United States Patent Application Publication US 2025/0084491 A1 - sequence listing, part 11

SEQ ID NO: 195505 - DNA, 75 bp, synthetic construct
  source 1..75: mol_type = other DNA
cagagcagttttatccgcctggcgcaccaatcccgtggccatcagataccgttccgtctggctatgccctgatgc

SEQ ID NO: 195506 - DNA, 75 bp, synthetic construct
  source 1..75: mol_type = other DNA
taacggaaaatacactgcacaggacgccaccacggcgcggaaaggtcttgttcagctcaatagtgccatcaacag

SEQ ID NO: 195507 - DNA, 75 bp, synthetic construct
  source 1..75: mol_type = other DNA
aacaccggcggaatgggtgcttactctccagcgccggtagtaaccgatgaagttcatcagcgcacgatggaacgt

SEQ ID NO: 195508 - DNA, 75 bp, synthetic construct
  source 1..75: mol_type = other DNA
gggcgattaccgcaccggcgatgtgatccacggcctgccgctggaagaagtggctggcggcaaagtgttccacgc

SEQ ID NO: 195509 - DNA, 75 bp, synthetic construct
  source 1..75: mol_type = other DNA
accgatatccactgggatgattgcttctgccggaaagatatcggctggcgcgccatcgaacgcgagcagaactaa

SEQ ID NO: 195510 - DNA, 75 bp, synthetic construct
  source 1..75: mol_type = other DNA
gcgcgaaaaggtcttgtccagctcagtagcgtcaccaacagcgattctgaaacgcttgcggcaacgccaaaggcg

SEQ ID NO: 195511 - DNA, 75 bp, synthetic construct
  source 1..75: mol_type = other DNA
tgtgtcgtcgaggtcatgggaactaaatctgcaatcactatccgagtaaccacgccgacaacatcaagtggtggc

SEQ ID NO: 195512 - DNA, 75 bp, synthetic construct
  source 1..75: mol_type = other DNA
ggctagagtctcagggagcctttaatcatccttactggatgtgcaagtgttcctggtcatatggtaataacaaaa

SEQ ID NO: 195513 - DNA, 75 bp, synthetic construct
  source 1..75: mol_type = other DNA
cgtgatgggtatggatttgaggctgactggtcagagttttataccacatcacgaaagccaacacctgcggatatt

SEQ ID NO: 195514 - DNA, 75 bp, synthetic construct
  source 1..75: mol_type = other DNA
gccaccacagcgcgaaaaggtcttgtccagctcagtagcgtcaccaacagtgattctgaaaccctcgcggcaacg

SEQ ID NO: 195515 - DNA, 75 bp, synthetic construct
  source 1..75: mol_type = other DNA
acgtcacccggacgcctcgctgaccgcaaaaggctttgttcaactcagtagcgccaccaacagcacgtctgaaac

SEQ ID NO: 195516 - DNA, 75 bp, synthetic construct
  source 1..75: mol_type = other DNA
gggtgtatgtgcggcaatggcggtttccttcgttgtctctgccattctgctgaaaaccagcaaagtgaaagagga

SEQ ID NO: 195517 - DNA, 75 bp, synthetic construct
  source 1..75: mol_type = other DNA
ctgccggtatcatggggatgatcctcgcgattctggcattcatggggattggtccgctggttgaagccctgtcta

SEQ ID NO: 195518 - DNA, 75 bp, synthetic construct
  source 1..75: mol_type = other DNA
gtgaacaaaccacaatccctgcgccacgcccttaataaagcagtgccttatgtcagtaataacccggacaaactg

SEQ ID NO: 195519 - DNA, 75 bp, synthetic construct
  source 1..75: mol_type = other DNA
gtgacgccggtatgggttccagtgcgatgggcgcaggcgtgctgcgtaagaaaattcaggatgcaggtctgtcgc

SEQ ID NO: 195520 - DNA, 75 bp, synthetic construct
  source 1..75: mol_type = other DNA
ggtagacggtaagatcaaatccggtttcgaaatgctggtgaacaacttctccgctggcattatcggaatgatcct

SEQ ID NO: 195521 - DNA, 75 bp, synthetic construct
  source 1..75: mol_type = other DNA
tgaaaaccagcaaagtgaaagatgaagatgatattgaagcagcaactcgtcgtatgcaggacatgaaagctgagt

SEQ ID NO: 195522 - DNA, 75 bp, synthetic construct
  source 1..75: mol_type = other DNA
caaccggacatcatgacaaccgacgaggggagaaaaaacggatttgcctggtacgctgacatcaataacgacagc

SEQ ID NO: 195523 - DNA, 75 bp, synthetic construct
  source 1..75: mol_type = other DNA
ccgctgcctgagccggtgacgcgcccggtcgagctgtacgttaacggcgaactggtgagtaagtgggatgagtga

SEQ ID NO: 195524 - DNA, 75 bp, synthetic construct
  source 1..75: mol_type = other DNA
tcactggaaatgcagtctgagccgaccggcgacagtaccacgccgtccccggtggagctggtttccatgttccag

SEQ ID NO: 195525 - DNA, 75 bp, synthetic construct
  source 1..75: mol_type = other DNA
aagaatatcccggaacccacgccgccggagcccgtcacccgcccgatggagctttatatcaatggcgaactggtg

SEQ ID NO: 195526 - DNA, 75 bp, synthetic construct
  source 1..75: mol_type = other DNA
gtgaagaatatcccggaaccttcgccgccggagccggttacccgaccgatggagctgtatatcaatggcgaactg

SEQ ID NO: 195527 - DNA, 75 bp, synthetic construct
  source 1..75: mol_type = other DNA
acgccctcaataaagcggtgccttatgtccgaaataacccggacaaactgcatctgtttgtggataacggttcgc

SEQ ID NO: 195528 - DNA, 75 bp, synthetic construct
  source 1..75: mol_type = other DNA
tctgttcaagctcggcgcggagaacatcttcctcggtcgcaaagcggcaaccaaagaagaagcgattcgttttgc

SEQ ID NO: 195529 - DNA, 75 bp, synthetic construct
  source 1..75: mol_type = other DNA
caacgattcgagtccggaacactattcgctatggaggcatgttcaacttctcgttctggggaatgaacgttcagg

SEQ ID NO: 195530 - DNA, 75 bp, synthetic construct
  source 1..75: mol_type = other DNA
gattttgggggcacgcccgttgacgggtctttggtgctctgtgtcctggaacaagaattcaggatcatgcgattg

SEQ ID NO: 195531 - DNA, 75 bp, synthetic construct
  source 1..75: mol_type = other DNA
agtcaaagtctggctggatgtgtgctggacgggagcactgaccagtgtctggaatgtgcagaacaaaatcaccgt

SEQ ID NO: 195532 - DNA, 75 bp, synthetic construct
  source 1..75: mol_type = other DNA
gtgtggcccagatgctggcaccgaaagcccggacgcccacagcgaccagcacggataacggtaagcagaacacct

SEQ ID NO: 195533 - DNA, 75 bp, synthetic construct
  source 1..75: mol_type = other DNA
atcaggtacggattgccgggcgggatgcaggagaaaccgaattatcatcccgtcttaatgagccgctggcaaatg

SEQ ID NO: 195534 - DNA, 75 bp, synthetic construct
  source 1..75: mol_type = other DNA
cagtctggtccgaaaaaaatacattcgatgtgtgtttcaccggatttaagaaagcagataaagaaagattggttg

SEQ ID NO: 195535 - DNA, 75 bp, synthetic construct
  source 1..75: mol_type = other DNA
atggttttacgacgccgggtttttattgggtaagcattgataatgcagaaaccgtcgcaggtatgccgtcacgta

SEQ ID NO: 195536 - DNA, 75 bp, synthetic construct
  source 1..75: mol_type = other DNA
accattaaccccaccggtaatgccgaaaacaccgttaaaaacatcgcatttaactacatcgtgaggcttgcataa

SEQ ID NO: 195537 - DNA, 75 bp, synthetic construct
  source 1..75: mol_type = other DNA
gaatccgtcatcgagcgtctggcacacaccaccagcgtggatgaagtgctggaactgctggcgggtcgtaagtaa

SEQ ID NO: 195538 - DNA, 75 bp, synthetic construct
  source 1..75: mol_type = other DNA
agtgttcttgccgggtatttttcggaaaatgaattacagcatcggaaaaaaatgctgacaaaaatttttcaggcc

SEQ ID NO: 195539 - DNA, 75 bp, synthetic construct
  source 1..75: mol_type = other DNA
caaacagcgctcatcaacgaagtctggcgacacgatctgaacagggtatttattgacaataccagcaaaaatacc

SEQ ID NO: 195540 - DNA, 75 bp, synthetic construct
  source 1..75: mol_type = other DNA
tcctccactgagggtgggtggcacgcacataactttcgttattgcgcaacgtctgcataccgggatacccccggt

SEQ ID NO: 195541 - DNA, 75 bp, synthetic construct
  source 1..75: mol_type = other DNA
gcgtgcaacaggcgtcagcaaaggtccggggcagcagaaagccgtcaggatcgcggcgtcggctgaagagctgac

SEQ ID NO: 195542 - DNA, 75 bp, synthetic construct
  source 1..75: mol_type = other DNA
taatgtgaataccacaagtgctgatacatgcaattcagcaattgaaacgacgaagccccgcaagtgtcgttacca

SEQ ID NO: 195543 - DNA, 75 bp, synthetic construct
  source 1..75: mol_type = other DNA
gggaaaaacatctatttcacatattgcggaggaatgacgttgtcgaacagaatatacctagacgttaaaagtgga

SEQ ID NO: 195544 - DNA, 75 bp, synthetic construct
  source 1..75: mol_type = other DNA
atgaaaaaatcaatactaattttagggcttacgttaattgtctcatctcaaataccatcggcaatggcaaaaaat

SEQ ID NO: 195545 - DNA, 75 bp, synthetic construct
  source 1..75: mol_type = other DNA
agaacttaaactggcagctatcccacatcaggcatctgctgttaatgcattcgttacggttagtcaggggatcag

SEQ ID NO: 195546 - DNA, 75 bp, synthetic construct
  source 1..75: mol_type = other DNA
tttgtgattactggaatccagtatacacgaaaaagaccaaaacaaaacgcttgaagtggattccacttagtgatt

SEQ ID NO: 195547 - DNA, 75 bp, synthetic construct
  source 1..75: mol_type = other DNA
ctggcgctttatgcagtgcctgacagacagcattgcaatattcaccgttaccgctgccactgagcgcgaagcacg

SEQ ID NO: 195548 - DNA, 75 bp, synthetic construct
  source 1..75: mol_type = other DNA
aactgttcaggagattcgcgcttcagttcatcggactcattcaatgagcggatataagatcccattacttaatga

SEQ ID NO: 195549 - DNA, 75 bp, synthetic construct
  source 1..75: mol_type = other DNA
tgtatcttcctggggatatgagcaaacgaacgttaatttctaccaggttatttctgttcatggcaaaaaaaccgt

SEQ ID NO: 195550 - DNA, 75 bp, synthetic construct
  source 1..75: mol_type = other DNA
cagcaattgaaattgaggaattcgaaacagcatataaaggatcaccggaagaaaaacacgagttcacatcatact

SEQ ID NO: 195551 - DNA, 75 bp, synthetic construct
  source 1..75: mol_type = other DNA
tgaaatcacggtgattgataacgacacacgcctgccagcgtttaaagacgcgctgcgctggaacgaagtgtatta

SEQ ID NO: 195552 - DNA, 75 bp, synthetic construct
  source 1..75: mol_type = other DNA
tcgccgagatgcacgacattgaaatcacggtgattgataacgacacacgcctgccagcgtttaaagacgcgctgc

SEQ ID NO: 195553 - DNA, 75 bp, synthetic construct
  source 1..75: mol_type = other DNA
gtgaaggcgattcagtttgcggtgggtaagagcggtaaaatatcggtggttgcgtcactcgcacctgtcatgctg

SEQ ID NO: 195554 - DNA, 75 bp, synthetic construct
  source 1..75: mol_type = other DNA
atgcagtgcgtcaggcgatgcgtaatttacaggataacagagcgttttacgggctttatcagaaagctcttgccc

SEQ ID NO: 195555 - DNA, 75 bp, synthetic construct
  source 1..75: mol_type = other DNA
atggactaccacaagcgcaaaacgcatcttgcccggcttattcctcaatggcgaatgagacaacagaggaacgcc

SEQ ID NO: 195556 - DNA, 75 bp, synthetic construct
  source 1..75: mol_type = other DNA
ttatttacgccagcagcgaagtttgtgatttgcaaaagtggcgtcccatttgtggccgaagcgatggaggtgttg

SEQ ID NO: 195557 - DNA, 75 bp, synthetic construct
  source 1..75: mol_type = other DNA
cgcgagcgtgggatcggcgtgccgatgccaaagaagccctgtgggcgcgtttatttacgcctgcggcaaaatttg

SEQ ID NO: 195558 - DNA, 75 bp, synthetic construct
  source 1..75: mol_type = other DNA
gcggtctcactgaccgtcaggcgcagcgggagtctgaagcgcagcgtcttcgggacgtgtacggtgataatccgg

SEQ ID NO: 195559 - DNA, 75 bp, synthetic construct
  source 1..75: mol_type = other DNA
tctcattagggattgccgggatgatcctctgcttgttgggctttgaagttatcggtccggcagtgttaattgcca

SEQ ID NO: 195560 - DNA, 75 bp, synthetic construct
  source 1..75: mol_type = other DNA
accatttgaactggaagcagacggtctgttagccatctgtattaccgcgacggtaaaccatttgaactggaagca

SEQ ID NO: 195561 - DNA, 75 bp, synthetic construct
  source 1..75: mol_type = other DNA
tatgtactatgctgcgataaattcaactggatgccgacttactgcattaggtgtttattatcgtaatttagcaat

SEQ ID NO: 195562 - DNA, 75 bp, synthetic construct
  source 1..75: mol_type = other DNA
agtcattctaccttttgattataatcaaagtaaaaataatggagtgaggataagtgatatattaaattgggcaaa

SEQ ID NO: 195563 - DNA, 75 bp, synthetic construct
  source 1..75: mol_type = other DNA
tcgtgatcctttaactgggatagcaaaccgacgtgcaatgaacagtatcttacacgacgcgatagataacggcgg

SEQ ID NO: 195564 - DNA, 75 bp, synthetic construct
  source 1..75: mol_type = other DNA
gattgtgctttgggcagccatgccatgatgcgtcgtgcgttctcgctggcgatttatcacgctcatcaacgccat

SEQ ID NO: 195565 - DNA, 75 bp, synthetic construct
  source 1..75: mol_type = other DNA
ggaacggctgaatcccttgaactggggcggctggcgaatgtgaatccgcctgaattattgcgctacgatgcccag

SEQ ID NO: 195566 - DNA, 75 bp, synthetic construct
  source 1..75: mol_type = other DNA
tatttatctggctgatgacggcggtgtggcggtggcggtgatcaccggagtgaactacggcagtgcgtccggcgg

SEQ ID NO: 195567 - DNA, 75 bp, synthetic construct
  source 1..75: mol_type = other DNA
gttagaaatagtttctatatgctaaggttgcactatgtgcctattggatataaagttcgcgaaattttctttaat

SEQ ID NO: 195568 - DNA, 75 bp, synthetic construct
  source 1..75: mol_type = other DNA
cactctgcatcttgagtcggggagttttattgaagaaagcctgaaagggcacagcactgacgtgctctattccgt

SEQ ID NO: 195569 - DNA, 75 bp, synthetic construct
  source 1..75: mol_type = other DNA
gacgctggcgcagtggtttgaagagaagggatttcaggagggatatgcaggaggtaagacaggaggtaagacagg

SEQ ID NO: 195570 - DNA, 75 bp, synthetic construct
  source 1..75: mol_type = other DNA
caagctgcatcagaaactgaacaccaccatgatctacgtgacccacgatcagaccgaagcgatgaccatggcgac

SEQ ID NO: 195571 - DNA, 75 bp, synthetic construct
  source 1..75: mol_type = other DNA
ggtttacgacaacatggcgtttggcctgaagatgcaaaaaatcgccaaagaggtgattgatgagcgggtgaactg

SEQ ID NO: 195572 - DNA, 75 bp, synthetic construct
  source 1..75: mol_type = other DNA
ccacctactggaaggtacatccgttgctgaggcgctctgccgtcacgctaatgaaaacgacattaacctgattgt

SEQ ID NO: 195573 - DNA, 75 bp, synthetic construct
  source 1..75: mol_type = other DNA
tgcatatgaaatatgccatcagcagctttaatgtgccgtccacgcaaatggcggcggcaacgtttgtgctggaag

SEQ ID NO: 195574 - DNA, 75 bp, synthetic construct
  source 1..75: mol_type = other DNA
accgtaattgtctgcgcatcaactgcgctttgccgctcagcgaaacctatcgcgaagcactaaagcaaattggcg

SEQ ID NO: 195575 - DNA, 75 bp, synthetic construct
  source 1..75: mol_type = other DNA
tgaaatcccaaccgatccagaaacaggcatcagcgttgaagcgctggaactggcgctggagcagtggccgattaa

SEQ ID NO: 195576 - DNA, 75 bp, synthetic construct
  source 1..75: mol_type = other DNA
atttatctggctgatgacggcggtgtggcggtggatatgtcccgtgaagcgtcactggaaatgcagtctgagccg

SEQ ID NO: 195577 - DNA, 75 bp, synthetic construct
  source 1..75: mol_type = other DNA
ttgaatgccaatctcgaaggcacgcgcgccgccagcaacatgatgattgaacgttacaaccagtcagtactgaac

SEQ ID NO: 195578 - DNA, 75 bp, synthetic construct
  source 1..75: mol_type = other DNA
aaacaacaagggtatctttttcaaaaaaggcatacaaaaaggcatacaaaacgaaaatcaaaaacacataatctt

SEQ ID NO: 195579 - DNA, 75 bp, synthetic construct
  source 1..75: mol_type = other DNA
tggtgttatgccagttacttcacatggaaaaaaaacaaccagaattcaccagactcagtagaactgtttacccgg

SEQ ID NO: 195580 - DNA, 75 bp, synthetic construct
  source 1..75: mol_type = other DNA
ggttggcattgtggatgatgaaggcaatgtctatctggcgggggtcaatgcgggtgagcatatgatggtgttctg

SEQ ID NO: 195581 - DNA, 75 bp, synthetic construct
  source 1..75: mol_type = other DNA
aatttgacccccgtttccttgagttaaagggcgatacgaaaattgatctcggtaagttttcaaaaaaagggtatg

SEQ ID NO: 195582 - DNA, 75 bp, synthetic construct
  source 1..75: mol_type = other DNA
tcagcgggcaaaaagcgatggcggtactgcggttgcgtgacggcagctacccgccgtttggcgcggaagtgaaaa

SEQ ID NO: 195583 - DNA, 75 bp, synthetic construct
  source 1..75: mol_type = other DNA
ggcgcccagcctgaaaccgctctggcgggagcttagccgggtggtgcagcataatctgcaaaccgttctcagcta

SEQ ID NO: 195584 - DNA, 75 bp, synthetic construct
  source 1..75: mol_type = other DNA
aaaaaaccgtaactgttcaggagattcgcgcttcagttcatcggactcattcaatgagcggatataagaccccat

SEQ ID NO: 195585 - DNA, 75 bp, synthetic construct
  source 1..75: mol_type = other DNA
gggtcggacagcagtcaggtcggctactttaatcgcatcgatgacgcaacgcactaccagattaacgtcggcacc

SEQ ID NO: 195586 - DNA, 75 bp, synthetic construct
  source 1..75: mol_type = other DNA
aaaaaatatattcaggaaaagacgaatatttccctgagctatgtctgtggagaatcatctgaagagattatggcc

SEQ ID NO: 195587 - DNA, 75 bp, synthetic construct
  source 1..75: mol_type = other DNA
gttgacacactgaaaataaataattttctggctgaaacagaccagcgttacttcgattccttaccatctgagaat

SEQ ID NO: 195588 - DNA, 75 bp, synthetic construct
  source 1..75: mol_type = other DNA
atggctggtttgtgaactctatgaggagctgaagaaaaataaagttgagcataatgccgattttttatcaccgga

SEQ ID NO: 195589 - DNA, 75 bp, synthetic construct
  source 1..75: mol_type = other DNA
cgcccaacctgcgcggctatgcaccggatgtttccggcgtggcgcacagcagtgcaaaagtcaccattagccaga

SEQ ID NO: 195590 - DNA, 75 bp, synthetic construct
  source 1..75: mol_type = other DNA
cggagtttggcagtacgatcccgtttctctggcagcatgaccattcccgccctgtaggccagtgtacggtgcgtc

SEQ ID NO: 195591 - DNA, 75 bp, synthetic construct
  source 1..75: mol_type = other DNA
atgaaagtattaacttttaaaaatgatactgtctctgttggtgatgtctttgtatcatcatggggctatgagcaa

SEQ ID NO: 195592 - DNA, 75 bp, synthetic construct
  source 1..75: mol_type = other DNA
tgagtaccggagtcggcgcggaactgcgccgtccgttaggcattggcatggtcggcggtctggttgtcagccagg

SEQ ID NO: 195593 - DNA, 75 bp, synthetic construct
  source 1..75: mol_type = other DNA
ctgcttggcgcgctgccgctgatgttgagtaccggggtcggcgcggaactgcgtcgtccgttaggtatcggcatg

SEQ ID NO: 195594 - DNA, 75 bp, synthetic construct
  source 1..75: mol_type = other DNA
gatcctgatgaccaccctggcggctctgcttggcgcgctgccgctgatgttgagtaccggggtcggcgcggaact

SEQ ID NO: 195595 - DNA, 75 bp, synthetic construct
  source 1..75: mol_type = other DNA
tgatggtggcgatcttactcgccgggattatcggttatcgcgccctgcccgtttcggcgctgccggaagtggact

SEQ ID NO: 195596 - DNA, 75 bp, synthetic construct
  source 1..75: mol_type = other DNA
ggtcgtggactggcgaaagtgctgaatcatccgtggctgactttaagcgtagcgctcagcacgctgctgcttagc

SEQ ID NO: 195597 - DNA, 75 bp, synthetic construct
  source 1..75: mol_type = other DNA
ccagatgcaatccgccgaagagtatcgccagctaatcatcgcctaccagaacggcgcaccgattcgtctgggcga

SEQ ID NO: 195598 - DNA, 75 bp, synthetic construct
  source 1..75: mol_type = other DNA
accttgcagttccagctaacattaccgctggatgtcgccgagcaggaagtgcaggccgcgattaacgccgccact

SEQ ID NO: 195599 - DNA, 75 bp, synthetic construct
  source 1..75: mol_type = other DNA
atgttactcaccgatctccttcacggtaatacgcaagtctatggttgccgcattaacctggaacatctgcgcggc

SEQ ID NO: 195600 - DNA, 75 bp, synthetic construct
  source 1..75: mol_type = other DNA
ccgcattaacctggaacatctgcgcggcatcctgcctgacggtatttttaaacgttatggcgatgtggccgaact

SEQ ID NO: 195601 - DNA, 75 bp, synthetic construct
  source 1..75: mol_type = other DNA
gtgacggtactttctgaccgaaccaccaatatccgcgcttcagttgacgatacccagtttgaactgatgctggct

SEQ ID NO: 195602 - DNA, 75 bp, synthetic construct
  source 1..75: mol_type = other DNA
ctaacaaagaacaggccatcgtgatgaatgttcagcgccagccaggtgctaacattatctccaccgccgacagta

SEQ ID NO: 195603 - DNA, 75 bp, synthetic construct
  source 1..75: mol_type = other DNA
aacattatctccaccgccgacagcatccggcagatgctgccacagctcaccgagagtctgccgaaatcggtgaag

SEQ ID NO: 195604 - DNA, 75 bp, synthetic construct
  source 1..75: mol_type = other DNA
tgtttatgggcgatatcgtcgggcgactgttccgcgaatttgccattaccctggcggtagcgattttgatctcag

SEQ ID NO: 195605 - DNA, 75 bp, synthetic construct
  source 1..75: mol_type = other DNA
gtttgaagagcagcagagcgcgaagcaggccgccatcagcgcaaaagcccgcggtctcactgaccgtcaggcgca

SEQ ID NO: 195606 - DNA, 75 bp, synthetic construct
  source 1..75: mol_type = other DNA
cgaaacggcagttatccgggcaggaaaaatccctgctggctcatgagaaagaaacgctggagtacaaacgccagc

SEQ ID NO: 195607 - DNA, 75 bp, synthetic construct
  source 1..75: mol_type = other DNA
gaaacgacaaagaatgtgcccggcgttggtgcgttgtttggtgaactggcagaagagaaccgcgtatttattgag

SEQ ID NO: 195608 - DNA, 75 bp, synthetic construct
  source 1..75: mol_type = other DNA
gtggtgattcagaacgacggtatcaacggacaggcggggccgcagctgatgaaggcggtgtatgacatggcccgc

SEQ ID NO: 195609 - DNA, 75 bp, synthetic construct
  source 1..75: mol_type = other DNA
cccgttcggtgctgtccatgatgacagaaatcctgcttaaacaggccatggtgggcattgtcgggcgtatcggca

SEQ ID NO: 195610 - DNA, 75 bp, synthetic construct
  source 1..75: mol_type = other DNA
gcgggagtctgaagcgcagcgtcttcgggacgtgtacggtgataatccgcaggcgctggcccgggtcaccggggc

SEQ ID NO: 195611 - DNA, 75 bp, synthetic construct
  source 1..75: mol_type = other DNA
gctggctgccgagcgcgagcaaggcatgtcgccgcgcgatgcaatttaccaggcctgtttgctgcgttttcgtcc

SEQ ID NO: 195612 - DNA, 75 bp, synthetic construct
  source 1..75: mol_type = other DNA
tatccaaccattcaggtggtcacgctctacccaggtgcgagcccggatgtcatgacctctgccgttaccgcgccg

SEQ ID NO: 195613 - DNA, 75 bp, synthetic construct
  source 1..75: mol_type = other DNA
tactcaggtcagccgcacccagtaccagtttaccttgcaggccacatcgctggatgcgctcagtacctgggtgcc

SEQ ID NO: 195614 - DNA, 75 bp, synthetic construct
  source 1..75: mol_type = other DNA
cgctggcctccctgaatcagcagtataacttcctgagcgtttcccagttacgccatattgatgagcttgagcgca

SEQ ID NO: 195615 - DNA, 75 bp, synthetic construct
  source 1..75: mol_type = other DNA
ctcgctgagatggaaacagccttttccgctcttaagcaggaggtgactgagacagggcggatgaaaccagtcagg

SEQ ID NO: 195616 - DNA, 75 bp, synthetic construct
  source 1..75: mol_type = other DNA
tgtttatgggcgatatcgtcgggcgactgttccgcgaatttgctattactctggcagtcgcgattttgatctcag

SEQ ID NO: 195617 - DNA, 75 bp, synthetic construct
  source 1..75: mol_type = other DNA
ttctggcaaggcttgatgtcttcaaccgatgccgtgataaccgtggcgcattcgcaaaagacaacaaccctaccc

SEQ ID NO: 195618 - DNA, 75 bp, synthetic construct
  source 1..75: mol_type = other DNA
gaaaggcagcctgcaggggttcagggttattgagcccatctggacctatccggggatttataactccgacaaccc

SEQ ID NO: 195619 - DNA, 75 bp, synthetic construct
  source 1..75: mol_type = other DNA
gccagatttacatcgacgttcgttcgccgcggggaatctccgcatggatggacgacaacgagctgcaatcgaagc

SEQ ID NO: 195620 - DNA, 75 bp, synthetic construct
  source 1..75: mol_type = other DNA
cgctgaaaaacgaagttgatgacaatcgtaaagaagccaatgcgggaactgcatctgccatcgctatcgcctcac

SEQ ID NO: 195621 - DNA, 75 bp, synthetic construct
  source 1..75: mol_type = other DNA
aaaagaaagggctcaatacgataaacaaatgcaaagtctggcgcagaagtctgtccaggcacatgaacaaattga

SEQ ID NO: 195622 - DNA, 75 bp, synthetic construct
  source 1..75: mol_type = other DNA
ctctgatgaacggcgtcaaactttccggtgctgtgacagaaaacaaaaataatatcgaacagaaccgcagcgata

SEQ ID NO: 195623 - DNA, 75 bp, synthetic construct
  source 1..75: mol_type = other DNA
catctgatggcgaaatccgcgtcttctatgactcaatacacgccatgcaggagaatctgttcagggtgccgctga

SEQ ID NO: 195624 - DNA, 75 bp, synthetic construct
  source 1..75: mol_type = other DNA
gaaggtttcctggttctggatcgatctggcggtccctgtcggcgcactggcaacggctatttataccctctactg

SEQ ID NO: 195625 - DNA, 75 bp, synthetic construct
  source 1..75: mol_type = other DNA
ggccgcgcttgctgccgccgcctggcaggcagagcaggctgaccgggccttattgcgttcactgatcctgaccgg

SEQ ID NO: 195626 - DNA, 75 bp, synthetic construct
  source 1..75: mol_type = other DNA
gctcaaaactgtcggcgatgaagacaaggcggatcgggtaaaacagctcgaagaggccatgaagcggtttaaggt

SEQ ID NO: 195627 - DNA, 75 bp, synthetic construct
  source 1..75: mol_type = other DNA
cgcaagatggtcggcaccatcgcggaagaaatgacccgcaaatggataaagctcaaaactgtcggcgatgaagac

SEQ ID NO: 195628 - DNA, 75 bp, synthetic construct
  source 1..75: mol_type = other DNA
ggctacggctacggcgactttgatagcttccccggatacccgtatctggccacgctggcgcaaaagcctgaatat

SEQ ID NO: 195629 - DNA, 75 bp, synthetic construct
  source 1..75: mol_type = other DNA
gtccagatgtgatatttgtggtgatcacatacatcatcaacgatgctcgttatggtgagtttgatgactacccgc

SEQ ID NO: 195630 - DNA, 75 bp, synthetic construct
  source 1..75: mol_type = other DNA
atgattgcaggtccgctgggtggctggtgcattaagcacttcgaccgctgggtagacggtaagatcaaatccggt

SEQ ID NO: 195631 - DNA, 75 bp, synthetic construct
  source 1..75: mol_type = other DNA
cgtcagtgccagccttagtctgttccttgctggtttcgccgctgcccagcttctatgggggccgctctctgaccg

SEQ ID NO: 195632 - DNA, 75 bp, synthetic construct
  source 1..75: mol_type = other DNA
gtgaagaagttggctgccagaatcatgcaatgccgaagtcgctcatagcgaatcacactgatctatatcgatata

SEQ ID NO: 195633 - DNA, 75 bp, synthetic construct
  source 1..75: mol_type = other DNA
acctgatttcagtggcaacgcctgttgagctggaatttgaagacctgcctgaaacagtgttcaccgccctgaccg

SEQ ID NO: 195634 - DNA, 75 bp, synthetic construct
  source 1..75: mol_type = other DNA
ctaaaggtgcatctccgctgtctgcgggcgatgtgactaacgacctgagccacgtacgtaaaatcatcgttgcct

SEQ ID NO: 195635 - DNA, 75 bp, synthetic construct
  source 1..75: mol_type = other DNA
cattaaccacggtatcttctcgccgctgggcattcagcagtcccatgaactgggtaaatccatcttcttcctgat

SEQ ID NO: 195636 - DNA, 75 bp, synthetic construct
  source 1..75: mol_type = other DNA
atgacattaccaaccactatttattcatttcctgcatatttatctcgtttttcgtccaccgacaaaccagtaaaa

SEQ ID NO: 195637 - DNA, 75 bp, synthetic construct
  source 1..75: mol_type = other DNA
caagtctcggcactgaacgactgaaatttgccgctcaacagcgcgccagcatcatgcagttcagcaaccgcgccg

SEQ ID NO: 195638 - DNA, 75 bp, synthetic construct
  source 1..75: mol_type = other DNA
ctcagacagtatcgccggaagctggcaaaagccagggcgtatgttgtcgactatttgaaaaagcgaagagagtaa

SEQ ID NO: 195639 - DNA, 75 bp, synthetic construct
  source 1..75: mol_type = other DNA
ccaatggcgcgatctacccgattgttgtcgcccaggcgctgcgtcccttcccacacgcaactggtcgcgccgcag

SEQ ID NO: 195640 - DNA, 75 bp, synthetic construct
  source 1..75: mol_type = other DNA
tcaccgttcatccttagcgagatgggctatagcccggcagtcattggtttaagttatgtaccacaaaccatcgcg

SEQ ID NO: 195641 - DNA, 75 bp, synthetic construct
  source 1..75: mol_type = other DNA
ccgcaacgcgaagcacaaccctttgcagcgctttaaggccaaccctgaaaacgtcttttccgctgccacgctggc

SEQ ID NO: 195642 - DNA, 75 bp, synthetic construct
  source 1..75: mol_type = other DNA
gaacagagcgtacagatttacgggatctggtcaccactcatcggggaatcctcccgtgtgtgcacgcatccggat

SEQ ID NO: 195643 - DNA, 75 bp, synthetic construct
  source 1..75: mol_type = other DNA
gggttcacgattgatcttgagacagtgtattacgcgggagtaagtaacccggttcaccgtaaggcagaaatgatg

SEQ ID NO: 195644 - DNA, 75 bp, synthetic construct
  source 1..75: mol_type = other DNA
cgcagctctggcagcgcctgagccgtaatcacggcgtaagcagcacggagatccgccataacccggtcgccagct

SEQ ID NO: 195645 - DNA, 75 bp, synthetic construct
  source 1..75: mol_type = other DNA
tcggctttattgtgcttctggtgcaaagcgttgagggcgaaaaagaggccagcgccgcgcggcaggccaagctgg

SEQ ID NO: 195646 - DNA, 75 bp, synthetic construct
  source 1..75: mol_type = other DNA
caactgggggcatcagaccccgaagccgccgcacgtctggcatccacacttcagcaggaccagaacaccatgaaa

SEQ ID NO: 195647 - DNA, 75 bp, synthetic construct
  source 1..75: mol_type = other DNA
ccgggggatgtcattcatctggttccccgggcagaaggtgccaaaagtggcggagtgtttcaggccgtgcttggc

SEQ ID NO: 195648 - DNA, 75 bp, synthetic construct
  source 1..75: mol_type = other DNA
agtattgcagccagcaacatcatgttctccatgggctctgcaatggcgctgggtggcgtggcccggatgctggcc

SEQ ID NO: 195649 - DNA, 75 bp, synthetic construct
  source 1..75: mol_type = other DNA
atcagagcaatacgttgcgttaaaaacggctgttcagtctctgaggccactggttattgcaacaatcatccggtg

SEQ ID NO: 195650 - DNA, 75 bp, synthetic construct
  source 1..75: mol_type = other DNA
acgccaggacaccggtatggggaaccgttttctgcggagctcggtgtggaggtcgatcgatatggtcgtgccgtt

SEQ ID NO: 195651 - DNA, 75 bp, synthetic construct
  source 1..75: mol_type = other DNA
tatcggtgaacagcagatgcagtacctgttacggggcggcactctgtacgttgacggcagcatcattgcaccgca

SEQ ID NO: 195652 - DNA, 75 bp, synthetic construct
  source 1..75: mol_type = other DNA
cgtaaacgaggacggcagcctgaacccgaaatacaacggtgccaccgtgcgcgatgccagtgattatctggttta

SEQ ID NO: 195653 - DNA, 75 bp, synthetic construct
  source 1..75: mol_type = other DNA
gattttctgaaggcctgggacatcgagaacgaagagggagaacggttcagccttgaggatatctactgggcaggt

SEQ ID NO: 195654 - DNA, 75 bp, synthetic construct
  source 1..75: mol_type = other DNA
ccaactggaggtttcccgtgccgagcagttacgtgaaatggcaaataaggcagagcttcgcgccctgcaaagtaa

SEQ ID NO: 195655 - DNA, 75 bp, synthetic construct
  source 1..75: mol_type = other DNA
gatggaacaggtcgccgaatcgcgtggtgactccgcgttcttcgtgacagtaacctgcccttcccgctttcacag

SEQ ID NO: 195656 - DNA, 75 bp, synthetic construct
  source 1..75: mol_type = other DNA
gaaaaaacagacaccggagagggtaaaaccccaccaccggaaaccaggaaagaacaaaaactggtcgtcccggga

SEQ ID NO: 195657 - DNA, 75 bp, synthetic construct
  source 1..75: mol_type = other DNA
ggactcacaaatcccgtaaatgagcaaaaacgtgccgcgatatatgaagcgcgcacaaaacaggcaaaagcggga

SEQ ID NO: 195658 - DNA, 75 bp, synthetic construct
  source 1..75: mol_type = other DNA
ctgctacggcctggtgtttcaccacgccacttttccatttttatatctgcatatcaggaaaatcttcagtatgaa

SEQ ID NO: 195659 - DNA, 75 bp, synthetic construct
  source 1..75: mol_type = other DNA
gggcgccgaccactgaactggggctggacattgtgtcaaaaatcgggattccaatgatcctcggcagcgtctgta

SEQ ID NO: 195660 - DNA, 75 bp, synthetic construct
  source 1..75: mol_type = other DNA
cgctggatatcgccaacaaaacgctaccgctgtttcgccatgtcaatagcgagtcattacgcaaagtttgtgaaa

SEQ ID NO: 195661 - DNA, 75 bp, synthetic construct
  source 1..75: mol_type = other DNA
gcacctggtccggcgttcccgtagaaggctcgctggtgaacgtacgtattatcgcggtgatgtcaggcgggattc

SEQ ID NO: 195662 - DNA, 75 bp, synthetic construct
  source 1..75: mol_type = other DNA
aaaagagttgcttgccgttaccgccattttctcgttgttcgccctgttcagcacctggtccggcgtgccggtgga

SEQ ID NO: 195663 - DNA, 75 bp, synthetic construct
  source 1..75: mol_type = other DNA
gcgttgtgaccggaacgctgaaaatttactactgccacgcgcatcagatcacctcgtcattacaggaaatggcgg

SEQ ID NO: 195664 - DNA, 75 bp, synthetic construct
  source 1..75: mol_type = other DNA
gccgctgtttcgccatgtcaatagcgaatcattacgtaaagtctgcgaaattatccgcgatgatattcacgccga

SEQ ID NO: 195665 - DNA, 75 bp, synthetic construct
  source 1..75: mol_type = other DNA
gtcggccatagtgaaagccatgtatgcagcgacgattgaaagtgaacttgataccgaaaaggcctttgaatatat

SEQ ID NO: 195666 - DNA, 75 bp, synthetic construct
  source 1..75: mol_type = other DNA
ggtgaaatgcgcgtgggttcccgtgtggtatctcaggagatcagcactgcagacgaaggcgatggtggtcaggtt

SEQ ID NO: 195667 - DNA, 75 bp, synthetic construct
  source 1..75: mol_type = other DNA
cactgggagatgaaaactatcagtctgcggcgctgggcgtcggtcgcgatttgtctaccttcggcgcggtcgcgt

SEQ ID NO: 195668 - DNA, 75 bp, synthetic construct
  source 1..75: mol_type = other DNA
atctggtgcgcaataacgggatagcggccaaatgcggtaggccctgcataaggatcatattgtcgggcatatgtt

SEQ ID NO: 195669 - DNA, 75 bp, synthetic construct
  source 1..75: mol_type = other DNA
ttggcaatgatgataagcctgctgtcgctcgtggtccgctggggttgcatctccataatggttttacgctcgata

SEQ ID NO: 195670 - DNA, 75 bp, synthetic construct
  source 1..75: mol_type = other DNA
gggaatgcccgggcagatgatctggtgcgcaataacggaatagcggctaatgcggtggctctgcataaggatcac

SEQ ID NO: 195671 - DNA, 75 bp, synthetic construct
  source 1..75: mol_type = other DNA
ggctggtcgttatatggcggtgcgctgggtgatgaaaactatcagtctgcggcgctgggcgtcggtcgcgatttg

SEQ ID NO: 195672 - DNA, 75 bp, synthetic construct
  source 1..75: mol_type = other DNA
gcaggtcgatctcagcgctaactaccatgaagggcagtacacctcggcgggtatttccttacagggcggcgcgac

SEQ ID NO: 195673 - DNA, 75 bp, synthetic construct
  source 1..75: mol_type = other DNA
tcgaacctgggaaatacaatttacaggttcaactaaataaacagccgctgacggaagaatacgatatttactggt

SEQ ID NO: 195674 - DNA, 75 bp, synthetic construct
  source 1..75: mol_type = other DNA
ggcgtcggtcgcgatttgtctacattcggcgcggtcgcgtttgatgttactcactcgcacaccaaactggataaa

SEQ ID NO: 195675 - DNA, 75 bp, synthetic construct
  source 1..75: mol_type = other DNA
aaaccggcgattcaggaacagacacagcgggtgacgccaacggaacccccgacttcaatttcagtaaaccagtaa

SEQ ID NO: 195676 - DNA, 75 bp, synthetic construct
  source 1..75: mol_type = other DNA
gcgccggttgttcctgatgacataaagcctgtcattcaggagcagacgcaacaggtgacacccaccaatccccct

SEQ ID NO: 195677 - DNA, 75 bp, synthetic construct
  source 1..75: mol_type = other DNA
tcagttttacagcgtcatggaacggctgaagatgctggattccctgcaggcaacacagcttcagtcggccatagt

SEQ ID NO: 195678 - DNA, 75 bp, synthetic construct
  source 1..75: mol_type = other DNA
ccaggagcttttctgccatccgcgagccagtgtcacagttgatgaagaatgttcgcaagtggtggatttactgca

SEQ ID NO: 195679 - DNA, 75 bp, synthetic construct
  source 1..75: mol_type = other DNA
tgtgggaatcagccctgtccctggtgctggcgacattcccgttcatcttccttctgataccctcctgtcagccag

SEQ ID NO: 195680 - DNA, 75 bp, synthetic construct
  source 1..75: mol_type = other DNA
ggcggacaatgtcgggtggaaaggtgttttcgggttacccggcctgatacatcagagcaatacgttgcgttaaaa

SEQ ID NO: 195681 - DNA, 75 bp, synthetic construct
  source 1..75: mol_type = other DNA
aaggtcagttactcaagtgcccgcgcctccgccaatgagtcgtggcgctattttatgggacgacgaaaatttatt

SEQ ID NO: 195682 - DNA, 75 bp, synthetic construct
  source 1..75: mol_type = other DNA
attttccgccagcaggtcagggaatccgcggaatgctggctgaaacggacgagtacatggccggaggtaaacgac

SEQ ID NO: 195683 - DNA, 75 bp, synthetic construct
  source 1..75: mol_type = other DNA
ccgtggggctaatcagttttacagcgtcatggagcggctgaagatgctcgattccctgcaggtaacacagcttca

SEQ ID NO: 195684 - DNA, 75 bp, synthetic construct
  source 1..75: mol_type = other DNA
ttgatgaacaatgttcgcaagtggtggatttactgcaacagagctggcaggtgataagtgctggcggacaatgcc

SEQ ID NO: 195685 - DNA, 75 bp, synthetic construct
  source 1..75: mol_type = other DNA
ttgatgaacaatgttcgcaagtggtggatttactgcaacagacctggcggatgataagtgctggcggacaatgcc

SEQ ID NO: 195686 - DNA, 75 bp, synthetic construct
  source 1..75: mol_type = other DNA
ggaagaatggccattgacgggctcaaggaggttcaggaatcagtgatgcgcattgaggccggactgagcacgtat

SEQ ID NO: 195687 - DNA, 75 bp, synthetic construct
  source 1..75: mol_type = other DNA
ggtgaaatgcgcgtgggatcccgggtggtatctcaggagatcagcactgcagaagaaggcgatggtggtcaggtt

SEQ ID NO: 195688 - DNA, 75 bp, synthetic construct
  source 1..75: mol_type = other DNA
gttcagcaggcggtggaccactggccaaatctgttggcatttcacttcacgctctattcggcagaaggaatctat

SEQ ID NO: 195689 - DNA, 75 bp, synthetic construct
  source 1..75: mol_type = other DNA
cctggttcatcagggcaatacgtggcgttaaaaacggctgttcagtcctttatgtcgcaggttattgcaacaatc

SEQ ID NO: 195690 - DNA, 75 bp, synthetic construct
  source 1..75: mol_type = other DNA
accggcctgatgacccgcgacaactacagaacggtaaataacattaccctgggtaagcatccggaggcgaaacga

SEQ ID NO: 195691 - DNA, 75 bp, synthetic construct
  source 1..75: mol_type = other DNA
tacgggaggtatcgcgctgcccgtctcccgtaaccatctggcagacactgctcatccgtctgctggaccagcact

SEQ ID NO: 195692 - DNA, 75 bp, synthetic construct
  source 1..75: mol_type = other DNA
tttcgtcagaaactgaacgagggctggtatcaggtacgtattgccgggcaggatacaggtgaaaccgaattatca

SEQ ID NO: 195693 - DNA, 75 bp, synthetic construct
  source 1..75: mol_type = other DNA
gcaccgtgcactggcacatgatggtctttgcacatcctgaagaaatcgacagcatcgtggacatcacccgtgata

SEQ ID NO: 195694 - DNA, 75 bp, synthetic construct
  source 1..75: mol_type = other DNA
ggtgaaatgcgcgtggggtcgcgggtgatttcgcaggaaatcagcacggcagatgagggggatggtggtcaggtt

SEQ ID NO: 195695 - DNA, 75 bp, synthetic construct
  source 1..75: mol_type = other DNA
tggtatcaggtgcgcatttccgggcgtgatgcaggcgaaaatgaattatctgcccgtcttaatgaaccgctggca

SEQ ID NO: 195696 - DNA, 75 bp, synthetic construct
  source 1..75: mol_type = other DNA
accggcctgatggcccgcgacaattacagaacggtaaataacattaccctgggcaagcatccggaggcaaaacaa

SEQ ID NO: 195697 - DNA, 75 bp, synthetic construct
  source 1..75: mol_type = other DNA
cccgctctcagttaataaacagtattgatattctccgggctcgcagggcaatcggcctgatgacccgcgataact

SEQ ID NO: 195698 - DNA, 75 bp, synthetic construct
  source 1..75: mol_type = other DNA
agcagcatattgaggcagggatttcactgtgtgacgcggtgaactttctcgttgaaaaatacgcgctggtacgta

SEQ ID NO: 195699 - DNA, 75 bp, synthetic construct
  source 1..75: mol_type = other DNA
ggaaaaatacgcactggtacgaactgaccgtaagcgtgcagcaagaaccgtattgacggggatgtgttattcagt

SEQ ID NO: 195700 - DNA, 75 bp, synthetic construct
  source 1..75: mol_type = other DNA
aactttctcgttgaaaaatacgccctggtgcgtaccgaccagccgggattcagcccctgtacccgctctcagtta

SEQ ID NO: 195701 - DNA, 75 bp, synthetic construct
  source 1..75: mol_type = other DNA
ctcgcccgactgctggaccagcactacggccttacgctgaatgacacaccgttcgtggatgaacgtgtgattgag

SEQ ID NO: 195702 - DNA, 75 bp, synthetic construct
  source 1..75: mol_type = other DNA
gtttgccgatgaacgtgtaattgagcagcatattgaggcaggcatttcactgtgtgatgcggtgaactttctcgt

SEQ ID NO: 195703 - DNA, 75 bp, synthetic construct
  source 1..75: mol_type = other DNA
atgcgcgactccagcgattacctggttaacacgttttttgcggcggtccgcaaaaaactgaaccgcgacggcctg

SEQ ID NO: 195704 - DNA, 75 bp, synthetic construct
  source 1..75: mol_type = other DNA
gccgccttgccagccagatggcacgcaatccggaaggcccgcaacggctgaaagatgatgcaatggatgcggtac

SEQ ID NO: 195705 - DNA, 75 bp, synthetic construct
  source 1..75: mol_type = other DNA
cagcatattgaggcaggcatttcactgtgtgatgcagtgaactttctcgtggaaaaatacgcgctggtgcgtacc

SEQ ID NO: 195706 - DNA, 72 bp, synthetic construct
  source 1..72: mol_type = other DNA
ggcctgatgacccgcgacaattacagaacggtaaataacattaccctgggtaagtatccggaggcgaaatga

SEQ ID NO: 195707 - DNA, 75 bp, synthetic construct
  source 1..75: mol_type = other DNA
tgaaaaatacgcactggtacgtaccgaccagccgggattcagcgcctgtactgaaccgccccgggtttcctggag

SEQ ID NO: 195708 - DNA, 75 bp, synthetic construct
  source 1..75: mol_type = other DNA
gtgacaacggagtacatcagagactggcaacaaccacgctgtgcagtcggtcgcgagggaacgggggagcctgtc

SEQ ID NO: 195709 - DNA, 75 bp, synthetic construct
  source 1..75: mol_type = other DNA
tgcccgtcttaatgagccgctggcaaatggtgccgtgatccacattgtgccgcgtctggcgggagctaaaagtgg

SEQ ID NO: 195710 - DNA, 75 bp, synthetic construct
  source 1..75: mol_type = other DNA
tcaggaagatcgtcacgaactgggcgatgatattactccgcgctttaaggcggagtatgtcgacggctcaaaagg

SEQ ID NO: 195711 - DNA, 75 bp, synthetic construct
  source 1..75: mol_type = other DNA
gcgtggaatgcgccatcggctgggcgcgccttcaccgggtccgccagttccagttctttggtatcccctcccgtc

SEQ ID NO: 195712 - DNA, 75 bp, synthetic construct
  source 1..75: mol_type = other DNA
gagcaaagcgtacagatttacgggatctggtcgccacaaatcggggaatcttcccgcgtgtgcacgcacccggat

SEQ ID NO: 195713 - DNA, 75 bp, synthetic construct
  source 1..75: mol_type = other DNA
tggccgaagcccgtggcgacaaagcggtgtttctgactgtcacctgcccgtcaaaataccacgccacaacggaga

SEQ ID NO: 195714 - DNA, 75 bp, synthetic construct
  source 1..75: mol_type = other DNA
accggcctgatgacccgcagccactacagaatggtgaacaacatcaccctgggtaaacactgtgaggcgaaacaa

SEQ ID NO: 195715 - DNA, 75 bp, synthetic construct
  source 1..75: mol_type = other DNA
cgcaggcggcgacgctatgtctatcgcccgtggcagtgtggcaaatgctgcttgcacgcctgctggaacaacatt

SEQ ID NO: 195716 - DNA, 75 bp, synthetic construct
  source 1..75: mol_type = other DNA
gttcgctgatgaacgtgtgattgagcagcatattgaggcaggtatttcactgtgtgacgcggtgaactttctcgt

SEQ ID NO: 195717 - DNA, 75 bp, synthetic construct
  source 1..75: mol_type = other DNA
ctcacccgactgttggaccagcattacggcctcacactgaatgacacaccgttcgccgatgaacgtgtgattgag

SEQ ID NO: 195718 - DNA, 75 bp, synthetic construct
  source 1..75: mol_type = other DNA
tgatatcctccgggcacgccgggcaaccggcctgatgacccgcgacaactacagaacggtaaataacattaccct

SEQ ID NO: 195719 - DNA, 75 bp, synthetic construct
  source 1..75: mol_type = other DNA
atcgacaccattgtgtcccacacccgcgatattgccattcaggaagatcgtcacgagctgggcgatgatattact

SEQ ID NO: 195720 - DNA, 75 bp, synthetic construct
  source 1..75: mol_type = other DNA
gcgttacatctgcacaccatgccgccacattacgaagctctgaacaagagcgatccggatacggaactgttaccg

SEQ ID NO: 195721 - DNA, 75 bp, synthetic construct
  source 1..75: mol_type = other DNA
ggcaacaaccgcgccacgcagtaggacgtgaaggaacggggatccccgcacctgaatccgcactttcctcctggc

SEQ ID NO: 195722 - DNA, 75 bp, synthetic construct
  source 1..75: mol_type = other DNA
caggcgcgcatccttgatctgctggaaagcattatgcaaaagcaggctccgggaatgttgctggtcactcatgat

SEQ ID NO: 195723 - DNA, 75 bp, synthetic construct
  source 1..75: mol_type = other DNA
aaagcattatgcaaaaacaggcaccggggatgctgctggtcacccatgatatgggcgtagtggcgcgtctggcgg

SEQ ID NO: 195724 - DNA, 75 bp, synthetic construct
  source 1..75: mol_type = other DNA
cacgcgcgggaaacctgcctggcgttagggaaacccgccgatgacgccacgcttaccgctgccatagaagcggtg

SEQ ID NO: 195725 - DNA, 75 bp, synthetic construct
  source 1..75: mol_type = other DNA
acggcctcacactgaatgacacaccgttggcggatgaacgtgtgattgagcagcatattgaagcagggatttcac

SEQ ID NO: 195726 - DNA, 75 bp, synthetic construct
  source 1..75: mol_type = other DNA
cctccgggctcgcagggccactggcctgatgatcagcgacaattacagaacggtaaataacattaccctgggtaa

SEQ ID NO: 195727 - DNA, 75 bp, synthetic construct
  source 1..75: mol_type = other DNA
atacgcgctggtgcgtaccgaccagccgggattcagcgcctgtacccggtctcagttaataaacagtattgatat

SEQ ID NO: 195728 - DNA, 75 bp, synthetic construct
  source 1..75: mol_type = other DNA
atacgcgctggtgcgtaccgaccagccgggattcagcgcctgtacccgttctcagttaataaacagtatagatat

SEQ ID NO: 195729 - DNA, 75 bp, synthetic construct
  source 1..75: mol_type = other DNA
cctccgggctcgcggggctactggcctgatgaccagcgacaattacagaacggtaaataacattaccctgggtaa

SEQ ID NO: 195730 - DNA, 75 bp, synthetic construct
  source 1..75: mol_type = other DNA
cctccgggctcgccgggcaactggcctgatgatcagcgacaattacagaacggtaaataacattaccctgggtaa

SEQ ID NO: 195731 - DNA, 75 bp, synthetic construct
  source 1..75: mol_type = other DNA
cctccgggctcgctgggccactggcctgatgagcagcgacaattacagaacggtaaataacattaccctgggtaa

SEQ ID NO: 195732 - DNA, 75 bp, synthetic construct
  source 1..75: mol_type = other DNA
tccgggcccgccgggcgacaggcctgatgacccgcgacaattacagaatggtaaatgacattagccaggggaagc

SEQ ID NO: 195733 - DNA, 75 bp, synthetic construct
  source 1..75: mol_type = other DNA
cccgctctcagttaataaacagcatcgatatcctccgggctcgcagggcgaccagcctgatgacccgcgacaatt

SEQ ID NO: 195734 - DNA, 75 bp, synthetic construct
  source 1..75: mol_type = other DNA
ggcctgatgacccgcgacaattacagaatggtaaataacattacccagggtaagcatccggaggcgcaacaatga

SEQ ID NO: 195735 - DNA, 75 bp, synthetic construct
  source 1..75: mol_type = other DNA
atacgcgctggtgcgtaccgaccagccgggattcagcgcctgtacccgatctcagttaataaacaggatcgatat

SEQ ID NO: 195736 - DNA, 75 bp, synthetic construct
  source 1..75: mol_type = other DNA
atacgcgctggtgcgtaccgaccagccgggattcagcgcctgtacccgatctcagttaataaacagcatggatat

SEQ ID NO: 195737 - DNA, 75 bp, synthetic construct
  source 1..75: mol_type = other DNA
tgatatcctccgggctcgcagggcgacaggcctgatgacccgcgacaattaccgaacggtaaataacattaccct

SEQ ID NO: 195738 - DNA, 75 bp, synthetic construct
  source 1..75: mol_type = other DNA
taaaaaatgataacgagcagacagtgggccttgtcgatgatgacggcaatgtttatctggctggggtgaaacctg

SEQ ID NO: 195739 - DNA, 75 bp, synthetic construct
  source 1..75: mol_type = other DNA
gatgcggattggctttagatccgttcgagcttgttctcgaccgtgcgagaaacggtgaaaacatagtgtctgaga

SEQ ID NO: 195740 - DNA, 75 bp, synthetic construct
  source 1..75: mol_type = other DNA
ccgcgccaccatgcttcagagtcaggatcgtggcattaagaatggctggataagctgtagtgagcggatgcctga

SEQ ID NO: 195741 - DNA, 75 bp, synthetic construct
  source 1..75: mol_type = other DNA
gaagatgttgtacagctggcgcatcatgtaagacagaaagttggtgaaaaatttaatgtctggcttgagcctgaa

SEQ ID NO: 195742 - DNA, 75 bp, synthetic construct
  source 1..75: mol_type = other DNA
gcagagattttcgcggatgggtataacaccgccatgcttcatgccgaaaactttcgggaaaataagaattcgtca

SEQ ID NO: 195743 - DNA, 75 bp, synthetic construct
  source 1..75: mol_type = other DNA
ccaatgtgtttcgtatcgcactggcatcactggaagcagagccagtggcgtggaaggcgaccttcacgcaaattg

SEQ ID NO: 195744 - DNA, 75 bp, synthetic construct
  source 1..75: mol_type = other DNA
cggagattaaatcattcatcactggtttcctgagcgacgcggcgcacgataaccaatcttcagacagcctgcttg

SEQ ID NO: 195745 - DNA, 75 bp, synthetic construct
  source 1..75: mol_type = other DNA
tgtcggtcgcttcggggtgattatcccggtgatggcaattgccggttcgctggtgagtaaaaagagccaacccgc

SEQ ID NO: 195746 - DNA, 75 bp, synthetic construct
  source 1..75: mol_type = other DNA
tgctggcgctcggcgcggacagcagcatcaatatggaaggtaaagaaagccgtttcggtgtgttggtcagtagcc

SEQ ID NO: 195747 - DNA, 75 bp, synthetic construct
  source 1..75: mol_type = other DNA
tatcaggctgtgacgaccattgaaggagcgcaacagctgttaccaatgggtccggtagcttctcaggaagcaatc

SEQ ID NO: 195748 - DNA, 75 bp, synthetic construct
  source 1..75: mol_type = other DNA
cctgatccaaaagtgaatggcaatgccggtagtttcttcaaaaaccctgttgtatctgccgaaacggctaaagca

SEQ ID NO: 195749 - DNA, 75 bp, synthetic construct
  source 1..75: mol_type = other DNA
tacctcttccaggtacagcgggcgttgaacgcgtactctttagcgcgcttggcgtctctgaccgtgagatgaact

SEQ ID NO: 195750 - DNA, 75 bp, synthetic construct
  source 1..75: mol_type = other DNA
tatcaggcagtgaataccgttgaaggagcgcaacagctgttaccaatgggtccggtggcttctcaggaagcgatc

SEQ ID NO: 195751 - DNA, 75 bp, synthetic construct
  source 1..75: mol_type = other DNA
gatgtaaatggcaactctccgggaactccggatagttggataagctgtagtgagcaaatgccagaaaagaaccag

SEQ ID NO: 195752 - DNA, 75 bp, synthetic construct
  source 1..75: mol_type = other DNA
aatgcccgctcaagatgattggattttaatttattcaaagcacggcgagtatatggcaggacaggtacaagggga

SEQ ID NO: 195753 - DNA, 75 bp, synthetic construct
  source 1..75: mol_type = other DNA
attgatcgtgaatataacacgttcactggtatgtattctgacaaagcagaagtcgaacggtgggtgcggctgcat

SEQ ID NO: 195754 - DNA, 75 bp, synthetic construct
  source 1..75: mol_type = other DNA
atgcgacggaaacagggttcaggaatacgtgaaactggagcgactgcagaacgcgctatcgggcaactctccggt

SEQ ID NO: 195755 - DNA, 75 bp, synthetic construct
  source 1..75: mol_type = other DNA
aagctgtagtacacgaatccccgctcaagatgattggattttaatttattcaaagcacggcgagtatatggcagg

SEQ ID NO: 195756 - DNA, 75 bp, synthetic construct
  source 1..75: mol_type = other DNA
acttatggcgtgctgtcgcgtcaggatctcgaccagttgcaggcaggcgcgcgcgttgacgtggtcgatgacaaa

SEQ ID NO: 195757 - DNA, 75 bp, synthetic construct
  source 1..75: mol_type = other DNA
gttcggcaatgaactgcaagcagctgggtaaccactttgatatccacggcggcggttctgacctgatgttcccgc

SEQ ID NO: 195758 - DNA, 75 bp, synthetic construct
  source 1..75: mol_type = other DNA
aaatcgtggcagcatattggaactgggttgtaaatccaattgattacaaaaaatatagagctttcacgtatttat

SEQ ID NO: 195759 - DNA, 75 bp, synthetic construct
  source 1..75: mol_type = other DNA
agtgccggtaactccggatagttggataagctgtagtgagcgaatgccagaaatgggagagcgacaatgctatgt

SEQ ID NO: 195760 - DNA, 75 bp, synthetic construct
  source 1..75: mol_type = other DNA
ggttcaggacgcagagccaaacttcgatgtaaatggcaactctccgggaactccggatggttggataagctgtag

SEQ ID NO: 195761 - DNA, 75 bp, synthetic construct
  source 1..75: mol_type = other DNA
agaacgtgcttatttcggtgaatttcgatagctctctggttgaaccgctaatatgctccgcacgctataccggaa

SEQ ID NO: 195762 - DNA, 75 bp, synthetic construct
  source 1..75: mol_type = other DNA
atttcgatagctctctggttgagccgctaatatgctccgcacgctataccggaagtacattccggcgtggagatg

SEQ ID NO: 195763 - DNA, 75 bp, synthetic construct
  source 1..75: mol_type = other DNA
ggaatacgtgaaactggagcgactgcagaacgcgatatcgggcaactctccggtaattccggatggctggataag

SEQ ID NO: 195764 - DNA, 75 bp, synthetic construct
  source 1..75: mol_type = other DNA
aaccggcaagcggatatcgacgcggcgaaagaggtctggtcggaaagcaaacggatgctggctgacagcgttacg

SEQ ID NO: 195765 - DNA, 75 bp, synthetic construct
  source 1..75: mol_type = other DNA
gtcagttggcagtagagccggtagtgcctgctgttctggaacgtttgcgaaccattgtagcggacccacgcgcat

SEQ ID NO: 195766 - DNA, 75 bp, synthetic construct
  source 1..75: mol_type = other DNA
aagcgtcaaccagctctccggtaactccggctcttctgcctggtggtttcaccattgaggaggcgaaggaattac

SEQ ID NO: 195767 - DNA, 75 bp, synthetic construct
  source 1..75: mol_type = other DNA
atgaccactatgaccaaagaacgactgctgacactcaagcagtggcgcgaaacatacggacctggtagcaacgtt

SEQ ID NO: 195768 - DNA, 75 bp, synthetic construct
  source 1..75: mol_type = other DNA
atacgtggagttgagcgacggcactttatcgtggttagggaacgccttgtactggatgcctctaccggaaccgcc

SEQ ID NO: 195769 - DNA, 75 bp, synthetic construct
  source 1..75: mol_type = other DNA
cctatatgctggcttaccattatctggacaccgaagaagtgatcgcttctctgcaaaaccgcccggcacaacaaa

SEQ ID NO: 195770 - DNA, 75 bp, synthetic construct
  source 1..75: mol_type = other DNA
tttgagcgcgagctgcaaaacaacatccttggcttgatgccacaggcaattctctcttctgagcatggctctctt

SEQ ID NO: 195771 - DNA, 75 bp, synthetic construct
  source 1..75: mol_type = other DNA
gcttataccttaatgaccgatatccactgggacgattgcttctgccggaaagatatcggctggcgcgccatcgga

SEQ ID NO: 195772 - DNA, 75 bp, synthetic construct
  source 1..75: mol_type = other DNA
caaccgtgaaaggcatggcggcggaaggcaacacctacaccggttttctctacgcgggcctgatgatcgacaaac

SEQ ID NO: 195773 - DNA, 75 bp, synthetic construct
  source 1..75: mol_type = other DNA
tggtttgtaaaagcatcactggagcagaatgcactatcgggcaactctccggtaactccggatggttggataagc

SEQ ID NO: 195774 - DNA, 75 bp, synthetic construct
  source 1..75: mol_type = other DNA
ctttattttccttttcttctggtggcgggcagatatttacagggtcacgtttcttaatcagagtatatcccacta

SEQ ID NO: 195775 - DNA, 75 bp, synthetic construct
  source 1..75: mol_type = other DNA
ctggatgagccgctgaaagtggattcgttaagccagcaaaaactgccagaaggcagtaaatggcaggactggcgc

SEQ ID NO: 195776 - DNA, 75 bp, synthetic construct
  source 1..75: mol_type = other DNA
ttgaattgttcattaaaaatccgcttgaaaacgggcttacccgtggtgaacaaatggaactggcacgaattgctc

SEQ ID NO: 195777 - DNA, 75 bp, synthetic construct
  source 1..75: mol_type = other DNA
cttatttcggtgaatttcgatagtgatctggttgagccgctaatatgctccgcacgctataccggaagcaccttt

SEQ ID NO: 195778 - DNA, 75 bp, synthetic construct
  source 1..75: mol_type = other DNA
tgattaaagaaatcaaagagcgaatcggcagtctggacgtgcgagacaatattgagcgccgggcttatgaaattg

SEQ ID NO: 195779 - DNA, 75 bp, synthetic construct
  source 1..75: mol_type = other DNA
acgcctgccgcaccgccatgcttcagtccggaaactttcgggaaagcaagaattcgtcaaccaataattttcggg

SEQ ID NO: 195780 - DNA, 75 bp, synthetic construct
  source 1..75: mol_type = other DNA
tccgtttgaaaacccaaccgcactgaccaacttcgtgcaaatgctggcgatcttcttgatcccaacagcgctgtg

SEQ ID NO: 195781 - DNA, 75 bp, synthetic construct
  source 1..75: mol_type = other DNA
agtatcccagcgagcaatatcttaatgagctgatcaccaacatagagtttgccgcaagggcaccagttgaagtcg

SEQ ID NO: 195782 - DNA, 75 bp, synthetic construct
  source 1..75: mol_type = other DNA
taatggattcgaaagaatgcattgacgtaattcgtgaagaagtaaagcgatggaatgattcccgcgccgctggta

SEQ ID NO: 195783 - DNA, 75 bp, synthetic construct
  source 1..75: mol_type = other DNA
agaatgccggaagaaacgggtgacattattgttgtttcggatggcattgtaatgtcagggatttcttattctcgt

SEQ ID NO: 195784 - DNA, 75 bp, synthetic construct
  source 1..75: mol_type = other DNA
aataggtggggctgcggtgcaccgtcaacaggcgttagttctcattaatgaagacaatgcaaaaagcgaagatgt

SEQ ID NO: 195785 - DNA, 75 bp, synthetic construct
  source 1..75: mol_type = other DNA
cagtgtgccatatgagaacgacaaagcttcccgatccaaaagtgaacggcaatgccggtagtttcttcaaaaatc

SEQ ID NO: 195786 - DNA, 75 bp, synthetic construct
  source 1..75: mol_type = other DNA
tatggcaggacaggtgcaaggggaatacgtggagttgagcgacggcactttatcgtggttagggaacgccttgtt

SEQ ID NO: 195787 - DNA, 75 bp, synthetic construct
  source 1..75: mol_type = other DNA
tgcgtagtgaacacaaaatacgggtattacgtgcaatgctggtctgaaggtcaagggtggcttggtgatgatatc

SEQ ID NO: 195788 - DNA, 75 bp, synthetic construct
  source 1..75: mol_type = other DNA
tacaagttgcctcccctgtcatccaacgaagtaaacgacgcggcatggaaattacacaacatgctgactgaacac

SEQ ID NO: 195789 - DNA, 75 bp, synthetic construct
  source 1..75: mol_type = other DNA
cgtatgagaaagaactggcactgatgggcgaagattatcaggacattttccgccagcaggtcagggaatccgcag

SEQ ID NO: 195790 - DNA, 75 bp, synthetic construct
  source 1..75: mol_type = other DNA
cccggctggccacgcagatgttttcctgctggctggaagaggcgcttcttcgggggattattcgtccgccacggg

SEQ ID NO: 195791 - DNA, 75 bp, synthetic construct
  source 1..75: mol_type = other DNA
tgctcagggcaatgttttgcctgttctgtacggtgaaatgcgtgtggggtcgcgggtggtttctcaggagatcag

SEQ ID NO: 195792 - DNA, 75 bp, synthetic construct
  source 1..75: mol_type = other DNA
ttatcaggcgcgatcagcctggtcacgggcagagtggattggtgccggaagaatggccattgacgggctcaagga

SEQ ID NO: 195793 - DNA, 75 bp, synthetic construct
  source 1..75: mol_type = other DNA
ggacgtccggccatgctgcatattttcgagccggtggaggacgggcagacccgtggggctaatcagttttacagc

SEQ ID NO: 195794 - DNA, 75 bp, synthetic construct
  source 1..75: mol_type = other DNA
ggggatgtcagaagctgattcgcatgcctttattgaagatgtggaggcggcgtggatggaatattgcgatccggt

SEQ ID NO: 195795 - DNA, 75 bp, synthetic construct
  source 1..75: mol_type = other DNA
tgcaggccacgcaactgcagtcggcggtggttcgcgccatttatgtctattatctccccgtagttgtcgccacca

SEQ ID NO: 195796 - DNA, 75 bp, synthetic construct
  source 1..75: mol_type = other DNA
ggcgctcttaccttccattcatctgggtaacgcccgcgcggatgatctggtccgtaacaacggtattgccgcaaa

SEQ ID NO: 195797 - DNA, 75 bp, synthetic construct
  source 1..75: mol_type = other DNA
acgggcagccattgcggcagagtatggggtattccggagggggtaccggatttggcgggcagcttgcggaatggc

SEQ ID NO: 195798 - DNA, 75 bp, synthetic construct
  source 1..75: mol_type = other DNA
atgaaacgaacgcctgtcctgattgatgtgaacggtgttccgcttcgtgagagtctcagctacaacgggggcggt

SEQ ID NO: 195799 - DNA, 75 bp, synthetic construct
  source 1..75: mol_type = other DNA
aaggtcagttactcaagtgcccgcgcctccgccaatgagtcgtggcgctattttatggggcggcgaaaatttatt

SEQ ID NO: 195800 - DNA, 75 bp, synthetic construct
  source 1..75: mol_type = other DNA
tcagattttccgctactacacttcaggcgatgagtttctgcaaatcaataccaccggcggcgaagatattgatga

SEQ ID NO: 195801 - DNA, 75 bp, synthetic construct
  source 1..75: mol_type = other DNA
taacgatctcggcgagccggagtggttattttcgcgcgcgctgggtgttgatatcccactgacggtgatgctgcc

SEQ ID NO: 195802 - DNA, 75 bp, synthetic construct
  source 1..75: mol_type = other DNA
ctctcacgtccggtgtggatagagcaggcgtatcagcagcagatagcggagagtcgcaggccggaagaggagaca

SEQ ID NO: 195803 - DNA, 75 bp, synthetic construct
  source 1..75: mol_type = other DNA
gcatttccttacagggcggcgcgacgctcaccgcacaaggtggcgcgcttcaccgtacccagaatatgggcggca

SEQ ID NO: 195804 - DNA, 75 bp, synthetic construct
  source 1..75: mol_type = other DNA
ggtgaaatgcgcgtgggctcccgtgtggtatctcaggagatcagcactgcagatgaaggcgatggtggtcaggtt

SEQ ID NO: 195805 - DNA, 75 bp, synthetic construct
  source 1..75: mol_type = other DNA
caacgccaaagcgatgggggctatgaccttaaactggcaggaaaaacgctggcagcgattttttaacagtgaaga

SEQ ID NO: 195806 - DNA, 75 bp, synthetic construct
  source 1..75: mol_type = other DNA
ctggctggggatgcgggagactgcggcaaaaagttttgtcgatgaggtggaggcggcctggtcagaatacgcaga

SEQ ID NO: 195807 - DNA, 75 bp, synthetic construct
  source 1..75: mol_type = other DNA
ctggcttgggatgcgggagacctcagcaaaaagttttgtcgatgaggtggaagcggcctggtcggaatatgcaga

SEQ ID NO: 195808 - DNA, 75 bp, synthetic construct
  source 1..75: mol_type = other DNA
ggtgaaatgcgcgtggggtcccgcgtggtatctcaggagatcagcactgcagaggaaggcgatggtggtcaggtt

SEQ ID NO: 195809 - DNA, 75 bp, synthetic construct
  source 1..75: mol_type = other DNA
acttttcgtaatggtcagttgcgtgccgtggcggcgggcagtcgtctgagtttttccagtacagcgcgcaactat

SEQ ID NO: 195810 - DNA, 75 bp, synthetic construct
  source 1..75: mol_type = other DNA
aaaattccgcaccttttccctggtgatgatctgaaactacagactgcgcaggattcagacaatggattttcggcg

SEQ ID NO: 195811 - DNA, 75 bp, synthetic construct
  source 1..75: mol_type = other DNA
atgaaggagcaacaattcgatgcctgttgctgctcagccagacgagtatttgtcacccgcgagccagtgtcacag

SEQ ID NO: 195812 - DNA, 75 bp, synthetic construct
  source 1..75: mol_type = other DNA
gcggctgttatggcagttgctatatggatgccaggagtaggaattatggcgagtaatctgctgttttctctcggt

SEQ ID NO: 195813 - DNA, 75 bp, synthetic construct
  source 1..75: mol_type = other DNA
atgaaacgtgttgtaatgccggtacgctggcaatgtgcaaaataccagcgttggtattgtggaaatcagccctgt

SEQ ID NO: 195814 - DNA, 75 bp, synthetic construct
  source 1..75: mol_type = other DNA
gtgcaaataaccgaagcattaatttcagagccgggagacatccggcgttttcttcagcaggcggtggaccactgg

SEQ ID NO: 195815 - DNA, 75 bp, synthetic construct
  source 1..75: mol_type = other DNA
cgcattgaaacggaaggcgacggaaacgtgcaaacgcgacttggggtgaaaacctacctgaatagccatcacaag

SEQ ID NO: 195816 - DNA, 75 bp, synthetic construct
  source 1..75: mol_type = other DNA
tacattgaagcgaactggatcaacaatagcaaagtctacgccgtgaagatgaatggtcaaaccgtaggccgtgaa

SEQ ID NO: 195817 - DNA, 75 bp, synthetic construct
  source 1..75: mol_type = other DNA
ggacaggtacaaggggaatacgtggagttgagcgacggcactttatcgtggttagggaacgccttattctggatg

SEQ ID NO: 195818 - DNA, 75 bp, synthetic construct
  source 1..75: mol_type = other DNA
gcgcttaaggaatatgaagatgccgaactgacagcggcgcgtattgctgcggcactggggctgtatatccgtaag

SEQ ID NO: 195819 - DNA, 75 bp, synthetic construct
  source 1..75: mol_type = other DNA
ttaccgggcgacagagcgaaaccaaagagatcgccgctgaaaatatggtgcatctgaagtttacccgccgccttc

SEQ ID NO: 195820 - DNA, 75 bp, synthetic construct
  source 1..75: mol_type = other DNA
caatcatgacctggtaatcggtgttttcgacaaacttgaggagcgggggattggtgcaaaggggatcattgttga

SEQ ID NO: 195821 - DNA, 75 bp, synthetic construct
  source 1..75: mol_type = other DNA
gaagggaaacgcacgtttactgaatttatgcgtgaaggtgtgggcgttcatgcgtttaacggcgaaatctttgtg

SEQ ID NO: 195822 - DNA, 75 bp, synthetic construct
  source 1..75: mol_type = other DNA
ctgacgggaaaacatcccttcgggaatacgcaggatatcatggcggtggaggcgggtttggtgggcagctgcgag

SEQ ID NO: 195823 - DNA, 75 bp, synthetic construct
  source 1..75: mol_type = other DNA
agaagttcacccgctggtatgacacgaataacgtgacgctgggcggtgttaaaattccgcaccttttttcctggc

SEQ ID NO: 195824 - DNA, 75 bp, synthetic construct
  source 1..75: mol_type = other DNA
cttaaggaggtgcaggaggcggtgatgcgtattgaaggtggcctgagcacgtacgagaaggagctggccctgatg

SEQ ID NO: 195825 - DNA, 75 bp, synthetic construct
  source 1..75: mol_type = other DNA
gtctttattgaagatgttgaggcagcgtggatggaattctgcgatccggtgtttggttcgatggatgtggagggg

SEQ ID NO: 195826 - DNA, 75 bp, synthetic construct
  source 1..75: mol_type = other DNA
tgcggcgacgctgccctccgggcgaccgggaatgatccatgtgtttcagccgcaggaggacgggcagacgcgcgg

SEQ ID NO: 195827 - DNA, 75 bp, synthetic construct
  source 1..75: mol_type = other DNA
gaagggaaacgcacgtttaccgaatttatgcgtgaaggtgtgggtgttcatgcgtttaacggcgaaatctttgtg

SEQ ID NO: 195828 - DNA, 75 bp, synthetic construct
  source 1..75: mol_type = other DNA
gaagggaaacgcacgtttaccgaatttattcgtgaaggtgtgggagttcatgcgtttaacggcgaaatctttgtg

SEQ ID NO: 195829 - DNA, 75 bp, synthetic construct
  source 1..75: mol_type = other DNA
taccatatctgtgaggatgattttccgttctctggtagtggacgatgggaacggatcccgcgtgaactacccacc

SEQ ID NO: 195830 - DNA, 75 bp, synthetic construct
  source 1..75: mol_type = other DNA
gtgcacaacattccgggtgtgtggaatacccggttacctcttcttcaggagatcgttatagagatcctctacaac

SEQ ID NO: 195831 - DNA, 75 bp, synthetic construct
  source 1..75: mol_type = other DNA
agagccaaaaagccgagctggaaggcattatcaagcaacaagctgtacagcttgagcaggcgaatcgtcagcaag

SEQ ID NO: 195832 - DNA, 75 bp, synthetic construct
  source 1..75: mol_type = other DNA
tcttccggaaaccctgcaaagccaggcgatgctggaaaaactgatgcagacccgcgtgcgtaacctgctggcaca

SEQ ID NO: 195833 - DNA, 75 bp, synthetic construct
  source 1..75: mol_type = other DNA
ccgtggttgaagagaccagggaggccgtggacaccacgtcacaacctgtcgcaacagaaaaaaagagtaagaaca

SEQ ID NO: 195834 - DNA, 75 bp, synthetic construct
  source 1..75: mol_type = other DNA
aggctatctgccgatgaacagagaggaagccagcctgttcttccggctactgaaccgtcgatatgaaaaagcgag

SEQ ID NO: 195835 - DNA, 75 bp, synthetic construct
  source 1..75: mol_type = other DNA
atgatgaaaccacgttcttcttattcaaaaacagcattcattcttttattttctgttttcctggtagcggcagtg

SEQ ID NO: 195836 - DNA, 75 bp, synthetic construct
  source 1..75: mol_type = other DNA
gccagcgacgggatcaaaccggaagaagtcgagtggcaaactgcggcgattgaaggcaagctcgacctgctggtg

SEQ ID NO: 195837 - DNA, 75 bp, synthetic construct
  source 1..75: mol_type = other DNA
ctacaatcattccagccaatggcgctatgaaaaagtctctgctcaggagttactttcaccgctcgccgatgccag

SEQ ID NO: 195838 - DNA, 75 bp, synthetic construct
  source 1..75: mol_type = other DNA
caggagttactgcaacgactggggctggaagaccgcacagaatattacccggcgcagctttccggcggtcagcaa

SEQ ID NO: 195839 - DNA, 75 bp, synthetic construct
  source 1..75: mol_type = other DNA
tccgctccaactggcaggaactaaaccagctgattgccgccgctaacgtctggaccatcaaaacctacggcccgg

SEQ ID NO: 195840 - DNA, 75 bp, synthetic construct
  source 1..75: mol_type = other DNA
acagctatcgccagcgttggcagttcgacaaaatcgtgcgttccacccacggtgttaactgtacaggctcctgta

SEQ ID NO: 195841 - DNA, 75 bp, synthetic construct
  source 1..75: mol_type = other DNA
acgctcgacttccgcatgtccagtacctgcctgttctccgatatcgttctgcccaccgccacctggtacgaaaaa

SEQ ID NO: 195842 - DNA, 75 bp, synthetic construct
  source 1..75: mol_type = other DNA
ttgcgcctttgtcggcaacgacttatgcgtaaattacgtgcaaataagccagcgtcatcagacgaaccggagcag

SEQ ID NO: 195843 - DNA, 75 bp, synthetic construct
  source 1..75: mol_type = other DNA
ggtacttcctgccgcctgggttcgcgggccgctcaaagagcatcactggtcaacgttgcttgccgctcgtgcgct

SEQ ID NO: 195844 - DNA, 75 bp, synthetic construct
  source 1..75: mol_type = other DNA
aaaaaacaagggttttatgctcgtttttttctgactaactccgcgccaatgttgttgatagatccctcgcgtgat

SEQ ID NO: 195845 - DNA, 75 bp, synthetic construct
  source 1..75: mol_type = other DNA
aatttcgcatttacccggtggccataagcctttgaattttgttcataaactggcggatggttcgactcgtcatgt

SEQ ID NO: 195846 - DNA, 75 bp, synthetic construct
  source 1..75: mol_type = other DNA
cttcgcagtgcagtatcagggtaataacgaaggtgcaaacaacggtcaggaaggcaccaacaacggacgtgatgt

SEQ ID NO: 195847 - DNA, 75 bp, synthetic construct
  source 1..75: mol_type = other DNA
tatcgtggagcttacggtaatacgaatgtcggttacagtcggagtggtgacagcagccagatttattacggaatg

SEQ ID NO: 195848 - DNA, 75 bp, synthetic construct
  source 1..75: mol_type = other DNA
caacgttgcttgctgctcgtgctctggataccacctgttatatggtggcggcaggggagtgcgggaacaaaaata

SEQ ID NO: 195849 - DNA, 75 bp, synthetic construct
  source 1..75: mol_type = other DNA
cttcaacaaagtggaactggaaaacgtgctgctgcataagctgccggtgaaacgcctgcaactggctgatggcag

SEQ ID NO: 195850 - DNA, 75 bp, synthetic construct
  source 1..75: mol_type = other DNA
ccagccgatgctgaacaccgcaattgatgcggcagagatgatcctgacactggcaccggaaaccaatggtcaggt

SEQ ID NO: 195851 - DNA, 75 bp, synthetic construct
  source 1..75: mol_type = other DNA
gtcgatatgaaaaagcgagcatcatactgacgtcaaacaaagggttcgcagactggggagaaatgttcggagatc

SEQ ID NO: 195852 - DNA, 75 bp, synthetic construct
  source 1..75: mol_type = other DNA
tggacttactcaccagtcctgtctggatcgtttcgccctttgaggaacagttaatttatgccaatagcgcggcgc

SEQ ID NO: 195853 - DNA, 75 bp, synthetic construct
  source 1..75: mol_type = other DNA
tccaggactctgcggtgcactgcaggaagctccgatgaaggcactgatatgccgtcaaatggaggggggagaaaa

SEQ ID NO: 195854 - DNA, 75 bp, synthetic construct
  source 1..75: mol_type = other DNA
gcgcggtaaaacagaaattaccgaaattgtgctgcgtaaaccgcagtctggtgcgctacgcggtacacgcctgca

SEQ ID NO: 195855 - DNA, 75 bp, synthetic construct
  source 1..75: mol_type = other DNA
gcagatgctggcaccgaaagccaggacgcccacggcagccagtacagataacggcaaacagaacacctatttctc

SEQ ID NO: 195856 - DNA, 75 bp, synthetic construct
  source 1..75: mol_type = other DNA
gttttacgcacaaatggctcaggaagaagggcgctttgactttaatgatatatgcgccgcgatcagcgataaatt

SEQ ID NO: 195857 - DNA, 75 bp, synthetic construct
  source 1..75: mol_type = other DNA
aagcgtacgaacaaaccctgccgctgctgtcggaatacagcacctgggtagggcaacatgaagggctgtataaag

SEQ ID NO: 195858 - DNA, 75 bp, synthetic construct
  source 1..75: mol_type = other DNA
gccatgatgacggtgatcccccgcatttccaccccgacgctgacgccgcaggaaatggcagagctggaccccgcc

SEQ ID NO: 195859 - DNA, 75 bp, synthetic construct
  source 1..75: mol_type = other DNA
ccattcaactggatacccctatcaagcgtggtaaaacagaaatcaccgaaattgtgctgcgcaaaccgcagtccg

SEQ ID NO: 195860 - DNA, 75 bp, synthetic construct
  source 1..75: mol_type = other DNA
accgtagctccggcttccagagtattgatacacaattaaacagcgactttaagggtaataaccaactcaatatca

SEQ ID NO: 195861 - DNA, 75 bp, synthetic construct
  source 1..75: mol_type = other DNA
ggaagttggtccgattactgggcttccggacaaaatcgtagcaattactctattggctacagtaacagtgcatcc

SEQ ID NO: 195862 - DNA, 75 bp, synthetic construct
  source 1..75: mol_type = other DNA
gttttacgcacaaatggctcaggaagaagggcgctttgactttaatgatatttgcgctgctattagcgataaatt

SEQ ID NO: 195863 - DNA, 75 bp, synthetic construct
  source 1..75: mol_type = other DNA
tttgcgctgcaatcagcgataaattagagcgtcgacatccacatgtttttgctgacagttctgccgaaaacagca

SEQ ID NO: 195864 - DNA, 75 bp, synthetic construct
  source 1..75: mol_type = other DNA
ttgaactcccgccgttttcaaaaatcctcccggaacatgtggttccagccgtcactaaggcgttgaacgactgcc

SEQ ID NO: 195865 - DNA, 75 bp, synthetic construct
  source 1..75: mol_type = other DNA
gttataacaatgttgatgtagctgccagtgccaacggcgtgagcggcgattatttcaatgtctatggcatgacct

SEQ ID NO: 195866 - DNA, 75 bp, synthetic construct
  source 1..75: mol_type = other DNA
gccgtgggtcgcctctgccacccccgctgtctcgcaaaacctgcgcctgcgttataacaatgttgatgtagctgc

SEQ ID NO: 195867 - DNA, 75 bp, synthetic construct
  source 1..75: mol_type = other DNA
atcactccagccagtggcgctatgaaaaagtcaccgcgcaggaattgctctcaccgctcgccgatgccagtaaat

SEQ ID NO: 195868 - DNA, 75 bp, synthetic construct
  source 1..75: mol_type = other DNA
atattcgccgcagctatcccgctggggatgagcaggtcgaggtgctgaagggcatcagccttgatatttatgccg

SEQ ID NO: 195869 - DNA, 75 bp, synthetic construct
  source 1..75: mol_type = other DNA
tagatgctctggcacgagagtaatttttgagataaaaatgccagccgatcgggctggcattttgcctttaggatg

SEQ ID NO: 195870 - DNA, 75 bp, synthetic construct
  source 1..75: mol_type = other DNA
gtttctttgctcgaccattaccgggattttattcggctggctgcctgcgagaaatgcggcacggctggatccagt

SEQ ID NO: 195871 - DNA, 75 bp, synthetic construct
  source 1..75: mol_type = other DNA
ttacccatgacgaagtgatcactctgttccacgagttcggtcatggtctgcatcatatgctgacccgcatcgaaa

SEQ ID NO: 195872 - DNA, 75 bp, synthetic construct
  source 1..75: mol_type = other DNA
tatctccggtcactatgaaaccggcgaaccgctgccgaaagagttgctggataaaatgctggcggcgaagaacta

SEQ ID NO: 195873 - DNA, 75 bp, synthetic construct
  source 1..75: mol_type = other DNA
ggtaagtgggataacagcaaggtgatggaagagatcctcgctctgcgtcacgaactggcgcaactgctgggcttt

SEQ ID NO: 195874 - DNA, 75 bp, synthetic construct
  source 1..75: mol_type = other DNA
ttacccatgacgaagtgatcacgttgttccacgagttcggtcacggactgcatcatatgctgacccgcatcgaaa

SEQ ID NO: 195875 - DNA, 75 bp, synthetic construct
  source 1..75: mol_type = other DNA
tggaagagatcctcgcgctgcgtcacgaactggcgcaactgctgggctttgaaaactacgcctttaaatcacttg

SEQ ID NO: 195876 - DNA, 75 bp, synthetic construct
  source 1..75: mol_type = other DNA
acggttctctgcaaaaaccggtcgcgtacctgacctgtaacttcaaccgcccggtgaatggtaaaccggcgctgt

SEQ ID NO: 195877 - DNA, 75 bp, synthetic construct
  source 1..75: mol_type = other DNA
tgtccagttagctgactttagtcatattaattacataataactgataaatcaccgggtgcagagtggatagcatt

SEQ ID NO: 195878 - DNA, 75 bp, synthetic construct
  source 1..75: mol_type = other DNA
tgacctgacgcgagatgttgacggtttctactgccgtgaagttgtgaaacgaatgtttgaggtgtggtgccactg

SEQ ID NO: 195879 - DNA, 75 bp, synthetic construct
  source 1..75: mol_type = other DNA
ccccttgcttacaatttcccacgaagaaatcgcattatcagtggtctaagtaaaggtgtactggtggtggaagcg

SEQ ID NO: 195880 - DNA, 75 bp, synthetic construct
  source 1..75: mol_type = other DNA
atgaagagatgaagttgcgcatgctcaacggcagtcattcattcctggcgtatctgggttatcttgccggatatc

SEQ ID NO: 195881 - DNA, 75 bp, synthetic construct
  source 1..75: mol_type = other DNA
gattggggctactatgaagtgaaccttattggcggtgaacagcaaatcatcgatctaaaacagcaagataatctc

SEQ ID NO: 195882 - DNA, 75 bp, synthetic construct
  source 1..75: mol_type = other DNA
cccatcgacaatggtggatcgcattgtacccgcggtcacggcagaaacactggataaaatcgaacaactcgccgg

SEQ ID NO: 195883 - DNA, 75 bp, synthetic construct
  source 1..75: mol_type = other DNA
atgaataaagcatttgaacgatgggtccaccagcgttacagcaatcgctatgatctgacgcgagatgttgacggt

SEQ ID NO: 195884 - DNA, 75 bp, synthetic construct
  source 1..75: mol_type = other DNA
ataggtggtgcaagttcttcatcattcagcggacgtggtggtggtaaagctgagggctttggtgctggcggaggc

SEQ ID NO: 195885 - DNA, 75 bp, synthetic construct
  source 1..75: mol_type = other DNA
caggcaacagccggagctggattgagcggtgcatttattgaagcatttttcgaggttgataatgatttcgaagtc

SEQ ID NO: 195886 - DNA, 75 bp, synthetic construct
  source 1..75: mol_type = other DNA
tgaatggcgtcagtattgctgtactggggaatggactcaataccattcatcctcgtcgccatgcccgactggcta

SEQ ID NO: 195887 - DNA, 75 bp, synthetic construct
  source 1..75: mol_type = other DNA
ttgatgctgttgtattgcagcaaacaggactttcattgcggcaggcacaacgctttctttcattttcgcagaaga

SEQ ID NO: 195888 - DNA, 75 bp, synthetic construct
  source 1..75: mol_type = other DNA
tgacctgacgcgagatgttgacggcttctactgtcgtgaagttgtgaagcgaatgtttgacgtgtggtgccactg

SEQ ID NO: 195889 - DNA, 75 bp, synthetic construct
  source 1..75: mol_type = other DNA
atgggaaataatttgttatccgcaaaagcgacactccctgtttatgatcgtaataacctgacgccaaaaattgtt

SEQ ID NO: 195890 - DNA, 75 bp, synthetic construct
  source 1..75: mol_type = other DNA
aacagcctcgccattccgcccgctgatgctatcgatcatcagggacgtctggtgctcattcaataccgcccaaaa

SEQ ID NO: 195891 - DNA, 75 bp, synthetic construct
  source 1..75: mol_type = other DNA
gccaaatggctaaatcagcatcgacaggaggggattattacactcgtgctttcggttgaccacgatgaggatatc

SEQ ID NO: 195892 - DNA, 75 bp, synthetic construct
  source 1..75: mol_type = other DNA
gcaaactggcttaatcaacatcgtcaggaggggattattacactcgtgctttcggttgaccgcgatgaagatatc

SEQ ID NO: 195893 - DNA, 75 bp, synthetic construct
  source 1..75: mol_type = other DNA
gtaagttggcagcatcacccaaatgcgtattactcttattatcttggagagcgtaatatctccgtactgcccctt

SEQ ID NO: 195894 - DNA, 75 bp, synthetic construct
  source 1..75: mol_type = other DNA
tttgctgtgattgcgccgctataccgggttgtccccggacaatcagaacaggttgaatcctttgttctgcagctt

SEQ ID NO: 195895 - DNA, 75 bp, synthetic construct
  source 1..75: mol_type = other DNA
atgtggttcgtgctgcctgccaaacgtagccatttacgcggcaggctaccggaaatcaaaacaactgacggcgag

SEQ ID NO: 195896 - DNA, 75 bp, synthetic construct
  source 1..75: mol_type = other DNA
gattgggggtattatgaggtcaacttaattggtggcgaacagcaaatcgctgatctaaatcagcaagataatctc

SEQ ID NO: 195897 - DNA, 75 bp, synthetic construct
  source 1..75: mol_type = other DNA
tttgcaaaattatgccgatcgattgattgaacgctacagcaacccggctttacgccaccgaacctggcagattgc

SEQ ID NO: 195898 - DNA, 75 bp, synthetic construct
  source 1..75: mol_type = other DNA
ttgaagataattttgttgccggacgcccggaatgggaaaaagcaggcgctgaactggtcagcgatgtgctgcctt

SEQ ID NO: 195899 - DNA, 75 bp, synthetic construct
  source 1..75: mol_type = other DNA
tagcctgccgtggctgggattactccccggtgcactgtacacaggctggaaaaaccgcaagcattccgcaaccgt

SEQ ID NO: 195900 - DNA, 75 bp, synthetic construct
  source 1..75: mol_type = other DNA
gcgcttatatcgttttcccggttctgttttgaccgattaccggatactgaagaattacgccaaaacactgaaagg

SEQ ID NO: 195901 - DNA, 75 bp, synthetic construct
  source 1..75: mol_type = other DNA
ttgaagatagttttgtcgccggacgccctgaatgggaaaaagcaggcgccgaactggttagagatgtgctgcctt

SEQ ID NO: 195902 - DNA, 75 bp, synthetic construct
  source 1..75: mol_type = other DNA
gtaaaaagctgattgcccttgttctggccggagccggaacgttcaccattgccacgcactacaccggctactggg

SEQ ID NO: 195903 - DNA, 75 bp, synthetic construct
  source 1..75: mol_type = other DNA
atggagaatgcatcagatgcaaactacgcgtaccccctactctgtttcctttatgtatcggtggatatcccgcat

SEQ ID NO: 195904 - DNA, 75 bp, synthetic construct
  source 1..75: mol_type = other DNA
accatttgcgacagaatatagagaaaaccgtgttgctcttaacgcgaattcccttgcagataatgttgaactgga

SEQ ID NO: 195905 - DNA, 75 bp, synthetic construct
  source 1..75: mol_type = other DNA
gtccgcttggttatatcaccgacttttcccgtctcaatcgccgtatgcataataaaagtttcactgtcgatggcg

SEQ ID NO: 195906 - DNA, 75 bp, synthetic construct
  source 1..75: mol_type = other DNA
ccggcgccagcctgcatgctaagacgtttagtatcgatggcaagacggtgtttattggttcattcaatttcgacc

SEQ ID NO: 195907 - DNA, 75 bp, synthetic construct
  source 1..75: mol_type = other DNA
acgtttattaagtgatgatccggcgaaaggggagggcaaggcaaaacggcattcactgttaccgcagcgcctgtt

SEQ ID NO: 195908 - DNA, 75 bp, synthetic construct
  source 1..75: mol_type = other DNA
aggatggtgttattcaggttaagccgaaattcaccgactattacaatctcgcttataacaaacgcgggaaattac

SEQ ID NO: 195909 - DNA, 75 bp, synthetic construct
  source 1..75: mol_type = other DNA
ccgggggaggcgatggaaatagcggaagtacaggctacgccacgctgaattatcgcggtggttacggcaatgcca

SEQ ID NO: 195910 - DNA, 75 bp, synthetic construct
  source 1..75: mol_type = other DNA
ctttccacaacctacgatttaggtatgggctttagcgcgggcgcggcatacacctcctcagaccgcaccaatgac

SEQ ID NO: 195911 - DNA, 75 bp, synthetic construct
  source 1..75: mol_type = other DNA
tggttacggcaatgccaatatcggttacagccatagtgatgatattaagcagctctattacggagtcagcggtgg

SEQ ID NO: 195912 - DNA, 75 bp, synthetic construct
  source 1..75: mol_type = other DNA
atattttgccttactccgctcgtttgaagtcaactcagaagtccgtcaatcctggactggtgagcgcttcggcaa

SEQ ID NO: 195913 - DNA, 75 bp, synthetic construct
  source 1..75: mol_type = other DNA
ttaattttaccgtagatctccaaaaaaacagtgccagacaatttccaacgaccggtagcacaagtccagccgtcc

SEQ ID NO: 195914 - DNA, 75 bp, synthetic construct
  source 1..75: mol_type = other DNA
acattttacgcttgcttgacagccatccacgcattgaagtccggctttttaatcctttctcgtttcgcttgctgc

SEQ ID NO: 195915 - DNA, 75 bp, synthetic construct
  source 1..75: mol_type = other DNA
acgtctcggcatccctgacgggcccaaccggcagtatcgatctgggctgcggctcggcgaactccgaagaaggta

SEQ ID NO: 195916 - DNA, 75 bp, synthetic construct
  source 1..75: mol_type = other DNA
tgatttaatgaccggaaacagccttgacgactggacggagaacctgaaacggaaatcagaaaaagagctggagga

SEQ ID NO: 195917 - DNA, 75 bp, synthetic construct
  source 1..75: mol_type = other DNA
catgccaaaggtgaatatttcggcccgttcccgaatggctatgccgtacgtgaaacactggcgctactgcaaaag

SEQ ID NO: 195918 - DNA, 75 bp, synthetic construct
  source 1..75: mol_type = other DNA
ggctcggcgaactccgaagaaggcattacggttgcgatgaccgaggcaaaaaacaccatgaccgtcggcgccgat

SEQ ID NO: 195919 - DNA, 75 bp, synthetic construct
  source 1..75: mol_type = other DNA
tcacggggtcaatgactggcccaaccggggtgattgatcttggtgcaggttccgcaaactccgaagaaggtatca

SEQ ID NO: 195920 - DNA, 75 bp, synthetic construct
  source 1..75: mol_type = other DNA
caccatgaccatcggttctgatggcgaagtgatgcacagtctccatgcagataaaagcgggacaattaccgttaa

SEQ ID NO: 195921 - DNA, 75 bp, synthetic construct
  source 1..75: mol_type = other DNA
tgcagagtgataatcacagtgacgccaaacaaggatcgttctccgcatcgctttctcgtctggcgcgtattcgtc

SEQ ID NO: 195922 - DNA, 75 bp, synthetic construct
  source 1..75: mol_type = other DNA
gcaacatccccactgctgaactgatccccgcactctgcttcgcagtcatctttatctttgcccgtttccgttctc

SEQ ID NO: 195923 - DNA, 75 bp, synthetic construct
  source 1..75: mol_type = other DNA
agggattattaccggattgtttttatatgccttcggcgctgcattattctggcccgccgcagaaataatgaacta

SEQ ID NO: 195924 - DNA, 75 bp, synthetic construct
  source 1..75: mol_type = other DNA
tctgttacgcgcaccaccgataaagattcagctaaaactgttgttcaggaaactctgaaagatacttgggagtct

SEQ ID NO: 195925 - DNA, 75 bp, synthetic construct
  source 1..75: mol_type = other DNA
atgcgtattgaaatctgcatagccaaagaaaaaatgactaaaatgccaaacggtgctgtggatgcgttaaaggaa

SEQ ID NO: 195926 - DNA, 75 bp, synthetic construct
  source 1..75: mol_type = other DNA
aacttttgttcaggaaactctgaaagatacctgggagtctgctgacgagtggtttgtatactcccaccataaatg

SEQ ID NO: 195927 - DNA, 75 bp, synthetic construct
  source 1..75: mol_type = other DNA
atcatcatctgacccgtatcgccacgttttgcgcgctgctgtattgcaacagtgctttcagtgctgaactcgttg

SEQ ID NO: 195928 - DNA, 75 bp, synthetic construct
  source 1..75: mol_type = other DNA
ggattacgccacaacgtttttcgctgtttgaaaagctggaatatcagttccctgacaggcatatcacactgtggt

SEQ ID NO: 195929 - DNA, 75 bp, synthetic construct
  source 1..75: mol_type = other DNA
cccggagagtggatgacgctggccagcctcaatgcagatgattttccgccagccaatgaaccggtaattgcgaag

SEQ ID NO: 195930 - DNA, 75 bp, synthetic construct
  source 1..75: mol_type = other DNA
aggtgaatggagttttaacgccgaagagacggaagtcgccgacagcgaagagaataaaaataccgatcagcatct

SEQ ID NO: 195931 - DNA, 75 bp, synthetic construct
  source 1..75: mol_type = other DNA
atatcagcgaatgcgatgcaagggctgagggcgcaccaacagaatcgaccctcattggcgataagcattacccag

SEQ ID NO: 195932 - DNA, 75 bp, synthetic construct
  source 1..75: mol_type = other DNA
ctctatgattattactgatacttatcctggtagagatagaatgagaagcctacttctctttgatatgtctacctc

SEQ ID NO: 195933 - DNA, 75 bp, synthetic construct
  source 1..75: mol_type = other DNA
ccgccacaaaatttttaacgccgactggattatcgacggtgaacaacagccgaaatcgctgttcaggatgatcaa

SEQ ID NO: 195934 - DNA, 75 bp, synthetic construct
  source 1..75: mol_type = other DNA
aagcactttttcctgatcgaaggcgatgaattacgggaactgaagcacagaaactctttaagagtttctgtgaaa

SEQ ID NO: 195935 - DNA, 75 bp, synthetic construct
  source 1..75: mol_type = other DNA
tggaagactgttatttcagccagaaacagccaccagcagcacaaaactccccaaccccaaatgatggatgcgcat

SEQ ID NO: 195936 - DNA, 75 bp, synthetic construct
  source 1..75: mol_type = other DNA
ctctctccccgatcacccataaccagattcctgtaattaccactgaacttttggcgcagctttatggcaccgaaa

SEQ ID NO: 195937 - DNA, 75 bp, synthetic construct
  source 1..75: mol_type = other DNA
tgggtgtacgacctgcggaccaatatgccgagctttggtaaacgcacgccgtttaccgacgagcatttgcagccg

SEQ ID NO: 195938 - DNA, 75 bp, synthetic construct
  source 1..75: mol_type = other DNA
tcttcatgaggacagtgataacgatcgtgatgaaggaatgctaaaggcaacggattatccactggcaatggcgtt

SEQ ID NO: 195939 - DNA, 75 bp, synthetic construct
  source 1..75: mol_type = other DNA
tggaacggtttaaattttatctggagcaacacgggtggatcgttgcccgtaaagaacaactagtggaaaggctga

SEQ ID NO: 195940 - DNA, 75 bp, synthetic construct
  source 1..75: mol_type = other DNA
accagttcgtactacgagggatttcgaggaattttgacagtactgaaacgcagaccgtttatgtttttgatgaat

SEQ ID NO: 195941 - DNA, 75 bp, synthetic construct
  source 1..75: mol_type = other DNA
atgggacagaaacaatccgtattcgccaaaatcatcatgagaacaaagtacgctttgttgaagggaagcactttt

SEQ ID NO: 195942 - DNA, 75 bp, synthetic construct
  source 1..75: mol_type = other DNA
gaaatgagaaaggaggcacatagaatgaccagtaataatttgaatgttaaaaaaccagcacctgttgcttcagca

SEQ ID NO: 195943 - DNA, 75 bp, synthetic construct
  source 1..75: mol_type = other DNA
aatgaggcacgcaagttatgtggagaaccagaggttagaaacaataaattcatcgaaaaaatactcgatgaactt

SEQ ID NO: 195944 - DNA, 75 bp, synthetic construct
  source 1..75: mol_type = other DNA
gccgggagaccaccatacaggcaaccgacacaaccaccgtcctgggtgtatccacgcttcaggctggcgcggtca

SEQ ID NO: 195945 - DNA, 75 bp, synthetic construct
  source 1..75: mol_type = other DNA
aaccaatgccggagcatttacccagacagcagagaaagcaggacagacccgaagtaagtaccagaaaatcatcgc

SEQ ID NO: 195946 - DNA, 75 bp, synthetic construct
  source 1..75: mol_type = other DNA
ccaggcggtgaaaggtaacaggctggccagtattgaagggaatgatgaaactgagataatcgggaaacagtccac

SEQ ID NO: 195947 - DNA, 75 bp, synthetic construct
  source 1..75: mol_type = other DNA
agggacaggatttctactggacgaagaacaaaagcgattctcagagcctcaaaaacggcacagagataagcccgg

SEQ ID NO: 195948 - DNA, 75 bp, synthetic construct
  source 1..75: mol_type = other DNA
gttagaagcgttcagggcgtttcttgccagtcctactaacgaagatctcagtcctgaggaaagggacgccatgta

SEQ ID NO: 195949 - DNA, 75 bp, synthetic construct
  source 1..75: mol_type = other DNA
gtgtggttctggtaaaactacttctatatgtaatataatcaatgacagtactgaaagatatattttagtacagaa

SEQ ID NO: 195950 - DNA, 75 bp, synthetic construct
  source 1..75: mol_type = other DNA
tgaccggtaataatttgaatgttgaaaaaccagcacctgttacgtcagctacgccagcaccagccgtgaatatta

SEQ ID NO: 195951 - DNA, 75 bp, synthetic construct
  source 1..75: mol_type = other DNA
atattattactgatacagtatcaaaagatgaaagtgttattagttcagttattgaatttctttcatctggaagta

SEQ ID NO: 195952 - DNA, 75 bp, synthetic construct
  source 1..75: mol_type = other DNA
agtggtaatacagcactcagtcccgaagagcaaaaggctatgtggaacaaatacgaaaaggaagtacaaaaaagc

SEQ ID NO: 195953 - DNA, 75 bp, synthetic construct
  source 1..75: mol_type = other DNA
atgaaatcacgtgctgccgttgcatttgctcccggtaaaccactggaaatcgttgaaattgacgtagcgccaccg

SEQ ID NO: 195954 - DNA, 75 bp, synthetic construct
  source 1..75: mol_type = other DNA
tgtggttgaagtcggtgaaggcgtaaccagcgtcaaacctggcgaccatgtgatcccgctttacaccgcggagtg

SEQ ID NO: 195955 - DNA, 75 bp, synthetic construct
  source 1..75: mol_type = other DNA
acgccatcctcggtgttaacgatcagggtatcgacggtacgccaatcagtgctaaagcagtgggtattacgctgt

SEQ ID NO: 195956 - DNA, 75 bp, synthetic construct
  source 1..75: mol_type = other DNA
cgcaagcaggacgaattatcgctatcgatacaaacccgaagaaattcgatctggcgcgtcgcttcggtgccaccg

SEQ ID NO: 195957 - DNA, 75 bp, synthetic construct
  source 1..75: mol_type = other DNA
atacctttgaatgcatcggtaacgtcaacgtgatgcgtgcggcgctggaaagtgcgcaccgcggctggggtcagt

SEQ ID NO: 195958 - DNA, 75 bp, synthetic construct
  source 1..75: mol_type = other DNA
cgttgaaattgacgtagcgccaccgaagaaaggtgaagtgctgattaaagtcactcataccggcgtctgccatac

SEQ ID NO: 195959 - DNA, 75 bp, synthetic construct
  source 1..75: mol_type = other DNA
aacaggtgcagtttaacggtctggcgctggtgattatcgacgaacagcatcgttttggcgtgcatcagcgtctgg

SEQ ID NO: 195960 - DNA, 75 bp, synthetic construct
  source 1..75: mol_type = other DNA
cgaagcaaagcgcggtaaatatggtgcggagatgatccacccggaataccgcgtgcagggcgatctcagcacgcc

SEQ ID NO: 195961 - DNA, 75 bp, synthetic construct
  source 1..75: mol_type = other DNA
accgctcggtatcgaagtgggctggctcgccggaaaacagaaaggtaaagcacgactggctcagcaagaagccat

SEQ ID NO: 195962 - DNA, 75 bp, synthetic construct
  source 1..75: mol_type = other DNA
cgtcggcaatggtcaacgcatccgcctgaaaggccaggggacgccgggcgaaaacggcggtccaaatggcgacct

SEQ ID NO: 195963 - DNA, 75 bp, synthetic construct
  source 1..75: mol_type = other DNA
gtggtggcggagatcgagcgcgatatggcgctggatgtgccgatgatgcgcctggtgcagggcgatgtaggttcc

SEQ ID NO: 195964 - DNA, 75 bp, synthetic construct
  source 1..75: mol_type = other DNA
atgaaaggtcgcctgttagatgctgttccgctcagttcgctaacgggcgttggcgcggcgcaaagtaataagctg

SEQ ID NO: 195965 - DNA, 75 bp, synthetic construct
  source 1..75: mol_type = other DNA
ttccagttggtcaccggtcgcgtatggaaaggttccgcgtttggcggcgtgaaaggtcgttcccagttaccgggt

SEQ ID NO: 195966 - DNA, 75 bp, synthetic construct
  source 1..75: mol_type = other DNA
cacgctgctggaacaggccgaacagggcgtagattacttcacgattcatgcgggcgttctcctgcgctacgtgcc

SEQ ID NO: 195967 - DNA, 75 bp, synthetic construct
  source 1..75: mol_type = other DNA
tacgtaacagcccggtgccgattggtactgtgccgatctaccaggcgctggaaaaggttaacgggatcgcggaag

SEQ ID NO: 195968 - DNA, 75 bp, synthetic construct
  source 1..75: mol_type = other DNA
ggaaagcacttttttaaagcatcgggtgaagaattaaaaaatttgcgacttactttaagtaagtcacaaaacccc

SEQ ID NO: 195969 - DNA, 75 bp, synthetic construct
  source 1..75: mol_type = other DNA
gtccccgccgatgcgatggtatgcactctggagcggtttaaattttatctggagcaacacggctggatcgttgcc

SEQ ID NO: 195970 - DNA, 75 bp, synthetic construct
  source 1..75: mol_type = other DNA
atgattattggccgtaacttcctggtaaaagttaacgccaatatcggcaactcggcggtcacctcttccatcgaa

SEQ ID NO: 195971 - DNA, 75 bp, synthetic construct
  source 1..75: mol_type = other DNA
ttcacgtcggggattggtgcggcgatgattggctggtttggctgcgcgatgctctgttacgtaacgccgaaagag

SEQ ID NO: 195972 - DNA, 75 bp, synthetic construct
  source 1..75: mol_type = other DNA
gctttctgcgcagggtatccgcgtggtcggtatgaactataaagacgacaggcagaaagcgattagctggctgaa

SEQ ID NO: 195973 - DNA, 75 bp, synthetic construct
  source 1..75: mol_type = other DNA
caaaagccggacgaattatcgctatcgatactaacccggagaaattcgagttggcgcgtcgcttcggcgctactg

SEQ ID NO: 195974 - DNA, 75 bp, synthetic construct
  source 1..75: mol_type = other DNA
actacatggggtgctctacattcagtgaatacaccgtggtcgcggaagtgtctctggcaaaaattaatccagaag

SEQ ID NO: 195975 - DNA, 75 bp, synthetic construct
  source 1..75: mol_type = other DNA
aaggagagccgctgatcatcaaagaggcaactgcggactggcgccgcatcaccccgcataaacgctttgccttca

SEQ ID NO: 195976 - DNA, 75 bp, synthetic construct
  source 1..75: mol_type = other DNA
agcctgtttgatggtgacggtatgttagggctggatctgggcgtgtatggtgcgccggaaacgttccttatcgac

SEQ ID NO: 195977 - DNA, 75 bp, synthetic construct
  source 1..75: mol_type = other DNA
atgaagcgcaacgtattgttaattcctttgattatcttcctggcgattgccgcggcgttgctgtggcagctggca

SEQ ID NO: 195978 - DNA, 75 bp, synthetic construct
  source 1..75: mol_type = other DNA
cgtaaccgccatcagacacggagaaccacgtaacgataaatacagcttctggtggcagcttgctggcaacctggt

SEQ ID NO: 195979 - DNA, 75 bp, synthetic construct
  source 1..75: mol_type = other DNA
ggtgctcaggggctggcgcagttcatgcctgccactgccgactggataagtcagttgatgccggggcttaacagc

SEQ ID NO: 195980 - DNA, 75 bp, synthetic construct
  source 1..75: mol_type = other DNA
cgcacaactgcatcaggaaagtggctggcgtcccggtgccgtatcaccggcgggtgctcagggtatggcgcagtt

SEQ ID NO: 195981 - DNA, 75 bp, synthetic construct
  source 1..75: mol_type = other DNA
ttgccacgccactgggcccactgtgggtgatttgcgatgagcaatttcgcctgcgggcggttgaatgggaagagt

SEQ ID NO: 195982 - DNA, 75 bp, synthetic construct
  source 1..75: mol_type = other DNA
gccgccagtgactgcgagcgtatggccatgacgctgtcaggctataacggtggtctgggctgggtacagcgggac

SEQ ID NO: 195983 - DNA, 75 bp, synthetic construct
  source 1..75: mol_type = other DNA
aatgctgccagctggcgggagaaccgccattatccacaacgcatcctgcgcgagctggcaccgcgatatctcaca

SEQ ID NO: 195984 - DNA, 75 bp, synthetic construct
  source 1..75: mol_type = other DNA
tgttggggatttgatttgcaaagaagattatgaagctaaaccatatcaatatcccggaactgcttactataaagc

SEQ ID NO: 195985 - DNA, 75 bp, synthetic construct
  source 1..75: mol_type = other DNA
gcaacaatggttaagtgctgccgagcgacttggctttttgagtgaacgagtcctgttacaaggggtcgtctcaga

SEQ ID NO: 195986 - DNA, 75 bp, synthetic construct
  source 1..75: mol_type = other DNA
ttataaggggggagaaatagtacagggagggcgttggtgtaaggtaaacggtgaaccattattttatattaatta

SEQ ID NO: 195987 - DNA, 75 bp, synthetic construct
  source 1..75: mol_type = other DNA
cgagaaccggggttatccgcagcgcatcctctaccagaacgcaccgcgctacctgtcatggggaggggctacctg

SEQ ID NO: 195988 - DNA, 75 bp, synthetic construct
  source 1..75: mol_type = other DNA
aggctaacgctgccgaaccacccgccgccgccaaaccctaccgcgctgaactggttcgcaacgcccgcgctgtgt

SEQ ID NO: 195989 - DNA, 75 bp, synthetic construct
  source 1..75: mol_type = other DNA
taagccagttgtatccacaattgcgtgaaaacaaaccgtataacccaacctgggcgattcgcgcgctggtgcaat

SEQ ID NO: 195990 - DNA, 75 bp, synthetic construct
  source 1..75: mol_type = other DNA
cgttcctgcctgttgcaatattgcgggccttgatacgcctcataaacgttttttcaaacgcttaatcattggtgc

SEQ ID NO: 195991 - DNA, 75 bp, synthetic construct
  source 1..75: mol_type = other DNA
ttgaatatgaccataccttcctgatggggcagaatgcctcaaatattgatctcagccggtatagtgaaggtaacc

SEQ ID NO: 195992 - DNA, 75 bp, synthetic construct
  source 1..75: mol_type = other DNA
agtttattgttgaacatatcaatgccatgaccacactggcgcgggaacaccggtcattgccgccggaactggcgc

SEQ ID NO: 195993 - DNA, 75 bp, synthetic construct
  source 1..75: mol_type = other DNA
ctggaaaaaatcgcccgccagcatccggataaccccgtgggacaattttgctactggcactttagtcgcatcgcc

SEQ ID NO: 195994 - DNA, 75 bp, synthetic construct
  source 1..75: mol_type = other DNA
caacagtactatcgatcgatggggttatggtgtcaccagcgctctttctccttatcatgaaaaccgtatcgcgct

SEQ ID NO: 195995 - DNA, 75 bp, synthetic construct
  source 1..75: mol_type = other DNA
acgcaaggtggctataagatttatgaaacgactgtgccgccaggcgctttcgtcattgatgatctgagtccgtca

SEQ ID NO: 195996 - DNA, 75 bp, synthetic construct
  source 1..75: mol_type = other DNA
gtcactcactccaatgtccgcatccctgaagataaaacataccaggggcagagctatcgtttatcgtggaacaaa

SEQ ID NO: 195997 - DNA, 75 bp, synthetic construct
  source 1..75: mol_type = other DNA
ccgatattaactatgcactgcgacaaacgctggtgctatgtttgcccgtggccgttgggttaatgcttggcgaat

SEQ ID NO: 195998 - DNA, 75 bp, synthetic construct
  source 1..75: mol_type = other DNA
gcggcaggtacgctggagcagcatttacagcgggttattggtcatctgaacaccatgcacaccatttcgtcgatg

SEQ ID NO: 195999 - DNA, 75 bp, synthetic construct
  source 1..75: mol_type = other DNA
actaatgacggtattgctggtgacgcaaaatggctacggcgctactcgcctgcggattgtgaatcgttctgtagg

SEQ ID NO: 196000 - DNA, 75 bp, synthetic construct
  source 1..75: mol_type = other DNA
tacaatgcacaccatttcagcgatggcctggcgacagcgaccgcatcacgggatttggttgagtcggaagttacg

SEQ ID NO: 196001 - DNA, 75 bp, synthetic construct
  source 1..75: mol_type = other DNA
ctaaattactccccgcatcgctgctggccgccatttttaccttaagtctggcaggatacatgccagtctgggaac

SEQ ID NO: 196002 - DNA, 75 bp, synthetic construct
  source 1..75: mol_type = other DNA
aaccgtggtcgggttaatcattgcgggcgtggcgctgcactttaaaattcccgaaggttacaccctgaccttgat

SEQ ID NO: 196003 - DNA, 75 bp, synthetic construct
  source 1..75: mol_type = other DNA
ccacctacgttgactataaaatcaacctgttggatgaagatgacagcttctacgctgccaacggcatctctaccg

SEQ ID NO: 196004 - DNA, 75 bp, synthetic construct
  source 1..75: mol_type = other DNA
tccgtttcacgattgggatcgccagtccattttattttcctggccctggtggtactgaatcttgtcgctggtttt

SEQ ID NO: 196005 - DNA, 75 bp, synthetic construct
  source 1..75: mol_type = other DNA
acacgctggacgtggttaagcagctggcagagcagaccgccagccatacgcacagcaacacgggcaccccacaga

SEQ ID NO: 196006 - DNA, 75 bp, synthetic construct
  source 1..75: mol_type = other DNA
cttctccaccgaaaaagacggtattggcgttgaagtggcgctgcagtggaacgatggcttccaggaaaacatcta

SEQ ID NO: 196007 - DNA, 75 bp, synthetic construct
  source 1..75: mol_type = other DNA
cgttggtgtttcggtagtaaacgccctgtcgcaaaaactggagctggttatccagcgcgagggtaaaattcaccg

SEQ ID NO: 196008 - DNA, 75 bp, synthetic construct
  source 1..75: mol_type = other DNA
tgtttacgactaaagtgacggaagcgtacttgtctttattagcgcatggcgcgaaagcgacagtggcgaaatatt

SEQ ID NO: 196009 - DNA, 75 bp, synthetic construct
  source 1..75: mol_type = other DNA
aaccaatgctgacgcgttcgtacagacggcgacgaaagcagggcagacccggagcaagtaccagaatataattgc

SEQ ID NO: 196010 - DNA, 75 bp, synthetic construct
  source 1..75: mol_type = other DNA
cagactccggtttataccgcagtaccgctgccggtaccgatggccggccatgactccggtatgttccagtttccg

SEQ ID NO: 196011 - DNA, 75 bp, synthetic construct
  source 1..75: mol_type = other DNA
gattacatctggtaccagttgcctgatggttcgctttacgtcggcggtgctgaaaagtcactgtttaccggtcgt

SEQ ID NO: 196012 - DNA, 75 bp, synthetic construct
  source 1..75: mol_type = other DNA
caatgacacaatggccatcacatggacaccgcgcaatcgcgtcactggccagcccctgcaaaaaacaccattaca

SEQ ID NO: 196013 - DNA, 75 bp, synthetic construct
  source 1..75: mol_type = other DNA
atcgatattccggcagaattcagccagggcgcagcgggtggtaacacaatgaccgttccgctgatccagagcctg

SEQ ID NO: 196014 - DNA, 75 bp, synthetic construct
  source 1..75: mol_type = other DNA
atgttcatttcagcatcccactttgcgcaagatagccagctggctggaggaaaacagcggaattgttgtcagtgt

SEQ ID NO: 196015 - DNA, 75 bp, synthetic construct
  source 1..75: mol_type = other DNA
tacccacggtgtggatactgactatccgctggatcacgaatttatcaccggtggcgaatatcgtcgtatctgcac

SEQ ID NO: 196016 - DNA, 75 bp, synthetic construct
  source 1..75: mol_type = other DNA
gatgccggaaatcattgaacgcggtcacgtctacattgcccagccgccgctgtacaaagtgaagaaaggcaagca

SEQ ID NO: 196017 - DNA, 75 bp, synthetic construct
  source 1..75: mol_type = other DNA
cttctccaccgaaaaagacggtatcggcgttgaagttgcattgcagtggaatgatggcttccaggaaaacatcta

SEQ ID NO: 196018 - DNA, 75 bp, synthetic construct
  source 1..75: mol_type = other DNA
ccactgaaaaagacggtattggcgtcgaagtggcgttgcagtggaacgatggcttccaggaaaacatctactgct

SEQ ID NO: 196019 - DNA, 75 bp, synthetic construct
  source 1..75: mol_type = other DNA
ggtctgaaatttggtgacttgggttcattcgactatggtcgtaattatggcgtaatgtacgacatcgaaggctgg

SEQ ID NO: 196020 - DNA, 75 bp, synthetic construct
  source 1..75: mol_type = other DNA
atgaaaagcaaagtactggcactcttaattcctgccctgctcgctgcaggtgctgcacatgcagtcgaagtttat

SEQ ID NO: 196021 - DNA, 75 bp, synthetic construct
  source 1..75: mol_type = other DNA
ggaacagtacattaaagacgatgaggcgatggatcagtaccaaatctccatcgcgctggatggtgcttctttgca

SEQ ID NO: 196022 - DNA, 75 bp, synthetic construct
  source 1..75: mol_type = other DNA
ctatgaaggcggtatcaaggcgttcgttgaatatctgaacaaaaacaaaacgccgatccacccgaacatcttcta

SEQ ID NO: 196023 - DNA, 75 bp, synthetic construct
  source 1..75: mol_type = other DNA
gccgtcgtatgctgcgcgttaccgttaaggatgcgattgccgccgaccagctgttcaccacgctgatgggcgacg

SEQ ID NO: 196024 - DNA, 75 bp, synthetic construct
  source 1..75: mol_type = other DNA
ggctacagcaaaaaagccaaagttagcgccaccggtgacgatgcgcgtgaaggcctgattgcggtcgtttccgta

SEQ ID NO: 196025 - DNA, 75 bp, synthetic construct
  source 1..75: mol_type = other DNA
attctggcgaaacgtctgcgtgagttgtcgttcctcaactccggcgtttccattcgtctgcgcgacaagcgcgac

SEQ ID NO: 196026 - DNA, 75 bp, synthetic construct
  source 1..75: mol_type = other DNA
gcgtttctggccaagccttgaaactttcaccaatgtgaccgagttcgaatacgatattctggcgaagcgtctgcg

SEQ ID NO: 196027 - DNA, 75 bp, synthetic construct
  source 1..75: mol_type = other DNA
ggcgacgcttatcaccgcgcttggctgtggtatcggtcgtgacgagtacaacccggacaaactgcgttatcacaa

SEQ ID NO: 196028 - DNA, 75 bp, synthetic construct
  source 1..75: mol_type = other DNA
ttgtgatcaaacccaatgccaacagccgcccaaccggggataccactggctatctggcaaacccgaaggaggtgt

SEQ ID NO: 196029 - DNA, 75 bp, synthetic construct
  source 1..75: mol_type = other DNA
gagttctggttggtgagctggatgatgagcagatggctgcattgtccagattgggtaacgattataggccaacaa

SEQ ID NO: 196030 - DNA, 75 bp, synthetic construct
  source 1..75: mol_type = other DNA
tgtggtcgggaagtgaaatttacccttgaagtacttcggggagatagtgttgagaaggcctctcgggtatggtct

SEQ ID NO: 196031 - DNA, 75 bp, synthetic construct
  source 1..75: mol_type = other DNA
aaaacagattctttcgttgcatagtaaagttaaagaagcatttgaaggcatggtttcagattttgcccgtactaa

SEQ ID NO: 196032 - DNA, 75 bp, synthetic construct
  source 1..75: mol_type = other DNA
ttttatttataagggtcattgcgaattatctgatgcaaagtggtaatgactccaacttactgatagtgttttatg

SEQ ID NO: 196033 - DNA, 75 bp, synthetic construct
  source 1..75: mol_type = other DNA
ataaatttaattttccagttaagccaataaaatatagtaatcaggctaaagaggtttcacttctagacccaagcg

SEQ ID NO: 196034 - DNA, 75 bp, synthetic construct
  source 1..75: mol_type = other DNA
aattggcgcagtcctggcgaacacattgagcaacctgatttcagccgtgttgctcatctatttgttccgcctgta

SEQ ID NO: 196035 - DNA, 75 bp, synthetic construct
  source 1..75: mol_type = other DNA
caacgctgccagcccgaacaaagaactggcaaaagagttcctcgaaaactacctgctgactgacgaagggctgga

SEQ ID NO: 196036 - DNA, 75 bp, synthetic construct
  source 1..75: mol_type = other DNA
cctatcaggatgaacttgcgaaagatccacgtattgccgccaccatggataacgctcagaaaggtgaaattatgc

SEQ ID NO: 196037 - DNA, 75 bp, synthetic construct
  source 1..75: mol_type = other DNA
ccacgatcagaagaaagcgggactaatctttgaagctgaagaggtcattagtcttttaacatccgtactgaaaca

SEQ ID NO: 196038 - DNA, 75 bp, synthetic construct
  source 1..75: mol_type = other DNA
atgaagcgtgcgcctgtcattccaaaacatacgattaagactcaaccgcttgaagatactccgtcatcggcacca

SEQ ID NO: 196039 - DNA, 75 bp, synthetic construct
  source 1..75: mol_type = other DNA
gggcgaacatgcgtctggtggcgccagcggtaatgagctggttactggcaaaaacgctattgctgctgtttgcct

SEQ ID NO: 196040 - DNA, 75 bp, synthetic construct
  source 1..75: mol_type = other DNA
tattactttccagacgactgattacaaagaacatgaaccgttctttaaagcattgatggaaggattgtctgtcgt

SEQ ID NO: 196041 - DNA, 75 bp, synthetic construct
  source 1..75: mol_type = other DNA
atggataaaccaaaggcgtactaccgcctgcttctccccagctttcttttactttcggcctgtaccgttgatatc

SEQ ID NO: 196042 - DNA, 75 bp, synthetic construct
  source 1..75: mol_type = other DNA
gacaaaaagtcgtggttttgttcggaatttgtcacggatgcatttgccaaagccgggcatccgcttacgctggcg

SEQ ID NO: 196043 - DNA, 75 bp, synthetic construct
  source 1..75: mol_type = other DNA
tgcatttgccaaagccgggcatccgcttacactggcgcaatcgggctggattagccctgccgatctgatgcatat

SEQ ID NO: 196044 - DNA, 75 bp, synthetic construct
  source 1..75: mol_type = other DNA
atgctggaactgaatttttcccagacgttgggcaatcattgcctggccattaatgaaacgctgcccgccaatggt

SEQ ID NO: 196045 - DNA, 75 bp, synthetic construct
  source 1..75: mol_type = other DNA
atgtcagccattcgctggatgagatcctccatctggcagacagagtgatggtactggaaaacggtcaggtgaaag

SEQ ID NO: 196046 - DNA, 75 bp, synthetic construct
  source 1..75: mol_type = other DNA
ttctgaaagtgtcgatactggaacatcacccgcattacgcaatgaccgcgctggcgctgggcgatcagcatttgt

SEQ ID NO: 196047 - DNA, 75 bp, synthetic construct
  source 1..75: mol_type = other DNA
aattaagtaccgtgtttcaccagtggatgggcggctttccggaagacgaatcgaaagcgttcgccattatctcct

SEQ ID NO: 196048 - DNA, 75 bp, synthetic construct
  source 1..75: mol_type = other DNA
cagagctatggctataccgactatgaattgagtaccgtgtttcaccagtggatgggcggctttccggaagacgaa

SEQ ID NO: 196049 - DNA, 75 bp, synthetic construct
  source 1..75: mol_type = other DNA
acagttcaattcactacatggtgttgtaaaggaaagctttaataaaatggtatcccaacatgccattaataggtg

SEQ ID NO: 196050 - DNA, 75 bp, synthetic construct
  source 1..75: mol_type = other DNA
caccgcgtttgccaataaaatcaaagatagcggttataactatcgcggcattgtcgaatttattccctttatggt

SEQ ID NO: 196051 - DNA, 75 bp, synthetic construct
  source 1..75: mol_type = other DNA
ggcagcatattggaactgggtagtgagtccaattgattacaaaaaatacagagctttcacatatttatcaggcaa

SEQ ID NO: 196052 - DNA, 75 bp, synthetic construct
  source 1..75: mol_type = other DNA
atgcagagttcatcgatatgctcgatgcaccagtcgaggatgagcctgccattaataaactactggcaaggaaac

SEQ ID NO: 196053 - DNA, 75 bp, synthetic construct
  source 1..75: mol_type = other DNA
ggccgcgtatgaccttgctaacgggaaatacactgcacaggatgccaccacggcgcgaaaagggcttgtccagct

SEQ ID NO: 196054 - DNA, 75 bp, synthetic construct
  source 1..75: mol_type = other DNA
agcacgaacagtcacgacgtcacccggacgcctcgctgaccgcaaaaggttttactcagttaagcagtgcgacca

SEQ ID NO: 196055 - DNA, 75 bp, synthetic construct
  source 1..75: mol_type = other DNA
aagtacgtgccggtagcgggaaaaagttcacggtcagcagcagcaatacatccacgaaggaagccgcattcaatt

SEQ ID NO: 196056 - DNA, 75 bp, synthetic construct
  source 1..75: mol_type = other DNA
tcgctgcaacgccgaaagcggtaaaggcagcatatgaccttgctaacgggaaatacactgcacaggacgccacca

SEQ ID NO: 196057 - DNA, 75 bp, synthetic construct
  source 1..75: mol_type = other DNA
aataagccaacagcatcagagatcggggcgttaccgtcagatgggacagcagtatcgtcagttaatctggcttca

SEQ ID NO: 196058 - DNA, 75 bp, synthetic construct
  source 1..75: mol_type = other DNA
ggctgaccggcttcacccggcacgccgtatcctggggcgtgtgtcatccgaatatctactacttccataatctga

SEQ ID NO: 196059 - DNA, 75 bp, synthetic construct
  source 1..75: mol_type = other DNA
tgctggaaggcattctcctgtctgaatgtgaacgtctgaggcagcgttctctggcaaataaactgatcagcctct

SEQ ID NO: 196060 - DNA, 75 bp, synthetic construct
  source 1..75: mol_type = other DNA
gcgtatgaccttgctaacgggaaatacactgcacaggatgccaccacagcgcgaaaaggtcttgtccagctcagt

SEQ ID NO: 196061 - DNA, 75 bp, synthetic construct
  source 1..75: mol_type = other DNA
catcaacagcgattctgaaacgctggctgcaacgccaaaagcggtgaagtctgcctatgataatgctgaaaaacg

SEQ ID NO: 196062 - DNA, 75 bp, synthetic construct
  source 1..75: mol_type = other DNA
aacgccgaaagcggtaaaggccgcttatgatcttgctaacgggaaatatactgcgcaggatgccaccacagcgcg

SEQ ID NO: 196063 - DNA, 75 bp, synthetic construct
  source 1..75: mol_type = other DNA
gaaacgcttgcggcaacaccaaaggcggttaagacagcgtatgaccttgctaacgggaaatacactgcacaggat

SEQ ID NO: 196064 - DNA, 75 bp, synthetic construct
  source 1..75: mol_type = other DNA
gaatattttaaatggcgcatcaggtctggcagcacaacaaaagatctgatgacgcttaagtctgatgcactacgg

SEQ ID NO: 196065 - DNA, 75 bp, synthetic construct
  source 1..75: mol_type = other DNA
acagcacgtctgaaacactggctgcaacgccaaaggcggtaaaggccgcatatgaccttgctaacgggaaatata

SEQ ID NO: 196066 - DNA, 75 bp, synthetic construct
  source 1..75: mol_type = other DNA
tagtggatacgctgcgatggggactgaaatgcgacatcacaccacatttcggggcccgtctggtgcaggaaggca

SEQ ID NO: 196067 - DNA, 75 bp, synthetic construct
  source 1..75: mol_type = other DNA
cggctgcattatctggctgaccgggccagcatcaccggtaaattcagtgacgtcgaatgccgtaagctggatgaa

SEQ ID NO: 196068 - DNA, 75 bp, synthetic construct
  source 1..75: mol_type = other DNA
ggttttacctgcgaagccgatacccttggtagttgcggctacgtatatatcgccatttatcccactcaacgctaa

SEQ ID NO: 196069 - DNA, 75 bp, synthetic construct
  source 1..75: mol_type = other DNA
aaccgttcgttggcgtgctgagcgcaggtattaacgccgccagtccgaacaaagagctggcgaaagagttcctcg

SEQ ID NO: 196070 - DNA, 75 bp, synthetic construct
  source 1..75: mol_type = other DNA
ctggcgaaagagttcctcgaaaactatctgttgactgacgagggactggaagccgtcaataaagacaaaccgctg

SEQ ID NO: 196071 - DNA, 75 bp, synthetic construct
  source 1..75: mol_type = other DNA
gatgatgttttccgcctcgactctcgccaaaatcgaagaaggtaaactggtaatctggattaacggcgataaagg

SEQ ID NO: 196072 - DNA, 75 bp, synthetic construct
  source 1..75: mol_type = other DNA
ggaaaggataccttcacgaaaaatatcggtgcctgtcgtgcttatagcggcgctttgagcactgaagccggaaac

SEQ ID NO: 196073 - DNA, 75 bp, synthetic construct
  source 1..75: mol_type = other DNA
gccaccacggcgcggaaaggtcttgttcagctcagtagcgccaccaacagtgattctgaaacgctggccgcaaca

SEQ ID NO: 196074 - DNA, 75 bp, synthetic construct
  source 1..75: mol_type = other DNA
ttggtggtgctgccacatacaaacctgcgaacaatggcatgacatggacacatcaggcaccgtccgggtgtgtat

SEQ ID NO: 196075 - DNA, 75 bp, synthetic construct
  source 1..75: mol_type = other DNA
cagcattaccggtgaattcagtaacgcagaatctttgaagttggatgaagtattcccacgttttatcagccagat

SEQ ID NO: 196076 - DNA, 75 bp, synthetic construct
  source 1..75: mol_type = other DNA
gcattcccgcaatttatcagtcagatggaatcaatgctgactactggtgaaatgaatcctcgccatgcccactgt

SEQ ID NO: 196077 - DNA, 75 bp, synthetic construct
  source 1..75: mol_type = other DNA
agcgggatattacaccgcgcatgggggcacgtctggtacaggagggcaaccggctgcactatctggctgaccggg

SEQ ID NO: 196078 - DNA, 75 bp, synthetic construct
  source 1..75: mol_type = other DNA
acacccatgggaatttttattataggcgttgtagttttatgggtattttctatagaaaatatccaaattagtaat

SEQ ID NO: 196079 - DNA, 75 bp, synthetic construct
  source 1..75: mol_type = other DNA
gaggaatttatgaatctatctattatgttaaaagagggaaagttaaatatcaatgatattgaaagattagctatt

SEQ ID NO: 196080 - DNA, 75 bp, synthetic construct
  source 1..75: mol_type = other DNA
atgaaccttgaagccttaccgaaatattactccccaaaatctccaaaattgagcgatgacgcaccggcgacaggc

SEQ ID NO: 196081 - DNA, 75 bp, synthetic construct
  source 1..75: mol_type = other DNA
ggaaggcagtcctcttggctgtacttacctatgtggcaaccagactgtttaagccaatgaaacatgctgacgttc

SEQ ID NO: 196082 - DNA, 75 bp, synthetic construct
  source 1..75: mol_type = other DNA
tttcttattcatactgttaggcttatcctcccttatgatttcgctatataccttcggaaggtgctggtcaatatt

SEQ ID NO: 196083 - DNA, 75 bp, synthetic construct
  source 1..75: mol_type = other DNA
gcaaccatacctttttatgctgtcacttatatatctatttacactaagatatactttaaaagtatttttatgtga

SEQ ID NO: 196084 - DNA, 75 bp, synthetic construct
  source 1..75: mol_type = other DNA
gaagtgtcgggttataaccgtgttgatccgcagtgggcaattcactatagcctggcttacaccagttggagtcag

SEQ ID NO: 196085 - DNA, 75 bp, synthetic construct
  source 1..75: mol_type = other DNA
tttccattccggaccaggaccgtttctggctgagtgcaggtacgacttacgcatttaataaagatgcttcagtcg

SEQ ID NO: 196086 - DNA, 75 bp, synthetic construct
  source 1..75: mol_type = other DNA
cgcatcgcgttgggtacaacttattactacgatgataactggaccttccgtaccggcattgccttcgatgacagc

SEQ ID NO: 196087 - DNA, 75 bp, synthetic construct
  source 1..75: mol_type = other DNA
tcagtggtacaaaggatatgcagatgtcattgataaactggttacaaagtgctggcaggaggaagcttacgctga

SEQ ID NO: 196088 - DNA, 75 bp, synthetic construct
  source 1..75: mol_type = other DNA
aactatggtctggcgacagagtttaatgacacttatgcaggcggttctgtcggtggtacaaccgacctcgaaacc

SEQ ID NO: 196089 - DNA, 75 bp, synthetic construct
  source 1..75: mol_type = other DNA
ccagttccggctcagaatcgttctatctccattccggaccaggaccgtttctggctgagtgctgagagatcccct

SEQ ID NO: 196090 - DNA, 75 bp, synthetic construct
  source 1..75: mol_type = other DNA
ggggtacgaaatcaagttgattcaacatccactattcggccctgatccggtgaaggtatttgcaataaagtgtga

SEQ ID NO: 196091 - DNA, 75 bp, synthetic construct
  source 1..75: mol_type = other DNA
aacactggagctggtgaagcaagccgcaggcacgttgcaactggacattaccgctcgtctgtcgatgagtctcaa

SEQ ID NO: 196092 - DNA, 75 bp, synthetic construct
  source 1..75: mol_type = other DNA
gtcaagggttattaagatatctaaatatgaacgagaaaactttaggtcaacgaattagagaaagacgcaagcagg

SEQ ID NO: 196093 - DNA, 75 bp, synthetic construct
  source 1..75: mol_type = other DNA
taaagcgatggagcacaacggcggcagcctgacctataccgtgcttgaagacctgttaaaagatgcagaagaggc

SEQ ID NO: 196094 - DNA, 75 bp, synthetic construct
  source 1..75: mol_type = other DNA
gcaactggctctgttgcaagcccacggagttgatctttcgcgcgtcaccgttggtcactgcgatctgaaagacaa

SEQ ID NO: 196095 - DNA, 75 bp, synthetic construct
  source 1..75: mol_type = other DNA
aatcatcgaagcagtaggtggtttcgacaatatcgaagatgtggatgcctgcgcaacacgcctgaggctggcgct

SEQ ID NO: 196096 - DNA, 75 bp, synthetic construct
  source 1..75: mol_type = other DNA
ttaacttcaagaagttgcagaaattttcttctgctctgatgttaccaatcgccattcttccggcggcgggtttga

SEQ ID NO: 196097 - DNA, 75 bp, synthetic construct
  source 1..75: mol_type = other DNA
tggagctggaaagggatcttgcctcacaaagtgaggagctcgttgacctgcaggcacatcccttttttaacctgt

SEQ ID NO: 196098 - DNA, 75 bp, synthetic construct
  source 1..75: mol_type = other DNA
catctgtttacagatgagttcagactagaacggcgcctgcagggacacggcctgggtagctggatcacgcagcag

SEQ ID NO: 196099 - DNA, 75 bp, synthetic construct
  source 1..75: mol_type = other DNA
atggcaaataaacacctgcatttgaatttaaaaggagaatacttccacgctatccgggcggggaagaaggttgag

SEQ ID NO: 196100 - DNA, 75 bp, synthetic construct
  source 1..75: mol_type = other DNA
tcagatcctcgaaggcttaaagattggagagaatgttgtgttgtcgttgccggaagagaaagcaaccgaagaaga

SEQ ID NO: 196101 - DNA, 75 bp, synthetic construct
  source 1..75: mol_type = other DNA
ccgcgccgctttagttctgccctggctaattctttaaaccagttaccaagggttagaccgtcagaagttgccgcc

SEQ ID NO: 196102 - DNA, 75 bp, synthetic construct
  source 1..75: mol_type = other DNA
gaagcacgccagcaatctccggctggctgcgtgatggtattcgccgcccgtattcgtcagggggtgtgccatgcc

SEQ ID NO: 196103 - DNA, 75 bp, synthetic construct
  source 1..75: mol_type = other DNA
ctgtaagccaaacttacaagttgaacgagctgtcgggcaactatccggtaactccggatggttggataagctgta

SEQ ID NO: 196104 - DNA, 75 bp, synthetic construct
  source 1..75: mol_type = other DNA
agtcttaaatatggagacgataacggcaaccatcctcaaactaatgaatatggtctgattagcaatgtcacacac

SEQ ID NO: 196105 - DNA, 75 bp, synthetic construct
  source 1..75: mol_type = other DNA
tgcgaatggcggcagaacgtgcaactcaagcaatggaacgcctgttaatgttgccagttgatgatgatttgttaa

SEQ ID NO: 196106 - DNA, 75 bp, synthetic construct
  source 1..75: mol_type = other DNA
gtgttctattgaaagttccagattttcaatggttaatgaaaataatattagcattcacattggaaaaaactgcct

SEQ ID NO: 196107 - DNA, 75 bp, synthetic construct
  source 1..75: mol_type = other DNA
cgcggttgatgctgttgccgctattgcagaggtgagaggctggaacgcctgccgcgctgccatgcttcatagtgc

SEQ ID NO: 196108 - DNA, 75 bp, synthetic construct
  source 1..75: mol_type = other DNA
atcctcctggttcaggacgcagagccaaacttcgatgtaaatggcaactctccggtaactccggatggttggata

SEQ ID NO: 196109 - DNA, 75 bp, synthetic construct
  source 1..75: mol_type = other DNA
ctttgggcaaccattgcctgaccattaatgaaaagctgccagctaatggcatcaccgctatctttggtgtttccg

SEQ ID NO: 196110 - DNA, 75 bp, synthetic construct
  source 1..75: mol_type = other DNA
aggtaaaacgctgtgggcgcgtatcagcccgtgggccagggatgaactggcgatcaaacctggcctgtggctgta

SEQ ID NO: 196111 - DNA, 75 bp, synthetic construct
  source 1..75: mol_type = other DNA
agggatctgcctttcgccagaaaagcgtcgcgttggttatgtgtttcaggatgcgcggctgtttccgcattacaa

SEQ ID NO: 196112 - DNA, 75 bp, synthetic construct
  source 1..75: mol_type = other DNA
cgagctatcgggcaactctccggtaactccggatggttggataagctgtagtgagcgaatgcccgctcaagatga

SEQ ID NO: 196113 - DNA, 75 bp, synthetic construct
  source 1..75: mol_type = other DNA
gtgcttatttcggtgaatttcgatagctctctggttgaaccgctaatatgctccgcacgctataccggaagcacc

SEQ ID NO: 196114 - DNA, 75 bp, synthetic construct
  source 1..75: mol_type = other DNA
atgaattttctggtggagggggaggagttccactctacgccacccctccagcgccagtagtaccggaagaaaaac

SEQ ID NO: 196115 - DNA, 75 bp, synthetic construct
  source 1..75: mol_type = other DNA
gccattgttgcgacttcatatcaacgtcttatagcccatttttataatcatcttatttttgcgggtgatgctgcc

SEQ ID NO: 196116 - DNA, 75 bp, synthetic construct
  source 1..75: mol_type = other DNA
cagcgtgcagagggtgtaagggtaaaggcattgccctagatgaaaaaagaacccgatttcatggtacaccagttt

SEQ ID NO: 196117 - DNA, 75 bp, synthetic construct
  source 1..75: mol_type = other DNA
gtgggtgaaggaattatgtcagcattgccatggtaagggagaagtcagcacggcttgcagagggtgtaagggtaa

SEQ ID NO: 196118 - DNA, 75 bp, synthetic construct
  source 1..75: mol_type = other DNA
tctgctcaattacgcgatggcactggataacccgacattgaacaaattgagtgaagaaacccggctacagatcat

SEQ ID NO: 196119 - DNA, 75 bp, synthetic construct
  source 1..75: mol_type = other DNA
gtggggaatctgttatcaaggaagagtgggtgaaggaactatgtcagcattgccatggtaagggagaagtcagca

SEQ ID NO: 196120 - DNA, 75 bp, synthetic construct
  source 1..75: mol_type = other DNA
ttattcctggcaaaagttggtgttcaggatcctcagtttgcgattgaaggtctgctcaattacgcgatggcaatg

SEQ ID NO: 196121 - DNA, 75 bp, synthetic construct
  source 1..75: mol_type = other DNA
atgaaccttgaagctttaccaaaatattactccccaaaatctccaaaattgagtgatgacgcaccggcgacaggc

SEQ ID NO: 196122 - DNA, 75 bp, synthetic construct
  source 1..75: mol_type = other DNA
gtgaaaaacctgagatcgccattgttccccagagcctacaccggatcattaacggtaatgataaaaaagccatac

SEQ ID NO: 196123 - DNA, 75 bp, synthetic construct
  source 1..75: mol_type = other DNA
tcagtggtacaaaggatatgcagacgttattaataaactggttacaaagtgctggcaggaagaagcgtatgctga

SEQ ID NO: 196124 - DNA, 75 bp, synthetic construct
  source 1..75: mol_type = other DNA
ctgaccgaaagccaaaaaaaattcgtttttagtaatagctttggtcctgatattctcaaaggtgcagcaggttca

SEQ ID NO: 196125 - DNA, 75 bp, synthetic construct
  source 1..75: mol_type = other DNA
tctcgcgaacaactggagatggaaatcgacaaattcactattattcagcgcgataacacaactattgcctgcgcc

SEQ ID NO: 196126 - DNA, 75 bp, synthetic construct
  source 1..75: mol_type = other DNA
aaattgccgcgttccgcctgctgtcaaaaatgccgaccatggccgcgatgtgttacaagtattccattggtcagc

SEQ ID NO: 196127 - DNA, 75 bp, synthetic construct
  source 1..75: mol_type = other DNA
tggctcttcgggtgcgaacccgtttgcctgtatcgctgcaggtattgcttcactgtggggacctgcgcacggtgg

SEQ ID NO: 196128 - DNA, 75 bp, synthetic construct
  source 1..75: mol_type = other DNA
gcggcaacgccaaaggcggttaagacagcgtatgaccttgctaacgggaaatacactgcacaggatgccaccacg

SEQ ID NO: 196129 - DNA, 75 bp, synthetic construct
  source 1..75: mol_type = other DNA
cgcttacgcaacgggacaacgcgatgctgaacgagcgggtcatgaagttgagtcagcaggtgcagcacttgagcg

SEQ ID NO: 196130 - DNA, 75 bp, synthetic construct
  source 1..75: mol_type = other DNA
agggtgagcgctatctggaactggcagagaaacgcgaggctaacgaatcgtttgtttatggctggctggaggagc

SEQ ID NO: 196131 - DNA, 75 bp, synthetic construct
  source 1..75: mol_type = other DNA
ggcgagaacgggaaatttctggtgttgccggacgggatgaaaggggaaaacacctggacggtgggcgacaagaac

SEQ ID NO: 196132 - DNA, 75 bp, synthetic construct
  source 1..75: mol_type = other DNA
agcagctgcaacaggactatatgcagcggctgaacgaatgggagagcgccttcgtggaattgcagaagatgtttt

SEQ ID NO: 196133 - DNA, 75 bp, synthetic construct
  source 1..75: mol_type = other DNA
caggaagacaaccaggggcgttttctggtgctgccggaaggtgtgaaagcggacacgaactggacgttcgacaac

SEQ ID NO: 196134 - DNA, 75 bp, synthetic construct
  source 1..75: mol_type = other DNA
gacttgataaagaccagtacagcatcctgtgggtggagcatcgtgacaaggggcggcttgagctgaattttctga

SEQ ID NO: 196135 - DNA, 75 bp, synthetic construct
  source 1..75: mol_type = other DNA
atggccttattatgggagttagcttcctctcggtatgcagatgcaccagaaagaactctttcaccctggcgaggg

SEQ ID NO: 196136 - DNA, 75 bp, synthetic construct
  source 1..75: mol_type = other DNA
atgaaatcgaaagacgaaatttttgatgccgttcttggcaaagaaggcggctacgtcaatcacccggatgacaga

SEQ ID NO: 196137 - DNA, 75 bp, synthetic construct
  source 1..75: mol_type = other DNA
ccgtggcgatatgcgcgatttaactcgcgaacaggcactggaaatccttgaggctgattactggtacggaccacg

SEQ ID NO: 196138 - DNA, 75 bp, synthetic construct
  source 1..75: mol_type = other DNA
acgcgcgggcaggcgctggaaattcttgaggcggactactggtacggaccacgttttgaccaagtggcaaacctg

SEQ ID NO: 196139 - DNA, 75 bp, synthetic construct
  source 1..75: mol_type = other DNA
ggcggtccgaccaaatggggcattacggaaaaagtcgcccgcgcccacggataccgtggcgatatgcgcgattta

SEQ ID NO: 196140 - DNA, 75 bp, synthetic construct
  source 1..75: mol_type = other DNA
agagtgtcgcccctgtaaacagcacaatagagaacacgctggaactgttacgcagtaaggctaaatacgccaaaa

SEQ ID NO: 196141 - DNA, 75 bp, synthetic construct
  source 1..75: mol_type = other DNA
cagagcctgcaccggctgatttatggccctgacaaacgggccacgccgcccctggatgatgatctgatagtgaat

SEQ ID NO: 196142 - DNA, 75 bp, synthetic construct
  source 1..75: mol_type = other DNA
atgaaagttaacggcagcggcgggattgacggcagcgatgcgttaatggggccgaaggttcaggccaatgatatc

SEQ ID NO: 196143 - DNA, 75 bp, synthetic construct
  source 1..75: mol_type = other DNA
tcaaagatagcggttataactatcgcggcattgtcgaatttattccctttatggtgactcgccagatgtgctcac

SEQ ID NO: 196144 - DNA, 75 bp, synthetic construct
  source 1..75: mol_type = other DNA
cgagtgggagagcgccttcggggaatggcggaaaatgtcagggcttatgcaacgggagaacgcggcgctgagcga

SEQ ID NO: 196145 - DNA, 75 bp, synthetic construct
  source 1..75: mol_type = other DNA
acgagtaaacaacagctggctggccagcagctttccgttttatcccgactaaacagcaccagtggccggatggca

SEQ ID NO: 196146 - DNA, 75 bp, synthetic construct
  source 1..75: mol_type = other DNA
atgaaagtgaacgccagcggcgggattgacggcagcgacgcgttaatggggccgaaggttcaggccaatgatatc

SEQ ID NO: 196147 - DNA, 75 bp, synthetic construct
  source 1..75: mol_type = other DNA
agagatgcgtaaaaccaacgagttgtttgattcgaaagataacccgtttaacagcgattcggtgcgcatgatgca

SEQ ID NO: 196148 - DNA, 75 bp, synthetic construct
  source 1..75: mol_type = other DNA
atacagcgagaacaggagataagggacgaacggctgatacaggagcgcgaacatgcgttatccctggagcgtgag

SEQ ID NO: 196149 - DNA, 75 bp, synthetic construct
  source 1..75: mol_type = other DNA
cgatacgatggacgcgcactggaaaaccgtactgaaaatgagcgtgaaacgctggctgtggctgattatcgtctc

SEQ ID NO: 196150 - DNA, 75 bp, synthetic construct
  source 1..75: mol_type = other DNA
aaaggagcgttttatgagcaatcttttacggacgggcgcggagttcgagaaaaagctgaaagagagagccgaatc

SEQ ID NO: 196151 - DNA, 75 bp, synthetic construct
  source 1..75: mol_type = other DNA
gggaacgggcggtcgaagcagaacgcgctgagactggtgaaggagtaagtgccgatgaccgagctggaaaaacag

SEQ ID NO: 196152 - DNA, 75 bp, synthetic construct
  source 1..75: mol_type = other DNA
gagcgccttcacggatttgcagcatatgttcgagctgacacgacaggagaacgggcaactgagggaacagtgcga

SEQ ID NO: 196153 - DNA, 75 bp, synthetic construct
  source 1..75: mol_type = other DNA
gcaggaacgcgaacatgagttatctctggagcgggagcgtcagccggaaatccaggagcggacactggatggccc

SEQ ID NO: 196154 - DNA, 75 bp, synthetic construct
  source 1..75: mol_type = other DNA
gaatatgaccgggcagcgaaggtctgggcaaaagccaaccgcgaatcacatcacgaactgaatcaggaatggagt

SEQ ID NO: 196155 - DNA, 75 bp, synthetic construct
  source 1..75: mol_type = other DNA
cggtggcgcgatgacctaccgtgtgcataccgacacggaagataacccgttcagcggtgggttgttcagccagtt

SEQ ID NO: 196156 - DNA, 75 bp, synthetic construct
  source 1..75: mol_type = other DNA
aacgccgcagtgtactgaaccttgacggtcagttagtcgattacagccagggccgtaactataccgcccatctgg

SEQ ID NO: 196157 - DNA, 75 bp, synthetic construct
  source 1..75: mol_type = other DNA
ttacctgtccactcacctcacctgacgatataaaaaatttcagaaacagtttcaataaggccgtaagcgtcgtct

SEQ ID NO: 196158 - DNA, 75 bp, synthetic construct
  source 1..75: mol_type = other DNA
atggatacgggcatttaaatcaaagagtcctttcagttacctcctcccggagaacgaacatgaatgcatatggac

SEQ ID NO: 196159 - DNA, 75 bp, synthetic construct
  source 1..75: mol_type = other DNA
cgtaatatctccgtactgccccttaatgtttatgatcccccggaacgttttatcgcttacataaaaaaaaacaga

SEQ ID NO: 196160 - DNA, 75 bp, synthetic construct
  source 1..75: mol_type = other DNA
gcgtctgccctcgctgtttaacgggctggtcaaagcgatgaacgccgcgccgccggagagtgaagaaaaactcgc

SEQ ID NO: 196161 - DNA, 75 bp, synthetic construct
  source 1..75: mol_type = other DNA
tgcatccatcatgttcggtcatgatgaaagcaccccatcgaacctgtctgacaaagcctcaaaagagcttgctct

SEQ ID NO: 196162 - DNA, 75 bp, synthetic construct
  source 1..75: mol_type = other DNA
gtctggctttgctggcttgatttaatgaccggaaactgccttgacgactggacggagaatctgaaacggaaatca

SEQ ID NO: 196163 - DNA, 75 bp, synthetic construct
  source 1..75: mol_type = other DNA
gccccggaaaacagtaccctggcagtacagaaagacaaagaaagcacgatgcaggccgtgtatcagcaactcacc

SEQ ID NO: 196164 - DNA, 75 bp, synthetic construct
  source 1..75: mol_type = other DNA
ggcgataacaacgtcattattcgcgaagatattattgcgcaactggaaactgcgcagaaaatccgtgacatcttc

SEQ ID NO: 196165 - DNA, 75 bp, synthetic construct
  source 1..75: mol_type = other DNA
aaagctattttgtaaaacagcgcgatgaactggttgaactgacggcgatggattcctgggtacttaaccttaccc

SEQ ID NO: 196166 - DNA, 75 bp, synthetic construct
  source 1..75: mol_type = other DNA
cgctggtggtggcgactgataagggcgcaccagacgagcccaccaaaaccaacctcggcacatacagccacctca

SEQ ID NO: 196167 - DNA, 75 bp, synthetic construct
  source 1..75: mol_type = other DNA
gaaactgaatctttcaagacgtattcgaaatccgttcctgagcgaatagtgaaggaactaaaagaatatatcgaa

SEQ ID NO: 196168 - DNA, 75 bp, synthetic construct
  source 1..75: mol_type = other DNA
agtcgcggccatagctctacacgccaggctgcgacactggcccgtgaggctggagtcggtaagctaatcattacc

SEQ ID NO: 196169 - DNA, 75 bp, synthetic construct
  source 1..75: mol_type = other DNA
gatgataaaggctgtcagcatttattacgcgagtgccgggcaattttcccggcaacagaactggcgagcgatttc

SEQ ID NO: 196170 - DNA, 75 bp, synthetic construct
  source 1..75: mol_type = other DNA
gctttcgttgattgtggagggcgcgcttttacacccggcatctatgtttttacggtcgatgtttttggccgtaac

SEQ ID NO: 196171 - DNA, 75 bp, synthetic construct
  source 1..75: mol_type = other DNA
tgtgctgtgttttgaaatcacacagggaaaaacgaaagctgcggcacgtgttgtgcctgtacatagccttatcac

SEQ ID NO: 196172 - DNA, 75 bp, synthetic construct
  source 1..75: mol_type = other DNA
atgttcgcaaccgcattgttatctggcgttgcttttaacgcgcttgctgatgacccaaatcagggttctggtaaa

SEQ ID NO: 196173 - DNA, 75 bp, synthetic construct
  source 1..75: mol_type = other DNA
ctgacaacaccaatgtcactttgggtacgcctatcgttatcaacttcccgacaacgaacgcttatcaggagctga

SEQ ID NO: 196174 - DNA, 75 bp, synthetic construct
  source 1..75: mol_type = other DNA
ggctgcgatgtaggcgcaccggacgagcccaccaaaaccaacctcggcacacacagccacctcattttcgtgcag

SEQ ID NO: 196175 - DNA, 75 bp, synthetic construct
  source 1..75: mol_type = other DNA
ctcaggatcatctggcgtgatgcggctggctggattatggacgtgatggatagcggcggtgccgcgcttctctct

SEQ ID NO: 196176 - DNA, 75 bp, synthetic construct
  source 1..75: mol_type = other DNA
ccgtcccggcgttatcaggaggctggattggcagacaaacgcagtaaaatgctcacgatgtgggtgaccgaagat

SEQ ID NO: 196177 - DNA, 75 bp, synthetic construct
  source 1..75: mol_type = other DNA
catctatgcattatgtttctgcgatgttacattttaagccagtatacactccgctagcgctacgtgactggttca

SEQ ID NO: 196178 - DNA, 75 bp, synthetic construct
  source 1..75: mol_type = other DNA
atttcaaagctcgcatggagtcaccaacgaagacagcaacaacaggcaacgtccaggcacaagcaaactacgttc

SEQ ID NO: 196179 - DNA, 75 bp, synthetic construct
  source 1..75: mol_type = other DNA
ccgctgatggcctcggcgaccgctactttcctgttccgccagttctttatgacgctgccggatgagctggtggaa

SEQ ID NO: 196180 - DNA, 75 bp, synthetic construct
  source 1..75: mol_type = other DNA
atgattgagaaccgtccgtggctgacgatattcagccataccatgctgatcctcgggatcgcggtgatcctcttc

SEQ ID NO: 196181 - DNA, 75 bp, synthetic construct
  source 1..75: mol_type = other DNA
gccgcgcggatcgacggcgcgtcaccaatgcgtttcttttgcgacatcgtttttccgctgtccaaaaccaatctg

SEQ ID NO: 196182 - DNA, 75 bp, synthetic construct
  source 1..75: mol_type = other DNA
cggctgcaatggtcgaggcgaaagagtatcgctttatttcccccgtattttcttacgacaaaaccggtcaggtgc

SEQ ID NO: 196183 - DNA, 75 bp, synthetic construct
  source 1..75: mol_type = other DNA
gtggacaggatgcctcggcagcggtaaacaagatgctcgccaattctgcaaagttggcggcggctgacatgcgct

SEQ ID NO: 196184 - DNA, 75 bp, synthetic construct
  source 1..75: mol_type = other DNA
ccatgatgattatgaacaggctcaaagctacgctaaccagttaacaccacgtccgcctctcgttgtagttacgaa

SEQ ID NO: 196185 - DNA, 75 bp, synthetic construct
  source 1..75: mol_type = other DNA
tcataaagttgtagatagaatgcctacaaaaatgaaacttagctacttaaaaacattagcttactatgcgtctga

SEQ ID NO: 196186 - DNA, 75 bp, synthetic construct
  source 1..75: mol_type = other DNA
caagcttgcaggcatcaaccgcacccggatggaaaacctgtttcacaggttgtttgcacccgcaaggcttaacat

SEQ ID NO: 196187 - DNA, 75 bp, synthetic construct
  source 1..75: mol_type = other DNA
tcgttccgttattcgtcatcgatgaggctgtagcacgtatcaaggatggtagcatcattgggtatgtctatgacc

SEQ ID NO: 196188 - DNA, 75 bp, synthetic construct
  source 1..75: mol_type = other DNA
gacgctgccggatgagctggtggaagccgcgcggatcgacggcgcgtcgccaatgcgcttcttttgcgacattgt

SEQ ID NO: 196189 - DNA, 75 bp, synthetic construct
  source 1..75: mol_type = other DNA
ttttatcacgctgatgctgccggttgaagtgcgtattttcccgacggtggaagtcatcgccaacctgaaaatgct

SEQ ID NO: 196190 - DNA, 75 bp, synthetic construct
  source 1..75: mol_type = other DNA
gaagtgcgtattttcccgacggtggaagtgatcgccaatctgaaaatgctcgacagctacgccggtttaacgctg

SEQ ID NO: 196191 - DNA, 75 bp, synthetic construct
  source 1..75: mol_type = other DNA
gagatcctttcatctatcggcgtttactccgacacgatgacgcaggaaatcatccgtcgcatgtctggcgacgac

SEQ ID NO: 196192 - DNA, 75 bp, synthetic construct
  source 1..75: mol_type = other DNA
tcgccgcaacaccaaaagcggttaaggcagcatatgaccttgctaacgggaaatacactgcacaggacgccacca

SEQ ID NO: 196193 - DNA, 75 bp, synthetic construct
  source 1..75: mol_type = other DNA
gctcatcggagatttttgtcaccggaattaatctcaatatcattacgattgttcttatctcaatggcaatttgca

SEQ ID NO: 196194 - DNA, 75 bp, synthetic construct
  source 1..75: mol_type = other DNA
gattacggcaccgacgtggaagtcagcaagaatggcatcaggctgggtgactaccacgcgaaagtcatgtcagcg

SEQ ID NO: 196195 - DNA, 75 bp, synthetic construct
  source 1..75: mol_type = other DNA
ctgccgataacattggtggcgtatattacagaccggtgcagaaatacattaacgggacttggtataacgtggcgc

SEQ ID NO: 196196 - DNA, 75 bp, synthetic construct
  source 1..75: mol_type = other DNA
tcattacggatactggctgtggcaatattcatcttgctggcgctgttattgaggtaatgggcataaagtctgcaa

SEQ ID NO: 196197 - DNA, 75 bp, synthetic construct
  source 1..75: mol_type = other DNA
taatgctgacggcctctggcgataaatttgggtcatggaacggtttaaggccgctgactatcaataacgctaatg

SEQ ID NO: 196198 - DNA, 75 bp, synthetic construct
  source 1..75: mol_type = other DNA
gaagaggccgcgatgcgcgcagcggaagaactgagcaatgccgatatgctggcaaaacagattgaggctcgcaat

SEQ ID NO: 196199 - DNA, 75 bp, synthetic construct
  source 1..75: mol_type = other DNA
aagcgctggcaacggttggttttcgcgtcactgagatgactgaccgaaattggctcgcggcattaagtgctcagc

SEQ ID NO: 196200 - DNA, 75 bp, synthetic construct
  source 1..75: mol_type = other DNA
catcgctgaaaactctgccaatatgtacctgcttggccaaaaagccgaaaccatcaacgcgctcaaaaaagaagg

SEQ ID NO: 196201 - DNA, 75 bp, synthetic construct
  source 1..75: mol_type = other DNA
gcagattaaaaccggcgatgacgtcgatgtcgatatcgccatttgttcaatgatgggcgttgatccagaggatgt

SEQ ID NO: 196202 - DNA, 75 bp, synthetic construct
  source 1..75: mol_type = other DNA
acggttttaaaacctggctggataaaaccaccccgcttgccgcactcagcagcacccagaccggcggcaaaccac

SEQ ID NO: 196203 - DNA, 75 bp, synthetic construct
  source 1..75: mol_type = other DNA
atggagcaaatggcaggaggctatagctttttttgatatttggaattacccagttgcgactgaggaagacttggc

SEQ ID NO: 196204 - DNA, 75 bp, synthetic construct
  source 1..75: mol_type = other DNA
actggaccttccgtacgggtattgcattcgatgacagcccggttccggcagataaacgttctatctctatcccag

SEQ ID NO: 196205 - DNA, 75 bp, synthetic construct
  source 1..75: mol_type = other DNA
gtacccgcttcattaaccaatggtattaatactccggactctcaaattgctcatctgaaaggtgacgaatggggc

SEQ ID NO: 196206 - DNA, 75 bp, synthetic construct
  source 1..75: mol_type = other DNA
atgcaccggcagctatcggtccttacgtgcagggcgttgatctgggcaatatgatcatcacctccggtcagatcc

SEQ ID NO: 196207 - DNA, 75 bp, synthetic construct
  source 1..75: mol_type = other DNA
gcaactcgacagcattaccgaaaatgtcataccgcacgccatcacgagtatgtgcacagtgtttgctgaatcaga

SEQ ID NO: 196208 - DNA, 75 bp, synthetic construct
  source 1..75: mol_type = other DNA
ctgggaatgccggtaaatactcaccctgatgcgcaatttgctggcgcacttggcgcggcggcaattggtcaacga

SEQ ID NO: 196209 - DNA, 75 bp, synthetic construct
  source 1..75: mol_type = other DNA
tatgccaaggcaaaaattgagcgttacgccggttcgctggggccattgttgtctcaacagttgattgcccagggt

SEQ ID NO: 196210 - DNA, 75 bp, synthetic construct
  source 1..75: mol_type = other DNA
gtgttcagcttctcccgtcagatgcagggaacaggagaaatcgtcaccgcactgctcgccgcattgctggacggt

SEQ ID NO: 196211 - DNA, 75 bp, synthetic construct
  source 1..75: mol_type = other DNA
gcgatgtcaagcagtatggtctcggtgagatatttcagtacccgccagataaatacgcagactcgcgtcgtgtaa

SEQ ID NO: 196212 - DNA, 75 bp, synthetic construct
  source 1..75: mol_type = other DNA
tggaagaactgacggtatattgtgcgatggagctggctgcaggatattatggggccaccaaccgctatggcacga

SEQ ID NO: 196213 - DNA, 75 bp, synthetic construct
  source 1..75: mol_type = other DNA
tccgcgacatcttcttcagccagcagaacgggctgggcgcacagtttgccgtggaaaccgtatcgctttccggca

SEQ ID NO: 196214 - DNA, 75 bp, synthetic construct
  source 1..75: mol_type = other DNA
gctgtcagccgctggaccccctatgataaaccggtcattaatgcgcagcaggaactgagcaagctgcccatatac

SEQ ID NO: 196215 - DNA, 75 bp, synthetic construct
  source 1..75: mol_type = other DNA
ttctggcggatatgggattgtaccagggcgtccgcgtagggccgtatgtggagcaaacctacattcagcttcttg

SEQ ID NO: 196216 - DNA, 75 bp, synthetic construct
  source 1..75: mol_type = other DNA
tcaaactggtctggctctgctggcttgatttaatgaccggaaacagccttgacgactggacgaaaaacctgaaac

SEQ ID NO: 196217 - DNA, 75 bp, synthetic construct
  source 1..75: mol_type = other DNA
tggcagcagaacttgccgagtttgcaccacctgagaagaaaaaaggacgtccagccagcgaggaacgcatcatag

SEQ ID NO: 196218 - DNA, 75 bp, synthetic construct
  source 1..75: mol_type = other DNA
gatgcccggcgggatgaaggctcttaatctgaagaaaacgcttctgacttacagcagcttcatttctgccgttcg

SEQ ID NO: 196219 - DNA, 75 bp, synthetic construct
  source 1..75: mol_type = other DNA
tcatggacggtttctatgccgatctatccaatgatgcccctatgcgtgaactgctggtgatctttgtcgtttcac

SEQ ID NO: 196220 - DNA, 75 bp, synthetic construct
  source 1..75: mol_type = other DNA
aagacgaaacagcgcgtcgaattaccgatccagacatggggcctttattcagcgatgctctagaagagagcgatc

SEQ ID NO: 196221 - DNA, 75 bp, synthetic construct
  source 1..75: mol_type = other DNA
tcgttccgttatttgttattgatgaggctgttgcacgtatcaaggatggtagcattatcgagtatgtctatgacc

SEQ ID NO: 196222 - DNA, 75 bp, synthetic construct
  source 1..75: mol_type = other DNA
caagctcgcaggcatcaaccgcactcggatggaaaacctgtttcacaggttgttcgcacccgctcggcttaacat

SEQ ID NO: 196223 - DNA, 75 bp, synthetic construct
  source 1..75: mol_type = other DNA
cactgacgaatggggtagttacactagagagttaccgaaggagaagcatctgactggtacaatttttactcagcg

SEQ ID NO: 196224 - DNA, 75 bp, synthetic construct
  source 1..75: mol_type = other DNA
gcgcttccgaaagaaaagcacctgaccggcaagatttttactcagcgcattgagcgcaataacctgacgctgaga

SEQ ID NO: 196225 - DNA, 75 bp, synthetic construct
  source 1..75: mol_type = other DNA
gaaccgatcaaacgtgccgggagctactggcactgcttacacccttcaacatcggcatgctgaccagcgatgact

SEQ ID NO: 196226 - DNA, 75 bp, synthetic construct
  source 1..75: mol_type = other DNA
gttcctggaggtggtgcggcggcaggtgcaggcagtatcagtgccggggcgatggccggagcggctgttgccact

SEQ ID NO: 196227 - DNA, 75 bp, synthetic construct
  source 1..75: mol_type = other DNA
tggtgaccagcgatgactggggcagctacgccagagaagtgccgaaggagaaacacctgaccggcaaaatcttca

SEQ ID NO: 196228 - DNA, 75 bp, synthetic construct
  source 1..75: mol_type = other DNA
agtgggcgacatcgttaaaaccaccgtgtttgtgaaagatctgaacgacttcgcaaccgtaaacgccacttacga

SEQ ID NO: 196229 - DNA, 75 bp, synthetic construct
  source 1..75: mol_type = other DNA
cagctcaaccttaccaaagatcagtacgaggcaatcattgccttgcaaaaagagatagaagcggaaattaaaggt

SEQ ID NO: 196230 - DNA, 75 bp, synthetic construct
  source 1..75: mol_type = other DNA
aattgctgtaaggattctggctggggccaggatatcgggctgtccagttgcagcagtgatgaaaaggcactgggt

SEQ ID NO: 196231 - DNA, 75 bp, synthetic construct
  source 1..75: mol_type = other DNA
gcattgacaggggcgaataacacactggttgttattcctacgacaaattcagtaaaacagggcggttaccctgtg

SEQ ID NO: 196232 - DNA, 75 bp, synthetic construct
  source 1..75: mol_type = other DNA
aatactaaaattaaagaaaacactaggataagtctgaatgtggagcgttctgagttcggttcatacaatattgat

SEQ ID NO: 196233 - DNA, 75 bp, synthetic construct
  source 1..75: mol_type = other DNA
ccaacatgatgtacaagccgactcaggaagtgacggacggctgcggtttctccatcggtcaccagcagcagtttg

SEQ ID NO: 196234 - DNA, 75 bp, synthetic construct
  source 1..75: mol_type = other DNA
aacatattctattttacgcaaaaagaatattaaggtgatcgttacaactggaccaggaattgcgattgcagcaac

SEQ ID NO: 196235 - DNA, 75 bp, synthetic construct
  source 1..75: mol_type = other DNA
cgttagatcagcctagcggatctaaacgcttattggatattttgcgtacgggtctaaaagatccgcgtttcacca

SEQ ID NO: 196236 - DNA, 75 bp, synthetic construct
  source 1..75: mol_type = other DNA
ggtcatgaattttacgtcgatgaacgcgtgctggtgccgcgttcgccgattggtgaactgatcaacaataaattt

SEQ ID NO: 196237 - DNA, 75 bp, synthetic construct
  source 1..75: mol_type = other DNA
cagtaaatgagctgcaaaccattcaggacatgttgcgctggtcggttagccgcttcagcgcggcaaatatctggt

SEQ ID NO: 196238 - DNA, 75 bp, synthetic construct
  source 1..75: mol_type = other DNA
ccttcgctctacctgccgctggatatcccggaagatatgcgcaccgcgcgtctgacctccagcgaaaaacaccgt

SEQ ID NO: 196239 - DNA, 75 bp, synthetic construct
  source 1..75: mol_type = other DNA
agaacaaaaagggcgaggcggttgtcgtttccgaagttagtgaaggcataaggaagagcgttacttcacgactat

SEQ ID NO: 196240 - DNA, 75 bp, synthetic construct
  source 1..75: mol_type = other DNA
ggtatcgacaccgtgcaggcgatggcaggcaaagtgaactggacggtgtacatcctgcaaaccggtttctccttt

SEQ ID NO: 196241 - DNA, 75 bp, synthetic construct
  source 1..75: mol_type = other DNA
agcaaccgcagcacattttagatatgtgtaccggtagcggctgcatcgccattgcctgtgcttatgccttcccgg

SEQ ID NO: 196242 - DNA, 75 bp, synthetic construct
  source 1..75: mol_type = other DNA
tggctaccagtcgggatggtattcatttcgagaaacagggtgtgatcctcactccaccagaaggaatcatgcact

SEQ ID NO: 196243 - DNA, 75 bp, synthetic construct
  source 1..75: mol_type = other DNA
aggctaaaaaatatgttcgccgcgtcagagataaagttccgtattctgactgggataaagagcaacttcaggatg

SEQ ID NO: 196244 - DNA, 75 bp, synthetic construct
  source 1..75: mol_type = other DNA
ggaattacaacttccgatgggaaacctaacgataggcacagaagataacgatattgtttattttccccttgaaca

SEQ ID NO: 196245 - DNA, 75 bp, synthetic construct
  source 1..75: mol_type = other DNA
tatagctgggtaggttacgcggtgttgttagcgctggcgctgaacatctgttacgtgctgctgcgtcgcattacc

SEQ ID NO: 196246 - DNA, 75 bp, synthetic construct
  source 1..75: mol_type = other DNA
aaacgcgtcaccatggcttccggcattttgctgggattaggcttcttcctgaccgcgcattccaacaacctgatg

SEQ ID NO: 196247 - DNA, 75 bp, synthetic construct
  source 1..75: mol_type = other DNA
gcgccagcttgctgaactgaaaaatattgagcaacgagaagggaagaatttccactactattcactcgctgtcat

SEQ ID NO: 196248 - DNA, 75 bp, synthetic construct
  source 1..75: mol_type = other DNA
ggacgcaaccaccaactggatggttaaggactcttacccgcaatcattacgcgcttataacgaactggtcggtag

SEQ ID NO: 196249 - DNA, 75 bp, synthetic construct
  source 1..75: mol_type = other DNA
tcaagcctatatgttaaaagataacattgatccaacggaaacaatggaaatttctcaaaagctacgctctaaaga

SEQ ID NO: 196250 - DNA, 75 bp, synthetic construct
  source 1..75: mol_type = other DNA
atgattttaactattgcagaaaaaccggaattagctgaaattattgctaaagcgttcggcggtgaagtaaagaga

SEQ ID NO: 196251 - DNA, 75 bp, synthetic construct
  source 1..75: mol_type = other DNA
atgattttaactattgcagaaaaaccggaattagccgaaattattgctaaagctttcggcggtgaagtaaagaaa

SEQ ID NO: 196252 - DNA, 75 bp, synthetic construct
  source 1..75: mol_type = other DNA
gtgcagaggaaaacaccgattcggcttttgatgctatcagtgctatgaaagtagatgatgtaggggtttgtaatg

SEQ ID NO: 196253 - DNA, 75 bp, synthetic construct
  source 1..75: mol_type = other DNA
aaaaccttccttgaagatttgaagcgtgttagtcgttacgttaccgatcctcacatcaaacagcttttgttaagc

SEQ ID NO: 196254 - DNA, 75 bp, synthetic construct
  source 1..75: mol_type = other DNA
gtacagaggaaaacaccgattcggcttttgatgctatcagtgctgtgaacgtggatgatgtaggggtttgtaatg

SEQ ID NO: 196255 - DNA, 75 bp, synthetic construct
  source 1..75: mol_type = other DNA
acagcctatggtggcaacctgagtgcgccactggcacgtgtgatgatgacgaataccctctggctggcagctgtc

SEQ ID NO: 196256 - DNA, 75 bp, synthetic construct
  source 1..75: mol_type = other DNA
tgaagggcgcgcaagtgagcttcagcaatgtcggcgcagccggtgcgctgactgtggatactctgaccgccaata

SEQ ID NO: 196257 - DNA, 75 bp, synthetic construct
  source 1..75: mol_type = other DNA
ggacagtacaccgccgggcgctggagctttatcgggcagggctcaacgctgaatgtcggcgcgggcagcataatg

SEQ ID NO: 196258 - DNA, 75 bp, synthetic construct
  source 1..75: mol_type = other DNA
tcccatgattgattttagttctgtcaatataagcggttccaatccaggagtagccactcttgtcaatccacaata

SEQ ID NO: 196259 - DNA, 75 bp, synthetic construct
  source 1..75: mol_type = other DNA
ccgcgactggcaggttacagcgaaggctggtttaagttatcaatttgacctgcgtaatactggtgctaccacgta

SEQ ID NO: 196260 - DNA, 75 bp, synthetic construct
  source 1..75: mol_type = other DNA
tacgggacgttgtcaggcaatacctttaactggcaatacaacggtatggatgtcagcatggagcgtaaaaaggca

SEQ ID NO: 196261 - DNA, 75 bp, synthetic construct
  source 1..75: mol_type = other DNA
atcgctgtgacttcaccagaaaacgttcatgcctcggacgttggtaatattctcccctatcaaacttaccgtgat

SEQ ID NO: 196262 - DNA, 75 bp, synthetic construct
  source 1..75: mol_type = other DNA
tcaatcataataataaactcgtagtcgtatccgagcttagttgtggcataaaaaaaagatctcgaggctgtcgtt

SEQ ID NO: 196263 - DNA, 75 bp, synthetic construct
  source 1..75: mol_type = other DNA
caattacgggaaaaagctgacagtgaaatatcctggcgtcaggatgctgttgatgctgatatcgcaactgatgaa

SEQ ID NO: 196264 - DNA, 75 bp, synthetic construct
  source 1..75: mol_type = other DNA
ccggttcaatgggcgggtaacgttgaaaaatggttccacgcttactattaatgaacattttactggcggtataga

SEQ ID NO: 196265 - DNA, 75 bp, synthetic construct
  source 1..75: mol_type = other DNA
tcattatcagtatgatttgtttaatccgagcaagactgttgttcatgattttgctggggatacatatatcaggaa

SEQ ID NO: 196266 - DNA, 75 bp, synthetic construct
  source 1..75: mol_type = other DNA
acaactcgcattcttggtatctgggggcagagaccggctggcgtttctttttacctggcgaaactttcatccaac

SEQ ID NO: 196267 - DNA, 75 bp, synthetic construct
  source 1..75: mol_type = other DNA
acaactgggtgatgactctgttctgacgcaaccagtatcatttgaacagccagactgggaaacacgcaacttcac

SEQ ID NO: 196268 - DNA, 75 bp, synthetic construct
  source 1..75: mol_type = other DNA
cagctttgcgccgtgaactgaaagcgcgtgtcaccgttgccagtttttttaagcctatgtgcgctgcgctggagt

SEQ ID NO: 196269 - DNA, 75 bp, synthetic construct
  source 1..75: mol_type = other DNA
atgaaacgtccgaatatgcccgtacaggggcagggcttcgttcagcccgaagaactgagccaacagtatttcgcc

SEQ ID NO: 196270 - DNA, 75 bp, synthetic construct
  source 1..75: mol_type = other DNA
ggtggatgaatttggcgtaagttttgccggttgcgcagtcgttagccatgaacagcatattcaggcgtacagttc

SEQ ID NO: 196271 - DNA, 75 bp, synthetic construct
  source 1..75: mol_type = other DNA
tatgtttaagcgtcgaacgggctactcacccggtaaatttactcgtcgattaacgatgcatgattatgcaatcac

SEQ ID NO: 196272 - DNA, 75 bp, synthetic construct
  source 1..75: mol_type = other DNA
tacatcaccaccgtgaacatggcgaaagaactggcgatggtcgaacgtaccgaacagggccgcgccgttcgccag

SEQ ID NO: 196273 - DNA, 75 bp, synthetic construct
  source 1..75: mol_type = other DNA
caatccggtgagcgcaaaatctcgccaacgtgtagagcacgactacctgagtaccatcaacatggcgaaagaact

SEQ ID NO: 196274 - DNA, 75 bp, synthetic construct
  source 1..75: mol_type = other DNA
ataactcatcaatacataaactgaagcttgataatgctcaacttaattttgaacagcgtgagggattttccgccc

SEQ ID NO: 196275 - DNA, 75 bp, synthetic construct
  source 1..75: mol_type = other DNA
aatgccgacaactccatcgtaacgctgggcagtgaagacctttatatcgatcttaatgacgggaatggtgtgaaa

SEQ ID NO: 196276 - DNA, 75 bp, synthetic construct
  source 1..75: mol_type = other DNA
tttatttaccggcttcactgtcacacacactgacagcagcgcctccgccgatgctttcaaaggtaaaacgaagtc

SEQ ID NO: 196277 - DNA, 75 bp, synthetic construct
  source 1..75: mol_type = other DNA
agcaagattaagcagtctggcagacccggcaaagactatctgttaagtgtcggaatggcgaaagaactggcaatg

SEQ ID NO: 196278 - DNA, 75 bp, synthetic construct
  source 1..75: mol_type = other DNA
atgccgcataagtttgttgcgacaggcaacgtacttttaaaaaccgtactggtttcagaagcggaaagtgaaacg

SEQ ID NO: 196279 - DNA, 75 bp, synthetic construct
  source 1..75: mol_type = other DNA
gattccatgttcagaacgatacaaaagctgtgaattccggcagaagttttatgagggtggcgtataaaagttatt

SEQ ID NO: 196280 - DNA, 75 bp, synthetic construct
  source 1..75: mol_type = other DNA
gggaatgtttgccgtatttatgccaggagaaccgcataaaccgggatgtgttgttggcgagtcgggtgagattaa

SEQ ID NO: 196281 - DNA, 75 bp, synthetic construct
  source 1..75: mol_type = other DNA
atgatgatgggtgaagtacagtcattaccgtctgctgggttacatcctgcgttacaggacgcgttaacgctggcc

SEQ ID NO: 196282 - DNA, 75 bp, synthetic construct
  source 1..75: mol_type = other DNA
tgccggatacataccggtatcatctgtctcatcgtattcgccggatgtttgggattgaaaagacatcatcgccat

SEQ ID NO: 196283 - DNA, 75 bp, synthetic construct
  source 1..75: mol_type = other DNA
tgccggatacataccggtatcatctgtctcatcgtattcgccggatgattgggaatgaaaagacatcatcgccat

SEQ ID NO: 196284 - DNA, 75 bp, synthetic construct
  source 1..75: mol_type = other DNA
gaggcggggttgctggtgactgcactggacggcctgttctggttcggcagtcagcgtattgcaactgatgttttg

SEQ ID NO: 196285 - DNA, 75 bp, synthetic construct
  source 1..75: mol_type = other DNA
tcgacaaattgttcgtgatgatgacgttaggtgatgatcgttcgatctaccgcacctacgttgatggtcgtctgg

SEQ ID NO: 196286 - DNA, 75 bp, synthetic construct
  source 1..75: mol_type = other DNA
gatggcaatggcgcaacgcctgaaagaagaatatcccgatacgtgggtgcatacccatctttgtgaaaacaaaga

SEQ ID NO: 196287 - DNA, 75 bp, synthetic construct
  source 1..75: mol_type = other DNA
tcaacttgaaaaagcatggcagaagaaagttaaagtgggcatgggaacggatatcggtgccggaaccactttcaa

SEQ ID NO: 196288 - DNA, 75 bp, synthetic construct
  source 1..75: mol_type = other DNA
gggaatgttcgccgtgtttatgccaggtgaaccgcataaaccaggatgcgttgtcggcgaacctggtgagattaa

SEQ ID NO: 196289 - DNA, 75 bp, synthetic construct
  source 1..75: mol_type = other DNA
gtcacatcatgttccagcaggccgggttgattgccgttacgctgtttatcttcggttactccatgtggaccacca

SEQ ID NO: 196290 - DNA, 75 bp, synthetic construct
  source 1..75: mol_type = other DNA
ggccggaccagaagaacggctgcgtattgccctgctgaatgtggattacgtcaccagttttgaactgccttttcg

SEQ ID NO: 196291 - DNA, 75 bp, synthetic construct
  source 1..75: mol_type = other DNA
tgccggatacataccggtatcatctgtctcatcgtattcgccggatgcttgggactgaaaagacatcatcgccat

SEQ ID NO: 196292 - DNA, 75 bp, synthetic construct
  source 1..75: mol_type = other DNA
ccgcgaacggcttaagtatgcactggaggtgggcttactggtgacggcgctggacggcctgttctggtttggcag

SEQ ID NO: 196293 - DNA, 75 bp, synthetic construct
  source 1..75: mol_type = other DNA
agaaaaatgtggtgtttaacgataaacggtttggttgcgtgtacagcctgaaggccagcctttccggtgtgccgg

SEQ ID NO: 196294 - DNA, 75 bp, synthetic construct
  source 1..75: mol_type = other DNA
gcaattcacgttctcgtcgtcgtgagcgtttaaaggcaaaggcattagctaacggcgtgctggcccgcgaagaag

SEQ ID NO: 196295 - DNA, 75 bp, synthetic construct
  source 1..75: mol_type = other DNA
atgcatacacgaattgattatctggtgaataaatactgttttacagaactgaatgaatctccacgtcttcgtcgg

SEQ ID NO: 196296 - DNA, 75 bp, synthetic construct
  source 1..75: mol_type = other DNA
tgcgtgtacagcctgaaggccagcctttctggtgtgccggatacataccggtatcatctgtctcaccgtattcgt

SEQ ID NO: 196297 - DNA, 75 bp, synthetic construct
  source 1..75: mol_type = other DNA
agctttttctgcttctgccggaggagtatggcccagcctttccagcaatcgtcgattgttataccagtccaccca

SEQ ID NO: 196298 - DNA, 75 bp, synthetic construct
  source 1..75: mol_type = other DNA
tgccggatacataccggtatcatctgtctcatcgtattcgccgggtgattgggagtgaaaagacatcatcgccat

SEQ ID NO: 196299 - DNA, 75 bp, synthetic construct
  source 1..75: mol_type = other DNA
tgccggatacataccggtatcatctgtctcatcgtattcgccggctgattgggactgaaaagacatcatcgccat

SEQ ID NO: 196300 - DNA, 75 bp, synthetic construct
  source 1..75: mol_type = other DNA
tgccggatacataccggtatcatctgtctcatcgtattcgccggatggttgggagtgaaaagacatcatcgccat

SEQ ID NO: 196301 - DNA, 75 bp, synthetic construct
  source 1..75: mol_type = other DNA
tggttgggaatgaaaacacatcattgccatatcagcaggttgcccgggaagtgaaagcgccccgtgaacgactga

SEQ ID NO: 196302 - DNA, 75 bp, synthetic construct
  source 1..75: mol_type = other DNA
ccgcattcgtcgtgtggttgcgaatgaaaacacatcattgccatatcagcagattgcccgggaagtgaaagcccc

SEQ ID NO: 196303 - DNA, 75 bp, synthetic construct
  source 1..75: mol_type = other DNA
aatgtggattacgtcaccagttttgaactgccatttcggttgctgcttatccgtacaccacaacagattgcagcg

SEQ ID NO: 196304 - DNA, 75 bp, synthetic construct
  source 1..75: mol_type = other DNA
cgggccgtctggctgcggtaaatcgacgctgctgcgtactttcaacaaaatgtttgaactgtatccggagcagcg

SEQ ID NO: 196305 - DNA, 75 bp, synthetic construct
  source 1..75: mol_type = other DNA
caggattacaccgtggtgatcgtcacccacaacatgcagcaggctgcgcgttgttccgaccacacggcgtttatg

SEQ ID NO: 196306 - DNA, 75 bp, synthetic construct
  source 1..75: mol_type = other DNA
caatgccatgatcagaaccacttggggagtttctacggttaatggcaaagcagaggttatgaagtatgcacctga

SEQ ID NO: 196307 - DNA, 75 bp, synthetic construct
  source 1..75: mol_type = other DNA
aggcgaaaaaccgtaaggcgctgacaccgctattagaaatccgtaatctgaccaaatcttatgaggggcaacatg

SEQ ID NO: 196308 - DNA, 75 bp, synthetic construct
  source 1..75: mol_type = other DNA
ctgcgtgaagaatggggcatcagccagaaaaatgtggtgttcaacgataaacgttttggctgcgtgtacagcctg

SEQ ID NO: 196309 - DNA, 75 bp, synthetic construct
  source 1..75: mol_type = other DNA
atgtgtacacgaattgattatctggcggataaatactgctttacagaactgaatgagtccccccgtcttcgtcag

SEQ ID NO: 196310 - DNA, 75 bp, synthetic construct
  source 1..75: mol_type = other DNA
ctggtgatgattgtttttggcgcgaccttaatgaaagatgcgccgaaacaggaagtcaaaacccataatggcgtg

SEQ ID NO: 196311 - DNA, 75 bp, synthetic construct
  source 1..75: mol_type = other DNA
ggaagtcaaaacccataatggcgtggtggaaaatgatttcactctggcagagtcgatgcgtaaaccgcaatactg

SEQ ID NO: 196312 - DNA, 75 bp, synthetic construct
  source 1..75: mol_type = other DNA
gatgttggcagtgatgttcctgacagcatgtatgagtggcctatatgtgattggtgtagcgaaagatatcgccca

SEQ ID NO: 196313 - DNA, 75 bp, synthetic construct
  source 1..75: mol_type = other DNA
gcagcgatttgcagcgctgggctggtcgccaggcagcgagtgggcgcgtcgccgggctgatgaataaaggctggc

SEQ ID NO: 196314 - DNA, 75 bp, synthetic construct
  source 1..75: mol_type = other DNA
gacagcgcattctgacaacctgatgatgctgtggttaagcgccggtgtgctggtcggtttggcggatggcgcggg

SEQ ID NO: 196315 - DNA, 75 bp, synthetic construct
  source 1..75: mol_type = other DNA
tctacgtgattttcgccctgctgattctgtcactggcgctttctacgaccattcgccagccagagcagaaaatgt

SEQ ID NO: 196316 - DNA, 75 bp, synthetic construct
  source 1..75: mol_type = other DNA
gtgcatccactgaaagtcgacgcggatgcctcggtggtcgataacgtgccggtacatgtggcgctgcgcccggaa

SEQ ID NO: 196317 - DNA, 75 bp, synthetic construct
  source 1..75: mol_type = other DNA
acatgctgcaaacgctgaacgaagcctacaaagtattgcaattacaaggctatcgcctctcggcatatgaagcgt

SEQ ID NO: 196318 - DNA, 75 bp, synthetic construct
  source 1..75: mol_type = other DNA
tccatcatgcatttaagaaaaaagattggatttcgaattatgatagcctgttaactttgcgggagttctttcgtt

SEQ ID NO: 196319 - DNA, 75 bp, synthetic construct
  source 1..75: mol_type = other DNA
cctctgttgttttggaggatgaagattactctcttatttataattttctggttaatgcaggttgccaacaagtcg

SEQ ID NO: 196320 - DNA, 75 bp, synthetic construct
  source 1..75: mol_type = other DNA
cagcatcgctttctgtccgacctccaacctttatctcggtagcggcttattcaatctgcaaaaagcatggcagaa

SEQ ID NO: 196321 - DNA, 75 bp, synthetic construct
  source 1..75: mol_type = other DNA
gatgatggatcgcaatgcgccggattatctgcttgataccgcagaaagcagttatcaccaaagcaaagaactgat

SEQ ID NO: 196322 - DNA, 75 bp, synthetic construct
  source 1..75: mol_type = other DNA
aacgtcgttatgaggatttagagtacgcccgcgaaatgtcggcgttcttcatcaagcagcttttacgtaacggaa

SEQ ID NO: 196323 - DNA, 75 bp, synthetic construct
  source 1..75: mol_type = other DNA
tgccaaacgcaaaccgcatcagctttccggtggccaacgtcagcgagtggcgctggcccgaagcctcgccaaacg

SEQ ID NO: 196324 - DNA, 75 bp, synthetic construct
  source 1..75: mol_type = other DNA
gtacatccgttgaaagtggatcctgaagcatccgtggtagataacgtgccggtacatgtggcggtgcgcccggaa

SEQ ID NO: 196325 - DNA, 75 bp, synthetic construct
  source 1..75: mol_type = other DNA
ttgggcgcgtccggttgtggtaagtctacgttgctacggatgctggcaggtttcgaacaaccctctatcggacaa

SEQ ID NO: 196326 - DNA, 75 bp, synthetic construct
  source 1..75: mol_type = other DNA
agtgatattaccgaagaggagatttgcgagaaatataaatcaaccattgaggcgtttaaaaaaaagcaactagcg

SEQ ID NO: 196327 - DNA, 75 bp, synthetic construct
  source 1..75: mol_type = other DNA
tccgcctgaaaagcgggcagatgatcagcgcccagttacaaaacgcccatcgttttcgcaaagggttaccgacct

SEQ ID NO: 196328 - DNA, 75 bp, synthetic construct
  source 1..75: mol_type = other DNA
ggtggatattctggagcgtgtcggcgtgacctgtgtgatggtaacgcacgatcaggaagaggcgatgaccatggc

SEQ ID NO: 196329 - DNA, 75 bp, synthetic construct
  source 1..75: mol_type = other DNA
attccctgaacgtttaagaagagtattgcggaaaatgcaatatatttgtctaactttattcttcatgaagaatag

SEQ ID NO: 196330 - DNA, 75 bp, synthetic construct
  source 1..75: mol_type = other DNA
acatcgcaggcgggatgtgtcagcatcagcgttacgctagtttcacccgggggcagagaaggcgagatgccccgc

SEQ ID NO: 196331 - DNA, 75 bp, synthetic construct
  source 1..75: mol_type = other DNA
atgtcagcttccctgaagaatcaacaaggctttagcctgccggaggtaatggttgcgatggtgctgatggtgatg

SEQ ID NO: 196332 - DNA, 75 bp, synthetic construct
  source 1..75: mol_type = other DNA
aaggctttagtctaccggaagtgatgctggcgatggtgctgatggtgatgattgtcactgcgttatccggtttcc

SEQ ID NO: 196333 - DNA, 75 bp, synthetic construct
  source 1..75: mol_type = other DNA
aatattaccctactaaatttggccgcaactatgtgctgcgtgatgtcagcatcacacttccacgcgatcgcaata

SEQ ID NO: 196334 - DNA, 75 bp, synthetic construct
  source 1..75: mol_type = other DNA
ttaggagggatggatacgcctaacagggggaaagtaactcgtctctgccgagtatcttggcctctagcactaggt

SEQ ID NO: 196335 - DNA, 75 bp, synthetic construct
  source 1..75: mol_type = other DNA
tcactatcaatatgaacgttaaaattgagcatgagatcatcatcaaggcagacaaagatgtcgaagagctgcttg

SEQ ID NO: 196336 - DNA, 75 bp, synthetic construct
  source 1..75: mol_type = other DNA
caaaaaattcgacacattttaaggggattttcgcaatgcgtatcattctgcttggcgctccgggtgcggggaaag

SEQ ID NO: 196337 - DNA, 75 bp, synthetic construct
  source 1..75: mol_type = other DNA
ccatctggtactcactacgggagggactgggccggcgcgccgtgacgtgacgcctgatgcgacgctggcagtagc

SEQ ID NO: 196338 - DNA, 75 bp, synthetic construct
  source 1..75: mol_type = other DNA
agcgtacaaacctgacgtggtgctcggtatgggcggctacgtatcaggtccaggtggtctggccgcgtggtcgtt

SEQ ID NO: 196339 - DNA, 75 bp, synthetic construct
  source 1..75: mol_type = other DNA
tactactctaaagaagcggaagcgggcaacaccaaatacgcaaaagtcgatggcaccaaaccggttgctgaagtt

SEQ ID NO: 196340 - DNA, 75 bp, synthetic construct
  source 1..75: mol_type = other DNA
tcagatgacagcaccgctgatcggctactactccaaagaagcggaagcgggtaataccaaatacgcgaaagttga

SEQ ID NO: 196341 - DNA, 75 bp, synthetic construct
  source 1..75: mol_type = other DNA
aagaagcggaagcgggtaataccaaatacgcgaaagttgacggcaccaagccggttgctgaagttcgcgctgatc

SEQ ID NO: 196342 - DNA, 75 bp, synthetic construct
  source 1..75: mol_type = other DNA
atcgaagaacacggtctgatccacaacgtcattcctattcggtccgatctgttccgcgacttgccgaaagtgcag

SEQ ID NO: 196343 - DNA, 75 bp, synthetic construct
  source 1..75: mol_type = other DNA
tatagtgagaaggacagggtaaaaataatttcatctttaaggtttgttaatgaggtttttattgaggaatcgtta

SEQ ID NO: 196344 - DNA, 75 bp, synthetic construct
  source 1..75: mol_type = other DNA
gggtgatgattgggctggccgatttgattgggtaaatgacatttgtgatgttatttatttaccaagaacaccatc

SEQ ID NO: 196345 - DNA, 75 bp, synthetic construct
  source 1..75: mol_type = other DNA
ggagctggataaacagatagccgcacgcgttgccgcattacgggctgctaacccggatgccagcacgaacgttcc

SEQ ID NO: 196346 - DNA, 75 bp, synthetic construct
  source 1..75: mol_type = other DNA
agctgttcgtgctgatgaccctgggtgatgaacgcaatatcagcgagacgtgggtgaacggcgagcgggtgtggt

SEQ ID NO: 196347 - DNA, 75 bp, synthetic construct
  source 1..75: mol_type = other DNA
tgcggacgctgggcgaggcctacaaggtaggacaactgcagagctatcgcctgcgcgccagcgaggccttctatc

SEQ ID NO: 196348 - DNA, 75 bp, synthetic construct
  source 1..75: mol_type = other DNA
cgacatttatctttctgttattgattactggcggcgtttacccgctgctgaccaccgcgctggggcaatggtggt

SEQ ID NO: 196349 - DNA, 75 bp, synthetic construct
  source 1..75: mol_type = other DNA
aacgcgaaatatggcaataccccgggcctgaaagcctatagccacgtctccgaccaatatgcgccgttcgcaacc

SEQ ID NO: 196350 - DNA, 75 bp, synthetic construct
  source 1..75: mol_type = other DNA
cagatcccgcccacgcgcatcaccgatctcctgctggaggtggatgcggcgaccggcttcaccgaagcgttcacc

SEQ ID NO: 196351 - DNA, 75 bp, synthetic construct
  source 1..75: mol_type = other DNA
gttccgtgacttgccgaaagtgcagtacgacctgatcgtcaccaacccgccgtacgtcgatgcggaagatatgtc

SEQ ID NO: 196352 - DNA, 75 bp, synthetic construct
  source 1..75: mol_type = other DNA
ggttgaactggtgacggcgtcagcaagcgggctggacaataacatcaccccgcaagcggcggcctggcagatccc

SEQ ID NO: 196353 - DNA, 75 bp, synthetic construct
  source 1..75: mol_type = other DNA
gttggcatcctggtcgcctgtggctcttcgatcctgattattcctggctttatcccaatgttcttctccaacgcc

SEQ ID NO: 196354 - DNA, 75 bp, synthetic construct
  source 1..75: mol_type = other DNA
ctggttgactgattttacgaagctgacggtcagatcggggatgtgtcaccagaatatctaccaccatcataccct

SEQ ID NO: 196355 - DNA, 75 bp, synthetic construct
  source 1..75: mol_type = other DNA
atgagcacgattattactgaacaatacgaacactggtgcgcaaatcagatcatcagtggaaaacctgcgcgaccg

SEQ ID NO: 196356 - DNA, 75 bp, synthetic construct
  source 1..75: mol_type = other DNA
aacggcttccgacactttgtcgcgccacttgcgaaactgacatcagaaggcttacaggatttacgtccacagacg

SEQ ID NO: 196357 - DNA, 75 bp, synthetic construct
  source 1..75: mol_type = other DNA
ttgatttaactgaaagtattattggatatgaaatactaacagaagcagattctttctcgtcatttaaatcattga

SEQ ID NO: 196358 - DNA, 75 bp, synthetic construct
  source 1..75: mol_type = other DNA
tttactatgggaccggctgcgttttattttggcgcagccgtaattttgactattcttgctgtggaatggctggac

SEQ ID NO: 196359 - DNA, 75 bp, synthetic construct
  source 1..75: mol_type = other DNA
gaccagaacaggaggcgtgcagaattttcagtacaccagtgaggtgttttacaacccgggagggaacgaacacag

SEQ ID NO: 196360 - DNA, 75 bp, synthetic construct
  source 1..75: mol_type = other DNA
atggcgatattggtccacttcgaccgttcactattaatctgcggacgggtgaaatatccatgtcgcataaagtgt

SEQ ID NO: 196361 - DNA, 75 bp, synthetic construct
  source 1..75: mol_type = other DNA
cgaatttcctgatgattgtgatgttttaatcagctacgctccaccaaaagatgaatcgctggttgccagttttat

SEQ ID NO: 196362 - DNA, 75 bp, synthetic construct
  source 1..75: mol_type = other DNA
cctgagcaagctgttgagcccggcgatttctgcatagccagacttggtggtgatgaatttaccttcaagaaactg

SEQ ID NO: 196363 - DNA, 75 bp, synthetic construct
  source 1..75: mol_type = other DNA
ggtatgacgcagggtggaattggtcactggttgcgcggatctcgtcatccatctcttgacgagattggtgtggtg

SEQ ID NO: 196364 - DNA, 75 bp, synthetic construct
  source 1..75: mol_type = other DNA
atgccctccatagtaaccacaaataaaaaatacaatatgtactcattaaacacaagcaaaaaatacacattgtgc

SEQ ID NO: 196365 - DNA, 75 bp, synthetic construct
  source 1..75: mol_type = other DNA
atcagggatagcggtcaggtgtttctacaaccactaaacccgcaatatccaatgatcccatgcaatgagagttgt

SEQ ID NO: 196366 - DNA, 75 bp, synthetic construct
  source 1..75: mol_type = other DNA
aggccaacgtcagcaaatatcttgctgattttgaatcaaaagtgggtttaaaagtttttgaccgaaccacccggc

SEQ ID NO: 196367 - DNA, 75 bp, synthetic construct
  source 1..75: mol_type = other DNA
taatcggctgggaatgaatttacgtccggtgttgctgatgcttgagcggctgaaagagtgggtaatgctggatat

SEQ ID NO: 196368 - DNA, 75 bp, synthetic construct
  source 1..75: mol_type = other DNA
attactggcgtcttggcgcaatcttcggggtgatttacatctctatgttgctgttggttggctggccgattctcg

SEQ ID NO: 196369 - DNA, 75 bp, synthetic construct
  source 1..75: mol_type = other DNA
tggggaaacgcacactgacgttgggttatgcgattgtcatcatcgatattctgctggcaccatttacaccgtcta

SEQ ID NO: 196370 - DNA, 75 bp, synthetic construct
  source 1..75: mol_type = other DNA
ttattactcttttaatgatatgcaacagcaagctcaagggccttttagctggggatataatgacgtttggcaaac

SEQ ID NO: 196371 - DNA, 75 bp, synthetic construct
  source 1..75: mol_type = other DNA
ccttgtattgctcagcttaggtttgtgggtatttggcagtgaagtcattaatgctactgcggttggtctgctggc

SEQ ID NO: 196372 - DNA, 75 bp, synthetic construct
  source 1..75: mol_type = other DNA
atgtctttagcaaaagataatatatggaaactattggcgcccctggtggtgatgggtgtcatgtttcttatccct

SEQ ID NO: 196373 - DNA, 75 bp, synthetic construct
  source 1..75: mol_type = other DNA
ggtcggtattattttgctgatcgttgctccgtggctctcctatgtgctgtacaagccggaagtgactcacagtgc

SEQ ID NO: 196374 - DNA, 75 bp, synthetic construct
  source 1..75: mol_type = other DNA
actggcgcaacgtggtgctcactcagaatggcgtaaagaccaaagtgaacctctatgcgctgatgcagcgtggcg

SEQ ID NO: 196375 - DNA, 75 bp, synthetic construct
  source 1..75: mol_type = other DNA
tcagctgaatgcgaaggacgcatcggcaatgatactcggaacggaattccagcttgaaccttacgacattgttta

SEQ ID NO: 196376 - DNA, 75 bp, synthetic construct
  source 1..75: mol_type = other DNA
gtgacgggcgcgactggtcgctaacgcgcctggcggcaatggccttcaccatgctgttgctgatgccgtttgcct

SEQ ID NO: 196377 - DNA, 75 bp, synthetic construct
  source 1..75: mol_type = other DNA
taatggttggcaatctgtaaatacctgggctagccatgattatagctatctccagggagggcaggttcatcttgg

SEQ ID NO: 196378 - DNA, 75 bp, synthetic construct
  source 1..75: mol_type = other DNA
aggttaatagtggtacaggagtatctacagactggcaaggctatactgttgtctctaatttaatgccttatcagg

SEQ ID NO: 196379 - DNA, 75 bp, synthetic construct
  source 1..75: mol_type = other DNA
cgcctttcctatagcattatggaaggttgggcgaaccacggggatggtaattcaggcagtattaatgctcgttat

SEQ ID NO: 196380 - DNA, 75 bp, synthetic construct
  source 1..75: mol_type = other DNA
aagtgatcgccgagatcactcatcgctacggtttcgataagccgatccacgaacgttacttcaaaatgctctggg

SEQ ID NO: 196381 - DNA, 75 bp, synthetic construct
  source 1..75: mol_type = other DNA
gctgcacctatatcaagcaggtggtggacggcgagacattgctggagctggattatctggcgaatatcttcaaag

SEQ ID NO: 196382 - DNA, 75 bp, synthetic construct
  source 1..75: mol_type = other DNA
gcacatacatcaaacaggtactggatggtgaggagctgctggagctggattatctggccaatatcttccgcgtcg

SEQ ID NO: 196383 - DNA, 75 bp, synthetic construct
  source 1..75: mol_type = other DNA
atggttaatgccaatccttgctcgcgcccggaatttatctggcgtttccactccctgcaaaaacactgcgatcac

SEQ ID NO: 196384 - DNA, 75 bp, synthetic construct
  source 1..75: mol_type = other DNA
tggacaaagaccagaagagaaaagagaagcctgcgctggttgctcaattaactttgctggacatcgttgccaatg

SEQ ID NO: 196385 - DNA, 75 bp, synthetic construct
  source 1..75: mol_type = other DNA
ggctcgctgctgattgaagtgatgttttcaatggccttggcttactgggctacgaagcgaccgtctcgcgcgatt

SEQ ID NO: 196386 - DNA, 75 bp, synthetic construct
  source 1..75: mol_type = other DNA
gggaaagcgaaaaatgtgattacctgcccgtatcacgcctgggcattcaaactcgatggcaacctggcccatgcg

SEQ ID NO: 196387 - DNA, 75 bp, synthetic construct
  source 1..75: mol_type = other DNA
cgttgcagtgccgctccagcatcgaccgctataactcgacgggccgtatcgatgaaatcccgctggtgacgcacc

SEQ ID NO: 196388 - DNA, 75 bp, synthetic construct
  source 1..75: mol_type = other DNA
ctgccaccacgccaccgtggtgatgatgttgataacgatgattttgatgattatcaccagtttgaacgagggggc

SEQ ID NO: 196389 - DNA, 75 bp, synthetic construct
  source 1..75: mol_type = other DNA
ttaccaatgccaatatttacctggacggcgcgaatctgctgggccgggctgaagaggtcaaactgccggacgtct

SEQ ID NO: 196390 - DNA, 75 bp, synthetic construct
  source 1..75: mol_type = other DNA
acggcaaacccgtggcaggcggtagcattacagtgccgctccagtattgattgctataactcccaggggaaagcg

SEQ ID NO: 196391 - DNA, 75 bp, synthetic construct
  source 1..75: mol_type = other DNA
gagctcccggcaggtttcgataaactggaaggggaaattaaatggaactccttttatcaggacgtcatgcgtaaa

SEQ ID NO: 196392 - DNA, 75 bp, synthetic construct
  source 1..75: mol_type = other DNA
atagtgggacaagagaaatagcactaaataacgataaaaaataccattctgaatttttttgcggtgtggtgcttg

SEQ ID NO: 196393 - DNA, 75 bp, synthetic construct
  source 1..75: mol_type = other DNA
acttcgtgatacccagcacatgatgcagcaaatactgctgagccttgttcatgcgctgtacgaaggtaatccgca

SEQ ID NO: 196394 - DNA, 75 bp, synthetic construct
  source 1..75: mol_type = other DNA
tcactaggcggcgtattgacgcaggttggtgtggaaagttttgcctggtatcgccatccggggacggaagattgt

SEQ ID NO: 196395 - DNA, 75 bp, synthetic construct
  source 1..75: mol_type = other DNA
ctacagcgacccgggaagttatgaaccgctggcgcggttggataaggcggggaaagagggaccgaaccggatact

SEQ ID NO: 196396 - DNA, 75 bp, synthetic construct
  source 1..75: mol_type = other DNA
caaacagaacgtaagcacatcatcatcgaaggcgatggcgaggaagaagtcgctcgtctgcaagattatctgact

SEQ ID NO: 196397 - DNA, 75 bp, synthetic construct
  source 1..75: mol_type = other DNA
gtgatatcggtcagttcagatatcaatgttcccaaacttccatcgatgaaagctattctttcagcaaataaaaaa

SEQ ID NO: 196398 - DNA, 75 bp, synthetic construct
  source 1..75: mol_type = other DNA
tcgtgccttcgaacgtattggcggtacggtgttgggctcgattttaggtcttatcgctctgcaactggagttaat

SEQ ID NO: 196399 - DNA, 75 bp, synthetic construct
  source 1..75: mol_type = other DNA
acgctatacgccaaagaactaacctgcgaagccgatacgctgggttccagtggttacgtctatatcgctatttat

SEQ ID NO: 196400 - DNA, 75 bp, synthetic construct
  source 1..75: mol_type = other DNA
agttactgaaaaaataccaaatgacactaccagcattggctttaggcgaatcagaaagaggattcagctatcatt

SEQ ID NO: 196401 - DNA, 75 bp, synthetic construct
  source 1..75: mol_type = other DNA
aaagctactacctaaaggagtcattcaggatagatggagtatattcacctgatcttggtactccctgccattttt

SEQ ID NO: 196402 - DNA, 75 bp, synthetic construct
  source 1..75: mol_type = other DNA
cacggatgtgaacggcgcgccggaagagatgacggacagtgacgggaaaatcgtgtgggagacggggtatcaggt

SEQ ID NO: 196403 - DNA, 75 bp, synthetic construct
  source 1..75: mol_type = other DNA
ggtgcaattgtcacacacggagagaataaaaatggcagcattgtcgcggaaaacggtcaggtttatctgactgga

SEQ ID NO: 196404 - DNA, 75 bp, synthetic construct
  source 1..75: mol_type = other DNA
gtggcgaagggctgcgccaactctgcgtatccgtgaccagcataaagatgaaaagatggcagcaatccataaagc

SEQ ID NO: 196405 - DNA, 75 bp, synthetic construct
  source 1..75: mol_type = other DNA
ggtcagcgatgttgccagaactctctgttgtgcccgttcatccgttggtcgctggattaactggtttacgcactc

SEQ ID NO: 196406 - DNA, 75 bp, synthetic construct
  source 1..75: mol_type = other DNA
aagctgtgaaacgttgcgctggctgaaagcaaacccgaagttcaggataatttatcagccggtttactcgccgtg

SEQ ID NO: 196407 - DNA, 75 bp, synthetic construct
  source 1..75: mol_type = other DNA
aggaaggggaaaatgatttaccctcgaccgccagtcgcgagatctttgtttatgcaattactgctcttgctgcgt

SEQ ID NO: 196408 - DNA, 75 bp, synthetic construct
  source 1..75: mol_type = other DNA
ccattgcgtattacagcaggtgcgccaactggttgcacagttggaacaacaagaagagggaaatgatttaccctc

SEQ ID NO: 196409 - DNA, 75 bp, synthetic construct
  source 1..75: mol_type = other DNA
acatggcacgggtattcatgtgtttaatgggcagccctataccatcaccggtggcacggtctgtttcgtacgcga

SEQ ID NO: 196410 - DNA, 75 bp, synthetic construct
  source 1..75: mol_type = other DNA
atggtaaatctccctcctgagctggggtcacctgatgtatgggctggtggaggtgttgggctgattgcaggctta

SEQ ID NO: 196411 - DNA, 75 bp, synthetic construct
  source 1..75: mol_type = other DNA
cccgtgttttacgaagatgaagtggatattcacctcaatcccaaaactggcgcagactggcagctacgtgggcag

SEQ ID NO: 196412 - DNA, 75 bp, synthetic construct
  source 1..75: mol_type = other DNA
caggcacttcatgacacgataacccgtaatcatcagtgccgctcaatgtggcagttactgaaaaaggtccgccat

SEQ ID NO: 196413 - DNA, 75 bp, synthetic construct
  source 1..75: mol_type = other DNA
cgttcgaacatatttgcgcattgctgcgtgagcttgttaagcattctcctggcgatttcggttatcagcgttccc

SEQ ID NO: 196414 - DNA, 75 bp, synthetic construct
  source 1..75: mol_type = other DNA
ccgcaacatgcttcaatcatccgtcgatggttgcctgctgccggactggtatggtggagagccgcgccgacactg

SEQ ID NO: 196415 - DNA, 75 bp, synthetic construct
  source 1..75: mol_type = other DNA
atgaggcgtggctatgagaatggtcacatggttattgcattgcacacaggaaaactaatggtaaatctccctcct

SEQ ID NO: 196416 - DNA, 75 bp, synthetic construct
  source 1..75: mol_type = other DNA
aaaacagtttgcaggagagtatggaaagtcgtgaatcacgtctgaacttgctcctggcctggctggaggagcatt

SEQ ID NO: 196417 - DNA, 75 bp, synthetic construct
  source 1..75: mol_type = other DNA
ccgttcgccgtctgctgaacccggcaaccggtgaggaagacacactgaaaaaagaggcgctcaacgaagcacagg

SEQ ID NO: 196418 - DNA, 75 bp, synthetic construct
  source 1..75: mol_type = other DNA
tgcgtccctacatcgaggccaactacgggccacaggcgcactatccccgtgttgttctgcgtatcagtgaagccg

SEQ ID NO: 196419 - DNA, 75 bp, synthetic construct
  source 1..75: mol_type = other DNA
tgtgcgctgggacgcgcggcagctggctaacacgctgaatgaatatctggtgcgtccctatatcgaggccaacta

SEQ ID NO: 196420 - DNA, 75 bp, synthetic construct
  source 1..75: mol_type = other DNA
gcatttcatgaagccctggacgaactcctgaaagcggcttttgctctcaccatgtggggtgcccgcgtgcggatc

SEQ ID NO: 196421 - DNA, 75 bp, synthetic construct
  source 1..75: mol_type = other DNA
gctaacacgctgaatgaatatctggtgcggccctacatcgaggccaactacgggccacaggcgcactatccccgc

SEQ ID NO: 196422 - DNA, 75 bp, synthetic construct
  source 1..75: mol_type = other DNA
attttgtggaacacccgcaacaaccactgggtgccccgtgattatgagtgggttgatccccgttttctgaaagcc

SEQ ID NO: 196423 - DNA, 75 bp, synthetic construct
  source 1..75: mol_type = other DNA
atgaacgaccagcaaatcgaaaaagaaatcgttgagaaaggcaaaacgtcaccgcgcgttacgcctcaatatatc

SEQ ID NO: 196424 - DNA, 75 bp, synthetic construct
  source 1..75: mol_type = other DNA
attctgcgtcctggtgctgcgcaacggcttcaccgtcaccggcgaaagtgcctgcgccagcccggaaaacttcga

SEQ ID NO: 196425 - DNA, 75 bp, synthetic construct
  source 1..75: mol_type = other DNA
gagcgtacaactcgcaaggttacgttaacaaaagcaggaaaaaggttgctcccggaggcgcgggaattaataaaa

SEQ ID NO: 196426 - DNA, 75 bp, synthetic construct
  source 1..75: mol_type = other DNA
acccatcgccgccaacatcgaccagattgtcattgtctccgccattttgccggagctgtcactcaatattatcga

SEQ ID NO: 196427 - DNA, 75 bp, synthetic construct
  source 1..75: mol_type = other DNA
gtaaaccggcggcggaaggcgtaaatgtcaaagggatcgtggaagcggtgcatgagcgcacctcagtgttgacgc

SEQ ID NO: 196428 - DNA, 75 bp, synthetic construct
  source 1..75: mol_type = other DNA
gccagcagcgccgtgtgaacgctaatcaccagcgtcgtctaaaaacgtctaaggagaagcccgactacgacgaca

SEQ ID NO: 196429 - DNA, 75 bp, synthetic construct
  source 1..75: mol_type = other DNA
gcatatcctctcttttgcgccaggtgccagccacggttatatcgaaacacacgttcaggaacatggtgcctatat

SEQ ID NO: 196430 - DNA, 75 bp, synthetic construct
  source 1..75: mol_type = other DNA
aaccttaccgtgccatttattgatgttggcacccaaagcgccgctgcctgtttaactgcgaaaagcctggcgcaa

SEQ ID NO: 196431 - DNA, 75 bp, synthetic construct
  source 1..75: mol_type = other DNA
tatcttgccggaagttggtctgactattgggcggacggacaaaataatactaactactccattggttatagtaac

SEQ ID NO: 196432 - DNA, 75 bp, synthetic construct
  source 1..75: mol_type = other DNA
cataccagtaattacagcattcaaggcttcaccaaagcgatagacgaagcggaactgatggcgctcggcaaagaa

SEQ ID NO: 196433 - DNA, 75 bp, synthetic construct
  source 1..75: mol_type = other DNA
tagcccagctcctgtgtcgcattaccggcgcggaagatgcctgcatcgttaataacaatgcggcggcggtactgc

SEQ ID NO: 196434 - DNA, 75 bp, synthetic construct
  source 1..75: mol_type = other DNA
tggcacagttgttgtgccgccttactggcgcggaagatgcctgcatcgtcaataacaatgcggcggcggtgctgt

SEQ ID NO: 196435 - DNA, 75 bp, synthetic construct
  source 1..75: mol_type = other DNA
ggtagttggacagactattgggcaagtaacaataaccgaactgaatacaacgttggctacagtaaaagtgtttcc

SEQ ID NO: 196436 - DNA, 75 bp, synthetic construct
  source 1..75: mol_type = other DNA
agtgtgaatacgggttataaccttgataaagaatctgaaaatgtcgcttccgttggtggatatcttagctatgac

SEQ ID NO: 196437 - DNA, 75 bp, synthetic construct
  source 1..75: mol_type = other DNA
ttgctgcctatcgttattccactgaggattaccttggtctgcatgatgcgttagccctcattgacgacgccaatc

SEQ ID NO: 196438 - DNA, 75 bp, synthetic construct
  source 1..75: mol_type = other DNA
ataataacaaacttacttatatagcctcgttttgcgcattgctgttaagcccctgtgccataagcgctgaacacg

SEQ ID NO: 196439 - DNA, 75 bp, synthetic construct
  source 1..75: mol_type = other DNA
tggttcgaaaacagtcgaacaataaattgcaaattgcattatcaacttcctgcacagccagaaacacttggaagt

SEQ ID NO: 196440 - DNA, 75 bp, synthetic construct
  source 1..75: mol_type = other DNA
gtgatctgatccttcaactcagcaaaagttcgatttattcaacaaagcctagcagtaacggcgcggcaacagaaa

SEQ ID NO: 196441 - DNA, 75 bp, synthetic construct
  source 1..75: mol_type = other DNA
gcttcaccaaagcgatagacgaagcggaactgatggcgctcggcaaagaactggatgttcccgtggtgacggatt

SEQ ID NO: 196442 - DNA, 75 bp, synthetic construct
  source 1..75: mol_type = other DNA
gcgtaacaatctgctgtacagcggcatttcgacatttacggtcgatgacgatggcacggtgcgcattgaaaacct

SEQ ID NO: 196443 - DNA, 75 bp, synthetic construct
  source 1..75: mol_type = other DNA
gctgaaactggcggaaggtgattaccagcaggttgaaaagctgatggcgaaaaatgccgatcacgctgaacaacc

SEQ ID NO: 196444 - DNA, 75 bp, synthetic construct
  source 1..75: mol_type = other DNA
agtggctactgcggcggatcttccgcactggcgcgcacacccgtgggtggtttgtcgggcgtaagcgtcgccgtg

SEQ ID NO: 196445 - DNA, 75 bp, synthetic construct
  source 1..75: mol_type = other DNA
cgctcgtttgatttcattgtccttgcttatccggacaccacatcgctcaacgatatgaaggattttctgtcggat

SEQ ID NO: 196446 - DNA, 75 bp, synthetic construct
  source 1..75: mol_type = other DNA
caccaccaccaacggcacttacgccgagcttggcaccaaaggggaaacccgtaataaccagcatgagtcactgct

SEQ ID NO: 196447 - DNA, 75 bp, synthetic construct
  source 1..75: mol_type = other DNA
ggtaatgggatcgacattcgcctgaacttcctcggcttacctggaggcgagtccacacctgcaggcctggaactg

SEQ ID NO: 196448 - DNA, 75 bp, synthetic construct
  source 1..75: mol_type = other DNA
tgccgacgcgctggacagactgcacaaaccggaagaagccgcagcgatgcgtcgcgatggcttgatgctgacctt

SEQ ID NO: 196449 - DNA, 75 bp, synthetic construct
  source 1..75: mol_type = other DNA
cggacgcctacgattacgcatggcttgccgacgcgctggacagactgcacaagccggaagaagctgcagcgatgc

SEQ ID NO: 196450 - DNA, 75 bp, synthetic construct
  source 1..75: mol_type = other DNA
gtatacggaaaatgaaagcggcagctactaccacgcaacgcaaccacgccatttaggggaaaaacccctagataa

SEQ ID NO: 196451 - DNA, 75 bp, synthetic construct
  source 1..75: mol_type = other DNA
acccggaacagctggaaaaagtgctgcgccaacagatcaaaaacgtcggcgatcgcccgctgttgtggagcacac

SEQ ID NO: 196452 - DNA, 75 bp, synthetic construct
  source 1..75: mol_type = other DNA
ttctgcttattgcggggatcgtggttggtccgatgattgccgggcatcagggttacgtactgattcaaaccgaca

SEQ ID NO: 196453 - DNA, 75 bp, synthetic construct
  source 1..75: mol_type = other DNA
gctgaaactggcggaaggcgattatcagcaagttgaaaagctgatggcgaaaaatgccgatcacgctgaacaacc

SEQ ID NO: 196454 - DNA, 75 bp, synthetic construct
  source 1..75: mol_type = other DNA
cggactactgggccactaatgaatcacagagtagttttgcgtttggttacagcagcggctttgactgggccagct

SEQ ID NO: 196455 - DNA, 75 bp, synthetic construct
  source 1..75: mol_type = other DNA
gaaggtgaagggcgcgagcgtttcagcgctgtactggagcagggggcgattgctgtcggtagtgataacaaagca

SEQ ID NO: 196456 - DNA, 75 bp, synthetic construct
  source 1..75: mol_type = other DNA
gaaggggaaggacgcgagcgtttcagcgcattattggaacagggggcgattgctgccggtagtgatgacaaagct

SEQ ID NO: 196457 - DNA, 75 bp, synthetic construct
  source 1..75: mol_type = other DNA
cgggacggagaagcagtattacaaaaacgcaatgaaagcgcagatgattgccttgatatcgcaaaagctattcca

SEQ ID NO: 196458 - DNA, 75 bp, synthetic construct
  source 1..75: mol_type = other DNA
acttggcattgggatgaatacttctgtcggcgcaatttccttcgatgtcacccactccagtgtcgatataccgga

SEQ ID NO: 196459 - DNA, 75 bp, synthetic construct
  source 1..75: mol_type = other DNA
gatgcaaatggcagccgttgcccaggggtttggcggcatctggcgcagtggcgcattaactgaaagtccggtagt

SEQ ID NO: 196460 - DNA, 75 bp, synthetic construct
  source 1..75: mol_type = other DNA
gggcgttaaccgaaagcccggtggtacgtgatgcattcggttgtcgggatcaggataaaatcgtcgggtttctct

SEQ ID NO: 196461 - DNA, 75 bp, synthetic construct
  source 1..75: mol_type = other DNA
ctgcaaaatatcctgcgcgcgggtatgcgtgcgccagaccataaatccatgcaaccgtggcatttctttgtgatt

SEQ ID NO: 196462 - DNA, 75 bp, synthetic construct
  source 1..75: mol_type = other DNA
ttcccggagtgcgcattgcatgcgcatgcttgagcagggaaaggcctgttatctgtataccggtcatgaccacag

SEQ ID NO: 196463 - DNA, 75 bp, synthetic construct
  source 1..75: mol_type = other DNA
gaaggggaagggcgcgagcgtttcagcgccgttctggagcagggggcgattgctgccggtagtgatgacaaagcc

SEQ ID NO: 196464 - DNA, 75 bp, synthetic construct
  source 1..75: mol_type = other DNA
cgcattaatgctcaagctgcccgcaaagtgtcagcatccttgcaaaacgagcgtttgaggactgaaaacgcccac

SEQ ID NO: 196465 - DNA, 75 bp, synthetic construct
  source 1..75: mol_type = other DNA
gaattgaaatctccagcgcaaaaatccgctgtgttgattctgtaaaaggtactgcggaatatacttttcgtattg

SEQ ID NO: 196466 - DNA, 75 bp, synthetic construct
  source 1..75: mol_type = other DNA
atgaagctcccctacgatggcaaaaaaattcaacgatcgccgctcgcttgcctgattgcgtgcagcctgctgccc

SEQ ID NO: 196467 - DNA, 75 bp, synthetic construct
  source 1..75: mol_type = other DNA
tcagtgcacaacgttcatggaatgaggacggtgaaacggatgatagcatctaccttagtttcaccattccaattg

SEQ ID NO: 196468 - DNA, 75 bp, synthetic construct
  source 1..75: mol_type = other DNA
gtcaccaaccagagtattgcctttgttacggttgagggtaagaaaaacgctgaggcttgtctcaccctgaagaac

SEQ ID NO: 196469 - DNA, 75 bp, synthetic construct
  source 1..75: mol_type = other DNA
gtcaggcatttgtgcgcggtattaacgacagcggggaattaacagtgcgctggtatgaaaacaaccaaaccattg

SEQ ID NO: 196470 - DNA, 75 bp, synthetic construct
  source 1..75: mol_type = other DNA
gaagcaacaagcacctcatttaaccttgctgcctatcgttattccaccagggactatctcggtctgcatgatgcg

SEQ ID NO: 196471 - DNA, 75 bp, synthetic construct
  source 1..75: mol_type = other DNA
gatgggtactggggcatcgagcatcgatgtcaaacgttattcacagggtaacccaacgcctcctggcgtttataa

SEQ ID NO: 196472 - DNA, 75 bp, synthetic construct
  source 1..75: mol_type = other DNA
agcagtaacggcgcggcaacagaaagcgtggaatatgacagttcctttttgatgggtactggggcatcgagcatc

SEQ ID NO: 196473 - DNA, 75 bp, synthetic construct
  source 1..75: mol_type = other DNA
agcgaactggtcgtgaccattgaagaagcggatggttccaaacgcacctttacgcaacccttctcgtcggttgta

SEQ ID NO: 196474 - DNA, 75 bp, synthetic construct
  source 1..75: mol_type = other DNA
gcccgtgccgtttgcttctgatattaccgacgaaaaagggacctctatcgggaccgtcggacagggtagtcaggc

SEQ ID NO: 196475 - DNA, 75 bp, synthetic construct
  source 1..75: mol_type = other DNA
actccggcagggttcggtgccgacctcgaagtgaccatcaccgaatcggacggctcaaagcgtacgtttagtcag

SEQ ID NO: 196476 - DNA, 75 bp, synthetic construct
  source 1..75: mol_type = other DNA
tggggcagcttcagcgtcaaccggcaacgtagctggaatgaagacggcgctaaagatgacgcaatgtacgtcagc

SEQ ID NO: 196477 - DNA, 75 bp, synthetic construct
  source 1..75: mol_type = other DNA
aatcgatcgctggggatatgccgtaacgtcctctgtcagcccataccgtgaaaaccgcgtaggcctgaacattga

SEQ ID NO: 196478 - DNA, 75 bp, synthetic construct
  source 1..75: mol_type = other DNA
ccatccgcggtgtagcaaactccaacgccaaagtcaccgtgacgcaaagcggttataaaatctatgaaaccaccg

SEQ ID NO: 196479 - DNA, 75 bp, synthetic construct
  source 1..75: mol_type = other DNA
ctgattatttccgccaatgagatcttctggatgtcagccgggatattcctcgtcctgctggggctggtgtggttt

SEQ ID NO: 196480 - DNA, 75 bp, synthetic construct
  source 1..75: mol_type = other DNA
ccacgaccatgtggaccaaccgcgagtcgatgcaccatgcgcagttgactgagtcggtaaacccgttcaacccga

SEQ ID NO: 196481 - DNA, 75 bp, synthetic construct
  source 1..75: mol_type = other DNA
caatgacgcgttgtatgcgtttaaggtgctgtttccgtccggtaagggctttaaattcctggtaatgctgccaac

SEQ ID NO: 196482 - DNA, 75 bp, synthetic construct
  source 1..75: mol_type = other DNA
caccaccatgtggaccaaccgcgagtcgatgcaccacgcacagttaaccgagtcggtaaacccgttcaacccgaa

SEQ ID NO: 196483 - DNA, 75 bp, synthetic construct
  source 1..75: mol_type = other DNA
cactaccatgtggaccaaccgcgagtcgctgcatcatgcgcagttgaccgagtcggtgaatccgtataacccgaa

SEQ ID NO: 196484 - DNA, 75 bp, synthetic construct
  source 1..75: mol_type = other DNA
ctctccaactttacgcgaacactggcagggtccatcggtacgtccatcaccacgaccatgtggaccaatcgcgag

SEQ ID NO: 196485 - DNA, 75 bp, synthetic construct
  source 1..75: mol_type = other DNA
tcataccatgggccttgaagagattaatgacgccttcgacctgatgcatgaaggcaaatctattcgtacagtgat

SEQ ID NO: 196486 - DNA, 75 bp, synthetic construct
  source 1..75: mol_type = other DNA
gactactacttcatctcacaaggtaaaaccgatattccggcactttataccccggagggacgctatggcgcgtat

SEQ ID NO: 196487 - DNA, 75 bp, synthetic construct
  source 1..75: mol_type = other DNA
caccccagtgttggtacgccaaccaatgccggagcgtttacccggacggcgacaaaggccggacagacccggagc

SEQ ID NO: 196488 - DNA, 75 bp, synthetic construct
  source 1..75: mol_type = other DNA
cgcaaaaagcgcggctgcttagccgttttaaaccgatggcgacattcaccgagaaaaacggctatccaccggaaa

SEQ ID NO: 196489 - DNA, 75 bp, synthetic construct
  source 1..75: mol_type = other DNA
ttcgccagactgggtgcgctatgagaaagacaaaggctggcagctaaaagccgaaaaaacgttgatcagcagcta

SEQ ID NO: 196490 - DNA, 75 bp, synthetic construct
  source 1..75: mol_type = other DNA
cgcaaaaagcgcggatgctcaaccggtttaaaccgatggcgacattcactgagaaaaacggttatccgccggaaa

SEQ ID NO: 196491 - DNA, 75 bp, synthetic construct
  source 1..75: mol_type = other DNA
actacatgggatgctccaccttcagtgagtatacggtagtggccgaggtttctctggcaaaaattaacccggagg

SEQ ID NO: 196492 - DNA, 75 bp, synthetic construct
  source 1..75: mol_type = other DNA
cattattttttctaaaatattaggcatgaaggcaggcgattgctttaaagcgggtctgcatatcgggattggctt

SEQ ID NO: 196493 - DNA, 75 bp, synthetic construct
  source 1..75: mol_type = other DNA
atgaaagatagcgaattaatgacagtaaacttgccactttcacttggcgttactcgacggacgctattcaggtgg

SEQ ID NO: 196494 - DNA, 75 bp, synthetic construct
  source 1..75: mol_type = other DNA
gcgcctgatcaacgccgcgcgcagcaccggctttgccgaatgcgcctttgaagatgccgcccgctatgccaacca

SEQ ID NO: 196495 - DNA, 75 bp, synthetic construct
  source 1..75: mol_type = other DNA
cagcttaatctcaccaaagatcagtacgaggcaatcattgccctgcaaaaagagatagaagcggaaattaaaggt

SEQ ID NO: 196496 - DNA, 75 bp, synthetic construct
  source 1..75: mol_type = other DNA
ggtggcgattccgattgcgatattggttaacgtggcgatgttactgacccgtatgacgcgggtggtaaatgttga

SEQ ID NO: 196497 - DNA, 75 bp, synthetic construct
  source 1..75: mol_type = other DNA
cggcgaaagcgatggcggaaaatttcgacctgaatctgcatgtggtcgatgtcggctggccgggctcttcaccaa

SEQ ID NO: 196498 - DNA, 75 bp, synthetic construct
  source 1..75: mol_type = other DNA
tgtaaatgatgtttacaaatcagataacgtctttgtacagcgatttactgataaatacatggagcgtttcaaaac

SEQ ID NO: 196499 - DNA, 75 bp, synthetic construct
  source 1..75: mol_type = other DNA
ataaaaatggcaacggatgataacggtatagttgattatgcctttgccgaacaaattaaggaacgtatacgccag

SEQ ID NO: 196500 - DNA, 75 bp, synthetic construct
  source 1..75: mol_type = other DNA
tgatagtgatcctgctaaagatgtagttggtgagccagaatcaggacacggtatcttcttaggtcaaacaggtac

SEQ ID NO: 196501 - DNA, 75 bp, synthetic construct
  source 1..75: mol_type = other DNA
ttcaaatcatgggcggtctgggctataccgatgaagcgcgcgtctcccgcttctggcgtgatgtccgttgtgaac

SEQ ID NO: 196502 - DNA, 75 bp, synthetic construct
  source 1..75: mol_type = other DNA
tttttattaaagagaacgcccgtaatcataaattacgtgaggttgagcatgatgaagatgaagaagcagagtatg

SEQ ID NO: 196503 - DNA, 75 bp, synthetic construct
  source 1..75: mol_type = other DNA
actcgcaaacatcaattgatgagggtattaaaaaactcaactccattttgcagatgtccgaaaaaatgtgcgccc

SEQ ID NO: 196504 - DNA, 75 bp, synthetic construct
  source 1..75: mol_type = other DNA
tctgctggcttgatgaatttgccgagcctgctatagcccgcaaaatatattcatcagcgtttccgttggtggata

SEQ ID NO: 196505 - DNA, 75 bp, synthetic construct
  source 1..75: mol_type = other DNA
ttgaaagaggaaaaactaacgcttttgcatttttgaagtccaaacatgcaaaagtgcctttgtttattctcttgg

SEQ ID NO: 196506 - DNA, 75 bp, synthetic construct
  source 1..75: mol_type = other DNA
gggtaatttcagaaccacgtcagtgaattcgtacccgttgccgccacagtccaacctgacccaggccagagtggc

SEQ ID NO: 196507 - DNA, 75 bp, synthetic construct
  source 1..75: mol_type = other DNA
ctgcctgtatgctgactttttccctgagcgcctgttccggttcgaactatgtgatgcacaccaatgacggacgta

SEQ ID NO: 196508 - DNA, 75 bp, synthetic construct
  source 1..75: mol_type = other DNA
tcaggagatgctggagagaggtttagacagagaattagttctgatggtgacccgactttcggcagacgatcttat

SEQ ID NO: 196509 - DNA, 75 bp, synthetic construct
  source 1..75: mol_type = other DNA
tcaggagatgttggagagagggttagacagagagttagttctgatggtgaccagactttcgccagacgatcttat

SEQ ID NO: 196510 - DNA, 75 bp, synthetic construct
  source 1..75: mol_type = other DNA
tcaatatcagcagtagtggttacagcgataccaatcgcatcagctacagcgtaaacacgggttatatgatgaata

SEQ ID NO: 196511 - DNA, 75 bp, synthetic construct
  source 1..75: mol_type = other DNA
atgactactaaagctactcgcggtcgtccttgccgttttgatcgtgaacaactggcagcgattgtaaaagcgtac

SEQ ID NO: 196512 - DNA, 75 bp, synthetic construct
  source 1..75: mol_type = other DNA
gccctgcccgttttaacgctgaacagatggctgatattgcctacgcttattatacagcggatcgtggtaaggaag

SEQ ID NO: 196513 - DNA, 75 bp, synthetic construct
  source 1..75: mol_type = other DNA
atgcagatgatgtatatcaccagccagcaacggttctttttgtcgtgacaccatcggcgtggggacaacctcgcc

SEQ ID NO: 196514 - DNA, 75 bp, synthetic construct
  source 1..75: mol_type = other DNA
cattcaggcgccaggagcaaaaggcgctcgtattaactacggaaacagcaccgtagaccgctggagttatggtgt

SEQ ID NO: 196515 - DNA, 75 bp, synthetic construct
  source 1..75: mol_type = other DNA
gtattagccagttttgcgccaatcattcatggcgtagcgaataccaatgccaaagtaaccgttatgcaaaatggt

SEQ ID NO: 196516 - DNA, 75 bp, synthetic construct
  source 1..75: mol_type = other DNA
ggttctgtttttggtgttaaggacagccacgatgatgtggtggtccccggagcctttaccacaacactccagaaa

SEQ ID NO: 196517 - DNA, 75 bp, synthetic construct
  source 1..75: mol_type = other DNA
acgtgtacaccggcgttactgaatttgctggcctatgaccgggacataacccgctttgacggggaacccctcggg

SEQ ID NO: 196518 - DNA, 75 bp, synthetic construct
  source 1..75: mol_type = other DNA
ttgaattactggaacggcaggacggactcgactgggacgtgattgtcgttcgagtgacaagcagccaggttgcgg

SEQ ID NO: 196519 - DNA, 75 bp, synthetic construct
  source 1..75: mol_type = other DNA
aacctgttcatcatgccggtggccgtctgtggcgcgacagcaatgtgggtcgattgctatcgcgctaaacatgca

SEQ ID NO: 196520 - DNA, 75 bp, synthetic construct
  source 1..75: mol_type = other DNA
gctgaaccactacttaacctgctggcataccagcgcaatatcactcgtttccgtggcgagccagtcagtctgttt

SEQ ID NO: 196521 - DNA, 75 bp, synthetic construct
  source 1..75: mol_type = other DNA
aggttatactttaaataggggagcatattctttttctccttccgcaggtttccgttatgagtcatgggatgtaaa

SEQ ID NO: 196522 - DNA, 75 bp, synthetic construct
  source 1..75: mol_type = other DNA
gttactgattctgctttgaatgtgtcactcacctatatgtatcaggatcaatatgggaaaaaacataaaaaaaca

SEQ ID NO: 196523 - DNA, 75 bp, synthetic construct
  source 1..75: mol_type = other DNA
ggcgcgattctgattttaatcggctcgattagctgggcgtttggctcagtttatggctcgcgcattaccttacct

SEQ ID NO: 196524 - DNA, 75 bp, synthetic construct
  source 1..75: mol_type = other DNA
tggctcgcgcattaccttacctgtagggatgatggcgggtgcgattgagatgctggcggcaggcgtggtgttaat

SEQ ID NO: 196525 - DNA, 75 bp, synthetic construct
  source 1..75: mol_type = other DNA
tgatgacgatcccctttcgaaacgcgcacacgcccacatgaaggccggttctttaaccggcctttctattggtta

SEQ ID NO: 196526 - DNA, 75 bp, synthetic construct
  source 1..75: mol_type = other DNA
ctttaatcacatcgttttaaaagccagtgaaaatggcgtgcctgtttatctgcgtgatgttgcgaaggtccagat

SEQ ID NO: 196527 - DNA, 75 bp, synthetic construct
  source 1..75: mol_type = other DNA
tggcgggcgggggtggtgatcctgcgatccggcaaaaacgcccgagaagtgatcgccgccgtgaaggacaaactg

SEQ ID NO: 196528 - DNA, 75 bp, synthetic construct
  source 1..75: mol_type = other DNA
ggtgacgtttccttccaatgatgaagcacgcatcagcgatgtgaaaaatgcgctggcgcgtggggagatccctga

SEQ ID NO: 196529 - DNA, 75 bp, synthetic construct
  source 1..75: mol_type = other DNA
ccattgtaaaagatccgctacatgttgagacggaagaacagttgtgggataagtttgtgctgatgcatcatgcgg

SEQ ID NO: 196530 - DNA, 75 bp, synthetic construct
  source 1..75: mol_type = other DNA
acagtgaacatcgcgcttgatttggcgcgtctggaaaaagccagacctgcggaacagcccgcccccgtcaagtaa

SEQ ID NO: 196531 - DNA, 75 bp, synthetic construct
  source 1..75: mol_type = other DNA
gggtttgacagacgatgtcaaagtgcaactgcagaaactggaaaacagaatgtcagcagcgtcatcatcgacctg

SEQ ID NO: 196532 - DNA, 75 bp, synthetic construct
  source 1..75: mol_type = other DNA
gggtttgacagacgatgtcaaagtgcaactgcagaaactggaaaaacagaatgtcagcagcgtcatcatcgacct

SEQ ID NO: 196533 - DNA, 75 bp, synthetic construct
  source 1..75: mol_type = other DNA
gaaagtcggcgtgctggatattccgggcttctatgtgggtttgacagacgatgtcaaagttcaactgcagaaact

SEQ ID NO: 196534 - DNA, 75 bp, synthetic construct
  source 1..75: mol_type = other DNA
gtattggcgcagtgctgcaaatggatgatgactacaccgttatcaattcgatggtggcaggtggtccggcagcga

SEQ ID NO: 196535 - DNA, 75 bp, synthetic construct
  source 1..75: mol_type = other DNA
aatctgcttgattacagccacaatgtgctgctggcgagcgatgttgaacagtttgccaaaaagaaaactgagctg

SEQ ID NO: 196536 - DNA, 75 bp, synthetic construct
  source 1..75: mol_type = other DNA
gccaatatgactcacccacagatattaatgtccgcaggacgagcattgtgtattaaaccttttgccagcaatcgt

SEQ ID NO: 196537 - DNA, 75 bp, synthetic construct
  source 1..75: mol_type = other DNA
acgttcacctttacttcagtgccctttcgtaatggcagcaggacactgaatggcggggatttccggaccacggcc

SEQ ID NO: 196538 - DNA, 75 bp, synthetic construct
  source 1..75: mol_type = other DNA
gcactctttcttccagatctatctctacatggcaccctgtgagcagtgtgtttacattcgctacgccatgttcgt

SEQ ID NO: 196539 - DNA, 75 bp, synthetic construct
  source 1..75: mol_type = other DNA
ccagatatcatcatgcctacgggcaatgaagagacggaaaccggtgagaaattcgaagataacgcgctgccgtgg

SEQ ID NO: 196540 - DNA, 75 bp, synthetic construct
  source 1..75: mol_type = other DNA
ggttgacgtgattggctggcgtcttgatgatgtggttgccttaattaaagggcctaagggcagtaaagttcgtct

SEQ ID NO: 196541 - DNA, 75 bp, synthetic construct
  source 1..75: mol_type = other DNA
gaatcaattgaatcagtaaaagttatagaaatacctgaaccttataatccggttgccatctatggatttgcttgc

SEQ ID NO: 196542 - DNA, 75 bp, synthetic construct
  source 1..75: mol_type = other DNA
tctggatgagacggtgaatatcgcactcgatctggcgaagcttgaaaaagccagacccgcggaacaacccgctcc

SEQ ID NO: 196543 - DNA, 75 bp, synthetic construct
  source 1..75: mol_type = other DNA
atgcattaccagccaaaacaagatttactcaatgatcgcattatcctggtgacgggagccagcgatgggattggt

SEQ ID NO: 196544 - DNA, 75 bp, synthetic construct
  source 1..75: mol_type = other DNA
gagaatctgtcgcactgcaacttcgaattgattatcgcacaattggcgatcctctctttgggggcgagctatgtg

SEQ ID NO: 196545 - DNA, 75 bp, synthetic construct
  source 1..75: mol_type = other DNA
gccactctactgtcacgctgccttaccagcgccggtagtgcctgaaggactggttaaagcggtgcgtttttatga

SEQ ID NO: 196546 - DNA, 75 bp, synthetic construct
  source 1..75: mol_type = other DNA
acttcgtgatacccagcacatgatgcgtattttcatgaaaggagatcactcaataacttccatcgagatcgggta

SEQ ID NO: 196547 - DNA, 75 bp, synthetic construct
  source 1..75: mol_type = other DNA
accatggtggtgattatggggccaatctcgttctggggtaacgttgtccctcgcgccttcgaacgtattggcggt

SEQ ID NO: 196548 - DNA, 75 bp, synthetic construct
  source 1..75: mol_type = other DNA
tgctcaatgatcgtattatcctggtgacgggcgccagcgacggaattggtcgtgaagccgcgctgacttatgcgc

SEQ ID NO: 196549 - DNA, 75 bp, synthetic construct
  source 1..75: mol_type = other DNA
atctgctaccaccatggcattttatgaatatggctcaggcttgtatgctggcttttggtatgtgtctggtgctgc

SEQ ID NO: 196550 - DNA, 75 bp, synthetic construct
  source 1..75: mol_type = other DNA
gctgccattgcgctgctaaaggaattaccacgctttaaggacaataattttgtgttccctgcccaacgtaaagga

SEQ ID NO: 196551 - DNA, 75 bp, synthetic construct
  source 1..75: mol_type = other DNA
cactggaaacctatgcctaccctttcattggcaaaaaggccgttagtgaaatcaccaaagtcgatcttctggcaa

SEQ ID NO: 196552 - DNA, 75 bp, synthetic construct
  source 1..75: mol_type = other DNA
cttttatgagcaggttaagcgtgagaatccgccagctgaaaccggagcatggaaagacgctgttgattgggtgct

SEQ ID NO: 196553 - DNA, 75 bp, synthetic construct
  source 1..75: mol_type = other DNA
cgaagattaaatcattcatcaatggcttcctgagcgacccagcgcacgataaccaatcctcagacagcctgcttg

SEQ ID NO: 196554 - DNA, 75 bp, synthetic construct
  source 1..75: mol_type = other DNA
atgccaaagaaggccaaggaactctcaggactcgtcgtatcacgattaaaatccgaaggcatgtatgccgttggt

SEQ ID NO: 196555 - DNA, 75 bp, synthetic construct
  source 1..75: mol_type = other DNA
agggttggaactggttatgacgagacttcatgcaggagcaaaatttgaccacggagtttataaagtctctggtgg

SEQ ID NO: 196556 - DNA, 75 bp, synthetic construct
  source 1..75: mol_type = other DNA
ggtaccgatgatggcaccggataagaagggggcagcaaactcagcggtgaatttcggttctggcctgggaaattt

SEQ ID NO: 196557 - DNA, 75 bp, synthetic construct
  source 1..75: mol_type = other DNA
cagtctcagatcggacagatatttgccgcctacggaattgtggttgccgtaacttcctggttatccggtgtctgt

SEQ ID NO: 196558 - DNA, 75 bp, synthetic construct
  source 1..75: mol_type = other DNA
gattgaagcagagtttccggtctcgatcaccggaatgttaatggatgccatagaagcacgtttacagcagcaata

SEQ ID NO: 196559 - DNA, 75 bp, synthetic construct
  source 1..75: mol_type = other DNA
accttcagcaaagttaaaagaaggtgttcgtgttcaacggatgaaagaagccattcaggctatccagcaggccat

SEQ ID NO: 196560 - DNA, 75 bp, synthetic construct
  source 1..75: mol_type = other DNA
gagaggcctcaagaaaggctaaagaacttgtgagaaaaaaaagtgaaatagaagatttcatcgtagctggtaaac

SEQ ID NO: 196561 - DNA, 75 bp, synthetic construct
  source 1..75: mol_type = other DNA
atctggcaacagaaagaatacagacgcaatctggagcgagcagccattgtgtacgcgaatgagtttggacataag

SEQ ID NO: 196562 - DNA, 75 bp, synthetic construct
  source 1..75: mol_type = other DNA
gaacgaatccccccgtcttcgccggcagtggcaggatgttctggaggagtgccggcagacagaggccgggccaga

SEQ ID NO: 196563 - DNA, 75 bp, synthetic construct
  source 1..75: mol_type = other DNA
gtgtacagcctgaaggccagtctttctggtgtgccggatacataccggtatcatctgtctcaccgtattcgtcgc

SEQ ID NO: 196564 - DNA, 75 bp, synthetic construct
  source 1..75: mol_type = other DNA
cccagacattttatataaaaccaggtaagtttatctggagctacctgggaacatttttatttatgttgggcggct

SEQ ID NO: 196565 - DNA, 75 bp, synthetic construct
  source 1..75: mol_type = other DNA
cgcatagaagacgctaagccaattaagttcatggcacaggacgtgatctggcaacagaaagaatacagacgcaat

SEQ ID NO: 196566 - DNA, 75 bp, synthetic construct
  source 1..75: mol_type = other DNA
actctccaggaaacccggggcggttcaaaggcattagctaacggcgtgctggcccgcgaagaagcaataagttca

SEQ ID NO: 196567 - DNA, 75 bp, synthetic construct
  source 1..75: mol_type = other DNA
tatcaacaagataaatgccgccatcgcaggcgtaatatatctgtttttactctctttggtggcgattgtcgttgc

SEQ ID NO: 196568 - DNA, 75 bp, synthetic construct
  source 1..75: mol_type = other DNA
acctacgcacatcaccggtgaacacgctggtcaaatggcaggaacaacgctttttgtggttgttaatggccgctg

SEQ ID NO: 196569 - DNA, 75 bp, synthetic construct
  source 1..75: mol_type = other DNA
cagagatgaaaagctgggttgatacagtttccttaaacaaaacaccattacttgatgctgtggtaacaacgatat

SEQ ID NO: 196570 - DNA, 75 bp, synthetic construct
  source 1..75: mol_type = other DNA
aaatagcgacatcttacgatgcaaaatgtttttccactaaaaagtggaatgttttaaattttgacagaaaacatt

SEQ ID NO: 196571 - DNA, 75 bp, synthetic construct
  source 1..75: mol_type = other DNA
gacctgtatcaacaatctgaaggctggtatctgctgccgccgtggcattttatgaacatggcgcaagcgtgtatg

SEQ ID NO: 196572 - DNA, 75 bp, synthetic construct
  source 1..75: mol_type = other DNA
gaacatggcacaggcctgtatgttggcttttggtctctgtttattactgctgctagtgatgagcggcgcatgggg

SEQ ID NO: 196573 - DNA, 75 bp, synthetic construct
  source 1..75: mol_type = other DNA
gcactcgttcttccaaatctatctctacatggcaccatgcgaacaatgcgtttacattcgctacgccatgtttgt

SEQ ID NO: 196574 - DNA, 75 bp, synthetic construct
  source 1..75: mol_type = other DNA
ccgcagggctggcctggggggctaagtatctcgaaattacggcaaccaaatatgattcaccaccaatgtatgtcg

SEQ ID NO: 196575 - DNA, 75 bp, synthetic construct
  source 1..75: mol_type = other DNA
tttaatcagtatgctggccggtttattatttaatgttgatcctggttctcaccgttttatcattatgatgacgtt

SEQ ID NO: 196576 - DNA, 75 bp, synthetic construct
  source 1..75: mol_type = other DNA
aagataaatgccgccatcacgggcgtaatgtatttgtttttaatctctttggtggcgattgtcgttgcaagttta

SEQ ID NO: 196577 - DNA, 75 bp, synthetic construct
  source 1..75: mol_type = other DNA
tttgcgtccacctattcaatactgccatcactaaaaaatgaagttaaagtaacatcgtatattggtacatggcaa

SEQ ID NO: 196578 - DNA, 75 bp, synthetic construct
  source 1..75: mol_type = other DNA
atactcgcaaaatagcaataaattagattttcagcacgaagccaggatattaaacggcatatggctcattaccgc

SEQ ID NO: 196579 - DNA, 75 bp, synthetic construct
  source 1..75: mol_type = other DNA
tatgattcaccgccgatgtatgtcgccataggattgttattactttgtatgtatggcttaagtaaagatatcaat

SEQ ID NO: 196580 - DNA, 75 bp, synthetic construct
  source 1..75: mol_type = other DNA
ttaaatgccagacccagccatcaggatttacttcccgatcctgaattgccagatgatacccggctatgggcaatg

SEQ ID NO: 196581 - DNA, 75 bp, synthetic construct
  source 1..75: mol_type = other DNA
caacaaacctgctgctgcatattccggcgattgcccatcaggccggctgccatattccaaccgttgacgactgga

SEQ ID NO: 196582 - DNA, 75 bp, synthetic construct
  source 1..75: mol_type = other DNA
ccccttccggcgaaccggtgtggcaggagatagccagagcctccgcgaaggcggcgttgaacttatgtaaacaag

SEQ ID NO: 196583 - DNA, 75 bp, synthetic construct
  source 1..75: mol_type = other DNA
aaaggcattacgtcggtacgttctcgtgtgaccaatctgactgaattgcagccagggatcacccatgaacaggtt

SEQ ID NO: 196584 - DNA, 75 bp, synthetic construct
  source 1..75: mol_type = other DNA
ctgactcttacgacccgtggtttaacctggcggtagaggagtgtatttttcgccagatgccggccacgcagcgcg

SEQ ID NO: 196585 - DNA, 75 bp, synthetic construct
  source 1..75: mol_type = other DNA
tgataattcattactctttactgagaacattcagaacactacacaaatatttccgcacaaaatcataacgtccgt

SEQ ID NO: 196586 - DNA, 75 bp, synthetic construct
  source 1..75: mol_type = other DNA
aattttatacgcttgataagcagtttcatctggccatttctgaagccagtcataatcgggtgttattagatatgt

SEQ ID NO: 196587 - DNA, 75 bp, synthetic construct
  source 1..75: mol_type = other DNA
gccattaacgaaaataatgtggctgaattttatacgcttgataagcagtttcatctggccatttctgaagccagt

SEQ ID NO: 196588 - DNA, 75 bp, synthetic construct
  source 1..75: mol_type = other DNA
aaaggctctatcaaaagatagcgaatcttattattaagctcatcaatgataatgtctttccgccaggtagttttt

SEQ ID NO: 196589 - DNA, 75 bp, synthetic construct
  source 1..75: mol_type = other DNA
tccagtctttctgagtgcgaaaaaggcgtgaaaagtgttgtggcgttaacgcctgagctgcaacctattgatggc

SEQ ID NO: 196590 - DNA, 75 bp, synthetic construct
  source 1..75: mol_type = other DNA
gaccaacgggcaaagagagtcatgtttatggcatctacggcattagtgaatccagtctttctgagtgcgaaaaag

SEQ ID NO: 196591 - DNA, 75 bp, synthetic construct
  source 1..75: mol_type = other DNA
atgtttataggtgacggtaaaagtacaggggtaactaccggcattagtagcaacctgaccagttggctctcttcc

SEQ ID NO: 196592 - DNA, 75 bp, synthetic construct
  source 1..75: mol_type = other DNA
agtacgaatgtgtattgagcaccttgtcaatgaaaaaaatattatcagaaagaataacgcaggtaaaaaggtgta

SEQ ID NO: 196593 - DNA, 75 bp, synthetic construct
  source 1..75: mol_type = other DNA
tcacaaatgccggcacagcagccctcgcagctgcggtgttaccggatggagaaaagatcacgctgacacatatcg

SEQ ID NO: 196594 - DNA, 75 bp, synthetic construct
  source 1..75: mol_type = other DNA
agttttattgatgaagacctgcggcaatattattccgacctcttgtggtttgtgaaaacgcaggagggagcgggt

SEQ ID NO: 196595 - DNA, 75 bp, synthetic construct
  source 1..75: mol_type = other DNA
gtattaattgtgatatgtgtgaacctgaatgccccaatgaagcgatttcaatgggcgaacatatctacgagatta

SEQ ID NO: 196596 - DNA, 75 bp, synthetic construct
  source 1..75: mol_type = other DNA
agtgcagaaatgtattgagcacattattaatgaaaaaaatattatcagaaaaaataatgcatataataattcgtg

SEQ ID NO: 196597 - DNA, 75 bp, synthetic construct
  source 1..75: mol_type = other DNA
aagataaagattttgtatgtgcgtttgcgacttcaccgaatagcttttatgaggctattgaatcctatcgtaatt

SEQ ID NO: 196598 - DNA, 75 bp, synthetic construct
  source 1..75: mol_type = other DNA
tgcattttttacaccatccacattaccgacatccgggaaaacgaaaatgccaactggcaacagtacaaaaccgaa

SEQ ID NO: 196599 - DNA, 75 bp, synthetic construct
  source 1..75: mol_type = other DNA
aaactcgaattagcacgcctacaggccgaacagcgtggcaaagagattgaatatcgcattggcgctgacgcacgc

SEQ ID NO: 196600 - DNA, 75 bp, synthetic construct
  source 1..75: mol_type = other DNA
cgcgaaaaaatggcgaaaatgatccccgaagaagataaaagcgccccaaaaattgagggatcttctgcaatgatc

SEQ ID NO: 196601 - DNA, 75 bp, synthetic construct
  source 1..75: mol_type = other DNA
attgtcttcgctgtggtgctggtcacgttgggaaaatatctcttccctgcaaaacccgttgtcgcgccagtcatt

SEQ ID NO: 196602 - DNA, 75 bp, synthetic construct
  source 1..75: mol_type = other DNA
tatatttatgtggtgattgaacatcagagccgtgaggatattcatatggcctttcgcctgatgcgctattccatg

SEQ ID NO: 196603 - DNA, 75 bp, synthetic construct
  source 1..75: mol_type = other DNA
caattacattatcagggggtggatgtaaccggggaatacgctttatatcagttgcctgagttatttttagatttt

SEQ ID NO: 196604 - DNA, 75 bp, synthetic construct
  source 1..75: mol_type = other DNA
ctgaaggtcttccgcgtgaaatcgagttgcgccagaaacaatacgagtactatcgtgatttactgttcagtttcc

SEQ ID NO: 196605 - DNA, 75 bp, synthetic construct
  source 1..75: mol_type = other DNA
ttatctgcccgtcttaatgagccgctggcaaatggtgccgtgatccacattgtgccgcgtctggcgggtgccaaa

SEQ ID NO: 196606 - DNA, 75 bp, synthetic construct
  source 1..75: mol_type = other DNA
catatcctgtctatagctctcaaactgcaaataatgggaaaataggttctatcaataccttcgattttgatggcg

SEQ ID NO: 196607 - DNA, 75 bp, synthetic construct
  source 1..75: mol_type = other DNA
aaaaacttgaattcccaatcccctgcccggaaaatccggaaaaatcccttgccatccagtctgaaatcgttcgga

SEQ ID NO: 196608 - DNA, 75 bp, synthetic construct
  source 1..75: mol_type = other DNA
tggcgatgcttcgtttttcgaaatagcaaacaacggaagaaaaccagtaaagtcttctttgcgcattgctggcaa

SEQ ID NO: 196609 - DNA, 75 bp, synthetic construct
  source 1..75: mol_type = other DNA
tctggataaattcgacaccctgaccaactccatcaccgaaggtctcccgcgtgaaatcgagttgcgccagaaaca

SEQ ID NO: 196610 - DNA, 75 bp, synthetic construct
  source 1..75: mol_type = other DNA
gccgtggttttttctattgagcatgtcgacgtggcttggcttttgtacctgggcctgtgcgcacttcacgaataa

SEQ ID NO: 196611 - DNA, 75 bp, synthetic construct
  source 1..75: mol_type = other DNA
ctcgaacaattgctgacggcgctcgccagttcgcaaacagatgcttacaccgtcgcacgtattatcgccccgcta

SEQ ID NO: 196612 - DNA, 75 bp, synthetic construct
  source 1..75: mol_type = other DNA
gttgcgctggcgttcttgctcacctttctcatcattcgcttgtttaccatcccggaaagcacctggccgctggtc

SEQ ID NO: 196613 - DNA, 75 bp, synthetic construct
  source 1..75: mol_type = other DNA
acaccctgactaactccatcaccgaaggtctcccgcgtgaaatcgagttgcgccagaaacaatacgagtactatc

SEQ ID NO: 196614 - DNA, 75 bp, synthetic construct
  source 1..75: mol_type = other DNA
cgaacaggtaaattttcaataactaatgtttgcggcctgattacattaaaaaataaatacccattaatctacaaa

SEQ ID NO: 196615 - DNA, 75 bp, synthetic construct
  source 1..75: mol_type = other DNA
gtcaaaaatattaagatccccatcccctgcccggataatccggaaaagtcccttgccatccagtctgaaatcgtt

SEQ ID NO: 196616 - DNA, 75 bp, synthetic construct
  source 1..75: mol_type = other DNA
aacatggagatgtcgtgataactgacgtgggggaaactgtagaagacgttggtaaagcagtggcatggcttgggg

SEQ ID NO: 196617 - DNA, 75 bp, synthetic construct
  source 1..75: mol_type = other DNA
ccgtccggtcctgcgccagggagcatgccgtatccgtgccgtcgcgatggcaaacatcgagctggcagatgaagg

SEQ ID NO: 196618 - DNA, 75 bp, synthetic construct
  source 1..75: mol_type = other DNA
aatgaacgatatcatcaacgctcatgctgacctgaaagagtacctgcgtaagcatgctgagaagatgaacaaggg

SEQ ID NO: 196619 - DNA, 75 bp, synthetic construct
  source 1..75: mol_type = other DNA
aaaacaacagcaacgaaatcagccttcgtggttacctggaacgcactggtaacggtgcccgtaaaggtaacggcc

SEQ ID NO: 196620 - DNA, 75 bp, synthetic construct
  source 1..75: mol_type = other DNA
gagaaggcaaaagcgaaagggctgacctcgacggtctgcttcccgacgggcaacatcgcgccggaaggttcggtg

SEQ ID NO: 196621 - DNA, 75 bp, synthetic construct
  source 1..75: mol_type = other DNA
taacgggtaaaaaaccggttatcaccgagcgagaaatcaacggcgttcgctggcgctggctgggcgatggtgtgc

SEQ ID NO: 196622 - DNA, 75 bp, synthetic construct
  source 1..75: mol_type = other DNA
ggcgttcggtgcggctttcgtggctgactgcgctttatctctctggctctatcagcgtaaagctaacgctaagac

SEQ ID NO: 196623 - DNA, 75 bp, synthetic construct
  source 1..75: mol_type = other DNA
ccaatatctttgaaaagtctcgaaggggaaattagtacagagcagcaatgtttacagctacttcgaaagcaatac

SEQ ID NO: 196624 - DNA, 75 bp, synthetic construct
  source 1..75: mol_type = other DNA
gacagccattctggcgaagaggtgatggctattttgcatcagttgcgcgatcgcggacacacggtgattattgtc

SEQ ID NO: 196625 - DNA, 75 bp, synthetic construct
  source 1..75: mol_type = other DNA
aaaccggtaagcatctggcagagataaaactggatcccaaaaccatggtgaacaacattgaccattctctggcaa

SEQ ID NO: 196626 - DNA, 75 bp, synthetic construct
  source 1..75: mol_type = other DNA
gcgatgtatgggcaaggaaagacccgaggtcaagtggcattactcggtattgaagcagcaaccaatcaggcatgt

SEQ ID NO: 196627 - DNA, 75 bp, synthetic construct
  source 1..75: mol_type = other DNA
tgaacaaaccaggaataatataaatcgtcttgacgattccattaacaatcttacgcggggggctggccgttttgc

SEQ ID NO: 196628 - DNA, 75 bp, synthetic construct
  source 1..75: mol_type = other DNA
tcttcaattggtcacgggcggtatcccccgtgttgacactgtattaacctaccgctcgaagctgtctgagttggg

SEQ ID NO: 196629 - DNA, 75 bp, synthetic construct
  source 1..75: mol_type = other DNA
atgatatacccggaaattacaggcaaaagcggcgagcatttacgtctaaaaacgctggaagccgtctggatccag

SEQ ID NO: 196630 - DNA, 75 bp, synthetic construct
  source 1..75: mol_type = other DNA
tcaatgggcaaaaatatcgcacaacaaaccgtaatggagtggtggtatacgacggaatggctttgttgaataaat

SEQ ID NO: 196631 - DNA, 75 bp, synthetic construct
  source 1..75: mol_type = other DNA
atcacctgatgatggatgtgtcgcaaagcgatagcgaaacagaattacgcgggaaccgtaaaatgaccgcccctt

SEQ ID NO: 196632 - DNA, 75 bp, synthetic construct
  source 1..75: mol_type = other DNA
ggaattaaagatgcttatgtcaatgggcaaaaatatcgcacaacaaaccgtaatggagtggtggtatacgacgga

SEQ ID NO: 196633 - DNA, 75 bp, synthetic construct
  source 1..75: mol_type = other DNA
tcagagtaacgcgctggtaactattgaacagaacggttttgtggtttatcagaaagaggttcctcctggcccgtt

SEQ ID NO: 196634 - DNA, 75 bp, synthetic construct
  source 1..75: mol_type = other DNA
acctttgatacccattttatgatgggcggaatgaaagaccaacaggttgctcatattcgcttggatgataatcaa

SEQ ID NO: 196635 - DNA, 75 bp, synthetic construct
  source 1..75: mol_type = other DNA
ggtgcgagcaagcaaagtgattttgtccaggcaggttatcagtatggttttaataacttattgacgctgtatggc

SEQ ID NO: 196636 - DNA, 75 bp, synthetic construct
  source 1..75: mol_type = other DNA
ccatttccgtcgatgccacgaagtcgcatagtaaacaagacaacggcgatgtgtttgacgggcaaagttatcaaa

SEQ ID NO: 196637 - DNA, 75 bp, synthetic construct
  source 1..75: mol_type = other DNA
aaatattcgtcttgatgataatcaacccttgccggggcagtatgacatcgatatttatgtcaataagcaatggcg

SEQ ID NO: 196638 - DNA, 75 bp, synthetic construct
  source 1..75: mol_type = other DNA
cagcggtgtgcggttgtttcgtgatatgcagatgttgcctaactcgaaacaaaattttacgccacgggtgcaggg

SEQ ID NO: 196639 - DNA, 75 bp, synthetic construct
  source 1..75: mol_type = other DNA
tataaatagcgataattttgcacgcgaaaatcagtgtttaacatttgagcaacttgttcagggcggaagctactc

SEQ ID NO: 196640 - DNA, 75 bp, synthetic construct
  source 1..75: mol_type = other DNA
cctttacctgggcagtacgacattgatatttatgtcaataaacaatggcgtggaaaatatgagattatcgtcaaa

SEQ ID NO: 196641 - DNA, 75 bp, synthetic construct
  source 1..75: mol_type = other DNA
atggcgagattactggggacgtagcggcagcagtaaggattatcagttgagttattccaataactggcggcggat

SEQ ID NO: 196642 - DNA, 75 bp, synthetic construct
  source 1..75: mol_type = other DNA
atttgctcaaattctcggtactctgcgcattggtgatatgtatacgtcagccgatatctttgattctgttcgctt

SEQ ID NO: 196643 - DNA, 75 bp, synthetic construct
  source 1..75: mol_type = other DNA
tcgcggtcggctactttaacgtaggttcttcgattggtgcgatgattgcgccgccgctggtggtatgggcaatcg

SEQ ID NO: 196644 - DNA, 75 bp, synthetic construct
  source 1..75: mol_type = other DNA
tccggattatcaatgtcgcccgacgcagtgcaataaaagccagcacacaggcgattaatcagctgcgtgcgctgc

SEQ ID NO: 196645 - DNA, 75 bp, synthetic construct
  source 1..75: mol_type = other DNA
agctgcgttgagctggcgcggacgtttgtctttctggcgaatcagggaaaggctattcatatcgatgagcccgta

SEQ ID NO: 196646 - DNA, 75 bp, synthetic construct
  source 1..75: mol_type = other DNA
ctacgaactccgattatagttttccccgttcagaacaataccaacgcggcgacacttcaactaacactaggcgga

SEQ ID NO: 196647 - DNA, 75 bp, synthetic construct
  source 1..75: mol_type = other DNA
ctacgaactcctattatcgttttccccgttcagaacaataccaacgccgcaacgcttcaattgacactgggcgga

SEQ ID NO: 196648 - DNA, 75 bp, synthetic construct
  source 1..75: mol_type = other DNA
tcagagtggcggcattcagagcaataaagcagtaaacgttacagggcgggtaacaccgtcagactacgcaaattt

SEQ ID NO: 196649 - DNA, 75 bp, synthetic construct
  source 1..75: mol_type = other DNA
tgatgggcgcggggtggatagagggcgaaccttactttctgcacaagcagatgacttcaaaatgcatgagcataa

SEQ ID NO: 196650 - DNA, 75 bp, synthetic construct
  source 1..75: mol_type = other DNA
ggtaagcaatgtttaacatttaagcaacttattcagggcgggagctatacctgggatatcggagtttttcgtctc

SEQ ID NO: 196651 - DNA, 75 bp, synthetic construct
  source 1..75: mol_type = other DNA
aacaaatttttgagtcaaacgtcgacacgttttggcctggcggcttggcgttattcatcgcgtgattaccgaaca

SEQ ID NO: 196652 - DNA, 75 bp, synthetic construct
  source 1..75: mol_type = other DNA
gccatgcgtcattactccgaagaggaaatctggcaacgcgtcggcaaagatccgtcgggatctccgttcaattcc

SEQ ID NO: 196653 - DNA, 75 bp, synthetic construct
  source 1..75: mol_type = other DNA
ttgtctttctggcgaatcaggggaaggcttttcatatcgatgagccagtagtaacgccgatgcaggcacggcaaa

SEQ ID NO: 196654 - DNA, 75 bp, synthetic construct
  source 1..75: mol_type = other DNA
ttttagaaaacatcttgcggcaagtgcggccgctaattggtcagggtaaagtcgcagattatattccggcactgg

SEQ ID NO: 196655 - DNA, 75 bp, synthetic construct
  source 1..75: mol_type = other DNA
ggcggacagtttcatctgccgcacggcctggcgaatgcgctcctgctcacggcggttatccgctttaatgctggc

SEQ ID NO: 196656 - DNA, 75 bp, synthetic construct
  source 1..75: mol_type = other DNA
gatgtatgcggcaggtaacgtaggatctattattgcgcccatcgcctgtggttatgcccaggaagagtacagttg

SEQ ID NO: 196657 - DNA, 75 bp, synthetic construct
  source 1..75: mol_type = other DNA
ctggtcagcaatgtatggtcactcttctctgccactgatggtgctggggctggcggtgatgggctttgccgaact

SEQ ID NO: 196658 - DNA, 75 bp, synthetic construct
  source 1..75: mol_type = other DNA
aaagcacgtaaaaaatcaggaattgatgtgccagtattttcatggccacatttttctttagatcacaaaaaacat

SEQ ID NO: 196659 - DNA, 75 bp, synthetic construct
  source 1..75: mol_type = other DNA
ccgatgtggccgaatttatgatgttgcagatgcttaaccgccatcaaatgcagttcacgcatcgttcccaactgc

SEQ ID NO: 196660 - DNA, 75 bp, synthetic construct
  source 1..75: mol_type = other DNA
tggttatcggttttggcggcggctctgcgctggacgccgcaaaagcgattgtctggtttagtcgccagtgtgcta

SEQ ID NO: 196661 - DNA, 75 bp, synthetic construct
  source 1..75: mol_type = other DNA
tcaccgacattccagatggaattaaccgaacaatatccgtcaaaggcgttattattaattgccgaacaaaatacc

SEQ ID NO: 196662 - DNA, 75 bp, synthetic construct
  source 1..75: mol_type = other DNA
cgtgacaagctggctaatggcgcgctggtgctggacgacagttttattcccacctgtcaggccatccgggtcagt

SEQ ID NO: 196663 - DNA, 75 bp, synthetic construct
  source 1..75: mol_type = other DNA
ccctatcacgacggttatgtttacttcgaactcgacaagggcgtagctgcctggcaggacgtgatgaaagccggg

SEQ ID NO: 196664 - DNA, 75 bp, synthetic construct
  source 1..75: mol_type = other DNA
actgggggccagtgagatccatccaacgttcctttatctgtcactggcgattattgtctgcggctatggtttgtt

SEQ ID NO: 196665 - DNA, 75 bp, synthetic construct
  source 1..75: mol_type = other DNA
aactggggatggctgctggttctgctggtggcaacgcctgcgctgattaccgtactgttctggaaagagtggtcg

SEQ ID NO: 196666 - DNA, 75 bp, synthetic construct
  source 1..75: mol_type = other DNA
tcaccgacattccagatagaattaatcgatgaatatccgtctaaggcgttattattaatagccgaacaaaatacc

SEQ ID NO: 196667 - DNA, 75 bp, synthetic construct
  source 1..75: mol_type = other DNA
ttaatggtcatttatatcaaccggggaatataaccggttttgtcgctcttctcaataaatacatagccggtgaaa

SEQ ID NO: 196668 - DNA, 75 bp, synthetic construct
  source 1..75: mol_type = other DNA
tttattcttgggtgcgctgaactgatccgagaaatttctgaaacaattagcaagcaatgtcctgactcttttgtg

SEQ ID NO: 196669 - DNA, 75 bp, synthetic construct
  source 1..75: mol_type = other DNA
ccttggggaagagcatgcacttgctgttatcttccacgagctaggtcatttgcttcttggacacaaagcagtttt

SEQ ID NO: 196670 - DNA, 75 bp, synthetic construct
  source 1..75: mol_type = other DNA
gcaatttggactcatttgggatggagattctgtcgaaacctgtagtggtgcctttggcgactatttaaagtttaa

SEQ ID NO: 196671 - DNA, 75 bp, synthetic construct
  source 1..75: mol_type = other DNA
gcaataccctgtatctggaacgtggatttgcccaacttctcggcacgcttcgcgtgggtgatatgtacacatcaa

SEQ ID NO: 196672 - DNA, 75 bp, synthetic construct
  source 1..75: mol_type = other DNA
gtggaatgaaagaccagcaggttgcaaatattcgtcttgatgataatcaacccttaccggggcagtatgacatcg

SEQ ID NO: 196673 - DNA, 75 bp, synthetic construct
  source 1..75: mol_type = other DNA
cattgaagcttatgcagctgaagaaacctttgatacccattttatgataggtggaatgaaagaccagcaggttgc

SEQ ID NO: 196674 - DNA, 75 bp, synthetic construct
  source 1..75: mol_type = other DNA
ggtcatctgtatcaaccgggagatattactggttttgtaactcttctgaataaatatatagcaggtgaaattcat

SEQ ID NO: 196675 - DNA, 75 bp, synthetic construct
  source 1..75: mol_type = other DNA
gataagttttataaatcgaagtattacgatagattacataagataattatttctgctatttcccggaggaaataa

SEQ ID NO: 196676 - DNA, 75 bp, synthetic construct
  source 1..75: mol_type = other DNA
tgtgatctcttgtctgtatgccgcgaaggcgcgtaaaaagtcaggtatcaatgtaccggtattttcatggccgca

SEQ ID NO: 196677 - DNA, 75 bp, synthetic construct
  source 1..75: mol_type = other DNA
gcttacatccaaacaggagagataccaaatccaggtagtcgaaggtgcagaactgatatggaagcggatgaccaa

SEQ ID NO: 196678 - DNA, 75 bp, synthetic construct
  source 1..75: mol_type = other DNA
ttccggatgtcctggacccagagctcgacccaatggcccgtgacgatgaaataaacctgctctacgttgcatcca

SEQ ID NO: 196679 - DNA, 75 bp, synthetic construct
  source 1..75: mol_type = other DNA
cgacgataaccatacgtgggcagctctccgataacatggtgtatacggagaagcacatccgtatcatcagtgtga

SEQ ID NO: 196680 - DNA, 75 bp, synthetic construct
  source 1..75: mol_type = other DNA
tgaccggggctttttactttcagggagcaacagatatgccgggttgtacatcacgtttattgcccgaaggccctt

SEQ ID NO: 196681 - DNA, 75 bp, synthetic construct
  source 1..75: mol_type = other DNA
ggtgagtttgtgatcccggaactgctcggcggcccggacagtattatgatcggacgcgtcctgtggcaggagttc

SEQ ID NO: 196682 - DNA, 75 bp, synthetic construct
  source 1..75: mol_type = other DNA
atgagtacacttgaacctgcagcccagccgaaaccgccgggcggattaaggctgtggctgtcgcagttgcaaatg

SEQ ID NO: 196683 - DNA, 75 bp, synthetic construct
  source 1..75: mol_type = other DNA
caacggaagcgctggtccctgccccgctttaccagggaatgcgcgacggcaaaatcgtccgttttgaagagataa

SEQ ID NO: 196684 - DNA, 75 bp, synthetic construct
  source 1..75: mol_type = other DNA
gaggcgcaaaacatcagccgtaaagtcgtaatcatcccttctgctatcgaacgcatgttagtgactcttgccacc

SEQ ID NO: 196685 - DNA, 75 bp, synthetic construct
  source 1..75: mol_type = other DNA
taccgcaatgtgtttactgaagatgaccagggaacatatccccggctggttatccgtaatgctgaaggtcagttg

SEQ ID NO: 196686 - DNA, 75 bp, synthetic construct
  source 1..75: mol_type = other DNA
atcaaaatggggcttcgacggctggatgtcgcgtcgcattactctgcggaagaactggcgaaagtgaaaaaaaga

SEQ ID NO: 196687 - DNA, 75 bp, synthetic construct
  source 1..75: mol_type = other DNA
atgtacatcatgaacagtacggaaaacatgccctttatcgatctccagtgccgcaagctttttaccatcaaaagt

SEQ ID NO: 196688 - DNA, 75 bp, synthetic construct
  source 1..75: mol_type = other DNA
gcggaagccagtaaggatatacggcaggcattgaagagttttgcggggaaggaagtggttttttatcgccctgaa

SEQ ID NO: 196689 - DNA, 75 bp, synthetic construct
  source 1..75: mol_type = other DNA
atctggccgtttatatcggcattgtttacgcctacgtgccgtttatggtgctgccgatttataccgcgttgattc

SEQ ID NO: 196690 - DNA, 75 bp, synthetic construct
  source 1..75: mol_type = other DNA
cctgctatggctgggggttatcgaccagccgctaactattctgcataccaacctggctgtctatatcggcattgt

SEQ ID NO: 196691 - DNA, 75 bp, synthetic construct
  source 1..75: mol_type = other DNA
ccaaaggcgggattattgccggatcgatgctggtgtttatcccggctgtgggcgagtttgtgatcccggaactgc

SEQ ID NO: 196692 - DNA, 75 bp, synthetic construct
  source 1..75: mol_type = other DNA
ttaccgacgtgcgtgtggaacggctgcatgacatgagcgaggcagatgctaaagcggaaggcgcatctccggcga

SEQ ID NO: 196693 - DNA, 75 bp, synthetic construct
  source 1..75: mol_type = other DNA
tcgtgctggtcggtttccgccgtgatctgaaactcaatgatggcttttcgctaagtggtgtatccgctctttatc

SEQ ID NO: 196694 - DNA, 75 bp, synthetic construct
  source 1..75: mol_type = other DNA
accaaaatattgccgcttatgctgcgttatcccaggcagagaacagcgccaataatagtgattatttgtatacta

SEQ ID NO: 196695 - DNA, 75 bp, synthetic construct
  source 1..75: mol_type = other DNA
acggatactggtacttatgcggtgcacacgcccggtgatgaacgatgtgaagacgttatcaaatggaccggcttt

SEQ ID NO: 196696 - DNA, 75 bp, synthetic construct
  source 1..75: mol_type = other DNA
ggattcgtcggcgcaatcgtcattgccagcgcctacggctggagtatcgaacgggtggcctatcgcccggtgcgt

SEQ ID NO: 196697 - DNA, 75 bp, synthetic construct
  source 1..75: mol_type = other DNA
gcctctattaccaccatgcaggcggtgatctggattgttaccttcctcgccatgctggcgctgacgattttcatt

SEQ ID NO: 196698 - DNA, 75 bp, synthetic construct
  source 1..75: mol_type = other DNA
acgccatcggcggaaaatgtgtgttcaccagtgagtggaatcagttctcccgacggacttacagtgcaaactggt

SEQ ID NO: 196699 - DNA, 75 bp, synthetic construct
  source 1..75: mol_type = other DNA
tggctgtgctcggtctgctgtggttgcgccatgagaacggcaatttatcccgctcctttgagacggcgaaccatg

SEQ ID NO: 196700 - DNA, 75 bp, synthetic construct
  source 1..75: mol_type = other DNA
atgtgacaaccgttctgcaaaactactttcattactgcgctctgaaaatgagctgtgtagagctggccaggacgt

SEQ ID NO: 196701 - DNA, 75 bp, synthetic construct
  source 1..75: mol_type = other DNA
atttcatacgatacggtggtagcgcgttccgaatttgaacattccgcgcgaaatgcggctatcgcctggctgatg

SEQ ID NO: 196702 - DNA, 75 bp, synthetic construct
  source 1..75: mol_type = other DNA
ggctgaaacacgcaatggccgtaactcttgagcatgtgtcggtcacggatgcagggcaggctggtgttgctgcaa

SEQ ID NO: 196703 - DNA, 75 bp, synthetic construct
  source 1..75: mol_type = other DNA
agggattatccgttggcggagaatatggcaccagcgccacctatatgagtgaagttgccacgcatcatttcagta

SEQ ID NO: 196704 - DNA, 75 bp, synthetic construct
  source 1..75: mol_type = other DNA
ttgaccgctattgggatcgccgactacctgtcgatccgtttaagcttgctaaagcgtggggtgctcgtgttgaag

SEQ ID NO: 196705 - DNA, 75 bp, synthetic construct
  source 1..75: mol_type = other DNA
gtgatttgatgaccggggagctgaaaatccgtggtgttaatgcgctgaggattttcaacgaagcctttggtctga

SEQ ID NO: 196706 - DNA, 75 bp, synthetic construct
  source 1..75: mol_type = other DNA
cttaaaatccgtggtgttaatgcgctgaggattttcaacgacgcttttggtcttatttttcgtcgttcggaagag

SEQ ID NO: 196707 - DNA, 75 bp, synthetic construct
  source 1..75: mol_type = other DNA
caactccacgaaaaacgcaacgtttaatttatggggtaattcatcccgacctgtagttgcagagcttggtgatga

SEQ ID NO: 196708 - DNA, 75 bp, synthetic construct
  source 1..75: mol_type = other DNA
gaaaccggcagtagctctgcggataatatcggtggtgtgtattacaaacaggcccagatttatataaatggcgca

SEQ ID NO: 196709 - DNA, 75 bp, synthetic construct
  source 1..75: mol_type = other DNA
cggacgggtgaaatatccatgtcgcataaagtgtctgttggcggcggttctcaggtcaatggtgcgctgggtatc

SEQ ID NO: 196710 - DNA, 75 bp, synthetic construct
  source 1..75: mol_type = other DNA
aactcaattgctttcggggataacgataccggcctgaaacagaatggtgatggcctgctggatgtttatgccaat

SEQ ID NO: 196711 - DNA, 75 bp, synthetic construct
  source 1..75: mol_type = other DNA
tacggataacagtataacgttcgctgtaaacgggcagatggttccatcaaactacggaaactttgatgcccgcta

SEQ ID NO: 196712 - DNA, 75 bp, synthetic construct
  source 1..75: mol_type = other DNA
ggataatgtcaacggcgtgtattaccgcccgcttcagaaactgattaatggtacctggtataacgtggcgagtgt

SEQ ID NO: 196713 - DNA, 75 bp, synthetic construct
  source 1..75: mol_type = other DNA
gatctgcgatatgtaaaaaaatctggtgatttgatgaccggggagctgaaaatccgtggtgttaatgcactgagg

SEQ ID NO: 196714 - DNA, 75 bp, synthetic construct
  source 1..75: mol_type = other DNA
atggtatcgtacgcgttgcccaacgagtcattcctgaaattaaacatcaggatgaggtgcgggtaaaaattgcca

SEQ ID NO: 196715 - DNA, 75 bp, synthetic construct
  source 1..75: mol_type = other DNA
atgaaatcagtagtgaatgatactgatggtatcgtgcgcgttgcagaaagcgtcattcctgaaattaaacatcag

SEQ ID NO: 196716 - DNA, 75 bp, synthetic construct
  source 1..75: mol_type = other DNA
ccttaatgacgttgtggctaactttgccacgcgtggttcggaaaaccatttcgtacagatagcgcagcttcagag

SEQ ID NO: 196717 - DNA, 75 bp, synthetic construct
  source 1..75: mol_type = other DNA
gcgagaaaacgtctgcccgccgaagtctctttctggacaaaagaagggttgtggaaaaatgagagcgctggcctg

SEQ ID NO: 196718 - DNA, 75 bp, synthetic construct
  source 1..75: mol_type = other DNA
atggcggaaatagcggttataaatcacaaaaaacgtaaaaatagcccgcgaattgtccagtcaaacgaactgact

SEQ ID NO: 196719 - DNA, 75 bp, synthetic construct
  source 1..75: mol_type = other DNA
ctcagtgaaacaaaagaaataaccaatccgtatgccatgcgtttatacgaatccctgtgccagtaccgtaaaccg

SEQ ID NO: 196720 - DNA, 75 bp, synthetic construct
  source 1..75: mol_type = other DNA
aatccaaatattgccgcttatgccgcgttatctcaggcagaaaacagcaacaataataatgattatttgtatagc

SEQ ID NO: 196721 - DNA, 75 bp, synthetic construct
  source 1..75: mol_type = other DNA
tgcaggcaagtgttgatgagatcaatagccggacaccaatgcgcctctcttacatcgagaaaaagaaaggcgtaa

SEQ ID NO: 196722 - DNA, 75 bp, synthetic construct
  source 1..75: mol_type = other DNA
agcggttataaaccataaaaaacgtaaaaatagcccgcggattgtccagtcaaatgagctgactgaggcggcata

SEQ ID NO: 196723 - DNA, 75 bp, synthetic construct
  source 1..75: mol_type = other DNA
ggcggttcactgttttatgaagtgtgacaatctgaaaatctgtcacacttcacatgggcctgtcatggcggaaat

SEQ ID NO: 196724 - DNA, 75 bp, synthetic construct
  source 1..75: mol_type = other DNA
ccgcgcattatgagcggtgcagaagatatgagcgcctatattacgctcccgctttgccgtatcagcgatcgccat

SEQ ID NO: 196725 - DNA, 75 bp, synthetic construct
  source 1..75: mol_type = other DNA
cccacaccatttccagcaacagcagcgttacaacgactacctggataaccagcgtttccgggccatgaatgattt

SEQ ID NO: 196726 - DNA, 75 bp, synthetic construct
  source 1..75: mol_type = other DNA
ataaaaaacgtaaaaatagtccgcgaattgtgcagtcgaatgagctgactgaggcggcatatagcctttcccgcg

SEQ ID NO: 196727 - DNA, 75 bp, synthetic construct
  source 1..75: mol_type = other DNA
aatatgcctgtcgatcagattcagcgccagtttattcagcagtcgaaaatttcctcaccggaaaagatccgcaac

SEQ ID NO: 196728 - DNA, 75 bp, synthetic construct
  source 1..75: mol_type = other DNA
ggctgccgccggagccgttgcactgcatgtctccggcagtttcccggatctgaacatgcaactgtgggcgataag

SEQ ID NO: 196729 - DNA, 75 bp, synthetic construct
  source 1..75: mol_type = other DNA
ggtcaatctgccgctgcatctgcgtgacggcatctggcaggccgatgttcatgactcggaactgctacagtctgc

SEQ ID NO: 196730 - DNA, 75 bp, synthetic construct
  source 1..75: mol_type = other DNA
gtggcaaacaccattctcttcctgttgtctgacaaaacatcatgggtgacgggcgctatctgggatgtcgatgcc

SEQ ID NO: 196731 - DNA, 75 bp, synthetic construct
  source 1..75: mol_type = other DNA
aagatgccttgatcgttaaagaagagggtggcctgggtcataaagcctgtatttcaggtcagggtgatatgccgt

SEQ ID NO: 196732 - DNA, 75 bp, synthetic construct
  source 1..75: mol_type = other DNA
atgctgttacaacccggaagtgatatctggcagaaggagtatgcgctggagctgcagcgtcgtcgcctgacgctg

SEQ ID NO: 196733 - DNA, 75 bp, synthetic construct
  source 1..75: mol_type = other DNA
gaacgagaagatgtatgtccgcattgtggaagagggtaatgactccaacttattgatagtgttttatgttcagat

SEQ ID NO: 196734 - DNA, 75 bp, synthetic construct
  source 1..75: mol_type = other DNA
attggttatgttcccaacatcgcgcaaagcgatgcgacattacagggtttgcgtcagctcatttttatctggcct

SEQ ID NO: 196735 - DNA, 75 bp, synthetic construct
  source 1..75: mol_type = other DNA
attctgcggcgcaaaacgaatgccaggcggtgaaactggcgcacgatggcgcgttatctctcagtcaatgtgatg

SEQ ID NO: 196736 - DNA, 75 bp, synthetic construct
  source 1..75: mol_type = other DNA
gatgagcttggctacgacgtcgcaaacagcgaaagcacgggcgcggatgatcctaaagtcatcgatggccgtcat

SEQ ID NO: 196737 - DNA, 75 bp, synthetic construct
  source 1..75: mol_type = other DNA
tgcagtcaggaagtattggtatcgatcgcaaagatattgaaaaagtatttaccgggcgtaccgtattatcgagca

SEQ ID NO: 196738 - DNA, 75 bp, synthetic construct
  source 1..75: mol_type = other DNA
cgtgaaaccgctggctggaatacgctgaatggtaagaatacgatatcacgggtgttgggacttatgcctgacgtc

SEQ ID NO: 196739 - DNA, 75 bp, synthetic construct
  source 1..75: mol_type = other DNA
accggtaaaaatcatgctggttggacgtgaaaccgctggctggaatacgctgaatggtaagaatacgatatcacg

SEQ ID NO: 196740 - DNA, 75 bp, synthetic construct
  source 1..75: mol_type = other DNA
ctgtagatcgttacaggaaacatcttccggtacaaaatgatggcaccaccaacctcaaatcacgtagccgcttca

SEQ ID NO: 196741 - DNA, 75 bp, synthetic construct
  source 1..75: mol_type = other DNA
atgctggttggacgtgaaaccgcaggctggaatacgctgagtggtaagaatacgatatcacgggtgttgggactt

SEQ ID NO: 196742 - DNA, 75 bp, synthetic construct
  source 1..75: mol_type = other DNA
aaggtaatcagcaacttggctatatcttcgccgccacgctgttttcactgttcggcctgctgtttatgtggatct

SEQ ID NO: 196743 - DNA, 75 bp, synthetic construct
  source 1..75: mol_type = other DNA
atcttttgcaagttaaatatttcggacactctacaggaggtgtcgaattttttaatctgcttaataaagtcatcg

SEQ ID NO: 196744 - DNA, 75 bp, synthetic construct
  source 1..75: mol_type = other DNA
ggcagtgatgaaatcgatattggtcgcctggtcggcaccgtcattgaagcgcgctggtgggtgattggcatcacc

SEQ ID NO: 196745 - DNA, 75 bp, synthetic construct
  source 1..75: mol_type = other DNA
acgccagctgatcttcatctacccaagcgcactggcggtagtcaccattgtggcgatgggttgcttctacagtct

SEQ ID NO: 196746 - DNA, 75 bp, synthetic construct
  source 1..75: mol_type = other DNA
tttccgattatggatttcgcccaggagctggaactggtcgccagtgcttcggcgcgtttgttggcccatagcggt

SEQ ID NO: 196747 - DNA, 75 bp, synthetic construct
  source 1..75: mol_type = other DNA
tcaatgaaatgagcgctgcgctaaagcgtcgattcgattttgaaacggtctttccgattatggatttcgcccagg

SEQ ID NO: 196748 - DNA, 75 bp, synthetic construct
  source 1..75: mol_type = other DNA
tattggctcaattttatggctttattgggttgataatgattgctgtattgagcacttctgtcaaagttgaaattg

SEQ ID NO: 196749 - DNA, 75 bp, synthetic construct
  source 1..75: mol_type = other DNA
cttcgccgccacgctgttttcactgtttggcctgctgtttatgtggatctgctattcgggcgtgaaagagcgtta

SEQ ID NO: 196750 - DNA, 75 bp, synthetic construct
  source 1..75: mol_type = other DNA
ttacacccagtacgtgcttaacgatcccatcctgttgtcgtatatgggatttttcagcatgggctgtattttcat

SEQ ID NO: 196751 - DNA, 75 bp, synthetic construct
  source 1..75: mol_type = other DNA
cttcgccgccacgctgttttcactgttcggcctgctgtttatgtggatctgctactcgggcgtgaaagagcgtta

SEQ ID NO: 196752 - DNA, 75 bp, synthetic construct
  source 1..75: mol_type = other DNA
tctatatcggcggcctgctgatttgggtgctgggcgatctgctcaactatttcttcggcggcggttcggtcagct

SEQ ID NO: 196753 - DNA, 75 bp, synthetic construct
  source 1..75: mol_type = other DNA
cccaacgaacgcgcatcgctggcagcatggcgtcagggtggcgctacattgggcctgctgctgtgtacggtggga

SEQ ID NO: 196754 - DNA, 75 bp, synthetic construct
  source 1..75: mol_type = other DNA
ctttccgtgcgattgccggtaaccgcccgctgttcattttgtgcattgctaacctctgtaccttaggggcattta

SEQ ID NO: 196755 - DNA, 75 bp, synthetic construct
  source 1..75: mol_type = other DNA
tgcttggcattaccgaagatgcgccaaaaacacgtaaaaaaacgttaccaaaagcgccgcccaagtatcaatttg

SEQ ID NO: 196756 - DNA, 75 bp, synthetic construct
  source 1..75: mol_type = other DNA
tcgctctgttcgtgtttttgcgcgagaaaccagctttgaacaactgctggaaatgcaggaaaagcttaacgccgt

SEQ ID NO: 196757 - DNA, 75 bp, synthetic construct
  source 1..75: mol_type = other DNA
atgagtgaaaatgaaacgtttgacgcaacaaaaaagctactcctgaatattcgctctgttcgtgtttttgcgcga

SEQ ID NO: 196758 - DNA, 75 bp, synthetic construct
  source 1..75: mol_type = other DNA
ttttcattaaggaaacggggaaaacaactgcatctctgtctctgcagtctccgtttcttttatatcccccctgta

SEQ ID NO: 196759 - DNA, 75 bp, synthetic construct
  source 1..75: mol_type = other DNA
gtgtctctcactgtacctccgatggaaagttcgtttgcaatgatggaaccattagtaaatcaaaaaaaatctgta

SEQ ID NO: 196760 - DNA, 75 bp, synthetic construct
  source 1..75: mol_type = other DNA
attaaatagcgtgtgtaaggttatggagccacttcttttaggccatcaactagtgagtcaaataagaaaaaaaat

SEQ ID NO: 196761 - DNA, 75 bp, synthetic construct
  source 1..75: mol_type = other DNA
gcgcagtggaagaagctttattacaaaccgttagcggtttagggcgcttattaaattatacgctgtgtgaaatga

SEQ ID NO: 196762 - DNA, 75 bp, synthetic construct
  source 1..75: mol_type = other DNA
gaaagccgctgatgtgcatatcggttttctcgaccgattcagcggtgcattggtgatttatggctcggtgggcgc

SEQ ID NO: 196763 - DNA, 75 bp, synthetic construct
  source 1..75: mol_type = other DNA
atgacgctaactcccggcgaaacggcgatgatcgccggtgatttagcgctgaaagccgctgatgtgcatatcggt

SEQ ID NO: 196764 - DNA, 75 bp, synthetic construct
  source 1..75: mol_type = other DNA
ccgattgatgaagcaatgaaagccgggcgttctctggaagattttcgtatcaataaaaattcgaacgacataaca

SEQ ID NO: 196765 - DNA, 75 bp, synthetic construct
  source 1..75: mol_type = other DNA
ctcagttgggtggtttggggggaagcatattaggtttttgttgggttttgttatatctttttagggcaaagggct

SEQ ID NO: 196766 - DNA, 75 bp, synthetic construct
  source 1..75: mol_type = other DNA
ttatccggccacacccctgactgaattttcattaaggaaacggggaaaacaactacatctctgtctctgcagtct

SEQ ID NO: 196767 - DNA, 75 bp, synthetic construct
  source 1..75: mol_type = other DNA
gatgatggttcgtgccgtgaaccgtgcaaaaggttttaaccatccgctgttcaaaggtgaatgtgcgatgtggcg

SEQ ID NO: 196768 - DNA, 75 bp, synthetic construct
  source 1..75: mol_type = other DNA
cgacctgacggcaaccacagaagagaagcaggccgcaaccaacattgaccgcgccatgctgctgggtgctcaggc

SEQ ID NO: 196769 - DNA, 75 bp, synthetic construct
  source 1..75: mol_type = other DNA
cgtcagtggaatgactggtacacctcgacgtccggtaaggactggaaccagatgatggttcgtgccgtgaaccgt

SEQ ID NO: 196770 - DNA, 75 bp, synthetic construct
  source 1..75: mol_type = other DNA
aacggcagatcaccctgaattcaaaaaaatcatgatcaacgacgtactgccgccgacgtatgaccgtcatttttt

SEQ ID NO: 196771 - DNA, 75 bp, synthetic construct
  source 1..75: mol_type = other DNA
gtgaaagtggttatcctctatccacgaggcaaaatcagtccactgcaagaaaaactgttctgtacattgggcggc

SEQ ID NO: 196772 - DNA, 75 bp, synthetic construct
  source 1..75: mol_type = other DNA
gtgcgctgcgtgaccagcttcacccaggcgaatatggtctgttcctcggcaccgcgcatccggcgaaatttaaag

SEQ ID NO: 196773 - DNA, 75 bp, synthetic construct
  source 1..75: mol_type = other DNA
cgtgatggagattataaaaattataatctaactttaagtgagttttatagactgaataacaacggatttacagtt

SEQ ID NO: 196774 - DNA, 75 bp, synthetic construct
  source 1..75: mol_type = other DNA
cgcaacgaagcgcattgatatcggatgcgaaggagagaatcagcctctggcagtcagagcttctgctggacatca

SEQ ID NO: 196775 - DNA, 75 bp, synthetic construct
  source 1..75: mol_type = other DNA
tggtagcgttacccgctatctgaaggaggttgccattatggctacagtccctgctttatctcaccctgaatttac

SEQ ID NO: 196776 - DNA, 75 bp, synthetic construct
  source 1..75: mol_type = other DNA
atgaatagtcgagttacttgtacaaagcttgacatctctgtcaatagaaatctagacaaaaatcatacacttaca

SEQ ID NO: 196777 - DNA, 75 bp, synthetic construct
  source 1..75: mol_type = other DNA
tttctgttcatgggaagaaaactgtcatcgttcgcgagattcgcgctaattcagaatataccgattcaatggttg

SEQ ID NO: 196778 - DNA, 75 bp, synthetic construct
  source 1..75: mol_type = other DNA
ctatatcgacgatctgcgtgtcttgcttcatttcttcgcgcacaaagaatttattaccatcaaccgcactgctga

SEQ ID NO: 196779 - DNA, 75 bp, synthetic construct
  source 1..75: mol_type = other DNA
tatcggcccgatgtgtactgacctttatttgcccgcattacctgagatgtcggagcaactggcgacaaccacgac

SEQ ID NO: 196780 - DNA, 75 bp, synthetic construct
  source 1..75: mol_type = other DNA
gcgatgaagtgtcagagaaaataagagtaatcgctgaaaaacgtcgcgctgaaggagcgagagataaagatgtaa

SEQ ID NO: 196781 - DNA, 75 bp, synthetic construct
  source 1..75: mol_type = other DNA
ctatattcctgatggttcgacaatttttatcactatcggcaccacggtggagcacgtagcccgagcgttacttaa

SEQ ID NO: 196782 - DNA, 75 bp, synthetic construct
  source 1..75: mol_type = other DNA
ttttagtgacggttattatggcgttcttgattcaattagatatcggtagatatcaatttgttggtgttattgatg

SEQ ID NO: 196783 - DNA, 75 bp, synthetic construct
  source 1..75: mol_type = other DNA
aggatggcttggacttattattctgtttattgtggcaaggattagaatgttatatttctctctgccggaagaatt

SEQ ID NO: 196784 - DNA, 75 bp, synthetic construct
  source 1..75: mol_type = other DNA
cattaattctcggtcttttagccgggattggcccaatgtgtaccgacctttacttgcctgcgttgcctgagatgt

SEQ ID NO: 196785 - DNA, 75 bp, synthetic construct
  source 1..75: mol_type = other DNA
gcgatgaagttgctgaaaaaattaatgccattgtggagaaacggaaagctgagggcgccagggagaaagatgtta

SEQ ID NO: 196786 - DNA, 75 bp, synthetic construct
  source 1..75: mol_type = other DNA
tatcctggatgcgtgctcgtctgtctgccatctcactggcagatatccaaaaacacctggcgaaaatcatcattc

SEQ ID NO: 196787 - DNA, 75 bp, synthetic construct
  source 1..75: mol_type = other DNA
cctgacctccattgaaaagacccgtgtagaagcggctcgtaagctcaaggtgctgtcagtgatcagttcgccaca

SEQ ID NO: 196788 - DNA, 75 bp, synthetic construct
  source 1..75: mol_type = other DNA
acccgcggcacgaccaactcctcatgctgatcgccgagcgtgggtatatgaatattgatgagctggcaaatctgc

SEQ ID NO: 196789 - DNA, 75 bp, synthetic construct
  source 1..75: mol_type = other DNA
gatattcctgggttttgtacctttatggaacatgagctggttgctaaagagacggatgaactgccttatcgttat

SEQ ID NO: 196790 - DNA, 75 bp, synthetic construct
  source 1..75: mol_type = other DNA
gatattcctgggttttgtacctttatggaacacgaactggtcgccaaagagacggatgggctgccttatcgctat

SEQ ID NO: 196791 - DNA, 75 bp, synthetic construct
  source 1..75: mol_type = other DNA
acctgccggtaagccaccgctgtttatcatgctcgatggtacctggccggaagctcgcaagatgtttcgtaaaag

SEQ ID NO: 196792 - DNA, 75 bp, synthetic construct
  source 1..75: mol_type = other DNA
catttttaccctattattcttggacatgaatttagtggtatcgtacaggaaacaggctcttctgttaaagacttg

SEQ ID NO: 196793 - DNA, 75 bp, synthetic construct
  source 1..75: mol_type = other DNA
tggcagagcaaaacggcgtggcgtgggagtcgatcgacgcctggcagatcccttcatcactgattgccgaaatgc

SEQ ID NO: 196794 - DNA, 75 bp, synthetic construct
  source 1..75: mol_type = other DNA
gggaatccatcgatgcctggcagatcccttcctcgctgattgccgaaatgccggcctccgtggcgctgcattatg

SEQ ID NO: 196795 - DNA, 75 bp, synthetic construct
  source 1..75: mol_type = other DNA
gtgaatacacaggaatatcattcatttacatttgatggtgaatattccaggccagtaagagatgatctctttatt

SEQ ID NO: 196796 - DNA, 75 bp, synthetic construct
  source 1..75: mol_type = other DNA
gggtgtatagcggagccgacagtttatcctggctcagaacgcttcacggtaaaaagatctggatcgtctgcgatg

SEQ ID NO: 196797 - DNA, 75 bp, synthetic construct
  source 1..75: mol_type = other DNA
taccagcctgtcaggattgtaataaaacaaagagcgaagatatcccaatttgctcagaagaagaaactttgcacc

SEQ ID NO: 196798 - DNA, 75 bp, synthetic construct
  source 1..75: mol_type = other DNA
ctggcggccctgacgcgtaaagtcggacgcaaagtgcgttacgtcattgttctgcggggacaaattgtcacgggg

SEQ ID NO: 196799 - DNA, 75 bp, synthetic construct
  source 1..75: mol_type = other DNA
cgatcatgattttcaaaaatggtcaggttgagctggctgaacgaatctctttaatcttaccggggcgcatcttgt

SEQ ID NO: 196800 - DNA, 75 bp, synthetic construct
  source 1..75: mol_type = other DNA
gggttaggcgagcattttacccgctttaaaacacgctatctggcaggaaaaacgcaacatccgggaagcatcaca

SEQ ID NO: 196801 - DNA, 75 bp, synthetic construct
  source 1..75: mol_type = other DNA
cacgatccgcgggcaatgttgtacaatgcagttcagcatcagtggctcacggaacagcaggccggtgaaatctgg

SEQ ID NO: 196802 - DNA, 75 bp, synthetic construct
  source 1..75: mol_type = other DNA
tgagatcaacagcgagtacatcaaaatggggcttcgacggctggatgtcgcgtcgcattactctgcggaagaact

SEQ ID NO: 196803 - DNA, 75 bp, synthetic construct
  source 1..75: mol_type = other DNA
ggcgaaagtgaaaaaaagaaagaccggcaacctgtcaaaacgaagccggttaagcgaagttgaccccgatctcat

SEQ ID NO: 196804 - DNA, 75 bp, synthetic construct
  source 1..75: mol_type = other DNA
cctacgtctgaaagacggttttactctgagagacattaaagacttttatccggacaagcgcccttctctctcaga

SEQ ID NO: 196805 - DNA, 75 bp, synthetic construct
  source 1..75: mol_type = other DNA
cggcatcggcactgttggcggggcagaggctatgagtgcagtagggacgcaggaatctggaacggcgtctgcgtt

SEQ ID NO: 196806 - DNA, 75 bp, synthetic construct
  source 1..75: mol_type = other DNA
tatcattttattgctgattacacttatctacaccctacacttctatccctggctgaaattcagcattgggttttg

SEQ ID NO: 196807 - DNA, 75 bp, synthetic construct
  source 1..75: mol_type = other DNA
cttcgggttacttatccgggaataactgctttaattgataaggctgatccaaaagtcaaatcaaaaacttttgat

SEQ ID NO: 196808 - DNA, 75 bp, synthetic construct
  source 1..75: mol_type = other DNA
atgcgtttttctcaccgactgttcttacttctgattctcctgctgacgggagcaccaatactcgctcaggagcct

SEQ ID NO: 196809 - DNA, 75 bp, synthetic construct
  source 1..75: mol_type = other DNA
aagcacgtaaccaaacagggcttaacggccctgttttatcactgactcgtttgctcgaagagttgtatcaccact

SEQ ID NO: 196810 - DNA, 75 bp, synthetic construct
  source 1..75: mol_type = other DNA
aagaatgggggtataatgttgtacacatccgcataagtgcgcttatggaaaacccattatattttgagccagcag

SEQ ID NO: 196811 - DNA, 75 bp, synthetic construct
  source 1..75: mol_type = other DNA
aacaaaattatcgaagagatatccaaagaatgggggtataatgttgtacacatccgcataagtgcgcttatggaa

SEQ ID NO: 196812 - DNA, 75 bp, synthetic construct
  source 1..75: mol_type = other DNA
gtccgcgcctggtttttagcgaatcgcgcgggggagccagccgacctggtggactgtattgccggaaccatcgtc

SEQ ID NO: 196813 - DNA, 75 bp, synthetic construct
  source 1..75: mol_type = other DNA
atccaggcattttcagaacttgacctctcccttctggcgaatgcacctctgtttatgctgggtgtctttcttgta

SEQ ID NO: 196814 - DNA, 75 bp, synthetic construct
  source 1..75: mol_type = other DNA
atagatgttcaatatcttgatgattatagaaagtatgagactgttgtagctaagaaatttataaacgagattgct

SEQ ID NO: 196815 - DNA, 75 bp, synthetic construct
  source 1..75: mol_type = other DNA
aaaattaaagaccgtataaaaagcatattatcaaccgaagtaagaactgtattaggtatttccgcaggacaaact

SEQ ID NO: 196816 - DNA, 75 bp, synthetic construct
  source 1..75: mol_type = other DNA
gaaaaaattactgcgggaaggtgatggtattggcacatcagctactcgcgccacaatagttgctgatttaaagaa

SEQ ID NO: 196817 - DNA, 75 bp, synthetic construct
  source 1..75: mol_type = other DNA
agaatatataaggacaacaagcttaaataatgaaataaaacagcgcgttccttccagatatttagatgaattaat

SEQ ID NO: 196818 - DNA, 75 bp, synthetic construct
  source 1..75: mol_type = other DNA
aggataaggagtacctcgaggtgatgcataaaataattttactttgcgatgaaatgaaaatagtaacgaagcgaa

SEQ ID NO: 196819 - DNA, 75 bp, synthetic construct
  source 1..75: mol_type = other DNA
agaatatatcaggacggcaagtttaaataatgaaataaaacagcgcgtaccttccaggtatttagatgaattaat

SEQ ID NO: 196820 - DNA, 75 bp, synthetic construct
  source 1..75: mol_type = other DNA
agttagataccgaagatcagcgtcatttatatctgatgctgaaagaggattacgattcaagcctgttaattccca

SEQ ID NO: 196821 - DNA, 75 bp, synthetic construct
  source 1..75: mol_type = other DNA
tatcccagaacgcattgctcgttattctgatctagtcgttcccgagattgataaacggttaatccaacttcagct

SEQ ID NO: 196822 - DNA, 75 bp, synthetic construct
  source 1..75: mol_type = other DNA
agtttcgtgaggaagaaaaggaactggcgtttctgtatgcagatgagattgaacgccttctgattgcatgtgatg

SEQ ID NO: 196823 - DNA, 75 bp, synthetic construct
  source 1..75: mol_type = other DNA
caccggagaaacgactggcgcgtctggaaaataatctggaaattgcgctgaaacgcgacgacatgaccgcagaac

SEQ ID NO: 196824 - DNA, 75 bp, synthetic construct
  source 1..75: mol_type = other DNA
ccggcctgattgataatgcagatccgaaaataaaatcaaaaacttttgatgattcgaaagtaacagcgcaccacg

SEQ ID NO: 196825 - DNA, 75 bp, synthetic construct
  source 1..75: mol_type = other DNA
ggatgcactaaaccggtcctgcgttactggtgtaacgcgaacgatacggtaagtgttaccagggcgctgaaaggt

SEQ ID NO: 196826 - DNA, 75 bp, synthetic construct
  source 1..75: mol_type = other DNA
tattttaaaactggtcgaacttttgcggatgagcattacctgaaatcgcgcgtaaccgtcgttgatgttagcgat

SEQ ID NO: 196827 - DNA, 75 bp, synthetic construct
  source 1..75: mol_type = other DNA
tggaaatagagcaggggaaacgtgacgttgattcttttgtgaagattcaggaaaaatttgtacgagagcagatta

SEQ ID NO: 196828 - DNA, 75 bp, synthetic construct
  source 1..75: mol_type = other DNA
taccggggcaaactgataacgacatctggttctggcaggcgatatgcgccaacgcgcagggcgatgaaactgaag

SEQ ID NO: 196829 - DNA, 75 bp, synthetic construct
  source 1..75: mol_type = other DNA
ggtgctaatttatgtcacgccgaactcgacggtttagatcctcgaaaagtcgatacatcaggtatcaaaattgcc

SEQ ID NO: 196830 - DNA, 75 bp, synthetic construct
  source 1..75: mol_type = other DNA
cagggtgatatcgaaggctgccactttgatgtcgcagatcttcgtgatgcaagtttccaacaatgccaacttgcg

SEQ ID NO: 196831 - DNA, 75 bp, synthetic construct
  source 1..75: mol_type = other DNA
aaggaatagaatccatcccttatatcaatgaaggtgatattcaagcagacttaattctcaaggacatccagagaa

SEQ ID NO: 196832 - DNA, 75 bp, synthetic construct
  source 1..75: mol_type = other DNA
attgacccacagatgatgaaactggatggcgttaccggagaattacgtcgtgacggcagtattgtttataagctg

SEQ ID NO: 196833 - DNA, 75 bp, synthetic construct
  source 1..75: mol_type = other DNA
gcggtgcgtatggagcgtcgtatagatcgtgccacggaacgtgcaaatctgcgcgaacgctataacacattccgt

SEQ ID NO: 196834 - DNA, 75 bp, synthetic construct
  source 1..75: mol_type = other DNA
gtgcatcctgtcacgcataaagcggcgtcacttgcatacagcaaggagaagctgcaccgggcgtgcagggagctg

SEQ ID NO: 196835 - DNA, 75 bp, synthetic construct
  source 1..75: mol_type = other DNA
tggaagcgatgctggtgagtctggcgattgcccgtggcagtgatgaatgggaagctgacattctcgcgaaagcac

SEQ ID NO: 196836 - DNA, 75 bp, synthetic construct
  source 1..75: mol_type = other DNA
ttttcgacgcccgcgccaatatggaagcgatgctggtcagtctggcgattgcccgcggtggcgatgaatgggagg

SEQ ID NO: 196837 - DNA, 75 bp, synthetic construct
  source 1..75: mol_type = other DNA
tttagttattgcgggtcatctggtcgggtttgtattgtgtgggcaggttcgtttacgcgactatagtgatgcagg

SEQ ID NO: 196838 - DNA, 75 bp, synthetic construct
  source 1..75: mol_type = other DNA
ctcgtcttgccagtgaacgtttgccgtggatgagcgatgaccaacgccgtcggatgcaggatattgccgatcgcc

SEQ ID NO: 196839 - DNA, 75 bp, synthetic construct
  source 1..75: mol_type = other DNA
atcgctggctgaagaacgatattattcgcggtaattttcaaccggatgaaaaattacggatgagtttgctgacat

SEQ ID NO: 196840 - DNA, 75 bp, synthetic construct
  source 1..75: mol_type = other DNA
gagtgggaccagcgccatcaggcatttcatactgcgattgtggctggctgcggttcccactatttactgcaaatg

SEQ ID NO: 196841 - DNA, 75 bp, synthetic construct
  source 1..75: mol_type = other DNA
ggcacagaccggtattcttcgaacccaaaacagattatgtatcccgtccgctttaccggatgcaggagaaataca

SEQ ID NO: 196842 - DNA, 75 bp, synthetic construct
  source 1..75: mol_type = other DNA
ctgtctgagcgcgaggagatacgagctggtttgtcagccaaaatgagcattcgtgcgatagctactgcgctgaat

SEQ ID NO: 196843 - DNA, 75 bp, synthetic construct
  source 1..75: mol_type = other DNA
tacagcaaatcatcactaacctggtggggaatgcaattaaattcaccgagaatggcaacattgatattctggtag

SEQ ID NO: 196844 - DNA, 75 bp, synthetic construct
  source 1..75: mol_type = other DNA
tgatgaagaatgtggctaaaacgatagggaaaaggttgtacggtatcctgaacgccatgcgccatggcgtatcaa

SEQ ID NO: 196845 - DNA, 75 bp, synthetic construct
  source 1..75: mol_type = other DNA
tttgaagtgggcacaaagcccgtgacacaaacgctgaaagtccctgccagtaacaccgttgcaccagctcaggcc

SEQ ID NO: 196846 - DNA, 75 bp, synthetic construct
  source 1..75: mol_type = other DNA
aaaaagcatctgtttttgaactgtggaagaacggaacaggcttcagcgagatagctaatatcctgggttcgaaac

SEQ ID NO: 196847 - DNA, 75 bp, synthetic construct
  source 1..75: mol_type = other DNA
aaaaagcctctgtttttgaactatggaagaacggaacaggcttcagtgaaatagcgaatatcctaggttcaaaac

SEQ ID NO: 196848 - DNA, 75 bp, synthetic construct
  source 1..75: mol_type = other DNA
gtctgcgtaatgatgatgtcgatttggtcgatattctgaatgtcgatgattgctggcaggcagatcccgaattac

SEQ ID NO: 196849 - DNA, 75 bp, synthetic construct
  source 1..75: mol_type = other DNA
tggtctggaagcctctaaatcagatcagccttgtatttaccgctgtcatgcagggttaactgatttctctattcc

SEQ ID NO: 196850 - DNA, 75 bp, synthetic construct
  source 1..75: mol_type = other DNA
tgcggatggtcagtctgggccgcaaaaactacctgttcttcggttcggatcatggaggagagcggggagcgctgc

SEQ ID NO: 196851 - DNA, 75 bp, synthetic construct
  source 1..75: mol_type = other DNA
ttttgcaaagtttttcgtcagacgtatcaggtaacaccgcaggtatatcgtcagcaaattagcgaaaatacagca

SEQ ID NO: 196852 - DNA, 75 bp, synthetic construct
  source 1..75: mol_type = other DNA
caaaaaacaactcaattttgtggttattaaagagaacaaatctcagtcagattcggtgcgccagactcgtgcgcc

SEQ ID NO: 196853 - DNA, 75 bp, synthetic construct
  source 1..75: mol_type = other DNA
atcccgaattacttaatgaatttcgcaaagttcctgagatggattactcaagagttatggcctctgctgatttgt

SEQ ID NO: 196854 - DNA, 75 bp, synthetic construct
  source 1..75: mol_type = other DNA
ggatcaacctgctgcgcggcctcttgcgtgaagctggtatcgaggcccccgcctcgaccgctgccttcatccgcg

SEQ ID NO: 196855 - DNA, 75 bp, synthetic construct
  source 1..75: mol_type = other DNA
gacgcctgtaccaccgccgatctccactttaccgatgccgcaggcgatgactatacggtgtcgctgatcccggaa

SEQ ID NO: 196856 - DNA, 75 bp, synthetic construct
  source 1..75: mol_type = other DNA
atgaataccctggcgcttaatgcgcaatcgcctcagccgaccgccacggcggaaaacaacaccgtggcggccagc

SEQ ID NO: 196857 - DNA, 75 bp, synthetic construct
  source 1..75: mol_type = other DNA
gcgggcggcgatacagggagaacgattaatcatgaacgaaaacacaacgctgaacgcactgatttgtcgtcacgc

SEQ ID NO: 196858 - DNA, 75 bp, synthetic construct
  source 1..75: mol_type = other DNA
gtactggcgcgtatggacgccattccggaggaacaacggcttgagtcgggcgtgtctgccggtgcggtgatggat

SEQ ID NO: 196859 - DNA, 75 bp, synthetic construct
  source 1..75: mol_type = other DNA
gccgggcgctggcagcaaagtatccgggagacatgccgctgatgctggttatctggtccccggaagagattcagg

SEQ ID NO: 196860 - DNA, 75 bp, synthetic construct
  source 1..75: mol_type = other DNA
ggaggtcaaattcctccactgcctgcccgcttttcatgacgaccagacgacgcttggcaagaaaatggcggaaga

SEQ ID NO: 196861 - DNA, 75 bp, synthetic construct
  source 1..75: mol_type = other DNA
gtaacagctaatggtgtgttgccggggatgatcgtcattggccccgacaataagctgtatgagatcaagcgcgta

SEQ ID NO: 196862 - DNA, 75 bp, synthetic construct
  source 1..75: mol_type = other DNA
tcaacccgtaagttctgtcgcaccgaaacctgttcagcagcaaggcggaataatgtatgaccttggtaatggact

SEQ ID NO: 196863 - DNA, 75 bp, synthetic construct
  source 1..75: mol_type = other DNA
cctcccggaatacgtcacccgtcgacaggcgatggttgatcaggcccgcagcctgctgaaaaacaacacacacga

SEQ ID NO: 196864 - DNA, 75 bp, synthetic construct
  source 1..75: mol_type = other DNA
actttaccgatgccgcaggcgatgactacacggtgtcgctgatcccggagggcagttcttccgtggggccaggac

SEQ ID NO: 196865 - DNA, 75 bp, synthetic construct
  source 1..75: mol_type = other DNA
ttgttgaagctaacaagtgtagctttagcatctctggtgggtgaagaaaagcgtaataagcttattggggcacct

SEQ ID NO: 196866 - DNA, 75 bp, synthetic construct
  source 1..75: mol_type = other DNA
atgtacggaacatgcgaaacgctatgccggaagctggcagcaaagtattcgggagacacgccactgatgctggtt

SEQ ID NO: 196867 - DNA, 75 bp, synthetic construct
  source 1..75: mol_type = other DNA
gccagttgttgcgtgaacagtatcccgcagaaaccccgctgaacctcattgtctggtccccggcggatatcgaag

SEQ ID NO: 196868 - DNA, 75 bp, synthetic construct
  source 1..75: mol_type = other DNA
atttgattatggtcgcagtaaccttagtgctgggcgcgggtgattttgctctcacgctgggcggttttacgttgg

SEQ ID NO: 196869 - DNA, 75 bp, synthetic construct
  source 1..75: mol_type = other DNA
aacgatgctttccggctctgtcggcggtagcggcgtgaccacctatgctgaaaatatcggtgtgatggccgtgac

SEQ ID NO: 196870 - DNA, 75 bp, synthetic construct
  source 1..75: mol_type = other DNA
gaacaaaaccacgtcaaaaaacgctgcgaatatcacctgagacaatttataaaacgctgtactttcgtagccgtg

SEQ ID NO: 196871 - DNA, 75 bp, synthetic construct
  source 1..75: mol_type = other DNA
gtcctggcgcgcctggaggacatcccggaagaccagcggattgagtccggtatttcttccgctgcggtgatggag

SEQ ID NO: 196872 - DNA, 75 bp, synthetic construct
  source 1..75: mol_type = other DNA
atgaaatcagaaccgtcctggcgcgcctgggaggacatcccggaagaccagcggactgaatccggtatttcttcc

SEQ ID NO: 196873 - DNA, 75 bp, synthetic construct
  source 1..75: mol_type = other DNA
cggaagaccagcggactgaatccggtatttcttccgccgctgcgatggagattatcagcaacgtgagcgaaaacc

SEQ ID NO: 196874 - DNA, 75 bp, synthetic construct
  source 1..75: mol_type = other DNA
atgtacggaacatgcgaaacgctatgccggcagctggcagcaaagtatacgggagacacgcctctgatgctggtt

SEQ ID NO: 196875 - DNA, 75 bp, synthetic construct
  source 1..75: mol_type = other DNA
atgtacggaacatgcgaaacgctatgccggtagctggcagcaaagtatacgggagacacgcccctgatgctggtt

SEQ ID NO: 196876 - DNA, 75 bp, synthetic construct
  source 1..75: mol_type = other DNA
cgcgattttgctcaatgcgttgttaagtagaaggttggttgacgttccaccgccagaagttgttcatcaggagcc

SEQ ID NO: 196877 - DNA, 75 bp, synthetic construct
  source 1..75: mol_type = other DNA
cgcgattttactcaatgcgttgttgagcagaaggttggttgacgttcctccgccagaagttgttcatcaggaacc

SEQ ID NO: 196878 - DNA, 75 bp, synthetic construct
  source 1..75: mol_type = other DNA
atctttccattttaatgtcggggatcggcacgttactgtttttctttattaccggcgggcgcgtccccagttatc

SEQ ID NO: 196879 - DNA, 75 bp, synthetic construct
  source 1..75: mol_type = other DNA
tgcagagaatagcattcaaacagacaagtattctaacgaaaagcttgcaatctatttgaaacaatcaactgcatc

SEQ ID NO: 196880 - DNA, 75 bp, synthetic construct
  source 1..75: mol_type = other DNA
gcacgggaaggggatatgtcattgttgaaaccgggaccgtttacagctgcagctacgatggagttacgttatgag

SEQ ID NO: 196881 - DNA, 75 bp, synthetic construct
  source 1..75: mol_type = other DNA
tgctcagcgaagagtcccggctgcgtggcggggaggatgcgcagttcgccggcctgcaggccagccgtaacggac

SEQ ID NO: 196882 - DNA, 75 bp, synthetic construct
  source 1..75: mol_type = other DNA
ccgggcaacattattcatgcttacgctacaaatttcgataataatttttgtggcattgattagccttggcaatga

SEQ ID NO: 196883 - DNA, 75 bp, synthetic construct
  source 1..75: mol_type = other DNA
atcgattaatccaatggcaaaacctgctcgccaacgtgaaaccaataatctacgcgctatttatcgctggcatcc

SEQ ID NO: 196884 - DNA, 75 bp, synthetic construct
  source 1..75: mol_type = other DNA
ggggtgatgcctttgaggcagaacgcgaacagtggaatgacgctaacaatgtgctcacgcttcggccgggagtgg

SEQ ID NO: 196885 - DNA, 75 bp, synthetic construct
  source 1..75: mol_type = other DNA
agctctaccagctggttgccgccggtggcgggcgaatggtctccagcggggacaccgcgcagttgcaggctgtct

SEQ ID NO: 196886 - DNA, 75 bp, synthetic construct
  source 1..75: mol_type = other DNA
gacagcaaaacccgccatcagcgtgataactaccgggccgggatggtgatggagcattgggacgctgagaagaaa

SEQ ID NO: 196887 - DNA, 75 bp, synthetic construct
  source 1..75: mol_type = other DNA
tggcccaggtgaccggtgcccgggagcagcagcaactgacggatatcattcgcgagtcacggcgtgaggccggag

SEQ ID NO: 196888 - DNA, 75 bp, synthetic construct
  source 1..75: mol_type = other DNA
ctgtcgtcagaagggcgggatgtggtggcccaggtgaccggtgcccgggagcagcaacaactgacggatatcatc

SEQ ID NO: 196889 - DNA, 75 bp, synthetic construct
  source 1..75: mol_type = other DNA
agcaggtacgtgaacagatgcagcgtactgaacgtgagtgggtggtgaagatgccggaaaaagagatagagctgg

SEQ ID NO: 196890 - DNA, 75 bp, synthetic construct
  source 1..75: mol_type = other DNA
acccgctccgatactgaccggggttatgtggccaacagtctgtgggaggtggccggattcacgcaggagggggct

SEQ ID NO: 196891 - DNA, 75 bp, synthetic construct
  source 1..75: mol_type = other DNA
tcatcaggtgaacgaaatgcttctgggaggttgattgcggttcaaattaaatgtggggattcctttttttctcgt

SEQ ID NO: 196892 - DNA, 75 bp, synthetic construct
  source 1..75: mol_type = other DNA
cctgatcgttggcggtcaaaccagcggtggacaggacgccacaaacagactgtcctttatggccatgacggctac

SEQ ID NO: 196893 - DNA, 75 bp, synthetic construct
  source 1..75: mol_type = other DNA
gctcgtggatacaaaggcatcattcaggatgttgttgcagcaatggccagtgctgataaaaaagatccagctttt

SEQ ID NO: 196894 - DNA, 75 bp, synthetic construct
  source 1..75: mol_type = other DNA
gtgaaccaactgaccgaattcgtgccttacgggaacaaatccttgatacgaccccctgcattgagacagatcgtg

SEQ ID NO: 196895 - DNA, 75 bp, synthetic construct
  source 1..75: mol_type = other DNA
cattctgggaagcatgccagacattctggtttattcagagcatgttacagattgaatccagcggtcattctatct

SEQ ID NO: 196896 - DNA, 75 bp, synthetic construct
  source 1..75: mol_type = other DNA
ggtttccgtggtatcattaatgaagttagccgtgccttggaatcattagatcgcactgaaccaggatatataaag

SEQ ID NO: 196897 - DNA, 75 bp, synthetic construct
  source 1..75: mol_type = other DNA
aatctccggacgatttgttactgaaggcctgtgaagtcagtcgtcttggtatggggatcccggcttattacaacg

SEQ ID NO: 196898 - DNA, 75 bp, synthetic construct
  source 1..75: mol_type = other DNA
ggatgcagaaattaccatggaagcgaaccccggtacggtagaagccgatcgctttgttgattatcagcgtgccgg

SEQ ID NO: 196899 - DNA, 75 bp, synthetic construct
  source 1..75: mol_type = other DNA
gatgttgaaaccgcagataagccattcgagttctttatgaatcgcttccgtttgctggaagccgcaccgcgcgtg

SEQ ID NO: 196900 - DNA, 75 bp, synthetic construct
  source 1..75: mol_type = other DNA
gctaccggatcaatcactggaagaggcgcttggcgatctacgccaggccattgaactgaatccgccgcatctttc

SEQ ID NO: 196901 - DNA, 75 bp, synthetic construct
  source 1..75: mol_type = other DNA
accaaaactgactttaaattttgatatacccccctccccctgcatcggtagggggcttgcaggagaagtatttaa

SEQ ID NO: 196902 - DNA, 75 bp, synthetic construct
  source 1..75: mol_type = other DNA
gttatcaaacgttataatgaagctaattctagtgatgcgcaaaaagaatgtcatttatttaacacatattatggt

SEQ ID NO: 196903 - DNA, 75 bp, synthetic construct
  source 1..75: mol_type = other DNA
ttgaactgaatccgccgcatctttcctggtatcaactgaccatcgaacccaatacgctgtttggctcgcgccctc

SEQ ID NO: 196904 - DNA, 75 bp, synthetic construct
  source 1..75: mol_type = other DNA
tcgtggttaaccgtaatatcaatgggcagaccgtacgttacatcgaacgcctttccagtcgcctgttcaccaatg

SEQ ID NO: 196905 - DNA, 75 bp, synthetic construct
  source 1..75: mol_type = other DNA
agcggtggtgcgtatttcgttaatactgatgtaggcgctcagattcagttcccatataccggcacagatccagac

SEQ ID NO: 196906 - DNA, 75 bp, synthetic construct
  source 1..75: mol_type = other DNA
acgctgcgaatatcacctgagacaatttataaaacgctgtactttcgtagccgtgaagcgctacaccacctgaat

SEQ ID NO: 196907 - DNA, 75 bp, synthetic construct
  source 1..75: mol_type = other DNA
atgtcctcaattcaactcgggaagaaaagcaatgaaaaaaaggttctggcaatagctctggtaacggtgtttacc

SEQ ID NO: 196908 - DNA, 75 bp, synthetic construct
  source 1..75: mol_type = other DNA
cagggcatcaacgaagaccagaacctgggcatcgccatcacccgccgtgcgctggaagccccgctgcgcgccatc

SEQ ID NO: 196909 - DNA, 75 bp, synthetic construct
  source 1..75: mol_type = other DNA
ggcatttgccgacggcgattttattaagtatttcggcgacgaaaatatttattacgaccacgccactttggaagg

SEQ ID NO: 196910 - DNA, 75 bp, synthetic construct
  source 1..75: mol_type = other DNA
catacccgcaaaggcgaaagaggtacgattaacatagtgaacggaactgaaccgccccgggaatcctggagacta

SEQ ID NO: 196911 - DNA, 75 bp, synthetic construct
  source 1..75: mol_type = other DNA
aggccgacgaaaatgacattcgtttacctggcgaagtggcgttctttattgccaagcgtctacgatctaacgtac

SEQ ID NO: 196912 - DNA, 75 bp, synthetic construct
  source 1..75: mol_type = other DNA
tggcgatggcgctggcgaaagagctgactaaccacagtctgccggagattggcgatgcgtttggtggtcgtgacc

SEQ ID NO: 196913 - DNA, 75 bp, synthetic construct
  source 1..75: mol_type = other DNA
gaaatatcgataacagacgctctctagggcattgggagggcgatttagtctcaggtacaaaaaactctcatatag

SEQ ID NO: 196914 - DNA, 75 bp, synthetic construct
  source 1..75: mol_type = other DNA
tggttaaggcgaacaaaatcacgtcaaaaaacgctgcgaatatcacctgagacaatttataaaacgctgtacttt

SEQ ID NO: 196915 - DNA, 75 bp, synthetic construct
  source 1..75: mol_type = other DNA
tcacacgagctgcgtacaccactgaatggtgttattggctttacccgcctgacgctgaaaacagaattaacacca

SEQ ID NO: 196916 - DNA, 75 bp, synthetic construct
  source 1..75: mol_type = other DNA
ctctggtaacggtgtttaccggtacaggtgtagcacaggctgctgacgtaacagctcaggctgtagcgacctggt

SEQ ID NO: 196917 - DNA, 75 bp, synthetic construct
  source 1..75: mol_type = other DNA
gaagatgcggggggctccgtcaggtcctgctgtcggtggtaccgagggcattcggactaccagccagcccgacag

SEQ ID NO: 196918 - DNA, 75 bp, synthetic construct
  source 1..75: mol_type = other DNA
catgatgaacgagcgctactggacggtggcggaggtgaatactcaggacgctgtggtcacgctgcggaatgctga

SEQ ID NO: 196919 - DNA, 75 bp, synthetic construct
  source 1..75: mol_type = other DNA
cggagtacaccggcgcggtggccatgatgaacgagcgttactggacggtggcggaggtaaacacgcaggatgccg

SEQ ID NO: 196920 - DNA, 75 bp, synthetic construct
  source 1..75: mol_type = other DNA
gcccggcatgaaaagggggataccggcccggaagaacgcacgttcactgtcctggagccgctgcgggtacccgat

SEQ ID NO: 196921 - DNA, 75 bp, synthetic construct
  source 1..75: mol_type = other DNA
tcctgctgccggtgaacagacgctgacatcagagcaattatcactggtccgaaccgacatcattgaagctatccg

SEQ ID NO: 196922 - DNA, 75 bp, synthetic construct
  source 1..75: mol_type = other DNA
ggccgccgggtgctggcggaaaatggtctggagggtgagacgatggcccgctttattgcggccggcaaaaagtat

SEQ ID NO: 196923 - DNA, 75 bp, synthetic construct
  source 1..75: mol_type = other DNA
gctgcctgagttacaccacgatgatcgacagcattaaagatctgcactgggatattcgccccagcccccattttg

SEQ ID NO: 196924 - DNA, 75 bp, synthetic construct
  source 1..75: mol_type = other DNA
tggagctggcgacagatgtttgccgtgatatcaaccaggccgccgggcaattttcagcgatgcagaaagtcgttt

SEQ ID NO: 196925 - DNA, 75 bp, synthetic construct
  source 1..75: mol_type = other DNA
ccgtttcagaaatggcagcgtcaggaggtgtgcgataacgaacgttatcaacggacgctggaaaacttcggctat

SEQ ID NO: 196926 - DNA, 75 bp, synthetic construct
  source 1..75: mol_type = other DNA
gcccactgagcgggccgtgaagctggcccatgattatgtggagggaaccggggcgggtaccagcgcatcacgcac

SEQ ID NO: 196927 - DNA, 75 bp, synthetic construct
  source 1..75: mol_type = other DNA
atgctggccggtacggtcaatcgtctgccctccgcaccggggctgtttgagcaggcgagagccggcatcgatgcc

SEQ ID NO: 196928 - DNA, 75 bp, synthetic construct
  source 1..75: mol_type = other DNA
acagcaacaactgacggacatcatccgcgagtcacggcgtgaggccggagaactgggccgggagcaggtaacact

SEQ ID NO: 196929 - DNA, 75 bp, synthetic construct
  source 1..75: mol_type = other DNA
cggatcaacatcttttgagaaagccatgcagcaggcacaaaaggctattaacgctatgacgcagggtgccaagtc

SEQ ID NO: 196930 - DNA, 75 bp, synthetic construct
  source 1..75: mol_type = other DNA
actgaccgatcaaaaaggtttgtataccgctgacccgcgcagcaatccgcaggcagaactgattaaagatgttta

SEQ ID NO: 196931 - DNA, 75 bp, synthetic construct
  source 1..75: mol_type = other DNA
ggcgctgcaactgattagcccgctgtttttgccgccgccgcaacaagtactggcaaaactgctcaccattgccgg

SEQ ID NO: 196932 - DNA, 75 bp, synthetic construct
  source 1..75: mol_type = other DNA
atctgattgctatatggaagatgaggctttaccttctggtagggtaatttctcgacgcaacaatgactccataat

SEQ ID NO: 196933 - DNA, 75 bp, synthetic construct
  source 1..75: mol_type = other DNA
cggcattgatgacgcactgcgcgcgattgccggtgatagcgtttcaggcctcggaactggcggcatgagcaccaa

SEQ ID NO: 196934 - DNA, 75 bp, synthetic construct
  source 1..75: mol_type = other DNA
acggtatgctggcgtcgctggactctaaacgtattgatgtggtgattaatcaggtcaccatttctgatgagcgca

SEQ ID NO: 196935 - DNA, 75 bp, synthetic construct
  source 1..75: mol_type = other DNA
gtgtttacaaacaatggctctacactgcaaacagacataacaacattcggggtgaatatgaaattagcacatctg

SEQ ID NO: 196936 - DNA, 75 bp, synthetic construct
  source 1..75: mol_type = other DNA
agagattaaggtcggcgataacgataacctttctgcgctggcggcgattcttgcgggtgccgataaactgttgct

SEQ ID NO: 196937 - DNA, 75 bp, synthetic construct
  source 1..75: mol_type = other DNA
cacatatgcttcgccattcctgcggatatgcactggcaggtaaaggcgcagatacccggctgatacaggattatc

SEQ ID NO: 196938 - DNA, 75 bp, synthetic construct
  source 1..75: mol_type = other DNA
cttgggtttatggtgcagtcggcgggagagttcctggcgactgacgtggtgctggcagggatcgcggtgatcgcc

SEQ ID NO: 196939 - DNA, 75 bp, synthetic construct
  source 1..75: mol_type = other DNA
ccgcaggtaacaagccgggcgtcattggtgatgcgatggaaggtatttctgtcggtacgctgttccatgcccagg

SEQ ID NO: 196940 - DNA, 75 bp, synthetic construct
  source 1..75: mol_type = other DNA
cgggtatggctaaaatcacaaccggttaatactcagcttgatcctgaaaaattgactaccgcgcagttaatcgct

SEQ ID NO: 196941 - DNA, 75 bp, synthetic construct
  source 1..75: mol_type = other DNA
acctgggttacccggaactgccagcgactatcgcctcgaaacaactgctggcggcggtagggcagagtcgactga

SEQ ID NO: 196942 - DNA, 75 bp, synthetic construct
  source 1..75: mol_type = other DNA
taaaactcggcaccagtgtgctaacaggcggatcgcgccgcctgaaccgtgcccatattgttgaactcgttcgcc

SEQ ID NO: 196943 - DNA, 75 bp, synthetic construct
  source 1..75: mol_type = other DNA
gacaagcaaaatcgtctttgaactatataagattagaagatacgactgacaacagtcacatagtaaaagaactaa

SEQ ID NO: 196944 - DNA, 75 bp, synthetic construct
  source 1..75: mol_type = other DNA
gtgaaaatctctattcacgaagtggttaaaacgctggtcgaagcgatcatcctcgtgttcctggttatgtatctg

SEQ ID NO: 196945 - DNA, 75 bp, synthetic construct
  source 1..75: mol_type = other DNA
atttaacgccgccgctcagtcaactgccttttgacgaatatgtctctgaaattcttgggcatattttctggttct

SEQ ID NO: 196946 - DNA, 75 bp, synthetic construct
  source 1..75: mol_type = other DNA
gaatataacaccaacagaaataaacttatcaaagttaactgttggttggccgtcagaaataaaaaaagcaataaa

SEQ ID NO: 196947 - DNA, 75 bp, synthetic construct
  source 1..75: mol_type = other DNA
ctggattttcggtgcgccgccggcgggtgaaatcacggtagatgaaggggcaaccgccgccattcttgaacgcgg

SEQ ID NO: 196948 - DNA, 75 bp, synthetic construct
  source 1..75: mol_type = other DNA
agtacgtgaaagatccggctaaccgcgagaaattcgccaaagcctggggcgtggaaagcctgcctgctcataccg

SEQ ID NO: 196949 - DNA, 75 bp, synthetic construct
  source 1..75: mol_type = other DNA
tcgcgatgctgaccggtaacctcggtaagccgcatgctggtgttaacccggttcgtggtcagaacaacgtacagg

SEQ ID NO: 196950 - DNA, 75 bp, synthetic construct
  source 1..75: mol_type = other DNA
ccaggagatctgggacgagttgcgtcacctgtgcccggatttctacggtgcgacttacgagaaaatgggcgaact

SEQ ID NO: 196951 - DNA, 75 bp, synthetic construct
  source 1..75: mol_type = other DNA
ccacaacagccacaacagccacaacagccacaacagccacaacagccacaacagccagtgtcttctgtcatcaat

SEQ ID NO: 196952 - DNA, 75 bp, synthetic construct
  source 1..75: mol_type = other DNA
cagacacagcgggatatgcagcggcgtgaagaggtcaatatcaaccacagccaccgccacgatgaacaggatgaa

SEQ ID NO: 196953 - DNA, 75 bp, synthetic construct
  source 1..75: mol_type = other DNA
ataagaagtcagattcaggtgtgaatgttccggcaggggggatcgagcaggagctgaaaatgaaaccggaagaag

SEQ ID NO: 196954 - DNA, 75 bp, synthetic construct
  source 1..75: mol_type = other DNA
cggtgtaccgcgtaacgcgctgtatgccacgacggtgattgccggtctgtgtttcctgacctccatgtttggtaa

SEQ ID NO: 196955 - DNA, 75 bp, synthetic construct
  source 1..75: mol_type = other DNA
gcagtaaagaaattagtgattcagcgtttaaatgtccgtcttgcggccatcaggtcagaaagccgaagcgctcat

SEQ ID NO: 196956 - DNA, 75 bp, synthetic construct
  source 1..75: mol_type = other DNA
ctgaacagaggtgatatgctcacctcagaacaacacaggtgccataatgaaaaaaagaaatttcagcgcagagtt

SEQ ID NO: 196957 - DNA, 75 bp, synthetic construct
  source 1..75: mol_type = other DNA
aatatcgatgctatgtgccgaattgcggagtatgagactaatctcgctgcgctggtggtggagaacgacggactg

SEQ ID NO: 196958 - DNA, 75 bp, synthetic construct
  source 1..75: mol_type = other DNA
gccatcggctacaccatggtttacggcattatcggcatgataaacttcgcccacggcgaggtttatatgattggc

SEQ ID NO: 196959 - DNA, 75 bp, synthetic construct
  source 1..75: mol_type = other DNA
atgtctgaacagtttttgtatttcttgcagcagatgtttaacggcgtcacgctgggcagtacctacgcgctaata

SEQ ID NO: 196960 - DNA, 75 bp, synthetic construct
  source 1..75: mol_type = other DNA
aggcgatgttaatcgctctgatcgtcatctgtttaaccgtcatagtgacagcactggtaacgaggaaagacctct

SEQ ID NO: 196961 - DNA, 75 bp, synthetic construct
  source 1..75: mol_type = other DNA
cgggttattcgcgaaataaacgaccgggataagcaatattatttcaaagattttaaagttgagtcttcagtttaa

SEQ ID NO: 196962 - DNA, 75 bp, synthetic construct
  source 1..75: mol_type = other DNA
cgggttattcgcgaaataaacgaccgggataagcaatattatttcaaagattataaagttgaatcgtcagtttaa

SEQ ID NO: 196963 - DNA, 75 bp, synthetic construct
  source 1..75: mol_type = other DNA
cagtctcggcgaactggctgcttacatgccggtttccggttcgtttgccacttacggtcagaactatgttgaaga

SEQ ID NO: 196964 - DNA, 75 bp, synthetic construct
  source 1..75: mol_type = other DNA
accgctgtttaccaccgacgaattacgcagcgcccatgtcgcaatggcgctgtacccgctttcagcgttccgcgc

SEQ ID NO: 196965 - DNA, 75 bp, synthetic construct
  source 1..75: mol_type = other DNA
cgcagcgcccatgtcgcaatggcgctgtacccgctttcagcgttccgcgccatgaaccgcgccgctgaacatgtc

SEQ ID NO: 196966 - DNA, 75 bp, synthetic construct
  source 1..75: mol_type = other DNA
tggatgcggatatcggttttggctcttcggcctttaacgttgcccgcaccgtgaaatcgatgattaaagccggtg

SEQ ID NO: 196967 - DNA, 75 bp, synthetic construct
  source 1..75: mol_type = other DNA
ctatgtcgcttgttatttctgattttgctaatgctgaggaaacaagaggtaaagctatgatgaaaatagaaccgt

SEQ ID NO: 196968 - DNA, 75 bp, synthetic construct
  source 1..75: mol_type = other DNA
atatattctaaggttttgctaagtgttttcccgataaaaccgatcccttggatactcggttttaacgaagataca

SEQ ID NO: 196969 - DNA, 75 bp, synthetic construct
  source 1..75: mol_type = other DNA
ccggaggcgattaccgaactcgccatgtatcgccagtttgccgatgcggtgcaggtgccgatcctcgccaacatt

SEQ ID NO: 196970 - DNA, 75 bp, synthetic construct
  source 1..75: mol_type = other DNA
tgcatccatcccagaccatgatgttttgctcgcaggtttcccatgccaaccgttcagtattgccggtgtcagcaa

SEQ ID NO: 196971 - DNA, 75 bp, synthetic construct
  source 1..75: mol_type = other DNA
gtgaaagacatcagcgtcagcccgttcacgctggtgttccagcacgcggggctgctttctgcggcggcggtgatg

SEQ ID NO: 196972 - DNA, 75 bp, synthetic construct
  source 1..75: mol_type = other DNA
cggtgtaccgcgtaacgccctgtatgcgacgacggtgattgccggtctgtgcttcctgacgtcaatgtttggcaa

SEQ ID NO: 196973 - DNA, 75 bp, synthetic construct
  source 1..75: mol_type = other DNA
attgaagatcaggttggtgcgaaacgctgcggtcatcgtccgaataaagcgatcgtctcgaaagaagagatggtg

SEQ ID NO: 196974 - DNA, 75 bp, synthetic construct
  source 1..75: mol_type = other DNA
gctggcgaacgagcgcaaggtttcggtctcccacgcatcgtcaggcattggcggccttgctgttcttctacggca

SEQ ID NO: 196975 - DNA, 75 bp, synthetic construct
  source 1..75: mol_type = other DNA
atcctcatatgttaaggcatgcttgtggttatgaactggctgagcgtggtgcagatacccgtttaattcaggatt

SEQ ID NO: 196976 - DNA, 75 bp, synthetic construct
  source 1..75: mol_type = other DNA
gcgtctatccaacttttgaagacgatccgcaaatggagtgcagtgacttcaacgacctgcacaaactacgtggac

SEQ ID NO: 196977 - DNA, 75 bp, synthetic construct
  source 1..75: mol_type = other DNA
gaccgccatcgaaatggatcgcgatttggatctcaatatatatatggatgataaaacgcgatccacaaacgagca

SEQ ID NO: 196978 - DNA, 75 bp, synthetic construct
  source 1..75: mol_type = other DNA
gtatagcggcattgctgccagccgctgccaatgcgcttaatgttccgcagccgacaatgtatgatgcccgcattc

SEQ ID NO: 196979 - DNA, 75 bp, synthetic construct
  source 1..75: mol_type = other DNA
gcgtcaacttttctcacgtccacggtgatgcgatgccggcttccgccaccgctcatcgcccggagcttgccgggc

SEQ ID NO: 196980 - DNA, 75 bp, synthetic construct
  source 1..75: mol_type = other DNA
gccgtcgatggcgcagagtttgtcgaagatagctggcaacgtgaagctggcggcggtgggcgtagtcgggtgttg

SEQ ID NO: 196981 - DNA, 75 bp, synthetic construct
  source 1..75: mol_type = other DNA
gatcacctttccagcaatgagctgcggcggttacgtgaatacattacggggaatagctcatgcagctacgaagag

SEQ ID NO: 196982 - DNA, 75 bp, synthetic construct
  source 1..75: mol_type = other DNA
ctatgtcgggccttgaggctcacacagctgcaataccacttctgctaagtaatgtgggaggatgttttgaattaa

SEQ ID NO: 196983 - DNA, 75 bp, synthetic construct
  source 1..75: mol_type = other DNA
taactgatatcatttggtgtgtttcccaaagtgataagattaaggcaatcgaaaaaattggcattagagcgtcaa

SEQ ID NO: 196984 - DNA, 75 bp, synthetic construct
  source 1..75: mol_type = other DNA
tttcctaattttagaaggagagaaaactatgggaaatgccgacagaatcaccacattctttgacgtcaaggaggg

SEQ ID NO: 196985 - DNA, 75 bp, synthetic construct
  source 1..75: mol_type = other DNA
cgttttacttgcttcaaatttaatccttcaagcgatttgccgatgatttatcgtgtggctgctgatggtgaagaa

SEQ ID NO: 196986 - DNA, 75 bp, synthetic construct
  source 1..75: mol_type = other DNA
ccattacagctgaagcctgcgttcatcacctgttttttaattatgacgattatgaaatgctggggcataagctca

SEQ ID NO: 196987 - DNA, 75 bp, synthetic construct
  source 1..75: mol_type = other DNA
cattaataatcaatgaagacttgcgctatccggccgacatcctcattgataaaggacggatccagaaaattgcct

SEQ ID NO: 196988 - DNA, 75 bp, synthetic construct
  source 1..75: mol_type = other DNA
gtgatgaaacccgacgcacaccaggttaaacagttcctgctcaaccttcaggatacaatttgtcagcagctgagc

SEQ ID NO: 196989 - DNA, 75 bp, synthetic construct
  source 1..75: mol_type = other DNA
ctatgagagcgagccattcagaaatgcaatgctccgaatggcaaacaccccacgcggatcaacagcgtttgagaa

SEQ ID NO: 196990 - DNA, 75 bp, synthetic construct
  source 1..75: mol_type = other DNA
ggttataaagtattttatcgttgataaatcaggaaaaaatctttatatccgagatgatgtgaatatttttaagac

SEQ ID NO: 196991 - DNA, 75 bp, synthetic construct
  source 1..75: mol_type = other DNA
ccaaattgacgaacaagacaaggatgaaaagattaaagggactgattatctctatgctttgactagaaatcctgc

SEQ ID NO: 196992 - DNA, 75 bp, synthetic construct
  source 1..75: mol_type = other DNA
tggtccggtaaatctggatttgaagcaattaagcgatctgcgcagccagttcagaatggacgtgaagggggagcg

SEQ ID NO: 196993 - DNA, 75 bp, synthetic construct
  source 1..75: mol_type = other DNA
aggctgaagaatgttctcatgaaaggcgacctgacgccggaagttgtcaacaacatgctattcagcaagaacaaa

SEQ ID NO: 196994 - DNA, 75 bp, synthetic construct
  source 1..75: mol_type = other DNA
tggccccgcaagccggagaaaatgcagagcaggctaagcaagctttctatgctgcctatccattgccatctgtgc

SEQ ID NO: 196995 - DNA, 75 bp, synthetic construct
  source 1..75: mol_type = other DNA
aatgccgccactggtacgctgggagtatgattatcagccagaagcaggcagcccggaagcggcgttaagtgagtt

SEQ ID NO: 196996 - DNA, 75 bp, synthetic construct
  source 1..75: mol_type = other DNA
gcttcgatttaacccctttctatggttttgaagaagacgccattcactggcaccgcaccgcccgtgacctgtgcc

SEQ ID NO: 196997 - DNA, 75 bp, synthetic construct
  source 1..75: mol_type = other DNA
tatgttcccaccagccacgcgaatgtgcgcttttttattgccgaaaaaccgggtgccgatcccgtctggtggttt

SEQ ID NO: 196998 - DNA, 75 bp, synthetic construct
  source 1..75: mol_type = other DNA
cacttagttcgtgcatggcggcgtacatatggattacccaccatagtgacaaattgttctaataattatgggccg

SEQ ID NO: 196999 - DNA, 75 bp, synthetic construct
  source 1..75: mol_type = other DNA
aggtaaggcattacctatttatggtaaaggggatcaaattcgcgactggttgtatgtagaggatcatgctcgtgc

SEQ ID NO: 197000 - DNA, 75 bp, synthetic construct
  source 1..75: mol_type = other DNA
attcaacctggtctgggatcgcggtacgctgtttggcttacaaaccggcgggcgcaccgaatcaatcctgatgtc

SEQ ID NO: 197001 - DNA, 75 bp, synthetic construct
  source 1..75: mol_type = other DNA
gaactgaaggaaattccaaagctaattgatgccaaccgcaagacagtgcgtgatcgccttgatgagctgaaagcc

SEQ ID NO: 197002 - DNA, 75 bp, synthetic construct
  source 1..75: mol_type = other DNA
agcacaggaggaggctgaacgaatcaggcgcgaggctgaagcaaaagagcaagccagaatagcagaagaaaaaga

SEQ ID NO: 197003 - DNA, 75 bp, synthetic construct
  source 1..75: mol_type = other DNA
aagccagaatagcagaagaaaaagaaccaaggacgaagaagagcgtagagcaaaggataaagctcaccggaaaga

SEQ ID NO: 197004 - DNA, 75 bp, synthetic construct
  source 1..75: mol_type = other DNA
ggcagcagctgaagctctcgcaaagcaaattgagtctgaccatgaaatagcgattttgatggatcgcgaatttga

SEQ ID NO: 197005 - DNA, 75 bp, synthetic construct
  source 1..75: mol_type = other DNA
aaggcacgccagcctcttactgattatgaggaagaacaggcgcggattaaagccgaagaagaagctaaggcagca

SEQ ID NO: 197006 - DNA, 75 bp, synthetic construct
  source 1..75: mol_type = other DNA
ttgcgcagacgaaaacatatctcgatggtcttggcaaagaccttgttgctgaactgaaggaaattccaaagctca

SEQ ID NO: 197007 - DNA, 75 bp, synthetic construct
  source 1..75: mol_type = other DNA
atgaccaaaattaaaattctggcgctcagtatgctgaccgccatatcggtgaacacggcttatgctgaaagcact

SEQ ID NO: 197008 - DNA, 75 bp, synthetic construct
  source 1..75: mol_type = other DNA
acgttacagccgcttatctgatgaagttaaaaactctcccatggtggataagtcatgggatggactgttttccac

SEQ ID NO: 197009 - DNA, 75 bp, synthetic construct
  source 1..75: mol_type = other DNA
ggcgctgaagcatctgacgccggtatctgaagaaactaaacccgccggcacaccggctgtgcagtcaccaaagcg

SEQ ID NO: 197010 - DNA, 75 bp, synthetic construct
  source 1..75: mol_type = other DNA
gccgaaacaagaagtatcgtgatattatcagactctttaaggctttttcgcggtgggggcctgtttgaagaacct

SEQ ID NO: 197011 - DNA, 75 bp, synthetic construct
  source 1..75: mol_type = other DNA
ttatactcggacgtagtgaaatttatcgaatcaacaaaagaaaaagaaaacttgcagaagaagtatttgatgcgc

SEQ ID NO: 197012 - DNA, 75 bp, synthetic construct
  source 1..75: mol_type = other DNA
accatcggagagccgaaatcactcataatactttatgggataaagttccggcttccgcatggaaaaatgtaaaat

SEQ ID NO: 197013 - DNA, 75 bp, synthetic construct
  source 1..75: mol_type = other DNA
aatcgcttatttcatgctggacagatagcatattttctattgtgttaggtatgagcaagagcaactcccgtaaaa

SEQ ID NO: 197014 - DNA, 75 bp, synthetic construct
  source 1..75: mol_type = other DNA
tggtgatctggtttggtattggtgaaacctcgaagatcttactgatctatttagcgatttttgcacctgtggcga

SEQ ID NO: 197015 - DNA, 75 bp, synthetic construct
  source 1..75: mol_type = other DNA
accggattacgcattggtctggggtgtgggctggtctacgctggtagcggcggagctgattgccgcgacacgcgg

SEQ ID NO: 197016 - DNA, 75 bp, synthetic construct
  source 1..75: mol_type = other DNA
ccgccgctggcttatttgccgctgatggtgatctggtttggtattggtgaaacctcgaagatcttactgatctat

SEQ ID NO: 197017 - DNA, 75 bp, synthetic construct
  source 1..75: mol_type = other DNA
atggaaagccttggcttcaggcttaagagacttagaaaagataaggggctgacccaagtagaactgggtaagctt

SEQ ID NO: 197018 - DNA, 75 bp, synthetic construct
  source 1..75: mol_type = other DNA
aacaaaccctcgataccatatagatgaattgactgtgaaaggtgatattgttctttctgataatgcaaaaataac

SEQ ID NO: 197019 - DNA, 75 bp, synthetic construct
  source 1..75: mol_type = other DNA
tggggtggtcaacgctggtggcggcagaactgattgccgcgacgcgaggcttaggttttatggttcagtcagcgg

SEQ ID NO: 197020 - DNA, 75 bp, synthetic construct
  source 1..75: mol_type = other DNA
catttttatttgcaattactttgcctccagtgatggtatggtttctagttgcaaaatttacctacggtattgatc

SEQ ID NO: 197021 - DNA, 75 bp, synthetic construct
  source 1..75: mol_type = other DNA
gctccattggcgacgttgagctggtgatttttgtcgttgaaggcacccgctggacgccggacgacgaaatggtgc

SEQ ID NO: 197022 - DNA, 75 bp, synthetic construct
  source 1..75: mol_type = other DNA
gtggataacgtgcaggaaaaagccgatctgctgccgcacttacagttcctggcaagccagatgaacttcctcgat

SEQ ID NO: 197023 - DNA, 75 bp, synthetic construct
  source 1..75: mol_type = other DNA
agcacaaaaagcatgttcacactcaccatgaactacaagcacaaaacattcgggagtgggacgttggtattcgaa

SEQ ID NO: 197024 - DNA, 75 bp, synthetic construct
  source 1..75: mol_type = other DNA
gacgcctgtaccaccgccgaactccactttaccgatgccgcgggcgatgactacaccgtctcgctgatcccggaa

SEQ ID NO: 197025 - DNA, 75 bp, synthetic construct
  source 1..75: mol_type = other DNA
agaggaatggtatagatatggtcgtcttatttatcgtgaggtatcaaagaagttactcacgcttaaacgtagccc

SEQ ID NO: 197026 - DNA, 75 bp, synthetic construct
  source 1..75: mol_type = other DNA
gcattggtgatttatggctcggtgggcgcagtagaagaagcgttatcacaaaccgtcagcggtttaggtcgctta

SEQ ID NO: 197027 - DNA, 75 bp, synthetic construct
  source 1..75: mol_type = other DNA
tgtcgcaggcgttttcgctctataacgaactcaccgtgcggcaaaaccttgagttacatgcccgtttgtttcaca

SEQ ID NO: 197028 - DNA, 75 bp, synthetic construct
  source 1..75: mol_type = other DNA
gccagtctggaagaggcatttatcgcctatttgcaggaagcggcagggcagagcaacgaagccgaagcgccgccc

SEQ ID NO: 197029 - DNA, 75 bp, synthetic construct
  source 1..75: mol_type = other DNA
gccattttcggtactgccataatcacgttgattccggcgacgcagttttccgggatgatcgatccggtagcttca

SEQ ID NO: 197030 - DNA, 75 bp, synthetic construct
  source 1..75: mol_type = other DNA
cgaaaacctgaagctgatgattgtagattcaattggtcaacgcaacagttatgtgaaaacatggggttgcggagg

SEQ ID NO: 197031 - DNA, 75 bp, synthetic construct
  source 1..75: mol_type = other DNA
tgaccgaggcgttgtttaaggcgcgcctgaataacatgctgtcgcgtcgcgatcacctggaaaactttgtccaga

SEQ ID NO: 197032 - DNA, 75 bp, synthetic construct
  source 1..75: mol_type = other DNA
cctgtttgcaggaggcggcagggcagagcaacgaagccgaagcgccgcccgtggtgcacgacgctactcacgcgc

SEQ ID NO: 197033 - DNA, 75 bp, synthetic construct
  source 1..75: mol_type = other DNA
cgagcgttttaagctcaacgacgttgaagatgttctgccggagtcattgccgctcggcattcgccagcggctttc

SEQ ID NO: 197034 - DNA, 75 bp, synthetic construct
  source 1..75: mol_type = other DNA
aaactgggctacagcctgcaagattgtattgcctttggcgatggaatgaacgatgccgaaatgctgtcgatggcg

SEQ ID NO: 197035 - DNA, 75 bp, synthetic construct
  source 1..75: mol_type = other DNA
cttcgttaccggctcccacaccttctgagcacgccgcagcagtgcttaatctggttgatgacggtgttaatggag

SEQ ID NO: 197036 - DNA, 75 bp, synthetic construct
  source 1..75: mol_type = other DNA
tcgacggagcgatgccgagccgtgctgaaacggtaaaaggatcgacggagcgatgccgagccgtgctgaaacggt

SEQ ID NO: 197037 - DNA, 75 bp, synthetic construct
  source 1..75: mol_type = other DNA
tggaagaggccgaacgcttcgactggttggtggcgatgaatgccggagaagtgctggcaactggcagcgccgaag

SEQ ID NO: 197038 - DNA, 75 bp, synthetic construct
  source 1..75: mol_type = other DNA
atgacgtatctggaacgggcttccgctccgccagtcgcgcaactggcgggggtgagcctgcattatggaaaaaac

SEQ ID NO: 197039 - DNA, 75 bp, synthetic construct
  source 1..75: mol_type = other DNA
tgttaagagcctggaagccaatccgaaacagttcccggattttggcccacgtctggcggaaatcaaagcgcaaac

SEQ ID NO: 197040 - DNA, 75 bp, synthetic construct
  source 1..75: mol_type = other DNA
atccggtggtcagctgtgggcattgctatccgtgctctataggtaagccgaacgtttgtacgacactggctgtat

SEQ ID NO: 197041 - DNA, 75 bp, synthetic construct
  source 1..75: mol_type = other DNA
tacaatcgccgcgtggcactgtatcgggaaacggagaaaattacgtaccactggaagaagccggagcggttacgg

SEQ ID NO: 197042 - DNA, 75 bp, synthetic construct
  source 1..75: mol_type = other DNA
ttatagggacgtaactaaacttaatttgattcaatcaagttggtattttgtttggtattcagttttaggtttggt

SEQ ID NO: 197043 - DNA, 75 bp, synthetic construct
  source 1..75: mol_type = other DNA
gcgcagtatgtaacagaccggcagcggatagcggcctatagcggtgaagcttgtcctcatagcggggagtggtcg

SEQ ID NO: 197044 - DNA, 75 bp, synthetic construct
  source 1..75: mol_type = other DNA
taccccaacccgttttcgtaggatggaataaaaaacgaaaattccactacaacgaagttattaaattcatgaaac

SEQ ID NO: 197045 - DNA, 75 bp, synthetic construct
  source 1..75: mol_type = other DNA
gatgtttcacattatcgaagtagtaaccgcgtcaggggacgttctacggcttacagatgggtacttcgatttgga

SEQ ID NO: 197046 - DNA, 75 bp, synthetic construct
  source 1..75: mol_type = other DNA
gacatggctctatggttagatatcctaaagaagattgagtttgcatactgtgtccctgaagttttggcattttat

SEQ ID NO: 197047 - DNA, 75 bp, synthetic construct
  source 1..75: mol_type = other DNA
aacgtaaccggtcatggtcaaccgactgaaaatgataccgttctggtttatggtgccggtccaatcggcctgacg

SEQ ID NO: 197048 - DNA, 75 bp, synthetic construct
  source 1..75: mol_type = other DNA
tagatttgtgtaattgcctgattttgatatgttcaatccagcatcaaatgaaggttaatttatggacgaaaaaca

SEQ ID NO: 197049 - DNA, 75 bp, synthetic construct
  source 1..75: mol_type = other DNA
gactatgtgaatagtgatgaaagaataaaactgattactaatgaaaaaaatatcggagctggaggtagtagaaat

SEQ ID NO: 197050 - DNA, 75 bp, synthetic construct
  source 1..75: mol_type = other DNA
gtcatcgcaatggtctttttatcgtaaatatatgaaattaaatttatatcaagcaatttattatttttcgttcta

SEQ ID NO: 197051 - DNA, 75 bp, synthetic construct
  source 1..75: mol_type = other DNA
ttccctggcattttcagggaacgacataccatggttggtggcaaaatcagtggcaacgctgggggcaggggaata

SEQ ID NO: 197052 - DNA, 75 bp, synthetic construct
  source 1..75: mol_type = other DNA
ggacggcagacctgccggctggtacagggattatcgcagcgcggatgattcgccgatcacctggaccttctccgg

SEQ ID NO: 197053 - DNA, 75 bp, synthetic construct
  source 1..75: mol_type = other DNA
atgatcgtattaagtaaacgggagaaggaaacacttcatgaaatcagtaagtggtcagagttccctgagtactgg

SEQ ID NO: 197054 - DNA, 75 bp, synthetic construct
  source 1..75: mol_type = other DNA
ttctgaaacgtggtgttcggccaactaccagttaactgataaagggaaagtattgctacagcaattagtagaatc

SEQ ID NO: 197055 - DNA, 75 bp, synthetic construct
  source 1..75: mol_type = other DNA
cgcatcgtagtcagcgccaggtggctggggtttggctaccagcggttaatgccttcttttgctggcgtacgcttc

SEQ ID NO: 197056 - DNA, 75 bp, synthetic construct
  source 1..75: mol_type = other DNA
tccccttcagccagagccgttccttcctgagtcagatggccccgaagaatacgaaaactacagcgcatatcagga

SEQ ID NO: 197057 - DNA, 75 bp, synthetic construct
  source 1..75: mol_type = other DNA
gtttttacaccggtccacactgaggaaaaaaccatgactccgacagaatatcctgaaacatcacccgatacaggg

SEQ ID NO: 197058 - DNA, 75 bp, synthetic construct
  source 1..75: mol_type = other DNA
gcggaaagtgagtttgaggtattaatttcttattactcaggcccgcaggcgcgtatttattatgcggagatgctg

SEQ ID NO: 197059 - DNA, 75 bp, synthetic construct
  source 1..75: mol_type = other DNA
ttaaccgaagaactggcgattgccgagacgaatcaaaaccattatgcgttggctaatgaactggcgcgtctgggg

SEQ ID NO: 197060 - DNA, 75 bp, synthetic construct
  source 1..75: mol_type = other DNA
ggcgctgaccgtcacgggcatactttgctgatgcgcctgcaggacaaactcaaccctgagcgccacctgcgcaaa

SEQ ID NO: 197061 - DNA, 75 bp, synthetic construct
  source 1..75: mol_type = other DNA
aaagaaacggtggaagcctatcatatgaaagggaagagccatgactgcggtaataaattaggttacatgcaggcc

SEQ ID NO: 197062 - DNA, 75 bp, synthetic construct
  source 1..75: mol_type = other DNA
accgcatatggcgttgtggattgcaaaggcgttgaattagcgccgggtgaaagcgtacctatggttggcgtggtt

SEQ ID NO: 197063 - DNA, 75 bp, synthetic construct
  source 1..75: mol_type = other DNA
tattgcagatgcggtgaaaggtgatatcagcattctggcggacagtgggattcgtaacgggcttgatgtcgtgcg

SEQ ID NO: 197064 - DNA, 75 bp, synthetic construct
  source 1..75: mol_type = other DNA
ctggcttcgctgtggacggcgtagaaggtctcctgaacacgattattggtgtgcgcgaggcgtacaaccaagatt

SEQ ID NO: 197065 - DNA, 75 bp, synthetic construct
  source 1..75: mol_type = other DNA
tgagcacgccgcagcagtgcttaatctggttgatgacggtgtcatcgaatggagtgacccggaggtcgtgagggc

SEQ ID NO: 197066 - DNA, 75 bp, synthetic construct
  source 1..75: mol_type = other DNA
cagaagttatttatgacatgaaaaaatttgtttatccgccttgttgtgattggccggggtttaatgatttccctt

SEQ ID NO: 197067 - DNA, 75 bp, synthetic construct
  source 1..75: mol_type = other DNA
gacgggaaaaaattcatgtatccggttgctgatgtttggccgggaattgaagatgaagcattgtttttattttaa

SEQ ID NO: 197068 - DNA, 75 bp, synthetic construct
  source 1..75: mol_type = other DNA
gagcttgaggtgctggcgcgtggcgcgaccgtaaattatgaagggaaaaaattcacgtatccggtcactgatgag

SEQ ID NO: 197069 - DNA, 75 bp, synthetic construct
  source 1..75: mol_type = other DNA
gaacttgaggcgctggcgcgtggagcgacattggtatatggcgaaaaaaaattcacatatcagcttgttgataag

SEQ ID NO: 197070 - DNA, 75 bp, synthetic construct
  source 1..75: mol_type = other DNA
actcagaggtgcattaaaacacggactgagaagaccaaaccgtcagcaaagaaacggaagtatgttaaaaccgca

SEQ ID NO: 197071 - DNA, 75 bp, synthetic construct
  source 1..75: mol_type = other DNA
caaccgtaaattatgacgggaaaaaattcacgtatccaatcattgatgagtggccggggttcataaccaagtgtg

SEQ ID NO: 197072 - DNA, 75 bp, synthetic construct
  source 1..75: mol_type = other DNA
cagcgcgcagggtggggcaaatgttccgcgcgattgtcagactgtcagggttgcccgtagtccgtcggatgaagt

SEQ ID NO: 197073 - DNA, 75 bp, synthetic construct
  source 1..75: mol_type = other DNA
tgagcacgccgcagcagtgctaaatctggttgatgacggtgttatcgaatggaatgacccggaggtcgtgagggc

SEQ ID NO: 197074 - DNA, 75 bp, synthetic construct
  source 1..75: mol_type = other DNA
tgctcagaacggcatctggcctcagcgatgggaacttgaggcgctggcgcgtggcgcgaccgtaaattatgacgg

SEQ ID NO: 197075 - DNA, 75 bp, synthetic construct
  source 1..75: mol_type = other DNA
ttaaatcttgttgatgacggggctatcgcatgggatgaccccgaagtcgtgacggcgctcaagggcgcactaaaa

SEQ ID NO: 197076 - DNA, 75 bp, synthetic construct
  source 1..75: mol_type = other DNA
tgccgcaggcaccggtaaggcgtttaccggtgcttatgcatggaacgcgccacgcgaggctgtcgggcgcgaaag

SEQ ID NO: 197077 - DNA, 75 bp, synthetic construct
  source 1..75: mol_type = other DNA
tgccaggacatccccgcaccactgaaacgctttcttcctgactataaacggatggaagaaaaaatagacacagta

SEQ ID NO: 197078 - DNA, 75 bp, synthetic construct
  source 1..75: mol_type = other DNA
atgacctggcaaaatgggtctggcagaatgaatctgaactgcgccctggaaactcgcaaaatacactgctaaccc

SEQ ID NO: 197079 - DNA, 75 bp, synthetic construct
  source 1..75: mol_type = other DNA
ccgaggacaattttatcgctaataacgtcgggatgaccaggctgcaggcaacagtgactgatggaaacggcaacc

SEQ ID NO: 197080 - DNA, 75 bp, synthetic construct
  source 1..75: mol_type = other DNA
gtgcagtacatcgaagcgtggatctctggcaatggctgtgtgccgatttatggcctgatggaagatgcggcgacg

SEQ ID NO: 197081 - DNA, 75 bp, synthetic construct
  source 1..75: mol_type = other DNA
cgcattcagcagcagcaggatatcgataacggaacgttgcctgatttcatttcggaaacagcttccattcgtgat

SEQ ID NO: 197082 - DNA, 75 bp, synthetic construct
  source 1..75: mol_type = other DNA
tggcgagcaggagaagcaaattcttactgccgaagcggtagaatttctgactgagctggtgacgcattttacgcc

SEQ ID NO: 197083 - DNA, 75 bp, synthetic construct
  source 1..75: mol_type = other DNA
ttctctaccttaacctgtctggaagtgatggctggcggtgtttctaaaggccatgcgctggaagcggtggcgaag

SEQ ID NO: 197084 - DNA, 75 bp, synthetic construct
  source 1..75: mol_type = other DNA
gtggcattacgctgacctgactgcgctgcgcgaaggtgagtatgcaaagagtcgtcagggacgtatgttccttga

SEQ ID NO: 197085 - DNA, 75 bp, synthetic construct
  source 1..75: mol_type = other DNA
tcacttctacagcgtcgcccaacatgcggttctttgcagccagctggtgccgcaggaatttgcttttgaagcgtt

SEQ ID NO: 197086 - DNA, 75 bp, synthetic construct
  source 1..75: mol_type = other DNA
gtgaaaaagggttgctggtctatcgctcggtgattgcccgtccgcatgaagccatgtggcgtcagatggtggagg

SEQ ID NO: 197087 - DNA, 75 bp, synthetic construct
  source 1..75: mol_type = other DNA
cacgttggctttgccatgagcgtaattaatgaagccgaagcgcgcgacactctcgacgccttacaaaacatgttt

SEQ ID NO: 197088 - DNA, 75 bp, synthetic construct
  source 1..75: mol_type = other DNA
tccggagctggaagtgattggtactaacgccgaggacgcagtgccgcattatctgcgtaagctctatttatcgta

SEQ ID NO: 197089 - DNA, 75 bp, synthetic construct
  source 1..75: mol_type = other DNA
ttctggttgatggcatcgttgaacaccgcgaacaaccgcaaacctatcttggcggttacgacctgaccattagcg

SEQ ID NO: 197090 - DNA, 75 bp, synthetic construct
  source 1..75: mol_type = other DNA
aaagttattccactgtcgccaggccatacctatgggatgtttatggaacgctttaaagagttaaggaaggtgcga

SEQ ID NO: 197091 - DNA, 75 bp, synthetic construct
  source 1..75: mol_type = other DNA
gaccggcattgaccccttgacgctaaacgcggtgcgaaaactgtttaaagagcctggtgtgcaacatacggcaga

SEQ ID NO: 197092 - DNA, 75 bp, synthetic construct
  source 1..75: mol_type = other DNA
ttgatgcgttgacacttaacgcagtgcggaaacttttcaaagagccaggtgtgcaacatacggcggagacggtag

SEQ ID NO: 197093 - DNA, 75 bp, synthetic construct
  source 1..75: mol_type = other DNA
tacagtttcatttgagagatactgttccttacgtgatgattgtgataaagctttttatatttctaagggatgcac

SEQ ID NO: 197094 - DNA, 75 bp, synthetic construct
  source 1..75: mol_type = other DNA
gacggtggcaaagccttaaaactgctggtgctgtggcgtagtgatgaagatgcgcagcaacgcctggatatggtg

SEQ ID NO: 197095 - DNA, 75 bp, synthetic construct
  source 1..75: mol_type = other DNA
aaagttattccactggcaccgggccatgcctacgggatgtttatggagcgctttaacgagttatcggagttacgc

SEQ ID NO: 197096 - DNA, 75 bp, synthetic construct
  source 1..75: mol_type = other DNA
gcgacattttaccgttcatggccttccgtccgattatcaggcaaccacgtctgatggaaagcagcctgtttacgc

SEQ ID NO: 197097 - DNA, 75 bp, synthetic construct
  source 1..75: mol_type = other DNA
ggcgtacataacggcatgatgcttgatgatgctctgtttggttgtgcccgcaacgccgatgccattattccatca

SEQ ID NO: 197098 - DNA, 75 bp, synthetic construct
  source 1..75: mol_type = other DNA
aaccggacacccgcgcgatctgacattaatccactcgctgggtattggcgatcgcgacagcaaaggcactaaccg

SEQ ID NO: 197099 - DNA, 75 bp, synthetic construct
  source 1..75: mol_type = other DNA
ttgatgcgttgacactgaatgcagtgcggaaacttttcaaagagccggatgtgcaacatacggcggagacggtag

SEQ ID NO: 197100 - DNA, 75 bp, synthetic construct
  source 1..75: mol_type = other DNA
gtcacggtaagcgcagtcacgaccgctggtggaatgcaaacagtagatataacgctggtggcaggcccggcagac

SEQ ID NO: 197101 - DNA, 75 bp, synthetic construct
  source 1..75: mol_type = other DNA
atgtcatttattaaaactttttccgggaagcatttttattatgacaggataaataaagacgacatcgtgattaac

SEQ ID NO: 197102 - DNA, 75 bp, synthetic construct
  source 1..75: mol_type = other DNA
tcaatgaacgcttacaacatccatgaagctgacgcgatagttatcgaaaccaaccagggcggcgaaatggcagag

SEQ ID NO: 197103 - DNA, 75 bp, synthetic construct
  source 1..75: mol_type = other DNA
catctgatgagtctgacgaaaccgggatcgtggcgtgttccgcttatggtggcggtaagcacgctcagtattctg

SEQ ID NO: 197104 - DNA, 75 bp, synthetic construct
  source 1..75: mol_type = other DNA
gcaatgagcgcatacgacattcatgaggctgacgcgatggttatcgaaaccaaccagggcggtgaaatggcagag

SEQ ID NO: 197105 - DNA, 75 bp, synthetic construct
  source 1..75: mol_type = other DNA
ggcgaggctttcatgatatacagccttgctgaaaatttttgcagcagcaatggctacacgctccccagagcaaac

SEQ ID NO: 197106 - DNA, 75 bp, synthetic construct
  source 1..75: mol_type = other DNA
ctgcgaagaaatcacctgaccggcttgatgccgcggtatacgcgctcaccgaactatcagaaccacaatcaaccg

SEQ ID NO: 197107 - DNA, 75 bp, synthetic construct
  source 1..75: mol_type = other DNA
gttaccggctttcgtgccgggcatatggaaccaggctggcagggcgcgctgattatcgatgacccggttaagccg

SEQ ID NO: 197108 - DNA, 75 bp, synthetic construct
  source 1..75: mol_type = other DNA
ttgtttccactattccacgttttaccatctacccgaaaacgcactacgtcacgccacgcgagcgcatcgtccagg

SEQ ID NO: 197109 - DNA, 75 bp, synthetic construct
  source 1..75: mol_type = other DNA
ctgttgtaccggagtgaacatattcccgaggcttggcaggggcggggacgaacgaagtatgtcaacgaggctggg

SEQ ID NO: 197110 - DNA, 75 bp, synthetic construct
  source 1..75: mol_type = other DNA
taacggtggctggcctgtatctgccggatatcccagatgccagcgcccaactgttgtaccggagtgaacatattc

SEQ ID NO: 197111 - DNA, 75 bp, synthetic construct
  source 1..75: mol_type = other DNA
ggccgatgagtggtgcctgaactacgccaccgattttggctatgtcggcacggtctacccggagctggagaaaat

SEQ ID NO: 197112 - DNA, 75 bp, synthetic construct
  source 1..75: mol_type = other DNA
tgatgaagaggtggagcgactgtcgcttttcgatccgttaaccgggcaggttatctcaactatcgcgcgatatac

SEQ ID NO: 197113 - DNA, 75 bp, synthetic construct
  source 1..75: mol_type = other DNA
agaacacggtgagcgcgtgcgttatcttcactcagatatcgacaccgtcgaacgtatggagattatccgcgactt

SEQ ID NO: 197114 - DNA, 75 bp, synthetic construct
  source 1..75: mol_type = other DNA
atgtctaatatcgtcactgcaaaaatctacggccccgctcagaaaatgcgtttccttccttacgcgttcgcagag

SEQ ID NO: 197115 - DNA, 75 bp, synthetic construct
  source 1..75: mol_type = other DNA
cgaatcaactggcgattatcgaacgtgaaattccgaccccggcagtgggggaagttcgagtaaaagtgaaactcg

SEQ ID NO: 197116 - DNA, 75 bp, synthetic construct
  source 1..75: mol_type = other DNA
gttgctgatgccatttcattattcgaaaaggatcaaaagcactgttgcaaagttttactcacgttttctgaataa

SEQ ID NO: 197117 - DNA, 75 bp, synthetic construct
  source 1..75: mol_type = other DNA
tgatgccattagtttatttgaacaggatcaaaaacattgctgcaaagtcttactcactttttctgtaagcgtaca

SEQ ID NO: 197118 - DNA, 75 bp, synthetic construct
  source 1..75: mol_type = other DNA
agcctaataaaagatattgtacgggaggctcaggaggatatcaatagcaatggacctgcatggagttcttggtca

SEQ ID NO: 197119 - DNA, 75 bp, synthetic construct
  source 1..75: mol_type = other DNA
atgattgatatagttacatgtgtaatagatgctgattttgataatataatcaaaatagcctcaaatatggattta

SEQ ID NO: 197120 - DNA, 75 bp, synthetic construct
  source 1..75: mol_type = other DNA
gcagatattatcaaaaatatcgaacaaggtaacatccagaataaacataattatctgtcacaggatgtaaaacat

SEQ ID NO: 197121 - DNA, 75 bp, synthetic construct
  source 1..75: mol_type = other DNA
gaagcgttcctacgttgcaaacgatcctgaaaaggcgagcgatgaagcgcacaccatccataacccggtggtgaa

SEQ ID NO: 197122 - DNA, 75 bp, synthetic construct
  source 1..75: mol_type = other DNA
ggcgacaacggtgcagaacgaactgactcaggagttaaaactccaggagtttcaggacagcctgaaaaaggttga

SEQ ID NO: 197123 - DNA, 75 bp, synthetic construct
  source 1..75: mol_type = other DNA
gattttaaagttgccgcgacccgaatcctttctccttatgcttctgccgttctggcggataaacaattttgtctt

SEQ ID NO: 197124 - DNA, 75 bp, synthetic construct
  source 1..75: mol_type = other DNA
ccggaatttgtggttcagatagccatatttatcgtgggcataatccttttgcgaaatacccgcgcgtcattggtc

SEQ ID NO: 197125 - DNA, 75 bp, synthetic construct
  source 1..75: mol_type = other DNA
aaagcgaaagagagcggggcagacagggcgattaataacagccagacaccgcttggcgagattttcggtgatgct

SEQ ID NO: 197126 - DNA, 75 bp, synthetic construct
  source 1..75: mol_type = other DNA
gccggaacagaagccagaaaccacgccagagccggtggtaaaacctgctgcggacgctgaaccgaaaaccgctgc

SEQ ID NO: 197127 - DNA, 75 bp, synthetic construct
  source 1..75: mol_type = other DNA
ggcctgacctgcaacgagcagaatttcattactaaatcggggatgcaacgttacgcggcggagcacaacattatt

SEQ ID NO: 197128 - DNA, 75 bp, synthetic construct
  source 1..75: mol_type = other DNA
tggtggtaacgtttatggcgcgacaaaagcgtttgttcgtcagttcagcctgaatctgcgcactgacttgcatgg

SEQ ID NO: 197129 - DNA, 75 bp, synthetic construct
  source 1..75: mol_type = other DNA
cacgtcaatatcaataccctggaaatgatgccggttacccaaagctatgccggactgaatgtccaccgtcagtaa

SEQ ID NO: 197130 - DNA, 75 bp, synthetic construct
  source 1..75: mol_type = other DNA
cggcaggttttggtgaatgcattactcgtcgttttattcaacaagggcataaagttatcgccactggccgtcgcc

SEQ ID NO: 197131 - DNA, 75 bp, synthetic construct
  source 1..75: mol_type = other DNA
ggtgaaagtgtataaatcctctttcaccgcgatgtataccgccgtcaccactcaccgccagccgtgccgcatgaa

SEQ ID NO: 197132 - DNA, 75 bp, synthetic construct
  source 1..75: mol_type = other DNA
tagtgaaaaatgccgatggtagcctgacgctggagctggaagatggtcgcagtgaaacggtggattgcctgattt

SEQ ID NO: 197133 - DNA, 75 bp, synthetic construct
  source 1..75: mol_type = other DNA
gcaaccaaaaaagacttcgacaataccgtcgccattcacccaacggcggcagaagagttcgtgaccatgcgttaa

SEQ ID NO: 197134 - DNA, 75 bp, synthetic construct
  source 1..75: mol_type = other DNA
tacgaaggtcaaagttcgtaagccggactcttctcgtgcacgttcgcgggaagtgtatattgtagcgaccgggcg

SEQ ID NO: 197135 - DNA, 75 bp, synthetic construct
  source 1..75: mol_type = other DNA
gcgattttctttaccaaaggtacactttggtattgttaaatatggtgataacgttaattcaattactgttgataa

SEQ ID NO: 197136 - DNA, 75 bp, synthetic construct
  source 1..75: mol_type = other DNA
ctgataagccttcattaaatgatttactggctattggtattggaaatacatcttacgatgaatcccgcaatggcc

SEQ ID NO: 197137 - DNA, 75 bp, synthetic construct
  source 1..75: mol_type = other DNA
ctgaaatcatatctggcctaatcaagacttatgcaggagtagataacgtaggtgatatagccaaagaagcctcat

SEQ ID NO: 197138 - DNA, 75 bp, synthetic construct
  source 1..75: mol_type = other DNA
aacacggtaatcaaccttaatgcagaatggggagctggtaaaagttttttcataaagagattttataactcaata

SEQ ID NO: 197139 - DNA, 75 bp, synthetic construct
  source 1..75: mol_type = other DNA
gaagacttttcaataaatatttccaacgtatttgaagcatttgggttaaatctaagagactcaatccgaaatact

SEQ ID NO: 197140 - DNA, 75 bp, synthetic construct
  source 1..75: mol_type = other DNA
gggcttcgcggtggcgctgaagatgggtgcaaccaaaaagacttcgacaataccgtcgccattcacccaacggcg

SEQ ID NO: 197141 - DNA, 75 bp, synthetic construct
  source 1..75: mol_type = other DNA
gcttcgtgccaacgaagggatgaattaccaggacccgaatgttgatctggcgtggatattctggaagtccagtcg

SEQ ID NO: 197142 - DNA, 75 bp, synthetic construct
  source 1..75: mol_type = other DNA
cttcgttaccggctcccacaccttctgagcacgccgcagcagtgcttaatctggtagatgacggtgttatcgaat

SEQ ID NO: 197143 - DNA, 75 bp, synthetic construct
  source 1..75: mol_type = other DNA
gaggcgctggcgcgtggcgcgaccgtaaattatgacgggaaaaaattcacgtatccggtcgctgatgagtggccg

SEQ ID NO: 197144 - DNA, 75 bp, synthetic construct
  source 1..75: mol_type = other DNA
acaacagcatcgacccggaactggctcgtgaaaaatttgcggaactgcgcgctcagtacgttgtaacgcgtgaca

SEQ ID NO: 197145 - DNA, 75 bp, synthetic construct
  source 1..75: mol_type = other DNA
cattattgcttcgtgccaacgaaggtatgaattaccaggacccgaatgttgatctggcgtggatattctggaagt

SEQ ID NO: 197146 - DNA, 75 bp, synthetic construct
  source 1..75: mol_type = other DNA
ccattagggattaacggcggtaaacaaaagttcgtccaggccattggagatcttcctgattttggcggacatctg

SEQ ID NO: 197147 - DNA, 75 bp, synthetic construct
  source 1..75: mol_type = other DNA
aggctgtcgggcgcgaaagaccccttacacgtgacgagatgcgtcaggtgcaaggtgttttatccacgattaacc

SEQ ID NO: 197148 - DNA, 75 bp, synthetic construct
  source 1..75: mol_type = other DNA
gttttggtatggacgaaatgttgcagggcttcgcggtggcgctgaagatgggcgcaaccaaaaaagacttcgaca

SEQ ID NO: 197149 - DNA, 75 bp, synthetic construct
  source 1..75: mol_type = other DNA
atattctgatcgccaccggcggtcgtccgagccacccggatattccgggcgtggaatacggtattgattccgatg

SEQ ID NO: 197150 - DNA, 75 bp, synthetic construct
  source 1..75: mol_type = other DNA
accgtcagcaaagaaacggaagcccgttaaaaccgcatgaaatagcgccatcggccagactgacccggtcggaac

SEQ ID NO: 197151 - DNA, 75 bp, synthetic construct
  source 1..75: mol_type = other DNA
tgagcacgccgcagcagtgcttaatctggtagatgacggtgttatcgaatggagtgacccggaggtagtgatggt

SEQ ID NO: 197152 - DNA, 75 bp, synthetic construct
  source 1..75: mol_type = other DNA
cgcacatccgttatgacttagcacagcataatatcacaccgaaacgttgggaacttgaggcgctggcgcgagggg

SEQ ID NO: 197153 - DNA, 75 bp, synthetic construct
  source 1..75: mol_type = other DNA
aatgccttgcttaaggaacaaaacctgcaggcgagagatatcgttgcgatcggctgtcacggtcaaaccgtctgg

SEQ ID NO: 197154 - DNA, 75 bp, synthetic construct
  source 1..75: mol_type = other DNA
tttcgcagtttggacagcttgatactcaactcgggcgactttttgctgatgcggtcaatgccttgcttaaggaac

SEQ ID NO: 197155 - DNA, 75 bp, synthetic construct
  source 1..75: mol_type = other DNA
tgttgatgttgtgttggcgacaattgatgaacaccgggtcgcacagctggcaagtttgagctggccgatcccggt

SEQ ID NO: 197156 - DNA, 75 bp, synthetic construct
  source 1..75: mol_type = other DNA
gcatcgccgcgcctcggagtcctgtcaataactgtggaaagctcaccggcggtgatacttcgttaccggctccca

SEQ ID NO: 197157 - DNA, 75 bp, synthetic construct
  source 1..75: mol_type = other DNA
cccgtatccgcgttgaccttgctcagaacggtatcaggccgcagcgatgggagcttgaggcgctggcgcgtgggg

SEQ ID NO: 197158 - DNA, 75 bp, synthetic construct
  source 1..75: mol_type = other DNA
ggtcatccgcctgggacgttcacctatacagcgttgtgttaatcatatttctgaaccggatacagaaattccgcc

SEQ ID NO: 197159 - DNA, 75 bp, synthetic construct
  source 1..75: mol_type = other DNA
gtgatactccagttatgacacctacaccgtctgagcaagccgcagcggtgttaaatctgattgagcgcggggtta

SEQ ID NO: 197160 - DNA, 75 bp, synthetic construct
  source 1..75: mol_type = other DNA
gtcatgcagctggtggagacagacaaggaacggcatcaggttacgatgcgacggctggaatgttccaggaaggca

SEQ ID NO: 197161 - DNA, 75 bp, synthetic construct
  source 1..75: mol_type = other DNA
agctggagtcaaaagggctataccggagagctgccgcacgatgggcagaagtcatgctgttatgcaccgaggacg

SEQ ID NO: 197162 - DNA, 75 bp, synthetic construct
  source 1..75: mol_type = other DNA
atgcgctcaaagaggatggtgacgaaagaggagccgcgcgaaaccgttttcaggcaaagcaccttaaccggggcg

SEQ ID NO: 197163 - DNA, 75 bp, synthetic construct
  source 1..75: mol_type = other DNA
gatggcgacgaaagaggagccgcgcgaaaccgttttcaggcaaaacatcttaaccggggcggtgctgcggggtat

SEQ ID NO: 197164 - DNA, 75 bp, synthetic construct
  source 1..75: mol_type = other DNA
ctggttgatgacggtgttatcgaatggaatgacccggaggtcgtgagggcgctcaggggcgcattaaaacacggt

SEQ ID NO: 197165 - DNA, 75 bp, synthetic construct
  source 1..75: mol_type = other DNA
gcttcccgtacaacacaccgacctcaaaagaagcgtatctgtaccgggaaatctttgaagaattgttcccgcttc

SEQ ID NO: 197166 - DNA, 75 bp, synthetic construct
  source 1..75: mol_type = other DNA
ggtgtgacatgtactgcaccctggcggatttgcttgaacaagtaccggaaaggacgctcattgagctgaccaacg

SEQ ID NO: 197167 - DNA, 75 bp, synthetic construct
  source 1..75: mol_type = other DNA
gagcttgaggcgctggctcggggagcgaccataaattatggcgggaaaaaattcacgtatccggtcattgatgag

SEQ ID NO: 197168 - DNA, 75 bp, synthetic construct
  source 1..75: mol_type = other DNA
taatcggggcggtgctgcggggtatatcgcgaaatacatctcaaaaaacatcgacggctatgcactggatggtca

SEQ ID NO: 197169 - DNA, 75 bp, synthetic construct
  source 1..75: mol_type = other DNA
tgatagtaatggttctcaactaacttatggtattttcatagatgcaaattctgtattgaattttgtcgttgataa

SEQ ID NO: 197170 - DNA, 75 bp, synthetic construct
  source 1..75: mol_type = other DNA
gagcctggcgagtttcgtgtacgcagccgcccggccactttcggcggtcgtgacggcttactggagaaatactga

SEQ ID NO: 197171 - DNA, 75 bp, synthetic construct
  source 1..75: mol_type = other DNA
atacccgtgtggtggacagctgtatccgctatgccgacgagctgattgatgcccatctgcgcggacgctatatcc

SEQ ID NO: 197172 - DNA, 75 bp, synthetic construct
  source 1..75: mol_type = other DNA
ggcaagatggaaaaacacatcctgcgtgaatgttttgagtcgtacctgcctgcaagtgtggcctggcggcagaaa

SEQ ID NO: 197173 - DNA, 75 bp, synthetic construct
  source 1..75: mol_type = other DNA
ggcaaaatggaaaaacacatcctgcgtgaatgttttgaagcgtatctgcccgcaagcgtggcctggcggcagaaa

SEQ ID NO: 197174 - DNA, 75 bp, synthetic construct
  source 1..75: mol_type = other DNA
gggcgcaacctctctacaaccaacaaaaaacccacgtactggcggtaaacggtgaaatctacaaccaccaggcat

SEQ ID NO: 197175 - DNA, 75 bp, synthetic construct
  source 1..75: mol_type = other DNA
tgagcacgctgcagcagtgcttaatctggttgatgacggggttatagaatggaatgacccggaggttgtgagggc

SEQ ID NO: 197176 - DNA, 75 bp, synthetic construct
  source 1..75: mol_type = other DNA
cgtaaactgctggccctgcatatgtatgactgcgcccgtgccaacaaagcgatgtcagcctggggcgtggaagca

SEQ ID NO: 197177 - DNA, 75 bp, synthetic construct
  source 1..75: mol_type = other DNA
gatcatcccgctgtatatgggttatgacgaacacggtcaactgtatgtagcctcagaaatgaaagccctggtgcc

SEQ ID NO: 197178 - DNA, 75 bp, synthetic construct
  source 1..75: mol_type = other DNA
catcgctgaccgggactctccggaggtccccacggacaacacacagacgtctgacgttgtacctgacacctccgg

SEQ ID NO: 197179 - DNA, 75 bp, synthetic construct
  source 1..75: mol_type = other DNA
agaatgaaattgaaaattataaagcacataatctaattacgtgggaaacggtttcgcatcggtataattgtttgt

SEQ ID NO: 197180 - DNA, 75 bp, synthetic construct
  source 1..75: mol_type = other DNA
gaaacgccggaaacaatgcaacgagagctactgcaacgcatcgacaaggtttttgattttttccttaaccagtaa

SEQ ID NO: 197181 - DNA, 75 bp, synthetic construct
  source 1..75: mol_type = other DNA
atgacactactgaccgccgtgaagctatcgtgatcggcaacctgatattcacaccggtaaaagatgagaagccac

SEQ ID NO: 197182 - DNA, 75 bp, synthetic construct
  source 1..75: mol_type = other DNA
aaccggacaggccatgacgcagccggaagcaccggtaccgtcacaacccgctgctgtaccgccccaacagcccgc

SEQ ID NO: 197183 - DNA, 75 bp, synthetic construct
  source 1..75: mol_type = other DNA
gactatgacctgaaggtcacgatgaaagatcccgtgcagcgaaatgcgctggagcagatgcgggcagagcgggag

SEQ ID NO: 197184 - DNA, 75 bp, synthetic construct
  source 1..75: mol_type = other DNA
tcagatcattagctatccggctgtcgatgccgctgtggcgaagtttaagcaggactggcagggagcgtttggcag

SEQ ID NO: 197185 - DNA, 75 bp, synthetic construct
  source 1..75: mol_type = other DNA
actggcagcgattaagatgttgaaagcagagggtatcccgacgctgggtaccgcggtgtatggcgctgcgcaagg

SEQ ID NO: 197186 - DNA, 75 bp, synthetic construct
  source 1..75: mol_type = other DNA
agggctgctgtcggcgctggcaggtgcggaatatgttgcgccttacgttaatcgtattgatgctcagggcggtag

SEQ ID NO: 197187 - DNA, 75 bp, synthetic construct
  source 1..75: mol_type = other DNA
gaaacgccggaagcaatgcagcaagagctgctgcaacgcatcgataacgtttttgatttttttcttggtgcaaca

SEQ ID NO: 197188 - DNA, 75 bp, synthetic construct
  source 1..75: mol_type = other DNA
acaccagacatcgtaaagctgcgcaggatgctaagcgcggtaaaatcttcactaaaatcattcgtgagctggtaa

SEQ ID NO: 197189 - DNA, 75 bp, synthetic construct
  source 1..75: mol_type = other DNA
aaaaatctaaatatacagcttcgagagcatcaagactcaattcatctgaagagttcgccataatattcagaaagg

SEQ ID NO: 197190 - DNA, 75 bp, synthetic construct
  source 1..75: mol_type = other DNA
tgcaggagtacgcagccatgcagcaggcagccacgatgcagcatgcagaggctgaagccggaacggagacagaac

SEQ ID NO: 197191 - DNA, 75 bp, synthetic construct
  source 1..75: mol_type = other DNA
gtattgtcaataatgattactgcccttggtacttcattaggatttataattgggtattattttaaggataaagaa

SEQ ID NO: 197192 - DNA, 75 bp, synthetic construct
  source 1..75: mol_type = other DNA
tgttatctaaagttaatgcgttaagatttgaagataaaagaatagagaaggaaacaggagagattgaaaatgaaa

SEQ ID NO: 197193 - DNA, 75 bp, synthetic construct
  source 1..75: mol_type = other DNA
aatagaggcgatatttttgttagccgaaatgtatctgtacggtacaaaagataccataaaagatgaaaatcatgc

SEQ ID NO: 197194 - DNA, 75 bp, synthetic construct
  source 1..75: mol_type = other DNA
cgccgtggaatgaacattacaaaatgtatgactatatccgcaacgagctgccggatttagtgatgcaacattttc

SEQ ID NO: 197195 - DNA, 75 bp, synthetic construct
  source 1..75: mol_type = other DNA
cggtgagtcttatttcacaaggtcaacgcgttgcggaaatcatggttgatcaggggttgagtgatgatttttacg

SEQ ID NO: 197196 - DNA, 75 bp, synthetic construct
  source 1..75: mol_type = other DNA
aagtggcatggcaagccgatcagcatcagtcactgcgcaccagcgcggcgctggcaaaactgtattgcgcacgta

SEQ ID NO: 197197 - DNA, 75 bp, synthetic construct
  source 1..75: mol_type = other DNA
ttggtaccctgggacaagacccagatatcaggtatatactaaatggcggagcagtcggaagactcagcatcgcaa

SEQ ID NO: 197198 - DNA, 75 bp, synthetic construct
  source 1..75: mol_type = other DNA
cgttcaggaaaaagaagccacacaatccccggcgtcccctgctgcccctgaagcatcaaccgtcagcaccgctcc

SEQ ID NO: 197199 - DNA, 75 bp, synthetic construct
  source 1..75: mol_type = other DNA
cacgacgcggatggggcatccgcagagcccaccgcgttcacatcgtcgacagatgccccggagcctgcgccctct

SEQ ID NO: 197200 - DNA, 75 bp, synthetic construct
  source 1..75: mol_type = other DNA
cgaagatcagtggcaagaagaggaagaagagcaaccgatcaatatgtccaggggtattgttcatcctcgtcctgt

SEQ ID NO: 197201 - DNA, 75 bp, synthetic construct
  source 1..75: mol_type = other DNA
agcggtggcagtaaacctcagagcaacgccaatagcgaacctccaatggactttgaagacgatattccattttga

SEQ ID NO: 197202 - DNA, 75 bp, synthetic construct
  source 1..75: mol_type = other DNA
tgggggcagtcaaaccaacctcaaaaccaccagcaatacagcggtggcagtaaacctcagagcaacgccaatagc

SEQ ID NO: 197203 - DNA, 75 bp, synthetic construct
  source 1..75: mol_type = other DNA
tgttcctgctactgctactgctactgctactgctactgctactgctactgctactgttcttcttttttctgctgc

SEQ ID NO: 197204 - DNA, 75 bp, synthetic construct
  source 1..75: mol_type = other DNA
gggcttctgtcttttcagatctgtcatttgtctgttactgatgatgttgttgttcctgctactgctactgctact

SEQ ID NO: 197205 - DNA, 75 bp, synthetic construct
  source 1..75: mol_type = other DNA
aatatgcttagtgatgcgtatttttcccaatccgcgccgaaaagcaccgggcgcgaatactttaactacggttgg

SEQ ID NO: 197206 - DNA, 75 bp, synthetic construct
  source 1..75: mol_type = other DNA
tctgattctgactactgcagtgttgtcctgtctgccgggcgcaccttcggctcccggctgcctggcggcatccgg

SEQ ID NO: 197207 - DNA, 75 bp, synthetic construct
  source 1..75: mol_type = other DNA
atgacacagggctggcgggaggataaatgcccgtctgcccgcgcggggaaaataccgcgcgtcggtggcgctgaa

SEQ ID NO: 197208 - DNA, 75 bp, synthetic construct
  source 1..75: mol_type = other DNA
atgacacagggctggcgggaggataaatgcccgtctgcccgcgctgggaaaagaccgcgcgtcggtggcgctgaa

SEQ ID NO: 197209 - DNA, 75 bp, synthetic construct
  source 1..75: mol_type = other DNA
cgggtgttgatccccgtgatgttcaggccacactggcagaactcaccgccgtgaccatttctgaacaagttttgt

SEQ ID NO: 197210 - DNA, 75 bp, synthetic construct
  source 1..75: mol_type = other DNA
ccttcggtcaccggcgcaagcgaggcgacggtgctgggcgcaattttccctgcaaacccgcgatatcagagttaa

SEQ ID NO: 197211 - DNA, 75 bp, synthetic construct
  source 1..75: mol_type = other DNA
caatctctgccggactgaaaattgatgacttcgctcctcgcctgtcgttcttcttcggcatcggcatggatctgt

SEQ ID NO: 197212 - DNA, 75 bp, synthetic construct
  source 1..75: mol_type = other DNA
gcggttacgatactggaccgggcaatatgctgatggatgcgtggatctggcgtcagactggcaaatcttacgata

SEQ ID NO: 197213 - DNA, 75 bp, synthetic construct
  source 1..75: mol_type = other DNA
ttatgtcaggcaccagtcttgatggtgttgatgttgtgttggcgacgatcgatgagcaccgggtagcacagcagg

SEQ ID NO: 197214 - DNA, 75 bp, synthetic construct
  source 1..75: mol_type = other DNA
cattactgccaggcacagaagtcaccaccaccgatgccgttggcattagtggcgatgacatggaagcattggctt

SEQ ID NO: 197215 - DNA, 75 bp, synthetic construct
  source 1..75: mol_type = other DNA
ggtgaactgggggaaggtctttccggcggtcaaaaacagcgtatattcattgcccgagctttataccggaaacct

SEQ ID NO: 197216 - DNA, 75 bp, synthetic construct
  source 1..75: mol_type = other DNA
tttgtctttgactacagactcaaagcggaagatgagcgtgatgcccttctggctcaggtcagtgcccggacaggg

SEQ ID NO: 197217 - DNA, 75 bp, synthetic construct
  source 1..75: mol_type = other DNA
gttatcgaagttccggatattaccgctaaccgacggattaccgcgccgggttactggttttaccgcaatgatgaa

SEQ ID NO: 197218 - DNA, 75 bp, synthetic construct
  source 1..75: mol_type = other DNA
ggatccgtataacaacgttatccgcaccaccattgatcattgtgcacatcctatgtgtcgggattatctgcatcg

SEQ ID NO: 197219 - DNA, 75 bp, synthetic construct
  source 1..75: mol_type = other DNA
aaaagatttaggactacaaaaatctaatgtttcgagagcattcaaagagttatttgaaaagagaattctaattcg

SEQ ID NO: 197220 - DNA, 75 bp, synthetic construct
  source 1..75: mol_type = other DNA
gagatggcgaaactgcgcgatcatctgcgtctgctgaccgagaagttaaaagccagccagccgtcgaacatcgcg

SEQ ID NO: 197221 - DNA, 75 bp, synthetic construct
  source 1..75: mol_type = other DNA
atgttgcatttaaaaaatattactgcgggtaatccgaaaacagcagaacaatatcagatgacaaaacgatattcg

SEQ ID NO: 197222 - DNA, 75 bp, synthetic construct
  source 1..75: mol_type = other DNA
gaatttgttttcgactacaaacttaaggcggaagatgaacgcgacgccctgttaaaacaggtcagtatcatgacc

SEQ ID NO: 197223 - DNA, 75 bp, synthetic construct
  source 1..75: mol_type = other DNA
cgggtaatccaagaaccgcggagcaatatcagctgacaaaacaatatggtatcacctggcttttttcggaagacg

SEQ ID NO: 197224 - DNA, 75 bp, synthetic construct
  source 1..75: mol_type = other DNA
gaatgggaaaaagacctgctgctgggattaatcagcgacgaagacagggaaaaactgaaagcctgccgtatttat

SEQ ID NO: 197225 - DNA, 75 bp, synthetic construct
  source 1..75: mol_type = other DNA
atgttgcgtgcggcacgttatttatggagcgaagcggtcagtggatttggcgcacaggatccgtataacaacgtt

SEQ ID NO: 197226 - DNA, 75 bp, synthetic construct
  source 1..75: mol_type = other DNA
acgttcgtggcccgcgtgccactatgtataccgcccaaccgtggaccatccgtcagtatgctggtttctcgacag

SEQ ID NO: 197227 - DNA, 75 bp, synthetic construct
  source 1..75: mol_type = other DNA
tacccgccaaaaccgtcaatgcgtattatcgcagacatcatcgcctggtgttccggcaacatgccgcgatttaat

SEQ ID NO: 197228 - DNA, 75 bp, synthetic construct
  source 1..75: mol_type = other DNA
cgagaacccctgtaagtgccattcttttggcgagaatactttctgatgagattaaagaactaccatcgaccatga

SEQ ID NO: 197229 - DNA, 75 bp, synthetic construct
  source 1..75: mol_type = other DNA
cagataagctcaccggatcagacctgggcggtggatacggcagatgcgcgtacggagaacggacagcttgtgttt

SEQ ID NO: 197230 - DNA, 75 bp, synthetic construct
  source 1..75: mol_type = other DNA
agtaaccatgatatgtctaattatatatctaagttatatgaggaatctacaggttccttacgtacaaacctgcaa

SEQ ID NO: 197231 - DNA, 75 bp, synthetic construct
  source 1..75: mol_type = other DNA
tgtggttcagcgctctcccttaagacgaggcatggcaacatactggattctgaaaggagagaggcaggcggggca

SEQ ID NO: 197232 - DNA, 75 bp, synthetic construct
  source 1..75: mol_type = other DNA
acctgttattactggaaaaagaaggtgtggttcagcgctctccattaaggcgaggggtgatgctgccaacttact

SEQ ID NO: 197233 - DNA, 75 bp, synthetic construct
  source 1..75: mol_type = other DNA
cttcgccaatattcgcatccgtaatgaaatggtgcctggcgttgaaggggggatgacgcggcatttacctgacag

SEQ ID NO: 197234 - DNA, 75 bp, synthetic construct
  source 1..75: mol_type = other DNA
aggaacaaacgccgctggcggtgattgccgggaaagagtatggatcaggctccagccgtgactgggcggcaaaag

SEQ ID NO: 197235 - DNA, 75 bp, synthetic construct
  source 1..75: mol_type = other DNA
aaattatttggccaaaagaaacttgaatgttgatgaggacaaacttttcaaaagactaatttatcgcagtgaagt

SEQ ID NO: 197236 - DNA, 75 bp, synthetic construct
  source 1..75: mol_type = other DNA
tataatacaaagtgtgttaagtaagtacaaaatacaacatgatgggaatattttattaattgttgattcggtgga

SEQ ID NO: 197237 - DNA, 75 bp, synthetic construct
  source 1..75: mol_type = other DNA
cgctagcgggaaatatgaatatcaacctggcttcagagcctatcggtcacgatcgtaaaggcgacccggtatatc

SEQ ID NO: 197238 - DNA, 75 bp, synthetic construct
  source 1..75: mol_type = other DNA
tgtggttcagcgctctcccttaagtcgaggcatggcaacatactggattctgaaaggagagaggcaggcgggtca

SEQ ID NO: 197239 - DNA, 75 bp, synthetic construct
  source 1..75: mol_type = other DNA
agcgtatggagattatccgcgacttgcgtctgggcgagttcgacgtgctggtggggatcaacttactgcgcgaag

SEQ ID NO: 197240 - DNA, 75 bp, synthetic construct
  source 1..75: mol_type = other DNA
gatgatgcaacacgcgcagaatctggagttcgaagaagcggcgcaaattcgtgaccagttgcatcagctgcgtga

SEQ ID NO: 197241 - DNA, 75 bp, synthetic construct
  source 1..75: mol_type = other DNA
cggccagtggcaacacaggtggatgatcttctttcggagattcgtcagcgagcggcaattaacgaacgcgtactg

SEQ ID NO: 197242 - DNA, 75 bp, synthetic construct
  source 1..75: mol_type = other DNA
ccgctgaagtttgaagagttcgaagcattagccccgcaaaccatctatgtttccgcgacgcccggcaactatgaa

SEQ ID NO: 197243 - DNA, 75 bp, synthetic construct
  source 1..75: mol_type = other DNA
gcctggcgagccaccgccgacgctgtttgattacctgcctgccgatgggctgctggtggttgatgaatcacacgt

SEQ ID NO: 197244 - DNA, 75 bp, synthetic construct
  source 1..75: mol_type = other DNA
ctggaaaaatccggcggcgatgtggtggatcaggtggtgcgtccaaccggattgcttgatccgattatcgaagtg

SEQ ID NO: 197245 - DNA, 75 bp, synthetic construct
  source 1..75: mol_type = other DNA
tgtggttcagcgctctcccttaaggcgaggcatggcaacatactggcttctgaaaggagagaggcaggcgggcca

SEQ ID NO: 197246 - DNA, 75 bp, synthetic construct
  source 1..75: mol_type = other DNA
tgtggttcagcgctctcccttaaggcgaggcatggcaacatactggattctgaaaggagagaggcaggcgggaca

SEQ ID NO: 197247 - DNA, 75 bp, synthetic construct
  source 1..75: mol_type = other DNA
tgtggttcagcgctctcccttaagccgaggcatggcaacatactggcttctgaaaggagagaggcaggcggggca

SEQ ID NO: 197248 - DNA, 75 bp, synthetic construct
  source 1..75: mol_type = other DNA
attctctacggtgataagataaccccgtcgatggcgaaagcgattggcgaaacggaacgtcgtcgtgagaaacaa

SEQ ID NO: 197249 - DNA, 75 bp, synthetic construct
  source 1..75: mol_type = other DNA
tattcgaagaaactttgttacagtgagatgagtgaatatatgaagaatgaaatactggaatttctgaacaggcat

SEQ ID NO: 197250 - DNA, 75 bp, synthetic construct
  source 1..75: mol_type = other DNA
tgtggttcagcgctctcccttaaggcgaggcatggcaacatactgggttctgaaaggagagaggcaggcggggca

SEQ ID NO: 197251 - DNA, 75 bp, synthetic construct
  source 1..75: mol_type = other DNA
aggacggcgacagtcaccgctttaccctggcagatcgcggagcctacacgggcgtaattgccagctggttgcata

SEQ ID NO: 197252 - DNA, 75 bp, synthetic construct
  source 1..75: mol_type = other DNA
aagggaagattcgtgcctttgggcataaagccggggcaaaatctgtccgccgggctgtctcttttgcggccaaca

SEQ ID NO: 197253 - DNA, 75 bp, synthetic construct
  source 1..75: mol_type = other DNA
ggcactgggtgaagacctgtcggataagccagtggatcatatagaccagaccaatgagagtgacggcagttttct

SEQ ID NO: 197254 - DNA, 75 bp, synthetic construct
  source 1..75: mol_type = other DNA
tgacgccggattacatgctgatgctcgacagcagggatattaccggcaatatcagcgaccgtctgatgagcatga

SEQ ID NO: 197255 - DNA, 75 bp, synthetic construct
  source 1..75: mol_type = other DNA
gctaccggtcgtgcagatatttacacggaaacaccggttaaagtgtcaggctttaagcgcgtcatagacgagcag

SEQ ID NO: 197256 - DNA, 75 bp, synthetic construct
  source 1..75: mol_type = other DNA
ccgtgaaaaatcgtggcataagaccaccgtcggggaagtggtgaaggaaatagccgcgcggcacaagctgaagat

SEQ ID NO: 197257 - DNA, 75 bp, synthetic construct
  source 1..75: mol_type = other DNA
cgcaaagtgcgtgtggcgctgttttccaccggtgatgaactccagttgccaggtcagccactgggcgacggtcaa

SEQ ID NO: 197258 - DNA, 75 bp, synthetic construct
  source 1..75: mol_type = other DNA
cctgtttcagcgacactgacgttctatcaactggtgcaaccgttgctggcgaaattaagcggcaataccgccagt

SEQ ID NO: 197259 - DNA, 75 bp, synthetic construct
  source 1..75: mol_type = other DNA
actacaccaaaacgatccttgaagagttgggggaaattaccttctggaaactggcgattaaaccaggtaaaccgt

SEQ ID NO: 197260 - DNA, 75 bp, synthetic construct
  source 1..75: mol_type = other DNA
caaagcatccagcaacagcacttccatatcatgtaagacacatgggagtatccttataccattacactggtaaaa

SEQ ID NO: 197261 - DNA, 75 bp, synthetic construct
  source 1..75: mol_type = other DNA
ggcgctgggtaaagacctgtcggataagcccgtggaacatatagaccagactaatgagagtgacggcagttttct

SEQ ID NO: 197262 - DNA, 75 bp, synthetic construct
  source 1..75: mol_type = other DNA
tgcggtcattacgctggcgctgggctggaaggggcagccgcttttcccgaaaggggcattcacggtggatgagat

SEQ ID NO: 197263 - DNA, 75 bp, synthetic construct
  source 1..75: mol_type = other DNA
taccgtcagcccggataacggttttacgaccagtctggagcttgaagtgagaattgatgatttcgaaatggaatg

SEQ ID NO: 197264 - DNA, 75 bp, synthetic construct
  source 1..75: mol_type = other DNA
cagcatcagtattgagggcagggatatcaccactgtgctggataaccgcctgatgagtttgacgctgacggacaa

SEQ ID NO: 197265 - DNA, 75 bp, synthetic construct
  source 1..75: mol_type = other DNA
atgttgtctgctactcaaccacttagcgaaaaaatgccagctcatggctgtcgtcatgttgcgatcattatggat

SEQ ID NO: 197266 - DNA, 75 bp, synthetic construct
  source 1..75: mol_type = other DNA
cgttgcggagttctccatcatcctggctaccggtcgtgcagatatttacacggaaacaccggtcagagtgtcagg

SEQ ID NO: 197267 - DNA, 75 bp, synthetic construct
  source 1..75: mol_type = other DNA
ccgaagaggatatccacgcgctggcaggatggctgaaaaatgcccatgctgaccgtgaaattgcctaccgcccgg

SEQ ID NO: 197268 - DNA, 75 bp, synthetic construct
  source 1..75: mol_type = other DNA
atcccgcagattaccatcacccgcagcgacggcgaccgtcatcattttgcgattgctgaccgtggagcctatacc

SEQ ID NO: 197269 - DNA, 75 bp, synthetic construct
  source 1..75: mol_type = other DNA
aagggaaattcaccgttgatgaggttgaacaccggggcgcgccggatgtggtcaccatccgcgcccggagtgcag

SEQ ID NO: 197270 - DNA, 75 bp, synthetic construct
  source 1..75: mol_type = other DNA
atttcgcgcagtttcgagccactggaaaacgcgctggcacatgtaaaaaccattattgcgacgcctgccgtttag

SEQ ID NO: 197271 - DNA, 75 bp, synthetic construct
  source 1..75: mol_type = other DNA
tgcttgagcgtcattacgccgcatatcaccagcgactgactgagttgctgcaatccggcgaaggtaactaccgcg

SEQ ID NO: 197272 - DNA, 75 bp, synthetic construct
  source 1..75: mol_type = other DNA
aactgtggaacccggacacctgtccggcaaatctgctgccgtggctggcgtgggcgttttcggtcgacaggtggg

SEQ ID NO: 197273 - DNA, 75 bp, synthetic construct
  source 1..75: mol_type = other DNA
tattgctgaccgcggggcttataccggtgtaaccgcacgctggcttcacaccaaagaccctaagccaaaaaaggt

SEQ ID NO: 197274 - DNA, 75 bp, synthetic construct
  source 1..75: mol_type = other DNA
ccggtgccagccttgcaccggcctttatgctgacaatgaacagtaaggacataaccagcaattttagtgaccggc

SEQ ID NO: 197275 - DNA, 75 bp, synthetic construct
  source 1..75: mol_type = other DNA
tctaaagaggcgtttggtgttgccatgcttgaacgccattacgcggcataccaccaacgactgacggagttgctg

SEQ ID NO: 197276 - DNA, 75 bp, synthetic construct
  source 1..75: mol_type = other DNA
cacgcaaacaaaagcaacacacctggcaatgatcaaggctattctgcgcgccgcagagcgagactggaaatggct

SEQ ID NO: 197277 - DNA, 75 bp, synthetic construct
  source 1..75: mol_type = other DNA
ttttagttatagctattctttgtggtgttgccacattctgtgtttctggcctgtatctgaaatccctgtgcctgt

SEQ ID NO: 197278 - DNA, 75 bp, synthetic construct
  source 1..75: mol_type = other DNA
gaagcatgcgcgccatggtggcgcgcatgcttaagggttacgctattattattcttgcttattattcctgttgtt

SEQ ID NO: 197279 - DNA, 75 bp, synthetic construct
  source 1..75: mol_type = other DNA
gcagcggttatctggcctgggaaggtctgatctgcatgcaggaaatcggcaaatgtaccgaagagcatcaggcga

SEQ ID NO: 197280 - DNA, 75 bp, synthetic construct
  source 1..75: mol_type = other DNA
cggtcgcttttcttatcaggtaaacccgatgccgtttgggtgtagcaacccactaacccagatgttcaaccagct

SEQ ID NO: 197281 - DNA, 75 bp, synthetic construct
  source 1..75: mol_type = other DNA
ccaatccgggttgtagcggtagcgaaatcgccacagcactgaataccccaaccacagccattaattcggagttac

SEQ ID NO: 197282 - DNA, 75 bp, synthetic construct
  source 1..75: mol_type = other DNA
atatgttaacttactttatttattttgtgatggcatttatattcacaaattatattaatataaacatgaaaaaag

SEQ ID NO: 197283 - DNA, 75 bp, synthetic construct
  source 1..75: mol_type = other DNA
ctgaaaaactaaagcaagcggcaagacaagccagaggtgaaccagcctctggctcatctccatcagcaaaaaccc

SEQ ID NO: 197284 - DNA, 75 bp, synthetic construct
  source 1..75: mol_type = other DNA
gacccgctctgacggagacggccaccgctttcgcattgctgacagaaacgcctataccggagtgaaggcccactg

SEQ ID NO: 197285 - DNA, 75 bp, synthetic construct
  source 1..75: mol_type = other DNA
taacataagttatgtcattacatatagtttatattttgtgtttgcatttgtgtttactaattttattaatgtcag

SEQ ID NO: 197286 - DNA, 75 bp, synthetic construct
  source 1..75: mol_type = other DNA
cacatggttaatcattttcgcatgttgtatattgccattctccattttaaatacattgatcgcttcagttttaaa

SEQ ID NO: 197287 - DNA, 75 bp, synthetic construct
  source 1..75: mol_type = other DNA
tggtgttgtgacaattgctttgtcaacatatttcttaccaagattgacaattataaaaacaagtttccttataaa

SEQ ID NO: 197288 - DNA, 75 bp, synthetic construct
  source 1..75: mol_type = other DNA
atgaccattctagactacatcgcagccaatccggggtgcagcggaagtgaaatcgccacggcactgaatacccag

SEQ ID NO: 197289 - DNA, 75 bp, synthetic construct
  source 1..75: mol_type = other DNA
gataaaggcgtagtatcttactttcctgaatcaaaggaggcagcacttagtatcgttaaaaacattgaatcacgg

SEQ ID NO: 197290 - DNA, 75 bp, synthetic construct
  source 1..75: mol_type = other DNA
agctaattctcagcggtgaagaaagccagcgtggtcagcgtttacaggcttatttcggctatctcaaccaggcgc

SEQ ID NO: 197291 - DNA, 75 bp, synthetic construct
  source 1..75: mol_type = other DNA
cgccgcgcaactggatgccgcgtttcgtcagggtgaacataccggtattcagctgattctcagcggtgaagaaag

SEQ ID NO: 197292 - DNA, 75 bp, synthetic construct
  source 1..75: mol_type = other DNA
aatggcgggtggttccctgtgcaggcggacctgacaatgaagccggactgttttttcccgacttcggcagtgccg

SEQ ID NO: 197293 - DNA, 75 bp, synthetic construct
  source 1..75: mol_type = other DNA
catagaagcgcgtgtgcgcatttgtattaatcagctgctttatacgcccaaacacaccgcacgcttgttacaggt

SEQ ID NO: 197294 - DNA, 75 bp, synthetic construct
  source 1..75: mol_type = other DNA
acctgaacagaggtgatatgctcacctcagaacaacacaggtgccataatgaaaaaaagaaatttcagcgcagag

SEQ ID NO: 197295 - DNA, 75 bp, synthetic construct
  source 1..75: mol_type = other DNA
gagcgcgcggtacgccaaaagcaacaacaacgcgcaagcctgctcgcacaattgaaaaagcaggaagaagcgatc

SEQ ID NO: 197296 - DNA, 75 bp, synthetic construct
  source 1..75: mol_type = other DNA
cctcaaaacaaaaaagcgtttactgccgctggtgttggcagcggcattatgcagttcaccggtctgggcggaaga

SEQ ID NO: 197297 - DNA, 75 bp, synthetic construct
  source 1..75: mol_type = other DNA
gcagtttgctaacggtacgcagatccctattggcacgctgggggcagccatttctcaggcgaaaccgcagaaagg

SEQ ID NO: 197298 - DNA, 75 bp, synthetic construct
  source 1..75: mol_type = other DNA
aaggaatggttatcggtgcctctgaaggtactgaagttaaagcgattgccgacggtcgggtgattctggctgact

SEQ ID NO: 197299 - DNA, 75 bp, synthetic construct
  source 1..75: mol_type = other DNA
cgccagcgttcttagcgctggcgtattgttgtgcgccctttccgcccacgcggatgagcgtgaccaactcaaatc

SEQ ID NO: 197300 - DNA, 75 bp, synthetic construct
  source 1..75: mol_type = other DNA
atgacacgggccacgaaaccgcgcaggtttgcagtcaggcccatcatttacgccagcgttctttgcgctggcgta

SEQ ID NO: 197301 - DNA, 75 bp, synthetic construct
  source 1..75: mol_type = other DNA
tggatttgggcttaaacccattttgctttgagacagaactaaagattgagacaagaaagaaaaatctgactgttt

SEQ ID NO: 197302 - DNA, 75 bp, synthetic construct
  source 1..75: mol_type = other DNA
cagaatggacatcccgaagccggatggcggcgtgagaactttaggcatcccgacggtgttggacaggcttatcca

SEQ ID NO: 197303 - DNA, 75 bp, synthetic construct
  source 1..75: mol_type = other DNA
ataacgagagaaaacctgatgttggcatatcagcgcgtggcggagttgaaaccgtcgctgaagaagaacaggccc

SEQ ID NO: 197304 - DNA, 75 bp, synthetic construct
  source 1..75: mol_type = other DNA
atgcataaaataccctttgatgttcttgttcattctgaaaacgcattaatccgcgcaaaggaaatggacgcatta

SEQ ID NO: 197305 - DNA, 75 bp, synthetic construct
  source 1..75: mol_type = other DNA
taatccactctgaaaacgcattaatccgcgcaaaggaaatgaatgcgttgttaggcaaattaattgaagtgccgg

SEQ ID NO: 197306 - DNA, 75 bp, synthetic construct
  source 1..75: mol_type = other DNA
aataatattacccagatttttgttcaaagctccgtgacggtattgatcggcatgggcgagtttttcgctatcctg

SEQ ID NO: 197307 - DNA, 75 bp, synthetic construct
  source 1..75: mol_type = other DNA
tgatctggagatgatgaatgagctgggctactgttcggggattgaaaactattcgcgctttctctccgggcgtgg

SEQ ID NO: 197308 - DNA, 75 bp, synthetic construct
  source 1..75: mol_type = other DNA
cctgatttatatctcaaaatgatgctgcacctcacggtcggcatgattatcgaccaacgtgcgatcctgcgtcgc

SEQ ID NO: 197309 - DNA, 75 bp, synthetic construct
  source 1..75: mol_type = other DNA
gataaagaactggagcgtcgtggacacagcttctgccgctacgcagacgactgcaacatctacgtaagcagccgg

SEQ ID NO: 197310 - DNA, 75 bp, synthetic construct
  source 1..75: mol_type = other DNA
tgggtcatcgaaatattcagcatactgtcagatacacagccagtaatgctgctcgatttaaaggggtgtggaaaa

SEQ ID NO: 197311 - DNA, 75 bp, synthetic construct
  source 1..75: mol_type = other DNA
acttttcagaacgtgactcttttattaagtctgagggggattatcagaggtcgaaaggaattgttccgtttttta

SEQ ID NO: 197312 - DNA, 75 bp, synthetic construct
  source 1..75: mol_type = other DNA
gtggttgttgccctgggggccaagttttgtaagatcttacatgaaaccggcgcggtcgatcagattgccgtcaaa

SEQ ID NO: 197313 - DNA, 75 bp, synthetic construct
  source 1..75: mol_type = other DNA
ctgggggatatgccagatgtcactttcgaagaagcctgcctgagatggcttgaggaaaaagccgacaagaaatcc

SEQ ID NO: 197314 - DNA, 75 bp, synthetic construct
  source 1..75: mol_type = other DNA
cctgccgtaaaaaacaaacgcgtgagatggctggaaaaagaagaagccaggagactcattgatgcatgttctgat

SEQ ID NO: 197315 - DNA, 75 bp, synthetic construct
  source 1..75: mol_type = other DNA
cactcgcaagggggcgtttgtggtggacgaagtgagccacgaaggtccgccggataagctgaccatatccgcgaa

SEQ ID NO: 197316 - DNA, 75 bp, synthetic construct
  source 1..75: mol_type = other DNA
cgacctatgcgccatttgaatcaaaaaattcacaaggcgaactggttggcttcgatatcgatctggcgaaggagt

SEQ ID NO: 197317 - DNA, 75 bp, synthetic construct
  source 1..75: mol_type = other DNA
gtgcggcaattccgggaatgattattgccgggccgctgtggggtaacttcatcagccgttacgttgagctgcata

SEQ ID NO: 197318 - DNA, 75 bp, synthetic construct
  source 1..75: mol_type = other DNA
gtcaggtggcttgaagagaaagcacataaaaaatcactggacgatgacaaaagccggatcggattctggcttcaa

SEQ ID NO: 197319 - DNA, 75 bp, synthetic construct
  source 1..75: mol_type = other DNA
atgaataatttccctattaacattcatctggttaataaatttatgttttcaatgatattaagcgggctaatttgt

SEQ ID NO: 197320 - DNA, 75 bp, synthetic construct
  source 1..75: mol_type = other DNA
gggtacctgcattcgtattatgaccggtgcgccggtgccggaaggctgcgaagcggtggtgatgcaggagcagac

SEQ ID NO: 197321 - DNA, 75 bp, synthetic construct
  source 1..75: mol_type = other DNA
caggtattgcattgtgccttttaaccggtatgcgtgacccttttaaaccgccggaagatctatgccggattagcg

SEQ ID NO: 197322 - DNA, 75 bp, synthetic construct
  source 1..75: mol_type = other DNA
tttttgtgtccgtaaacctacccatacccgcattatggcggggcgtaacgggggagcctttgcgctcgctggttt

SEQ ID NO: 197323 - DNA, 75 bp, synthetic construct
  source 1..75: mol_type = other DNA
agcgtgggagcaatatgaacagttggcaaaatggcttatatattttggaagcatcatagaggttagcaatactaa

SEQ ID NO: 197324 - DNA, 75 bp, synthetic construct
  source 1..75: mol_type = other DNA
tctctggccagcttcctgccagaaatatttctctttacgcaaaacttggatatagaggaaatatgcagaatctga

SEQ ID NO: 197325 - DNA, 75 bp, synthetic construct
  source 1..75: mol_type = other DNA
cgatgtgctggaaaacggctggacaattttacagctgacgccagacgcactaacgctgggaaccgggacaaactg

SEQ ID NO: 197326 - DNA, 75 bp, synthetic construct
  source 1..75: mol_type = other DNA
attttacagctgacgccagacgtactaacgctgggtaccgggacaaactgcgaaccgccacaatggttgtggcaa

SEQ ID NO: 197327 - DNA, 75 bp, synthetic construct
  source 1..75: mol_type = other DNA
acgactactataagcaacaccactatgaaaccattgtgatgggcgcgagcttccgtcgcaccgaacaaatcctcg

SEQ ID NO: 197328 - DNA, 75 bp, synthetic construct
  source 1..75: mol_type = other DNA
gcagtttgccaacggtacgcagatccctatcggcacgctgggggcggcgatttctgcagcgaagccacagaaagg

SEQ ID NO: 197329 - DNA, 75 bp, synthetic construct
  source 1..75: mol_type = other DNA
tcggaaattgcccgcgtgctggaaagcctgaccaaaaacagcggcgagaaccagcctgcgacgctgaaatctcaa

SEQ ID NO: 197330 - DNA, 75 bp, synthetic construct
  source 1..75: mol_type = other DNA
acgactactataaacagcaccgttacgaaaccatcgtgatgggcgcaagtttccgccgtaccgagcaaatcctcg

SEQ ID NO: 197331 - DNA, 75 bp, synthetic construct
  source 1..75: mol_type = other DNA
ttccgtcgcaccgaacaaatcctcgccttaaccggctgtgatcgactgactattgcgccgaatttgctgaaggag

SEQ ID NO: 197332 - DNA, 75 bp, synthetic construct
  source 1..75: mol_type = other DNA
atccttcgctgttactcaaggctgccggattatcacaatatgagcatttaatagacgatgctatcgcctggggta

SEQ ID NO: 197333 - DNA, 75 bp, synthetic construct
  source 1..75: mol_type = other DNA
gacttttcggggaaaactgattattcctgcctgcactgtacaaaatgctgaagttaactggggcgatattgaaat

SEQ ID NO: 197334 - DNA, 75 bp, synthetic construct
  source 1..75: mol_type = other DNA
cttgcgtttcgtatgaaagtcacaccgcaggttgtgctggtgctgctggatgaactagaagctaaaaacaaacgc

SEQ ID NO: 197335 - DNA, 75 bp, synthetic construct
  source 1..75: mol_type = other DNA
cactgcgtgaggcggcagaagcaataaaaatagtagccacaccacaaaaattgctggcatttcgtatgaaagtca

SEQ ID NO: 197336 - DNA, 75 bp, synthetic construct
  source 1..75: mol_type = other DNA
aagaaaatggcagctggctttgcctgattgacttagaacacgcactacgcgtcgctggcattcgcatcaaaggag

SEQ ID NO: 197337 - DNA, 75 bp, synthetic construct
  source 1..75: mol_type = other DNA
gaagcggatattatcgctggtttgctggatggactggaagaagcaaaatcacaactcaacgagcagcgtgagtat

SEQ ID NO: 197338 - DNA, 75 bp, synthetic construct
  source 1..75: mol_type = other DNA
tggatatcgtttctggtcgcggcgcagtggtgttcgataacaccgaattccgcgtggtgaactcacgtactcagc

SEQ ID NO: 197339 - DNA, 75 bp, synthetic construct
  source 1..75: mol_type = other DNA
gtactgatggtgaccaggtacagattaacaacgttaacattctcggtcgtcagaacaccttctttgtcaccaaca

SEQ ID NO: 197340 - DNA, 75 bp, synthetic construct
  source 1..75: mol_type = other DNA
atcacttcatgccaaacttggatataaagggaatatgcagaatatcgttgcttctgacatcggtcgctgtactgg

SEQ ID NO: 197341 - DNA, 75 bp, synthetic construct
  source 1..75: mol_type = other DNA
aaccggaatgtttcgggtagcattggtaatgctataactctggggactccattcacaccggagaatgtctctggc

SEQ ID NO: 197342 - DNA, 75 bp, synthetic construct
  source 1..75: mol_type = other DNA
tgcaatgtccttatcatctgggaacaatgaaggttacgataacatcaaatggtcagtctggtaattcgatactgg

SEQ ID NO: 197343 - DNA, 75 bp, synthetic construct
  source 1..75: mol_type = other DNA
gttagggaataccaaaacggtgaaaggctggctggcacagcttcctgctaaatatcaccagcgcgccacctgcat

SEQ ID NO: 197344 - DNA, 75 bp, synthetic construct
  source 1..75: mol_type = other DNA
agctacaaaacgtaggatatctggccggtgatacgaaaattctcaacaacatcagttttttattgcgtgctggtg

SEQ ID NO: 197345 - DNA, 75 bp, synthetic construct
  source 1..75: mol_type = other DNA
ggccaaacgcttaaccagaatccgaaacaacccccgcgcggctctgttggtgagcgccgttggcttcgtaaacat

SEQ ID NO: 197346 - DNA, 75 bp, synthetic construct
  source 1..75: mol_type = other DNA
gcaccggtgggtttgtgtggcatgtatgcgcgtcgtggcgaagttcaggcagccaaagcggcggacgcgcatggc

SEQ ID NO: 197347 - DNA, 75 bp, synthetic construct
  source 1..75: mol_type = other DNA
atcagcgaaaatggtgccaccactataaaccctgatacggaaggtgatctttccagattgtctcagttactttct

SEQ ID NO: 197348 - DNA, 75 bp, synthetic construct
  source 1..75: mol_type = other DNA
tctgggcgatatcccattgattggtcatctgtttaagtccaccgcagataaaaaagaaaaacgcaatctgatggt

SEQ ID NO: 197349 - DNA, 75 bp, synthetic construct
  source 1..75: mol_type = other DNA
gtcgactatcgccgccaccaacagtgatttaagtaccttaaaggcaacggttgaggatggcagtggtaacctgat

SEQ ID NO: 197350 - DNA, 75 bp, synthetic construct
  source 1..75: mol_type = other DNA
gattcgctggtgcaggggctgggtaaagagttgcctgcggcgctggctccgatggcgaaagggaatgccgcatag

SEQ ID NO: 197351 - DNA, 75 bp, synthetic construct
  source 1..75: mol_type = other DNA
gctccggtgggtttgtgcggcatgtatgcgcgtcgcggcgaagttcaggctgccaaagcggctgatgctcacggc

SEQ ID NO: 197352 - DNA, 75 bp, synthetic construct
  source 1..75: mol_type = other DNA
tctgtcgctttgcaggccatctttcgcacttctacagggtcgcccaacatgcggttctttgcagccagctggtgc

SEQ ID NO: 197353 - DNA, 75 bp, synthetic construct
  source 1..75: mol_type = other DNA
tctgtcgctttgcaggccatctttcgcacttctacagggtcgcccaacatgcggtactttgcagccagcttgtgc

SEQ ID NO: 197354 - DNA, 75 bp, synthetic construct
  source 1..75: mol_type = other DNA
gcaggcgcgttcccgtggcttggcaccgtggtgggtggatttgtttttggtatcggtatcgtttatgcgggaggc

SEQ ID NO: 197355 - DNA, 75 bp, synthetic construct
  source 1..75: mol_type = other DNA
tctgtcgctttgcgggccatctttcgcacttctacagggtcgcccaacatgcggtgctttgcagccagcttgtgc

SEQ ID NO: 197356 - DNA, 75 bp, synthetic construct
  source 1..75: mol_type = other DNA
tctgtcgctttgcgggccatctttcgcacttctacagggtcgcccaacatgcggttctttgcagccagctagtgc

SEQ ID NO: 197357 - DNA, 75 bp, synthetic construct
  source 1..75: mol_type = other DNA
tctgtcgctttgccggccatctttcgcacttctacagggtcgcccaacatgcggtcctttgcagccagcttgtgc

SEQ ID NO: 197358 - DNA, 75 bp, synthetic construct
  source 1..75: mol_type = other DNA
ctataagcacaggttaaagctaccaaatggtattgaggcatatttttctaagcattacccaaatgtatatgacga

SEQ ID NO: 197359 - DNA, 75 bp, synthetic construct
  source 1..75: mol_type = other DNA
gcgacattctgccgttcatggctttccgtccaattatcaaccagccgcgcctgatggaaagtagcctgtttacgc

SEQ ID NO: 197360 - DNA, 75 bp, synthetic construct
  source 1..75: mol_type = other DNA
ggcggttacgacctgaccattagcggtcaacatcgccgtctgagttctaacgacgctattgaactggttagtcat

SEQ ID NO: 197361 - DNA, 75 bp, synthetic construct
  source 1..75: mol_type = other DNA
cggcacagcaacgcataaaagaattccactctgaagaattccttcagtcactgagaaccacaaccacctttgcgg

SEQ ID NO: 197362 - DNA, 75 bp, synthetic construct
  source 1..75: mol_type = other DNA
gagcaaggcttaagcctgatgccgcacaccgcgcagccggtactgccagcgcaaaaccaggccttaccgccggaa

SEQ ID NO: 197363 - DNA, 75 bp, synthetic construct
  source 1..75: mol_type = other DNA
acggcgatctctccacgctcgctcagcttctttctggctttagcggtacggcggttggcgtggtgaaaggcgact

SEQ ID NO: 197364 - DNA, 75 bp, synthetic construct
  source 1..75: mol_type = other DNA
gcccagtcaggtcaaatccctaaactggttacccaggtggaaaaaatcacttttagcgccgcctacgcacagcaa

SEQ ID NO: 197365 - DNA, 75 bp, synthetic construct
  source 1..75: mol_type = other DNA
acttttcatggaagaaaagcttgacccgattttccatgttgattcatatggttaccgaccaggcaaatcagctca

SEQ ID NO: 197366 - DNA, 75 bp, synthetic construct
  source 1..75: mol_type = other DNA
aagataccgggcagatcgaacaagattgcgatgtctggattggcctctatcgtgatgctgtttataacgaaaatg

SEQ ID NO: 197367 - DNA, 75 bp, synthetic construct
  source 1..75: mol_type = other DNA
ggagacggaagaaacacctgtttcatcaagtgaaaaggtagctaatgataatgaggaggatgtgttagagaattt

SEQ ID NO: 197368 - DNA, 75 bp, synthetic construct
  source 1..75: mol_type = other DNA
ttctgatacctctgataacagcaacaatagctcttacaggatgcaccccaaagaccagcctggaacgacataccc

SEQ ID NO: 197369 - DNA, 75 bp, synthetic construct
  source 1..75: mol_type = other DNA
acggctcgtatactgtaaaagcatccctagcgaatggagcttcacttgagaaacaactggaggctattgatgaaa

SEQ ID NO: 197370 - DNA, 75 bp, synthetic construct
  source 1..75: mol_type = other DNA
gactgcttttttaaccgagatcctcagccggaccggatgcggcctgctgcttgatattaacaatcttcatatttc

SEQ ID NO: 197371 - DNA, 75 bp, synthetic construct
  source 1..75: mol_type = other DNA
gtatatgtccctgccgctccgggtggaattactctgtacggtacaggtgaaaaaccgattgatgtgaagattggg

SEQ ID NO: 197372 - DNA, 75 bp, synthetic construct
  source 1..75: mol_type = other DNA
ttgtcagaacactgctgccgaccattgccgggttatcagggctgaataacgcacgctttcagttcttcaactgga

SEQ ID NO: 197373 - DNA, 75 bp, synthetic construct
  source 1..75: mol_type = other DNA
ctattaattggtcgctttattgcgtttgtcagaacactgctgccgaccattgccgggttatcagggctgaataac

SEQ ID NO: 197374 - DNA, 75 bp, synthetic construct
  source 1..75: mol_type = other DNA
caataacgtcaacattctcggtcgtcagaataccttctttgtcaccaacagcggtgtgcaaaaccgtctggaaac

SEQ ID NO: 197375 - DNA, 75 bp, synthetic construct
  source 1..75: mol_type = other DNA
aactgcaaaatctgaccatcgaaaacacgctgggcgatagcgtagatgcgggtaaccatccggcggtggcactgc

SEQ ID NO: 197376 - DNA, 75 bp, synthetic construct
  source 1..75: mol_type = other DNA
gatgccaggtgagtatgaaggtacagtttatgtccctgccgctccggggggaatcactgtctacggtatgggcga

SEQ ID NO: 197377 - DNA, 75 bp, synthetic construct
  source 1..75: mol_type = other DNA
atcgagctcgacgatactgacggtctggtcgcattgccgattcgcggtgcggtgctgtcgctgtatctcgggtgg

SEQ ID NO: 197378 - DNA, 75 bp, synthetic construct
  source 1..75: mol_type = other DNA
taacttggctaaatttactaaaaatatcccgggtaacgcagagaatcatacggtttgctacgttagattcccttc

SEQ ID NO: 197379 - DNA, 75 bp, synthetic construct
  source 1..75: mol_type = other DNA
ccgtgaaaaatcgtggcataacaccaccatcggggaagtggtgaaggaaatagcagcgcggcacaagctgaagat

SEQ ID NO: 197380 - DNA, 75 bp, synthetic construct
  source 1..75: mol_type = other DNA
ttgctgattggccgctttattgcgtttgtcagaacattactgccgactattgccgggttgtcagggctgaataat

SEQ ID NO: 197381 - DNA, 75 bp, synthetic construct
  source 1..75: mol_type = other DNA
gatgctgctcccggtggtgctgctggtgtttggcctggcaggttctctggttgtgttatggaaaaagaaatatgg

SEQ ID NO: 197382 - DNA, 75 bp, synthetic construct
  source 1..75: mol_type = other DNA
atggaacttttgacccaattgctgcaagccctgtgggcgcaggattttgaaaccctggccaatccatcgatgatt

SEQ ID NO: 197383 - DNA, 75 bp, synthetic construct
  source 1..75: mol_type = other DNA
ccgttggtgtacctgttccatggccatcagccacacctccaacggggtggctgaaatgcaatggtgcagcatttt

SEQ ID NO: 197384 - DNA, 75 bp, synthetic construct
  source 1..75: mol_type = other DNA
ctgagctggtgacgcattttacgccacaacgcaataaacttctggcagcgcgcattcagcagcagcaagatattg

SEQ ID NO: 197385 - DNA, 75 bp, synthetic construct
  source 1..75: mol_type = other DNA
tcgcgtcctgccagaccgccaggcagtgacaatggataaaccgttcctcagtgcctattcacgtctgctgattaa

SEQ ID NO: 197386 - DNA, 75 bp, synthetic construct
  source 1..75: mol_type = other DNA
cagcatcagtattgaggggaaggatatcaccactgtgctggataaccgcctgatgagtctgacgttgacggacaa

SEQ ID NO: 197387 - DNA, 75 bp, synthetic construct
  source 1..75: mol_type = other DNA
acgcggtctgcacttgccggaaaaacatgtcacctggcgtggtgaggcaatccccggcagcctgtttgattttgc

SEQ ID NO: 197388 - DNA, 75 bp, synthetic construct
  source 1..75: mol_type = other DNA
acaacgcaataaacttctggcagcgcgcattcagcagcagcaagatattgataacggaacgttgcctgattttat

SEQ ID NO: 197389 - DNA, 75 bp, synthetic construct
  source 1..75: mol_type = other DNA
ccaatgtgaaagtctttatggccgatttcgaagattcactggccccggactggaacaaagtgatcgacgggcaaa

SEQ ID NO: 197390 - DNA, 75 bp, synthetic construct
  source 1..75: mol_type = other DNA
gcagaagaaagcgccaaaagtaccggaagcgcgcgaaggtgaatacatggccggtgaggctgacaatgtttttgc

SEQ ID NO: 197391 - DNA, 75 bp, synthetic construct
  source 1..75: mol_type = other DNA
gcagcggtttcggtcaaagccgggaaattgttattcctgaaagccggtagcgcgatgacggccagtggcaaggcc

SEQ ID NO: 197392 - DNA, 75 bp, synthetic construct
  source 1..75: mol_type = other DNA
atgaagtgttaatgattcaggaaggccagtgttgggtcatcgacgatgtgcgttatctgggcggcagtgtccatg

SEQ ID NO: 197393 - DNA, 75 bp, synthetic construct
  source 1..75: mol_type = other DNA
tttccgtcatcggactgggtgttatcaacggtattacctatagcaagtggatgccattactgggtaataacacga

SEQ ID NO: 197394 - DNA, 75 bp, synthetic construct
  source 1..75: mol_type = other DNA
ttattccatgtgcactgctgctgagtgcctgtaccaccgtcacgccagcttataaagataacggcccccgcaccg

SEQ ID NO: 197395 - DNA, 75 bp, synthetic construct
  source 1..75: mol_type = other DNA
cggagttctccatcagcctggctaccggtcgggcagatatttacacggaaacaccggttaaagtgtcaggcttta

SEQ ID NO: 197396 - DNA, 75 bp, synthetic construct
  source 1..75: mol_type = other DNA
ggctggagaataacggagctttccgacatccatactggatgtgtaaagggtcatggtcctatgccagaaacaggg

SEQ ID NO: 197397 - DNA, 75 bp, synthetic construct
  source 1..75: mol_type = other DNA
caccccgagcacttccagcggtggcggaactactaatgcacaatttacttatataaaccatggcgcagattacgc

SEQ ID NO: 197398 - DNA, 75 bp, synthetic construct
  source 1..75: mol_type = other DNA
ttgagcaaaccgtagaactagccgctggatcattgcagaaaaaccagaatggcgcggatattcctggaaaagata

SEQ ID NO: 197399 - DNA, 75 bp, synthetic construct
  source 1..75: mol_type = other DNA
cactaagacaaatgtctctggtgcactaactaatgcggagtttatctatgtgtctaatggctcaagttattcacc

SEQ ID NO: 197400 - DNA, 75 bp, synthetic construct
  source 1..75: mol_type = other DNA
ggaatgccgacaccgcgacgaaattgaaaacagcacgctcgattggcggtgtggcatttgatggctcggccaata

SEQ ID NO: 197401 - DNA, 75 bp, synthetic construct
  source 1..75: mol_type = other DNA
tgttcagacatggaatggtcccggctggtctgacaggtcaggttatgtcgttacaggttcagttaacggaaaccg

SEQ ID NO: 197402 - DNA, 75 bp, synthetic construct
  source 1..75: mol_type = other DNA
gaaactcatggtgtccctgttggacctgcaacgtcaagtattgtatgtgagataatattaagttccatagataat

SEQ ID NO: 197403 - DNA, 75 bp, synthetic construct
  source 1..75: mol_type = other DNA
tatatgaagctctgctgcggcataattattttccgaatcagaaggggacgatttcagaaatcccaccatgttttt

SEQ ID NO: 197404 - DNA, 75 bp, synthetic construct
  source 1..75: mol_type = other DNA
ctttacctgattgacctagaacacgcattacgcgtcgctggcattcgcatcaaaggagaggagcatggaaataaa

SEQ ID NO: 197405 - DNA, 75 bp, synthetic construct
  source 1..75: mol_type = other DNA
attaatggcgtcaggttcgatggttcggctgacattaatatcaatactctggtatctcgcggtcgcgtaacggcc

SEQ ID NO: 197406 - DNA, 75 bp, synthetic construct
  source 1..75: mol_type = other DNA
cagtcacctggctgaagggcgggcgcgtatatccgcagctcgactgcttcggcattgtgaacgagatacgccgcg

SEQ ID NO: 197407 - DNA, 75 bp, synthetic construct
  source 1..75: mol_type = other DNA
tattcagggaaaggatataatccttacaatgatgattgttgtttcgatataatgaaaacatatggagttaatttt

SEQ ID NO: 197408 - DNA, 75 bp, synthetic construct
  source 1..75: mol_type = other DNA
aggagccatgaccatccgtgtaaccaccccgagcacttccagcggtggcggaattactaacgctcaattcaccta

SEQ ID NO: 197409 - DNA, 75 bp, synthetic construct
  source 1..75: mol_type = other DNA
actttcgcggaacgctcaattcacggcgtgaagaatcatggcacgacaccaccatcggtgagctggtcagtacca

SEQ ID NO: 197410 - DNA, 75 bp, synthetic construct
  source 1..75: mol_type = other DNA
ctcacaatctgaataataatggattcacgacgggcttagagcttgaggttaagctctccgatgtggagtacagct

SEQ ID NO: 197411 - DNA, 75 bp, synthetic construct
  source 1..75: mol_type = other DNA
gcgtgaagagtcatggcatgacaccaccctcggtgagctggtcagcaccattgcaaagcgcaataaactgacggc

SEQ ID NO: 197412 - DNA, 75 bp, synthetic construct
  source 1..75: mol_type = other DNA
ggaaatgccggtgaaggtgacggggtttaagcagccgattgatgatgcagaatggaccattaccaccctgacgca

SEQ ID NO: 197413 - DNA, 75 bp, synthetic construct
  source 1..75: mol_type = other DNA
tggcagggttcggcgcttctgaataagggagatttcacggtcgatgagattgagcaccggggcgcgcctgatacc

SEQ ID NO: 197414 - DNA, 75 bp, synthetic construct
  source 1..75: mol_type = other DNA
agcatccgaaagcaaagccggtcagcaaaaagacaaaggccaaaaaagagccggaagcgcgtgagggtgagtata

SEQ ID NO: 197415 - DNA, 75 bp, synthetic construct
  source 1..75: mol_type = other DNA
atgcgtgatctgatccttcaactcagcaaaagttcgatttattcaacaaagcccttagtggtcttaagtttgctt

SEQ ID NO: 197416 - DNA, 75 bp, synthetic construct
  source 1..75: mol_type = other DNA
atgaatggtgtaaacgtcgggaaagataatcctcgtcacgcatttgtttttacaggcaaaggtggtgagtatttt

SEQ ID NO: 197417 - DNA, 75 bp, synthetic construct
  source 1..75: mol_type = other DNA
gagttttacaccacgacccgcaaaccctctgcgggagatgttggtgcatacacgcaggcagaatgtaactcaagg

SEQ ID NO: 197418 - DNA, 75 bp, synthetic construct
  source 1..75: mol_type = other DNA
caggaagcgcgggaaggtgagtacatggccggagagtcggacaacgttcttgagctcacgaccatctatgccaca

SEQ ID NO: 197419 - DNA, 75 bp, synthetic construct
  source 1..75: mol_type = other DNA
ctggtatctacggcgtggctgcagaatttggcgcgaaagccctgaccatctgcaccgtgtctgaccacatccgca

SEQ ID NO: 197420 - DNA, 75 bp, synthetic construct
  source 1..75: mol_type = other DNA
tttctcctgtttgctctcttgatctgcggtattccttgcatggcagtgaagagtctgcaatatcaggcgaacatg

SEQ ID NO: 197421 - DNA, 75 bp, synthetic construct
  source 1..75: mol_type = other DNA
caataaacagctaggcccagtgactggcgaactgactcagttcaccagcatggaggacttctacaccgcgttcca

SEQ ID NO: 197422 - DNA, 75 bp, synthetic construct
  source 1..75: mol_type = other DNA
tcttttggatttgggtttaccattatttactaagtgcactagaatttttccttctcaaaccaaagagaatgatcg

SEQ ID NO: 197423 - DNA, 75 bp, synthetic construct
  source 1..75: mol_type = other DNA
tcggccaggcgctggagaaagtggccgccacgggtgactgccggcaggtggctcatgatttactggcagggaaag

SEQ ID NO: 197424 - DNA, 75 bp, synthetic construct
  source 1..75: mol_type = other DNA
ggcaggcgctggagaaagttgccgccacgggtgactgccggcaggtggctcatgatttactggcagggaaaggag

SEQ ID NO: 197425 - DNA, 75 bp, synthetic construct
  source 1..75: mol_type = other DNA
gcaaatcggcaaacttaaaggttgcagggtggtgggggttgccggtggcgcggaaaaatgccgccatgctatcga

SEQ ID NO: 197426 - DNA, 75 bp, synthetic construct
  source 1..75: mol_type = other DNA
gatccgtatatgcgcgggcgcatgagcgatgagccatcttattcaccaccggttgatattggtggcgtgatggtc

SEQ ID NO: 197427 - DNA, 75 bp, synthetic construct
  source 1..75: mol_type = other DNA
gctattcaatggatgcatggtcattcttttgatttgaataaaaagcaagttcaaactcatcgcgcacgtttacgt

SEQ ID NO: 197428 - DNA, 75 bp, synthetic construct
  source 1..75: mol_type = other DNA
ttcccgaagaggggctgaaacggatgctgggcgaaacccggcgctacggtattcccgtcacgctgcggggcatgg

SEQ ID NO: 197429 - DNA, 75 bp, synthetic construct
  source 1..75: mol_type = other DNA
ctggacaccaaatctttgatttgcactgtgaaaacgagatctaaacaaaaagcgacctttttgcgacgagatgtt

SEQ ID NO: 197430 - DNA, 75 bp, synthetic construct
  source 1..75: mol_type = other DNA
tgcaattatcagaaacccgctgccggtgagcctgcgttgttactctgggatgatgtaataaccttattccatgaa

SEQ ID NO: 197431 - DNA, 75 bp, synthetic construct
  source 1..75: mol_type = other DNA
ctggcggtaagtcaaagcaatgtgggtattaccgatcgtccgcagttggccgcaatgatggcgcgcgtcgactta

SEQ ID NO: 197432 - DNA, 75 bp, synthetic construct
  source 1..75: mol_type = other DNA
gacaggcgctggagaaagtggccaccacgggggactgccggcaggtggcccgggcgttgctgaataaccccggag

SEQ ID NO: 197433 - DNA, 75 bp, synthetic construct
  source 1..75: mol_type = other DNA
aagcagtgctgtctctggtgaaagacggtgcgaccgatggtgttcagatcgacccgacgctgttttcacagtacg

SEQ ID NO: 197434 - DNA, 75 bp, synthetic construct
  source 1..75: mol_type = other DNA
cggaaaaatgtcgccatgccacagacgttctcggttttgatgtttgccttgatcatcatgcagatgattttgccg

SEQ ID NO: 197435 - DNA, 75 bp, synthetic construct
  source 1..75: mol_type = other DNA
acccgtagtgggtagcattaatggtcaggatatctatggcgtcactgatgaagtggggctgctggtatggatggg

SEQ ID NO: 197436 - DNA, 75 bp, synthetic construct
  source 1..75: mol_type = other DNA
gtaaagtatgtgaatactggtgagggaattaatccgggtacggttaacggaatatcaacatttacattttcctat

SEQ ID NO: 197437 - DNA, 75 bp, synthetic construct
  source 1..75: mol_type = other DNA
aagcgatatactcacactgacgggggcatcgactgcaaccggagttgggctgagaatatacaaaaacactgacag

SEQ ID NO: 197438 - DNA, 75 bp, synthetic construct
  source 1..75: mol_type = other DNA
acccgaaaaaaagcggggcgagtaatacgctattaccgcaaattaattatgttctgcaaggtcagatttggctaa

SEQ ID NO: 197439 - DNA, 75 bp, synthetic construct
  source 1..75: mol_type = other DNA
cagaactcatgcaatggataacctgccatttgtctatgatacccgtgacaaaattggatatcagaatgcaaatgt

SEQ ID NO: 197440 - DNA, 75 bp, synthetic construct
  source 1..75: mol_type = other DNA
ccatttgtctataataccggttacaacattggatatcagaatgcaaatgtctggcgtattagtggcgggttttgt

SEQ ID NO: 197441 - DNA, 75 bp, synthetic construct
  source 1..75: mol_type = other DNA
agcagctataacgctacagagctaccacccggtccggatcgtttacccctgttgatggctacggtgctgaaaaaa

SEQ ID NO: 197442 - DNA, 75 bp, synthetic construct
  source 1..75: mol_type = other DNA
ttccgtcttgaagaggatgacgtcgcaactccaggtgaaggacaggtgttactgcgtactgtttatctgtcactg

SEQ ID NO: 197443 - DNA, 75 bp, synthetic construct
  source 1..75: mol_type = other DNA
gccgttgggttctggcctcgcgtccgcatggcgcgccaattcccgagaatttccgtcttgaagaggatgacgtcg

SEQ ID NO: 197444 - DNA, 75 bp, synthetic construct
  source 1..75: mol_type = other DNA
atgggagacggaaggcatatcgttcagtcatggtgtccggcttgtcgttctggtgaaaaaccttctataccacca

SEQ ID NO: 197445 - DNA, 75 bp, synthetic construct
  source 1..75: mol_type = other DNA
ttggtcaggattatggtcaccgtatccatgagtttcagcaggagatgggacaatgggtgaaagaggggaaaattc

SEQ ID NO: 197446 - DNA, 75 bp, synthetic construct
  source 1..75: mol_type = other DNA
aggcattgatatttattatgagaatgttggtggtaacgtgtttgatgcggtgctgccgctcctcaatacctctgc

SEQ ID NO: 197447 - DNA, 75 bp, synthetic construct
  source 1..75: mol_type = other DNA
cggcggggattgcgacttatgccaatgcgttgtcgaaccagcttgccccgcaagaggggctggttgcggcgcaac

SEQ ID NO: 197448 - DNA, 75 bp, synthetic construct
  source 1..75: mol_type = other DNA
tgacggaactggaagatgcagaatggagaattacagtatacggcttcctcttattatggacgtgggcattaatcg

SEQ ID NO: 197449 - DNA, 75 bp, synthetic construct
  source 1..75: mol_type = other DNA
attcgtatattactcagttgaggataatgatggttttggtacagcaagagagaatatctcaaaagttcttcaaaa

SEQ ID NO: 197450 - DNA, 75 bp, synthetic construct
  source 1..75: mol_type = other DNA
ctacctggtaaaaaagcctgccgtattcaataccgccaaaaaatagatggcttccagcaggaaaattggccgaaa

SEQ ID NO: 197451 - DNA, 75 bp, synthetic construct
  source 1..75: mol_type = other DNA
gcatcactctggacgtggttgaagatgagataaaccgtctgcgctataactggcaggagagccgcccctccgcgc

SEQ ID NO: 197452 - DNA, 75 bp, synthetic construct
  source 1..75: mol_type = other DNA
atgaatgttggtttctctactctggaggcatgggtacgtcagctcagacgggaacgtcaggagatcacgccttct

SEQ ID NO: 197453 - DNA, 75 bp, synthetic construct
  source 1..75: mol_type = other DNA
tcctttgtgtctcctgagcctcaagagatgcctgatgtatgcaaaactgaagcattacttgagcttgagcgtgaa

SEQ ID NO: 197454 - DNA, 75 bp, synthetic construct
  source 1..75: mol_type = other DNA
caggctatgaaagaccttatttctgcatatgaaacgcagaagaaggttgctatgcaggctgatattgagcagtta

SEQ ID NO: 197455 - DNA, 75 bp, synthetic construct
  source 1..75: mol_type = other DNA
atggaaagcctatatattaacggcagaaagattgatagcttcagtgactggtcgccacagattgaacatccagct

SEQ ID NO: 197456 - DNA, 75 bp, synthetic construct
  source 1..75: mol_type = other DNA
aagaaatgccagatatctgcaaaactgaagcattacttaatcttgagcgtgaatattacccacagttaaaagaac

SEQ ID NO: 197457 - DNA, 75 bp, synthetic construct
  source 1..75: mol_type = other DNA
acctttgtggctcctgagcctcaagagatgcctgatatttgcaaaactgaagcattgcttaagcttgaaaagaaa

SEQ ID NO: 197458 - DNA, 75 bp, synthetic construct
  source 1..75: mol_type = other DNA
atctttgtgtctcctgagcctcaagaaatgccagatatctgcaaaagtgaagcactatttaatcttgagcgtgaa

SEQ ID NO: 197459 - DNA, 75 bp, synthetic construct
  source 1..75: mol_type = other DNA
aacacctggttatttgaacgccttcaggaacgtaaaacgcacattgaatcgctgtttggcgagccgctcgactgg

SEQ ID NO: 197460 - DNA, 75 bp, synthetic construct
  source 1..75: mol_type = other DNA
cgctggataatccgccgatttccggtaagcagtcgtacgcaaaaggttcatccattgcactggtcagccaggttg

SEQ ID NO: 197461 - DNA, 75 bp, synthetic construct
  source 1..75: mol_type = other DNA
gaatcttaaggggttaattgccaggctggaggtattaccgagtaggcagcctggcggctgcggcttgtcatggcc

SEQ ID NO: 197462 - DNA, 75 bp, synthetic construct
  source 1..75: mol_type = other DNA
atgaacgcgaagaactttaataagcagtatccggtaggggctcgcttcatgcacactgcacatcctgcgttgcgt

SEQ ID NO: 197463 - DNA, 75 bp, synthetic construct
  source 1..75: mol_type = other DNA
atgaaagatgtgattgaagctgcgcatgcgctgcgtgaacaaggtatcgcgcatgttgttatttcactgggtgcc

SEQ ID NO: 197464 - DNA, 75 bp, synthetic construct
  source 1..75: mol_type = other DNA
ggacgcccccgtgggcagaacgtccgtgaatgcgattgatggcacattgctgattttagcgggtggcactgatga

SEQ ID NO: 197465 - DNA, 75 bp, synthetic construct
  source 1..75: mol_type = other DNA
tgtttttcgttatgtgttgataaagttttataatgcttttaaggagaatttgttttttgttgagattatctcgtg

SEQ ID NO: 197466 - DNA, 75 bp, synthetic construct
  source 1..75: mol_type = other DNA
acctgccgtcgctccttcttccggagtcagtaatgagtctgttgaaaacagagctggtactcccatttgaagatg

SEQ ID NO: 197467 - DNA, 75 bp, synthetic construct
  source 1..75: mol_type = other DNA
agcggggcagcaatgcctgacgaactgcaacagaaaatgcgtaatgccagcctgttcaacaaagggtatgagatg

SEQ ID NO: 197468 - DNA, 75 bp, synthetic construct
  source 1..75: mol_type = other DNA
tgacggcggcaataaagagatctggcctgtcattatcgactggatgatggatagcatgaaccgtctggaaaaagc

SEQ ID NO: 197469 - DNA, 75 bp, synthetic construct
  source 1..75: mol_type = other DNA
tatatccgcctggtactcgtttcatgcacattgcacatcaggcggtgcgtggtggtcgggtggtaaaaactgttg

SEQ ID NO: 197470 - DNA, 75 bp, synthetic construct
  source 1..75: mol_type = other DNA
ccagattgcgataacacagtgggtgtggaatgaatttaacgcccaatccggtaccagaaaaattgcagggaaaac

SEQ ID NO: 197471 - DNA, 75 bp, synthetic construct
  source 1..75: mol_type = other DNA
taatttaactgcgaaagttgccgctcgcctggctgccactattgtccggcgggggaaaacagatagaacaaatta

SEQ ID NO: 197472 - DNA, 75 bp, synthetic construct
  source 1..75: mol_type = other DNA
acttttttatattgggtgttttatttatatttatatcattcctaacagatcttatttacatagctattagcttaa

SEQ ID NO: 197473 - DNA, 75 bp, synthetic construct
  source 1..75: mol_type = other DNA
taaaaaaaacaaacaaagaaaagagcaaaaaccttttttgataccattattaaaccccaaggcgtatcttttctt

SEQ ID NO: 197474 - DNA, 75 bp, synthetic construct
  source 1..75: mol_type = other DNA
acgtttgtgcagtattccaccagcagcaagtacgccgcgctgtctgcgtttggccgcgcgtttactgtgaatttc

SEQ ID NO: 197475 - DNA, 75 bp, synthetic construct
  source 1..75: mol_type = other DNA
ggaactgtataaagagatgcaaaaacgtggttgggacgtaaaagaaagtgccgtaatggcgattactgccaacga

SEQ ID NO: 197476 - DNA, 75 bp, synthetic construct
  source 1..75: mol_type = other DNA
ctggctgccagtggcgcaaaaggtttcgttatttgtactccggaccccaaactcggctctgccatcgtcgcgaaa

SEQ ID NO: 197477 - DNA, 75 bp, synthetic construct
  source 1..75: mol_type = other DNA
catctatgggagaaagaataagggtgtgtatggctgttgatgaattgtataccgcattagatatacaaaagcagg

SEQ ID NO: 197478 - DNA, 75 bp, synthetic construct
  source 1..75: mol_type = other DNA
cacctctgtttcccgactaataaaattatgattgcacagaaaccgacgaaaaaaaacacgccaaaattggcgtgt

SEQ ID NO: 197479 - DNA, 75 bp, synthetic construct
  source 1..75: mol_type = other DNA
gtggcgggcggctgttttccttcgccgctggcgtatgctgatgtggtcaccaccaccacgcataaaacgttgcgc

SEQ ID NO: 197480 - DNA, 75 bp, synthetic construct
  source 1..75: mol_type = other DNA
gaggggcagacgaccatggagtacgtggaaggggcggcgttgcaggtggtggtcaatcgctatgagcgcgaccgt

SEQ ID NO: 197481 - DNA, 75 bp, synthetic construct
  source 1..75: mol_type = other DNA
tggtggatttgtgttgcacagcggaggactgacgttcagcaacgacagtttcagtgataatgacaccattgcttt

SEQ ID NO: 197482 - DNA, 75 bp, synthetic construct
  source 1..75: mol_type = other DNA
tctgaatatcgtgcgaagcgatggtaaaaatattccatttgcagcggatatttatgatgaacaaaacaatatcat

SEQ ID NO: 197483 - DNA, 75 bp, synthetic construct
  source 1..75: mol_type = other DNA
atgaataaactccccgatcatcttccgcggcggtatatcatcgaagctattcatttatgggatgcgggagaaact

SEQ ID NO: 197484 - DNA, 75 bp, synthetic construct
  source 1..75: mol_type = other DNA
gttaccgatgtagttctgattacgcgcgacaactttaaagaagaactggagaaaaaaggtttaggcggtaagtaa

SEQ ID NO: 197485 - DNA, 75 bp, synthetic construct
  source 1..75: mol_type = other DNA
taccgtcagtgcattcatctcctcttgatgggtggacctgtgtgtcacccatgctttccgtgggatttgtactga

SEQ ID NO: 197486 - DNA, 75 bp, synthetic construct
  source 1..75: mol_type = other DNA
cagccgctgcaggtggttcaggtggcaccacaccgtcaggaagggtgaaacggcgtccctctcccggtctgttcg

SEQ ID NO: 197487 - DNA, 75 bp, synthetic construct
  source 1..75: mol_type = other DNA
tgggaaaatcaatatatatgattatattaatgaaaaacagttagaaaaattaaatccaccgcaagatttacgttc

SEQ ID NO: 197488 - DNA, 75 bp, synthetic construct
  source 1..75: mol_type = other DNA
gcactggctgcgttaattaagaatggcccgctctggcaggagttgagggcatctttgctgaagaaaattacccga

SEQ ID NO: 197489 - DNA, 75 bp, synthetic construct
  source 1..75: mol_type = other DNA
tgatgcgattgctgattgttgtaagtctcgcctggacggggtgggctattaccctggtcttttatctactgaccg

SEQ ID NO: 197490 - DNA, 75 bp, synthetic construct
  source 1..75: mol_type = other DNA
aagatgttggtggtataaaaagagcaataattaattttgatgcgagcatgaatattatttgcggaccaaatggga

SEQ ID NO: 197491 - DNA, 75 bp, synthetic construct
  source 1..75: mol_type = other DNA
gattctggagactttttcaaaatccccatatattaatgatgtaagaatactggattggtgttttaataaaagtat

SEQ ID NO: 197492 - DNA, 75 bp, synthetic construct
  source 1..75: mol_type = other DNA
gaaggaaagtcctttgaaagaaaagatgagagttcattacacctgattactaacaaggttctggcgtgttatcaa

SEQ ID NO: 197493 - DNA, 75 bp, synthetic construct
  source 1..75: mol_type = other DNA
gcacgtggctatggtatgaaagtgattgccgtggatgaccagtttgtaaatgccaaaggtaagccgatggatacc

SEQ ID NO: 197494 - DNA, 75 bp, synthetic construct
  source 1..75: mol_type = other DNA
gaaggtaagtcttttgaaagaaaagatgatagttcattacacctgattactaacaaggttctggcgtgttaccaa

SEQ ID NO: 197495 - DNA, 75 bp, synthetic construct
  source 1..75: mol_type = other DNA
aagaatttaattatataatggatgtcattaattactgcaaggacaacggcattgtcaggtttgagcaaaaattaa

SEQ ID NO: 197496 - DNA, 75 bp, synthetic construct
  source 1..75: mol_type = other DNA
cgttcttcctctaaaacagcacctaaaaagacagattcaggcaggaatgatggcatcgatatgaacaacaattga

SEQ ID NO: 197497 - DNA, 75 bp, synthetic construct
  source 1..75: mol_type = other DNA
agcaagattttggttatcagctgcccattttgggggacgttgcgtatcaacgtgttcacctccagagcggtgagg

SEQ ID NO: 197498 - DNA, 75 bp, synthetic construct
  source 1..75: mol_type = other DNA
tggatacaaattgcgtagtccttcctccttcatacttaggaaaaatgaccgaagcacaagctaatacggaacttt

SEQ ID NO: 197499 - DNA, 75 bp, synthetic construct
  source 1..75: mol_type = other DNA
gcagctgtggccgcaaacgatctggatgctggtgggcgttggttgcgcctggctgacagcctgttttattcccgc

SEQ ID NO: 197500 - DNA, 75 bp, synthetic construct
  source 1..75: mol_type = other DNA
ggaaattatcgcgctgcgccagcagttactgggtatggcagaagacgatgcggcgtcgttgccggacgcagatgc

SEQ ID NO: 197501 - DNA, 75 bp, synthetic construct
  source 1..75: mol_type = other DNA
ggcgctggtcaaagccggttttgtgggcgaagcctggacccgcgccacggaacaggaaaaacaccgccagggcaa

SEQ ID NO: 197502 - DNA, 75 bp, synthetic construct
  source 1..75: mol_type = other DNA
ccatgaccgttgatgcgctttcagaatgcaatctaaaccttagtttgttcgattctgaaatacatcagaggcatt

SEQ ID NO: 197503 - DNA, 75 bp, synthetic construct
  source 1..75: mol_type = other DNA
atgattggcatttactcgcctggcatctggcgtattccgcatctggagaaatttctggcgcaaccgtgccagaaa

SEQ ID NO: 197504 - DNA, 75 bp, synthetic construct
  source 1..75: mol_type = other DNA
ttactacgatgccagcaagccttcggcgctggagaaactggtacaggataaagccggaaatgcggcattggctga

SEQ ID NO: 197505 - DNA, 75 bp, synthetic construct
  source 1..75: mol_type = other DNA
catggcaagcaagttcattgttacggcctgcccttctatgccggttggggtttaaccgttgatgaacatcactgc

SEQ ID NO: 197506 - DNA, 75 bp, synthetic construct
  source 1..75: mol_type = other DNA
aatggcgcgattactcactactggctggaagtgggtgattacgttattgatatcaccggggatcaatacaacatc

SEQ ID NO: 197507 - DNA, 75 bp, synthetic construct
  source 1..75: mol_type = other DNA
ctttgaagccttgctggcaggaaaaccggtgacatgcttcggccaaccctggtatgcaggctggggcttaacgga

SEQ ID NO: 197508 - DNA, 75 bp, synthetic construct
  source 1..75: mol_type = other DNA
tacaacctgggggccgatttctctctgcctgccgaggccaaagataaaaaaatcatcctggtgccgggtcaggta

SEQ ID NO: 197509 - DNA, 75 bp, synthetic construct
  source 1..75: mol_type = other DNA
tacctgccgctgtcgaaagagacgctcgccaccattattgccgggaaactggcccgcctggataacgtgctgcgc

SEQ ID NO: 197510 - DNA, 75 bp, synthetic construct
  source 1..75: mol_type = other DNA
tcgtctccgtaaagataagaagcgtgaaaaagtcatgattaacatggctgctttgacagtagatgcactttcggc

SEQ ID NO: 197511 - DNA, 75 bp, synthetic construct
  source 1..75: mol_type = other DNA
cggcgccgttgccggacgcagataccgtggaggatacgcagccagagtcagagtcagaacaggataaataccggt

SEQ ID NO: 197512 - DNA, 75 bp, synthetic construct
  source 1..75: mol_type = other DNA
gacccggtactgtgccgcgaccacgaaatcgacctgatgatcgacattctctgccgccgccgtaaaaacaacccg

SEQ ID NO: 197513 - DNA, 75 bp, synthetic construct
  source 1..75: mol_type = other DNA
atgaataaactccctgatcatcttccgcggcggtatatcatcgaagctatccatttatgggatgcgggagaaact

SEQ ID NO: 197514 - DNA, 75 bp, synthetic construct
  source 1..75: mol_type = other DNA
aaatataatcgtaggtttggttattatttgcatttgcatggctcaccactatttgttaatcagggtgagaccgtc

SEQ ID NO: 197515 - DNA, 75 bp, synthetic construct
  source 1..75: mol_type = other DNA
cgacattaaactatgacaaattattatacaactcattcatagataatgatatattcagcgggtatgatgggtatc

SEQ ID NO: 197516 - DNA, 75 bp, synthetic construct
  source 1..75: mol_type = other DNA
cgcccgtgtggcaatcaacctgtcatcgccaccgaagcaaatctcggcgctgaccaccctgagccaccagcagga

SEQ ID NO: 197517 - DNA, 75 bp, synthetic construct
  source 1..75: mol_type = other DNA
acgcccgtaacggcaggcttgacccggtactgtgccgcgaccacgaaatcgacctgatgatcgacattctctgcc

SEQ ID NO: 197518 - DNA, 75 bp, synthetic construct
  source 1..75: mol_type = other DNA
cgacaccatcaaaggccaggacctggcgattgccagcctgcataagcatctactgaccgcacgcgccgacctgcg

SEQ ID NO: 197519 - DNA, 75 bp, synthetic construct
  source 1..75: mol_type = other DNA
aggagaaacacaccgtctcgcggctgattggctcccctccgggctatgtcggctatggcgaaggcggcgtgctga

SEQ ID NO: 197520 - DNA, 75 bp, synthetic construct
  source 1..75: mol_type = other DNA
gtgccactacactgtcacggtaactttttgagtgaactgatattcgaaaaacgtttcaaagggctgatggcggag

SEQ ID NO: 197521 - DNA, 75 bp, synthetic construct
  source 1..75: mol_type = other DNA
caccatcaatatgtccgagtttcaggaaaaacacaccgtctcgcggctgattggttcccctccgggctatgtcgg

SEQ ID NO: 197522 - DNA, 75 bp, synthetic construct
  source 1..75: mol_type = other DNA
aaaagattgatagcttcggggactggttaccacaggttgaacatccgctacatactatccagcgtaaagaacacg

SEQ ID NO: 197523 - DNA, 75 bp, synthetic construct
  source 1..75: mol_type = other DNA
atgaaatcattaaccacggaaaccgcactggatattctgattacgtggctgcaggacaatattgactgcgaatcc

SEQ ID NO: 197524 - DNA, 75 bp, synthetic construct
  source 1..75: mol_type = other DNA
atcgactgcgaatccggaattatcttcgacaacgatgaggataaaatggattcggcagcactgctgccctgcatt

SEQ ID NO: 197525 - DNA, 75 bp, synthetic construct
  source 1..75: mol_type = other DNA
agcagcactgctgccctgcattaaacaggccagggaagatatccgtaccctgcgccaacagcagcttctgcaaca

SEQ ID NO: 197526 - DNA, 75 bp, synthetic construct
  source 1..75: mol_type = other DNA
tcatctggatgccagcgctgaatgcctgccggatttacccactttcgactggtaacccggaaattcacaacatga

SEQ ID NO: 197527 - DNA, 75 bp, synthetic construct
  source 1..75: mol_type = other DNA
acagcgctggatattctgattgcgtggctgcaggacaatatcgactgcggatcgggaatattagacgtcaactag

SEQ ID NO: 197528 - DNA, 75 bp, synthetic construct
  source 1..75: mol_type = other DNA
gggaattatctttgacaacaatgaggataaaacggattcagcagcactgttgccctgtatcgaacaggccagaga

SEQ ID NO: 197529 - DNA, 75 bp, synthetic construct
  source 1..75: mol_type = other DNA
atgaaatcattaacgacagaaacagcactggatattctgattgcgtggttgcaggacaatatcgactgcgaatcg

SEQ ID NO: 197530 - DNA, 75 bp, synthetic construct
  source 1..75: mol_type = other DNA
aacatgaaatcattaaccacggaaacagcactggatattctgattgcgtggctgcaggacaatatagactgcgaa

SEQ ID NO: 197531 - DNA, 75 bp, synthetic construct
  source 1..75: mol_type = other DNA
caagtgcggtttatctcggaggaggttttgtattgagcataattggttcaatactctatccaacagaaaaaagcc

SEQ ID NO: 197532 - DNA, 75 bp, synthetic construct
  source 1..75: mol_type = other DNA
attctgattgcgtggctgcaggacaatattgactgcgaatcggaaattatctttgacaacgatgaggataaaacg

SEQ ID NO: 197533 - DNA, 75 bp, synthetic construct
  source 1..75: mol_type = other DNA
atgaaatcattaaccacggaaagcgctctggatattctgattgcgtggctgcaggacaatatcgactgcgaatcg

SEQ ID NO: 197534 - DNA, 75 bp, synthetic construct
  source 1..75: mol_type = other DNA
ataaaacggattcggcagcgctgctgccctgcattgaacaggccagggaggatatctgtaccctgcgccaactgc

SEQ ID NO: 197535 - DNA, 75 bp, synthetic construct
  source 1..75: mol_type = other DNA
acattggcattgaggctgacaagttggaatttaaagctcttccaaaattaaccccgactaattcgattgtcgatc

SEQ ID NO: 197536 - DNA, 75 bp, synthetic construct
  source 1..75: mol_type = other DNA
cattgaaggcaatgaaaattgctatgctgatctggttaaagaagctgttgcgcaagcgcacctggtggtttatgt

SEQ ID NO: 197537 - DNA, 75 bp, synthetic construct
  source 1..75: mol_type = other DNA
cagactgttggggttctcgcttccgtattagggccggatgtactgctgaatgggaactatgtgcagggattgctg

SEQ ID NO: 197538 - DNA, 75 bp, synthetic construct
  source 1..75: mol_type = other DNA
atgagtgagttaaccgcactgcaggaacgccttgccggtctgattgccagcctgtcaccggcggcgcgtcggcaa

SEQ ID NO: 197539 - DNA, 75 bp, synthetic construct
  source 1..75: mol_type = other DNA
cgctcaccattttaattgctgtttgtgttccgggtaatcaggtgctgccgtttggcgatcttgccaccatcggct

SEQ ID NO: 197540 - DNA, 75 bp, synthetic construct
  source 1..75: mol_type = other DNA
acgtgcgtattccgctctattcgatcacggattggcatcgaagtccgatcagcgattcgcatccattcgatcaac

SEQ ID NO: 197541 - DNA, 75 bp, synthetic construct
  source 1..75: mol_type = other DNA
aatgggcttctgaaaaatacagaagtaatcctccaagcgtttccacgttgcgtcgttatgctaagcagaatttat

SEQ ID NO: 197542 - DNA, 75 bp, synthetic construct
  source 1..75: mol_type = other DNA
caaggtacagccacagtttcaggtgatgaggtcagaacccagcaggtactggttaacgtactggcgaatgcgctt

SEQ ID NO: 197543 - DNA, 75 bp, synthetic construct
  source 1..75: mol_type = other DNA
agtcgcaccagggaagcgacacagggtcgcttcagaacgttactggaagcgcagcttggcagtactcatcaacaa

SEQ ID NO: 197544 - DNA, 75 bp, synthetic construct
  source 1..75: mol_type = other DNA
tacaggtggaaactcatctccgttattttgaaaatctgaaaaaaacggcagatgaaaatatacgtatgctggatg

SEQ ID NO: 197545 - DNA, 75 bp, synthetic construct
  source 1..75: mol_type = other DNA
ggaattgcggctggcatcaacgatgaccaggaatgcctgtgtggtactgcaattcagactaacggatgtggaaga

SEQ ID NO: 197546 - DNA, 75 bp, synthetic construct
  source 1..75: mol_type = other DNA
gttaagcgcttcataaaagcactaaaagccaaagtgcaaaaaagcactctggaacaaattcaaccacttaatgtt

SEQ ID NO: 197547 - DNA, 75 bp, synthetic construct
  source 1..75: mol_type = other DNA
gaatttgaaatcgaagtttatgaagttttcaaaacggttgtccgtctcggcgttggcgcaatgtcccgtctgaat

SEQ ID NO: 197548 - DNA, 75 bp, synthetic construct
  source 1..75: mol_type = other DNA
atgcctgccgggtttacccactttcaactggtaaccagaaacaacatgaaatcattaaccacggaaaccgctctg

SEQ ID NO: 197549 - DNA, 75 bp, synthetic construct
  source 1..75: mol_type = other DNA
catcatccgctggcgcaggaagaagaaccgcttaaccgacgcgtgattaaacgctaccgggcgattgtggtgggc

SEQ ID NO: 197550 - DNA, 75 bp, synthetic construct
  source 1..75: mol_type = other DNA
caaccggaataaagaagaaagataatggacccgccatgatttttggggtggttatgctcgcggaaagcagaaact

SEQ ID NO: 197551 - DNA, 75 bp, synthetic construct
  source 1..75: mol_type = other DNA
atgcctgccgggtttacccactttcgactggtaaccagtaacaacatgaaatcattaaccacggaaactgctctg

SEQ ID NO: 197552 - DNA, 75 bp, synthetic construct
  source 1..75: mol_type = other DNA
atgcctgccgggtttacccactttccactggtaaccagcaacaacatgaaatcattaaccacggaaacggctctg

SEQ ID NO: 197553 - DNA, 75 bp, synthetic construct
  source 1..75: mol_type = other DNA
atgcctgccgggtttacccactttctactggtaaccagtaacaacatgaaatcattaaccacggaaacagctctg

SEQ ID NO: 197554 - DNA, 75 bp, synthetic construct
  source 1..75: mol_type = other DNA
aaacatactctgcttaatgttctggtgaactacagcgtgttcgatattagtcagacgctactggtgatgcgaccg

SEQ ID NO: 197555 - DNA, 75 bp, synthetic construct
  source 1..75: mol_type = other DNA
tatgaatgcagggtttgatgaaaagattttgttccctcatcagttgaagcactgcgggttaaggagtaacacatg

SEQ ID NO: 197556 - DNA, 75 bp, synthetic construct
  source 1..75: mol_type = other DNA
tctgcgcctggcgaacgaactttctgatgctgcagaaaacaaaggtactgcagttaagaaacgtgaagacgttca

SEQ ID NO: 197557 - DNA, 75 bp, synthetic construct
  source 1..75: mol_type = other DNA
tatcttcgacaacgatgaggataaaacaggttcggcagcactgttgcgctgtatcgaacaggccagggagggtat

SEQ ID NO: 197558 - DNA, 75 bp, synthetic construct
  source 1..75: mol_type = other DNA
atggcaactttgacaaaaaaagaacaagcatggttgaacgaattacaggacgttcttgatcgctgcccatcaccg

SEQ ID NO: 197559 - DNA, 75 bp, synthetic construct
  source 1..75: mol_type = other DNA
aaaacgcggagtggcgattcgtgaggctttcaaccagatacatcgttacagtaaagagagttttaacagcgaaaa

SEQ ID NO: 197560 - DNA, 75 bp, synthetic construct
  source 1..75: mol_type = other DNA
ccgttatctggcgcaacgttttctcgatagtggcgcgttaatcgagaagaaagtggtcgcccaaactctctttga

SEQ ID NO: 197561 - DNA, 75 bp, synthetic construct
  source 1..75: mol_type = other DNA
gctggcggcactctccgcgcggcttgagcgcctgaacgagctgcgcacgcgcgagcgcgaaaaactccaggcggc

SEQ ID NO: 197562 - DNA, 75 bp, synthetic construct
  source 1..75: mol_type = other DNA
ttaagcagtgggcgccagtctccccggctacccgggaggcttcgcgctctcctgaaccgtcgtctgtgttcggtg

SEQ ID NO: 197563 - DNA, 75 bp, synthetic construct
  source 1..75: mol_type = other DNA
aaccgcccggcgaatgggggatgttctgcgtgacaacctcggcggcgacaccgatcgtctgtccggcattttctc

SEQ ID NO: 197564 - DNA, 75 bp, synthetic construct
  source 1..75: mol_type = other DNA
cagcaacgctatgagcaggcgcaggagcgactcgggcgaatacgtaatgccggtgcggcggcactggctgccggt

SEQ ID NO: 197565 - DNA, 75 bp, synthetic construct
  source 1..75: mol_type = other DNA
tgcggtgatggcttccgctcccgtcgcggaggctatccggctcccgttgcgaccggaagcggccagaagggaagc

SEQ ID NO: 197566 - DNA, 75 bp, synthetic construct
  source 1..75: mol_type = other DNA
cacccgttccggtcgtgaatattcctgcgccagtggagagagtggcacgtcaggtatccacgctgccacagccgc

SEQ ID NO: 197567 - DNA, 75 bp, synthetic construct
  source 1..75: mol_type = other DNA
cttatcaggtaccagttgaagtccgtccggttcgtcgtaatgctctggcaatgcgctggatcgttgaagctgctc

SEQ ID NO: 197568 - DNA, 75 bp, synthetic construct
  source 1..75: mol_type = other DNA
tctgcgcctggcgaacgaactttccgatgctgcagaaaacaaaggcactgcagttaagaaacgtgaagacgttca

SEQ ID NO: 197569 - DNA, 75 bp, synthetic construct
  source 1..75: mol_type = other DNA
ataaaacggattcggcagctctgttgccctgtatcgaacaggcgcgacaggatgtccgaactctgcgccatctgc

SEQ ID NO: 197570 - DNA, 75 bp, synthetic construct
  source 1..75: mol_type = other DNA
caaccgggataaagcagaaaggtgatggacccgccatgatttttggagtggttatgctcgcggaaagcagagact

SEQ ID NO: 197571 - DNA, 75 bp, synthetic construct
  source 1..75: mol_type = other DNA
ttctctgagccaagtttaaatggctattattatggtttaatgttcttgatggtcatgctgtctaatcaaaagtac

SEQ ID NO: 197572 - DNA, 75 bp, synthetic construct
  source 1..75: mol_type = other DNA
gatgctgcagaaaacaaaggtactgcagttaagaaacgcgaagacgttcaccgtatggccgaagccaacaaggcg

SEQ ID NO: 197573 - DNA, 75 bp, synthetic construct
  source 1..75: mol_type = other DNA
cggaacacctacctggcggtgctgccgaagcaggcgcatggcgtggaaacctacacgtcgacgaccggcaacacc

SEQ ID NO: 197574 - DNA, 75 bp, synthetic construct
  source 1..75: mol_type = other DNA
cctggcgcggcgaacgcaactggctggagaatatgcacgagtataatcttcactttcttatgcaccctgtggatt

SEQ ID NO: 197575 - DNA, 75 bp, synthetic construct
  source 1..75: mol_type = other DNA
agcaggcggatgctgacggaaaggtacaggctttcagctctgttgatattgccagcggtcgtccgacagttgtgc

SEQ ID NO: 197576 - DNA, 75 bp, synthetic construct
  source 1..75: mol_type = other DNA
cgtccccgtgcgccgcacaagccgctatctgtatagccggaacaacatacgacggcacaacgaccatcgtaaaac

SEQ ID NO: 197577 - DNA, 75 bp, synthetic construct
  source 1..75: mol_type = other DNA
ggattacctgctgggtaaagaccggcagcgcgaacaggcccgcgtactgcgcggcaaccctgaacatgtgcgcga

SEQ ID NO: 197578 - DNA, 75 bp, synthetic construct
  source 1..75: mol_type = other DNA
gtgcgggttcaggcagtgggcccgtggattacctgctgggtaaagaccggcagcgcgaacaggcccgcgtactgc

SEQ ID NO: 197579 - DNA, 75 bp, synthetic construct
  source 1..75: mol_type = other DNA
atgctggaactactttttgtgattggcttttttgtcatgctgatggtcaccggcgtttcgttgctgggtattatc

SEQ ID NO: 197580 - DNA, 75 bp, synthetic construct
  source 1..75: mol_type = other DNA
gtggtgtgggttattaaggcgattaaagcaccaaaagtgccgaaatatcagcgctatgaccgctggcgttactaa

SEQ ID NO: 197581 - DNA, 75 bp, synthetic construct
  source 1..75: mol_type = other DNA
aaaacaatgaatgaaaagatgcaatggatgaagttacatatgcatcctcaggaatataatatttttgcagataaa

SEQ ID NO: 197582 - DNA, 75 bp, synthetic construct
  source 1..75: mol_type = other DNA
aaaagctacacatatcgcaaatccaggaaccgctcgctaccagcagttcgatgataatccggttaagcaggtagc

SEQ ID NO: 197583 - DNA, 75 bp, synthetic construct
  source 1..75: mol_type = other DNA
gggttgggaagatatagaggattttggggaaacacatctcgattttttgaagcaatatggtgattttgaaaatgg

SEQ ID NO: 197584 - DNA, 75 bp, synthetic construct
  source 1..75: mol_type = other DNA
atatttctattatccccgattacagacaagcctggaaagtgcaacataaattatcggatattctactgttgacta

SEQ ID NO: 197585 - DNA, 75 bp, synthetic construct
  source 1..75: mol_type = other DNA
gacagtatctgttatgcgaaactggatgacagcgtaattactgatgacattaaagacgatgccatcaaaactaaa

SEQ ID NO: 197586 - DNA, 75 bp, synthetic construct
  source 1..75: mol_type = other DNA
catatgaaacgcagaagaagattgctatgcaggccgatattgagcagcttactaagatttctcagaaatatagca

SEQ ID NO: 197587 - DNA, 75 bp, synthetic construct
  source 1..75: mol_type = other DNA
agagttaaagatgtcaccaaaggaaattatctttgtgtctcctgaacctcaagaaatgcctgatgtatgcaaaac

SEQ ID NO: 197588 - DNA, 75 bp, synthetic construct
  source 1..75: mol_type = other DNA
aagagatgcctgatatttgcaagggtgaagcattacttgagcttgaaaagaaatattacccactgctgaaagaac

SEQ ID NO: 197589 - DNA, 75 bp, synthetic construct
  source 1..75: mol_type = other DNA
acgatgaaagaattaagcttgagcaatcgctaaagatgtcaccaaaaacaaccatctttgtgtatcctgaacctc

SEQ ID NO: 197590 - DNA, 75 bp, synthetic construct
  source 1..75: mol_type = other DNA
aaaagattgattccttcggtgactggtcaccacagattgaacatccagctatcgctattcagcgtaaagaacacg

SEQ ID NO: 197591 - DNA, 75 bp, synthetic construct
  source 1..75: mol_type = other DNA
atgacaaacgatatttacattaatggcaaagtgattgatagtttcggtgactggtcaccaacgactgaacatcca

SEQ ID NO: 197592 - DNA, 75 bp, synthetic construct
  source 1..75: mol_type = other DNA
aattctgacataattgttatccttaatccttatcaggaagatttttcttcacacaataacgtcttaactttaaat

SEQ ID NO: 197593 - DNA, 75 bp, synthetic construct
  source 1..75: mol_type = other DNA
cgaacttatacctctggcgtgctctcttttcaggagagtgatttacccgaaggcgaaaagcagcgattgatggat

SEQ ID NO: 197594 - DNA, 75 bp, synthetic construct
  source 1..75: mol_type = other DNA
ccagacgccgcgcaagccgatgtttattacccgaaaaaaagcggggcgagtcatacgctattaccgcaaattaat

SEQ ID NO: 197595 - DNA, 75 bp, synthetic construct
  source 1..75: mol_type = other DNA
tcccttccggaaaaagaagctatgcgcaaatggtgtgctgagcacatggcttcacttcatgttaagcgattttat

SEQ ID NO: 197596 - DNA, 75 bp, synthetic construct
  source 1..75: mol_type = other DNA
gagtggtggcgcttaccgtaatgcctgtatgcagaactcccgttatacatttcattatactggctttccccctgg

SEQ ID NO: 197597 - DNA, 75 bp, synthetic construct
  source 1..75: mol_type = other DNA
atgtttctgaaaacggaaccgtttgaatataacgggcagactgtcacgctcagcgaactgtccgccctgcagcgc

SEQ ID NO: 197598 - DNA, 75 bp, synthetic construct
  source 1..75: mol_type = other DNA
gatgggcatggatgatattggcgaggatatgtacaacatgggcggagatctccaggagcatgcgggagatttcaa

SEQ ID NO: 197599 - DNA, 75 bp, synthetic construct
  source 1..75: mol_type = other DNA
cgattacgaagagcgtaaggcgaagattaaagccgatgctgaagaagcggcgcgtaagattggtggtaatgctga

SEQ ID NO: 197600 - DNA, 75 bp, synthetic construct
  source 1..75: mol_type = other DNA
gtatcgcgcccatgtgaagggcgaaagcactgaagcactactgccgaatatggttgcgacttcgctggcgaaatt

SEQ ID NO: 197601 - DNA, 75 bp, synthetic construct
  source 1..75: mol_type = other DNA
aaaatgccattcgctggatatatgaaccgggaagttttacaccgctggcacgttatgagaaaggcttgctgcatt

SEQ ID NO: 197602 - DNA, 75 bp, synthetic construct
  source 1..75: mol_type = other DNA
gtggtgctgtattaccgcctgccgcaggacggtatctttcgcggtgcagtgaactcacgccaggcttactaccgg

SEQ ID NO: 197603 - DNA, 75 bp, synthetic construct
  source 1..75: mol_type = other DNA
accaccgcaggtatcacagaacgctttacccgcaacatgatggggcacctgacatcatggcagatagcgaaccat

SEQ ID NO: 197604 - DNA, 75 bp, synthetic construct
  source 1..75: mol_type = other DNA
attcttagtaatactggtgatggagaaatatcactctatcagtctgttaatcagggggcagatgttcctcacgta

SEQ ID NO: 197605 - DNA, 75 bp, synthetic construct
  source 1..75: mol_type = other DNA
ggatcagggcggttctcccattacctggttactgattcaggttttctccccgcaaaatattcccggtttcattat

SEQ ID NO: 197606 - DNA, 75 bp, synthetic construct
  source 1..75: mol_type = other DNA
cggaagaaattaagctggcgatgcaggtggttgtactgcgcgacaagctggagccgtacttcgcggaaggtcgtt

SEQ ID NO: 197607 - DNA, 75 bp, synthetic construct
  source 1..75: mol_type = other DNA
aaaagcactgcgcagcctggcagagtcctttgctgcgaactttactgcggagctggataacgcaggcctcgcaca

SEQ ID NO: 197608 - DNA, 75 bp, synthetic construct
  source 1..75: mol_type = other DNA
gggcgagccggaattcactatcgacaatgccgatcagtatccggaaattctgcgtgagcgcgggaaagtcatcgc

SEQ ID NO: 197609 - DNA, 75 bp, synthetic construct
  source 1..75: mol_type = other DNA
agcagaaccggcatggacgggtgatatcaagtgagcatgaaggctggcggcactcaacgcaccgcatcaatccgc

SEQ ID NO: 197610 - DNA, 75 bp, synthetic construct
  source 1..75: mol_type = other DNA
ttagcggctggcgcacgccttgcgtcatcgtctccagaagcaatgcaatcatggctgcaaaacaacgccggtgag

SEQ ID NO: 197611 - DNA, 75 bp, synthetic construct
  source 1..75: mol_type = other DNA
aattcgctcagcgtttccgacagttcctggctctgatgcggctaactttgaagcaagactcgacacctttaaagc

SEQ ID NO: 197612 - DNA, 75 bp, synthetic construct
  source 1..75: mol_type = other DNA
gtcaggattcaaagagttaattttaaataataatggtgatgccagtttaacctttaaactccgctataagtcaac

SEQ ID NO: 197613 - DNA, 75 bp, synthetic construct
  source 1..75: mol_type = other DNA
tggcatacctgcaacaggtttaccctgacaccgtgatttcagttatcgtctggacgcgcagtgaagtgcgcgacg

SEQ ID NO: 197614 - DNA, 75 bp, synthetic construct
  source 1..75: mol_type = other DNA
tttacgattaatgtacaaggatgcccgactgcaaaaagtactgtttatagttctggtgtgagcgccaatgtgcgg

SEQ ID NO: 197615 - DNA, 75 bp, synthetic construct
  source 1..75: mol_type = other DNA
gtggacgtcagcgcccacgacgcgccgcgcagccccgaggagaagcgccgtgcgatgagctgggcgcaacggctc

SEQ ID NO: 197616 - DNA, 75 bp, synthetic construct
  source 1..75: mol_type = other DNA
ggctggagtgccgctacgacaagctgacccgcctgaccgaaatcaccaacgcggaaggtgagcactaccgtctgg

SEQ ID NO: 197617 - DNA, 75 bp, synthetic construct
  source 1..75: mol_type = other DNA
ggaactgatgcgccagaacagtgaaaagctgccggagagcttcaccgatggcgaaggcaaaaccacccgctacga

SEQ ID NO: 197618 - DNA, 75 bp, synthetic construct
  source 1..75: mol_type = other DNA
atttgctgtctgcccttcatgacaattacggcaaccggattgattttatccgcacggacggcctgctgacagaaa

SEQ ID NO: 197619 - DNA, 75 bp, synthetic construct
  source 1..75: mol_type = other DNA
acagctgagtctggaacttttaaacaaattaatagaactacaaatgatgctttccaagtttggacaagaaaaaat

SEQ ID NO: 197620 - DNA, 75 bp, synthetic construct
  source 1..75: mol_type = other DNA
ggatgaacgattatttatctgatcacggatattttgtatcagaccatgaaagttatcgaattagtttggggctac

SEQ ID NO: 197621 - DNA, 75 bp, synthetic construct
  source 1..75: mol_type = other DNA
tacctgcagtttgtgacatggtatgactgtgatggttgtattatcaggctgcatgccagtgctgaacgtaaatac

SEQ ID NO: 197622 - DNA, 75 bp, synthetic construct
  source 1..75: mol_type = other DNA
tattcttatgatatggcttctttcgagggggttagctatttaggagcaaggagtccaatgacacaaatagccgag

SEQ ID NO: 197623 - DNA, 75 bp, synthetic construct
  source 1..75: mol_type = other DNA
tcaaatgacagagccgaggaacaacgagcacaagaagagtggtatcagaacactgtgaaggaatgggaagaaagg

SEQ ID NO: 197624 - DNA, 75 bp, synthetic construct
  source 1..75: mol_type = other DNA
gaaaattaaaacagacaactatagttcaaatgacagagccgaggaacaacgagcacaagaagagtggtatcagaa

SEQ ID NO: 197625 - DNA, 75 bp, synthetic construct
  source 1..75: mol_type = other DNA
cagctggaaaaaacagccaccgcaggtacttcctgctcaccggacggacttgtaggccgcgacagtaaaggggca

SEQ ID NO: 197626 - DNA, 75 bp, synthetic construct
  source 1..75: mol_type = other DNA
ccagtattatcgctactcattattggccgtgggtacggtgggcttggcgcgataacaacagggaaagatagtcag

SEQ ID NO: 197627 - DNA, 75 bp, synthetic construct
  source 1..75: mol_type = other DNA
tcctaatatgctggtccgctgggccagacgcggttttggcgtatggagcgcctggcgtctggtgaaaacgaccct

SEQ ID NO: 197628 - DNA, 75 bp, synthetic construct
  source 1..75: mol_type = other DNA
ctggagcgtgagaacaatcatctgaaagaacagcaaaacggctggcaggaacgtctgcaggctctgctgggtcgc

SEQ ID NO: 197629 - DNA, 75 bp, synthetic construct
  source 1..75: mol_type = other DNA
ggaggccgatttcccagggaagcaaaaaaattaaaacagacaactataattcaagtgacagagcagaggaacaac

SEQ ID NO: 197630 - DNA, 75 bp, synthetic construct
  source 1..75: mol_type = other DNA
ctcaactgaaagagagcggaatgagtattcttatgatatggcttctttcgagggggttagctacttaggtgcaag

SEQ ID NO: 197631 - DNA, 75 bp, synthetic construct
  source 1..75: mol_type = other DNA
tgataataaagatgttacgcaaacttatgccagtgatgagcgtgcaaataaagttgcctcatttgcagcaagtgc

SEQ ID NO: 197632 - DNA, 75 bp, synthetic construct
  source 1..75: mol_type = other DNA
taaattaacggcgaccttagatgaacttggcagtgatgttagtgaggtgaagtcattctctctgtatgctgatga

SEQ ID NO: 197633 - DNA, 75 bp, synthetic construct
  source 1..75: mol_type = other DNA
tgggattaactattgatgacgcggtcagcgacggttcacaagcgaacgcgggtcagcggctaatccgtgcgcagg

SEQ ID NO: 197634 - DNA, 75 bp, synthetic construct
  source 1..75: mol_type = other DNA
ttatggggtcattgcaatgagccgattctgcgcttcggaacatgcaggctattgcgaacgaccgaagatgtatta

SEQ ID NO: 197635 - DNA, 75 bp, synthetic construct
  source 1..75: mol_type = other DNA
tcgtggaaaacgttttactaaagcagattatgtagaagatggtggtatcagtgtaatccattatggtgagatata

SEQ ID NO: 197636 - DNA, 75 bp, synthetic construct
  source 1..75: mol_type = other DNA
tttgcagggggaaaaacagtagcctttgttgactttaaagatattccagagaaagatattaatagagagccatcg

SEQ ID NO: 197637 - DNA, 75 bp, synthetic construct
  source 1..75: mol_type = other DNA
ggcgcagatcccgccacgtttagcctgagcttcctcaactccatgcagcaaaataccggtgctaacaacattgtg

SEQ ID NO: 197638 - DNA, 75 bp, synthetic construct
  source 1..75: mol_type = other DNA
cagcagagctgacagcagagcttaacatgcgtaaaaaacaatacaactactatctagataagttattgaatttca

SEQ ID NO: 197639 - DNA, 75 bp, synthetic construct
  source 1..75: mol_type = other DNA
gcatgcgtaaaaaacaatacaactactatcgcgaccagttgttgagttttaaagaggatgaggttgagggtaaga

SEQ ID NO: 197640 - DNA, 75 bp, synthetic construct
  source 1..75: mol_type = other DNA
agcattgtgtggtaatgttcaaagaatgaaaggccagttctatgctacagaacatgctgttgtagtttcagtcat

SEQ ID NO: 197641 - DNA, 75 bp, synthetic construct
  source 1..75: mol_type = other DNA
aggactttaccgatggcacgaccaccaacaccgggcgaggtctggacgttgctatcagccagaacggttttttcc

SEQ ID NO: 197642 - DNA, 75 bp, synthetic construct
  source 1..75: mol_type = other DNA
ggaaaaagcgcgaacctgggaactcggtacccgctacgacgacggcgcgctgacggcggaaatggggctgttcct

SEQ ID NO: 197643 - DNA, 75 bp, synthetic construct
  source 1..75: mol_type = other DNA
cgcacgaagtgggcgtgggctatcgctatgtgaatgaatcaacgcatgaaatgcgttactacaccgccaccagca

SEQ ID NO: 197644 - DNA, 75 bp, synthetic construct
  source 1..75: mol_type = other DNA
gcgttctgacctcaaatccaacagcgaatatttccactggcgcaattaacggcgcagatcccgccacgtttagcc

SEQ ID NO: 197645 - DNA, 75 bp, synthetic construct
  source 1..75: mol_type = other DNA
tgactgttttcgatagtcagggtaatgctcatgacatgagcgtttattttgtgaagaccggggataataactggg

SEQ ID NO: 197646 - DNA, 75 bp, synthetic construct
  source 1..75: mol_type = other DNA
tccaacaggcacagctgaccatgcaatgacgctggtgtttaatgccaatggcgttctgacgtcaaatccaacaga

SEQ ID NO: 197647 - DNA, 75 bp, synthetic construct
  source 1..75: mol_type = other DNA
cgcgatgccctgatgtccggaaagctgaaaacgcaggcagtacgcctgcgttttgctgatggcacgctgatcgat

SEQ ID NO: 197648 - DNA, 75 bp, synthetic construct
  source 1..75: mol_type = other DNA
ctgaggggacattcctgtcctctcagcagtttcagcagcaggcccgctgggaagcgttcagcaatgacagcattg

SEQ ID NO: 197649 - DNA, 75 bp, synthetic construct
  source 1..75: mol_type = other DNA
gggcgttgtactttctacaccccggcatcgctgggggatgtgaaactggaactttttgcggtgctgcggacatga

SEQ ID NO: 197650 - DNA, 75 bp, synthetic construct
  source 1..75: mol_type = other DNA
gatatgacctatcgtcaggcatttatgattggctatttccagtgtctggcgctgtggccgggtttctcccgttcc

SEQ ID NO: 197651 - DNA, 75 bp, synthetic construct
  source 1..75: mol_type = other DNA
gacttctggcccgatcgttgtttccgtgctggaaggtgaaaatgctgttcagcgtcaccgcgatctgctgggcgc

SEQ ID NO: 197652 - DNA, 75 bp, synthetic construct
  source 1..75: mol_type = other DNA
tatgctgaacacgatggaaaaccgttctttgatggtctggttgaattcatgacctctggcccgatcgtggtttcc

SEQ ID NO: 197653 - DNA, 75 bp, synthetic construct
  source 1..75: mol_type = other DNA
ctggtggcgcatcgctacatcacgcgcgatgccagcgccggaagtgaaaaccatatcgccctgagcgagcaggag

SEQ ID NO: 197654 - DNA, 75 bp, synthetic construct
  source 1..75: mol_type = other DNA
acaatgacggcagcctgcgccagtcggtcgacacactgctgacgctgattcatcagaaggagaaacaccatgcct

SEQ ID NO: 197655 - DNA, 75 bp, synthetic construct
  source 1..75: mol_type = other DNA
ccgactggcacgcgctgcccgctatactcctcaggattgtcttacgctcaataatgacggcagcctgcgccagtc

SEQ ID NO: 197656 - DNA, 75 bp, synthetic construct
  source 1..75: mol_type = other DNA
taacgggtctgctggaggccagtctgccatcccgggtcattgctctggaaatgtcccggccggatggacagacct

SEQ ID NO: 197657 - DNA, 75 bp, synthetic construct
  source 1..75: mol_type = other DNA
ggaaggccagccttcacgatatccgcctgcgtgaagaggctgacctctggctgtctgtgcgctcggatatcccgg

SEQ ID NO: 197658 - DNA, 75 bp, synthetic construct
  source 1..75: mol_type = other DNA
cgccagcgcctggaaaaccgtggtcgtgaaaatgccagtgaaattaacgcccggctggcgcgcgctgcccgctat

SEQ ID NO: 197659 - DNA, 75 bp, synthetic construct
  source 1..75: mol_type = other DNA
ttccgagttctcgttcctgctggcggtaccgatgatgatgggcgcaacggcgctcgatctctacaaaagctgggg

SEQ ID NO: 197660 - DNA, 75 bp, synthetic construct
  source 1..75: mol_type = other DNA
tggaaggtgacaagaaaatttataatgctgaagttgctgaatgggataagttacggcaacgattgcttgatgcca

SEQ ID NO: 197661 - DNA, 75 bp, synthetic construct
  source 1..75: mol_type = other DNA
agttcggtgacggaatcgcttaacacggcccgtaatgcattaaccagagctgaacaacagctgacgcaacagaaa

SEQ ID NO: 197662 - DNA, 75 bp, synthetic construct
  source 1..75: mol_type = other DNA
atgcgcagaaaaggtattctgaatacgcggttgtcagagctggaaaaaaagggcggggcagcccttgccgttctt

SEQ ID NO: 197663 - DNA, 75 bp, synthetic construct
  source 1..75: mol_type = other DNA
ttttgatatcaatatagctaataccggaaatgctccagcctataatattgaagtcgaatttaatcccccactggt

SEQ ID NO: 197664 - DNA, 75 bp, synthetic construct
  source 1..75: mol_type = other DNA
gacaacaccaggtcagttttgggttcgatgtggagcaggcacgacaagctctgggacttgccctgcccaggaaca

SEQ ID NO: 197665 - DNA, 75 bp, synthetic construct
  source 1..75: mol_type = other DNA
gtcagtgccagaacaaatgaacaaaagcatgcaaatgacgctcttaatgccctgttgaaggaaaaagagaatatc

SEQ ID NO: 197666 - DNA, 75 bp, synthetic construct
  source 1..75: mol_type = other DNA
gattaaggccaaaataacgaatagcaaaaatacatatgagaaaacaataaggacttatgttgtaaaactacctga

SEQ ID NO: 197667 - DNA, 75 bp, synthetic construct
  source 1..75: mol_type = other DNA
atgctcgatttgtcgatcattttggaaacccattatctggtacggttgagttttctgctggtagtgaagatagtc

SEQ ID NO: 197668 - DNA, 75 bp, synthetic construct
  source 1..75: mol_type = other DNA
aaatggtaatgctatttttgcgttaataagctccactccggggtcttacgtgattacagctcatgctggttctca

SEQ ID NO: 197669 - DNA, 75 bp, synthetic construct
  source 1..75: mol_type = other DNA
gcagaaaaggtattctggacacgcggttgtcagagctggaaaaaaatggcggggcagcccttgccgttcttgatg

SEQ ID NO: 197670 - DNA, 75 bp, synthetic construct
  source 1..75: mol_type = other DNA
tatcggcgcttacctgtttgttgatatggcgcacgttgcgggtctggttgccgctggtgtctatccgaacccggt

SEQ ID NO: 197671 - DNA, 75 bp, synthetic construct
  source 1..75: mol_type = other DNA
cctgttcctggttgatctggttgataaaaacctgaccggtaaagaagcagacgccgctctgggccgtgctaacat

SEQ ID NO: 197672 - DNA, 75 bp, synthetic construct
  source 1..75: mol_type = other DNA
gaggtggttgtgatcgcgcaaagcgtcggcgcagtgctggttgccacatgggttcatgattatgcgcctgcaatt

SEQ ID NO: 197673 - DNA, 75 bp, synthetic construct
  source 1..75: mol_type = other DNA
aacggggaatgtctgggcgggtgcgttttgaacagggcgatgcgtttaacccggaggaactcagcgcgttaactc

SEQ ID NO: 197674 - DNA, 75 bp, synthetic construct
  source 1..75: mol_type = other DNA
gataccgtagggtaacgttgtctctccatcgagacggggaacggattaaccataaagccgttcagcgcctgatgg

SEQ ID NO: 197675 - DNA, 75 bp, synthetic construct
  source 1..75: mol_type = other DNA
gggcaattgtcgttgacaagcaattacataccaccgcagacaatatttgggcgatgggagatgttaccggcgggc

SEQ ID NO: 197676 - DNA, 75 bp, synthetic construct
  source 1..75: mol_type = other DNA
cagggcgcaggcatttgaaaaaatgcaaagctttatcagccgtttatatgctaacaagtcgcaaaaatttgatta

SEQ ID NO: 197677 - DNA, 75 bp, synthetic construct
  source 1..75: mol_type = other DNA
gggatgcccgagggcatggaaaaagttcggggccgcgtggttatagcccatctcttgcgcgttcagtgcgggatg

SEQ ID NO: 197678 - DNA, 75 bp, synthetic construct
  source 1..75: mol_type = other DNA
gaaatataccgcatatagaagtaatattcctggttggctctggatatttacaagagaaccaacactttataaata

SEQ ID NO: 197679 - DNA, 75 bp, synthetic construct
  source 1..75: mol_type = other DNA
tcagagtggcgtatccgatgaatcaccacaggcctgataagtcgcgcagcgtcgcatcaggcaatgtgctccatt

SEQ ID NO: 197680 - DNA, 75 bp, synthetic construct
  source 1..75: mol_type = other DNA
ttgctggcgctgcgtgaagagctgaaagacgagctggaaatcgtcatgcgtgtctattttgaaaagccgcgtacg

SEQ ID NO: 197681 - DNA, 75 bp, synthetic construct
  source 1..75: mol_type = other DNA
tccagtaatagatctcttcaacaatgatgttatttcttacagcctttcggtaagcgtcaacggagcaccgtattg

SEQ ID NO: 197682 - DNA, 75 bp, synthetic construct
  source 1..75: mol_type = other DNA
gaaccctctcacttaaagcagcgattaaggtcaagcgataccgctcttacagaggagaggtagggcaaaccgccc

SEQ ID NO: 197683 - DNA, 75 bp, synthetic construct
  source 1..75: mol_type = other DNA
gatgcaacagctcggcctgaagtctcctgtgcgtctgaagaaataccggtcttaccggggaaatatgggactcgc

SEQ ID NO: 197684 - DNA, 75 bp, synthetic construct
  source 1..75: mol_type = other DNA
ttacttaacctgaaggaattacccgaacatttgggcattttaggcgggggatatattggcattgagttcgcctct

SEQ ID NO: 197685 - DNA, 75 bp, synthetic construct
  source 1..75: mol_type = other DNA
catgctcagtatctcgataagcgcagagaaatgatgcagtggtgggcggactggcttgatgaaaaggtggagtaa

SEQ ID NO: 197686 - DNA, 75 bp, synthetic construct
  source 1..75: mol_type = other DNA
gaaaaagccagtgcacacgcttcccgtacgctaaaagcggtgtacgaagcgattggttttgtggcgaagccgtaa

SEQ ID NO: 197687 - DNA, 75 bp, synthetic construct
  source 1..75: mol_type = other DNA
tccagtaatagatctcttcaacaatgatgttatttcttacagcctttcggaaagaccagtgatggcagtatcgta

SEQ ID NO: 197688 - DNA, 75 bp, synthetic construct
  source 1..75: mol_type = other DNA
gttcagaatgcccatgataatcgcatttctgacggttatcttaggtatggcaatccttatgggatatttaacgca

SEQ ID NO: 197689 - DNA, 75 bp, synthetic construct
  source 1..75: mol_type = other DNA
tcgtattggatttactaggatttgaacgtcatattgttgatcacaaaaactcagcatcaagtggttgcaccacga

SEQ ID NO: 197690 - DNA, 75 bp, synthetic construct
  source 1..75: mol_type = other DNA
taagcgcagagaaatgatgcagtggtgggcggactggcttgatggagagaaaaatagcgcaacttttaggccaca

SEQ ID NO: 197691 - DNA, 75 bp, synthetic construct
  source 1..75: mol_type = other DNA
gtgccgatgatgatgggcgcaacggcgctcgatctctacaaaagttgggggttcctgacaaccggtgatatcccg

SEQ ID NO: 197692 - DNA, 75 bp, synthetic construct
  source 1..75: mol_type = other DNA
cgccagagtgatgaacgatacccgtggggtattaaaagcgattgttgataataaaacccaacgggtgatgctgcc

SEQ ID NO: 197693 - DNA, 75 bp, synthetic construct
  source 1..75: mol_type = other DNA
gttgacaagcgattacataccaccgcagacaatatttgggcgatgggagatgttaccggcgggctgcaatttact

SEQ ID NO: 197694 - DNA, 75 bp, synthetic construct
  source 1..75: mol_type = other DNA
ttcggcgaactgagccgcatgacgcagtttaaagataaatctgcgcgttatgccgagaacatcaacgctggtctg

SEQ ID NO: 197695 - DNA, 75 bp, synthetic construct
  source 1..75: mol_type = other DNA
ccggcggtggtactggggctgttgttccacgacacgattaagtcattgtttaacccgataaatgtgatgtatgca

SEQ ID NO: 197696 - DNA, 75 bp, synthetic construct
  source 1..75: mol_type = other DNA
ctggcggtgccgatgatgatgggcgcaacggcgctcgatctctacaaaagctggggcttcctgacaaccggcgat

SEQ ID NO: 197697 - DNA, 75 bp, synthetic construct
  source 1..75: mol_type = other DNA
cgctgataatcagcttacttcctgttttcgcgtggcggaggatggcagttttagcgacggtcaggataccccgtt

SEQ ID NO: 197698 - DNA, 75 bp, synthetic construct
  source 1..75: mol_type = other DNA
ccgcaggacggtggctggatcggctggatgatcaaacctctgggccgctggtcgttaatcatggaaatcgatgaa

SEQ ID NO: 197699 - DNA, 75 bp, synthetic construct
  source 1..75: mol_type = other DNA
agatcggttagcaccggatctcggtctggatgataacggttcgctgctgctggattttggcccacggcagttcac

SEQ ID NO: 197700 - DNA, 75 bp, synthetic construct
  source 1..75: mol_type = other DNA
ggtatagaagaaaaggagcttcagccgaatattcctgatgaaactactgtaccgggtaagcgtaagggtagtaag

SEQ ID NO: 197701 - DNA, 75 bp, synthetic construct
  source 1..75: mol_type = other DNA
aatagatcattcaaaattaacggctattccagatattattgatattgcaagacgtaaaaatcaacacttctctta

SEQ ID NO: 197702 - DNA, 75 bp, synthetic construct
  source 1..75: mol_type = other DNA
ccatgcaggctgctgaatttgcccaactgttctctgactacgaactcctgccaccgttccgtcaacttgatcgcc

SEQ ID NO: 197703 - DNA, 75 bp, synthetic construct
  source 1..75: mol_type = other DNA
tgtcgcaagtgactactgcgccgatgtgttgcgtcatatcaatcatccgttcgcattaacactgcttatacgtgt

SEQ ID NO: 197704 - DNA, 75 bp, synthetic construct
  source 1..75: mol_type = other DNA
gatggcgaatatataagctggacaacagatggcgcaaatgcaggcactgtgttctatcgaacaggtaaattttca

SEQ ID NO: 197705 - DNA, 75 bp, synthetic construct
  source 1..75: mol_type = other DNA
cgagttgcgccagaaacaatacgagtactatcgtgatttactgttcagtttcccgaaacctgaaactgtcagtaa

SEQ ID NO: 197706 - DNA, 75 bp, synthetic construct
  source 1..75: mol_type = other DNA
ccgcaggatgctggctggatcggctggatgatcaaccccctgggccgctggtcgttaatcatggaaatcgatgaa

SEQ ID NO: 197707 - DNA, 75 bp, synthetic construct
  source 1..75: mol_type = other DNA
gatatcgccctgatgcagcttaacggcatcgcccagaaactgaaattcaaagcattacaggagcgggcaaaagaa

SEQ ID NO: 197708 - DNA, 75 bp, synthetic construct
  source 1..75: mol_type = other DNA
caccctgccggaaggcgatatctctattggtattcctcacgttctggaaatatcaccgacggatgctgccgcctt

SEQ ID NO: 197709 - DNA, 75 bp, synthetic construct
  source 1..75: mol_type = other DNA
tgatgaaggggcgccgagttcaccttgtccccatgtcagaccaagtaatttctttgctggaaacactgaagccgg

SEQ ID NO: 197710 - DNA, 75 bp, synthetic construct
  source 1..75: mol_type = other DNA
gcctgcattggctgggaagataccgatgctctgttacgtcaactggcgaatgcagtaaaagcgcgtcgcgggtaa

SEQ ID NO: 197711 - DNA, 75 bp, synthetic construct
  source 1..75: mol_type = other DNA
agtgggccgaaaccgaagccgataacggtcgctcagtggagccgtatttcagtgcggtttccgggcgcgtacttg

SEQ ID NO: 197712 - DNA, 75 bp, synthetic construct
  source 1..75: mol_type = other DNA
gccgtgttgaagcggcgcaggagctgaaagcgggaaatgtggaggccgttgtggcctccccaaacagcctgcatg

SEQ ID NO: 197713 - DNA, 75 bp, synthetic construct
  source 1..75: mol_type = other DNA
gcgtctggtctttcttgtccggtaggttttaaaaatggcacagacggtacgattaaagtggctatcgatgccatt

SEQ ID NO: 197714 - DNA, 75 bp, synthetic construct
  source 1..75: mol_type = other DNA
tgaattcctggatatgatcaccccgcaatatctcgcggacctgatgagctggggcgcaattggcgcacgtacaac

SEQ ID NO: 197715 - DNA, 75 bp, synthetic construct
  source 1..75: mol_type = other DNA
acgtttgccagcaaattgccggtggcgaaaaagctattattggcgtgatggttgaaagccacctggcggaaggga

SEQ ID NO: 197716 - DNA, 75 bp, synthetic construct
  source 1..75: mol_type = other DNA
cagttaccgctctatccatgatgtctttcggtgcatttgctcagagcgtcagcgctaccgcctccactctggatc

SEQ ID NO: 197717 - DNA, 75 bp, synthetic construct
  source 1..75: mol_type = other DNA
gactgatgatgcacaaaaaaatgatggggttctggacatagacaatatgcagctgagagaagaaccggagtgcat

SEQ ID NO: 197718 - DNA, 75 bp, synthetic construct
  source 1..75: mol_type = other DNA
tttgcgaagattcatggctacacctgttcgcatcgccctgatgacaacaattggcgttactgagcgcctcagtag

SEQ ID NO: 197719 - DNA, 75 bp, synthetic construct
  source 1..75: mol_type = other DNA
gtgatgtgctgttaccgcgctggatgccaaccgcgcaatcctggctggaaggtgacagtgtgcaacagaatcctg

SEQ ID NO: 197720 - DNA, 75 bp, synthetic construct
  source 1..75: mol_type = other DNA
cctatcatcggcggtcttgaaattcaggatattgagccgatgcaactgctggaagtaatccgcagatttgaagat

SEQ ID NO: 197721 - DNA, 75 bp, synthetic construct
  source 1..75: mol_type = other DNA
aagccagcaatcaccatcattgcgctggtaattggctatatcgctatcttctcacgccagcatgcttcctggatt

SEQ ID NO: 197722 - DNA, 75 bp, synthetic construct
  source 1..75: mol_type = other DNA
atgatgggaaaactgatttggttaatggggccgtccggctccgggaaagatagcctgctggcggaactccgcctg

SEQ ID NO: 197723 - DNA, 75 bp, synthetic construct
  source 1..75: mol_type = other DNA
acaacgtgctggcgctgtacatgcaggatcgttatctcggcaagatgaaccgtgtcgctgacgatattaccgtcg

SEQ ID NO: 197724 - DNA, 75 bp, synthetic construct
  source 1..75: mol_type = other DNA
cgaccgggcaaaataatacccgtgttgttccggatgatgtacgcaaggtctttgccgaatatcccaacgtgatca

SEQ ID NO: 197725 - DNA, 75 bp, synthetic construct
  source 1..75: mol_type = other DNA
ttcgtgggtatgtcatatttattttttaatataatttgtgttatgttgatgttttttactccatggcctgaaagt

SEQ ID NO: 197726 - DNA, 75 bp, synthetic construct
  source 1..75: mol_type = other DNA
tggtttgtaaaagcatcactggagcagaccgcgctatcgggcactcctccggtaactacggatggctggataagc

SEQ ID NO: 197727 - DNA, 75 bp, synthetic construct
  source 1..75: mol_type = other DNA
ggaaggcgattgaaccaggtagcatggaacatgagcatattttgctgcttgctgaactttcaagaataaacagcc

SEQ ID NO: 197728 - DNA, 75 bp, synthetic construct
  source 1..75: mol_type = other DNA
acgcggcggtgcgggtgaccgtctgctgatgtacgcacagctgaaggaatgggcagagaaaaactttgatatcaa

SEQ ID NO: 197729 - DNA, 75 bp, synthetic construct
  source 1..75: mol_type = other DNA
cgtgacggtgatgaagctctggcaataaagcaacagacggatccggttattgagttttgccagttcctgaatttt

SEQ ID NO: 197730 - DNA, 75 bp, synthetic construct
  source 1..75: mol_type = other DNA
tgaaaagcgtttcacggcggtaatcagggcggtggtgctggcgaccaacaataacccgatgatattcaccgaacg

SEQ ID NO: 197731 - DNA, 75 bp, synthetic construct
  source 1..75: mol_type = other DNA
gcggcgaaagtttacggacatgaatatataacgcgcaggattaaagggattacgcaaaccaacgtgacaacaaca

SEQ ID NO: 197732 - DNA, 75 bp, synthetic construct
  source 1..75: mol_type = other DNA
tgccgcgcatatagcgcatggctgaatattggtggcgatagtcagacctggacaaccgcacaattcatttcgtgg

SEQ ID NO: 197733 - DNA, 75 bp, synthetic construct
  source 1..75: mol_type = other DNA
ggctttactcattgaacagcgtgacggtgatgaagcactggcgataaagcagcaaacggatccggttattgagtt

SEQ ID NO: 197734 - DNA, 75 bp, synthetic construct
  source 1..75: mol_type = other DNA
gtgattttccgtttcgacaatatcgtcagtgaggccgaaaaagacagggagctaccggaaaagattgcggctgaa

SEQ ID NO: 197735 - DNA, 75 bp, synthetic construct
  source 1..75: mol_type = other DNA
ccgatttgcgctggattcatggcgtaatagttcaggctgcgtggtttgtgaaagcatcactagggcagaacgcat

SEQ ID NO: 197736 - DNA, 75 bp, synthetic construct
  source 1..75: mol_type = other DNA
gcgctgatggcttacggcgttgatcgttttatcatcgacgaagcgcacacggttaaagactgggattttcggccc

SEQ ID NO: 197737 - DNA, 75 bp, synthetic construct
  source 1..75: mol_type = other DNA
tgtccggtgccattcacctgtttaagcccctgtcgccgggggctgatacagccacaaccgtctccgccagtccag

SEQ ID NO: 197738 - DNA, 75 bp, synthetic construct
  source 1..75: mol_type = other DNA
tgccctggcaaaaatccggaaatgatgacgatggcggggaaaatccccgcctttttcctgccggtccccggacag

SEQ ID NO: 197739 - DNA, 75 bp, synthetic construct
  source 1..75: mol_type = other DNA
tggctgggggagtaattcaacacaggaagcgcagttctccgtgctcgacgacatcaccgccagcgaactcattaa

SEQ ID NO: 197740 - DNA, 75 bp, synthetic construct
  source 1..75: mol_type = other DNA
atctatcaggaaaattaacaacatacgatttcagtgcatgttctgctaactggcagcagaatatcaatgaagctc

SEQ ID NO: 197741 - DNA, 75 bp, synthetic construct
  source 1..75: mol_type = other DNA
agcgacccactggaagaatatcctgcaaaaatcgccccactgcccggcttttatcagttccccttatggcgcaga

SEQ ID NO: 197742 - DNA, 75 bp, synthetic construct
  source 1..75: mol_type = other DNA
tggggatcagcgccgtcattacgtccggagaacttgaggggacacacctgacaggggtttttgatgatcccgaaa

SEQ ID NO: 197743 - DNA, 75 bp, synthetic construct
  source 1..75: mol_type = other DNA
aaagcaaatctacttatgcagaatgtccgttgataatcacttttcctattatttaggagaaattgaagctggacg

SEQ ID NO: 197744 - DNA, 75 bp, synthetic construct
  source 1..75: mol_type = other DNA
acgttgttgtatggcgtgtctacaccattcttcgggtaatcgcaccagagtcggcggcctgtgcgtggtgtgagt

SEQ ID NO: 197745 - DNA, 75 bp, synthetic construct
  source 1..75: mol_type = other DNA
atttcacctaagattaacttatgtaacagtgtggaagtattgaccaattcattcgggacagttattagtggttga

SEQ ID NO: 197746 - DNA, 75 bp, synthetic construct
  source 1..75: mol_type = other DNA
atgatgactggcggggaaaatccccgcctttttcctgccggtcaccggaaagagcacaaaggaagtcgccgccgg

SEQ ID NO: 197747 - DNA, 75 bp, synthetic construct
  source 1..75: mol_type = other DNA
tcaggtaaacgttaaagcgggctacgctcgtaacttcctggtaccgcagggtaaagctgttccagctaccaagaa

SEQ ID NO: 197748 - DNA, 75 bp, synthetic construct
  source 1..75: mol_type = other DNA
gcactggctgcgttaattaagaatggcccgctctggcaggagttgagggcatctttgctgaagaccattacccga

SEQ ID NO: 197749 - DNA, 75 bp, synthetic construct
  source 1..75: mol_type = other DNA
gttaatcgcagcaatgatgtatccgcaggggatttttccggtactgtcagcgtccggcgtttgggtagcctgttt

SEQ ID NO: 197750 - DNA, 75 bp, synthetic construct
  source 1..75: mol_type = other DNA
acctgacgccagaacaggaaaaagcgtggaagcgccttgtgaaggctgtaaaggatttcagggcagccggaggaa

SEQ ID NO: 197751 - DNA, 75 bp, synthetic construct
  source 1..75: mol_type = other DNA
cggtcacgatatccgtagtctggcgctggcggagcactacttcggtgcaagtcaggattgcgaagactccattct

SEQ ID NO: 197752 - DNA, 75 bp, synthetic construct
  source 1..75: mol_type = other DNA
gcttaacagcgcggcagtttatcgcctgattgaccagtacgggccaatctcgcggattcagattgccgagcaaag

SEQ ID NO: 197753 - DNA, 75 bp, synthetic construct
  source 1..75: mol_type = other DNA
tcgcctgagcagcgccaggtgtttaaggaaaaagtacagcagcgcccactgaaccaacagcaacgtgataacgcc

SEQ ID NO: 197754 - DNA, 75 bp, synthetic construct
  source 1..75: mol_type = other DNA
atgcacaattatgaagcgcacttacctgtagttcttaatgtgccgtcagattatacgggacgcgttttgatattt

SEQ ID NO: 197755 - DNA, 75 bp, synthetic construct
  source 1..75: mol_type = other DNA
tgtgggttctcctgaatttttttctgaactctgtattcgtgcagaaataaaaccggaactgctgacaggaaaata

SEQ ID NO: 197756 - DNA, 75 bp, synthetic construct
  source 1..75: mol_type = other DNA
tctcgcctggacggggtgggccattaccctggtcttttatctgctgaccgttattgccttctggatgacccgtaa

SEQ ID NO: 197757 - DNA, 75 bp, synthetic construct
  source 1..75: mol_type = other DNA
gccagcattgataacgataagggctaccacactgcaagcgtttatatgcctagcattgatgcgccagggctaacc

SEQ ID NO: 197758 - DNA, 75 bp, synthetic construct
  source 1..75: mol_type = other DNA
atgcataatcatgaatcgcacttacctgtcgtgctgaatgtgccgtcagattatacggggcgcgttttgatattc

SEQ ID NO: 197759 - DNA, 75 bp, synthetic construct
  source 1..75: mol_type = other DNA
ctgtcgtgctgaatgtgccatcagattacacagggcgcgttttaatattcctggataaagggaaagtaaaatcac

SEQ ID NO: 197760 - DNA, 75 bp, synthetic construct
  source 1..75: mol_type = other DNA
aaaatagacgacatttttggtgataatgtcccaaatatgtcccactctggaattatggaggatataaagaaggcg

SEQ ID NO: 197761 - DNA, 75 bp, synthetic construct
  source 1..75: mol_type = other DNA
aaagtttcaatgcagggaacagatgctgaagtcaagaaaatggtcgactgccagacgcaaatgaccctttcaaga

SEQ ID NO: 197762 - DNA, 75 bp, synthetic construct
  source 1..75: mol_type = other DNA
gcccgcaaactggcggatttgattgaagcatgggagcctcccgaccactggttctccggcaccggcaaatctgag

SEQ ID NO: 197763 - DNA, 75 bp, synthetic construct
  source 1..75: mol_type = other DNA
gttcagcggcatcggcaaagacgaaggcaaagctgtcctcatttcttttctgcgtcactgcaaaggctttcgtac

SEQ ID NO: 197764 - DNA, 75 bp, synthetic construct
  source 1..75: mol_type = other DNA
tgccggagcgaaaaaacatgcaactggcacagatggctgacagtgaacgcgctcagttgcttgccggacgatttg

SEQ ID NO: 197765 - DNA, 75 bp, synthetic construct
  source 1..75: mol_type = other DNA
atattcagggccggacatcttgaacctgtaatgataaaggcgattggtcagaagctggcggcggcaggtgtacag

SEQ ID NO: 197766 - DNA, 75 bp, synthetic construct
  source 1..75: mol_type = other DNA
agtatgaggcggagaagcaaatagagagacaggcacaacttcagccgcaaaaagctgacaaccttgatcagtccc

SEQ ID NO: 197767 - DNA, 75 bp, synthetic construct
  source 1..75: mol_type = other DNA
gctggctggcgtacaggaggcgaaattatacaaaggcatcaccgaccaggaaccggagaactggcgcgactacct

SEQ ID NO: 197768 - DNA, 75 bp, synthetic construct
  source 1..75: mol_type = other DNA
atggcgaaccggtacgactggcagatgtttattgaggccacaggggaaggcgggagcggcaagagcacaatcacg

SEQ ID NO: 197769 - DNA, 75 bp, synthetic construct
  source 1..75: mol_type = other DNA
aaacatccgcgataatgcgccaaatttccataaatggcttgaacatgctgcaagaaaagacccgcgcaagatgat

SEQ ID NO: 197770 - DNA, 75 bp, synthetic construct
  source 1..75: mol_type = other DNA
ttcctctcaccagccggataactggatcaccacacacaacggcattgagtacacgccgccagtaccaggtgagaa

SEQ ID NO: 197771 - DNA, 75 bp, synthetic construct
  source 1..75: mol_type = other DNA
gaccagaaacagcctttaccgcgtctatctggcgtttatggcgtacgcaggcaggagcaaaccgctaaacgtaaa

SEQ ID NO: 197772 - DNA, 75 bp, synthetic construct
  source 1..75: mol_type = other DNA
ggcgatctattcagagcacagggccacgttcagcaaacgtgtaatcaataacgccgtggaagcgttaaaagttat

SEQ ID NO: 197773 - DNA, 75 bp, synthetic construct
  source 1..75: mol_type = other DNA
tccacaagcgttttttcaaactcctgcaactgggattcgattactggactccggtcggtggggcgatcacgcctc

SEQ ID NO: 197774 - DNA, 75 bp, synthetic construct
  source 1..75: mol_type = other DNA
gctaaagtcgtttgaggcttttcgcgagtgggtaaccattcaggctggattttacaccgaacatttttatcagga

SEQ ID NO: 197775 - DNA, 75 bp, synthetic construct
  source 1..75: mol_type = other DNA
cgtttcttcgcgttactcaatctcggtttcgaatactgggaacccaccggcggggcaatctcctccaacgaacgc

SEQ ID NO: 197776 - DNA, 75 bp, synthetic construct
  source 1..75: mol_type = other DNA
atccgtactgaatgtgctttggaactggattctgttccgaaaattttcctctcctaaggaagtagaaaatgtggc

SEQ ID NO: 197777 - DNA, 75 bp, synthetic construct
  source 1..75: mol_type = other DNA
gctaaagtcgtttgacgctttccgcgagtgggtaaccattcaggccggattttacaccgagcatatttatcctga

SEQ ID NO: 197778 - DNA, 75 bp, synthetic construct
  source 1..75: mol_type = other DNA
ctggtttcaggattcgttgattacctatgtgaatcagtaggccgggaacatacgccagctctgagcgaagccgca

SEQ ID NO: 197779 - DNA, 75 bp, synthetic construct
  source 1..75: mol_type = other DNA
ggagtattacttaattgatgatgttatttcggagatgctagaattaaaaaaaaagaattatcaaataatcattgt

SEQ ID NO: 197780 - DNA, 75 bp, synthetic construct
  source 1..75: mol_type = other DNA
cccggcgcagtgaaatcgccagtgcgctagcacgtttgttactattggaagtcttacacgcccgtcgcaccagcg

SEQ ID NO: 197781 - DNA, 75 bp, synthetic construct
  source 1..75: mol_type = other DNA
ccagcttaagttttcccggcgcagtgaaatcgccagcgccctgtcacgtctgttactattggaagtcttacacgc

SEQ ID NO: 197782 - DNA, 75 bp, synthetic construct
  source 1..75: mol_type = other DNA
gccgttactattggtacgaatagtagaagtaaagttaatacgcgctttcagttagcgaatgaaatattatggggg

SEQ ID NO: 197783 - DNA, 75 bp, synthetic construct
  source 1..75: mol_type = other DNA
aaattgtctttttagtgggcccggaacgattctgctgaaaaaaattgctgctagtgaggattttatccgagtaac

SEQ ID NO: 197784 - DNA, 75 bp, synthetic construct
  source 1..75: mol_type = other DNA
gtcatatctaagaaaaaaaacaaatcgtgggttaatgagcaaaatgaagaatttattgaaaaagtatggtgtcct

SEQ ID NO: 197785 - DNA, 75 bp, synthetic construct
  source 1..75: mol_type = other DNA
atctgtactgaatgtgctgtggaactggattctgttccgtaaattttcctctccggaacaagtcgaaaatgtggc

SEQ ID NO: 197786 - DNA, 75 bp, synthetic construct
  source 1..75: mol_type = other DNA
agtttgtgcgtttcgccgccgcagatagccaagctgggatgacggatgtggtcgtcgtggcgcaaagcgtcgggg

SEQ ID NO: 197787 - DNA, 75 bp, synthetic construct
  source 1..75: mol_type = other DNA
tcgattactggactccggtcggtggggcgatcacgcctcgcgaacgaaaactgctgtctggtttcgttgattacc

SEQ ID NO: 197788 - DNA, 75 bp, synthetic construct
  source 1..75: mol_type = other DNA
cggtagccgtgggcgcagggcgaaatccattgcatttgcgaatatggacgaaactgaatttcaacaggtttataa

SEQ ID NO: 197789 - DNA, 75 bp, synthetic construct
  source 1..75: mol_type = other DNA
gtcaggattgcgaagactccattctggtgcgtgtccatcgcggaaccggggccgggattatctctaacgggcgca

SEQ ID NO: 197790 - DNA, 75 bp, synthetic construct
  source 1..75: mol_type = other DNA
tttttatcggccgcaacggcaacgttggtgaaattggccatattcaggttgaaccgctgggtgaacgctgccact

SEQ ID NO: 197791 - DNA, 75 bp, synthetic construct
  source 1..75: mol_type = other DNA
gctatctctatcgtcaccgaaacccgcaatttccacgcaatcggtgtacggcttggtcgtcacgacgccaccatt

SEQ ID NO: 197792 - DNA, 75 bp, synthetic construct
  source 1..75: mol_type = other DNA
aaacttcttctggtttacttctcccggcgacaccggagagttgcgattttctgcatcaaatcaaaataggcgagt

SEQ ID NO: 197793 - DNA, 75 bp, synthetic construct
  source 1..75: mol_type = other DNA
atacctcttctggattactgctcccggcaacaccggagagttgcgaattcttgcatcaaataaaaataggtgagt

SEQ ID NO: 197794 - DNA, 75 bp, synthetic construct
  source 1..75: mol_type = other DNA
tcgattactggactccgatcggtggggcgatcacacctcgcgaacgagaaatggtgtttggcttcgttgattacc

SEQ ID NO: 197795 - DNA, 75 bp, synthetic construct
  source 1..75: mol_type = other DNA
ttgcatcaaatcaaaataggtgagtggatacacgcagactttaagcgtgtgcgtaactacgcattccacaagcgt

SEQ ID NO: 197796 - DNA, 75 bp, synthetic construct
  source 1..75: mol_type = other DNA
gcgtattgctgcgttccgatgatcccctgctcgacatgaactacatcaccagtttcaccggcatgaccgacaaat

SEQ ID NO: 197797 - DNA, 75 bp, synthetic construct
  source 1..75: mol_type = other DNA
tcgattactggactccgatcggaggggcgatcacgcctcacgaacgaaaactggtgtccggtttcgttgattacc

SEQ ID NO: 197798 - DNA, 75 bp, synthetic construct
  source 1..75: mol_type = other DNA
aggatgaatttgtctgtttacttcagtcagggtgttgttgggttaaacgaagggaagcaggagataagaaaaaac

SEQ ID NO: 197799 - DNA, 75 bp, synthetic construct
  source 1..75: mol_type = other DNA
gcagtgtgtctccgccacggcagtccgccacaaaaccacgccccccccctgttcaccgaagacacgctgctggcg

SEQ ID NO: 197800 - DNA, 75 bp, synthetic construct
  source 1..75: mol_type = other DNA
agaccccgctgtactcaagcaactgaacgtgatctcttcccttgcccgacaggcctcacgtatcgtgcatgccgg

SEQ ID NO: 197801 - DNA, 75 bp, synthetic construct
  source 1..75: mol_type = other DNA
tcagcaacaattgcagtcggctgatttcgttatcctttataccagtaatgagtgctttacctggtccaatcgcga

SEQ ID NO: 197802 - DNA, 75 bp, synthetic construct
  source 1..75: mol_type = other DNA
atggtactttaaatatcaacgttcccagactcgccgctgcctggcagctctgtttcgatcatgcccagaataaga

SEQ ID NO: 197803 - DNA, 75 bp, synthetic construct
  source 1..75: mol_type = other DNA
gtgccgagaaaatcgtctaacctactgaaacgcagattaaaaattgcagaaattgttgccgcccagggtgaaatc

SEQ ID NO: 197804 - DNA, 75 bp, synthetic construct
  source 1..75: mol_type = other DNA
acgatgacaccgcccgcaaactgacgccattaatccgcgcctggcctggtgaatcccagcataaacgcgccaccg

SEQ ID NO: 197805 - DNA, 75 bp, synthetic construct
  source 1..75: mol_type = other DNA
ctgtaccgccgactcactggctgaatttacctgggatctgtttaccgcctggctggccgctggcgcaccatcgaa

SEQ ID NO: 197806 - DNA, 75 bp, synthetic construct
  source 1..75: mol_type = other DNA
tcatgccagcaacaactgacacagccctcaaaccatgccagcgccgatatgctgcctgccgtattagtctcaccg

SEQ ID NO: 197807 - DNA, 75 bp, synthetic construct
  source 1..75: mol_type = other DNA
cttcaggagccggagaccatcaatcctgactgggcaatctggaaagcagaagacctgcccatctggctgtggcct

SEQ ID NO: 197808 - DNA, 75 bp, synthetic construct
  source 1..75: mol_type = other DNA
ctggagccgggatacacctcgctgctgaaagcctcccgacaggaagacacggagcaggatgaacagggcacactg

SEQ ID NO: 197809 - DNA, 75 bp, synthetic construct
  source 1..75: mol_type = other DNA
gaaatactatccaggacagccagggcaggtatttgatgattattacggcggtaaaatctggtgcgcaacgatact

SEQ ID NO: 197810 - DNA, 75 bp, synthetic construct
  source 1..75: mol_type = other DNA
tgccgacattgccgaaagtcgcgaactcactgtagcggagcttgaagatcggttagcgcccgatctcggtctgga

SEQ ID NO: 197811 - DNA, 75 bp, synthetic construct
  source 1..75: mol_type = other DNA
acgatgacaccgcccgcaaactgacgcctttgattcgcgcctggcctggtgaatcccagcataaacgcgccaccg

SEQ ID NO: 197812 - DNA, 75 bp, synthetic construct
  source 1..75: mol_type = other DNA
ctgtatccgggattattgcaggtgaaagccgcctgtaccgccgactcactggctgaatttgcctgggatctgttt

SEQ ID NO: 197813 - DNA, 75 bp, synthetic construct
  source 1..75: mol_type = other DNA
gctttgatgaaaccttaaaaccgtttgtgcgtgatgcttccggcagccgcctgaaagacttgcctaaaccgaaca

SEQ ID NO: 197814 - DNA, 75 bp, synthetic construct
  source 1..75: mol_type = other DNA
tttaaaaaggtgctcaccttcgattacagtacctgttcactcgactggcagcaggcaattacacaagcagtaggc

SEQ ID NO: 197815 - DNA, 75 bp, synthetic construct
  source 1..75: mol_type = other DNA
accacttagtctcgaacctgtatgcacaataaccgacacagaagctaaagagtttcaaactcgttgggactggga

SEQ ID NO: 197816 - DNA, 75 bp, synthetic construct
  source 1..75: mol_type = other DNA
aacttctggcacaaaaagatgaaaagcgctggcgcatgatgctaatgacaatgcttatctcgcaaccaacattag

SEQ ID NO: 197817 - DNA, 75 bp, synthetic construct
  source 1..75: mol_type = other DNA
gcccagaaactgaaattcaaagcattacaggagcgggcaaaagaaaaaattgccgacattgccgaaagtcgcgaa

SEQ ID NO: 197818 - DNA, 75 bp, synthetic construct
  source 1..75: mol_type = other DNA
ttcaaaacacatcacagttagtcatgaagaaagtatgaccaacctgttggcaaggatgggttttcaacgacgggt

SEQ ID NO: 197819 - DNA, 75 bp, synthetic construct
  source 1..75: mol_type = other DNA
gataaaggctttcgctcgctttccacatgctgctatggcggcattagctgaattgctggcgcaaaaagaggaaaa

SEQ ID NO: 197820 - DNA, 75 bp, synthetic construct
  source 1..75: mol_type = other DNA
accattacccctggaatctttctgtacaataaatgaaacaaaaagcaaaagactacaagtgcagcataattggca

SEQ ID NO: 197821 - DNA, 75 bp, synthetic construct
  source 1..75: mol_type = other DNA
tcctggttgagcatccgctggttcgtcacttaacccgccgtctgatttggggcgtttatagcaccgaaaacgagc

SEQ ID NO: 197822 - DNA, 75 bp, synthetic construct
  source 1..75: mol_type = other DNA
tctggaatatgccactgaggttgtcatcgcattgcaattcatccgatttgactggaattatgatgcccacctcat

SEQ ID NO: 197823 - DNA, 75 bp, synthetic construct
  source 1..75: mol_type = other DNA
gaatgatgctaaacgcgtcgtcgctcacgaaaaacccacgctgatgttcctggtgattggcgaaacggcacgcag

SEQ ID NO: 197824 - DNA, 75 bp, synthetic construct
  source 1..75: mol_type = other DNA
ggcgctgctaccacgtatggtgcgttcggtctacagcatggtgcatgatgagctggaaaaagagtacgttatcgc

SEQ ID NO: 197825 - DNA, 75 bp, synthetic construct
  source 1..75: mol_type = other DNA
acggctgcgcggggctggctgtactgtgcatttttggcggctggtttgcgccttacggcattgaccagcagtttc

SEQ ID NO: 197826 - DNA, 75 bp, synthetic construct
  source 1..75: mol_type = other DNA
gtgtatttttggcggctggtttgcgccttacggcatcgaccagcaatttctcggttatcaattattgccgccgtc

SEQ ID NO: 197827 - DNA, 75 bp, synthetic construct
  source 1..75: mol_type = other DNA
tattattcactcggatatctcagcgtcatggagactttgtgatatatcttcaagattatatatgagcgagagttt

SEQ ID NO: 197828 - DNA, 75 bp, synthetic construct
  source 1..75: mol_type = other DNA
gaggtgagcgcagagaaagagaaagcgctgtcgttactggccggacggatccgtcaaccgggttttacattaacg

SEQ ID NO: 197829 - DNA, 75 bp, synthetic construct
  source 1..75: mol_type = other DNA
cttgatgacgccggtcagtggctgcgttcgcgcgtggtgtggttagggatgcgtcagccaccgcgcggcttaatc

SEQ ID NO: 197830 - DNA, 75 bp, synthetic construct
  source 1..75: mol_type = other DNA
aggaaaatatgacactgcactgaaatcaacagtatggtccgattataaaaatgaaaaactgactaacacaatctc

SEQ ID NO: 197831 - DNA, 75 bp, synthetic construct
  source 1..75: mol_type = other DNA
gtaatattttctgatgatggtgttcaaataatcttgaatgatgaaaagctaaatattttattgtctttacttaac

SEQ ID NO: 197832 - DNA, 75 bp, synthetic construct
  source 1..75: mol_type = other DNA
ttgagatcagtcctaaagcactttttatcgaatctggattcaatccacgtgaagcggtaattggtgaactttgtt

SEQ ID NO: 197833 - DNA, 75 bp, synthetic construct
  source 1..75: mol_type = other DNA
caaagagttggaacaacagttgggcactttgctgtttgttcgtcatttgcgcagtgtggcgctcactcatgcggg

SEQ ID NO: 197834 - DNA, 75 bp, synthetic construct
  source 1..75: mol_type = other DNA
tcgtggtgaggcagggcgcattgagctgggcgtggtgggaaccgcaatgtgggggcgaatgcgtccggtaatgcg

SEQ ID NO: 197835 - DNA, 75 bp, synthetic construct
  source 1..75: mol_type = other DNA
ctaacgagcagttccgcaccgactttcccgagttcgccgataaaatccgctaccctgacccctcagtgaatttct

SEQ ID NO: 197836 - DNA, 75 bp, synthetic construct
  source 1..75: mol_type = other DNA
atgcgtttattatattctgctgttgtccttacttcagccttattgttacaggggtgcgtggctgccgctgtggtg

SEQ ID NO: 197837 - DNA, 75 bp, synthetic construct
  source 1..75: mol_type = other DNA
accgtttcccggaaacactgactaaccagtcccgctggtttggcttatatctcgatgaacttatcccggccgtga

SEQ ID NO: 197838 - DNA, 75 bp, synthetic construct
  source 1..75: mol_type = other DNA
tttgacaccccaaccggcaaactggtaagaaccagcgacaggttaagttttaaagcggcaaacgctgcagattcg

SEQ ID NO: 197839 - DNA, 75 bp, synthetic construct
  source 1..75: mol_type = other DNA
taaacagcttggctatgtgcacacaggagccggagctaacgcggtgaaatacaatccgaaatataacgaactgta

SEQ ID NO: 197840 - DNA, 75 bp, synthetic construct
  source 1..75: mol_type = other DNA
tcggcatccagttaatggcgctggatgaactcaacaatgtggatgatttccgtcaggtggtaagcgccactgcga

SEQ ID NO: 197841 - DNA, 75 bp, synthetic construct
  source 1..75: mol_type = other DNA
acgatacgccagcaggtagcgaatggctggagagcgtgcgggcatatgagaaagaaactttgagtcgccgcgggt

SEQ ID NO: 197842 - DNA, 75 bp, synthetic construct
  source 1..75: mol_type = other DNA
tgacagtgaaattgcccactatgtggcgcggattcactctacacgacagacaaaggagcttttgcgcatgaccac

SEQ ID NO: 197843 - DNA, 75 bp, synthetic construct
  source 1..75: mol_type = other DNA
tttgaacgctggcgaaccagtgaaaatgccgtgctgattcgccagcaaattcagtcattatgtgccgccgacccg

SEQ ID NO: 197844 - DNA, 75 bp, synthetic construct
  source 1..75: mol_type = other DNA
aggctataggcactgcgcaagaattaattgataaagtatttgatggcttgattataaatgacaatcagcagtttt

SEQ ID NO: 197845 - DNA, 75 bp, synthetic construct
  source 1..75: mol_type = other DNA
atgagcgttttttcaccaaccactcagcaagcatcagccattgactaccctaaaagtatggtaataacagcatgc

SEQ ID NO: 197846 - DNA, 75 bp, synthetic construct
  source 1..75: mol_type = other DNA
gtaatctattattaatggctacgctattaggtagcgcactatttgccagagctgcggataaagaaatgaccattg

SEQ ID NO: 197847 - DNA, 75 bp, synthetic construct
  source 1..75: mol_type = other DNA
caataaacaagccgacggtgaaaaagtgattcaggtgccaatcgatctctataccaaaacggaagacggtaaaca

SEQ ID NO: 197848 - DNA, 75 bp, synthetic construct
  source 1..75: mol_type = other DNA
gttcaggatgcggcaaaagattcttcagtacaggtacagttaattgaaactaacgcccagggcgatatttcgaaa

SEQ ID NO: 197849 - DNA, 75 bp, synthetic construct
  source 1..75: mol_type = other DNA
gcactgaaggtaaactggatgtcgaactgaattttaattgtaaagacgatttttctcccgataatgtgattcaac

SEQ ID NO: 197850 - DNA, 75 bp, synthetic construct
  source 1..75: mol_type = other DNA
cttcgttacctggcgcatgatgggcaaaaactacgatgcggcagtgctggctgcgggtcactgtggttttggcct

SEQ ID NO: 197851 - DNA, 75 bp, synthetic construct
  source 1..75: mol_type = other DNA
caggattcggggttgcgcctgccggtgaacattcatgaactgattcatcagtgcattgcttcatggaagaccggt

SEQ ID NO: 197852 - DNA, 75 bp, synthetic construct
  source 1..75: mol_type = other DNA
cgtgatgaagcactcttgaaagctgcggtagagttggataggacaagtacagaagagggagatcgtggtaaaggc

SEQ ID NO: 197853 - DNA, 75 bp, synthetic construct
  source 1..75: mol_type = other DNA
gccacacacttcccacctgaggcgggacgtccggtcgccgccgataatttgcatctgactctggcatttttaggc

SEQ ID NO: 197854 - DNA, 75 bp, synthetic construct
  source 1..75: mol_type = other DNA
ttgctatcgaattacctgcacaaatccgcaaacaaatcgttcactggcgggcagagcagtttcctcaggaggcgg

SEQ ID NO: 197855 - DNA, 75 bp, synthetic construct
  source 1..75: mol_type = other DNA
agataaaaagcttatcgagaaaatttttattgaataatatcatgaaaaatttcaaaattttccataatgaaattg

SEQ ID NO: 197856 - DNA, 75 bp, synthetic construct
  source 1..75: mol_type = other DNA
tccagagaaactaaaggggccattcccggtagttacagtgcagttattgatatgcctagtggtggtggtagcgtc

SEQ ID NO: 197857 - DNA, 75 bp, synthetic construct
  source 1..75: mol_type = other DNA
cggcgtacctgccgttgttgatctggcggcaatgcgcgaagcggttaaacgcctcggtggcgatactgcaaaggt

SEQ ID NO: 197858 - DNA, 75 bp, synthetic construct
  source 1..75: mol_type = other DNA
ggcgccgtgttctggctcaacgtgccggtgatgctgctgacgctggcgctcggccctcgcttcctgcccgagtat

SEQ ID NO: 197859 - DNA, 75 bp, synthetic construct
  source 1..75: mol_type = other DNA
cagcggatcgtcggaaggccacccgccgcgaatggatcggcctggccgtggtcgccctgccgtgcctggtctacg

SEQ ID NO: 197860 - DNA, 75 bp, synthetic construct
  source 1..75: mol_type = other DNA
tccagagaaactaaaggggccattcccggtagttacagtgcagttattgatatgccgagtggcaggggaagcgtc

SEQ ID NO: 197861 - DNA, 75 bp, synthetic construct
  source 1..75: mol_type = other DNA
ctggtggtacatcgtaccccgcgtcacatttacgcacaggtaattgcaccgaacagttctgaagttctggtagct

SEQ ID NO: 197862 - DNA, 75 bp, synthetic construct
  source 1..75: mol_type = other DNA
atgaattcaaaaaaggtttgttgcatatgtgtattattctcgctgcttgcaggatgtgcctctcaatcttctatt

SEQ ID NO: 197863 - DNA, 75 bp, synthetic construct
  source 1..75: mol_type = other DNA
tgaatataaagtgcttccaccatttcccggcaagaatgaagccagtacgactgatatgacagagcagcaaatcat

SEQ ID NO: 197864 - DNA, 75 bp, synthetic construct
  source 1..75: mol_type = other DNA
gcggatgcgctggaaacatcaccggaaattatctggccgtccagatatttcgatgatcagggcaaccgtattgta

SEQ ID NO: 197865 - DNA, 75 bp, synthetic construct
  source 1..75: mol_type = other DNA
ccgacataattgcagcgctgaaaaagcgcggaacgtcgctgtccgccgtttcccgcagctcagggctggcatcct

SEQ ID NO: 197866 - DNA, 75 bp, synthetic construct
  source 1..75: mol_type = other DNA
ggaagcgcaactgtttaatttgaaacaaaaaacatatgtatcgatggtgaaagacttggtgagtcgattccagta

SEQ ID NO: 197867 - DNA, 75 bp, synthetic construct
  source 1..75: mol_type = other DNA
ttgatgtggcagaacagcagatttcacaacttaagcagaaaacgtacgcagcagtggttaaagacctggtgaatc

SEQ ID NO: 197868 - DNA, 75 bp, synthetic construct
  source 1..75: mol_type = other DNA
gatatttttggcaatgaaaccacgctggcagtttctgaggaagatattcaggcagcactggaaggcgaagcgttc

SEQ ID NO: 197869 - DNA, 75 bp, synthetic construct
  source 1..75: mol_type = other DNA
cgctgctcgccagtgacgatgttcacgctaacagcagtgcttattttatgctcgatccaagtattgttattgatt

SEQ ID NO: 197870 - DNA, 75 bp, synthetic construct
  source 1..75: mol_type = other DNA
cgcgtgcagaaggatgagacgctggccaacgcgtttgagcgtctcactctggtggaactgggcctgcaactgccg

SEQ ID NO: 197871 - DNA, 75 bp, synthetic construct
  source 1..75: mol_type = other DNA
cggaaattatctggccctccagatatttcgataatcagggcaaccgcattgtaagacttatgcgagagcggcgct

SEQ ID NO: 197872 - DNA, 75 bp, synthetic construct
  source 1..75: mol_type = other DNA
gggctgcctggtcgccggtgaattatgaatataaagtgcttccaccattgcccgacaagaatgaagccagtacga

SEQ ID NO: 197873 - DNA, 75 bp, synthetic construct
  source 1..75: mol_type = other DNA
ctggcacggcagctggtgacgctgctcggaagttttgcatttgactggtcgattctgccggaaagcccgcgcaaa

SEQ ID NO: 197874 - DNA, 75 bp, synthetic construct
  source 1..75: mol_type = other DNA
gcgctcatcaccggactgacctttcttgaccccaaagatgccacacaggttcaggggctgtttcagcatttgcag

SEQ ID NO: 197875 - DNA, 75 bp, synthetic construct
  source 1..75: mol_type = other DNA
atgaaaacaatcgattttgaaatccgtacctccgaagtgagcgccagcaacaaaaagctggtgggctatgccgtg

SEQ ID NO: 197876 - DNA, 75 bp, synthetic construct
  source 1..75: mol_type = other DNA
ggtcaggtttggtgacgggccatggcaggatgttaagggactggatgaagtgggcagtgatacaggcagtagtgg

SEQ ID NO: 197877 - DNA, 75 bp, synthetic construct
  source 1..75: mol_type = other DNA
gcgaacggggaccggcaggtgatgctggtccggcaggcccacagggaccgaaaggagaaacaggtgcggctggcc

SEQ ID NO: 197878 - DNA, 75 bp, synthetic construct
  source 1..75: mol_type = other DNA
cgctggctctgttggttctgttttctctgcccgctactgccggtctttcgctggaggagactgctcgtaaggtga

SEQ ID NO: 197879 - DNA, 75 bp, synthetic construct
  source 1..75: mol_type = other DNA
tggtggaagaagcagcgcgtcacgccggggaggcgaagaagaatgccggagaggcggagacatcagcgaggaatg

SEQ ID NO: 197880 - DNA, 75 bp, synthetic construct
  source 1..75: mol_type = other DNA
tatagccaggcgcgcgcagcgggtcgcggtcgccaggactggtccgccattctggagcaggtccgtgtcagtgcc

SEQ ID NO: 197881 - DNA, 75 bp, synthetic construct
  source 1..75: mol_type = other DNA
ggactgggaacgcgtaatgggcgacggcgagcgtcaattctcgactctgaaaagcacggtagaggcgatctgggc

SEQ ID NO: 197882 - DNA, 75 bp, synthetic construct
  source 1..75: mol_type = other DNA
gtgatattctggtgtggaacccggtgctggaagatgcgtttgaactttcttcaatggggattcgcgtagatgctg

SEQ ID NO: 197883 - DNA, 75 bp, synthetic construct
  source 1..75: mol_type = other DNA
cgcgggtcctcaggggccgaagggagataaaggagagcgtggcgacaccggtcctgtcggggcaaccggtgagcg

SEQ ID NO: 197884 - DNA, 75 bp, synthetic construct
  source 1..75: mol_type = other DNA
cgcaccgttcgcttttctcccaacatcctgaactgcgccgcgctggcgataaccgtcgccgctgggctgaattag

SEQ ID NO: 197885 - DNA, 75 bp, synthetic construct
  source 1..75: mol_type = other DNA
tggtggaagaggtggcgcgtaacgctgaggaggcgaagaagaatgccggagaggcggagacgtcagcaaggaatg

SEQ ID NO: 197886 - DNA, 75 bp, synthetic construct
  source 1..75: mol_type = other DNA
gccggaggcactgcgccgttttgaactgatggtggaagaggtggcgcgtcacgctgaggaggcgaagaagaatgc

SEQ ID NO: 197887 - DNA, 75 bp, synthetic construct
  source 1..75: mol_type = other DNA
gcaggtcaggtttggtgacgggccgtggcaggatgttaaggggctggatgaagtgggcagtgatacaggcagaac

SEQ ID NO: 197888 - DNA, 75 bp, synthetic construct
  source 1..75: mol_type = other DNA
ggtttggtgacgggccgtggcaggatgttaaggggctggatgaagtgggcagtgatacaggcagaacaggagaat

SEQ ID NO: 197889 - DNA, 75 bp, synthetic construct
  source 1..75: mol_type = other DNA
aaatcagaaaccaacgcgaaaaacagcgagacagccgcaaagacgagcgaaaccaacgcaaagtccagccagacg

SEQ ID NO: 197890 - DNA, 75 bp, synthetic construct
  source 1..75: mol_type = other DNA
tcagcacgtgcagccagcacgtcagccggacaggccgcgtcgtcggctcaggaggcttcttccggcgcaggacag

SEQ ID NO: 197891 - DNA, 75 bp, synthetic construct
  source 1..75: mol_type = other DNA
gaagggcgacccgggggagacacaaatacggttccgtctggggccgggaaacattattgagacaaacagcaatgg

SEQ ID NO: 197892 - DNA, 75 bp, synthetic construct
  source 1..75: mol_type = other DNA
gcagaaagcgcacagtcagcggaacaaagcaggatagcggcggaagaggccgtaaaccgaatattgttaatcatg

SEQ ID NO: 197893 - DNA, 75 bp, synthetic construct
  source 1..75: mol_type = other DNA
aaggagaaacaggtgcggctggcccggtgggggcaaccggacctcagggaccgaagggcgacccgggggagacac

SEQ ID NO: 197894 - DNA, 75 bp, synthetic construct
  source 1..75: mol_type = other DNA
ctggatggcccttcgctgggatggtaatcagagacaggctaaaatgttgtcagcgcgtttccggtgcattttttg

SEQ ID NO: 197895 - DNA, 75 bp, synthetic construct
  source 1..75: mol_type = other DNA
aggcaacctgttcccgagtatttcccatggccctcggcaggggaacatgttccgcgagatgacgaatttaataag

SEQ ID NO: 197896 - DNA, 75 bp, synthetic construct
  source 1..75: mol_type = other DNA
tccgccttcacatgccggaaccattaccgtctatgaaggttccagaccaggtacgctgaatgattttctcggtgc

SEQ ID NO: 197897 - DNA, 75 bp, synthetic construct
  source 1..75: mol_type = other DNA
gcagagaaagctgcagccgacaaaaaagcagcagaaaaagcggctgctgaaaaggcagcagctgataagaaagca

SEQ ID NO: 197898 - DNA, 75 bp, synthetic construct
  source 1..75: mol_type = other DNA
agcatggacgttgagtatggccagtacagcgttatcctgctggttgaaggttttccgccttcacatgccgggacc

SEQ ID NO: 197899 - DNA, 75 bp, synthetic construct
  source 1..75: mol_type = other DNA
gatgacctcaaaacagctttttggtattgctgcagcggttctggtttatatcggaattaaaaaactgaaaaaagg

SEQ ID NO: 197900 - DNA, 75 bp, synthetic construct
  source 1..75: mol_type = other DNA
tcgggattaaaaaactgaaaaaagggcggggcagttcctggttacgtgacctgatttactggtatatgccaacag

SEQ ID NO: 197901 - DNA, 75 bp, synthetic construct
  source 1..75: mol_type = other DNA
ccgttacgcgctgctggagatcccatcagataaagtgccgcgctttgtgaatttaccgccagaagcgccacgtcg

SEQ ID NO: 197902 - DNA, 75 bp, synthetic construct
  source 1..75: mol_type = other DNA
atgatgccgcgttacaggcgctgcgcaaaaaaaggtctgtgtgatttagcaagtgaaacaccagagtttagcgac

SEQ ID NO: 197903 - DNA, 75 bp, synthetic construct
  source 1..75: mol_type = other DNA
gccttgccgattttactgcgccaggggcggcctgcggcgaacgcgccgatgtggtactggtttgccactgaacaa

SEQ ID NO: 197904 - DNA, 75 bp, synthetic construct
  source 1..75: mol_type = other DNA
ggcgaaaggccaccactttccggatgtcacacttgtggcgttactggacgtggacggcgcgctgttttctgccga

SEQ ID NO: 197905 - DNA, 75 bp, synthetic construct
  source 1..75: mol_type = other DNA
ttttgaattgccaaccttcgtttgtgtgctgtttgttggcgtgattttaagcaatggcttgtcaatgatgggctt

SEQ ID NO: 197906 - DNA, 75 bp, synthetic construct
  source 1..75: mol_type = other DNA
acaacagcgcgagcaacaccacgggcatcgtggtgttgtgttgtggtttaccggcctctctggttcagggaaatc

SEQ ID NO: 197907 - DNA, 75 bp, synthetic construct
  source 1..75: mol_type = other DNA
tctggcatagccatccggtgactccacaacagcgcgagcaacaccacgggcatcgtggtgttgtgttgtggttta

SEQ ID NO: 197908 - DNA, 75 bp, synthetic construct
  source 1..75: mol_type = other DNA
aaccaaccagagccgctggtttggcctgccactggatgaacttattcccgctgtaatctgtattggctggggaat

SEQ ID NO: 197909 - DNA, 75 bp, synthetic construct
  source 1..75: mol_type = other DNA
cgcttgttgccgcaacgctgacgttgctgctcgggcgcaagttggtccattccgtctcctttttgaagaaataca

SEQ ID NO: 197910 - DNA, 75 bp, synthetic construct
  source 1..75: mol_type = other DNA
cttgattgtggttgttggtctgttggtgatgcaaaatgccattggcattggtatggctagcctgttagggcttga

SEQ ID NO: 197911 - DNA, 75 bp, synthetic construct
  source 1..75: mol_type = other DNA
aatcgtcggggttttgcgcctgcgttgctgtgccatgattgtggctggattgccgaatgtccgcgctgcgatcac

SEQ ID NO: 197912 - DNA, 75 bp, synthetic construct
  source 1..75: mol_type = other DNA
tagcggcggaagaagccgtaaaccgaatccccaccgtggtgggacctcccgggccaaagggggaacaggggcccg

SEQ ID NO: 197913 - DNA, 75 bp, synthetic construct
  source 1..75: mol_type = other DNA
cgtgtatgaagattctcaaccggggacgctgaatgattttctcggtgccatgtcggaggatgacgtccggccgga

SEQ ID NO: 197914 - DNA, 75 bp, synthetic construct
  source 1..75: mol_type = other DNA
actgaagcatcaaaaagtgctgccgctgcagagtcctcaaaaagcgcggcggctaccagtgccggtgcggcgaaa

SEQ ID NO: 197915 - DNA, 75 bp, synthetic construct
  source 1..75: mol_type = other DNA
cgttatccggatcttgatgccaaagggcgtgagcgggcgattgcgaaagatcttggcgcggtattcctcgtcggg

SEQ ID NO: 197916 - DNA, 75 bp, synthetic construct
  source 1..75: mol_type = other DNA
cgtacacagccaggagttactgtctcgttatccggatcttgatgccaaagggcgtgagcgggcgattgcgaaaga

SEQ ID NO: 197917 - DNA, 75 bp, synthetic construct
  source 1..75: mol_type = other DNA
gtcagtacagcgttattctgttggtggaagggttcccgccgtcacatgccgggaccatcaccgtgtatgaagatt

SEQ ID NO: 197918 - DNA, 75 bp, synthetic construct
  source 1..75: mol_type = other DNA
ctggtttgccaccgagcacggtcaggcggtagatatcaacagcctgaaacgttcgccaaagcaacaacaggcact

SEQ ID NO: 197919 - DNA, 75 bp, synthetic construct
  source 1..75: mol_type = other DNA
gctatcatgcccgcgacctggcggtatatcgcgcgcacagcgagcaaatcccgatcattctcggttcggcaacgc

SEQ ID NO: 197920 - DNA, 75 bp, synthetic construct
  source 1..75: mol_type = other DNA
cactactacacgctgcatcaggcgcaacagcatttgcgctgtcaccactgtgacagccaacgcccggtgccgcgc

SEQ ID NO: 197921 - DNA, 75 bp, synthetic construct
  source 1..75: mol_type = other DNA
caggcccacagggaccgaaaggagaaacaggtgcggctggcccggtgggggcaaccggacctcagggaccaaagg

SEQ ID NO: 197922 - DNA, 75 bp, synthetic construct
  source 1..75: mol_type = other DNA
cagcaatctgtattggctggggtatcacaacatcgaaatatctgttcggtattggtgcagcggttctggtttatt

SEQ ID NO: 197923 - DNA, 75 bp, synthetic construct
  source 1..75: mol_type = other DNA
atggtgccggaaatcggcctgacaccacaaactatcgcccgttttcgtgaacgctttaatgcgcccgtagaagtt

SEQ ID NO: 197924 - DNA, 75 bp, synthetic construct
  source 1..75: mol_type = other DNA
catataaatcaaacagactgacgccggttttcattatagcttatgtcggactgggatatctgttctgttttacaa

SEQ ID NO: 197925 - DNA, 75 bp, synthetic construct
  source 1..75: mol_type = other DNA
aacacaagagttccggtgcatttggtggcacgaacacgagcattttccctaatggttataccgcgatttcaaatc

SEQ ID NO: 197926 - DNA, 75 bp, synthetic construct
  source 1..75: mol_type = other DNA
cgcatccagtacggatttggggacgaaaaccacatcatcgtttgattacggcactaaatccacgaataacactgg

SEQ ID NO: 197927 - DNA, 75 bp, synthetic construct
  source 1..75: mol_type = other DNA
tcagataccgttccgtctggttatgccctgatgcaggggcagacttttgacaaatctgcctacccgaaacttgca

SEQ ID NO: 197928 - DNA, 75 bp, synthetic construct
  source 1..75: mol_type = other DNA
tccgcgaaaaatatttatttccgccagcggtgtgcatgatcactttggcgtcagctggtttaaccccgaagatct

SEQ ID NO: 197929 - DNA, 75 bp, synthetic construct
  source 1..75: mol_type = other DNA
atgtttaaaccgcacgttaccgttgcttgcgtggtgcacgcagaaggcaaatttttagtcgttgaagagacgatt

SEQ ID NO: 197930 - DNA, 75 bp, synthetic construct
  source 1..75: mol_type = other DNA
ataccagtacagatggtaatcatagccactcactgtccggcacagcagcatctgcaggtgcacacgcgcatactg

SEQ ID NO: 197931 - DNA, 75 bp, synthetic construct
  source 1..75: mol_type = other DNA
gctgagcgttgggacggtaaactgcccgataccatgatccccggcagcacagttccgtttatctctactaagtaa

SEQ ID NO: 197932 - DNA, 75 bp, synthetic construct
  source 1..75: mol_type = other DNA
tgccgaatcaggcgcttacaatgtcaaccgctctggcgacagctatattctggttaacttctataccggagtcgg

SEQ ID NO: 197933 - DNA, 75 bp, synthetic construct
  source 1..75: mol_type = other DNA
gacgccgacgaatcagcgctgatttttattgagtacctggtgcgtcgaaatagtcagcagtgggcagagctggag

SEQ ID NO: 197934 - DNA, 75 bp, synthetic construct
  source 1..75: mol_type = other DNA
ggatttggggacgaaaaccacatcgtcgtttgattacggcactaaatccacgaataacaccggggcgcatacgca

SEQ ID NO: 197935 - DNA, 75 bp, synthetic construct
  source 1..75: mol_type = other DNA
gggcagaagtttatacctcgaaaaatcttccaccagaaagctacccagttggcgcaccaatcccgtggccatcag

SEQ ID NO: 197936 - DNA, 75 bp, synthetic construct
  source 1..75: mol_type = other DNA
aagagttccggtgcatttggtggcacgaacacgagcattttccctaatggttataccgcgatttcaaatccaagc

SEQ ID NO: 197937 - DNA, 75 bp, synthetic construct
  source 1..75: mol_type = other DNA
ttataagcatgatcccggatgcaatcaccttcaccggcatctgttactcacatcgcgtctttgttgcgttgaatg

SEQ ID NO: 197938 - DNA, 75 bp, synthetic construct
  source 1..75: mol_type = other DNA
ttaggcgtgaaggcgctaatcgtcatgccaaccgccaccgctgatatcaaagttgatgcggtacgcggcttcggc

SEQ ID NO: 197939 - DNA, 75 bp, synthetic construct
  source 1..75: mol_type = other DNA
gggcgtccatcgcatccgttgcaggaacgcctctacagcttcgaattcccggaatcgccgggcgcgctgctgcgc

SEQ ID NO: 197940 - DNA, 75 bp, synthetic construct
  source 1..75: mol_type = other DNA
ctcaacacgctgggtacgcactggaatatctctttgttccattatcgcagtcatggcaccgattacgggcgcgta

SEQ ID NO: 197941 - DNA, 75 bp, synthetic construct
  source 1..75: mol_type = other DNA
gggtacgctggcgctggaactgctccagcaggatgctcatctcgaccgcgtatttgttccggtcggcggcggcgg

SEQ ID NO: 197942 - DNA, 75 bp, synthetic construct
  source 1..75: mol_type = other DNA
caacgtgaacttccacggcctgcgctacgtctcggaacgttgtgagctgggtgaacagcgtgaagcgttgctggc

SEQ ID NO: 197943 - DNA, 75 bp, synthetic construct
  source 1..75: mol_type = other DNA
aacgcctctacagcttcgaattcccggaatcaccgggcgcgctgttgcgcttcctcaacacgctgggtacgcact

SEQ ID NO: 197944 - DNA, 75 bp, synthetic construct
  source 1..75: mol_type = other DNA
agcagcgtctgtatattctgcaagaacgtatcaatcagcaagcgatggcatggagccgccggatgctcggcacca

SEQ ID NO: 197945 - DNA, 75 bp, synthetic construct
  source 1..75: mol_type = other DNA
tggagtacaaagcgatcatccgtaaactgcgtgcggcgcgtccggatattcagatcagttctgacttcatcgttg

SEQ ID NO: 197946 - DNA, 75 bp, synthetic construct
  source 1..75: mol_type = other DNA
tgaagatgaaatgggtctgcgcgtggcagaaacaccggaatcggtgattgcccgtacccgcaaagaaaacgacct

SEQ ID NO: 197947 - DNA, 75 bp, synthetic construct
  source 1..75: mol_type = other DNA
gaaaccttccgtttatgccaggagtatctcgacgacatcatcaccgtcgatagcgatgccatctgtgcggcgatg

SEQ ID NO: 197948 - DNA, 75 bp, synthetic construct
  source 1..75: mol_type = other DNA
tgctccacggcgcgaactttgatgaagcgaaagccaaagcgatcgaactgtcacagcagcaggggttcacctggg

SEQ ID NO: 197949 - DNA, 75 bp, synthetic construct
  source 1..75: mol_type = other DNA
gtgctccggaaggtgccgaatatttaagagcagtgctgcgcgcgccggtttacgaggcggcgcaggttacgccgc

SEQ ID NO: 197950 - DNA, 75 bp, synthetic construct
  source 1..75: mol_type = other DNA
cccgacccagcctcatgacagcgatatcgactgctgccgttgggtcagcgccgaagaaattttacaggcgtcaaa

SEQ ID NO: 197951 - DNA, 75 bp, synthetic construct
  source 1..75: mol_type = other DNA
tctgcgttcgccgctggtggcggaaagtattcgttgttatcaaagcgggcaacgctatccgctggagatgattgg

SEQ ID NO: 197952 - DNA, 75 bp, synthetic construct
  source 1..75: mol_type = other DNA
tgcaaagggcgcaaatcagtgtgcgcgggcaggggataaattaccggatttacttgatgaatatatcagagcaac

SEQ ID NO: 197953 - DNA, 75 bp, synthetic construct
  source 1..75: mol_type = other DNA
tccagccgtttatttaccagcgatgaagatgctttctttgttgattctggccttagctatgatggaagaaatacg

SEQ ID NO: 197954 - DNA, 75 bp, synthetic construct
  source 1..75: mol_type = other DNA
aatgttatttatgaaattgccacgccatatactgaagccgatctgttccgaattaaattcacgcaaagcgccgac

SEQ ID NO: 197955 - DNA, 75 bp, synthetic construct
  source 1..75: mol_type = other DNA
taccggcgatgaagtgtcaaaaaaattacgttgcgacattatttctgtaaccagcactactgctgtagtggttcg

SEQ ID NO: 197956 - DNA, 75 bp, synthetic construct
  source 1..75: mol_type = other DNA
tggctgtatgtggaagatcacgcccgcgcgctgtattgcgtggcgaccaccgggaaagtcggtgaaacctataat

SEQ ID NO: 197957 - DNA, 75 bp, synthetic construct
  source 1..75: mol_type = other DNA
gatcgctttgcctttgagaaagttgatgtttgtgatcgggcagagttggcgcgcgtttttgcccggcatcaacct

SEQ ID NO: 197958 - DNA, 75 bp, synthetic construct
  source 1..75: mol_type = other DNA
gtgccgggtttattggctcggcgctggtgcgttatatcatcaacgaaacccgtgatgcggtagtggttgtcgata

SEQ ID NO: 197959 - DNA, 75 bp, synthetic construct
  source 1..75: mol_type = other DNA
attgcaaagggcgcaaatcagtgtgcgcgggcgggggataaattaccggatttactcgatgaatatatcagagca

SEQ ID NO: 197960 - DNA, 75 bp, synthetic construct
  source 1..75: mol_type = other DNA
ggctgccagaacacgctgctcaaccagctgtgtgccgatgcctgcggtattcgggtgatcgccgggcctgttgaa

SEQ ID NO: 197961 - DNA, 75 bp, synthetic construct
  source 1..75: mol_type = other DNA
gatcgctttgcctttgagaaagttgatatctgcgatcgggcagcgttggaacgcgtttttatcgaacatcagccc

SEQ ID NO: 197962 - DNA, 75 bp, synthetic construct
  source 1..75: mol_type = other DNA
aacgccagaagggtttactttactcaacggcggcccgaaatacagaagagcattcctcgactggggatgctttca

SEQ ID NO: 197963 - DNA, 75 bp, synthetic construct
  source 1..75: mol_type = other DNA
attgtccgtcagttgccaactcaactggagaacgttttcggccaatataccgccatcagcgccgtacaggatcgt

SEQ ID NO: 197964 - DNA, 75 bp, synthetic construct
  source 1..75: mol_type = other DNA
gtaaaagttgccgagccggggctgggttttaagatcccttttatggaaagcgtagagaaaatttccacgcgtaat

SEQ ID NO: 197965 - DNA, 75 bp, synthetic construct
  source 1..75: mol_type = other DNA
gggtcagcgtgtgggtctgcccgttgcttatcgcgatagccgcacccatggcctgatgacgcaggcacaacagca

SEQ ID NO: 197966 - DNA, 75 bp, synthetic construct
  source 1..75: mol_type = other DNA
cattccgcccgcaaaaacctcttgccatctctattggcgttctggccattgtgatactgccctttctctcgtatt

SEQ ID NO: 197967 - DNA, 75 bp, synthetic construct
  source 1..75: mol_type = other DNA
tggagaacgttttcggccaatataccgccatcagcgcggtacaggatcgtacaaaactggttcaggatctgcaaa

SEQ ID NO: 197968 - DNA, 75 bp, synthetic construct
  source 1..75: mol_type = other DNA
cctaaccactgcagagcgttgggacggtaagctacccgataccatgatccccggcagcacagttccgtttatctc

SEQ ID NO: 197969 - DNA, 75 bp, synthetic construct
  source 1..75: mol_type = other DNA
atgatataatagacaccgtactacctaaaccaatagcgtcagtggctaaagtcgccaagaaagccattgtttctg

SEQ ID NO: 197970 - DNA, 75 bp, synthetic construct
  source 1..75: mol_type = other DNA
tattccgatagcaacccgagcaattattcgtgccggtagaggtcatcgctattggtcggggtttgatcagagcat

SEQ ID NO: 197971 - DNA, 75 bp, synthetic construct
  source 1..75: mol_type = other DNA
ggcgatggcattgtccagtacgcttgattccattccgttatccatgcagcgacagttcccggatttaacgccacg

SEQ ID NO: 197972 - DNA, 75 bp, synthetic construct
  source 1..75: mol_type = other DNA
atctggccacctttacccctaatcctgacagtgaaattgcccactatgtggcgcaatttcgctccacacgacaga

SEQ ID NO: 197973 - DNA, 75 bp, synthetic construct
  source 1..75: mol_type = other DNA
acgccaggtgaacgcgtcgcagagcttgaggccgttgtggatcagcgtaacggagagtgtgaccgtttgatcaac

SEQ ID NO: 197974 - DNA, 75 bp, synthetic construct
  source 1..75: mol_type = other DNA
caggaacttaaaaccaaaacactgtgcatcggaaagcgtgtgtatcgggtagttcatgaaacaaaggtgaaaaaa

SEQ ID NO: 197975 - DNA, 75 bp, synthetic construct
  source 1..75: mol_type = other DNA
caacaacatcaagcctgactactgcaatgctaacggccttgagatgtgggatgagagccttactgatgaagattt

SEQ ID NO: 197976 - DNA, 75 bp, synthetic construct
  source 1..75: mol_type = other DNA
atcttataattaatttgtttgaaggggagtgttatgatcctgatgactttgaacccgatgatgattttaatgctc

SEQ ID NO: 197977 - DNA, 75 bp, synthetic construct
  source 1..75: mol_type = other DNA
ttcctgaagatacagacgatccagccttgcccggatatattcttttaatggatgagccagaaaatgcgttacacc

SEQ ID NO: 197978 - DNA, 75 bp, synthetic construct
  source 1..75: mol_type = other DNA
aggcagcatcagccggagagttaaaagcagagcaactgctctgcttcccctgtttattgctggctccaaactggt

SEQ ID NO: 197979 - DNA, 75 bp, synthetic construct
  source 1..75: mol_type = other DNA
ttgaggagttctctgcacaagggttcgctcgcgccagcatcagcaatatcagcaagcgcgcaggagtagctaaag

SEQ ID NO: 197980 - DNA, 75 bp, synthetic construct
  source 1..75: mol_type = other DNA
gtggcaaaacgtaaactttccattaaagagtttcagagaagcttacaggaatatatcgccaacctccgccagacc

SEQ ID NO: 197981 - DNA, 75 bp, synthetic construct
  source 1..75: mol_type = other DNA
tagcggttgatattcgtaaatcgtcaccaacttttggcaaatgggttggggtgaatttatctgctgagaataagc

SEQ ID NO: 197982 - DNA, 75 bp, synthetic construct
  source 1..75: mol_type = other DNA
gtgaatttatctgctgagaataagcgccagttgtggatacctgaaggattcgcacatgggtttttggtgctgagt

SEQ ID NO: 197983 - DNA, 75 bp, synthetic construct
  source 1..75: mol_type = other DNA
gattttgccggaaagcccgcgcaaaacgtccctgccgttgcagatgcctttgctgaccctacatgacgccaacag

SEQ ID NO: 197984 - DNA, 75 bp, synthetic construct
  source 1..75: mol_type = other DNA
cactcttgcgttgactcccttagtgaaagagttgaaggctctggagtgtaataaagagtcacaaatatcaaaagt

SEQ ID NO: 197985 - DNA, 75 bp, synthetic construct
  source 1..75: mol_type = other DNA
cggcggcactggatactttccgtggcgatatcgaacagatcccatcgatgtattcagcactgaaataccagggca

SEQ ID NO: 197986 - DNA, 75 bp, synthetic construct
  source 1..75: mol_type = other DNA
tcggggaagcgacgaagttttcccagtatctgctggactccgacaaacgctatcgggtgattgcgcgtcttggac

SEQ ID NO: 197987 - DNA, 75 bp, synthetic construct
  source 1..75: mol_type = other DNA
tccgcaagtctgaacggtaatgcattaacagcaacaaagctgcaaacgccaagacgggtttctggtgttgagttt

SEQ ID NO: 197988 - DNA, 75 bp, synthetic construct
  source 1..75: mol_type = other DNA
cattcttgcccggctgacaacactgccacaggtgctgggcgatcatgcgaaaaaaggcacgctacaggcacagtt

SEQ ID NO: 197989 - DNA, 75 bp, synthetic construct
  source 1..75: mol_type = other DNA
gattcatttatcagactgatgttatcattctcaattcccatggttgtcggtatatttttatgtgatatggggttt

SEQ ID NO: 197990 - DNA, 75 bp, synthetic construct
  source 1..75: mol_type = other DNA
gccggtaaaaagtttgatagcaatctttatattgttattagttattcatgttttccctgattttattacggcaaa

SEQ ID NO: 197991 - DNA, 75 bp, synthetic construct
  source 1..75: mol_type = other DNA
gaatgagtggctggcagagaaaggtgtagggaaggtgcgaataagcaggtcatttcttcccaagctgactcgctg

SEQ ID NO: 197992 - DNA, 75 bp, synthetic construct
  source 1..75: mol_type = other DNA
gcccagttgatggagcttctggaagatgaagagctgggacggatggctgatgagcgaagcggagaaaaggttata

SEQ ID NO: 197993 - DNA, 75 bp, synthetic construct
  source 1..75: mol_type = other DNA
atgccgtgctgattcgccagcaaattcagtcattatgtgccgccgacccgctgctttcagcgttttcgttgctga

SEQ ID NO: 197994 - DNA, 75 bp, synthetic construct
  source 1..75: mol_type = other DNA
gcgcaggaacggcatcaacaaaggccactgaagcctcaaaaagtgctgccgctgcagagtcctcaaaaagcgcgg

SEQ ID NO: 197995 - DNA, 75 bp, synthetic construct
  source 1..75: mol_type = other DNA
cggaatacgtgcgcaattttatgacgcaataccccggttcgcctttatacgtccgcaaggtgtggaaaaacgaga

SEQ ID NO: 197996 - DNA, 75 bp, synthetic construct
  source 1..75: mol_type = other DNA
acgaacgcatcctcgagcgccagtagcgcagcttcctcggcaacggcggcaggaaattccgcgaaggcggcaaaa

SEQ ID NO: 197997 - DNA, 75 bp, synthetic construct
  source 1..75: mol_type = other DNA
ttctctgctgctggcgattattgtggtggcgtttgccgggccgcatctgacacacgccatgtttgccgtctggct

SEQ ID NO: 197998 - DNA, 75 bp, synthetic construct
  source 1..75: mol_type = other DNA
tcgatttacagcatggtgcatgacgaactggaaaaagagtacgttatcgccgcccgtctggatggcgcatcaacg

SEQ ID NO: 197999 - DNA, 75 bp, synthetic construct
  source 1..75: mol_type = other DNA
gcacactcgcacgttgatgggcgcaggtttaatacaagcacttttaaagacacctatcagtatggttctacagct

SEQ ID NO: 198000 - DNA, 75 bp, synthetic construct
  source 1..75: mol_type = other DNA
tcagggaagacatcatcagatggagcacatacccactcattgtctggtactgccgcatctgcaggggcacacgca

SEQ ID NO: 198001 - DNA, 75 bp, synthetic construct
  source 1..75: mol_type = other DNA
agacatccgaaacgaatgcgaaagcgtcggaaacccgtgcagaatcctcaaaaacggcagccgcatcgtccgcca

SEQ ID NO: 198002 - DNA, 75 bp, synthetic construct
  source 1..75: mol_type = other DNA
tcactgtccggcactgctgcaagcgcaggtgcacacgcacatactgtcggtattggtgctcatacgcactcggtt

SEQ ID NO: 198003 - DNA, 75 bp, synthetic construct
  source 1..75: mol_type = other DNA
aacggccgtcggcagaaaaccgcgcttgatgactggttgcgcgatcatgaaatcaatgaattgatcgttatgggt

SEQ ID NO: 198004 - DNA, 75 bp, synthetic construct
  source 1..75: mol_type = other DNA
tcgatatacaaaatgatttctgtgctggtggcgcgcttgctgttccagaaggcgacagcactgtagatgtcgcca

SEQ ID NO: 198005 - DNA, 75 bp, synthetic construct
  source 1..75: mol_type = other DNA
caggactggcatccggcgaatcacggcagttttgccagtcagcacggtgtagagccttatacgccaggccaactc

SEQ ID NO: 198006 - DNA, 75 bp, synthetic construct
  source 1..75: mol_type = other DNA
gatgatgttccggaagaagagaagaagcagcgtctgtatattctgcaagaacgtattaatcagcaagcgatggca

SEQ ID NO: 198007 - DNA, 75 bp, synthetic construct
  source 1..75: mol_type = other DNA
gtctccatcatggaaggctgcaataaatattgcacctactgcgtggtgccttacacccgtggtgaagaggtaagc

SEQ ID NO: 198008 - DNA, 75 bp, synthetic construct
  source 1..75: mol_type = other DNA
attatttttgggccgcaaacgctgcaccgtctgccggagatgatcaactccgtgcgcggcgaccgcagcccggtt

SEQ ID NO: 198009 - DNA, 75 bp, synthetic construct
  source 1..75: mol_type = other DNA
gtcgtttgattacggcactaaatctacgaataacaccggggcacatacacacagtgtgagcggctctacaaactc

SEQ ID NO: 198010 - DNA, 75 bp, synthetic construct
  source 1..75: mol_type = other DNA
gaccggcgggagagcggggagctcaggggcctcagggtgtagctggtcctgtcggcccggcaggcgaaccgggag

SEQ ID NO: 198011 - DNA, 75 bp, synthetic construct
  source 1..75: mol_type = other DNA
cctcagggacctgctggcgaaaccggacccgcgggtgaacccgggccaagaggtgagcccggtccacagggactt

SEQ ID NO: 198012 - DNA, 75 bp, synthetic construct
  source 1..75: mol_type = other DNA
cgctgagcgattgcgcgctctcgctgtcggagaaagatctgcaggcacatactctggccactgcagaagtatata

SEQ ID NO: 198013 - DNA, 75 bp, synthetic construct
  source 1..75: mol_type = other DNA
acggcggcatctcagagcaaaactactgctgaatccgctgcgacccgtgcggaagctgctgctgatcgtgctgaa

SEQ ID NO: 198014 - DNA, 75 bp, synthetic construct
  source 1..75: mol_type = other DNA
tcacaacaatcagcagccacttctgcatccaccgcgaccacgaaagcgtcagaagctgccacctcagcccgggat

SEQ ID NO: 198015 - DNA, 75 bp, synthetic construct
  source 1..75: mol_type = other DNA
atgctgcggcgattcgccagcagctccagtcgttatgtgcggcagagccgctgctgtcagcattttcgctgctga

SEQ ID NO: 198016 - DNA, 75 bp, synthetic construct
  source 1..75: mol_type = other DNA
gtggcctgcactaccagctggcgccgcatgcgcagggtaaactggtgcgttgcgtggccggcgaagtgttcgacg

SEQ ID NO: 198017 - DNA, 75 bp, synthetic construct
  source 1..75: mol_type = other DNA
cgcacgttaatcagtttatggacgctggatggttcaccgctgcggaaggaggatattttcgccctttttgcggtg

SEQ ID NO: 198018 - DNA, 75 bp, synthetic construct
  source 1..75: mol_type = other DNA
aaaccacatcgtcgtttgattacggcactaaatccacgaataacaccggggcgcatacccatagtgttagcggta

SEQ ID NO: 198019 - DNA, 75 bp, synthetic construct
  source 1..75: mol_type = other DNA
ataaaacaacgaacttttattgtaaagaagctgaggctggtataatctggaatgatccacaaattaatattaaat

SEQ ID NO: 198020 - DNA, 75 bp, synthetic construct
  source 1..75: mol_type = other DNA
tatgtcccctacgtttgggcattgggttggtgtacggttgtcagcagaaaataaacgtcaactttggatcccaga

SEQ ID NO: 198021 - DNA, 75 bp, synthetic construct
  source 1..75: mol_type = other DNA
gacacggtgcagtttgtctataaggcgacgaactactacgcgccgcagtcagaacggagcatcatctggaacgat

SEQ ID NO: 198022 - DNA, 75 bp, synthetic construct
  source 1..75: mol_type = other DNA
tggtgagcacggaaaacaacttgatggggtgattaaatatcttgactcaacaaggcaggcggcaacagcagcggc

SEQ ID NO: 198023 - DNA, 75 bp, synthetic construct
  source 1..75: mol_type = other DNA
ctctaacctcatcaattagccctccagtggcaaaggtagcggcagtcggcactgcgattgggttgggtggtagag

SEQ ID NO: 198024 - DNA, 75 bp, synthetic construct
  source 1..75: mol_type = other DNA
caactaattattatagtccaaaacatgagcgtagcataatatggaatgatccgatattaaatattcattggccga

SEQ ID NO: 198025 - DNA, 75 bp, synthetic construct
  source 1..75: mol_type = other DNA
atgagcattattaaagaatttcgcgaatttgcaatgcgcggaaatgtggtggatttggcagtgggtgtcattatc

SEQ ID NO: 198026 - DNA, 75 bp, synthetic construct
  source 1..75: mol_type = other DNA
gcagccgttggtggttaccgtgatgagcaggccattgcggtgggcgtgggctaccgtttcacagagaatgtggca

SEQ ID NO: 198027 - DNA, 75 bp, synthetic construct
  source 1..75: mol_type = other DNA
gggatggacttaaactgcctgattatagggctcgtttttttatagaagtttggaaggagattttgtacgtcaaca

SEQ ID NO: 198028 - DNA, 75 bp, synthetic construct
  source 1..75: mol_type = other DNA
cacgagcgatgaaaatctcaaagccgtgataaatctgcgtcttgctcgcgttcaggtacagctcaagcaggctga

SEQ ID NO: 198029 - DNA, 75 bp, synthetic construct
  source 1..75: mol_type = other DNA
ttggctggcgctactggaacagccatcaggttgattctgcacgctccgcttctcttgcctatcaaaatgcggtta

SEQ ID NO: 198030 - DNA, 75 bp, synthetic construct
  source 1..75: mol_type = other DNA
ggcgcggcattcggtaagatcgtctcttcactggttgctgatatcatcatgccgccactgggtttattaattggc

SEQ ID NO: 198031 - DNA, 75 bp, synthetic construct
  source 1..75: mol_type = other DNA
ccccacaggaaggtattgtcggtgtacggattgagcattttcagggggcgctggataacggccctcattatccgc

SEQ ID NO: 198032 - DNA, 75 bp, synthetic construct
  source 1..75: mol_type = other DNA
gctggacgcatctgtggcataacgatgaaacagaaggcagccgttggcataaacagcagcatgattttcttagtt

SEQ ID NO: 198033 - DNA, 75 bp, synthetic construct
  source 1..75: mol_type = other DNA
atcgctggggaaaatggttttcctgcatggtctgaaattccaccaccaacacatgaggaacagattgccgcagcc

SEQ ID NO: 198034 - DNA, 75 bp, synthetic construct
  source 1..75: mol_type = other DNA
gtcttttccagccatacagtgttggaaaatttaacgcgacagcagccgttggtggttaccgtgatgagcaggcca

SEQ ID NO: 198035 - DNA, 75 bp, synthetic construct
  source 1..75: mol_type = other DNA
atacaaacattctgaccattgccttcgtctctaccgatggttcgatggataaacaggatattgccgattatgttg

SEQ ID NO: 198036 - DNA, 75 bp, synthetic construct
  source 1..75: mol_type = other DNA
atggcttcttaaccatattccagacaccactgagcagtttatggtcagatctgaaattgatggcgctgaagcgaa

SEQ ID NO: 198037 - DNA, 75 bp, synthetic construct
  source 1..75: mol_type = other DNA
gaaaaattcgctgcggaaaataaaaatacctacggtgcgctggcttctttggaacttgcgcagcaatttgttgac

SEQ ID NO: 198038 - DNA, 75 bp, synthetic construct
  source 1..75: mol_type = other DNA
ggtgagataggtggtgtatacagagatgcccgtgctcatactgacagtcaggtcacagcagtacgtgatgaactc

SEQ ID NO: 198039 - DNA, 75 bp, synthetic construct
  source 1..75: mol_type = other DNA
agcagtacgtgatgaactgaaggcagagggagacagtctgcgtggtgagataggcggtgtatacagagatgcccg

SEQ ID NO: 198040 - DNA, 75 bp, synthetic construct
  source 1..75: mol_type = other DNA
gcggtcgatgggaaagtccaggcgtatgaatttcgtcctgatctaccggagcttttcccacacccaagcttagcg

SEQ ID NO: 198041 - DNA, 75 bp, synthetic construct
  source 1..75: mol_type = other DNA
aaagccgccgaggagatcgagcaactcgtcaccgtcgcgcgtgaagaactccagcgccgcaaggccaaagagcag

SEQ ID NO: 198042 - DNA, 75 bp, synthetic construct
  source 1..75: mol_type = other DNA
gccgaggagatcgggcaactcatcaccgtcgcgcgtgaagaactccagcgtcgcaaggccaaagagcaggagtaa

SEQ ID NO: 198043 - DNA, 75 bp, synthetic construct
  source 1..75: mol_type = other DNA
aatcacaactgacaaccgtcagagtcccactagatgttatgcaagggatggaatccgttaagctggacggcgaaa

SEQ ID NO: 198044 - DNA, 75 bp, synthetic construct
  source 1..75: mol_type = other DNA
gtgaggcgttaaaagatgcggtagcacgggccgatgtggtgctcgactgtaccgacaatatggcgactcgccagg

SEQ ID NO: 198045 - DNA, 75 bp, synthetic construct
  source 1..75: mol_type = other DNA
caacacgccgcttattaccgccagcgcggtcggatttggcggtcagttgatggtattaacgccgccctgggagca

SEQ ID NO: 198046 - DNA, 75 bp, synthetic construct
  source 1..75: mol_type = other DNA
caacaatttcccattgaagcgatgtgtcaggtatttggtgtatccaagagcggttattacaactgggtacagcat

SEQ ID NO: 198047 - DNA, 75 bp, synthetic construct
  source 1..75: mol_type = other DNA
gaatttttaatgaaggcggcgcgggcgcaaaaaattacgcaattgtagatttgggtaacgggcttattgatatta

SEQ ID NO: 198048 - DNA, 75 bp, synthetic construct
  source 1..75: mol_type = other DNA
atggtagtgtccgctattgccagtacacctcacagaaaaacccaacgttactctaaagagttcaaagccgaagct

SEQ ID NO: 198049 - DNA, 75 bp, synthetic construct
  source 1..75: mol_type = other DNA
tgttcgacggtaaatcgagccagtggcgcagtctgacgttgcgccgcgccagcggttgcccggtatgtggaggat

SEQ ID NO: 198050 - DNA, 75 bp, synthetic construct
  source 1..75: mol_type = other DNA
acgatcaaaaatcctttccccggggcacgtatgccacacacctgggcggactctggcgggcgtatgaaaaaacgc

SEQ ID NO: 198051 - DNA, 75 bp, synthetic construct
  source 1..75: mol_type = other DNA
tggtgaaggaggctgtaagccatatccctgttccgcgcgacggtcgtgactatgatcccgatgttctgcagaagg

SEQ ID NO: 198052 - DNA, 75 bp, synthetic construct
  source 1..75: mol_type = other DNA
ggccagcgtacggaaaaaacattttccctgccggtgatgctctaccgcggtgtgttcagagccggtgaaacctac

SEQ ID NO: 198053 - DNA, 75 bp, synthetic construct
  source 1..75: mol_type = other DNA
ggctccgcaggacgggcgtgatgccacggctctggaaatactccccgccattgacgatcaaaaatcctttccccg

SEQ ID NO: 198054 - DNA, 75 bp, synthetic construct
  source 1..75: mol_type = other DNA
ttccccggggcacgtatgccacacacctgggaggattctggcgggcgtatgaaaaaacgcacgggatgcggggat

SEQ ID NO: 198055 - DNA, 75 bp, synthetic construct
  source 1..75: mol_type = other DNA
acgatcaaaaatcctttccccggggcacgtatgccacacacccgggtggactctggcgggcgtatgaaaaaacgc

SEQ ID NO: 198056 - DNA, 75 bp, synthetic construct
  source 1..75: mol_type = other DNA
aaggcggtgaatgatgctgtcgcaaatattccgctgccggcagacggtaaaagtatcaccccggatgatgtgcat

SEQ ID NO: 198057 - DNA, 75 bp, synthetic construct
  source 1..75: mol_type = other DNA
ccaaaacttcgccggggacgacatatacgccaataaaagtgagttgctgtaatccagtggctaaagccattgaga

SEQ ID NO: 198058 - DNA, 75 bp, synthetic construct
  source 1..75: mol_type = other DNA
aaagtctcaccccggatgatgtgcgtccgatgcttgaacagatggtgaaggaggctgtaagccatatccctgttc

SEQ ID NO: 198059 - DNA, 75 bp, synthetic construct
  source 1..75: mol_type = other DNA
taccggcggacggcaaaagtattacccccgatgatgtgcgtccgatgcttgagcagatggtgaaagaggcggtaa

SEQ ID NO: 198060 - DNA, 75 bp, synthetic construct
  source 1..75: mol_type = other DNA
tccgatgcttgagcagatggtgaaagaggcggtaagccatattcctgttccgcgtgatggtcgtgattacgatcc

SEQ ID NO: 198061 - DNA, 75 bp, synthetic construct
  source 1..75: mol_type = other DNA
gacggcaaaaagtattacccccgatgatgtgcgtccgatgcttgaacagatggtggaaggaggcggtaagccata

SEQ ID NO: 198062 - DNA, 75 bp, synthetic construct
  source 1..75: mol_type = other DNA
ctggcgggcgtatgaaaaaacgcacgggatgcggggatgggaatgcctggttgacggggtggccgatattgacgt

SEQ ID NO: 198063 - DNA, 75 bp, synthetic construct
  source 1..75: mol_type = other DNA
ttcagggatttttctctgaaaacaacaacgatattcccgatgatgctttcgatattgaagatgctctttattatg

SEQ ID NO: 198064 - DNA, 75 bp, synthetic construct
  source 1..75: mol_type = other DNA
atcgctggggaaaatggttttcctgcatggattgatattccaccgccaactcatgaggaacaaattgccgcagcc

SEQ ID NO: 198065 - DNA, 75 bp, synthetic construct
  source 1..75: mol_type = other DNA
gctggattatctggacgcactggaactggttgatacctccagtgctctagatattgaatggcctacgcctccggc

SEQ ID NO: 198066 - DNA, 75 bp, synthetic construct
  source 1..75: mol_type = other DNA
gctggattatctggaagcactggacctggtggatacttccagtgcgccagatattgaatggcctacacctccggc

SEQ ID NO: 198067 - DNA, 75 bp, synthetic construct
  source 1..75: mol_type = other DNA
gctggattatctggaagcactggatctggtggatacctccagtgcgccagatattgaatggcctacacctccggc

SEQ ID NO: 198068 - DNA, 75 bp, synthetic construct
  source 1..75: mol_type = other DNA
gctggattatctggaagcactggaactggtggatacatccagtgcgccagatattgaatggcctactcctccggc

SEQ ID NO: 198069 - DNA, 75 bp, synthetic construct
  source 1..75: mol_type = other DNA
cgggcaacctctgccggatgatgccgacctgcgtaaagagcgcaacgacgaaatcccggaagcagcaaaagagat

SEQ ID NO: 198070 - DNA, 75 bp, synthetic construct
  source 1..75: mol_type = other DNA
ttctgtgcatcaggcagtgggagcactgagcggcggtaatcaacagaaaatcgtgttatcgaagtggctggagaa

SEQ ID NO: 198071 - DNA, 75 bp, synthetic construct
  source 1..75: mol_type = other DNA
tacgcccataaaagtgagttgttgtagtccagcggctaaagccattgagaaccccgtagttacctgttgcagtac

SEQ ID NO: 198072 - DNA, 75 bp, synthetic construct
  source 1..75: mol_type = other DNA
ggtacttgaacgtgtaaagtcaggaacctggcaaggagatctctttaggttagcagcattaacttggtccgtacc

SEQ ID NO: 198073 - DNA, 75 bp, synthetic construct
  source 1..75: mol_type = other DNA
cacagagaatgtggcaggaaaagttgcagttgctgcaggtgggtcatccgcatcgtggaatgctggtgtgaattt

SEQ ID NO: 198074 - DNA, 75 bp, synthetic construct
  source 1..75: mol_type = other DNA
attattgcaggcacatcggcagcggtgacgtatacagatgtaacagcgcttgcacttcaggatgagataaaggat

SEQ ID NO: 198075 - DNA, 75 bp, synthetic construct
  source 1..75: mol_type = other DNA
ccgacctggcaaaaagcttttccggcgtatgggcgctgagcagcgcccagctcaccgtcggcacgggtgaaattc

SEQ ID NO: 198076 - DNA, 75 bp, synthetic construct
  source 1..75: mol_type = other DNA
aattcgttcaagtctggggaaccgtgctaaagaaggcctggtggtcgattttattcagcaaacgaaccttgatga

SEQ ID NO: 198077 - DNA, 75 bp, synthetic construct
  source 1..75: mol_type = other DNA
tggaacaacggttccctgaccctgccagtattgaaagtgaaaaagagaagaaagacttcgttaaactgtttggtg

SEQ ID NO: 198078 - DNA, 75 bp, synthetic construct
  source 1..75: mol_type = other DNA
agaacgcgtcaaaccgttatacgatgaattcaaggcgaaagatgcacaatccgccaaaaaccttgagcaagtaga

SEQ ID NO: 198079 - DNA, 75 bp, synthetic construct
  source 1..75: mol_type = other DNA
cggaagcgactgtccgtcgtgatttccagtatattgtcaaccagtatccaggcatgatccgcggtcacggttgcc

SEQ ID NO: 198080 - DNA, 75 bp, synthetic construct
  source 1..75: mol_type = other DNA
gagagccgaatctacagagaaaatgctgaacgacgagttcagcaggctcggcgaatctgtaagcgaggctgtgac

SEQ ID NO: 198081 - DNA, 75 bp, synthetic construct
  source 1..75: mol_type = other DNA
tgccatccgtgatgaaaaagtcctgaaatttaaggtggattacaatgatgtgcgtccgcaatttaaggccataga

SEQ ID NO: 198082 - DNA, 75 bp, synthetic construct
  source 1..75: mol_type = other DNA
caataaaacattctggaatttaatcaaaaacagccaggaatgtcctacaaatacagataacgtattgaatgaatg

SEQ ID NO: 198083 - DNA, 75 bp, synthetic construct
  source 1..75: mol_type = other DNA
gcaacagacgcaggaccacaggcacacagggtaatcagccaccagtgggaggcgatgacccttacggtgacaata

SEQ ID NO: 198084 - DNA, 75 bp, synthetic construct
  source 1..75: mol_type = other DNA
gtggagtttgtgcaggacgggaacaggaaatttctggtccttccttacgggaagtcagcagaggtgatttccttt

SEQ ID NO: 198085 - DNA, 75 bp, synthetic construct
  source 1..75: mol_type = other DNA
cgtggcgctggtgccggaagatcgcaaaaaagagggggcggtgctggggctgtcgattcgcgacaacctgtcgct

SEQ ID NO: 198086 - DNA, 75 bp, synthetic construct
  source 1..75: mol_type = other DNA
taaatccgcaatataaaacgaaaaaacagactgtttttcaaaaaattagcgcatttattgagaagtttaagggag

SEQ ID NO: 198087 - DNA, 75 bp, synthetic construct
  source 1..75: mol_type = other DNA
gtaaagagagttttaacagcgaaaattccctgtttaagtatctgcaactgtttgtcatttctaacggcaccgata

SEQ ID NO: 198088 - DNA, 75 bp, synthetic construct
  source 1..75: mol_type = other DNA
gaagaggctgcaaggcgctatatccgcacatcactaaaacgggagtacgctaccgaaaatgggacggagttaaat

SEQ ID NO: 198089 - DNA, 75 bp, synthetic construct
  source 1..75: mol_type = other DNA
ggacctgcaaaatcagggctatgaatttatatccgtaaaatcacagtcagcgatgctggccaacgttcgggaaca

SEQ ID NO: 198090 - DNA, 75 bp, synthetic construct
  source 1..75: mol_type = other DNA
gctaaagagggcctggtggtcgattttattcagcaaacgaacctggatgatttgccggataaggccagtatcatt

SEQ ID NO: 198091 - DNA, 75 bp, synthetic construct
  source 1..75: mol_type = other DNA
caaactggcaccggatcagcagacgcatattccgatgcaggtctggatgtcaccgggctttatcgccgggaaaca

SEQ ID NO: 198092 - DNA, 75 bp, synthetic construct
  source 1..75: mol_type = other DNA
tgagaatggacagtgagcggcgcatgaaaacgctgggggatgcggtgaaaaatacgcttctcacgcccaatgagg

SEQ ID NO: 198093 - DNA, 75 bp, synthetic construct
  source 1..75: mol_type = other DNA
caaatgaggagcaaagcgccattggtgatattactgacgaaagctttgataccagtgcaatgaacagcagcgcga

SEQ ID NO: 198094 - DNA, 75 bp, synthetic construct
  source 1..75: mol_type = other DNA
attccaccaggagatatggttgaaatcatggagattgccatgcgcaaggctggcaattctccggtaactccggat

SEQ ID NO: 198095 - DNA, 75 bp, synthetic construct
  source 1..75: mol_type = other DNA
ctttaccgccacctttttccagaaacataccctgcttaatgtcttagtgaactacagcgtattcgatgttagcca

SEQ ID NO: 198096 - DNA, 75 bp, synthetic construct
  source 1..75: mol_type = other DNA
agaaactcaataacctgatgaaagccgaagctgacctgcccgtctatcagcagcaggttgtgtttatctttgatg

SEQ ID NO: 198097 - DNA, 75 bp, synthetic construct
  source 1..75: mol_type = other DNA
ctttaccgccactttcttccagaagcataccctgctgaatgttctgtttaattacagcgtgtttgacagcagcca

SEQ ID NO: 198098 - DNA, 75 bp, synthetic construct
  source 1..75: mol_type = other DNA
ttatgacgctactaaaaccttcggtaacatcgtcactttccgggatctggaacgctcaaccattgatgccataac

SEQ ID NO: 198099 - DNA, 75 bp, synthetic construct
  source 1..75: mol_type = other DNA
catactctgctgaatgttctggtgaactacagcgtttttgacagtagtcagacgctactggtgatgcgaccgtac

SEQ ID NO: 198100 - DNA, 75 bp, synthetic construct
  source 1..75: mol_type = other DNA
acgccattgcaggtgctgtacgggtgtcgggggatgccctgcgcggtgagataggagctgtctaccgtgatgctg

SEQ ID NO: 198101 - DNA, 75 bp, synthetic construct
  source 1..75: mol_type = other DNA
ggcggttggtggctgacccgaagttaaaaaccaccagcaagggaacaccaatgacgctggtgagtatggctgttc

SEQ ID NO: 198102 - DNA, 75 bp, synthetic construct
  source 1..75: mol_type = other DNA
ttagttggacgagcggcaatacagaaagtaatttctaaaaacctttcatcttcaaataacatacctactgcaaaa

SEQ ID NO: 198103 - DNA, 75 bp, synthetic construct
  source 1..75: mol_type = other DNA
agctctctggcggcaaccagcagaaagttatcctcgcgcgctgcatggcgctcaatccacgggtgttgattgtcg

SEQ ID NO: 198104 - DNA, 75 bp, synthetic construct
  source 1..75: mol_type = other DNA
agaacggcgaaacgcggcagggctggcaggttatcgcagacagtgtaatcagtgcgcgaacggcgcgaccgggcg

SEQ ID NO: 198105 - DNA, 75 bp, synthetic construct
  source 1..75: mol_type = other DNA
gcagacaggccgaagcactggaaaggcaccgcaagggtgaactcctgagcgtggcgggtaacatgcagatcagcc

SEQ ID NO: 198106 - DNA, 75 bp, synthetic construct
  source 1..75: mol_type = other DNA
cccggatgcgtggatacgtaaaggctccatcaataacgggcaatacctgtcggttgatatcggtgtgaacaacca

SEQ ID NO: 198107 - DNA, 75 bp, synthetic construct
  source 1..75: mol_type = other DNA
tgcggcggccagagcagcacttgcgccattatcgccaacactaagtactacgttgccatactgaaccgcaaatca

SEQ ID NO: 198108 - DNA, 75 bp, synthetic construct
  source 1..75: mol_type = other DNA
caggcagaaggaagcggagaaaatcacctcgtgtcttcactggatgccttagctaaggtcgaacaaatcggcatc

SEQ ID NO: 198109 - DNA, 75 bp, synthetic construct
  source 1..75: mol_type = other DNA
tgatagtatggcttcgggtcagatagctcaatattcttcaatgataagtgtaattgtaacgagttcagttacact

SEQ ID NO: 198110 - DNA, 75 bp, synthetic construct
  source 1..75: mol_type = other DNA
aatactggataaaatgtctgctttagcagcggaatccaatttgatgacgttgggattgatggctggattagcagg

SEQ ID NO: 198111 - DNA, 75 bp, synthetic construct
  source 1..75: mol_type = other DNA
tcttacggctggactgagtgcgataccttcgaagggtattacgattggtcgagaaacaaatggtgggcagttact

SEQ ID NO: 198112 - DNA, 75 bp, synthetic construct
  source 1..75: mol_type = other DNA
gcaggttatcgcagacagtgtaatcagtgccagaacggcgcgaccgggcggcaaaaaaaaggtcaacaggaccag

SEQ ID NO: 198113 - DNA, 75 bp, synthetic construct
  source 1..75: mol_type = other DNA
ggcggctggtggctgacccgcagttaaagaccaccagcaagggcacacaaatggctatggcaagcatggcggtcc

SEQ ID NO: 198114 - DNA, 75 bp, synthetic construct
  source 1..75: mol_type = other DNA
gtcatcgcatttggcaaacaggccgaccaactggcaggacatgagaaaggcaacgtaatcagcgtatccggcgtg

SEQ ID NO: 198115 - DNA, 75 bp, synthetic construct
  source 1..75: mol_type = other DNA
ggcggctggtggacgacccacaggtaaaacagaccagcaagggcacacccatgacgctggcacggatggcggtat

SEQ ID NO: 198116 - DNA, 75 bp, synthetic construct
  source 1..75: mol_type = other DNA
agaacggagaaacgcggcagggctggcaggttatcgcagacagcgtaatcagtgcccgcgcggcacgtccaggcg

SEQ ID NO: 198117 - DNA, 75 bp, synthetic construct
  source 1..75: mol_type = other DNA
ggcggttggtggacgacccgcagactaaacagaccagcaagggcacccccatgacgctggcgcgtatggcggtat

SEQ ID NO: 198118 - DNA, 75 bp, synthetic construct
  source 1..75: mol_type = other DNA
cgaactggtgagcgtggcgggtaacatgcaggtaagcagtggacagggcagaacggcgaaacgcggcagggctgg

SEQ ID NO: 198119 - DNA, 75 bp, synthetic construct
  source 1..75: mol_type = other DNA
ccgatgttcagtggtttgatggttccgatccgcagaaaatgcataaccattatgcgtacatctacaacgaactgg

SEQ ID NO: 198120 - DNA, 75 bp, synthetic construct
  source 1..75: mol_type = other DNA
ggcgaacgtattaccggtagtcaggtgaaaaataatggctacgtgcaggacacgaataatcaacgaaattatatg

SEQ ID NO: 198121 - DNA, 75 bp, synthetic construct
  source 1..75: mol_type = other DNA
tacgatgatgagtcctgtgatgtggtgcgattcttcacgcaactgaaatgccgcatgatgccgtatctttaccgc

SEQ ID NO: 198122 - DNA, 75 bp, synthetic construct
  source 1..75: mol_type = other DNA
atgcaggtcagccagtggaccggacagaacggggaaacgcggcagggctggcaggttattgcagacagcgtaatc

SEQ ID NO: 198123 - DNA, 75 bp, synthetic construct
  source 1..75: mol_type = other DNA
agaacggggaaacgcgtcagggttatcaggttattgccgacagcgtaatcagtgcccgttctgcgcgtccaggtg

SEQ ID NO: 198124 - DNA, 75 bp, synthetic construct
  source 1..75: mol_type = other DNA
gcgctttactgccctggtgcgcaatggtcagacggtagagacctggaaccgggacggcggcacaagtactgaaca

SEQ ID NO: 198125 - DNA, 75 bp, synthetic construct
  source 1..75: mol_type = other DNA
ggtaccggcggacggcaaaagtattacccccgatgatgtgcgtccgatgcttgagcagatggtgaaagaggcggt

SEQ ID NO: 198126 - DNA, 75 bp, synthetic construct
  source 1..75: mol_type = other DNA
gacctttcttgaccccaaagatgccacacaggttcaggggctgtttcggcatttgcaggtcaggtttggtgacgg

SEQ ID NO: 198127 - DNA, 75 bp, synthetic construct
  source 1..75: mol_type = other DNA
cccggcaggcggcagaaagtgcagcctcagcaaagcagtcagaggatgcgtcctcgtcctcggcctctgcggccg

SEQ ID NO: 198128 - DNA, 75 bp, synthetic construct
  source 1..75: mol_type = other DNA
tccggatgaagccgggcgttacagcatggacgtcgagtatggtcagtacagcgtcactctgttggtggagggatt

SEQ ID NO: 198129 - DNA, 75 bp, synthetic construct
  source 1..75: mol_type = other DNA
gaatccaagaggatgggcaattctctcgattacagaaacttggtgaattactgttaaacaagagcacatgcactc

SEQ ID NO: 198130 - DNA, 75 bp, synthetic construct
  source 1..75: mol_type = other DNA
tgtcgaaagagacgctcgccaccatcattgccgggaaactggcccgcctggataacgtgctgcgcagccgctttg

SEQ ID NO: 198131 - DNA, 75 bp, synthetic construct
  source 1..75: mol_type = other DNA
gccgaatggaccggcgtgccacttaaccgcctgtcacagaatgagatgtcggtcatcaccgacctgccggtatgg

SEQ ID NO: 198132 - DNA, 75 bp, synthetic construct
  source 1..75: mol_type = other DNA
ccattaaaataatatgtgtccgacacttgatttttatcagtaatgaaacgacgaaaccccgcactgttggagcag

SEQ ID NO: 198133 - DNA, 75 bp, synthetic construct
  source 1..75: mol_type = other DNA
tgctctttggccttgcgccgctggcggcgtttgatctcgccttctaatgctgctgttacaaactgccctgtactt

SEQ ID NO: 198134 - DNA, 75 bp, synthetic construct
  source 1..75: mol_type = other DNA
ctggctgaaatcgacagccgaggacaatcaaatccatcgcatcgcccgcaacgctggcggtcatgcgacccgctt

SEQ ID NO: 198135 - DNA, 75 bp, synthetic construct
  source 1..75: mol_type = other DNA
ccacacacccgcaagggcgggactcgcacaacctgaataaatacatctggcgttttatcgccctgagcacggcac

SEQ ID NO: 198136 - DNA, 75 bp, synthetic construct
  source 1..75: mol_type = other DNA
ccgtcttttccgtgccggtgataatgttttggtcaattctttatcggtcattgtgttgtcctgcatagcaatgcg

SEQ ID NO: 198137 - DNA, 75 bp, synthetic construct
  source 1..75: mol_type = other DNA
attgcgttttcaggtgcctatgcctattggtcaatggaattaaaagacatgattagtacagatgacgcctatgtc

SEQ ID NO: 198138 - DNA, 75 bp, synthetic construct
  source 1..75: mol_type = other DNA
tgccgtctgccatagccttgatcctttttgcgctcggcatctccagctatggcgattacgtctcgcagggcgcgt

SEQ ID NO: 198139 - DNA, 75 bp, synthetic construct
  source 1..75: mol_type = other DNA
tggcactgatgacgggaagcggacggcgtttgtctgggattcaggtaaacggcgttacaaacgcgcccctgagaa

SEQ ID NO: 198140 - DNA, 75 bp, synthetic construct
  source 1..75: mol_type = other DNA
actacgttaagcacgaacgttgggtagaactctggcgcgattgcttgcgggtgaactatgagccgaatatcgata

SEQ ID NO: 198141 - DNA, 75 bp, synthetic construct
  source 1..75: mol_type = other DNA
gccgtagttggccttctgctggcagctctctatcaaccagtatggacgagcgcagttctcgctccgcaagatttc

SEQ ID NO: 198142 - DNA, 75 bp, synthetic construct
  source 1..75: mol_type = other DNA
aggccggttattgttcaagccagcgaaagttgttgagcatgaccccctacctatcacggtcagtcaccgggccgg

SEQ ID NO: 198143 - DNA, 75 bp, synthetic construct
  source 1..75: mol_type = other DNA
ggcatggcgcgtaacctatgcacggatgggctgcgagtcaccatcatggcaattgctacctgcgtcgttttactt

SEQ ID NO: 198144 - DNA, 75 bp, synthetic construct
  source 1..75: mol_type = other DNA
ctttttcaaagttgttggtaatgaccttaaagaattgcgggtagctttaaactactcacaaaatttgcgggttac

SEQ ID NO: 198145 - DNA, 75 bp, synthetic construct
  source 1..75: mol_type = other DNA
catttttcaaagtggctggcgatgccctgaaaaatttgcgggtagctttaaactactcacaaaatttgcaaccat

SEQ ID NO: 198146 - DNA, 75 bp, synthetic construct
  source 1..75: mol_type = other DNA
tcgggagggcgaggggcgttttaattaatcacacgcgggatatagatatttatgagcctgacgggccgacgaacc

SEQ ID NO: 198147 - DNA, 75 bp, synthetic construct
  source 1..75: mol_type = other DNA
gatatctcatactttgacccagagattacgacgactaccgatgatttccgtcgtgaatttaaggtgctctcaagt

SEQ ID NO: 198148 - DNA, 75 bp, synthetic construct
  source 1..75: mol_type = other DNA
tgaatgcagctttccagcgactgaaggatcgcaaggagttccggcctgtgcagggctggatacgtaccacggaag

SEQ ID NO: 198149 - DNA, 75 bp, synthetic construct
  source 1..75: mol_type = other DNA
cgagagacgttttaatcaatcacacacgagatgttgatattaatgagccagacggaccaacgaatctttccgcat

SEQ ID NO: 198150 - DNA, 75 bp, synthetic construct
  source 1..75: mol_type = other DNA
gccgtggcaggatgttaaggggctggatgaagtgggcagtgatacaggcagaactgaaccgccccgggtttcctg

SEQ ID NO: 198151 - DNA, 75 bp, synthetic construct
  source 1..75: mol_type = other DNA
gagacaaacagcaatggctggttcccggatacagatggcgcactcatcaccggactgacctttcttgaccccaaa

SEQ ID NO: 198152 - DNA, 75 bp, synthetic construct
  source 1..75: mol_type = other DNA
cgggtcctcaggggccgaagggagataaaggagagcgtggcgacaccggtcctgtcggggcaaccggtgagcggg

SEQ ID NO: 198153 - DNA, 75 bp, synthetic construct
  source 1..75: mol_type = other DNA
atctggcgaatggcgacagaaccaccggaagattttaccagcttacgcttgcatgaatcggcgtttctggtagcg

SEQ ID NO: 198154 - DNA, 75 bp, synthetic construct
  source 1..75: mol_type = other DNA
cgaacggggaccggcaggtgatgctggtccggcaggcccgcaggggccgaaaggcgacaggggagagaccggtct

SEQ ID NO: 198155 - DNA, 75 bp, synthetic construct
  source 1..75: mol_type = other DNA
gggccacccgggccaaagggggaaccgggtcccgcgggtcctcaggggccgaagggagataaaggagagcgtggt

SEQ ID NO: 198156 - DNA, 75 bp, synthetic construct
  source 1..75: mol_type = other DNA
gggggcaaccggacctcagggaccgaagggcgacccgggggagacacaaatccgttttcgtctggggccggcgag

SEQ ID NO: 198157 - DNA, 75 bp, synthetic construct
  source 1..75: mol_type = other DNA
cggcaggcccacagggaccgaaaggagaaacaggtgcggctggcccggtggggggcaaccggacctcagggaccg

SEQ ID NO: 198158 - DNA, 75 bp, synthetic construct
  source 1..75: mol_type = other DNA
cgcaaatacggttccgtctggggtcgggaaacattattgagacaaacagcaatggctggttcccggatacagatg

SEQ ID NO: 198159 - DNA, 75 bp, synthetic construct
  source 1..75: mol_type = other DNA
gaggaggcgaagaagaatgccggagaggcggagacgtccgcgaggaatgccggcatatcagccagtcaggcagaa

SEQ ID NO: 198160 - DNA, 75 bp, synthetic construct
  source 1..75: mol_type = other DNA
atccccaccgtggtggggccacccggaccaaagggagaaccggggcccgcgggtcctcaggggccgaagggagat

SEQ ID NO: 198161 - DNA, 75 bp, synthetic construct
  source 1..75: mol_type = other DNA
aagggcgacccgggggagacacaaatccgttttcgtctggggccggcgagcattattgagacaaacagcaatggc

SEQ ID NO: 198162 - DNA, 75 bp, synthetic construct
  source 1..75: mol_type = other DNA
gatatttcatactttgacccagagataaggacgactcccgatgatttccgtcgtgaatttaaggtgctatcacgt

SEQ ID NO: 198163 - DNA, 75 bp, synthetic construct
  source 1..75: mol_type = other DNA
caggcccacagggaccgaaaggagaaacaggtgcggctggcccggtgggggcaaccggacctcaggggccgaagg

SEQ ID NO: 198164 - DNA, 75 bp, synthetic construct
  source 1..75: mol_type = other DNA
ggctggttcccggatacagatggcgcactcagccccggactgacctgtcttgcccgcaaagatgccacacgggtt

SEQ ID NO: 198165 - DNA, 75 bp, synthetic construct
  source 1..75: mol_type = other DNA
cgggtcccgcgggtcctcaggggccgaagggagataaaggagagcgtggagacaccggtccggcaggggcaaccg

SEQ ID NO: 198166 - DNA, 75 bp, synthetic construct
  source 1..75: mol_type = other DNA
tttagtatcgccatgctgcgatgttttccaggcatgcgatcccatttttgtgcgcctgtactctttaaggaactt

SEQ ID NO: 198167 - DNA, 75 bp, synthetic construct
  source 1..75: mol_type = other DNA
gacaccggtcctgtcggggcaaccggtgaacggggaccggcaggtgatgctggtccggcaggcccgcaggggccg

SEQ ID NO: 198168 - DNA, 75 bp, synthetic construct
  source 1..75: mol_type = other DNA
tggatttgcccctatatttccagacatctgttatcacttaacctattacaagcccgctgccgcagatattcccgt

SEQ ID NO: 198169 - DNA, 75 bp, synthetic construct
  source 1..75: mol_type = other DNA
tggctatgcagtggttccttatctcacgacttatcaggaaaaccgtctctcggtagatactacgcagctgcccga

SEQ ID NO: 198170 - DNA, 75 bp, synthetic construct
  source 1..75: mol_type = other DNA
cggactgacctttcttgaccccaaagatgccacacaggttcaggggctgtttcagcatttgcaggtcaggtttgg

SEQ ID NO: 198171 - DNA, 75 bp, synthetic construct
  source 1..75: mol_type = other DNA
gcaggcccacagggaccgaaaggagaaacaggtgcggctggcccggtgggggcaaccggacctcaggggccgaag

SEQ ID NO: 198172 - DNA, 75 bp, synthetic construct
  source 1..75: mol_type = other DNA
gcggcggcaaagaaatccgaagctgctgcggcatcatcgaagaacgcggcgaaaagctcagaaacgaatgcagct

SEQ ID NO: 198173 - DNA, 75 bp, synthetic construct
  source 1..75: mol_type = other DNA
caaagatgccacacaggttcaggagatgtttcagcatttgcaggtcagatttggtgacgggccgtggcaggatgt

SEQ ID NO: 198174 - DNA, 75 bp, synthetic construct
  source 1..75: mol_type = other DNA
aaacccataccgcccggtgacatttgattatttaatggtgtcaccgcaaaactctcgccgtctgttatatgaaat

SEQ ID NO: 198175 - DNA, 75 bp, synthetic construct
  source 1..75: mol_type = other DNA
aaatccataccgtccggtgactttcgattatttaatggtgtcgccgcaaaactcccgtcgtttgctgtatgaaat

SEQ ID NO: 198176 - DNA, 75 bp, synthetic construct
  source 1..75: mol_type = other DNA
ttatactgactattcgttgctgaccgccgatgcgcgcatcaccaacgaagtacggcggggatttaactttattta

SEQ ID NO: 198177 - DNA, 75 bp, synthetic construct
  source 1..75: mol_type = other DNA
acgtaaagaaaacggtgaagtggtgcgttacgcacacatcgggaccgggaactttaacgaaaaaaccgcgcgtct

SEQ ID NO: 198178 - DNA, 75 bp, synthetic construct
  source 1..75: mol_type = other DNA
gtattgttgaccgttaccttgaacatgaccgggtttatatttttgaaaatggcggcgataaaaaggtctaccttt

SEQ ID NO: 198179 - DNA, 75 bp, synthetic construct
  source 1..75: mol_type = other DNA
aactttagctgagttcacaatgataacgctctgggaaatagacggctttggggaaattagtcataccgtaaaaac

SEQ ID NO: 198180 - DNA, 75 bp, synthetic construct
  source 1..75: mol_type = other DNA
aagcgcagcgcgataaaaaagccagtgaactgaagctggcgaacgcaaccattactgatatgcaggtgcgccagc

SEQ ID NO: 198181 - DNA, 75 bp, synthetic construct
  source 1..75: mol_type = other DNA
caacggaacatcgacgtcgaacaaaattgtgggtatgtacgccgcgccatccggcagtacgctgttgatcgaccg

SEQ ID NO: 198182 - DNA, 75 bp, synthetic construct
  source 1..75: mol_type = other DNA
aaaggatgcgtttcctggggatctattccaataaccttgatgagttctataaagtccgcttcgctgaactgaagc

SEQ ID NO: 198183 - DNA, 75 bp, synthetic construct
  source 1..75: mol_type = other DNA
acggattgagcattttcagggggcgctgaataacggtcctcattacccactcaatattttgcaggacgtgaaggt

SEQ ID NO: 198184 - DNA, 75 bp, synthetic construct
  source 1..75: mol_type = other DNA
gtgctcaaggacaccgttggtgaggaagatgaaccgccccgggaatcctggagactaaacttcctgagaaagagg

SEQ ID NO: 198185 - DNA, 75 bp, synthetic construct
  source 1..75: mol_type = other DNA
aagatgacccgcgatgccgaatacgatttagtgcacgagatggaagccagcctgatggagctgatgtcttccagt

SEQ ID NO: 198186 - DNA, 75 bp, synthetic construct
  source 1..75: mol_type = other DNA
cgcagcaacttatcacgatgaaaccgggcgaaacatatagttatacagatacgttgattgcaataggtacaggtt

SEQ ID NO: 198187 - DNA, 75 bp, synthetic construct
  source 1..75: mol_type = other DNA
gaatgctcattcagcgctgaataaaatctttgataaagagaaagagcagaaccgggtaaaagagcagcaactgct

SEQ ID NO: 198188 - DNA, 75 bp, synthetic construct
  source 1..75: mol_type = other DNA
tgataccgcccgtctgtttaatcatgacagccagattgttgccggcggtagcctggacgggcatatcggcaccct

SEQ ID NO: 198189 - DNA, 75 bp, synthetic construct
  source 1..75: mol_type = other DNA
gccctgttctgcaggcgatggtggatgacgcagtgggggccattccgctaccgcgtgatggtcgcgattatgatc

SEQ ID NO: 198190 - DNA, 75 bp, synthetic construct
  source 1..75: mol_type = other DNA
ttcttggatttttgtatagtagtacatttgaaaatagtaaagaaaccgggttgaataagattatatttataaata

SEQ ID NO: 198191 - DNA, 75 bp, synthetic construct
  source 1..75: mol_type = other DNA
gctatacgcaggccggaaaaatcaccgcagaagccgggatactgacgaatgacgatgccgtgttgtctgcccgcg

SEQ ID NO: 198192 - DNA, 75 bp, synthetic construct
  source 1..75: mol_type = other DNA
atttctgcgctggcagtgagtggtgacggacagattttgtcccgggatcgcctgacggttcatgtggccgacgat

SEQ ID NO: 198193 - DNA, 75 bp, synthetic construct
  source 1..75: mol_type = other DNA
tggcgctgaatgaggctaaagccatcctgattacggattgtgaaaatggggggggggggttatgcgtgatgatcg

SEQ ID NO: 198194 - DNA, 75 bp, synthetic construct
  source 1..75: mol_type = other DNA
ttatgcaacgggcaccacgggtaacttaatttcccgcgcaacaggaatgaacgttaatgccatgctaagtggccc

SEQ ID NO: 198195 - DNA, 75 bp, synthetic construct
  source 1..75: mol_type = other DNA
ggaatggcgggctgtcagtgaacagcggtgagaccgataacaccgggggacgccttcagtctgccggcgagcttc

SEQ ID NO: 198196 - DNA, 75 bp, synthetic construct
  source 1..75: mol_type = other DNA
cggtgacggcgtgatgaccaccggtctgctggataatacggaaggacagcttgtcagcgcatccggctcgctgtt

SEQ ID NO: 198197 - DNA, 75 bp, synthetic construct
  source 1..75: mol_type = other DNA
gggaatatcaccagtgccggacgaattcatctgaaagcggatgtgctggataaccggtcaggtacgcttgcggct

SEQ ID NO: 198198 - DNA, 75 bp, synthetic construct
  source 1..75: mol_type = other DNA
cacatgcataccatcaaagggaggaagaactggggtaccgtgtacatccatcctatgacagtctagctcccgtcg

SEQ ID NO: 198199 - DNA, 75 bp, synthetic construct
  source 1..75: mol_type = other DNA
ttttgaccttgccctgcagacaacggtgccggaaattaaaaccgcaaaagacttcctgcagaaaatggcaagcga

SEQ ID NO: 198200 - DNA, 75 bp, synthetic construct
  source 1..75: mol_type = other DNA
gatagtggaccagtcatcactgagcgtctcgcagtccctgtttgcccagctgacggattacatcgccgtcgacat

SEQ ID NO: 198201 - DNA, 75 bp, synthetic construct
  source 1..75: mol_type = other DNA
tcctgacctccaaccttggctaccaggtgattgtcgaacacgccgatgacccggaaaccatgcaggaagccctct

SEQ ID NO: 198202 - DNA, 75 bp, synthetic construct
  source 1..75: mol_type = other DNA
gaaggccgcctgattgactgcaaaaatatcgtcttcttcctgacgtccaacctcggctaccaggtaatagtcgag

SEQ ID NO: 198203 - DNA, 75 bp, synthetic construct
  source 1..75: mol_type = other DNA
aaaatctgccaggacattgccggtgagaccaacatgttctctgactgggcggcgtcacgccagggctgcaccgta

SEQ ID NO: 198204 - DNA, 75 bp, synthetic construct
  source 1..75: mol_type = other DNA
attgaccgcaacatgcagtacctgcagcagcaggtgtccactatcgtttcaggctcgtatcagagcaactaccac

SEQ ID NO: 198205 - DNA, 75 bp, synthetic construct
  source 1..75: mol_type = other DNA
caggcggccggttacttctccggtggttctgtctatcttcgtaacccggtcaaaaacgttcaactggtctcgatg

SEQ ID NO: 198206 - DNA, 75 bp, synthetic construct
  source 1..75: mol_type = other DNA
tgatttaccagctgacggactatatcggttacgacatcctgctgcagtacattcaggagctgatacagcaggcca

SEQ ID NO: 198207 - DNA, 75 bp, synthetic construct
  source 1..75: mol_type = other DNA
cgtttacgctgggcctgtatagtgcaggaacggcacaggccgggctgcaggatgacatgaattcgtttttcaaca

SEQ ID NO: 198208 - DNA, 75 bp, synthetic construct
  source 1..75: mol_type = other DNA
acgatccagctggtcagcatgacgctccctgatattaatgccggctgcggagggattgatgcctatctagggtca

SEQ ID NO: 198209 - DNA, 75 bp, synthetic construct
  source 1..75: mol_type = other DNA
tccggcagacaaccctgtcatgccttgtggctgcagttctggttattcctgcgcaggctgacgtgaataatgacc

SEQ ID NO: 198210 - DNA, 75 bp, synthetic construct
  source 1..75: mol_type = other DNA
tgaccgtctgcaacaggactttgtgcagtggacacaggagtcggcggaatcagtcgtgccggatgcagacggtaa

SEQ ID NO: 198211 - DNA, 75 bp, synthetic construct
  source 1..75: mol_type = other DNA
cgaaatcaaaaccgcgaaagacttcctgcagaagatggcgaatgacattaacagtatgaacctcagtagctgtca

SEQ ID NO: 198212 - DNA, 75 bp, synthetic construct
  source 1..75: mol_type = other DNA
gccctgcgttttctgagtaaagggatgtctcgggaagacgttgcagagatggcaaatttacctcttgctgaggtt

SEQ ID NO: 198213 - DNA, 75 bp, synthetic construct
  source 1..75: mol_type = other DNA
ccgactgggccgcatcccggcagggatgcaccgtcggagggaaatctcatctgttcgggacaaagccagcgacaa

SEQ ID NO: 198214 - DNA, 75 bp, synthetic construct
  source 1..75: mol_type = other DNA
tggctcgacggcgtgtacgggaagccaccgagctgccgcggcgcgaactgcgcctgcaccgcgcccgtgcgccca

SEQ ID NO: 198215 - DNA, 75 bp, synthetic construct
  source 1..75: mol_type = other DNA
taagcatggtgggggtatgggattctggactcagaaccctgagcactattcatcactggatgagtggactacgtt

SEQ ID NO: 198216 - DNA, 75 bp, synthetic construct
  source 1..75: mol_type = other DNA
caggctgccgggtatgcctatggtggctccctctatgcccgcagccaggtcaaaaatatccagcttatctccatg

SEQ ID NO: 198217 - DNA, 75 bp, synthetic construct
  source 1..75: mol_type = other DNA
acattatgctgcagtacattctggaactgctccagcaggcacgggccatgatttccaccggtaactacccgcagg

SEQ ID NO: 198218 - DNA, 75 bp, synthetic construct
  source 1..75: mol_type = other DNA
ttatgacgaagcagttatcgaacatattaacgacaacatgaatgatgccacccggcagattgcggcgtttcagtc

SEQ ID NO: 198219 - DNA, 75 bp, synthetic construct
  source 1..75: mol_type = other DNA
ttatgagcaatgctgccggttacttttttgaccttgccctgcagacaacggtgccggaaatcaaaaccgcaaaag

SEQ ID NO: 198220 - DNA, 75 bp, synthetic construct
  source 1..75: mol_type = other DNA
atgccacgcattaaacctcttttgattctttgtgccgccttactgacggtgacgcctgcagcgtcagcggatgtg

SEQ ID NO: 198221 - DNA, 75 bp, synthetic construct
  source 1..75: mol_type = other DNA
gttgtcgaacgtcagatgagctacatgcgtcaacagctttccgcccgtatgctcagccgttaccagaacaactat

SEQ ID NO: 198222 - DNA, 75 bp, synthetic construct
  source 1..75: mol_type = other DNA
acgctgccggatatcaatgccggatgtggcggcatcgacgcttatctcggttcgttcagttttattaatggcgag

SEQ ID NO: 198223 - DNA, 75 bp, synthetic construct
  source 1..75: mol_type = other DNA
acaattgatgaaattcagtccaccgagacattgatcgtcctgcaaaacccgatcatgcgtaccatcaagccctga

SEQ ID NO: 198224 - DNA, 75 bp, synthetic construct
  source 1..75: mol_type = other DNA
cggcgatatcgtccgtggttccgatctggtcgttaccgccatcgccgaaggtcgcaaagcggcagacggcattat

SEQ ID NO: 198225 - DNA, 75 bp, synthetic construct
  source 1..75: mol_type = other DNA
tcgacctgcagcgcgttgatccgcctaagaaaccgctgaagatccgcaaaattgagtttgttgaaatttacgagc

SEQ ID NO: 198226 - DNA, 75 bp, synthetic construct
  source 1..75: mol_type = other DNA
tccgatctggtggtgaccgctattgccgaaggtcgtaaagcggcagacggcattatgaactggctggaagtttaa

SEQ ID NO: 198227 - DNA, 75 bp, synthetic construct
  source 1..75: mol_type = other DNA
gcttgccagcaaaacgggcggcggcctgacgtcgcttcccgccaatgaagccacgctttcggcgcgtatcgaaag

SEQ ID NO: 198228 - DNA, 75 bp, synthetic construct
  source 1..75: mol_type = other DNA
ggacaatgcaactccgatgggtgaggctattgtgactggactggaaatgcttcgtcagcgtaaggaccgctaccg

SEQ ID NO: 198229 - DNA, 75 bp, synthetic construct
  source 1..75: mol_type = other DNA
gaagcaaaccggtaaaaaagtggcgattatcggcgcaggcccggcgggtctggcgtgtgcggatgtcctgacgcg

SEQ ID NO: 198230 - DNA, 75 bp, synthetic construct
  source 1..75: mol_type = other DNA
accaccgttgacggcaaggattccacgggcaccgagataaacggtgacaaagccatcgtcaacaacgacggcgac

SEQ ID NO: 198231 - DNA, 75 bp, synthetic construct
  source 1..75: mol_type = other DNA
gggataagcgcagatggtgcaacgaagtggcaatataatcacaacggtgagctcgttattacgggtgataatgcc

SEQ ID NO: 198232 - DNA, 75 bp, synthetic construct
  source 1..75: mol_type = other DNA
tttcaataacacagggtcggttaacagtcgtatgactcagacaggaggaacgttcaataaccaacagggcgggac

SEQ ID NO: 198233 - DNA, 75 bp, synthetic construct
  source 1..75: mol_type = other DNA
acggtattgatatcaccggcgacagcgcaacggtggataacaaaggcggtatgaccgtcaccgatccggactcca

SEQ ID NO: 198234 - DNA, 75 bp, synthetic construct
  source 1..75: mol_type = other DNA
ggttcagataccgcaggcgataacggagtgacaggcggttacagccagttcttcggtctgaaacaccagatggcc

SEQ ID NO: 198235 - DNA, 75 bp, synthetic construct
  source 1..75: mol_type = other DNA
caagcctgaaaggggtttctgttaacaccggatttacggctggaaccagctccacctccgtgaccttcgacaacg

SEQ ID NO: 198236 - DNA, 75 bp, synthetic construct
  source 1..75: mol_type = other DNA
gcttgcaggtaaaacgggcggtggcctgacgtcgctccctgccaatgaagccacgctttcggcgcgtatcgacag

SEQ ID NO: 198237 - DNA, 75 bp, synthetic construct
  source 1..75: mol_type = other DNA
tttgctgccatcgccaactgctttaccagcaaagacaccccggctggctgcttcatgatcaacaactgcaccacc

SEQ ID NO: 198238 - DNA, 75 bp, synthetic construct
  source 1..75: mol_type = other DNA
tgtattattcaggggatgtcgatcagcgcacgcgaaggtgcatcgctggaaaaactgatgcagattgccggaacg

SEQ ID NO: 198239 - DNA, 75 bp, synthetic construct
  source 1..75: mol_type = other DNA
gggatgtcgataagcgcctgtgaaggcgcatcgctggaaaaactgatgcagattgcccgaactactttgcgttta

SEQ ID NO: 198240 - DNA, 75 bp, synthetic construct
  source 1..75: mol_type = other DNA
ttcggcaatgttcattgtcattttacttaactctctcgtgtatatgccaacgctcggtttgagtaatacaatttc

SEQ ID NO: 198241 - DNA, 75 bp, synthetic construct
  source 1..75: mol_type = other DNA
ttgaacaagaagttgatccatcgattcgtaacagcgctcagggcgttttcctgatgatggccaatggttttggtt

SEQ ID NO: 198242 - DNA, 75 bp, synthetic construct
  source 1..75: mol_type = other DNA
caacaaccggtgatgcgccgcgagctttactggagtctgggttttcccggtccgggaattgtggattgtgtagag

SEQ ID NO: 198243 - DNA, 75 bp, synthetic construct
  source 1..75: mol_type = other DNA
cgccgcacaactggacgctctcaagtgccacgccggggatcgcgttcgtctggtgcgcctgtgcgcagaggagaa

SEQ ID NO: 198244 - DNA, 75 bp, synthetic construct
  source 1..75: mol_type = other DNA
atcccaggaagcgcaggacgttatcggccaggtgcatccgcaaacagctcccgcgcgtgcggtgctggaaaaaga

SEQ ID NO: 198245 - DNA, 75 bp, synthetic construct
  source 1..75: mol_type = other DNA
aacacccaatctatactcactttttatcccaggaggcgcaggacgtcatcgggcaagtgcatccacaaaccgcac

SEQ ID NO: 198246 - DNA, 75 bp, synthetic construct
  source 1..75: mol_type = other DNA
ccagtaaagacacccctgctggttgctttatgattaacaactgcgccacgctctccccggactctggagatatcg

SEQ ID NO: 198247 - DNA, 75 bp, synthetic construct
  source 1..75: mol_type = other DNA
gcacaactggatgccctcaaatgccacgcaggggatcgcgttcgtctggtgcgcctgtgcgcagaggagaaaaca

SEQ ID NO: 198248 - DNA, 75 bp, synthetic construct
  source 1..75: mol_type = other DNA
ttgagtgtgatatcgaccgcgtgcgcgccatccgtaaaagtcggctggtggaagtggcagaagggcagcctgcgc

SEQ ID NO: 198249 - DNA, 75 bp, synthetic construct
  source 1..75: mol_type = other DNA
tcttggcttcatgactggcattacaggctcttcaggttctcctgctcttggtgcagatattcgtagccgtgcatc

SEQ ID NO: 198250 - DNA, 75 bp, synthetic construct
  source 1..75: mol_type = other DNA
tgtcaactcaaacgctccgagcgtaaatgacatcggcaacacgcttcagcttatcaggcagaacaatgatattga

SEQ ID NO: 198251 - DNA, 75 bp, synthetic construct
  source 1..75: mol_type = other DNA
gtcggtaatggagggaagaaatcatcaatgcaacagccgcctactcagcaatcagcaggaggtagctacacgtca

SEQ ID NO: 198252 - DNA, 75 bp, synthetic construct
  source 1..75: mol_type = other DNA
atgcatatacatctggtgaccgcgatgcaatgcgaaaactggcatcacagtatcctgagcagtttgacgctgtaa

SEQ ID NO: 198253 - DNA, 75 bp, synthetic construct
  source 1..75: mol_type = other DNA
aatggcaaccctggacaatcgcgtaatggcggtcagatattggggttggatgttaaaaaaggtgaatcattgggg

SEQ ID NO: 198254 - DNA, 75 bp, synthetic construct
  source 1..75: mol_type = other DNA
tcggcaccttagcggctggcgcacgccttgcgtcatcgtctccagaagcaatgcaatcatggctgcaaaacaacg

SEQ ID NO: 198255 - DNA, 75 bp, synthetic construct
  source 1..75: mol_type = other DNA
tttacatgagctcaatcatctttataaagcgaaattatcaagaagggaattattagcttttcatagccgttataa

SEQ ID NO: 198256 - DNA, 75 bp, synthetic construct
  source 1..75: mol_type = other DNA
tgacagagtttagtcgttcttatcttgacaaattaaaggatgtatcgggatttgtggtttgtgcaaaatctccta

SEQ ID NO: 198257 - DNA, 75 bp, synthetic construct
  source 1..75: mol_type = other DNA
ttgtggctgcaatacacgagtgggcggaccttgaatcatactttgaggtgtatcgtgataagctgatggcgattc

SEQ ID NO: 198258 - DNA, 75 bp, synthetic construct
  source 1..75: mol_type = other DNA
cctgaccagccagtttaaccagcggttacttgcagcaaataaatccggcggtctggttgtgaacgatatcgcgca

SEQ ID NO: 198259 - DNA, 75 bp, synthetic construct
  source 1..75: mol_type = other DNA
atgaggcaaattagatttgagatagtcaacgacgccgtgaaagaaaatgctatcaggcagataagggaaatacag

SEQ ID NO: 198260 - DNA, 75 bp, synthetic construct
  source 1..75: mol_type = other DNA
tcgcgcagtgggtggcgtttaagcccgtctgcccggagatggcgatcggcctgcccgttccccgcccggcgctcc

SEQ ID NO: 198261 - DNA, 75 bp, synthetic construct
  source 1..75: mol_type = other DNA
gctggcgcacgccttgcggcctcgtctccagaagcaatgcaatcatggctgcaaaacaacgccaaggaactgact

SEQ ID NO: 198262 - DNA, 75 bp, synthetic construct
  source 1..75: mol_type = other DNA
aacctgagtaaaactgcaatcgccaataacgcgggtacctggtatctcggtgccagcagtagtagtgatagcaat

SEQ ID NO: 198263 - DNA, 75 bp, synthetic construct
  source 1..75: mol_type = other DNA
atagcgccatgattgagatcggaacggatgccacgattaacatgcaggtagatagttatgatcactatgcgagat

SEQ ID NO: 198264 - DNA, 75 bp, synthetic construct
  source 1..75: mol_type = other DNA
atgaaacacaagctttctgcaatccttatggccttcatgttgacgacgccagctgcgtttgctgcacctgaggca

SEQ ID NO: 198265 - DNA, 75 bp, synthetic construct
  source 1..75: mol_type = other DNA
tgtcagcggcggtgctcacgggattgatatcactggagacggcgccattgcaaacacgacaggagcgatcactgt

SEQ ID NO: 198266 - DNA, 75 bp, synthetic construct
  source 1..75: mol_type = other DNA
gataaaaacgcacgactggttaacaacggcactatcaacctcggaacgcagggtacgaccgacacgggcatgatc

SEQ ID NO: 198267 - DNA, 75 bp, synthetic construct
  source 1..75: mol_type = other DNA
aacaacagcggcaataccaccgttgatggtcagggctcgaccggtaccgaaatcgcgggtaataacgcggtggtg

SEQ ID NO: 198268 - DNA, 75 bp, synthetic construct
  source 1..75: mol_type = other DNA
ccattatatttttgaatacccagtattacctgcagggttgaaacttggtgggttggggaatgacgtcggttgttc

SEQ ID NO: 198269 - DNA, 75 bp, synthetic construct
  source 1..75: mol_type = other DNA
taaaatgcagggtcgccaggttaccatgcgcggtcaggatctggattcgcaaaccgccgctcggaatcaggcaat

SEQ ID NO: 198270 - DNA, 75 bp, synthetic construct
  source 1..75: mol_type = other DNA
ttgcagcagaagcagcaagcgctaaatgatggctacaaagacggcatcaacaccctcacaaccagcatgttcact

SEQ ID NO: 198271 - DNA, 75 bp, synthetic construct
  source 1..75: mol_type = other DNA
tttttgaatggcccggtacacagtttccgctttgaattcggcccaggtgtgcgttacgacaaatataccgacaat

SEQ ID NO: 198272 - DNA, 75 bp, synthetic construct
  source 1..75: mol_type = other DNA
tggaacgcccaacctgaagagaagctggagtttattgagaagatgaaacatgcctggcaggcagcgaaatcttac

SEQ ID NO: 198273 - DNA, 75 bp, synthetic construct
  source 1..75: mol_type = other DNA
agatgatattgattgggacctgataacaaatccacaggccactgcttcgaaaaaaccgaaacgtgttttctcccg

SEQ ID NO: 198274 - DNA, 75 bp, synthetic construct
  source 1..75: mol_type = other DNA
tgccacagtatgcaaccggtgtatgaagaatataaacagtcggtgcatttccagaacgcctccggcgtgcgagct

SEQ ID NO: 198275 - DNA, 75 bp, synthetic construct
  source 1..75: mol_type = other DNA
cattgattgaagaaacgctggtactggtgcaaaccgccggcgtacaagcgcgggtcgacttcataagcgaactgg

SEQ ID NO: 198276 - DNA, 75 bp, synthetic construct
  source 1..75: mol_type = other DNA
gctggttattacaacaaaacgctggatgcgataatcacctacgcgccttcagcgctatatcagaataatgtgggc

SEQ ID NO: 198277 - DNA, 75 bp, synthetic construct
  source 1..75: mol_type = other DNA
ggcgacggtttgggtgagttatggcgtggcgcaaaaggttttattgcgtcggctggcctcaccgcagattctgtt

SEQ ID NO: 198278 - DNA, 75 bp, synthetic construct
  source 1..75: mol_type = other DNA
taagccacgctggttgatattactggcggtggcgactgccgggctgtttgggaacttcatcctgttcagctcatc

SEQ ID NO: 198279 - DNA, 75 bp, synthetic construct
  source 1..75: mol_type = other DNA
tgcttctgagtgggctggtgatgttctttaacaccagtctggttgagatttttacaaagctcaccgattacacct

SEQ ID NO: 198280 - DNA, 75 bp, synthetic construct
  source 1..75: mol_type = other DNA
caattgaaccgtttgtgaagagaacagcttcaatctatggatatcctgatgataaaaataaaaatatagtctctg

SEQ ID NO: 198281 - DNA, 75 bp, synthetic construct
  source 1..75: mol_type = other DNA
aaatacaacaaaaatggcaagtttaaaataaatatagataatgaaaataataaatatgaaatacttgcaatttac

SEQ ID NO: 198282 - DNA, 75 bp, synthetic construct
  source 1..75: mol_type = other DNA
gaaatatcccagaaaatacagaataattgcgatcagaaaacagcagaagaatgtaaaactataattaatattgaa

SEQ ID NO: 198283 - DNA, 75 bp, synthetic construct
  source 1..75: mol_type = other DNA
tcgccagtttgccgggctacggcgcaaccttcacgcttattttaccgatcaaccgcagggaaatcagactgtatg

SEQ ID NO: 198284 - DNA, 75 bp, synthetic construct
  source 1..75: mol_type = other DNA
gatcagttaaaaaaagatgaatcgaatggaaaagcagcatatcatttctataaaaaagtattactctcagattaa

SEQ ID NO: 198285 - DNA, 75 bp, synthetic construct
  source 1..75: mol_type = other DNA
gtggagtccaatttgaagttatgagccgggcagacgttgagaaagttcgtgcactgagcaaagccggtagcagtg

SEQ ID NO: 198286 - DNA, 75 bp, synthetic construct
  source 1..75: mol_type = other DNA
tattgtcagcccgatgaccggttatgtctctcgccgtgctgtacagcctggtgcgcaaattagcccgacaacgcc

SEQ ID NO: 198287 - DNA, 75 bp, synthetic construct
  source 1..75: mol_type = other DNA
cggcaaacgtaagcgtctgctcctccttctcaccttgctctttatcattattgccgtagcgataggaatttattg

SEQ ID NO: 198288 - DNA, 75 bp, synthetic construct
  source 1..75: mol_type = other DNA
gcgtctgcctgtgcgtattgaactggaccagaaacagctggagcaatacccgctgcgtatcggtttatccacgct

SEQ ID NO: 198289 - DNA, 75 bp, synthetic construct
  source 1..75: mol_type = other DNA
ctggatgtttctggctcgatgagcggtagacccattaacgaacttaacgcaggattagtgacctttcgcgatgaa

SEQ ID NO: 198290 - DNA, 75 bp, synthetic construct
  source 1..75: mol_type = other DNA
ctgcttgccgatccgctggctttaaaaagagtggaactcggcattgtgacgttcggcccggtgcatgtggaacaa

SEQ ID NO: 198291 - DNA, 75 bp, synthetic construct
  source 1..75: mol_type = other DNA
ctgttatttccagaatgacggcacagacggttattgatggaaaagatgtattatatccaaacgggccaacattcg

SEQ ID NO: 198292 - DNA, 75 bp, synthetic construct
  source 1..75: mol_type = other DNA
gcggagaaatttgacgttgagtacgacggttggggcacttactttgaagatcctaacggcgaagacggcgacgat

SEQ ID NO: 198293 - DNA, 75 bp, synthetic construct
  source 1..75: mol_type = other DNA
gttgaagcatttaaactcggctatgaagtgactgatccagaagagctggaagttgaagagggtgatatcgtgatt

SEQ ID NO: 198294 - DNA, 75 bp, synthetic construct
  source 1..75: mol_type = other DNA
tcactggtgaatattccgtagttgacgatgagcgtcaacacctgtcgccaatttcagattcagaacgagaagaag

SEQ ID NO: 198295 - DNA, 75 bp, synthetic construct
  source 1..75: mol_type = other DNA
caggcgaatattgaggtgcaaaaaatcgccctcgcgaaagcacaaagcgactacaaccgccgtgtgccgctgggc

SEQ ID NO: 198296 - DNA, 75 bp, synthetic construct
  source 1..75: mol_type = other DNA
aaggccaatgaagttctgggcgaaatgagcttcccgcagttcagccgtctgctgccgtaccgtgattacaaccag

SEQ ID NO: 198297 - DNA, 75 bp, synthetic construct
  source 1..75: mol_type = other DNA
cagaatggctggaaaaggctttggagcagtccgcgaaaaaggatgatcggtcgttcagtaatgaggtattgagga

SEQ ID NO: 198298 - DNA, 75 bp, synthetic construct
  source 1..75: mol_type = other DNA
gaaattagtttatacaataatcacatctgcttgtgttatggctgggattctaattttctttttggttaaggcagt

SEQ ID NO: 198299 - DNA, 75 bp, synthetic construct
  source 1..75: mol_type = other DNA
tgcgaccacgcccggccagcgcaaagtctggcaggaaaaaatgcgggaacgtgaggccgacctgaaagcacgggg

SEQ ID NO: 198300 - DNA, 75 bp, synthetic construct
  source 1..75: mol_type = other DNA
atgcataaggtgaaatcatggcttgagcaggcggtgaaggactgcaatatccgtctgactgatgaaccagtgctt

SEQ ID NO: 198301 - DNA, 75 bp, synthetic construct
  source 1..75: mol_type = other DNA
tccagttaaaagtactggaagtccagggcatgaaagtgttcaccgaagtgaccgtcggtggtcccctctccaaca

SEQ ID NO: 198302 - DNA, 75 bp, synthetic construct
  source 1..75: mol_type = other DNA
cgcagaaggtgaagttctgcaactgatgaacgttaacgatccggacatcactgaagaaaactacatgcgcgttat

SEQ ID NO: 198303 - DNA, 75 bp, synthetic construct
  source 1..75: mol_type = other DNA
cttaatcggcttggcgctcattgtgggcttgacgatgtattccccccaggcggtaagcatagcgaaaacagcata

SEQ ID NO: 198304 - DNA, 75 bp, synthetic construct
  source 1..75: mol_type = other DNA
gtgtggatcactattgcaccgttcgtgacaaaaagagcattaaaagacatcgtactctcccgctatgcctgttac

SEQ ID NO: 198305 - DNA, 75 bp, synthetic construct
  source 1..75: mol_type = other DNA
atgaacgaacatcatcaaccttttgaagaaatacggcattatggcactgaagggcaagaattttggtcagctaga

SEQ ID NO: 198306 - DNA, 75 bp, synthetic construct
  source 1..75: mol_type = other DNA
ttctttcatttctgcaattctttttgtggggaagttggctgaacacatttggctcttatatgtttattacgctgc

SEQ ID NO: 198307 - DNA, 75 bp, synthetic construct
  source 1..75: mol_type = other DNA
tgcgaccacgcccggtcagcgaaaagtctggcaggaaaaaatgcgggaacgtgaagctgacctgaaagcacgggg

SEQ ID NO: 198308 - DNA, 75 bp, synthetic construct
  source 1..75: mol_type = other DNA
aaaccacggcggccatcagccaggtgaaagcacaaaaaaaggaactggaacaggaaagcggcaatgattccggcg

SEQ ID NO: 198309 - DNA, 75 bp, synthetic construct
  source 1..75: mol_type = other DNA
cggagtccatcggtatccagattgacggcgaccaggccatcgtcaataacgaaggcgagagcactatcaccaatg

SEQ ID NO: 198310 - DNA, 75 bp, synthetic construct
  source 1..75: mol_type = other DNA
gtctggcacgcgatgcaggatgtgatgcgaaaattgttgccaaggttgaacgtgcggaagccgtttgcagccagg

SEQ ID NO: 198311 - DNA, 75 bp, synthetic construct
  source 1..75: mol_type = other DNA
aaatatccgctgaaggatgcgcggcgtgcgcatgagattctggaaagccgggcgacgcagggttccagcctattg

SEQ ID NO: 198312 - DNA, 75 bp, synthetic construct
  source 1..75: mol_type = other DNA
tgatggtgtcgcacagtgtggaagatgcggcgcggatcgccacgcgctcggtggtggtcgccgacgggcgtatcg

SEQ ID NO: 198313 - DNA, 75 bp, synthetic construct
  source 1..75: mol_type = other DNA
aaccgctgcaccagcagaacaggtagttggttacaatatcaatctacaactggcagtgaaggattcacaaggaaa

SEQ ID NO: 198314 - DNA, 75 bp, synthetic construct
  source 1..75: mol_type = other DNA
aaatacaacaatgacaaacttaaaataaaaatagataaaatctctggtaaaaataataaatatgaaatacttgca

SEQ ID NO: 198315 - DNA, 75 bp, synthetic construct
  source 1..75: mol_type = other DNA
tatcgacacgtatatccgcagcggcctttatccgccgccatcgctacccagcggattaggcaccgaagcggctgg

SEQ ID NO: 198316 - DNA, 75 bp, synthetic construct
  source 1..75: mol_type = other DNA
tcgtgaagaaaacctggtcgagcgattgaaagagatcaccggtggtaagaaagtgcgcgtggtgtacgattcagt

SEQ ID NO: 198317 - DNA, 75 bp, synthetic construct
  source 1..75: mol_type = other DNA
agccgcaaccgcagctcatattgatggcgttcttgaagtctacggtgctttttctggcgcacaacttgaagatat

SEQ ID NO: 198318 - DNA, 75 bp, synthetic construct
  source 1..75: mol_type = other DNA
atggacgtaaccaatggaaaatacacaagtcttacggtttctggaaataccatttcgtggtctggagctagtggc

SEQ ID NO: 198319 - DNA, 75 bp, synthetic construct
  source 1..75: mol_type = other DNA
agcaggaaatgttctataactggataggcgatggtaaacgatgtgtagcattccacgaagcgggccatgcagtag

SEQ ID NO: 198320 - DNA, 75 bp, synthetic construct
  source 1..75: mol_type = other DNA
aaaatgaaacctaatgtaggaatgttgaatccgccgtatgcgcaggcaaaaagtgatgcggagttacacgaatta

SEQ ID NO: 198321 - DNA, 75 bp, synthetic construct
  source 1..75: mol_type = other DNA
gtatttgagagagatgtgaaacgatactttttatataagttgatgctggatatacataatgatccggaggctgca

SEQ ID NO: 198322 - DNA, 75 bp, synthetic construct
  source 1..75: mol_type = other DNA
agattattcttctcttactcaggaagtatttgagagagatgtgaaacgatactttttatataagttgatgctgga

SEQ ID NO: 198323 - DNA, 75 bp, synthetic construct
  source 1..75: mol_type = other DNA
ggcacattgttcgtagccataatgttgtttataaaggttttttgggaatgaaaaatcaaggaaatattttactta

SEQ ID NO: 198324 - DNA, 75 bp, synthetic construct
  source 1..75: mol_type = other DNA
aatctattctgtcggtactgaacctcaaaagttaaaagaattagtttatcagcagaatgattttctcaggcgcat

SEQ ID NO: 198325 - DNA, 75 bp, synthetic construct
  source 1..75: mol_type = other DNA
ttataaggctaaccgggacagaaaatgtatctgacttcttgtatgtcgttcattttttatggtcatatgctgaaa

SEQ ID NO: 198326 - DNA, 75 bp, synthetic construct
  source 1..75: mol_type = other DNA
aaatcaccttctgttaatgctgataatgcaggcagagacgttgttccggagtgggtgcaaaaagaccctgtagcc

SEQ ID NO: 198327 - DNA, 75 bp, synthetic construct
  source 1..75: mol_type = other DNA
attacccggccttttagcagcggaggatttaacgagcgcccgatcaaatggtatcacaacacgggttatgccttg

SEQ ID NO: 198328 - DNA, 75 bp, synthetic construct
  source 1..75: mol_type = other DNA
gaaagcaatccagtaccgatatcgtgctgactggctatcggttcctgaaactgactggaaacctcgtccacttaa

SEQ ID NO: 198329 - DNA, 75 bp, synthetic construct
  source 1..75: mol_type = other DNA
ttaaaaggctaaccggaacagaaaatgtatctgacttcttgtatgccgttcattttttatggtcatatgctgaaa

SEQ ID NO: 198330 - DNA, 75 bp, synthetic construct
  source 1..75: mol_type = other DNA
ctgctgtgtgatatgggatgtgatatttatgcaccgggcaccaccggtacactgaacgatcataacagtactact

SEQ ID NO: 198331 - DNA, 75 bp, synthetic construct
  source 1..75: mol_type = other DNA
tcaaggggaatggccgtgagacgacaattaataacgcacaaagcggtgtaattaacgtttacgcagataactcct

SEQ ID NO: 198332 - DNA, 75 bp, synthetic construct
  source 1..75: mol_type = other DNA
tgaacagatcggttttgcggtcagttgtatgctctacaatcgtaattacagtctgtatccggtgttaaccattca

SEQ ID NO: 198333 - DNA, 75 bp, synthetic construct
  source 1..75: mol_type = other DNA
cgtctcgccgtaatagtttctgtccgtgatatatttattaacatacgaccttccactattgaacaacagcattta

SEQ ID NO: 198334 - DNA, 75 bp, synthetic construct
  source 1..75: mol_type = other DNA
tggttcatattacgtgttcctgacaccttcacacgaattccattgatttgggagcagtctgaaaacaagaataac

SEQ ID NO: 198335 - DNA, 75 bp, synthetic construct
  source 1..75: mol_type = other DNA
gcagcctgaacgtaggcaccacggcggaactgaacagtgcgctgaaacaggtcagcggcagccaggcaacaacgg

SEQ ID NO: 198336 - DNA, 75 bp, synthetic construct
  source 1..75: mol_type = other DNA
tctgctgacgttgaatggcgcggtttccttctttaatgaaggcgaatttaatggttcaattaccggagacagcta

SEQ ID NO: 198337 - DNA, 75 bp, synthetic construct
  source 1..75: mol_type = other DNA
agttagatgccttccactggaaagaagacggcatcagtgataaaggtgtgatgctaaacttcaagaaaacattct

SEQ ID NO: 198338 - DNA, 75 bp, synthetic construct
  source 1..75: mol_type = other DNA
ttggtattcagatcgacggcgacaaggcggttgtgaataacgacggtgacaatgccatcagtaacggcggcaccg

SEQ ID NO: 198339 - DNA, 75 bp, synthetic construct
  source 1..75: mol_type = other DNA
ggaagccagcgtttcaacattgacgatggtcagagtggcggtggtttcaacagcctggcgacgatgggtgtgaaa

SEQ ID NO: 198340 - DNA, 75 bp, synthetic construct
  source 1..75: mol_type = other DNA
gtcgatacggggcaggcgttttataacgacggtacagggacaattctgaactatggtgagataaaccttctcggc

SEQ ID NO: 198341 - DNA, 75 bp, synthetic construct
  source 1..75: mol_type = other DNA
gcggataacgccgggaaaatcacgctggatacgctttgggtcgatcaaaacgacaccacgacgctgcgtactgac

SEQ ID NO: 198342 - DNA, 75 bp, synthetic construct
  source 1..75: mol_type = other DNA
tgccatcagcaacggcggcactggcaccagcatcaccggcaacgaagccacagccaacaacaccggcaaaaccac

SEQ ID NO: 198343 - DNA, 75 bp, synthetic construct
  source 1..75: mol_type = other DNA
tcaataatcagggcaaactgaccgtaaaagatcaagactcaatcggtatcgctatcaccggggatgacgcgcaat

SEQ ID NO: 198344 - DNA, 75 bp, synthetic construct
  source 1..75: mol_type = other DNA
cagaacaaaggtactattaacacgaccgatgctcagggattaatgatggcggattcaggggcgcaggttgtcaat

SEQ ID NO: 198345 - DNA, 75 bp, synthetic construct
  source 1..75: mol_type = other DNA
ttcgggtacgctcagcgcgaataacctggttattggcgacaacgtgagtgttaacgccgggtttagtgcaggaac

SEQ ID NO: 198346 - DNA, 75 bp, synthetic construct
  source 1..75: mol_type = other DNA
tctgggcttaccgtgtctggcgatggtaacaccgtcaatttgaatggcggcattcagtttgtgggcgagaaaaac

SEQ ID NO: 198347 - DNA, 75 bp, synthetic construct
  source 1..75: mol_type = other DNA
gaactgggtaacgacacacagtacgacatgatggcgctgcgtaaatctctgacgctgactgaacatcagaacctg

SEQ ID NO: 198348 - DNA, 75 bp, synthetic construct
  source 1..75: mol_type = other DNA
agcagtgccaccaacagcacctctgaaacgctggccgccacaccaaaagcggtcaaggctgcatacgacctggca

SEQ ID NO: 198349 - DNA, 75 bp, synthetic construct
  source 1..75: mol_type = other DNA
gtcattagtctgacggggatgacggcaggcaacaatggcaccgctttaaataatactgccggtgagatccaaatg

SEQ ID NO: 198350 - DNA, 75 bp, synthetic construct
  source 1..75: mol_type = other DNA
atgtgactggcagtgttgcgacaggggtaaatgtagccggtgatggcaatgaagttgaaattaccggtaatattc

SEQ ID NO: 198351 - DNA, 75 bp, synthetic construct
  source 1..75: mol_type = other DNA
ggcgacatcagtaagacggcagacacgaatgtgaaacaacagtacctggagttccgcagcgaaggggcgaaaacc

SEQ ID NO: 198352 - DNA, 75 bp, synthetic construct
  source 1..75: mol_type = other DNA
acgaccagcgagggggccatctccctggcaggtagtatgaatgttggtgacttttcaacaggcatggcgctcagg

SEQ ID NO: 198353 - DNA, 75 bp, synthetic construct
  source 1..75: mol_type = other DNA
gtaattactgtatataacgcaggtgccggtatggccgcctacggtaacagtaatatggttattaaccagggaatc

SEQ ID NO: 198354 - DNA, 75 bp, synthetic construct
  source 1..75: mol_type = other DNA
ccaccagtttgcataccgatcttccgggggcaacggcaaaagattatggcgttggtatggcaaccgggacagaca

SEQ ID NO: 198355 - DNA, 75 bp, synthetic construct
  source 1..75: mol_type = other DNA
taacggagccgtgaatatttgggggaataacgggcgctttatcaacaacggtaaagtggattcaaccgccaaatc

SEQ ID NO: 198356 - DNA, 75 bp, synthetic construct
  source 1..75: mol_type = other DNA
agcaatacagggaccatcaataaactggtacagaaagacggtactgttaataacagcggtataattactggtcgc

SEQ ID NO: 198357 - DNA, 75 bp, synthetic construct
  source 1..75: mol_type = other DNA
agagccagcgtacagcaagtcttgccggagctggcagccagtactttaatgttgacgacgggcagaagggcggcg

SEQ ID NO: 198358 - DNA, 75 bp, synthetic construct
  source 1..75: mol_type = other DNA
tatcactgccagaaatgccagtaccgggattcgcgttgttggagatgggggcgaaatttctctggctggccgtat

SEQ ID NO: 198359 - DNA, 75 bp, synthetic construct
  source 1..75: mol_type = other DNA
ctcagtggtgatgcgtcgacgttcattaacaggggggatatatccgtcagtaatggcagttcagagaccaatgcg

SEQ ID NO: 198360 - DNA, 75 bp, synthetic construct
  source 1..75: mol_type = other DNA
tgctggggacgaatggccacgtcgtcaacaacggttcggtggtgatcgccgatggtgtgaccgggtctggcctga

SEQ ID NO: 198361 - DNA, 75 bp, synthetic construct
  source 1..75: mol_type = other DNA
gacggtgacaacgccatcagcaacggcggcaccggcacgcaggttaacggcgacgaagccaccgtgaacaataac

SEQ ID NO: 198362 - DNA, 75 bp, synthetic construct
  source 1..75: mol_type = other DNA
ctggacggtaacggttatttgttgtggagcggcgtggcggcggtcattaccggcctggtggtctggctgctaccg

SEQ ID NO: 198363 - DNA, 75 bp, synthetic construct
  source 1..75: mol_type = other DNA
agcgaggatctcggtgcaggtacgcatgttgaagtcattgcgatagaagggataaccctacatatccgagcagtc

SEQ ID NO: 198364 - DNA, 75 bp, synthetic construct
  source 1..75: mol_type = other DNA
tgattgccgttctcgattcatcgaaatttaatcgtcgcggttttaatcaggtactgccaatcgaaaaaattgaca

SEQ ID NO: 198365 - DNA, 75 bp, synthetic construct
  source 1..75: mol_type = other DNA
ctttataacgaagcaggcgcaacactcagcaacagcagcagcgccgtttcaggtggagaaaatgccattgttaac

SEQ ID NO: 198366 - DNA, 75 bp, synthetic construct
  source 1..75: mol_type = other DNA
tcagggttgggcggcagatattacagaaatagaaaccaccacaggtgaaaagaaaaataccaatgtgacttgtcc

SEQ ID NO: 198367 - DNA, 75 bp, synthetic construct
  source 1..75: mol_type = other DNA
tggccagcagttgattggcagacgatttgtgctggaatcaccgttagtcaacggacgcggtcatatgcgcgtcgg

SEQ ID NO: 198368 - DNA, 75 bp, synthetic construct
  source 1..75: mol_type = other DNA
acggtacgccataaaacgcgctcgatgcatggttccattgccgagcgttcattgcaggatattaatgccgattta

SEQ ID NO: 198369 - DNA, 75 bp, synthetic construct
  source 1..75: mol_type = other DNA
ggcagtcaaaatgatccacgaagggatgaccgttattctcgacagcggaagtacgacaatgcttatcgccgaagg

SEQ ID NO: 198370 - DNA, 75 bp, synthetic construct
  source 1..75: mol_type = other DNA
gcgatggtcacagccgcaaataaagtgattgccgttctcgattcatcgaaatttaatcgtcgcggttttaatcag

SEQ ID NO: 198371 - DNA, 75 bp, synthetic construct
  source 1..75: mol_type = other DNA
ttaaaagcagtcctcaatcactgccgcacaattttaatatagccgctgtcggtttgatgaagaaggggatgtcga

SEQ ID NO: 198372 - DNA, 75 bp, synthetic construct
  source 1..75: mol_type = other DNA
atgaacatgcgtaatattcatgttattacggcccgctctgtaccggataaacgcatatcagatgattttatgcat

SEQ ID NO: 198373 - DNA, 75 bp, synthetic construct
  source 1..75: mol_type = other DNA
gtgtggatcactattgcaccgttcgtgacagataaaagcgtatcagatgattttatgcatgctgttctcagtaac

SEQ ID NO: 198374 - DNA, 75 bp, synthetic construct
  source 1..75: mol_type = other DNA
acgctcaaatgttaaaggaggatccagagggggcggcggcatttgcggcagcggctggaattaatacaaacgcca

SEQ ID NO: 198375 - DNA, 75 bp, synthetic construct
  source 1..75: mol_type = other DNA
caaaccggtaaaaatgtgattccttcggcagagccactattggtcacaccattaggcatcgccatgaatgcggac

SEQ ID NO: 198376 - DNA, 75 bp, synthetic construct
  source 1..75: mol_type = other DNA
tgggacgctggctaacttaacgctcaccccaacagagcagcaatacgttgttaatgctaatgacgcaataatggc

SEQ ID NO: 198377 - DNA, 75 bp, synthetic construct
  source 1..75: mol_type = other DNA
aattctcaaaaaatatatcagaaataggtaaatatctttctcacaacggtgagaacagattagaaagccttaata

SEQ ID NO: 198378 - DNA, 75 bp, synthetic construct
  source 1..75: mol_type = other DNA
gttataagcagttggaagattacattctcaaaacagccaataactatcaggaagagattggctctctgctgggta

SEQ ID NO: 198379 - DNA, 75 bp, synthetic construct
  source 1..75: mol_type = other DNA
agtggcgatcattaataatgctttgggtaatgggacgttggctaacttaacgctcagcccaacagagcagcaata

SEQ ID NO: 198380 - DNA, 75 bp, synthetic construct
  source 1..75: mol_type = other DNA
tggatgagctggtggactgtgtggcagagctggaaaccaaggttgggaagtttgaaaagctggtgcaggaggtac

SEQ ID NO: 198381 - DNA, 75 bp, synthetic construct
  source 1..75: mol_type = other DNA
agtagcaatgaattacacatcagcaaagacgaggcactacaacggcaatttactttagatgatgtgtccggcgca

SEQ ID NO: 198382 - DNA, 75 bp, synthetic construct
  source 1..75: mol_type = other DNA
cccaaactcggaagtaaaaatcctcaaaaaaataaaaatcccgctgcaagactccccaaccaattgcggttttga

SEQ ID NO: 198383 - DNA, 75 bp, synthetic construct
  source 1..75: mol_type = other DNA
ggcaagaaagtcattggtggaggcggtcaatgcagatcaaataccggatttatatggctcacacgttccatgcct

SEQ ID NO: 198384 - DNA, 75 bp, synthetic construct
  source 1..75: mol_type = other DNA
atcggccttcaggcgttgcagggacttggtagtgtcgctcaaacatataaagccgcaaagcaacaggaagcggat

SEQ ID NO: 198385 - DNA, 75 bp, synthetic construct
  source 1..75: mol_type = other DNA
gatcggcgtgcaggcagtggccccggaagcgggcgaactgatccagacggccgcactggcgatggcactgttgca

SEQ ID NO: 198386 - DNA, 75 bp, synthetic construct
  source 1..75: mol_type = other DNA
gattctaatggaaccatagcaaggaagactatatctgaaaaaatcgaagaattatataaatcttcatcaccgcaa

SEQ ID NO: 198387 - DNA, 75 bp, synthetic construct
  source 1..75: mol_type = other DNA
gttgaaggcgtgttacgagcagggctatcacagccagaaactgagagaatggaaagagcaattctttcggtcata

SEQ ID NO: 198388 - DNA, 75 bp, synthetic construct
  source 1..75: mol_type = other DNA
tctgagttgaaggcgtgttacgagcagggctatcacagccagaaactgagagaatggaaagagcaattctttcgg

SEQ ID NO: 198389 - DNA, 75 bp, synthetic construct
  source 1..75: mol_type = other DNA
gcagaaaaaaccgcagagaaagcagccgcagcaaaagccagagtaacggcaatcatagcggcagaacggaaggca

SEQ ID NO: 198390 - DNA, 75 bp, synthetic construct
  source 1..75: mol_type = other DNA
tatggtgaagggaaaatctctgccgatatcatgacgtctgctgtcgtaataagttcgtggtacacagatgaatat

SEQ ID NO: 198391 - DNA, 75 bp, synthetic construct
  source 1..75: mol_type = other DNA
ttatttttaatgatgccacgacagcggcaattaaggatcagctttgtggtcagtggcgttcagtgggcatcatgt

SEQ ID NO: 198392 - DNA, 75 bp, synthetic construct
  source 1..75: mol_type = other DNA
atgcccgccccgtgtcaggaaaaattatattctccagtgtggcccgggccggttcagaaacaggaaaaaactgaa

SEQ ID NO: 198393 - DNA, 75 bp, synthetic construct
  source 1..75: mol_type = other DNA
aatatcacgctgcctgaactgaatgcgtgctacagccagaaactgataagatggcatgagcaatcctttggctta

SEQ ID NO: 198394 - DNA, 75 bp, synthetic construct
  source 1..75: mol_type = other DNA
tgagatgtcaagtggggtgcaggcaacatacttcagtccaaacggtcagctggtcggcttagtggcatacattga

SEQ ID NO: 198395 - DNA, 75 bp, synthetic construct
  source 1..75: mol_type = other DNA
gaaataaaacaagaacacgaagaaaaattttcaaaaaacatatcagaaataggtaaatatctttctcacaacggt

SEQ ID NO: 198396 - DNA, 75 bp, synthetic construct
  source 1..75: mol_type = other DNA
tccccagataaacaatatcacgctgcctgaactgaatgcgtgctacagccagaaactgataagatggcatgagca

SEQ ID NO: 198397 - DNA, 75 bp, synthetic construct
  source 1..75: mol_type = other DNA
ttacggggtttctccgcgttaaggattcattaagatcgctacgtatacttctcgatatcttattgatttgcctta

SEQ ID NO: 198398 - DNA, 75 bp, synthetic construct
  source 1..75: mol_type = other DNA
tactttagatgatgtgtccggcgcagaatttaaccagcaaaaaaatacgcttctggtgctgtctcatgaatctcg

SEQ ID NO: 198399 - DNA, 75 bp, synthetic construct
  source 1..75: mol_type = other DNA
atggggaaacactaacagtaacggaagagaatattatagcggttgcaaagctgttaggtattacacctaccgaac

SEQ ID NO: 198400 - DNA, 75 bp, synthetic construct
  source 1..75: mol_type = other DNA
atctttaaatctgccgatgcggaaacacccgcacaggctattttaaatcgaatcaaacaactgaaaggaaaataa

SEQ ID NO: 198401 - DNA, 75 bp, synthetic construct
  source 1..75: mol_type = other DNA
gcaaagcgctaatgagcttccgttctcttcgagtgtaccgtgacaataaatccgtcacttttgccgaacttgatg

SEQ ID NO: 198402 - DNA, 75 bp, synthetic construct
  source 1..75: mol_type = other DNA
agagattttttatctctgcgagtcttatgctaataaaagagaaatgaatcctttgggttataaaaatggtgcagt

SEQ ID NO: 198403 - DNA, 75 bp, synthetic construct
  source 1..75: mol_type = other DNA
taaattgtttatgggcaccgacggcatcgatctcaatgcgggcgtaaccaccttcaacgaggtctataccgtcag

SEQ ID NO: 198404 - DNA, 75 bp, synthetic construct
  source 1..75: mol_type = other DNA
acgaacaaactatcctgatgccaggcggaacgtttcgtaaaaaatcggcctcatttcacgggcagctggcagaga

SEQ ID NO: 198405 - DNA, 75 bp, synthetic construct
  source 1..75: mol_type = other DNA
gtgatacgacaattaataacgcacaaagcggtgtaattaacgtttatgcagataattcctgggccttcggtggaa

SEQ ID NO: 198406 - DNA, 75 bp, synthetic construct
  source 1..75: mol_type = other DNA
tggaataccgacacgggggtaattagcggcgtgaatccaaatgcaccgttaattgatcttggtcgcggctataac

SEQ ID NO: 198407 - DNA, 75 bp, synthetic construct
  source 1..75: mol_type = other DNA
gagctggaataacgccctgcgttatgatgtgcataatctcgatagcagtcgctcgatagcttacggcgacgtcaa

SEQ ID NO: 198408 - DNA, 75 bp, synthetic construct
  source 1..75: mol_type = other DNA
ctcagaaccagttgttctcggggatcgccgcaactatacttggcgcaatactacaatatatttttgcgagaaatt

SEQ ID NO: 198409 - DNA, 75 bp, synthetic construct
  source 1..75: mol_type = other DNA
caaaaatatagtaaatacattaattatcaggaagttaaggtttacgcacgcgaagcaaaagctaactgctttact

SEQ ID NO: 198410 - DNA, 75 bp, synthetic construct
  source 1..75: mol_type = other DNA
acaataacggcaacaccaccgttgacggcaaggattccaccggcaccgagatcgcaggtaataacgccaccgtta

SEQ ID NO: 198411 - DNA, 75 bp, synthetic construct
  source 1..75: mol_type = other DNA
aacattggttaaagcaattttctaagccgcatagaaatattgccaaatcgctattagatagcctcatttatataa

SEQ ID NO: 198412 - DNA, 75 bp, synthetic construct
  source 1..75: mol_type = other DNA
ggaagcacgccagcaatccccggctggctgcgtgatggtattcgctgcccgtattcgtcaggaggtgcgccatga

SEQ ID NO: 198413 - DNA, 75 bp, synthetic construct
  source 1..75: mol_type = other DNA
atttctcaaacgtctggccagtgaatatggttatgccgtaaaagtgacgacaaaagagctgattttttcacattt

SEQ ID NO: 198414 - DNA, 75 bp, synthetic construct
  source 1..75: mol_type = other DNA
atgattgacgccattcgacgccatcatgattatacatcattacatccatggagtgataaagattcactcgaaatt

SEQ ID NO: 198415 - DNA, 75 bp, synthetic construct
  source 1..75: mol_type = other DNA
ttcgttaagtaaacgcatctccgttattgtgattctttttgccattgtggcagtgtgtactttcttcgtgcaatc

SEQ ID NO: 198416 - DNA, 75 bp, synthetic construct
  source 1..75: mol_type = other DNA
gcatcatttcagaattaccacgccaccattgacggcaaagaaattgcaggcataacgaataatatctcttcgctg

SEQ ID NO: 198417 - DNA, 75 bp, synthetic construct
  source 1..75: mol_type = other DNA
tcccgctgcaggaatccccaaccaattgcggttttgaaggattggcctatatctcgccaggatcacactttctgg

SEQ ID NO: 198418 - DNA, 75 bp, synthetic construct
  source 1..75: mol_type = other DNA
atgaaaatccataccaaagaggcgctcatgaaggctgaaatcagccgtagaagtctgatgaaaacctccgcactt

SEQ ID NO: 198419 - DNA, 75 bp, synthetic construct
  source 1..75: mol_type = other DNA
gaaatattagcatatatggcaacacatactggccaatctgtaattgagaaatatatttcaaataaaaaggggcta

SEQ ID NO: 198420 - DNA, 75 bp, synthetic construct
  source 1..75: mol_type = other DNA
gaatctaaatactgctggctgggttcattaccggaataatgaatatgaaattactggtataggccgtgtagaagt

SEQ ID NO: 198421 - DNA, 75 bp, synthetic construct
  source 1..75: mol_type = other DNA
agtgcgtagtcttgtgtgtcggggcattaatcaatatcagcacaactattcagttcacaccaaatgagaatgcgc

SEQ ID NO: 198422 - DNA, 75 bp, synthetic construct
  source 1..75: mol_type = other DNA
ggcgctgcattgcacattacggggtttctccgcgttaaggattcattaaggtcgctacgtatacttctcgatatc

SEQ ID NO: 198423 - DNA, 75 bp, synthetic construct
  source 1..75: mol_type = other DNA
gtccgtaaaagccagcatgtctcagggtttcagaattatcaggccactatcgatggtaaagagattacaggagta

SEQ ID NO: 198424 - DNA, 75 bp, synthetic construct
  source 1..75: mol_type = other DNA
gctgaatattggtggcgatagtcaggtctggacaaccgcgcaatttatttcgtggctggagagtcagggagcatt

SEQ ID NO: 198425 - DNA, 75 bp, synthetic construct
  source 1..75: mol_type = other DNA
aatgccaatgcccgtctggcaaaagaccggaacggagcagatattcccaataagccgctgtttatccaaaacgtc

SEQ ID NO: 198426 - DNA, 75 bp, synthetic construct
  source 1..75: mol_type = other DNA
ccgatactggctgtggaactattcatcttgcaggttgcgttattgaggttatgggtaataaaggagccatgacca

SEQ ID NO: 198427 - DNA, 75 bp, synthetic construct
  source 1..75: mol_type = other DNA
ggaaaagataccttcaccaaaaatattggtgcctgccgcgcatatagcgcatggctgaatattggtggcgatagt

SEQ ID NO: 198428 - DNA, 75 bp, synthetic construct
  source 1..75: mol_type = other DNA
aatcaacaacctgcatttgctttagggcaaacaggaagcattgtcggaaatgataaagctgttggctggaactgg

SEQ ID NO: 198429 - DNA, 75 bp, synthetic construct
  source 1..75: mol_type = other DNA
tttgatggttctaaaaatattgagttaacggcggaagatttaaatcttgagcaaaccgtagaattagccgctgga

SEQ ID NO: 198430 - DNA, 75 bp, synthetic construct
  source 1..75: mol_type = other DNA
gcgaaccgctgtcgctggcttctcctatcgtaagcaaatacgaaaaacttggcggttgtgagtatacgcttacct

SEQ ID NO: 198431 - DNA, 75 bp, synthetic construct
  source 1..75: mol_type = other DNA
acgaagacggtaacatattaaacaaacgaatattagatcgggcgcaagaaaactataaggttgcgcacgctaaat

SEQ ID NO: 198432 - DNA, 75 bp, synthetic construct
  source 1..75: mol_type = other DNA
caggcgtataccgttaatcctcaaacagagcgggtgaaaatgtactggcaaaaagccaatggcgaagcgtgggga

SEQ ID NO: 198433 - DNA, 75 bp, synthetic construct
  source 1..75: mol_type = other DNA
cgcggtatggagtcctggctggagcgtcagctacaacaactgagttatgcccgggtgttgatcctggatgaaata

SEQ ID NO: 198434 - DNA, 75 bp, synthetic construct
  source 1..75: mol_type = other DNA
ccccgcgccgtggccccgccatgccgccggaggcggcctggcggccccccgtcacgggttgccggaaacggactt

SEQ ID NO: 198435 - DNA, 75 bp, synthetic construct
  source 1..75: mol_type = other DNA
tacagttacagcaagcagaggctatgaaatatagtggtcgtcttgatgatcactattttaataagcgagcacaac

SEQ ID NO: 198436 - DNA, 75 bp, synthetic construct
  source 1..75: mol_type = other DNA
tggctggcgacgagactacaacacgaaaaaccagcagcctgcatttgctttagggcaaacaggaagcactgtcgg

SEQ ID NO: 198437 - DNA, 75 bp, synthetic construct
  source 1..75: mol_type = other DNA
gcgtgccaatatcgatgaatttacggagaccacctcgcgagccattgaagtcgtaggcggcgcggcaaaagggaa

SEQ ID NO: 198438 - DNA, 75 bp, synthetic construct
  source 1..75: mol_type = other DNA
ggcgattattgtgcttaacccagcagagccaccgttgatgatgcgtgacacggtgtatgtattgagcgacgaagc

SEQ ID NO: 198439 - DNA, 75 bp, synthetic construct
  source 1..75: mol_type = other DNA
ccgatgccgctcaggtcgggcaggcttgtcgggctgcccgtgcggcgtttccgcgctgggctcggctctcatttg

SEQ ID NO: 198440 - DNA, 75 bp, synthetic construct
  source 1..75: mol_type = other DNA
atgaatatattaagatacttaagtatttcgctcttcgcgttctcattttcatataccgccacagcctccactcag

SEQ ID NO: 198441 - DNA, 75 bp, synthetic construct
  source 1..75: mol_type = other DNA
tgacagggcttatcgccatgccggaattcgccgatatcgacatcgtgtttgacgccaccagtgcaggcgcgcatg

SEQ ID NO: 198442 - DNA, 75 bp, synthetic construct
  source 1..75: mol_type = other DNA
tgaaaaacgatgccgctttgcgcgaagcgaaaccggatattcgcttaattgacctgacgcctgctgccatcggcc

SEQ ID NO: 198443 - DNA, 75 bp, synthetic construct
  source 1..75: mol_type = other DNA
accggttgggacagcgtggcggcgtttcttgacgcgccacagcttaaggatatcgacaccagtgcggccatgccg

SEQ ID NO: 198444 - DNA, 75 bp, synthetic construct
  source 1..75: mol_type = other DNA
actttaatgcagtggagggaggagcgtttccggatcattcagcgacagtatggattaacgatgagggaggttccc

SEQ ID NO: 198445 - DNA, 75 bp, synthetic construct
  source 1..75: mol_type = other DNA
agcctaatgatatggaaggggaaagacatatatagcgttcagcgaaaatatggattaacgatgatggtggtacct

SEQ ID NO: 198446 - DNA, 75 bp, synthetic construct
  source 1..75: mol_type = other DNA
ggcgttacgatgaatggggtttcagcagcaccaggggagagcaaaaacgttcagttggatctcggtctgggtgac

SEQ ID NO: 198447 - DNA, 75 bp, synthetic construct
  source 1..75: mol_type = other DNA
atgatgctgtaccacgatgatgagccgctaacgtttgacctggtctggcagaagggcagctggcatcgcacgatg

SEQ ID NO: 198448 - DNA, 75 bp, synthetic construct
  source 1..75: mol_type = other DNA
tattacctgaaagcacaggaaacaatatatcatcgctacgtgattccgtatgccgggatctctttcaacttttta

SEQ ID NO: 198449 - DNA, 75 bp, synthetic construct
  source 1..75: mol_type = other DNA
ttgattgtgatgaagctttggctgcgtttaagcgtcaaattcgtcacagggaagtggatattatcgccgatctgc

SEQ ID NO: 198450 - DNA, 75 bp, synthetic construct
  source 1..75: mol_type = other DNA
atttaggtacggttgagccagattttgaaaataatttcctgcatggaaagctggcatttattcgtgatctggtga

SEQ ID NO: 198451 - DNA, 75 bp, synthetic construct
  source 1..75: mol_type = other DNA
tgtggaggatggaaaggaacctgataccccgtttaaaggcgtgtttaacgtcaggcttgatccagaactgcatcg

SEQ ID NO: 198452 - DNA, 75 bp, synthetic construct
  source 1..75: mol_type = other DNA
ttgggaaccggtattaaaagaggcgaaagatgccgaaatcccggtcttcttgctcgaccgttccatcgatgtgaa

SEQ ID NO: 198453 - DNA, 75 bp, synthetic construct
  source 1..75: mol_type = other DNA
cgcttcgctatttcagctactctttgcttctgacgtcgcagcattatgtggtgcgatccttggcggtattggcgg

SEQ ID NO: 198454 - DNA, 75 bp, synthetic construct
  source 1..75: mol_type = other DNA
acttggcccgcaaaccacgcataccattgtcgtaccctgtgatgaaccgttagtgccggggcaaaaagtggaatt

SEQ ID NO: 198455 - DNA, 75 bp, synthetic construct
  source 1..75: mol_type = other DNA
tggatttacgccgcgcggagatagcccacgagcgcgaagggctacccttaacgccgctggcgaactgtgtggcgg

SEQ ID NO: 198456 - DNA, 75 bp, synthetic construct
  source 1..75: mol_type = other DNA
ctcgccgtcagccagcgtctgacggagcagaacatcatcaacaaacgattgcatacctctcatgccttccactct

SEQ ID NO: 198457 - DNA, 75 bp, synthetic construct
  source 1..75: mol_type = other DNA
ctaccatcgcctatcacctcaacctgcgcggcccggcgatcacggtgcagacttcctcatcgacatccttggtgg

SEQ ID NO: 198458 - DNA, 75 bp, synthetic construct
  source 1..75: mol_type = other DNA
atttaggtacagttgtcacagattttgaaaataatgtcctgtatggaaagctggcgtttatccgtgatctggtga

SEQ ID NO: 198459 - DNA, 75 bp, synthetic construct
  source 1..75: mol_type = other DNA
atgagcgaagtaatcatgattgtctctcccggtaaatgggtatccgaagaacagctaattgcactgaaaggaata

SEQ ID NO: 198460 - DNA, 75 bp, synthetic construct
  source 1..75: mol_type = other DNA
ctggcaaatgggtatccgaagagcagttaattgcacttaaaggaatcaaaaagggaacgctaaaaaaagccaggg

SEQ ID NO: 198461 - DNA, 75 bp, synthetic construct
  source 1..75: mol_type = other DNA
cttctgtccgtgcgatgggctgcaacaccaccggtgttcgcggtattcgtttaggcgaaggcgataaagtcgtct

SEQ ID NO: 198462 - DNA, 75 bp, synthetic construct
  source 1..75: mol_type = other DNA
agcggtttagagagcttgtaagcaagtaccctaccctgtacagcctttgggattgggaaagtcgggagatacgct

SEQ ID NO: 198463 - DNA, 75 bp, synthetic construct
  source 1..75: mol_type = other DNA
gattgggaaggtcgagagattcggctagaggcgtttaaacgcgccctgacagtgttaagtagcggagagtacata

SEQ ID NO: 198464 - DNA, 75 bp, synthetic construct
  source 1..75: mol_type = other DNA
cgacgaatacaaagagctgctggatcagatcgcggaactgttgcgtattcttggtagcgccgatcgtctgatgga

SEQ ID NO: 198465 - DNA, 75 bp, synthetic construct
  source 1..75: mol_type = other DNA
tccgcgcggagccggaatgggcatgggctacggcggctgcggtggtggcggtcatatgggtatgggccactggta

SEQ ID NO: 198466 - DNA, 75 bp, synthetic construct
  source 1..75: mol_type = other DNA
ccgcagcaaaagccagagtaacggcaatcatagcggcagaacggaaggcagccgcaagggcggaacgaaaggcgc

SEQ ID NO: 198467 - DNA, 75 bp, synthetic construct
  source 1..75: mol_type = other DNA
ttcaatacctgtgtaaaggggacatgcgacctcttgacgatggagatattgtaggatgttcttctgaagacaata

SEQ ID NO: 198468 - DNA, 75 bp, synthetic construct
  source 1..75: mol_type = other DNA
ccgtgtcgttggtgacgtaatcggtaaataccatccccatggtgacttggcggtttatgacacgatcgtccgtat

SEQ ID NO: 198469 - DNA, 75 bp, synthetic construct
  source 1..75: mol_type = other DNA
cggaatggctggaaccagagttcggcgtgcgcgatggtctgtactatctgaccgaacagcaagcccaggcaattc

SEQ ID NO: 198470 - DNA, 75 bp, synthetic construct
  source 1..75: mol_type = other DNA
cccgacggcggcaatcattaacggtcgtcgcggtattgaagaagcttaccgtaccggtcgcggcaaggtatatat

SEQ ID NO: 198471 - DNA, 75 bp, synthetic construct
  source 1..75: mol_type = other DNA
cgcaatccttactgcaacacaaaacggttacggtaaacgtactgcggtggcggaatacccaactaagtcgcgtgc

SEQ ID NO: 198472 - DNA, 75 bp, synthetic construct
  source 1..75: mol_type = other DNA
gactttatcgaccgactgctggtggcgaacactcacgaccatatcctgtgcttctccagccgtggccgtgtctat

SEQ ID NO: 198473 - DNA, 75 bp, synthetic construct
  source 1..75: mol_type = other DNA
atgcgcatcgtgattgaagttaaacgcgatgcggtcggtgaagtggtgctcaacaacctctactcccagacccag

SEQ ID NO: 198474 - DNA, 75 bp, synthetic construct
  source 1..75: mol_type = other DNA
tatggaggcgctgaaaccgatcctgatcattccgctaatttccagtctggtggtcggtctggcgatgatctacct

SEQ ID NO: 198475 - DNA, 75 bp, synthetic construct
  source 1..75: mol_type = other DNA
aaacagcttgaagaagcgaaagcacgcgttcaggctcagcgcgctgaacagcaagcgaaaaaacgtgaagctgcc

SEQ ID NO: 198476 - DNA, 75 bp, synthetic construct
  source 1..75: mol_type = other DNA
tgagcaacatgtagagcatgctcgcaagcagcttgaagaagcgaaagcgcgtgttcaggcacagcgtgctgaaca

SEQ ID NO: 198477 - DNA, 75 bp, synthetic construct
  source 1..75: mol_type = other DNA
tgggctatcgattgtccagcgaatcgccaaattgcatggcatgaatgttgattttgggaatgcggaacaaggtgg

SEQ ID NO: 198478 - DNA, 75 bp, synthetic construct
  source 1..75: mol_type = other DNA
gtgatccgatgcgtgtgctgccgtgctgtatcgtgggtggggcgctgactggcgcaatctcaatggcgattggtg

SEQ ID NO: 198479 - DNA, 75 bp, synthetic construct
  source 1..75: mol_type = other DNA
ccgggtctgattggcggtatgctggcggtcagcaccggttctggctttattggcggtataattgctggcttcctg

SEQ ID NO: 198480 - DNA, 75 bp, synthetic construct
  source 1..75: mol_type = other DNA
ttgataagaaagattatctcagggctttactatgtgatacactgcccggtgattgtccaattattttttcaaatg

SEQ ID NO: 198481 - DNA, 75 bp, synthetic construct
  source 1..75: mol_type = other DNA
gtcgctgaccttatcgttcagccaacggggcctcccttgacgatcttgtcccggccattaaagttttcaacgcgc

SEQ ID NO: 198482 - DNA, 75 bp, synthetic construct
  source 1..75: mol_type = other DNA
atgaaaacgattttcaccgtgggagctgttgttctggtaaccggcttattaagtggttgcgtcaatgagcaaaag

SEQ ID NO: 198483 - DNA, 75 bp, synthetic construct
  source 1..75: mol_type = other DNA
gccagcgtattcagagtcaataataagcacgccaccaccggccccggcgaaacccaggttaccttgttctggtga

SEQ ID NO: 198484 - DNA, 75 bp, synthetic construct
  source 1..75: mol_type = other DNA
ggccatgcgctgccttaatattactcctttgtgtgctgaaaccagccaggcaaaaggccgcgttgaacgtgctca

SEQ ID NO: 198485 - DNA, 75 bp, synthetic construct
  source 1..75: mol_type = other DNA
acagcgataaagccagcgtattcagagtcaataataagcacgctaccactggtcccggtgaaacccagtttgccc

SEQ ID NO: 198486 - DNA, 75 bp, synthetic construct
  source 1..75: mol_type = other DNA
atgtctatttttacagcagcaatgattgccctggtatattggatatcccaagcaaaagtatggtacggcttttct

SEQ ID NO: 198487 - DNA, 75 bp, synthetic construct
  source 1..75: mol_type = other DNA
atgaagatgtcatctggcgaacgcatctccagccgcaggatcccacgcttgcgcaagccgtgcgggcgacgatcg

SEQ ID NO: 198488 - DNA, 75 bp, synthetic construct
  source 1..75: mol_type = other DNA
tgatccgcgagaacaaaccgctgatctcactatgggcgcaatggtatatcggcctgatggtgccaccattaatgt

SEQ ID NO: 198489 - DNA, 75 bp, synthetic construct
  source 1..75: mol_type = other DNA
gccttatctttatgcaaagttcccgaaaaacatttctgcaaagagtatatcttttaatgatattaaattattaga

SEQ ID NO: 198490 - DNA, 75 bp, synthetic construct
  source 1..75: mol_type = other DNA
tgattctgatgacctttaatcagcaaggtcgcccgtgtgtttttcagtccgatagtttttataccgcaagtgaaa

SEQ ID NO: 198491 - DNA, 75 bp, synthetic construct
  source 1..75: mol_type = other DNA
tacccccaaccgtaaactcgtcctcaaacccatcgccgggcgcgacccgcaatcggaagatctggcgctgacgca

SEQ ID NO: 198492 - DNA, 75 bp, synthetic construct
  source 1..75: mol_type = other DNA
gtcggggaggcgaatttattatcgataccgtggaggccgtgcgctttgtccctttagtgaagggtgagctggctt

SEQ ID NO: 198493 - DNA, 75 bp, synthetic construct
  source 1..75: mol_type = other DNA
ggtcagggaattaaaaactgccccttacctttaaagcggatgcgatttatatcgcataagagtgcagtactcatg

SEQ ID NO: 198494 - DNA, 75 bp, synthetic construct
  source 1..75: mol_type = other DNA
agcggatcctgtgactggttttcagctagtcaaatgcctcgatggacgcgtgttacgtattgctgacctggtgga

SEQ ID NO: 198495 - DNA, 75 bp, synthetic construct
  source 1..75: mol_type = other DNA
ttatcggctttttcctcgtgacctattcaggtttgaatactattggcatctctatttttggactctgtgccgtcc

SEQ ID NO: 198496 - DNA, 75 bp, synthetic construct
  source 1..75: mol_type = other DNA
atgacaaaaaagaaaagtgtttttatattactgctctgtctgttgtgggcgaaaacaacaatggctgacgttttc

SEQ ID NO: 198497 - DNA, 75 bp, synthetic construct
  source 1..75: mol_type = other DNA
cagccaaactgtatatcagcggaacaatatctgttccgcagagatgttatatcagagcagataaaaatagttttg

SEQ ID NO: 198498 - DNA, 75 bp, synthetic construct
  source 1..75: mol_type = other DNA
ggtgaaaccaatctcttcaacagcgcacgaaatattgcctgcgccattaaaataggtcagggaattaaaaactga

SEQ ID NO: 198499 - DNA, 75 bp, synthetic construct
  source 1..75: mol_type = other DNA
ttttcaccctgattggcctgctgctgaatattgtcagtgatatcagctatacgctggttgatccgcgtattgatt

SEQ ID NO: 198500 - DNA, 75 bp, synthetic construct
  source 1..75: mol_type = other DNA
gagatctcattttctatcctaattctcaagaagatggtgaacctgaaaacatcctgaaaatcgtctgcttattac

SEQ ID NO: 198501 - DNA, 75 bp, synthetic construct
  source 1..75: mol_type = other DNA
ggttcaacttgtcttccgaacgtagctctttacgcggcaggctaccggaaatcaaaacaactgacggcgagatga

SEQ ID NO: 198502 - DNA, 75 bp, synthetic construct
  source 1..75: mol_type = other DNA
ccgtcaccgtggtgactcaggtggaagtggataaaaacgatccgggttttgcccatcccaccaagcccatcggcg

SEQ ID NO: 198503 - DNA, 75 bp, synthetic construct
  source 1..75: mol_type = other DNA
ctggcgcgtcacggcgagaaaaaagccgtcaccgtggtgactcaggtggaagtggataaaaacgatccgggtttt

SEQ ID NO: 198504 - DNA, 75 bp, synthetic construct
  source 1..75: mol_type = other DNA
tggatttacgccgtgcggagattgcccacgagcgcgaagggctgcccttaacgccgctggcgaactgtgtggcag

SEQ ID NO: 198505 - DNA, 75 bp, synthetic construct
  source 1..75: mol_type = other DNA
catcgccctccttcctgcatcattcggaacagggcgctcagcgcctgtcagagctgccgaaccatatcaacaccc

SEQ ID NO: 198506 - DNA, 75 bp, synthetic construct
  source 1..75: mol_type = other DNA
atgagtgaaccgtcactgctccccccttcagccagtgatttcatgcgctgcgtggaacggggtacgacccggctg

SEQ ID NO: 198507 - DNA, 75 bp, synthetic construct
  source 1..75: mol_type = other DNA
atgcctgattcagccagccggtcggatagacctggagcttatatcccgggagaaaagcaatctcgatcgcatcgt

SEQ ID NO: 198508 - DNA, 75 bp, synthetic construct
  source 1..75: mol_type = other DNA
caacgctgaccagaaaatatgaaggctcaacttgtcttccaaacgtagctctttacgcggcaggctaccggaaat

SEQ ID NO: 198509 - DNA, 75 bp, synthetic construct
  source 1..75: mol_type = other DNA
aaatgggtgaagttggtaaaacgctgagggattctgttcccgggttacttaatagtaccgatctggttaatgacc

SEQ ID NO: 198510 - DNA, 75 bp, synthetic construct
  source 1..75: mol_type = other DNA
ctgccagtagcaaaactcaccccgaatttatgtgcggggatatttaccgcaatgaatacggtagccacatgacga

SEQ ID NO: 198511 - DNA, 75 bp, synthetic construct
  source 1..75: mol_type = other DNA
atgaaagagcttgtggtcgttgccattggtggcaacagcattataaaagataacgccagccagtcgattgagcat

SEQ ID NO: 198512 - DNA, 75 bp, synthetic construct
  source 1..75: mol_type = other DNA
atacctgcgctgaagaaatgtctcgcctggcaacccgtaagacgtcctttgaaggcaaggaaaaagcaattcgaa

SEQ ID NO: 198513 - DNA, 75 bp, synthetic construct
  source 1..75: mol_type = other DNA
cgggcacttcacgacacaataacgcgtaatcatcagtgccgctcaatgtggcaacgttcggccggagcaagaaac

SEQ ID NO: 198514 - DNA, 75 bp, synthetic construct
  source 1..75: mol_type = other DNA
accaattcgcatcatgttcacacccagtgcggtgattatcggtctggtttacattctgctgccgtttatggtgat

SEQ ID NO: 198515 - DNA, 75 bp, synthetic construct
  source 1..75: mol_type = other DNA
gtcaatcagctggcgagcaatgtgcaaacattaaatgccaaaatcgcccggcttgagcaggatatgaaagcacta

SEQ ID NO: 198516 - DNA, 75 bp, synthetic construct
  source 1..75: mol_type = other DNA
tcctggaactggaagcacaggtgaatgctgtttctccgcgctttacttcactggaagaaaaagaccagatcatcg

SEQ ID NO: 198517 - DNA, 75 bp, synthetic construct
  source 1..75: mol_type = other DNA
gaaaatttgctttggtgaatgccctgtctaaaacggagaagccaagtctccaagaccttcacaaggcaacaaata

SEQ ID NO: 198518 - DNA, 75 bp, synthetic construct
  source 1..75: mol_type = other DNA
tatccactttggcaaaccgcagcagcaggcgctggatcgcgtagatattgccactatgacccgctatatgcagga

SEQ ID NO: 198519 - DNA, 75 bp, synthetic construct
  source 1..75: mol_type = other DNA
gcgtggacgcggttatcgacaaagatctctccactgcactgctggcgcgcgaaattcacgctgacattttagtga

SEQ ID NO: 198520 - DNA, 75 bp, synthetic construct
  source 1..75: mol_type = other DNA
tggatttacgccgcgcggagattgctcacgagcgcgaagggctgcccttaacgccgctggcaaactgtgtggcgg

SEQ ID NO: 198521 - DNA, 75 bp, synthetic construct
  source 1..75: mol_type = other DNA
acccgtttgcctggtttctggcaaaactgccgcataaagtgcgaccgctgctgctgtttctgctgattgttccgt

SEQ ID NO: 198522 - DNA, 75 bp, synthetic construct
  source 1..75: mol_type = other DNA
atgggcctgatgttgctggtttactggcgcgcttctcgtttgctgaataagaaggcaaccgaaatagatgattag

SEQ ID NO: 198523 - DNA, 75 bp, synthetic construct
  source 1..75: mol_type = other DNA
ggctatcgccgcgtggtcgcctcgccggaaccgaaacgtattgtcgaagcacctgccattaaggcgctgatccaa

SEQ ID NO: 198524 - DNA, 75 bp, synthetic construct
  source 1..75: mol_type = other DNA
attgccgctttttctttgcgggctaaagatccagtcgggctttgctggtctgtgttcagttttattctgctatat

SEQ ID NO: 198525 - DNA, 75 bp, synthetic construct
  source 1..75: mol_type = other DNA
ggtgatcgttaatgtgcagggggatgaaccgatgatccctgcgacaatcattcgtcaggttgctgataatctcgc

SEQ ID NO: 198526 - DNA, 75 bp, synthetic construct
  source 1..75: mol_type = other DNA
aagaagtctttaatccgaatgcggttaaagtggttcttgatgctgaaggttatgcgctttacttttcacgtgcca

SEQ ID NO: 198527 - DNA, 75 bp, synthetic construct
  source 1..75: mol_type = other DNA
cgcgctacgcttctacgcgtctgcccggtaaaccgctggtcgatattaacggcaagcccatgatcgttcatgtcc

SEQ ID NO: 198528 - DNA, 75 bp, synthetic construct
  source 1..75: mol_type = other DNA
gagccaatgatccctgcgacaatcattcgtcaggttgctgataatctcgcccagcgtgaagtaggcatggctact

SEQ ID NO: 198529 - DNA, 75 bp, synthetic construct
  source 1..75: mol_type = other DNA
tgcaaaagaccttgaaaccgttggcgataacttcctgcgtcatcttggtatttatggctaccgtgcaggctttat

SEQ ID NO: 198530 - DNA, 75 bp, synthetic construct
  source 1..75: mol_type = other DNA
cggcgaaaaaatccatgttgctgtcgcgcatgaagttcctggcacaggtgtggatacccctgaagatctcgagcg

SEQ ID NO: 198531 - DNA, 75 bp, synthetic construct
  source 1..75: mol_type = other DNA
tacaggattctttcgatgcctcgggatttaatctgattatccatgaagttgcacataaactggacacccgaaatg

SEQ ID NO: 198532 - DNA, 75 bp, synthetic construct
  source 1..75: mol_type = other DNA
cggttggttcctttacaaggggttgaacttgacgctttgaaaagcggtcgtatcgccttgctgttttgtttacct

SEQ ID NO: 198533 - DNA, 75 bp, synthetic construct
  source 1..75: mol_type = other DNA
tggagttgttccagagctggtggcgtggagatacgcctcttggcgcagtgattatgtcgattgttatggctggat

SEQ ID NO: 198534 - DNA, 75 bp, synthetic construct
  source 1..75: mol_type = other DNA
atacgacgtaggctacggcgtaaaaaatagtcgcttgtcctgtaacccgatgcgcgagagtaatctgccattttt

SEQ ID NO: 198535 - DNA, 75 bp, synthetic construct
  source 1..75: mol_type = other DNA
attttgctggctcattgcgtgttattcgtaatcggggtgggacgtaaatcgctcaggaaacactatgaacctgtt

SEQ ID NO: 198536 - DNA, 75 bp, synthetic construct
  source 1..75: mol_type = other DNA
atgctgcttgaaggattactctgcggcgcactgacattaaccgttgcgtctggtctggaatatctgtcgatcccc

SEQ ID NO: 198537 - DNA, 75 bp, synthetic construct
  source 1..75: mol_type = other DNA
cggcgaaaaaatccatgttgctgttgcgcatgaagttcctggcacaggtgtggatacccctgaagatcttgagcg

SEQ ID NO: 198538 - DNA, 75 bp, synthetic construct
  source 1..75: mol_type = other DNA
gcgcagcactggtgatcaccggggaagggcgcatcgactcgcaaacggcaggcggtaaagcgccgctgggcgtgg

SEQ ID NO: 198539 - DNA, 75 bp, synthetic construct
  source 1..75: mol_type = other DNA
ggatcgggcagtacgattgctaacaatacagataccgttaccctgactgccagtgtgaaagatgtttatggacac

SEQ ID NO: 198540 - DNA, 75 bp, synthetic construct
  source 1..75: mol_type = other DNA
cgcctgaccgccggagtttgtttatttacacaaatttttttccccgtcatggcgacggcacaaaatgtggtacac

SEQ ID NO: 198541 - DNA, 75 bp, synthetic construct
  source 1..75: mol_type = other DNA
gcgcctggtaatggtattgaacaggccacacactggatgccgctaccggaaccgccgcaggaggttaaccgtggc

SEQ ID NO: 198542 - DNA, 75 bp, synthetic construct
  source 1..75: mol_type = other DNA
ccggcgcggaggtatagcagttagtccgggtaatgatcttaggcaagcaacccactggatgtcgctaccagaacc

SEQ ID NO: 198543 - DNA, 75 bp, synthetic construct
  source 1..75: mol_type = other DNA
aggtgctggcggctaacggcggcaatttagcgcgcgtggcaagcattgagatggaggaatgcgatccgcgtctgg

SEQ ID NO: 198544 - DNA, 75 bp, synthetic construct
  source 1..75: mol_type = other DNA
tatgggcactaccagctaccataattgctattgtgggcatatgtttaactatcattggatggatagttactgcct

SEQ ID NO: 198545 - DNA, 75 bp, synthetic construct
  source 1..75: mol_type = other DNA
gtcgctattcaacaatacaatgccaatcaggcgatgattctggggactaaactggaagatcagcctgccgtgcaa

SEQ ID NO: 198546 - DNA, 75 bp, synthetic construct
  source 1..75: mol_type = other DNA
taaagtcgttctcgacgccgaaggttatgcactctacttctcgcgcgccaccattccgtgggatcgtgatcgttt

SEQ ID NO: 198547 - DNA, 75 bp, synthetic construct
  source 1..75: mol_type = other DNA
cctggtacagccaaccaatccgcagctattaccttgcttgccagcacggcggaagaaagtaagtcattattgaaa

SEQ ID NO: 198548 - DNA, 75 bp, synthetic construct
  source 1..75: mol_type = other DNA
cgacaataaccagtacattggcagaaaccttaacagtcaatgtgcaagttcctggcactgaaccgccccgggttt

SEQ ID NO: 198549 - DNA, 75 bp, synthetic construct
  source 1..75: mol_type = other DNA
tagtcacgtctatgtgcagatgctgacgggcaggattggaagcgacgcagattccagcgctcaactaactgcctg

SEQ ID NO: 198550 - DNA, 75 bp, synthetic construct
  source 1..75: mol_type = other DNA
tgcggtgaaacgcctcaacgtggcggtggtgctcaatcaaaacgccccggcgctgaaaaactggaagccggagca

SEQ ID NO: 198551 - DNA, 75 bp, synthetic construct
  source 1..75: mol_type = other DNA
aggaaaatctgcccgtgtcgcagattgtcacggtgctggacggcgaaaagctcagctaccgcatcgacccgcaga

SEQ ID NO: 198552 - DNA, 75 bp, synthetic construct
  source 1..75: mol_type = other DNA
aacaacgtgaagaaacgcgtttgattatcgaagaattactggaagatggtagcgatccagacgcgctatatacca

SEQ ID NO: 198553 - DNA, 75 bp, synthetic construct
  source 1..75: mol_type = other DNA
gctggtggctattgtgctggcctatttgctggaatggccaaccgtgcgcctgcaatctattggctgttcccgccg

SEQ ID NO: 198554 - DNA, 75 bp, synthetic construct
  source 1..75: mol_type = other DNA
gccccgccgccgtgcaggctgccatcgatgagttcgtgcaactgggccgcacgaaattcctggcgcgccacggct

SEQ ID NO: 198555 - DNA, 75 bp, synthetic construct
  source 1..75: mol_type = other DNA
gtagtagtcgccgacgggcgaatcgcctggcagggtatgaccaatgagttgttgagcggtaaggcgagtgcttcg

SEQ ID NO: 198556 - DNA, 75 bp, synthetic construct
  source 1..75: mol_type = other DNA
aaagagtggaactcggtattgtgacgttcggcccggtgcatgtggaacaaccctttaccagcgccgctaattttt

SEQ ID NO: 198557 - DNA, 75 bp, synthetic construct
  source 1..75: mol_type = other DNA
ctggatgtttctggttcgatgaacggcaaacccattaatgaacttaacgccggattggttacctttcgcgatgaa

SEQ ID NO: 198558 - DNA, 75 bp, synthetic construct
  source 1..75: mol_type = other DNA
cagcctttgcctctgcaaggattacaattccgtgaactgtttagctggttatccagttcgctgcgttcggtttcc

SEQ ID NO: 198559 - DNA, 75 bp, synthetic construct
  source 1..75: mol_type = other DNA
tctggaaaccctggaaaaagcggcggttgaagcatttaaactcggctatgaagtgaccgatccagaagagctgga

SEQ ID NO: 198560 - DNA, 75 bp, synthetic construct
  source 1..75: mol_type = other DNA
cagaaaagtggcacaacattgaagccatgactgacgatacttatttcaacattgacttcttcgtggctcctgaag

SEQ ID NO: 198561 - DNA, 75 bp, synthetic construct
  source 1..75: mol_type = other DNA
ccctttaccagcgccgctaattttttcccgcccatcctgtttgcccagggcgatacaccaatgggtgcggccatt

SEQ ID NO: 198562 - DNA, 75 bp, synthetic construct
  source 1..75: mol_type = other DNA
gttctggaattaggactggaatggctggatggttttcatgaagtcttaatttatcctgcgccatttgtggtcgat

SEQ ID NO: 198563 - DNA, 75 bp, synthetic construct
  source 1..75: mol_type = other DNA
caacccaatgccgactcgtgcagaagttatggacgtggcaaacgccgtgctggatggtactgacgcagtaatgtt

SEQ ID NO: 198564 - DNA, 75 bp, synthetic construct
  source 1..75: mol_type = other DNA
ctgatgtcgggtgacctggtcattgtcacccagggcgacgtaatgagcacggtgggctctaccaacactacgcgt

SEQ ID NO: 198565 - DNA, 75 bp, synthetic construct
  source 1..75: mol_type = other DNA
tggtgctgttgagtgcgggatgtgtctcgctcgatccccactacagtacgcctgaatccccaatcccggcgacct

SEQ ID NO: 198566 - DNA, 75 bp, synthetic construct
  source 1..75: mol_type = other DNA
tggcctaaatcgctttctgttgccattggtggtggcgttgggttgatcggtgtcgatgctattcgtggggctgca

SEQ ID NO: 198567 - DNA, 75 bp, synthetic construct
  source 1..75: mol_type = other DNA
gagtgaagctaaagtgcgtgacctggtggacaggctaatcaaggcattgaccatcaaagtctctgatcctcatct

SEQ ID NO: 198568 - DNA, 75 bp, synthetic construct
  source 1..75: mol_type = other DNA
tgtggcaacgtttctgccaattttatcaacaagatcctttgcagagactgcatcgcactaataatacagactcgt

SEQ ID NO: 198569 - DNA, 75 bp, synthetic construct
  source 1..75: mol_type = other DNA
cgaatggtacgggaacaactgccgaggctgacggcacggtgtccagttttacgttagatctgtttggtcgtaatc

SEQ ID NO: 198570 - DNA, 75 bp, synthetic construct
  source 1..75: mol_type = other DNA
taaccgcgatgtgcaaaaagcgattgctgatattgactcagcacgggcgctctatgggcaaactaatgcgtcgtt

SEQ ID NO: 198571 - DNA, 75 bp, synthetic construct
  source 1..75: mol_type = other DNA
attgatgcttatgcagccagcgatcctgctgaatgttttgccgtactttctgaatatttctttagcgccccagaa

SEQ ID NO: 198572 - DNA, 75 bp, synthetic construct
  source 1..75: mol_type = other DNA
tggcgcagcgcgggcaaacttcttcccgacgatttcgctgactgccagtgccggcgttggcagtgatgcattgtc

SEQ ID NO: 198573 - DNA, 75 bp, synthetic construct
  source 1..75: mol_type = other DNA
gcgcgccagcgttgccagctatcagacacaagtgatgcaggataaaaatgcgctgaactttactggcaggtacaa

SEQ ID NO: 198574 - DNA, 75 bp, synthetic construct
  source 1..75: mol_type = other DNA
ctgcaactgactgattttacaaaccgaatcacgctctggcagtcgctgggcggcggtatgtcatcactcaagtaa

SEQ ID NO: 198575 - DNA, 75 bp, synthetic construct
  source 1..75: mol_type = other DNA
aaggcggtcaaggctgcatacgaccttgcagccggcaaggcgcccgtcagccacactcacccgtggagtcagata

SEQ ID NO: 198576 - DNA, 75 bp, synthetic construct
  source 1..75: mol_type = other DNA
accaaaagcggtcaaggctgcatacgacctggcagccggcaaggcgcctgacagccacactcacccgtggagtca

SEQ ID NO: 198577 - DNA, 75 bp, synthetic construct
  source 1..75: mol_type = other DNA
accaaaagcggtcaaggctgcatacgaccttgcagccggcaaggcgcctgtcagccacactcacccgtggagtca

SEQ ID NO: 198578 - DNA, 75 bp, synthetic construct
  source 1..75: mol_type = other DNA
cctgtgttactgcctgcgctatcaagcaagatattccggaatacattcggctgcttggcgaacaccgctatgctg

SEQ ID NO: 198579 - DNA, 75 bp, synthetic construct
  source 1..75: mol_type = other DNA
atacgcttaataaactgcttcaggatgacgcgtttttggctcgtcacgatttgcaggataaacgcgaacatttac

SEQ ID NO: 198580 - DNA, 75 bp, synthetic construct
  source 1..75: mol_type = other DNA
tgatattcctgtcaataggcagttactatctgacagataacaataaccaaaccatacagcgaatgaagttgcttc

SEQ ID NO: 198581 - DNA, 75 bp, synthetic construct
  source 1..75: mol_type = other DNA
gtggacagcaaaaccggaaaaccaaagtttagtgctgccgaactggtaggcgcactcgcaggaatcgcagagcta

SEQ ID NO: 198582 - DNA, 75 bp, synthetic construct
  source 1..75: mol_type = other DNA
agtacctgatgaagttcttgaaaaactgaccgttccgcaactccagcagatcttcaccttcgctatggaagtgat

SEQ ID NO: 198583 - DNA, 75 bp, synthetic construct
  source 1..75: mol_type = other DNA
gtagagcaggttactgcttacgccgacctggttcgcaaggtcatcccatccgtgccggacgctgtactggaaaaa

SEQ ID NO: 198584 - DNA, 75 bp, synthetic construct
  source 1..75: mol_type = other DNA
accaaaagcggtcaaggctgcatacgacctagcagccggcaaggcgcctggcagccacactcacccgtggagtca

SEQ ID NO: 198585 - DNA, 75 bp, synthetic construct
  source 1..75: mol_type = other DNA
gcacctctgaaacgctggccgccacaccaaaggccgtcaaggctgcatacgaccttgcagccggcaaggcgcccg

SEQ ID NO: 198586 - DNA, 75 bp, synthetic construct
  source 1..75: mol_type = other DNA
gtggtacgtaattctgggtggaacaaacagtcgcgcaaaagccgaattaaacggagcattctttaacataacccg

SEQ ID NO: 198587 - DNA, 75 bp, synthetic construct
  source 1..75: mol_type = other DNA
cacatttgcgatcatcagtgccagtacaactgtacccgcctcgattacgacagcgcactgaatatccgcgaactg

SEQ ID NO: 198588 - DNA, 75 bp, synthetic construct
  source 1..75: mol_type = other DNA
tgtaactacgtttgcagcaagtgtgtggatgtctgccctaaccgcgccaatgtctcaattgcggtccctggattc

SEQ ID NO: 198589 - DNA, 75 bp, synthetic construct
  source 1..75: mol_type = other DNA
agcctgggatgaatacctcaaagcctggtttgccctgcatcttctcgaagccatgttccagccttctgattctgg

SEQ ID NO: 198590 - DNA, 75 bp, synthetic construct
  source 1..75: mol_type = other DNA
catccgaaattcgcccaataccgcgatacgcttaataagctgctccaggatgacacatttttaacccgccacgga

SEQ ID NO: 198591 - DNA, 75 bp, synthetic construct
  source 1..75: mol_type = other DNA
tatcaatcctcagacaggtcagtctttcactgaacacggagccattacgacagtttatctctctgagggagatcg

SEQ ID NO: 198592 - DNA, 75 bp, synthetic construct
  source 1..75: mol_type = other DNA
tctggaaatcgctccccttcctgcgcgagtacaacaaaggcgcagtgctcaacttgggtaaacatgtggtgattg

SEQ ID NO: 198593 - DNA, 75 bp, synthetic construct
  source 1..75: mol_type = other DNA
gctctctatcaatgtcgcggcagttctgtcccgtgcctttgacggcaaactgccaatttcttattccggtggtgc

SEQ ID NO: 198594 - DNA, 75 bp, synthetic construct
  source 1..75: mol_type = other DNA
ctgaacgatatgtgccgcatcatcagccatgtccaccagcatcatcattatctgctgggccgcgtggaggtgtaa

SEQ ID NO: 198595 - DNA, 75 bp, synthetic construct
  source 1..75: mol_type = other DNA
taccctcggcaccattaataacaaaggtgcactgcccggtgaagagatgtatatgtcaggccgtgcgctgtttcc

SEQ ID NO: 198596 - DNA, 75 bp, synthetic construct
  source 1..75: mol_type = other DNA
catccggttgccgtgattggcgcgggtccagcaggtctggctgccggttacttccttgccagagcgggtcatccg

SEQ ID NO: 198597 - DNA, 75 bp, synthetic construct
  source 1..75: mol_type = other DNA
cagttcaacaacgtaccaccggagctgaacgatatgtgccgcatcatcagccatgtccaccagcatcatcattat

SEQ ID NO: 198598 - DNA, 75 bp, synthetic construct
  source 1..75: mol_type = other DNA
ttgccgcagttggcaccgctcgtcgggctaccgatgccatccttagtcgggaaaatattcgctcccaccagaacg

SEQ ID NO: 198599 - DNA, 75 bp, synthetic construct
  source 1..75: mol_type = other DNA
aagctgggcaaacatgtggtgattgtcggtgcgggtaacaccgcaatggactgcgcccgcgcggcattacgcgtg

SEQ ID NO: 198600 - DNA, 75 bp, synthetic construct
  source 1..75: mol_type = other DNA
gctgatgcaatagctgaaataaaacaatttaatcgatttgcacatgacccaatggctggcggtcacagaatgtgg

SEQ ID NO: 198601 - DNA, 75 bp, synthetic construct
  source 1..75: mol_type = other DNA
aacgcgcgcgtgcagagctgaatcaggcaaatgaagatgttgccagaaatcaggagcgacaggctaaagctgttc

SEQ ID NO: 198602 - DNA, 75 bp, synthetic construct
  source 1..75: mol_type = other DNA
taccgcctggggatcggacgtcgatttctcggtgtttcaggcgcaaaacgtctggatccgcacactgtacgatcg

SEQ ID NO: 198603 - DNA, 75 bp, synthetic construct
  source 1..75: mol_type = other DNA
gcatatatcacgaataccaatctaagctacgccaatttttcgaaagtcgtgttggaaaagtgtgagctgtgggaa

SEQ ID NO: 198604 - DNA, 75 bp, synthetic construct
  source 1..75: mol_type = other DNA
tgaatgggactctcagcacggtgaacttgaagggtatcgtgccagtgatggcgaacacctcggggcatttgaccc

SEQ ID NO: 198605 - DNA, 75 bp, synthetic construct
  source 1..75: mol_type = other DNA
cattgagttctgctatggaaagcaggaagaagaaagaagataagaaaaggagcgctgaaaataaattaaacgagg

SEQ ID NO: 198606 - DNA, 75 bp, synthetic construct
  source 1..75: mol_type = other DNA
cgaacctgtaagccaaacttacaagtcacaacacacgcagtttgaacaagttgctgacctctacgaaatgcaatt

SEQ ID NO: 198607 - DNA, 75 bp, synthetic construct
  source 1..75: mol_type = other DNA
caggagaacgaggaaattgcgctaacggtagggaaactgcgtgttgagcttgaggagacaaaatcaaaactcaac

SEQ ID NO: 198608 - DNA, 75 bp, synthetic construct
  source 1..75: mol_type = other DNA
agtgatctggttgagccgctaatatgctccgcacgctataccggaagcacctttcggcgaggagaagcaacgatt

SEQ ID NO: 198609 - DNA, 75 bp, synthetic construct
  source 1..75: mol_type = other DNA
tcgacaaagtgccgcctgatctgcgtttctttgccgggggcgaccgtagcattcgtggctataaatacaaatcta

SEQ ID NO: 198610 - DNA, 75 bp, synthetic construct
  source 1..75: mol_type = other DNA
tcgacaaagtaccgccggatctgcgtttcttcgctgggggcgaccgcagtattcgtggctacaaatacaaatcta

SEQ ID NO: 198611 - DNA, 75 bp, synthetic construct
  source 1..75: mol_type = other DNA
taatggtgatgaatttttcgaaacacagagccgcaatgtaaccggctggatgccgctaccagaaccgccgcagga

SEQ ID NO: 198612 - DNA, 75 bp, synthetic construct
  source 1..75: mol_type = other DNA
ctgtggcttcagcttcagtttcctgccccggacacgatgaagtgcatgtgtttgttgaggctgcagattacgaag

SEQ ID NO: 198613 - DNA, 75 bp, synthetic construct
  source 1..75: mol_type = other DNA
tacccaccccctccggcgaacgggatgaacagatcccgcacgagcatttcccggcaacacacagaggtcgccttc

SEQ ID NO: 198614 - DNA, 75 bp, synthetic construct
  source 1..75: mol_type = other DNA
attgtccacactgcggcgcatcggcccgtatcagaaccagcaaggcagccaatgataccggcaccatccggtata

SEQ ID NO: 198615 - DNA, 75 bp, synthetic construct
  source 1..75: mol_type = other DNA
caggatagcaatattgtctggattgaaaataatgaaaaaatagttttaaataaatatttattctatttctataaa

SEQ ID NO: 198616 - DNA, 75 bp, synthetic construct
  source 1..75: mol_type = other DNA
acggaattctggagctgcttcgcggtgtatctgattattcaggcgctggacggcaacctgttagtaccggtgttg

SEQ ID NO: 198617 - DNA, 75 bp, synthetic construct
  source 1..75: mol_type = other DNA
gtagcgtggcgcataccttcctcgatttcggcgatgattattttaccaacggcaaaccacatccgatgatcgatc

SEQ ID NO: 198618 - DNA, 75 bp, synthetic construct
  source 1..75: mol_type = other DNA
cgcttcgatttgaaaaatataacatttagcgatgataatattgattctttaatttctaaagttgaatattgtatt

SEQ ID NO: 198619 - DNA, 75 bp, synthetic construct
  source 1..75: mol_type = other DNA
tacatttatggctcatgaacgtttttcccaaacccttactccattgagtataaataaaattgaaacgattaaaaa

SEQ ID NO: 198620 - DNA, 75 bp, synthetic construct
  source 1..75: mol_type = other DNA
ctgacttaaaaaatatacatcaaataatttttgaggcttaccgcaaggttctgcaactaagtgacattgatattc

SEQ ID NO: 198621 - DNA, 75 bp, synthetic construct
  source 1..75: mol_type = other DNA
aacgccagcgtcgtcagcggcatgaccagcttttttcatgtggtctttcctgcaaacagcgaaagacggaggggg

SEQ ID NO: 198622 - DNA, 75 bp, synthetic construct
  source 1..75: mol_type = other DNA
taaatatttattctatttctataaaatagcaaaatggggaatatctgaaggtggaactattaaaagactttataa

SEQ ID NO: 198623 - DNA, 75 bp, synthetic construct
  source 1..75: mol_type = other DNA
agagggtgcggcggaaaacgctcgcacacaaatcgaatctcaattacccgcaggttataagccggtttatcttaa

SEQ ID NO: 198624 - DNA, 75 bp, synthetic construct
  source 1..75: mol_type = other DNA
gttggtcctaggggatgtggtaaaacacatttgatgcgttatgcttgggttgaatgtaaaaacgatgataacgca

SEQ ID NO: 198625 - DNA, 75 bp, synthetic construct
  source 1..75: mol_type = other DNA
aactggactacgcaggtaaagacggctggagcgcgaacgcgacgctggaaggtggcccaaacctgagttatgcga

SEQ ID NO: 198626 - DNA, 75 bp, synthetic construct
  source 1..75: mol_type = other DNA
aaagaactatatagtgtattaaaagaaagtgaattttctgatagagttaaagtaaaagaaataaatattgagttt

SEQ ID NO: 198627 - DNA, 75 bp, synthetic construct
  source 1..75: mol_type = other DNA
cgcgccacctgagactataacaaaatatgcaaaagcatataaagcagcttatcctgatttttcttttaatttgtg

SEQ ID NO: 198628 - DNA, 75 bp, synthetic construct
  source 1..75: mol_type = other DNA
atagtgaaggtgatagtgttaagttatcgctgtatgatttagataataataaaaatataaatgttaatattgata

SEQ ID NO: 198629 - DNA, 75 bp, synthetic construct
  source 1..75: mol_type = other DNA
ataattatggcgttttctttaatgggaaaagaatagatgaaaaatttagtatatcaaagctttcatttaatgaat

SEQ ID NO: 198630 - DNA, 75 bp, synthetic construct
  source 1..75: mol_type = other DNA
acgaataaagtaaggcccgtagtcgcagcaaagattgatattccaaaattcgaaaaacatcatcgtgatattggt

SEQ ID NO: 198631 - DNA, 75 bp, synthetic construct
  source 1..75: mol_type = other DNA
agttgatcccgtaacatgggaaagtataggctatacaggaagcgatagttatattaaatcgccaatatcatctcc

SEQ ID NO: 198632 - DNA, 75 bp, synthetic construct
  source 1..75: mol_type = other DNA
atggccagagtaaatctgtatatcagtaatgaggttcatgaaaaaattaatatgattgttgaaaagcgtcgtcag

SEQ ID NO: 198633 - DNA, 75 bp, synthetic construct
  source 1..75: mol_type = other DNA
atatagacttccatcaatatattctataatagattcaccattagttgatcccgtaacatgggaaagtataggcta

SEQ ID NO: 198634 - DNA, 75 bp, synthetic construct
  source 1..75: mol_type = other DNA
gaacatatatctttaagtgctcttagtgaaggattaacgggcaacagatcttttatcgactgcatttcatctatc

SEQ ID NO: 198635 - DNA, 75 bp, synthetic construct
  source 1..75: mol_type = other DNA
atcccggtgtgcaatgggatgtgcgtgactccgcctggcgttatgtcacgatccttgatctgccattctccctgg

SEQ ID NO: 198636 - DNA, 75 bp, synthetic construct
  source 1..75: mol_type = other DNA
atcctcgatctgccgttttctctggttattgatactttactgctaccgattgatattcatcacggcctatacgaa

SEQ ID NO: 198637 - DNA, 75 bp, synthetic construct
  source 1..75: mol_type = other DNA
atggagcgcaaagagtctgcatttaatcaggccgagtttaataaactacttcttgaatgcgttgtaaaaacacag

SEQ ID NO: 198638 - DNA, 75 bp, synthetic construct
  source 1..75: mol_type = other DNA
gaagctcagatggagcgtaaagagtctgcatttaatcagaccgagtttaataaattactccttgagtgtgtggta

SEQ ID NO: 198639 - DNA, 75 bp, synthetic construct
  source 1..75: mol_type = other DNA
gttttgatccgcgtgcttgggatgtggcaagcctgatggattttgctgtgccggtggtggcgtgtctgctgatct

SEQ ID NO: 198640 - DNA, 75 bp, synthetic construct
  source 1..75: mol_type = other DNA
tttctcaggaagtttagtctccaggattcccggggcggttcaataatggatataagccccttacttcatgcgctt

SEQ ID NO: 198641 - DNA, 75 bp, synthetic construct
  source 1..75: mol_type = other DNA
cactttgtgcggtggccactcagtttctggttggtctttttaccggaaactgggcttacggagcgatagccggtt

SEQ ID NO: 198642 - DNA, 75 bp, synthetic construct
  source 1..75: mol_type = other DNA
cgctttgtgctgtggctgcgcaggtactgattggtctttttaccggaaactgggtttacggggcgatagccggtt

SEQ ID NO: 198643 - DNA, 75 bp, synthetic construct
  source 1..75: mol_type = other DNA
aagggaaacgtatcaacatgccgtggtggggaggttttgatccacgcgtgtgggatgtgggaagtctgttggatt

SEQ ID NO: 198644 - DNA, 75 bp, synthetic construct
  source 1..75: mol_type = other DNA
cacccaggcagaatatcgctggatcgaaatgttcgggcatggcaagcgaatgaatatgccgtggtggggcggttt

SEQ ID NO: 198645 - DNA, 75 bp, synthetic construct
  source 1..75: mol_type = other DNA
ccctgtttgtgctggtgccttcgctgttggatcttctgccgctgttgctgctttgtatgatgcagcaggaaattc

SEQ ID NO: 198646 - DNA, 75 bp, synthetic construct
  source 1..75: mol_type = other DNA
tgtggcaagcctgatggattttgctgtgccggtggtggcgtgtctgctggtctggctgttggttaatcgtgggtg

SEQ ID NO: 198647 - DNA, 75 bp, synthetic construct
  source 1..75: mol_type = other DNA
agtttgaatatgcaaatatggtcgaagatatcagggagaaggtgtcatctgagctggaaagatttttccaaaaaa

SEQ ID NO: 198648 - DNA, 75 bp, synthetic construct
  source 1..75: mol_type = other DNA
gcaatgatgtctatgataaagtaaacgcgatagttgaaaaacgtcgtcaggagggagccagagataaagaaatca

SEQ ID NO: 198649 - DNA, 75 bp, synthetic construct
  source 1..75: mol_type = other DNA
atggatataacacctttccttcatgcactttgtgctgtggctgcacagctactgattggtctttttaccgggaac

SEQ ID NO: 198650 - DNA, 75 bp, synthetic construct
  source 1..75: mol_type = other DNA
gtgtgggatgtaggaagccttatggatttttctttcccaattatcggatgcttattggtatggattcttgcatcg

SEQ ID NO: 198651 - DNA, 75 bp, synthetic construct
  source 1..75: mol_type = other DNA
catatcagccccccatgaactggcaaatattcttacccgcgaaaaaatacttacagcacgggaaaaaaaagaaac

SEQ ID NO: 198652 - DNA, 75 bp, synthetic construct
  source 1..75: mol_type = other DNA
tacagaatttgttaactgtttgagacaacttacttcaggaaagactgaaagtgttcatcgcaccatcaataaact

SEQ ID NO: 198653 - DNA, 75 bp, synthetic construct
  source 1..75: mol_type = other DNA
ctagtgttttttttacaaacccagcagaagaaaaaccaagttatcatacggtaagaaatttctttgtcaatattt

SEQ ID NO: 198654 - DNA, 75 bp, synthetic construct
  source 1..75: mol_type = other DNA
gacccattgacagcgcctcgctgctggttgcctatattctcagttttatcaaagccatcgtgctgtttaaagtgg

SEQ ID NO: 198655 - DNA, 75 bp, synthetic construct
  source 1..75: mol_type = other DNA
gcgctgatttgtgtcgatcgtaataaacttgaacaactgagcgcagaaaaacgccgccgcacggcgctgatgttc

SEQ ID NO: 198656 - DNA, 75 bp, synthetic construct
  source 1..75: mol_type = other DNA
ttaaaatcttacagaactgttctggtatcaaaggaattcccggaaatattcgtagaatacgaagcgggcagtatc

SEQ ID NO: 198657 - DNA, 75 bp, synthetic construct
  source 1..75: mol_type = other DNA
atgcgactttttggttatgcacgagtctcaaccagtcagcaccccctcgatattcaggtcagggcgctcaaagac

SEQ ID NO: 198658 - DNA, 75 bp, synthetic construct
  source 1..75: mol_type = other DNA
tttcaggagctttatggggatcttaatattgaccaaatcgaatggaaattgattgaacttcccactaaaaatttt

SEQ ID NO: 198659 - DNA, 75 bp, synthetic construct
  source 1..75: mol_type = other DNA
tgtttgctggcttaactctgattgcgctgctggctgatttgtttcctactccagatactgttcgtgtcgagttcg

SEQ ID NO: 198660 - DNA, 75 bp, synthetic construct
  source 1..75: mol_type = other DNA
cgctggataacattgtctgcttctggcagccagaaaaagctgtaaaagcaggtgatgagtttgcattccagtatc

SEQ ID NO: 198661 - DNA, 75 bp, synthetic construct
  source 1..75: mol_type = other DNA
cgctggataacattgtctgcttctggcagccagaaaaagctgtgaaagcgggtgatgagtttgcattccagtatc

SEQ ID NO: 198662 - DNA, 75 bp, synthetic construct
  source 1..75: mol_type = other DNA
gggctgctatctctgcattggtcggctcatcacctgaagctcttgataccctgaatgagcttgcagcagcactgg

SEQ ID NO: 198663 - DNA, 75 bp, synthetic construct
  source 1..75: mol_type = other DNA
ttctgctgctgtatgtcatcaatatgggtgtcgcagaagtattacaggcaaccggaaatatgctgctgccagggc

SEQ ID NO: 198664 - DNA, 75 bp, synthetic construct
  source 1..75: mol_type = other DNA
aaggctggaatattcgtgcaaataataattttcttgccacacataaaggaagtaaagtaactgatttcgtaataa

SEQ ID NO: 198665 - DNA, 75 bp, synthetic construct
  source 1..75: mol_type = other DNA
tcatatatttggggggagagaaattgtcattattatatcaatggggataaacagcccccacactttatttatttg

SEQ ID NO: 198666 - DNA, 75 bp, synthetic construct
  source 1..75: mol_type = other DNA
ctttctttgggaaatttattagtgaattggacttttacaattacaaggttatttcatctcagaacacttatatat

SEQ ID NO: 198667 - DNA, 75 bp, synthetic construct
  source 1..75: mol_type = other DNA
ttgattatatcaacaaatctttctgaagatgatttcttaaaggctaaattaatcgacatagaaaacaaagcattg

SEQ ID NO: 198668 - DNA, 75 bp, synthetic construct
  source 1..75: mol_type = other DNA
aaatatatcaaagttaactgttggttggccatcagaaataaaaaaaacaataaaagaaaagtggcctgaaatgga

SEQ ID NO: 198669 - DNA, 75 bp, synthetic construct
  source 1..75: mol_type = other DNA
tatctgacaatgcacatctttcagaaagtgatcatcgactgttgaaaaacacagtatcacaaattgaatattatc

SEQ ID NO: 198670 - DNA, 75 bp, synthetic construct
  source 1..75: mol_type = other DNA
ttataaattatatattcaagcaaaaatcccttgattttatgttatcaggtgatgctgatattaataactttttaa

SEQ ID NO: 198671 - DNA, 75 bp, synthetic construct
  source 1..75: mol_type = other DNA
ttaatcctaatagtgaaggtgatagtgttaagctatcgctgtatgatttagataagaataaaaatataaatgtta

SEQ ID NO: 198672 - DNA, 75 bp, synthetic construct
  source 1..75: mol_type = other DNA
ctgcgccgcgttattccggcaatgggacccattgatagcgcctcgctgctggttgcctatattctcagtttcatt

SEQ ID NO: 198673 - DNA, 75 bp, synthetic construct
  source 1..75: mol_type = other DNA
tcaatggggaaaaattattgatcatgatgcctgtcaacttacatcagttaaacatttatcttcagttgaaaaatt

SEQ ID NO: 198674 - DNA, 75 bp, synthetic construct
  source 1..75: mol_type = other DNA
atgattttttagggaggatagtaatgtatactcttgatggtatagagttagaactatccgctaataaagaaagcc

SEQ ID NO: 198675 - DNA, 75 bp, synthetic construct
  source 1..75: mol_type = other DNA
tcttgccacacataaaggaagtaaagtaactgatttcgtaataaagagacaagaaatagcttataaaaggctttt

SEQ ID NO: 198676 - DNA, 75 bp, synthetic construct
  source 1..75: mol_type = other DNA
agcaccgttatatccgaacgcccccgtggtaaaaaaacgtccccggcggcccaacttcccttatgagtttaaaat

SEQ ID NO: 198677 - DNA, 75 bp, synthetic construct
  source 1..75: mol_type = other DNA
gtaaccggctcatttaaaccgtctggtcttgtttcctccggctctacaaaaataatgtccatcatttttaatgga

SEQ ID NO: 198678 - DNA, 75 bp, synthetic construct
  source 1..75: mol_type = other DNA
aaaatcgccttagtggagcagtcactgcagcccggagcctgtgtggcgcagatcgcccgtgaaaacggaatcaac

SEQ ID NO: 198679 - DNA, 75 bp, synthetic construct
  source 1..75: mol_type = other DNA
ctgcccgcaggtatgtcggagcgggaacttgatgcccgtctttacgggagtgcctccacagtatctgtcgtactt

SEQ ID NO: 198680 - DNA, 75 bp, synthetic construct
  source 1..75: mol_type = other DNA
ggcctgcagccgcccggcgaacatgaaacatcgctacttcccgtgacgttaacgccggagccggataataaaatc

SEQ ID NO: 198681 - DNA, 75 bp, synthetic construct
  source 1..75: mol_type = other DNA
aaaaaccgccggaaccgattttcaccggagtttaaatggagacttgttcagcaaactcttttacccggtgcctgt

SEQ ID NO: 198682 - DNA, 75 bp, synthetic construct
  source 1..75: mol_type = other DNA
gagccgcataccgtctcccagcttaaggggtctcctccgggctacgttggctacggtcagggcggcgtacttacc

SEQ ID NO: 198683 - DNA, 75 bp, synthetic construct
  source 1..75: mol_type = other DNA
gcagcttgagcggctgcgtcccctgctggatgcgcagtcggatgaatgcccggcacgtcagccacaggtcaccga

SEQ ID NO: 198684 - DNA, 75 bp, synthetic construct
  source 1..75: mol_type = other DNA
gcctgttgaaccagcaaatcctgccggtactaagtcagcagttgctggcgcagcaggccgcgcaccgtaaaccag

SEQ ID NO: 198685 - DNA, 75 bp, synthetic construct
  source 1..75: mol_type = other DNA
gatgaaggacgaacagacggaactgctgcatctggaaaaggatatcggcagacgggtggtcggacaggacgtggc

SEQ ID NO: 198686 - DNA, 75 bp, synthetic construct
  source 1..75: mol_type = other DNA
ttccagaccgtgatttaccgtccgctgacgcagtctgccatgcgcaccattgtggagatgaagcttgcacaggtc

SEQ ID NO: 198687 - DNA, 75 bp, synthetic construct
  source 1..75: mol_type = other DNA
ggtgggggaccccggagtggggaaaacggcactggtggaagggcttgccctgcgtattgcggaaggtaacgtgcc

SEQ ID NO: 198688 - DNA, 75 bp, synthetic construct
  source 1..75: mol_type = other DNA
ccggcaccagtgcagatacctgaacagataaatacactgccagacagtctgtgctgcgagctggttctgccggcc

SEQ ID NO: 198689 - DNA, 75 bp, synthetic construct
  source 1..75: mol_type = other DNA
gcgtagccgttgcccgtcaggttgtgttgctgtatttgccgcccgtattcgtcagggggtgtgccatgtgcaata

SEQ ID NO: 198690 - DNA, 75 bp, synthetic construct
  source 1..75: mol_type = other DNA
ctcgcatgggtgccttccaattaaatgaatctttacttgaacgaatcacccgtaaattacgtgacggatggaaac

SEQ ID NO: 198691 - DNA, 75 bp, synthetic construct
  source 1..75: mol_type = other DNA
ctgcccgcaggtatgtcggagcgagaacttgatacgggagtgcctccacagtacctgtcgtacttactgaaaaca

SEQ ID NO: 198692 - DNA, 75 bp, synthetic construct
  source 1..75: mol_type = other DNA
tcgccatcgccgcggaaagcaacgacgttattaccgccggtccacatatcatcctgccgccgtcccgtcacttta

SEQ ID NO: 198693 - DNA, 75 bp, synthetic construct
  source 1..75: mol_type = other DNA
gcttacagggcgcggcacgcgagtcggcgctgaaggtactggaactgacggcgggtaagctggcagccttttatg

SEQ ID NO: 198694 - DNA, 75 bp, synthetic construct
  source 1..75: mol_type = other DNA
ttaagacgtaagatgcgaaaagcagccatggacagaaactacctggcgtcagtccttacggggagcgggctttcg

SEQ ID NO: 198695 - DNA, 75 bp, synthetic construct
  source 1..75: mol_type = other DNA
gcaggaacttgatgcctgcctttacggacaattttccacggtaccagtcgtacgtcctgaaagcaccgttatatc

SEQ ID NO: 198696 - DNA, 75 bp, synthetic construct
  source 1..75: mol_type = other DNA
ggcctttgcccgcaggcatgtcggagcaggaacttgatgcctgcctttacggacaattttccacggtaccagtcg

SEQ ID NO: 198697 - DNA, 75 bp, synthetic construct
  source 1..75: mol_type = other DNA
gaagaacatttaccccgggttgtggccgggcgtcgcctgggtgtaccaaaatcaacagtttgtagtatgttcgtg

SEQ ID NO: 198698 - DNA, 75 bp, synthetic construct
  source 1..75: mol_type = other DNA
aagctttacttcttcactttgaagaacatttaccacggattgtggccggacgtcgcctgggcgtaccaaaatcaa

SEQ ID NO: 198699 - DNA, 75 bp, synthetic construct
  source 1..75: mol_type = other DNA
aaatcaactgtttgtagtatgttcgtgcgctttcggagagctggcctttcgtggcctttgcccgcaggcatgtcg

SEQ ID NO: 198700 - DNA, 75 bp, synthetic construct
  source 1..75: mol_type = other DNA
caggcttaaaggtaaactgacgccggcgttattacgtaagcgtcaacggagcaccgtattgacgcttatttattg

SEQ ID NO: 198701 - DNA, 75 bp, synthetic construct
  source 1..75: mol_type = other DNA
gaactgcattgcctttagccgcagtggcaccgacgaatatcccggctgcgtggtggtcatgtcgaacggggatga

SEQ ID NO: 198702 - DNA, 75 bp, synthetic construct
  source 1..75: mol_type = other DNA
tattggcggcaatgttggcgctcgcaagtgcgacgatacaggcagccgatgtcaccatcacggtgaacggtaagg

SEQ ID NO: 198703 - DNA, 75 bp, synthetic construct
  source 1..75: mol_type = other DNA
tacccaggcagaatatcgctggattggaatgttcgggcatggcaagcggattaacatgccgtggtggggcggttt

SEQ ID NO: 198704 - DNA, 75 bp, synthetic construct
  source 1..75: mol_type = other DNA
acaaatgacggcagaaatgctgctcagtcacggcttatcgctcatgaccccgtcagcatcttttcccaccccgcc

SEQ ID NO: 198705 - DNA, 75 bp, synthetic construct
  source 1..75: mol_type = other DNA
taatgacattgcggtgctgctggacgtggtagtcaaccacaaaatgggggcggatgaaaaagaagctattcgcgt

SEQ ID NO: 198706 - DNA, 75 bp, synthetic construct
  source 1..75: mol_type = other DNA
atactgggcgcgctgggtgatggagcaaacgcaatgcgacggttttcgtctcgacgcagtaaaacatattccggc

SEQ ID NO: 198707 - DNA, 75 bp, synthetic construct
  source 1..75: mol_type = other DNA
tgatccgcgcgtatgggatgttggaagcctgtttgactttgttgttcctgttactgtttgttttggtgtttattt

SEQ ID NO: 198708 - DNA, 75 bp, synthetic construct
  source 1..75: mol_type = other DNA
tgatccgcgtgtgtggaatgtggccagtctgatggattttgtggtgccggtggtggcctgtgcgggattgtatgg

SEQ ID NO: 198709 - DNA, 75 bp, synthetic construct
  source 1..75: mol_type = other DNA
atgattaagagcattgatgtcactccatttcttcactcgctttgcgcttttgtggctcaggtactggttggtatt

SEQ ID NO: 198710 - DNA, 75 bp, synthetic construct
  source 1..75: mol_type = other DNA
gatgcagcaggcgaaggtgattctggcggacgaaccgatcgcctcgctggacccggaatcggcccgcatcgtgat

SEQ ID NO: 198711 - DNA, 75 bp, synthetic construct
  source 1..75: mol_type = other DNA
atgcaaacgattatccgtgtcgagaagctcgccaaaaccttcaatcagcatcaggcgctgcacgcggttgatctg

SEQ ID NO: 198712 - DNA, 75 bp, synthetic construct
  source 1..75: mol_type = other DNA
tgggatgtggcaagcctgatggattttgctgtgccggtggtggcgtgtctgctgatctggatgttgatctgttaa

SEQ ID NO: 198713 - DNA, 75 bp, synthetic construct
  source 1..75: mol_type = other DNA
aaatccgtttttaaagatgtgaaagtatggatattcactttttttaaaatggtcatcattccgcttgttattata

SEQ ID NO: 198714 - DNA, 75 bp, synthetic construct
  source 1..75: mol_type = other DNA
ggttcatatggcggcgaaacaaaagccggtttcgctgacgctgggctggaatgatgatgaagggattggactgga

SEQ ID NO: 198715 - DNA, 75 bp, synthetic construct
  source 1..75: mol_type = other DNA
ctcactgtgctggctcgtcgctacgagtgggacatggacagcctctggcaggatttgcttggctggctcgacaaa

SEQ ID NO: 198716 - DNA, 75 bp, synthetic construct
  source 1..75: mol_type = other DNA
ttatctgacagaacgtcagttaccggacaaggccgttgacctgctcgataccgctgctgcccgtgtgcgtatgag

SEQ ID NO: 198717 - DNA, 75 bp, synthetic construct
  source 1..75: mol_type = other DNA
atgaaagctgagtgtaagttcgttgttggtagcctgacttttgctctggcaatttatcttgtttatgcttcaggc

SEQ ID NO: 198718 - DNA, 75 bp, synthetic construct
  source 1..75: mol_type = other DNA
tatattctgttatttgttattgccactcttctgctgctgcccggtagtgtcctggtcattggcagtggcattatt

SEQ ID NO: 198719 - DNA, 75 bp, synthetic construct
  source 1..75: mol_type = other DNA
cagcaggctgcgcaccgtaaaccagcccaactacggcttgcctggtatgaggaagacgggattgtactggagttc

SEQ ID NO: 198720 - DNA, 75 bp, synthetic construct
  source 1..75: mol_type = other DNA
atgggcatgatgccgcagaagaagaaaaaccatacaaaatcatggaattaccaacaagttggattgttgaaggca

SEQ ID NO: 198721 - DNA, 75 bp, synthetic construct
  source 1..75: mol_type = other DNA
aacccatcgctatccgttcgccacgctggcagaaacctacgagcgcgatgtgattaacaatcgtgatttgattaa

SEQ ID NO: 198722 - DNA, 75 bp, synthetic construct
  source 1..75: mol_type = other DNA
atgaaaatcttaaattgcccgcggttcgaaaaatatgccttgtggtttatgactggaaaaattgcgcctgaatcc

SEQ ID NO: 198723 - DNA, 75 bp, synthetic construct
  source 1..75: mol_type = other DNA
ggatgaagtggaaaaggcccaccgggatgtgctgaatctgttctaccaggtgtttgaccggggctttatgcgcga

SEQ ID NO: 198724 - DNA, 75 bp, synthetic construct
  source 1..75: mol_type = other DNA
ccctcggtatggaaaaacaggcactgctggaagatattgccgttggtcatcagaatcacggcgaacgcctgtctg

SEQ ID NO: 198725 - DNA, 75 bp, synthetic construct
  source 1..75: mol_type = other DNA
tcaccccggagcactggttactgaaactgctggagcagggggaaggagaccttaccgtgctgggcaggcgttatg

SEQ ID NO: 198726 - DNA, 75 bp, synthetic construct
  source 1..75: mol_type = other DNA
cagcaatcagggaggccgccaccacagggaaaatcacacctgcaatagcggatgtcgtaaacgacggctctaaat

SEQ ID NO: 198727 - DNA, 75 bp, synthetic construct
  source 1..75: mol_type = other DNA
gctgtgcaggtgctggaagcctatggcccgaaacggtttgcggcaaaattacgcaatgttggattgccgttgtat

SEQ ID NO: 198728 - DNA, 75 bp, synthetic construct
  source 1..75: mol_type = other DNA
tgtctggccgctaccgctggaaccctggctgcccgcatcagaacgtcgcgctgtgcgcttgccaccggcctcgac

SEQ ID NO: 198729 - DNA, 75 bp, synthetic construct
  source 1..75: mol_type = other DNA
ccgctgcttgaacggcctttaatgtcgtcgggggcggcgtggatcattcgccggattatggctgatgaagcgcaa

SEQ ID NO: 198730 - DNA, 75 bp, synthetic construct
  source 1..75: mol_type = other DNA
aacgcaaatcaacgcagtataagccaattacagcgatgcaggaggcttacgcgcaggaatataccaaatgccctg

SEQ ID NO: 198731 - DNA, 75 bp, synthetic construct
  source 1..75: mol_type = other DNA
gcggtcaaagccagcgtcatgatgcgtgatgagcgcattcagaaacgaatagctgaactgatggaagagcgcaac

SEQ ID NO: 198732 - DNA, 75 bp, synthetic construct
  source 1..75: mol_type = other DNA
gtttcgaaaaagctgacgaaaacagcagttaatgaggttttacgcagcatgaagaaatccgggctggaaaaaccg

SEQ ID NO: 198733 - DNA, 75 bp, synthetic construct
  source 1..75: mol_type = other DNA
gcgtaacatcgggttaccgctgtttctgcccaacggtgctgcgccgaatctgtcgctcattctcggcggcgcagg

SEQ ID NO: 198734 - DNA, 75 bp, synthetic construct
  source 1..75: mol_type = other DNA
gggcgtaaacccgttctcggtggcgcgcgcagcctggcaggatctgacttctggtcgggttatctctggcggtag

SEQ ID NO: 198735 - DNA, 75 bp, synthetic construct
  source 1..75: mol_type = other DNA
acggtcacgatgccaagctccctctgcagctgacaggcgttcgcgatggcgcgattattaaacgtttaccgggcg

SEQ ID NO: 198736 - DNA, 75 bp, synthetic construct
  source 1..75: mol_type = other DNA
ggatcattcgccggatcatggctgatgaagcgcagcccctgccggacggcgccttgccgcgcgttgtaccactgg

SEQ ID NO: 198737 - DNA, 75 bp, synthetic construct
  source 1..75: mol_type = other DNA
gcagctaacaggtgtgcgcgatggcgcgattattaaacgtttaccgggcgcagcggaagcgactttgccgttgca

SEQ ID NO: 198738 - DNA, 75 bp, synthetic construct
  source 1..75: mol_type = other DNA
cgcgccgcctggcaggatctaacttctggtcgggttatctccggcgggagcacgctcactatgcaggttgctcgt

SEQ ID NO: 198739 - DNA, 75 bp, synthetic construct
  source 1..75: mol_type = other DNA
ctatattcttaggaaatctatggattgacaaaaaaataccaccattagaatattgttcatttgaacgcgcttcaa

SEQ ID NO: 198740 - DNA, 75 bp, synthetic construct
  source 1..75: mol_type = other DNA
aatgcggaaccagaagaacaggttgatccgcgcaaagccgccgtcgaagccgctattgcccgagccaaagcgcgc

SEQ ID NO: 198741 - DNA, 75 bp, synthetic construct
  source 1..75: mol_type = other DNA
aactggaacaacagcaagccagcacagaaacggaagaacagatcgacccgcgtaaagccgccgttgaagccgcta

SEQ ID NO: 198742 - DNA, 75 bp, synthetic construct
  source 1..75: mol_type = other DNA
cgcaagctggagcagcaacaggctaatgcggagccagaagaacaggttgacccgcgcaaagccgccgtcgaagcc

SEQ ID NO: 198743 - DNA, 75 bp, synthetic construct
  source 1..75: mol_type = other DNA
attattggcggtttccgttcggggttatttacaccgaccgaagcaggcgcggttgccgccttctacgctctgttc

SEQ ID NO: 198744 - DNA, 75 bp, synthetic construct
  source 1..75: mol_type = other DNA
caatccgcgagtggccgaaaatctggcgcactacgcttagtggctttgatctgtcatcgaccatcatgaacatga

SEQ ID NO: 198745 - DNA, 75 bp, synthetic construct
  source 1..75: mol_type = other DNA
cgatgaacgcattcaaaaacggattgccgagttgatggaggagcgcaacaaacgaatgcgcgtcagtgctgatta

SEQ ID NO: 198746 - DNA, 75 bp, synthetic construct
  source 1..75: mol_type = other DNA
gccgattcactgggaagtggtacgcaagattattgaaaaagagcgtccggacgcggtgctgccaaccatgggggg

SEQ ID NO: 198747 - DNA, 75 bp, synthetic construct
  source 1..75: mol_type = other DNA
tcaaattgaagtggatggtggcgttaatcttgataatgtgaaacaagttaaagaagcgggggctgaccttattgt

SEQ ID NO: 198748 - DNA, 75 bp, synthetic construct
  source 1..75: mol_type = other DNA
cttacggtccctggttggttcgtattgaaagtgaaaaggatctggcgatggtgcttgtcgggaaactacctgtcg

SEQ ID NO: 198749 - DNA, 75 bp, synthetic construct
  source 1..75: mol_type = other DNA
atgcggaaccagaagaaccggtcgatccgcgcaaagccgccgtcgaagccgctattgcccgtgccaaagcgcgca

SEQ ID NO: 198750 - DNA, 75 bp, synthetic construct
  source 1..75: mol_type = other DNA
agttaattgaacgtattcatcagtttggcgtcgccgggctggggggtgcgggcttccctacgggtgttaaattgc

SEQ ID NO: 198751 - DNA, 75 bp, synthetic construct
  source 1..75: mol_type = other DNA
gttgctgatccacgtaaaaccgcagttgaagccgctatcgcccgcgccaaagcgcgcaagctggagcagcaacag

SEQ ID NO: 198752 - DNA, 75 bp, synthetic construct
  source 1..75: mol_type = other DNA
atattggtgcttcaattactaataagtttgaatcgcaatacataaaaaatcagttgggaatggatgccagtaaaa

SEQ ID NO: 198753 - DNA, 75 bp, synthetic construct
  source 1..75: mol_type = other DNA
aaagcggagaacaccttcgcctcaccacgctggaaagtgtctggattcagggaaaactacgtatgtgggggcgct

SEQ ID NO: 198754 - DNA, 75 bp, synthetic construct
  source 1..75: mol_type = other DNA
gctgcataccctcctgaatcgtaagcgactcgtcagaaccgtattgatatttactgagagctcagatcaactttc

SEQ ID NO: 198755 - DNA, 75 bp, synthetic construct
  source 1..75: mol_type = other DNA
tgaacaggaacgtcagcaaatcagcatgctggccaccattgcttcaggtattgcggggggacttgcaggcaacag

SEQ ID NO: 198756 - DNA, 75 bp, synthetic construct
  source 1..75: mol_type = other DNA
aatgttaaaatagaacccgtttacactggggagaataagcgtcctgatagttttagtgtaacatactctattgat

SEQ ID NO: 198757 - DNA, 75 bp, synthetic construct
  source 1..75: mol_type = other DNA
tgcattgggaagaactagttcagttgaagggatactagttgcttcgaaaagcgacagaaacacttatcagcaatg

SEQ ID NO: 198758 - DNA, 75 bp, synthetic construct
  source 1..75: mol_type = other DNA
gctaattggttagctgttgctgagtatgccctatatattcccatgcgtgaatcatttgctgagaaaatggcttga

SEQ ID NO: 198759 - DNA, 75 bp, synthetic construct
  source 1..75: mol_type = other DNA
ggaaaactacgtatgtgggggcgctggtcgtatattggcggtggcaggtcagggaatatgttcaatcagtttttg

SEQ ID NO: 198760 - DNA, 75 bp, synthetic construct
  source 1..75: mol_type = other DNA
cgaaggtaaagagtcgtactactggaatatccccattgcgaataccacggcgttgatgctgggaatgggaacttc

SEQ ID NO: 198761 - DNA, 75 bp, synthetic construct
  source 1..75: mol_type = other DNA
caggctaaagacaaatctattttagaattacaggcacaaaactggcagaaaaatggtcagcatcaggctatttct

SEQ ID NO: 198762 - DNA, 75 bp, synthetic construct
  source 1..75: mol_type = other DNA
tcttcttctcgctgttagcgatggcgatttaccagaactattgcagtcgcatggcgaacaaacctgagttagctc

SEQ ID NO: 198763 - DNA, 75 bp, synthetic construct
  source 1..75: mol_type = other DNA
ggcgctccggaggtgaaaaaagcgggtctggacaaacctgaacttgaggcttttttgcgggatatgatcaacggc

SEQ ID NO: 198764 - DNA, 75 bp, synthetic construct
  source 1..75: mol_type = other DNA
ggtgtgctgacgctgaaggcagacagtgtcacaaacgacgggcatctgcagggcgaaacgctgacgctggccgcc

SEQ ID NO: 198765 - DNA, 75 bp, synthetic construct
  source 1..75: mol_type = other DNA
ctgacggcatctggcgttatccggtaacaatcgaagatgtttctccacgttaccttgaagcgctgatcaattatg

SEQ ID NO: 198766 - DNA, 75 bp, synthetic construct
  source 1..75: mol_type = other DNA
tacgaagggcgggggatgagtaaacgcaaaatggctgaattgttgaatgaggtgcacccggaatggtgttttagt

SEQ ID NO: 198767 - DNA, 75 bp, synthetic construct
  source 1..75: mol_type = other DNA
gggaaattacggatgtgggggcgttggtcgtatataggtggtggcaaaccaggaaatatgttcaatcagttgctg

SEQ ID NO: 198768 - DNA, 75 bp, synthetic construct
  source 1..75: mol_type = other DNA
gctggatggcagccagccgccaacgctgttactgtcagagcaggaagggattaatggcattcgcttccccatctg

SEQ ID NO: 198769 - DNA, 75 bp, synthetic construct
  source 1..75: mol_type = other DNA
gctttgccgcgaatcgccccgctggcatggaaaaccggcaccagctatggctatcgcgatgcatgggcgataggt

SEQ ID NO: 198770 - DNA, 75 bp, synthetic construct
  source 1..75: mol_type = other DNA
caaatgccgcaactggcgccgcttttttcgcggatgatgcttggtaaaagtaaaagcgacaaaatcgtaacgacc

SEQ ID NO: 198771 - DNA, 75 bp, synthetic construct
  source 1..75: mol_type = other DNA
aaggtggcagaatttattttgtacaaaccaatggttatggcttttggtatagagaaaaaagttattgctttttga

SEQ ID NO: 198772 - DNA, 75 bp, synthetic construct
  source 1..75: mol_type = other DNA
ctcacgaatcatggtaccctggccgcagggaaaaccctttccgtcacgtcgcagaacgccgtcaccaacggcggt

SEQ ID NO: 198773 - DNA, 75 bp, synthetic construct
  source 1..75: mol_type = other DNA
ggactgggttcagacacggaacagatgcggtatctgatggataacgcggccagacaacagaaaggactgggatta

SEQ ID NO: 198774 - DNA, 75 bp, synthetic construct
  source 1..75: mol_type = other DNA
tgctgaatcaggtcggtattcccgatccggcatcgcgtctggatgtttacccgcatcagctttccggcggcatga

SEQ ID NO: 198775 - DNA, 75 bp, synthetic construct
  source 1..75: mol_type = other DNA
aagtggtcgggattgtgggtgagtccggctccggtaagtcggtcagttcactggcgattatggggctgattgatt

SEQ ID NO: 198776 - DNA, 75 bp, synthetic construct
  source 1..75: mol_type = other DNA
atgatatatccggaaattacaggcaaaagcggcgaacatttacgcctgaacacgctggaagcagtctggatccag

SEQ ID NO: 198777 - DNA, 75 bp, synthetic construct
  source 1..75: mol_type = other DNA
gctttaacgatggtctacctggtcatgccaaatatgtcactatttaacaatatcgctcaacttttcccaccagtc

SEQ ID NO: 198778 - DNA, 75 bp, synthetic construct
  source 1..75: mol_type = other DNA
ggcaggccgtccggggtgattgagatccccggcagtataacggaagaaaatgcgaaaaaactgaagagcaactgg

SEQ ID NO: 198779 - DNA, 75 bp, synthetic construct
  source 1..75: mol_type = other DNA
tttttcatccgcttgtggggctgccgccggtgtatgctgccgggctggctgccacgcaggggcatcatattcagg

SEQ ID NO: 198780 - DNA, 75 bp, synthetic construct
  source 1..75: mol_type = other DNA
atgcgtaagctggcgggtaacctgaaacagtccaacacgctgctgatcttcattaaccagatccgtatgaaaatt

SEQ ID NO: 198781 - DNA, 75 bp, synthetic construct
  source 1..75: mol_type = other DNA
gctggcaacgctgcgcaaagcgcaggatggcgagtttaatcagtatcggcgcggcaaagcggcggtaccggagtt

SEQ ID NO: 198782 - DNA, 75 bp, synthetic construct
  source 1..75: mol_type = other DNA
agcgaagatgcctgtagctacagattacattttcagtgcagccaccctacgcagcaaaggccacgctgtcacccg

SEQ ID NO: 198783 - DNA, 75 bp, synthetic construct
  source 1..75: mol_type = other DNA
atcgcgccgccgggcttatcggttccggcgggattattgcggccattatccctccctctattccactcattatct

SEQ ID NO: 198784 - DNA, 75 bp, synthetic construct
  source 1..75: mol_type = other DNA
agtggcctgcattatcgccgttatcctttctttgccgccttgcgtgaacgcgcaggtccggtgacctgggtgatg

SEQ ID NO: 198785 - DNA, 75 bp, synthetic construct
  source 1..75: mol_type = other DNA
aatggcggcaggccgtccggggtgattgagatccccggcagtataacggaagaaaatgcgaaaaaactgaagagc

SEQ ID NO: 198786 - DNA, 75 bp, synthetic construct
  source 1..75: mol_type = other DNA
ggcggtgacggtgcctgcccgggaagtgatccacgaccggtttaactgtttttttcatccgcttataggattgcc

SEQ ID NO: 198787 - DNA, 75 bp, synthetic construct
  source 1..75: mol_type = other DNA
atgtggaaccttttgcggcgaacccgaaaaaaccagaaatcaggacgtgatgtaaaagaggtgggctggaccagc

SEQ ID NO: 198788 - DNA, 75 bp, synthetic construct
  source 1..75: mol_type = other DNA
cggcaatacggtggtgctgaaaatccgcaacccccgggggcagatcaaagaactgcgtattctggactggagccg

SEQ ID NO: 198789 - DNA, 75 bp, synthetic construct
  source 1..75: mol_type = other DNA
cccagcgcgaaggtaaaacttgtgcatttatcgatgctgaacacgcgctggatccaatctatgctcgtaaactgg

SEQ ID NO: 198790 - DNA, 75 bp, synthetic construct
  source 1..75: mol_type = other DNA
gcattcaccgaagatctattccattggaataacgatctggaaggtgacgaagatcgacgcttgctgctcaacaga

SEQ ID NO: 198791 - DNA, 75 bp, synthetic construct
  source 1..75: mol_type = other DNA
cttcagggccaggcggtggaggtgccggacgacagcgatcgccgcctgcacaatctcaataatccacagccggac

SEQ ID NO: 198792 - DNA, 75 bp, synthetic construct
  source 1..75: mol_type = other DNA
cggcaatttcgacatcgacaccacggtgcgcaaccagctaaacggcatcaccaacggcttccagcagttgatggg

SEQ ID NO: 198793 - DNA, 75 bp, synthetic construct
  source 1..75: mol_type = other DNA
cgagaaacaagaagagttatcatcaatacagggtgatgccaccagcatagctcagtctcttggtctgaattatcg

SEQ ID NO: 198794 - DNA, 75 bp, synthetic construct
  source 1..75: mol_type = other DNA
tagcgatatagataattattccaaatgtcaaagtctaatttccattaccacccataaagaaatattcgcatggaa

SEQ ID NO: 198795 - DNA, 75 bp, synthetic construct
  source 1..75: mol_type = other DNA
caggtaaagagctggacaggactcaccatgggggtgggcattgcgcctacaaaaacgctggcattatacagtgat

SEQ ID NO: 198796 - DNA, 75 bp, synthetic construct
  source 1..75: mol_type = other DNA
cctactgaagctcaccagattaaccaggcgaaccacagagatctcgctgacagaattaaggtcttcaatagagtt

SEQ ID NO: 198797 - DNA, 75 bp, synthetic construct
  source 1..75: mol_type = other DNA
gatcttcgacaacaacctgattacaagcgttgtctttttcttatgaacaaaacaagcaataatcttaatcagatt

SEQ ID NO: 198798 - DNA, 75 bp, synthetic construct
  source 1..75: mol_type = other DNA
atttaaaaggtattatatcagaatcgctctataaaaaggttttaaatggactaatcggtattcgtgatcgccttc

SEQ ID NO: 198799 - DNA, 75 bp, synthetic construct
  source 1..75: mol_type = other DNA
gatactttgggaatagagataagagtaataaattagatttactgctgtgggcaactctttttctgaaaataacag

SEQ ID NO: 198800 - DNA, 75 bp, synthetic construct
  source 1..75: mol_type = other DNA
cataatattcctcattatcacatcctttttttcagtctataaattctttttacctggttattattacagataccc

SEQ ID NO: 198801 - DNA, 75 bp, synthetic construct
  source 1..75: mol_type = other DNA
gcgcgggcggaaagggaattatcaggcaaattattgccagaagaactgccaccagcagatataccagatcgagtg

SEQ ID NO: 198802 - DNA, 75 bp, synthetic construct
  source 1..75: mol_type = other DNA
tttattgctgagaagcttcttcaggaagcaaataaaatttcatttaacactggtgataatctcgattatatcaaa

SEQ ID NO: 198803 - DNA, 75 bp, synthetic construct
  source 1..75: mol_type = other DNA
aaaaaagaacgtggcacaatcgattatgttatcaacacagctgggctgctaataaaaaaacctattgattcttta

SEQ ID NO: 198804 - DNA, 75 bp, synthetic construct
  source 1..75: mol_type = other DNA
ctggtggttcaggtgcgagatttggaggaaccttaccaaagcagtttacaaagttagcaggaagagcagttatag

SEQ ID NO: 198805 - DNA, 75 bp, synthetic construct
  source 1..75: mol_type = other DNA
atccggcactggcggcagaaatcctgacgctgccttccgtcaatgaaatggcagaactgttcgatatcatcgacc

SEQ ID NO: 198806 - DNA, 75 bp, synthetic construct
  source 1..75: mol_type = other DNA
tctgaaagaaggtttaaccgtcttccgcgatcaggaattcagctctgaccttggttcccgcgcggtaaaccgtat

SEQ ID NO: 198807 - DNA, 75 bp, synthetic construct
  source 1..75: mol_type = other DNA
acaaaacttcatgcttatacttatgccatgggcggctccgttgtatataagcaattaccttctggacggtatcat

SEQ ID NO: 198808 - DNA, 75 bp, synthetic construct
  source 1..75: mol_type = other DNA
aaaagatgattgaagagagtaaaggcttcgcaaagcaggtgatgtggtttacctcgctggtatctcgtggcgaaa

SEQ ID NO: 198809 - DNA, 75 bp, synthetic construct
  source 1..75: mol_type = other DNA
tgcgcaggcgatcatcagtgctaatccggggcttaaccgcgccattcgtctgcgtcggcaaaaagagagtggggc

SEQ ID NO: 198810 - DNA, 75 bp, synthetic construct
  source 1..75: mol_type = other DNA
gccatcgccgctttcccggagttcctgttcagcaagcagacaacttgacccagttacgtcgcttagcctgtagcg

SEQ ID NO: 198811 - DNA, 75 bp, synthetic construct
  source 1..75: mol_type = other DNA
atctgccgcctttatatcgtgcattgactgacattggtgcggtgaaggtcgtcaaaaaggagatggcccaggggc

SEQ ID NO: 198812 - DNA, 75 bp, synthetic construct
  source 1..75: mol_type = other DNA
cgtaaacgccgtaacctggggctgaacaaagacgatgcactgaactttggtggtcagcaacaggagttgtggtgt

SEQ ID NO: 198813 - DNA, 75 bp, synthetic construct
  source 1..75: mol_type = other DNA
aaaccagcagccaggcgttaagcagcgcgcaggcgatcatcagtgctaatccggggcttaaccgcgccattcgtc

SEQ ID NO: 198814 - DNA, 75 bp, synthetic construct
  source 1..75: mol_type = other DNA
ggaaaatggacgtcattgggtacggtggcaggacccgttcccgaaaccgtgctacctgtttgcgctggtggcagg

SEQ ID NO: 198815 - DNA, 75 bp, synthetic construct
  source 1..75: mol_type = other DNA
taaagtaggtagtcccgtcgcattcgttggcgttttgttcgctcttcttggtataaaaatcaggcggcgagtcag

SEQ ID NO: 198816 - DNA, 75 bp, synthetic construct
  source 1..75: mol_type = other DNA
aatagcccttcggcttattatttaatgggatatagtgcgattccgtggtatatattttctgcattattattcttt

SEQ ID NO: 198817 - DNA, 75 bp, synthetic construct
  source 1..75: mol_type = other DNA
ccgatgacgcgcctgaacgccatggggatgccgtccattgccatgtggatgcagtgtgggttggttactgtcttc

SEQ ID NO: 198818 - DNA, 75 bp, synthetic construct
  source 1..75: mol_type = other DNA
aaaaccagaaatcaggacgtgacgtaagagaagtgggctggcggtccctgtttcaggcggtggctgagccttttg

SEQ ID NO: 198819 - DNA, 75 bp, synthetic construct
  source 1..75: mol_type = other DNA
ttcccagtgcctgcagacgctgattgagtccattgaactgttactggatgaggcgctggaaacgggggaaaacga

SEQ ID NO: 198820 - DNA, 75 bp, synthetic construct
  source 1..75: mol_type = other DNA
tggtctttgcttgtggttgctgtcattacacctctcaccttcagttctggactttgatattgatgtgcccttgtc

SEQ ID NO: 198821 - DNA, 75 bp, synthetic construct
  source 1..75: mol_type = other DNA
ggcctgagccgaaagacggtgagccaaggctacatatcaaggaatccgacaactcgtttgtggctccggagggga

SEQ ID NO: 198822 - DNA, 75 bp, synthetic construct
  source 1..75: mol_type = other DNA
tcagttaacggaaaccgtgacgaattaattgatacaactcaggcaaggccaattcagtattgcattaatgggacg

SEQ ID NO: 198823 - DNA, 75 bp, synthetic construct
  source 1..75: mol_type = other DNA
attataaaaatcatccagtgcttttcatcggcaccggttttagtcttaggtatcttcaaaactcttttggctgga

SEQ ID NO: 198824 - DNA, 75 bp, synthetic construct
  source 1..75: mol_type = other DNA
caggggacgccgaaagcgttgtggccggaaccgatgacgcgcctgaatgcgatggggatgccgtctatcgccatg

SEQ ID NO: 198825 - DNA, 75 bp, synthetic construct
  source 1..75: mol_type = other DNA
gtcggcaatgattgcgacggtggttgtcgtactggtggtgacatttgcgaacgtcttcaccattattcagcctgt

SEQ ID NO: 198826 - DNA, 75 bp, synthetic construct
  source 1..75: mol_type = other DNA
ctgcattatcgccgttatcctttctttgctgccttgcgtgaacgcgcaggtccggtaacctgggtgatgatgatc

SEQ ID NO: 198827 - DNA, 75 bp, synthetic construct
  source 1..75: mol_type = other DNA
gccacagtggattacgtggatgacaaactgaaagagcatgaacagtcacgacgtcacccggacgcctctctgacc

SEQ ID NO: 198828 - DNA, 75 bp, synthetic construct
  source 1..75: mol_type = other DNA
gttcaacttagcagcgccaccaacagcacgtctgaaacgctggctgcgacgcctaaggctgttaaggcggcatat

SEQ ID NO: 198829 - DNA, 75 bp, synthetic construct
  source 1..75: mol_type = other DNA
taacgacaccggatttaggcaagatggagatggtattattagcttctattcaaatggttcgcgcatcggacatat

SEQ ID NO: 198830 - DNA, 75 bp, synthetic construct
  source 1..75: mol_type = other DNA
aacggattagggtcacaataacgggcggcggtggcggagggggcggctgcaaggctatatccaataatgaaacgt

SEQ ID NO: 198831 - DNA, 75 bp, synthetic construct
  source 1..75: mol_type = other DNA
tcagcagcgctactaacagcacgtcagaaacgcaggctgccacaccaaaagccgtgaaggctgcatatgatcttg

SEQ ID NO: 198832 - DNA, 75 bp, synthetic construct
  source 1..75: mol_type = other DNA
tgtcgctaatgatggcaagatgtactgtcgattcagcatgttatcgaaaattgccgatgatgaaacaccgtggaa

SEQ ID NO: 198833 - DNA, 75 bp, synthetic construct
  source 1..75: mol_type = other DNA
gtcctgcactgaccggaacgccaacaacgccaactgcgccaaaagggactaataatacccagatcgcaagcacgg

SEQ ID NO: 198834 - DNA, 75 bp, synthetic construct
  source 1..75: mol_type = other DNA
ccttcaccaaaaatattggggcctgccgcgcatatagcgcatggctgaatattggtggcgatagtcaggtctgga

SEQ ID NO: 198835 - DNA, 75 bp, synthetic construct
  source 1..75: mol_type = other DNA
tatgacctggctaacgggaaatataccgcacaggacgccaccacagcgcgaaaaggccttgtccagctcagtagt

SEQ ID NO: 198836 - DNA, 75 bp, synthetic construct
  source 1..75: mol_type = other DNA
atgcgtgaccagaatgttattttgggacgtaatgcggtatccactgatggtgctcaggctttgctccgtcaggac

SEQ ID NO: 198837 - DNA, 75 bp, synthetic construct
  source 1..75: mol_type = other DNA
ggaatgatgtcgccagcctggcaaccctgacaaaagtcgggcgggatattcttgcgaaatcgaccgttgccgccg

SEQ ID NO: 198838 - DNA, 75 bp, synthetic construct
  source 1..75: mol_type = other DNA
acgccaccaacagcacgtctgaaacgctggcagcgacaccaaaagccgttaaggcagtaatggatgaaacgaaca

SEQ ID NO: 198839 - DNA, 75 bp, synthetic construct
  source 1..75: mol_type = other DNA
ctgacggtaaaaggcaccgtgcaactcagcagcgccactaacagcacatcagaaacgcaggctgccactccaaag

SEQ ID NO: 198840 - DNA, 75 bp, synthetic construct
  source 1..75: mol_type = other DNA
gacaacggcaatgaatatttcaaatggagaagcaaacaaagcaccacaacaaaagacctgatgacgctgaaatgg

SEQ ID NO: 198841 - DNA, 75 bp, synthetic construct
  source 1..75: mol_type = other DNA
atgagtaccacaacacgtaaatttaaaaccgttatcaccaatacgggtgccaaaaaattagctcaggcagccgcg

SEQ ID NO: 198842 - DNA, 75 bp, synthetic construct
  source 1..75: mol_type = other DNA
aaaccgttatcaccgatacgggtgccaaaaaattagcgcaggcagccgcgccagatggtaagcctgtccgcctga

SEQ ID NO: 198843 - DNA, 75 bp, synthetic construct
  source 1..75: mol_type = other DNA
atgggcagagttcctgcagcgcgcggtggaagagaacaccggtgccgatgctgagttgatgcttgcagacatcat

SEQ ID NO: 198844 - DNA, 75 bp, synthetic construct
  source 1..75: mol_type = other DNA
atgttcaggatacagggtccaactctgccgataatatagcgggcgtttattacagacccgttcaaaagtatataa

SEQ ID NO: 198845 - DNA, 75 bp, synthetic construct
  source 1..75: mol_type = other DNA
ctcatggattgatatgcgaaaccagaatgtcatttttggtagaaacgcagtatcaacaagttctgcgcaggcttt

SEQ ID NO: 198846 - DNA, 75 bp, synthetic construct
  source 1..75: mol_type = other DNA
gcgggtaagcaaccgaaagatgccaccctgacggcgctggcggggcttgctactgtggcagacaggtttccgtat

SEQ ID NO: 198847 - DNA, 75 bp, synthetic construct
  source 1..75: mol_type = other DNA
atcgacagtcaatgcactgaggatttttaattcatcctttggtgctatttttcgccgttctgaagaacacctgca

SEQ ID NO: 198848 - DNA, 75 bp, synthetic construct
  source 1..75: mol_type = other DNA
ccggtgggcttacttttgcaaacgactcaatccttgcctggattagaaatactgactgggcgaagattggattta

SEQ ID NO: 198849 - DNA, 75 bp, synthetic construct
  source 1..75: mol_type = other DNA
aaatgatgccgacagcgatactgattcatacatgtggtttgaaacaggcgacaacggcaatgaatatttcaaatg

SEQ ID NO: 198850 - DNA, 75 bp, synthetic construct
  source 1..75: mol_type = other DNA
aagacctgatgacgctgaaatgggatgcactaaatattcttgttaatgccgtcattaatggctgtcttggagttg

SEQ ID NO: 198851 - DNA, 75 bp, synthetic construct
  source 1..75: mol_type = other DNA
atgagcataaaattcagaaccgttatcaccactgccggtgcagcaaagctggcagcggcaaccgcgccgggaagg

SEQ ID NO: 198852 - DNA, 75 bp, synthetic construct
  source 1..75: mol_type = other DNA
ctgacggctgacagcactgatgctgttaacggctctcagctgaaaaccaccaacgatgctgtggcgacgaatacc

SEQ ID NO: 198853 - DNA, 75 bp, synthetic construct
  source 1..75: mol_type = other DNA
cgttaatgtgaaaaatggcgcgatcaagtctgacagttacgatgccattaatggttcacagctttatgccattag

SEQ ID NO: 198854 - DNA, 75 bp, synthetic construct
  source 1..75: mol_type = other DNA
ttctgcaaccagcaccgatgtagtaaacggctctcaattgtacgacctgcagcaggatgctctgttgtggaacgg

SEQ ID NO: 198855 - DNA, 75 bp, synthetic construct
  source 1..75: mol_type = other DNA
tctgggtaatcaaagccaggcaatcgctgcgggtgccattgccatcggtcaggggaataaagctgacggcgtaaa

SEQ ID NO: 198856 - DNA, 75 bp, synthetic construct
  source 1..75: mol_type = other DNA
caaacaccaccaacatcactaacctgacgagcgaagtggctggcaacaccaccagtatcactaacctgaccgatg

SEQ ID NO: 198857 - DNA, 75 bp, synthetic construct
  source 1..75: mol_type = other DNA
tagtgcggcacatggtacagatgccaccagcaaaatcactaacgtcaccgctggcgacctttcagccaccagcac

SEQ ID NO: 198858 - DNA, 75 bp, synthetic construct
  source 1..75: mol_type = other DNA
acacaacatggctgggcgaagaagctgcacgtaacactcgtattctggaacgccagccgcgcgtgataagccatg

SEQ ID NO: 198859 - DNA, 75 bp, synthetic construct
  source 1..75: mol_type = other DNA
tcctgatatcacccctgatgacctgctgctggaagtggcgaaaaacatctgtgaatgtagcaaaccgcacatcgc

SEQ ID NO: 198860 - DNA, 75 bp, synthetic construct
  source 1..75: mol_type = other DNA
aacgttacgatgctaaacgtcaggcgaaaatgcgtgcggcgctggagcagttaaaaggactggaaaatctttctg

SEQ ID NO: 198861 - DNA, 75 bp, synthetic construct
  source 1..75: mol_type = other DNA
caatagcaatgggtagtggagcaactgccgttggtgaccattctctggcgctagggggggcaactcagactctag

SEQ ID NO: 198862 - DNA, 75 bp, synthetic construct
  source 1..75: mol_type = other DNA
tatggcaataggatttaaagccaaagcatacggggcgggaagtacagcatttggctatgatgcacaagcaagcgg

SEQ ID NO: 198863 - DNA, 75 bp, synthetic construct
  source 1..75: mol_type = other DNA
cacgcacagtcggggatcagttccgatatcggcaccacgcctggcgcacgcttgccatatggtgatgaaccggat

SEQ ID NO: 198864 - DNA, 75 bp, synthetic construct
  source 1..75: mol_type = other DNA
cgcaggtaaattcagtgccaaacacggtactaatggtgacgcaagcgtgatcactgatgtcgcagatggtgaaat

SEQ ID NO: 198865 - DNA, 75 bp, synthetic construct
  source 1..75: mol_type = other DNA
cgcttgcccaggtggaagcagacagtcttcagactgtgacaaaaattgtcagggatgcgcaaaaaataaatccca

SEQ ID NO: 198866 - DNA, 75 bp, synthetic construct
  source 1..75: mol_type = other DNA
tcacaacagggaaagagaacagggcttgttgaaacagacctgaatggctcgaccaaaaaatggaataaacgcaga

SEQ ID NO: 198867 - DNA, 75 bp, synthetic construct
  source 1..75: mol_type = other DNA
atgattatcgtaatcggtggtgataaaggcggcacaggtaaatcacatctggcaaccaacgtaacagtttgcctc

SEQ ID NO: 198868 - DNA, 75 bp, synthetic construct
  source 1..75: mol_type = other DNA
ttcagcgtcatccgaccatgcgtgtgttccataagttaatggattaccacttaaatgaagcggaagaagggcgtg

SEQ ID NO: 198869 - DNA, 75 bp, synthetic construct
  source 1..75: mol_type = other DNA
cgtttggtgcggtggataacagcaacagtgatgttgtggctgttatggcctcggtcacttaccgcggtgctgatg

SEQ ID NO: 198870 - DNA, 75 bp, synthetic construct
  source 1..75: mol_type = other DNA
tgtggaagaggtgattgagttctacgaaacttcccgctttaactatggcgtttctctcgatcacatcgtctttgg

SEQ ID NO: 198871 - DNA, 75 bp, synthetic construct
  source 1..75: mol_type = other DNA
tcaccaacgttacggcgggtgaactgaacgcatccagtaccgatgcggttaacggttctcagttaaaaaccacta

SEQ ID NO: 198872 - DNA, 75 bp, synthetic construct
  source 1..75: mol_type = other DNA
cagagggaggagtcgcagttgcaataggaaccggagcgacagccagtggagaaggaagtaccgcattcggttacg

SEQ ID NO: 198873 - DNA, 75 bp, synthetic construct
  source 1..75: mol_type = other DNA
ctgtggaatgatgctaaaaatgcattcagtgcagctcacgaccaggataccaccagcaaaatcaccaacgttaaa

SEQ ID NO: 198874 - DNA, 75 bp, synthetic construct
  source 1..75: mol_type = other DNA
gaatcaatatcccgacttaaatcagaaacagtggtaatacatctcaattcttccagactaggagttatggcacat

SEQ ID NO: 198875 - DNA, 75 bp, synthetic construct
  source 1..75: mol_type = other DNA
ctcaatgtcagatacagatatcgagtctcttgtaaaagcatcgagcgttcaatggataaaaaacaatccgcaact

SEQ ID NO: 198876 - DNA, 75 bp, synthetic construct
  source 1..75: mol_type = other DNA
ttttttctgaggaggagctttcagaaaataaatttcgtgaagagattggagtatcacgcagaatatcctattcgc

SEQ ID NO: 198877 - DNA, 75 bp, synthetic construct
  source 1..75: mol_type = other DNA
ataacgcaggtatgctggaagttaataacaacgccgtcttcaataacagcggtgagtttatcctcgataacaaca

SEQ ID NO: 198878 - DNA, 75 bp, synthetic construct
  source 1..75: mol_type = other DNA
cctggtggcagatggtgagtcgacaaacttcattaattctgtggtgataactgacgcagtgcccggaagcgttat

SEQ ID NO: 198879 - DNA, 75 bp, synthetic construct
  source 1..75: mol_type = other DNA
agtattaatggcttagtggtcaatggtgataataaccttatcgagcttaatggtgggattcgtttcattggcgaa

SEQ ID NO: 198880 - DNA, 75 bp, synthetic construct
  source 1..75: mol_type = other DNA
gtactgatagttatagtggtgcagggaaaaatgcaacagcaattaaccaattgggcggtgttataactatttata

SEQ ID NO: 198881 - DNA, 75 bp, synthetic construct
  source 1..75: mol_type = other DNA
tggggatagctccgcgcatatcatagatggtatatcaattattggtgataatacagttaacattagtggccattc

SEQ ID NO: 198882 - DNA, 75 bp, synthetic construct
  source 1..75: mol_type = other DNA
actcaccaccgcagacggtacaactggcgaacatttccatattaacgatgccactattaccgaccatggcggcaa

SEQ ID NO: 198883 - DNA, 75 bp, synthetic construct
  source 1..75: mol_type = other DNA
aaacaggtcagcggtagccaggcaaccacggtattccgcgaagcgcgcgtgttaagcaaccgctttagtatgctg

SEQ ID NO: 198884 - DNA, 75 bp, synthetic construct
  source 1..75: mol_type = other DNA
atgcgcaaaattacctcagtaagcgttggcgaacaattagatagttttattacccggatggtccagtctggtcgt

SEQ ID NO: 198885 - DNA, 75 bp, synthetic construct
  source 1..75: mol_type = other DNA
ttccgggtgacggatgagtcaacccggcgctggctggaagaatttttatcatggcatggtggttaccgtgccttt

SEQ ID NO: 198886 - DNA, 75 bp, synthetic construct
  source 1..75: mol_type = other DNA
cagcggtggtgcgcgcggaattaatgtggatggaaatggcaccattatcagtaataaaggcaatattaccgtcgt

SEQ ID NO: 198887 - DNA, 75 bp, synthetic construct
  source 1..75: mol_type = other DNA
cctacgctaaaaatgaagatggcagttacacgctcaccggaccaaatggcaaaacgacgatcgtaaaaacctggt

SEQ ID NO: 198888 - DNA, 75 bp, synthetic construct
  source 1..75: mol_type = other DNA
actgaaggttacgccatatgcgggtgtaaaactgcgtcacacactggaaggtggctatcaggagcgcaatgccgg

SEQ ID NO: 198889 - DNA, 75 bp, synthetic construct
  source 1..75: mol_type = other DNA
accaacggtggcaccggcacccagattaatggtgatgacgccacggcaaacaacaacggcaaaaccaccgttgac

SEQ ID NO: 198890 - DNA, 75 bp, synthetic construct
  source 1..75: mol_type = other DNA
aacaatgaaggttttggtatgctggcgctgaacggcggtacagcggtaaaccagggtactatcaatctgacggcg

SEQ ID NO: 198891 - DNA, 75 bp, synthetic construct
  source 1..75: mol_type = other DNA
gcgcggagaatatcacttcctcttcagttgtctggaacgctaaaggcagtaccgatgccagcggcaacgttgacg

SEQ ID NO: 198892 - DNA, 75 bp, synthetic construct
  source 1..75: mol_type = other DNA
cggcaccttgaaagccaataaccttgttatcagtgacaacgtcaaggtaaatactggctttagtgcaggaactgc

SEQ ID NO: 198893 - DNA, 75 bp, synthetic construct
  source 1..75: mol_type = other DNA
cagtggtaacgttgacgtcaccatgaacaaaaacgcttataccgatgtggctaccgatgcctcggtgaatgatgt

SEQ ID NO: 198894 - DNA, 75 bp, synthetic construct
  source 1..75: mol_type = other DNA
ttcgccgcaggcacagcagacactacagtcaccttcgataacgtggtgcagggcagtaacctgacggatgctgat

SEQ ID NO: 198895 - DNA, 75 bp, synthetic construct
  source 1..75: mol_type = other DNA
acaatgccgtttttaacaaccacggcgaatttattctcgataacaacaaaaacgccgttcacatcaaccagtctg

SEQ ID NO: 198896 - DNA, 75 bp, synthetic construct
  source 1..75: mol_type = other DNA
cctgagcgaaagccagacgatgagtctggagtacggtatcgcgcgcctcgatggcgacggtgcgcagaaagcggg

SEQ ID NO: 198897 - DNA, 75 bp, synthetic construct
  source 1..75: mol_type = other DNA
aataaaggctctgttctcaatgccgaaggtgctgtcattgatatgtatggacgcggtagcattggcatgttagcc

SEQ ID NO: 198898 - DNA, 75 bp, synthetic construct
  source 1..75: mol_type = other DNA
ggtattcagatcgacggcgacaaggcggttgttaacaacgaaggcgagagcaccatcaccaacggcggcaccggt

SEQ ID NO: 198899 - DNA, 75 bp, synthetic construct
  source 1..75: mol_type = other DNA
taataacggaaaagtgattcaggacggcgatctggatgtcagcggcgggggccacggcattgatatcaccggtga

SEQ ID NO: 198900 - DNA, 75 bp, synthetic construct
  source 1..75: mol_type = other DNA
gggcgtttggtggttccactaaagcgattgtgaataatgggataatcaacctgttgtgtaatattggttgcgaga

SEQ ID NO: 198901 - DNA, 75 bp, synthetic construct
  source 1..75: mol_type = other DNA
gatcgacggcgacaaggccatcgtcaataacgaaggcgacagcaccatcagcaacggcggcaccggcacacagat

SEQ ID NO: 198902 - DNA, 75 bp, synthetic construct
  source 1..75: mol_type = other DNA
tagtgattgatacgcttgctgaacgagccggtggtcacacgaaattcatcaaccaacgtgacgaagattacttag

SEQ ID NO: 198903 - DNA, 75 bp, synthetic construct
  source 1..75: mol_type = other DNA
tttgatgtaagtgatgcgaccattgagaggtatatagctaacaacttggatgagctgaagaacaatggctacatc

SEQ ID NO: 198904 - DNA, 75 bp, synthetic construct
  source 1..75: mol_type = other DNA
gtttcttgggtgagaaaagtaaatcacttgaagaacgcctgaacgatccagaaaccctagaagtgttcaaaagac

SEQ ID NO: 198905 - DNA, 75 bp, synthetic construct
  source 1..75: mol_type = other DNA
gattcaaacccgttaggaaacaaaatacatgcagtccaaaaaataaaattgtacagtaaactaccgtacggtgct

SEQ ID NO: 198906 - DNA, 75 bp, synthetic construct
  source 1..75: mol_type = other DNA
aaaacatcgcaagaacgctatacgcctacgcgactggtaacgaaatttatctattgcatgcatttgtaaaaaaga

SEQ ID NO: 198907 - DNA, 75 bp, synthetic construct
  source 1..75: mol_type = other DNA
acgaaatctatctgctgcatgcatttgtgaaaaagacgcaaaagacaccaacgaaagctattgaaatcgccagga

SEQ ID NO: 198908 - DNA, 75 bp, synthetic construct
  source 1..75: mol_type = other DNA
ggtttgggagaaggctctgcattaccggttggggtgcctgttccgtggccttcagctacgccgccaacaggctgg

SEQ ID NO: 198909 - DNA, 75 bp, synthetic construct
  source 1..75: mol_type = other DNA
gtccggcactcaccggaacgccaacagcccccacggcggagcagtcggtcaacaatacacagattgccactacgg

SEQ ID NO: 198910 - DNA, 75 bp, synthetic construct
  source 1..75: mol_type = other DNA
acatgattaataactcaaggacagccaatggcaccgatggtaaggcgtacatggacaataacggtaactggcttt

SEQ ID NO: 198911 - DNA, 75 bp, synthetic construct
  source 1..75: mol_type = other DNA
ctgcattactcaacttgggaattaatcccaggcaacttgtatttgctccaaacaaatttcctgatttattctcaa

SEQ ID NO: 198912 - DNA, 75 bp, synthetic construct
  source 1..75: mol_type = other DNA
cttggcacacgtgttgtccagaccatgcagaaaggggtgatgtatgagaaagcagggcacgtaattaccgggctt

SEQ ID NO: 198913 - DNA, 75 bp, synthetic construct
  source 1..75: mol_type = other DNA
cgctggcggggcttgctactgcggcagacaggtttccgtattttacggggaatgatgttgccagcctggcgaccc

SEQ ID NO: 198914 - DNA, 75 bp, synthetic construct
  source 1..75: mol_type = other DNA
ccaaaggtacggcaaaaagccgctataaagctcgcagggaagaacttattgcagagcgacgcagtagtgaaagac

SEQ ID NO: 198915 - DNA, 75 bp, synthetic construct
  source 1..75: mol_type = other DNA
atgagtatgtcatcactgcacgggttatcaggcctgacggtcgtggagagacaccttttgcgctgagtccgccag

SEQ ID NO: 198916 - DNA, 75 bp, synthetic construct
  source 1..75: mol_type = other DNA
cctaaaaaaaaagaaaacggcggggagaaggtatattacctctccgtctcatttatcccccggcagcatcagaaa

SEQ ID NO: 198917 - DNA, 75 bp, synthetic construct
  source 1..75: mol_type = other DNA
gtacatacctgctctcgccaaagctgaaaactaacggtaagttgatgatggcagatgataaaagcaaagtgtacg

SEQ ID NO: 198918 - DNA, 75 bp, synthetic construct
  source 1..75: mol_type = other DNA
cgcgtcgaaattgcccatttctactgtgagttagccctgcagcatatggccagcgacgatctcgatcgtgccatg

SEQ ID NO: 198919 - DNA, 75 bp, synthetic construct
  source 1..75: mol_type = other DNA
ccgtcatgccgggatgcgtgcttttttgtggcgtccgccaaaacacaacaggactgtccgggttgtctgcaggga

SEQ ID NO: 198920 - DNA, 75 bp, synthetic construct
  source 1..75: mol_type = other DNA
cctgtgattttagggtcgaggcgaatgatcgtgattcatttgaacagtttttagtccggcatggaggttataaat

SEQ ID NO: 198921 - DNA, 75 bp, synthetic construct
  source 1..75: mol_type = other DNA
ccaccctactccactgcctgaacggacagtatcagtatgccgggctggcgggtgaactggtgcagaaagccgacc

SEQ ID NO: 198922 - DNA, 75 bp, synthetic construct
  source 1..75: mol_type = other DNA
ggatggatgtttataaaattcattggtacgcataaagaatatgacaaaatagatgctgaaactgtcagcctggag

SEQ ID NO: 198923 - DNA, 75 bp, synthetic construct
  source 1..75: mol_type = other DNA
tccagttacagcttgagtttccagaagtagccccgcgaaatggcgaagactggagcgagcatttaaaacgcttgc

SEQ ID NO: 198924 - DNA, 75 bp, synthetic construct
  source 1..75: mol_type = other DNA
atggacaagcgcagaaccattgccttcaaaccaaatccagatgtaaatcaaacagataaaattgtttgcaataca

SEQ ID NO: 198925 - DNA, 75 bp, synthetic construct
  source 1..75: mol_type = other DNA
agcgaggatctcggcgcaggtacgcatgttgaagtcattgcgatagaagggataacgctgatcatccgtgcggtc

SEQ ID NO: 198926 - DNA, 75 bp, synthetic construct
  source 1..75: mol_type = other DNA
gcgactgttcgacgagatgcaggcacaccagttgctcattccctgtgaggacaaagccatctggcgatgtcgaat

SEQ ID NO: 198927 - DNA, 75 bp, synthetic construct
  source 1..75: mol_type = other DNA
ttgcagtttgcggaagacgccagtccgatggctcacccaatccgtccggatatggtcattgaaatgaacaacttc

SEQ ID NO: 198928 - DNA, 75 bp, synthetic construct
  source 1..75: mol_type = other DNA
ttgtcgccatcaccaaagatgcatccacgcttaaccctgaaggttttagcgtcgttgaggttcccgatataacgg

SEQ ID NO: 198929 - DNA, 75 bp, synthetic construct
  source 1..75: mol_type = other DNA
atgatgcacttaaagaacataaaagcgggtaatactaaaacaccggagcagtatgagttaacaaagaagcacgga

SEQ ID NO: 198930 - DNA, 75 bp, synthetic construct
  source 1..75: mol_type = other DNA
ttggtaatgctaaaacaccggaacagtatgagttaacaaagaagcacggagttatctggctttactctgaagacg

SEQ ID NO: 198931 - DNA, 75 bp, synthetic construct
  source 1..75: mol_type = other DNA
tatattctgttattcattatcgctaccctctttctgttacccggtagcgtactggtgatcgccggtggaatagtc

SEQ ID NO: 198932 - DNA, 75 bp, synthetic construct
  source 1..75: mol_type = other DNA
ttctgacccgcttaattccgctgtttccgtacaatattcaaaattacgcttacggattaaccgctattgctttct

SEQ ID NO: 198933 - DNA, 75 bp, synthetic construct
  source 1..75: mol_type = other DNA
gaagcatgggaacgctacagtgttctggtcagtcgtgtggatcctgcaaatcctgaatggccggaaatgccgcaa

SEQ ID NO: 198934 - DNA, 75 bp, synthetic construct
  source 1..75: mol_type = other DNA
attgtttacgatgaaaataatattattgtcgccatcaccagagatgcttcaacgcttaaccctgaaggttttagc

SEQ ID NO: 198935 - DNA, 75 bp, synthetic construct
  source 1..75: mol_type = other DNA
acaaaaggccgcattgctttccgaagctgaatcagtcatccagccgctggaacgcgctgtcaggttgaatatggc

SEQ ID NO: 198936 - DNA, 75 bp, synthetic construct
  source 1..75: mol_type = other DNA
aaactttaaaccagatactataaaaattgcatacgataaaaataatgtgattgttaccgtaagcaaagatgtttc

SEQ ID NO: 198937 - DNA, 75 bp, synthetic construct
  source 1..75: mol_type = other DNA
aacgcttaaccctgaaggttttagcgttgtcgaggttcctgatattaccgccaaccgacgtgctgatgactcagg

SEQ ID NO: 198938 - DNA, 75 bp, synthetic construct
  source 1..75: mol_type = other DNA
gactggaagcatgggaacgctacagtgttctggtcagccgtgtggatacggcaaatcctgaatggccacaaaagc

SEQ ID NO: 198939 - DNA, 75 bp, synthetic construct
  source 1..75: mol_type = other DNA
gttatctggttatggtccgaagacggaaaaaactggtatgaggaagtaagtaattttcaggaagacacgataaag

SEQ ID NO: 198940 - DNA, 75 bp, synthetic construct
  source 1..75: mol_type = other DNA
ctcgtcgtgctcattcctgctggcgcgctggctggggcgtgacttgctgctgaaatacgtcggtcatagccatac

SEQ ID NO: 198941 - DNA, 75 bp, synthetic construct
  source 1..75: mol_type = other DNA
gaattttacgaagcggaggcgaaaaaacaggcgaagcagtttttcatggatattgctgtcgggttacgtgaaggg

SEQ ID NO: 198942 - DNA, 75 bp, synthetic construct
  source 1..75: mol_type = other DNA
atcgaggccactagcgaacagaacgcacgccagcaatccccggctggctgcgtgatggtattcgccgcccgtatt

SEQ ID NO: 198943 - DNA, 75 bp, synthetic construct
  source 1..75: mol_type = other DNA
aacgcgctgtcaggctgaatatggcgacggatgaggaacgcacacgactggagtcatgggaacgctacagcgttc

SEQ ID NO: 198944 - DNA, 75 bp, synthetic construct
  source 1..75: mol_type = other DNA
ccgggaaataatgcgggcaacggtgtttaattatatcgagtgtgattacaatcgctggcgtcgtcacagtgcctg

SEQ ID NO: 198945 - DNA, 75 bp, synthetic construct
  source 1..75: mol_type = other DNA
tgaaaggaacccgcaattacgaggataaagttgcggtaactgtagcattacaggagaaagaacgcttagacggtg

SEQ ID NO: 198946 - DNA, 75 bp, synthetic construct
  source 1..75: mol_type = other DNA
gatgagcagtcgccggaaaagcgccccgtaattttagaggcgcaggatgtgttgataacctacagaggaaaacta

SEQ ID NO: 198947 - DNA, 75 bp, synthetic construct
  source 1..75: mol_type = other DNA
aacgctctgtcagactgaatatggcaacagatgaggagcgtagccgactggaagcatgggaacgctacagtgttc

SEQ ID NO: 198948 - DNA, 75 bp, synthetic construct
  source 1..75: mol_type = other DNA
tcgccagactctatgcccgacacaaacaggtggatctgtctgcttctcgccacagcccacttactcaccctaaaa

SEQ ID NO: 198949 - DNA, 75 bp, synthetic construct
  source 1..75: mol_type = other DNA
ttcttacccgcttaatcccgctgtttccttacaatattcaaaattacgcctacggattaaccactatcgccttct

SEQ ID NO: 198950 - DNA, 75 bp, synthetic construct
  source 1..75: mol_type = other DNA
attgtttacgatgaaaataatattattgtcgctatcaccaaggatgcctctacgcttaaccctgaaggctttagc

SEQ ID NO: 198951 - DNA, 75 bp, synthetic construct
  source 1..75: mol_type = other DNA
gatgcatgggagcgttacagcgttctggtcagtcgtgtggatcctgcaaatcctgcaaatcctgaatggccggaa

SEQ ID NO: 198952 - DNA, 75 bp, synthetic construct
  source 1..75: mol_type = other DNA
aacagatgaggaacgcagccgactggaggtttgggaacgctatagcgttctggtcagtcgtgtggatcctgcaaa

SEQ ID NO: 198953 - DNA, 75 bp, synthetic construct
  source 1..75: mol_type = other DNA
cggcttacctgaatattctggaaaccggcccgctggcaggcattgaagatccgaaggtactgcaatatgcgctgg

SEQ ID NO: 198954 - DNA, 75 bp, synthetic construct
  source 1..75: mol_type = other DNA
cagggaccttacggaaacattctttcctgctatgaaggtgctccctgtgggtttgggctatatcatcaactcaca

SEQ ID NO: 198955 - DNA, 75 bp, synthetic construct
  source 1..75: mol_type = other DNA
cgacaccgcagacatcctgactgccgcttcccgcgacctggataagttcctgtggtttattgaagccaatatcga

SEQ ID NO: 198956 - DNA, 75 bp, synthetic construct
  source 1..75: mol_type = other DNA
atcaaaaatgtgaaccgccccgggtttcctggagagtgttttatctgtgaactcaggctgccagatcatcgtttc

SEQ ID NO: 198957 - DNA, 75 bp, synthetic construct
  source 1..75: mol_type = other DNA
cctgcaaaagttggggcatggcttatatattaccgaccggactctgtaacacaatattccaaagatattgcatgg

SEQ ID NO: 198958 - DNA, 75 bp, synthetic construct
  source 1..75: mol_type = other DNA
ctggtcttatcgtacacctgcaaaagttggggcatggcttatatattaccgaccggactctgtaacacaatattc

SEQ ID NO: 198959 - DNA, 75 bp, synthetic construct
  source 1..75: mol_type = other DNA
agttcgccacagcaatccgaaaccactggcacgtggagaataagctgcactggcgtctggacgtggtaatgaatg

SEQ ID NO: 198960 - DNA, 75 bp, synthetic construct
  source 1..75: mol_type = other DNA
cgtcttcacattgtttgcgatgtccctgatgaacttattgatttcacatttgaatggaaagggctgaagaaatta

SEQ ID NO: 198961 - DNA, 75 bp, synthetic construct
  source 1..75: mol_type = other DNA
tgtgtttggttacgcgccgtggaaacggatcgtttatctcggcagcggtggcttacagggcgcggcacgcgagtc

SEQ ID NO: 198962 - DNA, 75 bp, synthetic construct
  source 1..75: mol_type = other DNA
aaaatcaccgacagacagaatcaaaaatgatcatcgggacgcaatttctcttgccagattactgcgggctggtga

SEQ ID NO: 198963 - DNA, 75 bp, synthetic construct
  source 1..75: mol_type = other DNA
acttacccctgtctggatccctgacctgactcatgaagctatgcgggatctaatcagagcccgtgcagcagcgaa

SEQ ID NO: 198964 - DNA, 75 bp, synthetic construct
  source 1..75: mol_type = other DNA
gcagtctcctttcggtccataatagcagaacaaaagaaagagccagaaatgacggtcagatactatatcagttcc

SEQ ID NO: 198965 - DNA, 75 bp, synthetic construct
  source 1..75: mol_type = other DNA
cttcaacgatgcagtcacattttgtacaggctttttttacccgttctgtgcggattgaggtgtactggcaatagc

SEQ ID NO: 198966 - DNA, 75 bp, synthetic construct
  source 1..75: mol_type = other DNA
catcttggatcgactggttcatggcagtatcaagatcgaacttaaaggagaatcaatgcggaaaatacaatctcc

SEQ ID NO: 198967 - DNA, 75 bp, synthetic construct
  source 1..75: mol_type = other DNA
aaactggttaaccctgaaacaaaatattttactgaccggggccaccggcagcggtaaaacgttcctggcgtgtgc

SEQ ID NO: 198968 - DNA, 75 bp, synthetic construct
  source 1..75: mol_type = other DNA
cgtgtaaaccagcttggtgttgctgagccggtggtacagcgccagggcgctgaccgtatcgttgttgaactgcca

SEQ ID NO: 198969 - DNA, 75 bp, synthetic construct
  source 1..75: mol_type = other DNA
caggaaacccaaagacaaaagagcaataccaattgacaaagaattttgacgtaatctggttgtggtcagaagacg

SEQ ID NO: 198970 - DNA, 75 bp, synthetic construct
  source 1..75: mol_type = other DNA
atatcagctaacaaagaattttgatgttatctggttatggtccgaagacggaaaaaactggtatgaggaagtgaa

SEQ ID NO: 198971 - DNA, 75 bp, synthetic construct
  source 1..75: mol_type = other DNA
atgatgcacctgaaaaatattaaggccgagaatccgaaaacaccggaacaataccagctaactaaaaaagcgggc

SEQ ID NO: 198972 - DNA, 75 bp, synthetic construct
  source 1..75: mol_type = other DNA
ggaagcacgccagcaatccccggctggctgcgtgatggtatttactgcccgtattcgtcagggggtgcgccatgt

SEQ ID NO: 198973 - DNA, 75 bp, synthetic construct
  source 1..75: mol_type = other DNA
cgaattctgagcatgctattgcgaacagacaaacgttatgcagggaagcactgtgaaccgccccgggtttcctgg

SEQ ID NO: 198974 - DNA, 75 bp, synthetic construct
  source 1..75: mol_type = other DNA
acaatattccaaagatattgcatggaaagctcaacaacgattgtgttctcgttaccgaactctgacagcaaaagg

SEQ ID NO: 198975 - DNA, 75 bp, synthetic construct
  source 1..75: mol_type = other DNA
taacagcttccgtattactggcatcaataacccaagcgaagcgcgtcagctttcactgctgctgcgtgccggtgc

SEQ ID NO: 198976 - DNA, 75 bp, synthetic construct
  source 1..75: mol_type = other DNA
cctgatggaagtggatatggacaccgcgcttggcaaactccaggaacaaaatatcgatagcctacgcagtgacct

SEQ ID NO: 198977 - DNA, 75 bp, synthetic construct
  source 1..75: mol_type = other DNA
gtctaacttcaccaaggacaacatcggcaaaccgatggcaaccctgtttgtggagtacaaagacagcgggaagaa

SEQ ID NO: 198978 - DNA, 75 bp, synthetic construct
  source 1..75: mol_type = other DNA
cgcaaacgcgattgctatgggtgcagagagcaaagctgctgaaaatgcgacggcagttggtactaacgcggaggc

SEQ ID NO: 198979 - DNA, 75 bp, synthetic construct
  source 1..75: mol_type = other DNA
cgccaatcacggtgcaaatgccaccaacaaaatcactaatgttgctaaaggtacggtttctgcaaccagcaccga

SEQ ID NO: 198980 - DNA, 75 bp, synthetic construct
  source 1..75: mol_type = other DNA
agtaagcctcgttatcgctgccagaaatgtggttttaccgcatacaccctctactggcattgtccgtcttgtcgg

SEQ ID NO: 198981 - DNA, 75 bp, synthetic construct
  source 1..75: mol_type = other DNA
actaggaaacgcaacaaaagctactgctattatgagcatcgccctgggtgattcagctaatgcgtcgaaagaata

SEQ ID NO: 198982 - DNA, 75 bp, synthetic construct
  source 1..75: mol_type = other DNA
cgttgccagcgaaacggccaaaagccgtggcaaaaagagcgggcgcagtaagctgttaatttctgccctggttgc

SEQ ID NO: 198983 - DNA, 75 bp, synthetic construct
  source 1..75: mol_type = other DNA
aatacgttacaatgggactcccttaaaaaggcatatagtgcggcacatggtacagatactaccagtaccatcacc

SEQ ID NO: 198984 - DNA, 75 bp, synthetic construct
  source 1..75: mol_type = other DNA
cagttgccgctgaagcccgtcgaaccatttcatcagttttcgagttggcagtagcgacacttagagctgatagtg

SEQ ID NO: 198985 - DNA, 75 bp, synthetic construct
  source 1..75: mol_type = other DNA
gcttcgccgaaaccctgatagaaaccgacgatccggcgctgcggctggcgctctgcggacggcttcacgcggctc

SEQ ID NO: 198986 - DNA, 75 bp, synthetic construct
  source 1..75: mol_type = other DNA
atggctacaaccctcacccctgactgcgatttactcgatctgctgtccgcccccttcaatgccaccacggatttt

SEQ ID NO: 198987 - DNA, 75 bp, synthetic construct
  source 1..75: mol_type = other DNA
agcgaacgccattacgattggtgctgaaagcgaagccgctgaaaatgcgacggctgtaggtactaaagcgaaagc

SEQ ID NO: 198988 - DNA, 75 bp, synthetic construct
  source 1..75: mol_type = other DNA
gatccgagtcgcgatggtacccggggaccgggtcatatgctgaatggcgacaatacagacgaaaataaacagcat

SEQ ID NO: 198989 - DNA, 75 bp, synthetic construct
  source 1..75: mol_type = other DNA
actatttatgatagtggcgcactggcaaaggccaccctgacagcaggtaaacgagttgtttctgcaaaggtgcct

SEQ ID NO: 198990 - DNA, 75 bp, synthetic construct
  source 1..75: mol_type = other DNA
ccttaggcagactatctctcgccagcgcagcaaacgcgattgctatgggtgcagagagcgaagctgctgaaaatg

SEQ ID NO: 198991 - DNA, 75 bp, synthetic construct
  source 1..75: mol_type = other DNA
aacgttatgatgccaaacgtcaggagaaaatgcgcgcggcgctggaacagttgaaagggctggaaaatctctctg

SEQ ID NO: 198992 - DNA, 75 bp, synthetic construct
  source 1..75: mol_type = other DNA
tataccctgaccgtctacgagaagggcgcggaagtgattcgtatgatccatactctgctgggtgaagaaaacttc

SEQ ID NO: 198993 - DNA, 75 bp, synthetic construct
  source 1..75: mol_type = other DNA
agcactcactcgtactctggcgactgaactggcggatgagctgctggctatttacaacgcgaattaccagagcga

SEQ ID NO: 198994 - DNA, 75 bp, synthetic construct
  source 1..75: mol_type = other DNA
gaaaatgcgcgcggcgctggaacagttgaaagggctggaaaatctctctggcgatctgtacgagaagataactaa

SEQ ID NO: 198995 - DNA, 75 bp, synthetic construct
  source 1..75: mol_type = other DNA
gtaccgtgttgaacatgaagacattgcgaaacgcgctctgcgtaatgcctgcctgcgcttccttgcttttggtga

SEQ ID NO: 198996 - DNA, 75 bp, synthetic construct
  source 1..75: mol_type = other DNA
agcacatgttgccgatgctttccgcgcagtactccttgatgagcagattgatccggcgctggcggcggagatcct

SEQ ID NO: 198997 - DNA, 75 bp, synthetic construct
  source 1..75: mol_type = other DNA
aagcagctggcgcattcagcgccgcgcacggcaccgaagccaccagcaaaatcaccaacgtcaccgctggcaacc

SEQ ID NO: 198998 - DNA, 75 bp, synthetic construct
  source 1..75: mol_type = other DNA
gtgacgaccaacaccaccaacatcgccactaacaccaccaatatcaccaacctgactgacgctgttaacggtctc

SEQ ID NO: 198999 - DNA, 75 bp, synthetic construct
  source 1..75: mol_type = other DNA
ggcatctggcgaatccagtattgcattaggtaacaccagtgaggccagcgaacaaaatgcgattgcgctggggca

SEQ ID NO: 199000 - DNA, 75 bp, synthetic construct
  source 1..75: mol_type = other DNA
cgaaggcaaagtgatcccgttgcagaaaggcggtcatccggtgaattccgtgctgaacgtcacccaggcggaaca

SEQ ID NO: 199001 - DNA, 75 bp, synthetic construct
  source 1..75: mol_type = other DNA
tgatgagccgtggaccgcctggcgagaagaagagggcgttctgatcattaatcaattgccggaacgttttacgct

SEQ ID NO: 199002 - DNA, 75 bp, synthetic construct
  source 1..75: mol_type = other DNA
ggaatccggcgacaggcagttacagcgtcgccagcgaaacggcgaagagccgtggtaaaaaatcagggcgcagta

SEQ ID NO: 199003 - DNA, 75 bp, synthetic construct
  source 1..75: mol_type = other DNA
atcgggcagagttcagcatcaaagcgatgtgtcgtgtacttcgggttgcccgcagtggctggtatgtctggctca

SEQ ID NO: 199004 - DNA, 75 bp, synthetic construct
  source 1..75: mol_type = other DNA
agccgggaaataatgcgggcaacggtgtttaattatatcgaatgtgattacaatcggtggcggcggcacagttag

SEQ ID NO: 199005 - DNA, 75 bp, synthetic construct
  source 1..75: mol_type = other DNA
aactgaagcggcataatctgcgtggaagtatgagcgcaaaaggttgctgctacgataatgcctgcgtggaaagct

SEQ ID NO: 199006 - DNA, 75 bp, synthetic construct
  source 1..75: mol_type = other DNA
taaccgcctggacggaacgcgaagcgcgtggccgttgcccgtccggttgtgttgcagtattcgccgcccgtattc

SEQ ID NO: 199007 - DNA, 75 bp, synthetic construct
  source 1..75: mol_type = other DNA
aggctacggttatgacaatgcctgtgtagaaagcttctttcattcgctgaaggtggaatgtatccacggggaacg

SEQ ID NO: 199008 - DNA, 75 bp, synthetic construct
  source 1..75: mol_type = other DNA
gtgattacaatcgctgttgtcgtcacagtgcctgtggcggtctcagcccggaacaatttgaaaaccataatctcg

SEQ ID NO: 199009 - DNA, 75 bp, synthetic construct
  source 1..75: mol_type = other DNA
atggcgctgtggcggcgtaagaggccccggaacgttatcgttcacacggaccgtggaggccagtactgttcagca

SEQ ID NO: 199010 - DNA, 75 bp, synthetic construct
  source 1..75: mol_type = other DNA
gcgtaaccgttgcccgtcaggttgtgttgctgtatttgccgcccgtattcgtcaggaggtgtgccatgtgcaata

SEQ ID NO: 199011 - DNA, 75 bp, synthetic construct
  source 1..75: mol_type = other DNA
tatgagtgcgaaaggctactgttatgacaatgcctgtgtggaaagcttctttcattcgctgaaggtggaatgtat

SEQ ID NO: 199012 - DNA, 75 bp, synthetic construct
  source 1..75: mol_type = other DNA
ggcggcgtaagaggccccggaacgttatcgttcacacggaccgtggaggccagtactgttcagcagattatcagg

SEQ ID NO: 199013 - DNA, 75 bp, synthetic construct
  source 1..75: mol_type = other DNA
gcagtcgggaaataatgcgggcaacggtgtttaattatatcgagtgtgattacaatcgctggcgtcgtcacagtg

SEQ ID NO: 199014 - DNA, 75 bp, synthetic construct
  source 1..75: mol_type = other DNA
acgcgccgtcattggctggtcgatgtcaccgcgaatgacagcacaactggcctgtgatgcactacaaatggcgtt

SEQ ID NO: 199015 - DNA, 75 bp, synthetic construct
  source 1..75: mol_type = other DNA
gccgctgtccataaggcattcattgaggcaaagcagcgatacggtgctccccgccttgctgacgaaatgccggag

SEQ ID NO: 199016 - DNA, 75 bp, synthetic construct
  source 1..75: mol_type = other DNA
attatatcgaatgtgattacattcgctggcggcggcacagttggtgtggcggtctcactctggaacaatttgaaa

SEQ ID NO: 199017 - DNA, 75 bp, synthetic construct
  source 1..75: mol_type = other DNA
attatatcgaatgtgattacattcgttggcggcggcacagttggtgtggcggtctcaatccggaacaatttgaaa

SEQ ID NO: 199018 - DNA, 75 bp, synthetic construct
  source 1..75: mol_type = other DNA
attatatcgaatgtgattacattcgatggcggcggcacagttggtgtggcggtctcattccggaacaatttgaaa

SEQ ID NO: 199019 - DNA, 75 bp, synthetic construct
  source 1..75: mol_type = other DNA
gtgccgcgtgctccgggtggcccgcagcggactggtatacgtggtgtcagcggcggaacaaggataagcacgcgt

SEQ ID NO: 199020 - DNA, 75 bp, synthetic construct
  source 1..75: mol_type = other DNA
agcggctggtatacgtggtgtcagcagcggacaaggataagccctcgtcagcagttccgccagcactgcgacagc

SEQ ID NO: 199021 - DNA, 75 bp, synthetic construct
  source 1..75: mol_type = other DNA
ctgagggcaaaggcctcccggaagttcagcccggtcagctaccgcgcacacggcctgcctgtgtcagaaaatctg

SEQ ID NO: 199022 - DNA, 75 bp, synthetic construct
  source 1..75: mol_type = other DNA
ccatggagaacactttatcagccgggaaataatgcgggcaacggtgtttgaaccgccccgggaatcctggagact

SEQ ID NO: 199023 - DNA, 75 bp, synthetic construct
  source 1..75: mol_type = other DNA
atcaggctgagttcagcatcaaagcaatgtgccttgtgctcctggttgtccgcagtgtctggtatatgtggtgtc

SEQ ID NO: 199024 - DNA, 75 bp, synthetic construct
  source 1..75: mol_type = other DNA
tcacacggaccgcggaagcaagcactgttcagctgattatcaggctctgctgaagcagcataccgtaagagctcg

SEQ ID NO: 199025 - DNA, 75 bp, synthetic construct
  source 1..75: mol_type = other DNA
ttaacgtaaaaaccgtggcggcaagcctgcgccgtcagggactgagggcaaaggcctcccggaagttcagcccgg

SEQ ID NO: 199026 - DNA, 75 bp, synthetic construct
  source 1..75: mol_type = other DNA
tgcctgtgtcagaaaatctgttggagcaggatttttacgccagtggcccgaaccagaagtgggcaggagacatca

SEQ ID NO: 199027 - DNA, 75 bp, synthetic construct
  source 1..75: mol_type = other DNA
ttattggctggtcaatgtcgccacgcatgacggcgcaactggcctgcgatgccctgcagatggcgctatggcggc

SEQ ID NO: 199028 - DNA, 75 bp, synthetic construct
  source 1..75: mol_type = other DNA
gcagctggaatcaccactcgaaagtgtgatggcagcggcgaaaatcgcccatcaaaataagactatcgttgcgct

SEQ ID NO: 199029 - DNA, 75 bp, synthetic construct
  source 1..75: mol_type = other DNA
gagcgagcaggtgacgcccgcggtcggcgtggaacggtttaatcaggcgatgatggatttgggcgcgatgatttg

SEQ ID NO: 199030 - DNA, 75 bp, synthetic construct
  source 1..75: mol_type = other DNA
ccttcaggatgctctgcaattatctgatggcgcggtgcagaatatcctctggagcccgccgcgctcgatcatgtt

SEQ ID NO: 199031 - DNA, 75 bp, synthetic construct
  source 1..75: mol_type = other DNA
ttgatcactcaccgttggctgtgttacgtagcccttttgataatactgcacctgagcggtctaaaaccgaactgg

SEQ ID NO: 199032 - DNA, 75 bp, synthetic construct
  source 1..75: mol_type = other DNA
gtccgttagcggacatcaacaccatctttactgagatggaagaaggcaaaatccgtggccgcatggtgattgatt

SEQ ID NO: 199033 - DNA, 75 bp, synthetic construct
  source 1..75: mol_type = other DNA
ctgtcaaaaattcgtccagggcagtggattgctatctacggtcttggcggtctgggtaacctcgccctgcaatac

SEQ ID NO: 199034 - DNA, 75 bp, synthetic construct
  source 1..75: mol_type = other DNA
caacggcagattgctgccgataacctgacgcagctgaccgcgtttcgccataccttcagccatttccacttagat

SEQ ID NO: 199035 - DNA, 75 bp, synthetic construct
  source 1..75: mol_type = other DNA
attaattagcgccactgagcacgccattaaactggcccaggaagagggtctcggttttgttagcgttaaaaacac

SEQ ID NO: 199036 - DNA, 75 bp, synthetic construct
  source 1..75: mol_type = other DNA
atccgcaaatgcactacaaagaaaaatgccagcaggaaggtattccggttccggcaggaatattccattatctgg

SEQ ID NO: 199037 - DNA, 75 bp, synthetic construct
  source 1..75: mol_type = other DNA
ctgttacagcaattccgctgtggaaaagcttccattgcccacacaggacagccgggacattattgccgcagcatg

SEQ ID NO: 199038 - DNA, 75 bp, synthetic construct
  source 1..75: mol_type = other DNA
ctatcccgaccgcgtttacgaaccggcaacgctgattagcggctggaaaaaacagctgaaattaagcgatcgcgt

SEQ ID NO: 199039 - DNA, 75 bp, synthetic construct
  source 1..75: mol_type = other DNA
aagggcagggaccgacgctagtcctgttggacgaagttcatacctacaccggcactaccggggcgcaaacggcgc

SEQ ID NO: 199040 - DNA, 75 bp, synthetic construct
  source 1..75: mol_type = other DNA
atggtggggtatggcaggcgggagtggggcaggatggctcatttgggcaggtgttcacatcagcatcagacatga

SEQ ID NO: 199041 - DNA, 75 bp, synthetic construct
  source 1..75: mol_type = other DNA
agtgagcgtatcctagggaaaaaagacgttagtgtttcagacttaattacaatgctcaataacagtgattgggtt

SEQ ID NO: 199042 - DNA, 75 bp, synthetic construct
  source 1..75: mol_type = other DNA
cgtaaacaccccggaagcagtaaggaaattaacgcgcgacagggcgctggcaattgcacgcagccatggaattgc

SEQ ID NO: 199043 - DNA, 75 bp, synthetic construct
  source 1..75: mol_type = other DNA
cgcaaaaacagccgcattccctgcgggaaatagctggcatgacgtaagactggggataatcagcaacatattgat

SEQ ID NO: 199044 - DNA, 75 bp, synthetic construct
  source 1..75: mol_type = other DNA
tcgatttgtggcgaccagcggcgaagaggaagggaaattaggcgctgagaatttactcaagcggatgagtgacac

SEQ ID NO: 199045 - DNA, 75 bp, synthetic construct
  source 1..75: mol_type = other DNA
tcttgatacctatgctccgcaaagcgatgcagatattgatgccaaccttggcgggttaacattacaaggtgtgga

SEQ ID NO: 199046 - DNA, 75 bp, synthetic construct
  source 1..75: mol_type = other DNA
aaaatacgccaaccgaatatggtattcgttttgtggcgaccagtggtgaagaggaagggaaattaggcgctgaga

SEQ ID NO: 199047 - DNA, 75 bp, synthetic construct
  source 1..75: mol_type = other DNA
atgaagcagtttcttgattttctaccgctggttgtcttcttcgcgttctataagatttatgacatctatgcggca

SEQ ID NO: 199048 - DNA, 75 bp, synthetic construct
  source 1..75: mol_type = other DNA
tcgctttcgtaaggttgagaagatggccctgatcacttttgttctggtggtcgtcttcggtggcttgacgctgtt

SEQ ID NO: 199049 - DNA, 75 bp, synthetic construct
  source 1..75: mol_type = other DNA
atgaagaaagtagccgcgtttgttgcgctaagcctgctgatggcgggatgtgtaagtaatgacaaaattgctgta

SEQ ID NO: 199050 - DNA, 75 bp, synthetic construct
  source 1..75: mol_type = other DNA
acatttaatagtcgttatatcttcaccgataaaaacaagcgtaaaagctggcataacgtgacaggaagtacggtg

SEQ ID NO: 199051 - DNA, 75 bp, synthetic construct
  source 1..75: mol_type = other DNA
gtatttggtctgaccgccctcaccttaatcttcacactgttaagcggtatctatatttaccgccatatgccacag

SEQ ID NO: 199052 - DNA, 75 bp, synthetic construct
  source 1..75: mol_type = other DNA
cggtgccaataaccagcgtatccgcgactacggtcacgacaaactgaaagtctatggcatggggcgtgagaaaag

SEQ ID NO: 199053 - DNA, 75 bp, synthetic construct
  source 1..75: mol_type = other DNA
tgtggcgctcaaaccgaaagtgatgcagaaatcgttcggcggtaattatgatcgcaaactgttcgccaaattacg

SEQ ID NO: 199054 - DNA, 75 bp, synthetic construct
  source 1..75: mol_type = other DNA
cgccgttgtctggaagagaagccgcaagggcaattgcaggatatcgagcggcataaactcaatgcgatgggcgcc

SEQ ID NO: 199055 - DNA, 75 bp, synthetic construct
  source 1..75: mol_type = other DNA
cgcactggaatccggtgttattagccgttgatgaagcgcactgtatctcccaatggggccacgatttccgcccgg

SEQ ID NO: 199056 - DNA, 75 bp, synthetic construct
  source 1..75: mol_type = other DNA
ttatatcgccccggaacgcctgatgctggataactttcttgagcatctggcgcactggaatccggtgttattagc

SEQ ID NO: 199057 - DNA, 75 bp, synthetic construct
  source 1..75: mol_type = other DNA
catgggcatcaacaagccgaacgtccgcttcgtggtccactttgatattccgcgcaatatcgaatcctattatca

SEQ ID NO: 199058 - DNA, 75 bp, synthetic construct
  source 1..75: mol_type = other DNA
gtgcttaacgatccccgatttaccgctgaagtcgagctgaccattccctttcacgacgtcgatatgatgggcgtg

SEQ ID NO: 199059 - DNA, 75 bp, synthetic construct
  source 1..75: mol_type = other DNA
atggcaattgaacaaacagcaattacacgcgcgactttcgatgaagtgattctgccgatttatgctccggcagag

SEQ ID NO: 199060 - DNA, 75 bp, synthetic construct
  source 1..75: mol_type = other DNA
gcactacggcgtgacgccggatatcctgacctccgccaaagcgttaggcggtggtttcccgattagcaccatgct

SEQ ID NO: 199061 - DNA, 75 bp, synthetic construct
  source 1..75: mol_type = other DNA
atttccgcccggaatacgccgcgctcggtcagttgcgccaacgcttcccgacactgccgtttatggcgctgaccg

SEQ ID NO: 199062 - DNA, 75 bp, synthetic construct
  source 1..75: mol_type = other DNA
gaacgcctgatgctggataactttcttgagcatctggcgcactggaacccggcgttattagctgttgatgaagca

SEQ ID NO: 199063 - DNA, 75 bp, synthetic construct
  source 1..75: mol_type = other DNA
tcacgacgtcgatatgatgggcgtggcctggcacggtaactattttcgctactttgaagtggctcgcgaggcgct

SEQ ID NO: 199064 - DNA, 75 bp, synthetic construct
  source 1..75: mol_type = other DNA
atgatcgatggtgtggaaaacccggtttctgttctctatgggcaaaagctgcatgagcaggcgaaatatctgtca

SEQ ID NO: 199065 - DNA, 75 bp, synthetic construct
  source 1..75: mol_type = other DNA
tgaaaacatcgacaccaccacgccgggcggacggctcatcttccatgtgttcggtgcgctgggccagttcgagcg

SEQ ID NO: 199066 - DNA, 75 bp, synthetic construct
  source 1..75: mol_type = other DNA
gcttatctgcgcgatggcgatgtgctggtcgtctggcggctggatcggcttggccgctccctgccgcacctgatt

SEQ ID NO: 199067 - DNA, 75 bp, synthetic construct
  source 1..75: mol_type = other DNA
atgttaacaacatgtatgccgcttggggttgcgatgacgacgaacacgcattttagaggtgaagaattgaagaag

SEQ ID NO: 199068 - DNA, 75 bp, synthetic construct
  source 1..75: mol_type = other DNA
gggcaattgccattgttatgactcaaacagacacctgcgttgcaccatacggtggcgcggagcgttttctgggaa

SEQ ID NO: 199069 - DNA, 75 bp, synthetic construct
  source 1..75: mol_type = other DNA
ttaccaaaaacagacttgtccaatttagccttctctattgttgatggctttaaggagcattccttggttggttgg

SEQ ID NO: 199070 - DNA, 75 bp, synthetic construct
  source 1..75: mol_type = other DNA
ccgttcccataccgtttctgcgcaaggtggtattaccgttgcgctgggtaatacccatgaagataactgggaatg

SEQ ID NO: 199071 - DNA, 75 bp, synthetic construct
  source 1..75: mol_type = other DNA
ccgatcaacctgcgtttgtgaatatgggggaggtaatgaccttccgcaagctggaagaacgcagccgcgcgtttg

SEQ ID NO: 199072 - DNA, 75 bp, synthetic construct
  source 1..75: mol_type = other DNA
cactggtgactttttgccgccgtcagctcacgggctacaaagtaccgaagctggtggagtttcgtgatgagttac

SEQ ID NO: 199073 - DNA, 75 bp, synthetic construct
  source 1..75: mol_type = other DNA
gtacgacattgattatcacagcggcagcatcggcttacctgtgccgtcgacggaagcccgactggtggatgatga

SEQ ID NO: 199074 - DNA, 75 bp, synthetic construct
  source 1..75: mol_type = other DNA
ctatggccttaccgagtgtgcgccgctggtcagcgttaacccatatgatattgattatcatagtggtagcatcgg

SEQ ID NO: 199075 - DNA, 75 bp, synthetic construct
  source 1..75: mol_type = other DNA
atgttaacagcatgtatatcatttggggttgcgatgacgacgaacacgcattttagaggtgaagaattgaagaag

SEQ ID NO: 199076 - DNA, 75 bp, synthetic construct
  source 1..75: mol_type = other DNA
gtgcgccgctggtcagcgttaacccgtatgatattgattatcatagtggtagcatcggtttgccggtgccgtcga

SEQ ID NO: 199077 - DNA, 75 bp, synthetic construct
  source 1..75: mol_type = other DNA
ctggatgcaccgatgaatgccaccacgcgccttcagtgcatgagcgccgtggtgattgccctgacacagtgggag

SEQ ID NO: 199078 - DNA, 75 bp, synthetic construct
  source 1..75: mol_type = other DNA
attgacgaacccatgaataacactacgcgtctgcaatgcatgagcgctgctgtgattgcactgacacgatgggag

SEQ ID NO: 199079 - DNA, 75 bp, synthetic construct
  source 1..75: mol_type = other DNA
tgccagaacggtgccggagagtatgagcaacaacgagattttccggcagtggaaggcaccagtcgtttgtccgcc

SEQ ID NO: 199080 - DNA, 75 bp, synthetic construct
  source 1..75: mol_type = other DNA
tttgcataaggacgtggatgacgttctggcgaaagccgccgcacgcgatgtgaaattttgtctggcagtcgccac

SEQ ID NO: 199081 - DNA, 75 bp, synthetic construct
  source 1..75: mol_type = other DNA
atgacgctttatagcgggatgaacaataccagcggcaaagctattactgatattgaccatctgcgccagtcggtg

SEQ ID NO: 199082 - DNA, 75 bp, synthetic construct
  source 1..75: mol_type = other DNA
cgcagtgttatccatgagctatctgattgtaagcaccatgcagagcgccagtatttccgttgatatacagggagg

SEQ ID NO: 199083 - DNA, 75 bp, synthetic construct
  source 1..75: mol_type = other DNA
gacgacaaaaaaaaacaacagttagcggaggaacgcaacgccctcagggaaacattatccgctccggtaagtcgt

SEQ ID NO: 199084 - DNA, 75 bp, synthetic construct
  source 1..75: mol_type = other DNA
gtcagcttaaaggtggcgcaggccgtaattaataactcacgtggtaagtggatcgctaaggtaaaacacgtcgtt

SEQ ID NO: 199085 - DNA, 75 bp, synthetic construct
  source 1..75: mol_type = other DNA
gcttaccgtcgagcaggattacttatgcttacccgaaatagacggagcgttgctggtgggcaatagtggtcgaaa

SEQ ID NO: 199086 - DNA, 75 bp, synthetic construct
  source 1..75: mol_type = other DNA
gggatgccggagtgcgtcgctgcaccaaaagttcgtagtagcggatcgatagagcccgcgccatccattacgctg

SEQ ID NO: 199087 - DNA, 75 bp, synthetic construct
  source 1..75: mol_type = other DNA
ggaaggcaccagtcgtttgtccgccagcctggcaacgggcgggttatcgcctcgccagtgtttacatcgcctgtt

SEQ ID NO: 199088 - DNA, 75 bp, synthetic construct
  source 1..75: mol_type = other DNA
agattgatgagtcagttttacaagtcaggcaaagcctgcgtgaagagttttatccgcaggagattgaacaagagc

SEQ ID NO: 199089 - DNA, 75 bp, synthetic construct
  source 1..75: mol_type = other DNA
tacacaccggaaactaaagtacgtcagcaagagtccttcatccatcatatccagattggtcgtgaactgaacaag

SEQ ID NO: 199090 - DNA, 75 bp, synthetic construct
  source 1..75: mol_type = other DNA
gggttgaaacatggtctttctctgagactatccatagccgcagctacacccacattattcgtggcatggtggacg

SEQ ID NO: 199091 - DNA, 75 bp, synthetic construct
  source 1..75: mol_type = other DNA
ggaagcggtgaaaacgtcggtcacttcggccactgtgccgctacccgctcaacccgtcaatatcaccgttccggc

SEQ ID NO: 199092 - DNA, 75 bp, synthetic construct
  source 1..75: mol_type = other DNA
gaaccggacagcatcttccgcgtgcgtgacgatgcgaatacattgcatatcgagccgctgccgtattcgctcgaa

SEQ ID NO: 199093 - DNA, 75 bp, synthetic construct
  source 1..75: mol_type = other DNA
tgggaagatggtatttcgtggttcggaatttaaagtatctgctattggtggtttagcaacattgattgtttcttt

SEQ ID NO: 199094 - DNA, 75 bp, synthetic construct
  source 1..75: mol_type = other DNA
taagcactacgacgcagcggaaaagctcaatatccctgactatcaggagaaagaggatgcattcatgcaactggt

SEQ ID NO: 199095 - DNA, 75 bp, synthetic construct
  source 1..75: mol_type = other DNA
aggcgctaacccggagaaaacacgtcaaatcctgcaaatgaaccagcagcaggcgctgattgaactcacccgact

SEQ ID NO: 199096 - DNA, 75 bp, synthetic construct
  source 1..75: mol_type = other DNA
gagccagacagcatcttccgcgtgcgtgacgatgcgaacacactgcatatcgagccactgccgtattcgctggaa

SEQ ID NO: 199097 - DNA, 75 bp, synthetic construct
  source 1..75: mol_type = other DNA
tcgccgcccattgcgacgccaaaggtaaaatgtggagcaatttacgtctgttccgcgacggcgatggctttgcat

SEQ ID NO: 199098 - DNA, 75 bp, synthetic construct
  source 1..75: mol_type = other DNA
tagagctgaaaatgggcgagaactggcgtcgtaccggtacggtgctggctgcggtaaaactggaagatggtcagg

SEQ ID NO: 199099 - DNA, 75 bp, synthetic construct
  source 1..75: mol_type = other DNA
cgcgccgcattagcgaatcttttcagtgagctgccgactcacgaaaaacaggtagtcagagaaggcgcgacaacc

SEQ ID NO: 199100 - DNA, 75 bp, synthetic construct
  source 1..75: mol_type = other DNA
gcgcggacagcgaaaaatatatgcagggtcaggtgacagcagatgtcagccagatgacagaagatcagcacctgc

SEQ ID NO: 199101 - DNA, 75 bp, synthetic construct
  source 1..75: mol_type = other DNA
aaaggctgttacaccgggcaagagatggtggcacgagctaagttccgcggcgccaacaaacgcgcgctctggttg

SEQ ID NO: 199102 - DNA, 75 bp, synthetic construct
  source 1..75: mol_type = other DNA
tagattaagtttagcaaaaataaaatttcaaaatttaccgggatatttattctattacaggttgcatgaaggtca

SEQ ID NO: 199103 - DNA, 75 bp, synthetic construct
  source 1..75: mol_type = other DNA
gtcaactgctaaaaaaaacttgtatatggttatggtaaatgatttggtaataaagatgaaatgcttttttttgac

SEQ ID NO: 199104 - DNA, 75 bp, synthetic construct
  source 1..75: mol_type = other DNA
gtattacccctcgttgtgtaaacattgtccgtttattgcctggacggatcgtgtgcagtggcagagcaatcccgc

SEQ ID NO: 199105 - DNA, 75 bp, synthetic construct
  source 1..75: mol_type = other DNA
acggtttccggtgtagtaaaaacgatgggcgctatctctatgagttcgaagaaaatttctgagatcaccgccgtc

SEQ ID NO: 199106 - DNA, 75 bp, synthetic construct
  source 1..75: mol_type = other DNA
ctcctcgtaacctgattggctttgccaacggcgtttatgatctcgaggcgcagcgattccgcccccactgcccag

SEQ ID NO: 199107 - DNA, 75 bp, synthetic construct
  source 1..75: mol_type = other DNA
cctccatgctgcaaaaggcatgggacaatggggcgtggattgagcagggctaccgccttgcatctctcaaaggca

SEQ ID NO: 199108 - DNA, 75 bp, synthetic construct
  source 1..75: mol_type = other DNA
ttgctcgatccatccgtacgtcctttggtgatgggcgcgacctttggtatcgccttaacgctggtgattatcgcc

SEQ ID NO: 199109 - DNA, 75 bp, synthetic construct
  source 1..75: mol_type = other DNA
aatatgacgctgttcgccctctcctggttcggcaaccacagtgaagcctatagcctggcaggcattggtcataac

SEQ ID NO: 199110 - DNA, 75 bp, synthetic construct
  source 1..75: mol_type = other DNA
ttgataatcaacaacatattgataaggcgcttcctggaagaatagaacgtcgctgccgtgatgttatgcggataa

SEQ ID NO: 199111 - DNA, 75 bp, synthetic construct
  source 1..75: mol_type = other DNA
ttggcagctaataacggtggctggcagtgggcggcttctacgggtactgatgctgcgccgtattttcgtattttc

SEQ ID NO: 199112 - DNA, 75 bp, synthetic construct
  source 1..75: mol_type = other DNA
gccaggatttacgtctgcacgataatctggcgctggcggccgcctgtcgcaatccgtctgcacgcgtgctggcgc

SEQ ID NO: 199113 - DNA, 75 bp, synthetic construct
  source 1..75: mol_type = other DNA
gcaccagccgtttgtccgctagtctggcaacgggaggattatcgcctcgccagtgtttacatcgcctgctggcgg

SEQ ID NO: 199114 - DNA, 75 bp, synthetic construct
  source 1..75: mol_type = other DNA
tgggcgctatctccacgagttcgaagaaaatttccgagatcaccgccgtcatcaacagtattgctttccagacga

SEQ ID NO: 199115 - DNA, 75 bp, synthetic construct
  source 1..75: mol_type = other DNA
ctacaggaaaagttattcatcatcatgacggatgaaaaccaggttaatcactcattcgtcactgataaggggtta

SEQ ID NO: 199116 - DNA, 75 bp, synthetic construct
  source 1..75: mol_type = other DNA
gcacgcatatcaccgtacgctggcagcgagtgccgcacggtgccgaatttagcgttgaagataacggaccgggca

SEQ ID NO: 199117 - DNA, 75 bp, synthetic construct
  source 1..75: mol_type = other DNA
ttaacacctgcggcattaaaaaaaatatcgggtgtctgttacaggatgccgctgttttaaacgatgcctcaaaga

SEQ ID NO: 199118 - DNA, 75 bp, synthetic construct
  source 1..75: mol_type = other DNA
atgtgtacacgttgaaacaagccgcccgccttattggctatcatgagcatgaatttattgatttgctgattgagc

SEQ ID NO: 199119 - DNA, 75 bp, synthetic construct
  source 1..75: mol_type = other DNA
ctacaggaaaagttatttatcatcatgacggatgaaaaccaggtaaatcattcattcgtcaccgataagggattg

SEQ ID NO: 199120 - DNA, 75 bp, synthetic construct
  source 1..75: mol_type = other DNA
ctacaggaaaagttattcatcatcatgacggatgaaaaccaggttaatcattcattcgtcacggataagggcgtt

SEQ ID NO: 199121 - DNA, 75 bp, synthetic construct
  source 1..75: mol_type = other DNA
tgaggctgtggatgtattccgcctgaagaaacaatcgttacctgcgaatcaacgaggggcagggcgctcggttag

SEQ ID NO: 199122 - DNA, 75 bp, synthetic construct
  source 1..75: mol_type = other DNA
gtgattcgacctctgcaacatgccgcgcaacgtattgaacaaatcgccggtggcgatctgacaatgaacgacgaa

SEQ ID NO: 199123 - DNA, 75 bp, synthetic construct
  source 1..75: mol_type = other DNA
ggcataacgcaggttagccaggcgatttctgaaatggataaggtgacgcaacagaatgcttctctggtagaagag

SEQ ID NO: 199124 - DNA, 75 bp, synthetic construct
  source 1..75: mol_type = other DNA
gctgcaaaagttgggatggcagactttgcggatacaattcgcggctatcttggtgatgtctggatcgaatccaaa

SEQ ID NO: 199125 - DNA, 75 bp, synthetic construct
  source 1..75: mol_type = other DNA
attacaagcccgctgccgcagatattcccgtggcgagcgataacccagcgcactatgcggatgccattcgttata

SEQ ID NO: 199126 - DNA, 75 bp, synthetic construct
  source 1..75: mol_type = other DNA
tgaggcggtggacgtattccgtctgaacaaacattctgtgtcggcagaacctcgcggagcgggtgaaccagttag

SEQ ID NO: 199127 - DNA, 75 bp, synthetic construct
  source 1..75: mol_type = other DNA
gtgacggctgcgacgccggagtttctgcagggcttgcgtgaactgtgcgatcaacatcaggcattgctggtattt

SEQ ID NO: 199128 - DNA, 75 bp, synthetic construct
  source 1..75: mol_type = other DNA
ggtgccacaggctcatgctaacgcctctgcgccagctgccgcgctgttttccacggtggtgatgaaaattggcct

SEQ ID NO: 199129 - DNA, 75 bp, synthetic construct
  source 1..75: mol_type = other DNA
cctggaaaatatcggcatcatcctgctggggctgggcgctggcgtaacgggtatcgcgctcgaacaaccggcgct

SEQ ID NO: 199130 - DNA, 75 bp, synthetic construct
  source 1..75: mol_type = other DNA
aaaatcaatggtgattaccgctcacggttttgccatgccggtgaaacaggcgtttgcgccggtgctgaaactgcg

SEQ ID NO: 199131 - DNA, 75 bp, synthetic construct
  source 1..75: mol_type = other DNA
gcgttagcgtagtggcgttggcgatttgctgtgtgattggcggtgtcgctgcgccgtggttgctgccgatgctgt

SEQ ID NO: 199132 - DNA, 75 bp, synthetic construct
  source 1..75: mol_type = other DNA
cagaaattatggccctgtgtgcggtgttcctcaccagcaacagcaaagagggaaagctgtggtttgcactgggac

SEQ ID NO: 199133 - DNA, 75 bp, synthetic construct
  source 1..75: mol_type = other DNA
gcggcgttgcgtggtttgccgccgccgctgttctggcatttctcttttcgtttcataaggcgctgagcggctgga

SEQ ID NO: 199134 - DNA, 75 bp, synthetic construct
  source 1..75: mol_type = other DNA
tcgccaaaatccagggggttccagcctatgtcgttaatggtaagtacttgatctacaccaagagcatcaaatcca

SEQ ID NO: 199135 - DNA, 75 bp, synthetic construct
  source 1..75: mol_type = other DNA
aggcggattttgaagcggcactgaaagaaccagcggttcaagaaacactggaaaaatggaaagcctcttatgatg

SEQ ID NO: 199136 - DNA, 75 bp, synthetic construct
  source 1..75: mol_type = other DNA
tatttaaaaccatactgcttaccgcagctttggctgtttcatttaccgcttctgcatttaccgaaggcacggatt

SEQ ID NO: 199137 - DNA, 75 bp, synthetic construct
  source 1..75: mol_type = other DNA
cgctgttctggcatttctcttttcttttcaaaaagcgctaagtggctggatagccggaattggcggcgcggttgg

SEQ ID NO: 199138 - DNA, 75 bp, synthetic construct
  source 1..75: mol_type = other DNA
gaattgctcaccccgacgatgcaaaacatcgatcctcatattgaagttgcccccgtaataggtaagaccatatct

SEQ ID NO: 199139 - DNA, 75 bp, synthetic construct
  source 1..75: mol_type = other DNA
atgatggaatgttgatttctcaggtcgtcgattccgtcatgtacattgacaagaaagcctttggcatcctcctca

SEQ ID NO: 199140 - DNA, 75 bp, synthetic construct
  source 1..75: mol_type = other DNA
gcccactggtggcggaaaatccctttgctatcaaattcctgccttattgctaaacggccttaccgtggttgtttc

SEQ ID NO: 199141 - DNA, 75 bp, synthetic construct
  source 1..75: mol_type = other DNA
tggtcgatttaggctggccgccgctttctgctattacctgggggtcacccattgccccgtttgttattcctctga

SEQ ID NO: 199142 - DNA, 75 bp, synthetic construct
  source 1..75: mol_type = other DNA
gcttcatgaagcgcctggacgagaacgaagagggagagatgggcaaagatccggattctgtttacgagttcaaac

SEQ ID NO: 199143 - DNA, 75 bp, synthetic construct
  source 1..75: mol_type = other DNA
gcaaagagtacctgaagaccggtatgaagctgaaagagcgcctggctatgctggtggcgttgttccgcaacactt

SEQ ID NO: 199144 - DNA, 75 bp, synthetic construct
  source 1..75: mol_type = other DNA
ggagaaatcaccacaccaaccaccacgccgattcgtcattttttgatgattaaacccgtcgccactctggatgat

SEQ ID NO: 199145 - DNA, 75 bp, synthetic construct
  source 1..75: mol_type = other DNA
ggcgcatcaccagatggtcgtcgacgagcagggtaatctggtggcagtagggcggctgtatattaatgccgataa

SEQ ID NO: 199146 - DNA, 75 bp, synthetic construct
  source 1..75: mol_type = other DNA
tggtggatttaggctggccgccgctttctgccattacctgggggtcgccaattgccccgtttgttattcccctga

SEQ ID NO: 199147 - DNA, 75 bp, synthetic construct
  source 1..75: mol_type = other DNA
tgaaagcgtcattatttgttttgtaccaaccaatgcaaaatgctttcaaaatgcgtaaacgtgttgagaaagtta

SEQ ID NO: 199148 - DNA, 75 bp, synthetic construct
  source 1..75: mol_type = other DNA
gctgaacgatccgctgattcaaatcagcagttttgaccgtccgaatattcgctacatgctgatggagaagttcaa

SEQ ID NO: 199149 - DNA, 75 bp, synthetic construct
  source 1..75: mol_type = other DNA
caatatcgaatcctattatcaggaaaccggacgcgccgggcgtgatggcctgcccgcggaagcgatgctgtttta

SEQ ID NO: 199150 - DNA, 75 bp, synthetic construct
  source 1..75: mol_type = other DNA
gcattaagcataaatatctggacgagatctggaacaacaaagagaagtaccgtggtcgtattgttgaggttcatt

SEQ ID NO: 199151 - DNA, 75 bp, synthetic construct
  source 1..75: mol_type = other DNA
gtttagtaaagacgtcatcctcaaaatcacctataactggcatctaatacaaacactaaaacgggccatcaggcc

SEQ ID NO: 199152 - DNA, 75 bp, synthetic construct
  source 1..75: mol_type = other DNA
ggtgataaaatctggcaaagtaatgaatacaccatgaatgtcttctgtaataatgcattacccgcgccttccccc

SEQ ID NO: 199153 - DNA, 75 bp, synthetic construct
  source 1..75: mol_type = other DNA
tgaaatccatgttgatgaatgcatacaatcacaaatgcagtttttgatacggttagctggcgcagataattacag

SEQ ID NO: 199154 - DNA, 75 bp, synthetic construct
  source 1..75: mol_type = other DNA
acaaatcttggtgctgatggcattaagattgatatggggctaatgcctgccaaagacggtaacaactacggcttt

SEQ ID NO: 199155 - DNA, 75 bp, synthetic construct
  source 1..75: mol_type = other DNA
gaatgtccagcttctgcagaacagcatggatgcgccgaaaatcatcggatctttcccttgtaaaaaagtggctgg

SEQ ID NO: 199156 - DNA, 75 bp, synthetic construct
  source 1..75: mol_type = other DNA
atctgtacgattaacacagataaaaaaaatagattatgaagaagtttatcgtatatattttgaatcagtaagtcc

SEQ ID NO: 199157 - DNA, 75 bp, synthetic construct
  source 1..75: mol_type = other DNA
ttatgattccctttgttgcgaaggcgaactttatgatctatccaatatcaaaagaaatcaaaggaggcagtagtg

SEQ ID NO: 199158 - DNA, 75 bp, synthetic construct
  source 1..75: mol_type = other DNA
tggcatgatacagtgcccctgatactttgcgttgctgctgctatcgcctgcgccctggcacctttcacgcccatt

SEQ ID NO: 199159 - DNA, 75 bp, synthetic construct
  source 1..75: mol_type = other DNA
gatacgctttgatggggtgttttctccgggaggacgaattgttctgcgtcatctcaaacagcaggagcgggcgta

SEQ ID NO: 199160 - DNA, 75 bp, synthetic construct
  source 1..75: mol_type = other DNA
tcgacaacgcaacaggcgctggcgctatcgctgattacaaagataaagaaattatctacgtaaacgacgtcaaca

SEQ ID NO: 199161 - DNA, 75 bp, synthetic construct
  source 1..75: mol_type = other DNA
cctcaacgttgatgaactaaatctcactctcgataacggaagcaagtgggttggtcaggcaatttataacgttgc

SEQ ID NO: 199162 - DNA, 75 bp, synthetic construct
  source 1..75: mol_type = other DNA
acccaagatttctcaatcagttgatgatgtcgatttcttttacgctcccgccgacttccgggagacgctgctgga

SEQ ID NO: 199163 - DNA, 75 bp, synthetic construct
  source 1..75: mol_type = other DNA
ccatatcggattcaaacatgtcgccctggtgggcgttgacgctacgcaagaaccacgcgttcactccggcggcac

SEQ ID NO: 199164 - DNA, 75 bp, synthetic construct
  source 1..75: mol_type = other DNA
ttgccggattacggtctgccggatctcagcctgatccatcagggtatggctgcgggtattcatagcctgatgcgc

SEQ ID NO: 199165 - DNA, 75 bp, synthetic construct
  source 1..75: mol_type = other DNA
tatgctaaaaaagttgtaggtccgggtactaaagatgagtatgaaatagacgcacctaattgggaaggggcgttg

SEQ ID NO: 199166 - DNA, 75 bp, synthetic construct
  source 1..75: mol_type = other DNA
gcaagtgcgaatgctggtatcagttatctggctgatggtactgtagatccggcaaacgcagccattgcaggctgg

SEQ ID NO: 199167 - DNA, 75 bp, synthetic construct
  source 1..75: mol_type = other DNA
tctggtgtgttcgacatcaacagcagcgattacgttctgaacgctgatctggtgaacgaccgtacgtgggatact

SEQ ID NO: 199168 - DNA, 75 bp, synthetic construct
  source 1..75: mol_type = other DNA
tgttgacggtagcttgagctactctcacttcaacaacgacctgtctgcaaccatgagcaacggtacttacgttga

SEQ ID NO: 199169 - DNA, 75 bp, synthetic construct
  source 1..75: mol_type = other DNA
tggctggcttgaactgtggggcgcatgggtttattcaggccgcctggaaaagcgcatgagcagcgtaatagcgaa

SEQ ID NO: 199170 - DNA, 75 bp, synthetic construct
  source 1..75: mol_type = other DNA
tggcctggggaaccgtgcgccatctgcacgaagccccgtttggcccctggctctgtctggctatcactgttcaac

SEQ ID NO: 199171 - DNA, 75 bp, synthetic construct
  source 1..75: mol_type = other DNA
aatttatctcacttgcactagctgaatgggcagagcaacatgcagtaaaacaggaatttattcagccgggtaagc

SEQ ID NO: 199172 - DNA, 75 bp, synthetic construct
  source 1..75: mol_type = other DNA
ggcggaagagtgcatcgtggtcgccgattacgcggtaaaagtgccagatggtctggactcggcggcggccagcag

SEQ ID NO: 199173 - DNA, 75 bp, synthetic construct
  source 1..75: mol_type = other DNA
tggtatcagcacagcttatctcctcatcgtcatttgtacggcagcaccagatacccgttattgctggtctggggc

SEQ ID NO: 199174 - DNA, 75 bp, synthetic construct
  source 1..75: mol_type = other DNA
gcgtttaacacagctaaatgcaccgacgaccgaagaagtttatagagtgtactttgaatccgttaagcctgaggc

SEQ ID NO: 199175 - DNA, 75 bp, synthetic construct
  source 1..75: mol_type = other DNA
gaataccgttaatagttcagtaattgatacattagctgtaaataatggctctcaggtaaatgttactgattcctc

SEQ ID NO: 199176 - DNA, 75 bp, synthetic construct
  source 1..75: mol_type = other DNA
gtattccagagcggcgtatttaacgtagcactgaacaatggttcagaatggaataccgttaatagttcagtaatt

SEQ ID NO: 199177 - DNA, 75 bp, synthetic construct
  source 1..75: mol_type = other DNA
gttgttgcggcaaccggtaactacaaagttcgtatcgacaacgctactggtgctggttctatcgctgactacaac

SEQ ID NO: 199178 - DNA, 75 bp, synthetic construct
  source 1..75: mol_type = other DNA
gtctggtcgtgaaggaaagcgattacccctgctggcttgatgaagatgacgaaaatctgcccgtggtgctcgatg

SEQ ID NO: 199179 - DNA, 75 bp, synthetic construct
  source 1..75: mol_type = other DNA
atgttgaccagcgaaatccgaaccatccgggctggatcagcatttacgtgcggctggatgcgcccccggctggcg

SEQ ID NO: 199180 - DNA, 75 bp, synthetic construct
  source 1..75: mol_type = other DNA
ttcttctgtggaaatgtacctggtcagtgagtgtgtggagcatatcctggccagtggtctggtctgtgatgtgct

SEQ ID NO: 199181 - DNA, 75 bp, synthetic construct
  source 1..75: mol_type = other DNA
caaagttctggcccaggcatcgacggaaaataccgttaaagcgcgtaatgccgattacaacgcggcagaaaaaat

SEQ ID NO: 199182 - DNA, 75 bp, synthetic construct
  source 1..75: mol_type = other DNA
agcaggagctggtgcgccacattaaagatgagcctgcgtcgctggatcccgctaaagccgtgggcctgccagaga

SEQ ID NO: 199183 - DNA, 75 bp, synthetic construct
  source 1..75: mol_type = other DNA
cggctggcgacgttacttatcaaccgccacggcggcgtactgccgccgtacctagcctccgccattcagaaactg

SEQ ID NO: 199184 - DNA, 75 bp, synthetic construct
  source 1..75: mol_type = other DNA
gaaaacctgcccgtggtgctcgatgccatcctgaaccggggagcacgtttttcgtcggtggaaatgtacctggtc

SEQ ID NO: 199185 - DNA, 75 bp, synthetic construct
  source 1..75: mol_type = other DNA
gtgtcttttccgtatgccggtgaatggctgaccgaagacgaaatcagggctgtacttgcggcggtgcgcgatgcg

SEQ ID NO: 199186 - DNA, 75 bp, synthetic construct
  source 1..75: mol_type = other DNA
ttgctgacccgccagacgcgccgcttttgccttgtcgtgaaggaaagcgatcacccctgctggctcgatgaagac

SEQ ID NO: 199187 - DNA, 75 bp, synthetic construct
  source 1..75: mol_type = other DNA
catttatgtcgttctggatgcgccccggctggcgacgttacttatcaaccgccacggcggcgtactgcagccgta

SEQ ID NO: 199188 - DNA, 75 bp, synthetic construct
  source 1..75: mol_type = other DNA
acgtgcggctggatgcgccccggctggcgacgttacttatcaaccgtcacggcggcgtactgccgccgctcctgg

SEQ ID NO: 199189 - DNA, 75 bp, synthetic construct
  source 1..75: mol_type = other DNA
cgtggtgttctgcgggaggtggtccgggaagcccgggccgaaatccgcagcatggcggatgccctggcaaaaatc

SEQ ID NO: 199190 - DNA, 75 bp, synthetic construct
  source 1..75: mol_type = other DNA
atattgatatcaccgaatccttcccgaaaaatatgtatcagaagctgttgaaggatattccggggcaggtttata

SEQ ID NO: 199191 - DNA, 75 bp, synthetic construct
  source 1..75: mol_type = other DNA
ctgcgggaagttgtccgggaagcccgggccgaaatccgcagcatggcggatgccctggcaaaaatcaggggctga

SEQ ID NO: 199192 - DNA, 75 bp, synthetic construct
  source 1..75: mol_type = other DNA
gcctggttgtgaaggaaagcgatcacccctgctggctcgatgaagacgacgaaaaactgcccgtggtgctcgatg

SEQ ID NO: 199193 - DNA, 75 bp, synthetic construct
  source 1..75: mol_type = other DNA
ataccggatgaaccgccccgccagtggtttgaccgtggtgttctgcgggaagttgtccgggaagcccgggccgaa

SEQ ID NO: 199194 - DNA, 75 bp, synthetic construct
  source 1..75: mol_type = other DNA
acggctttgggccaaaaccggcagacattattcatgttccctttaacgatctccacgcggtgaaagcagtgatgg

SEQ ID NO: 199195 - DNA, 75 bp, synthetic construct
  source 1..75: mol_type = other DNA
tttcatcctggttctcacggttccacctacggcggtaatcctctggcctgtgcagtagcgggcgcggcgtttgat

SEQ ID NO: 199196 - DNA, 75 bp, synthetic construct
  source 1..75: mol_type = other DNA
atgcgttttgcgccatcgctggtggtggacgatgcggatatcgatgaagggatgcaacgtttcgcccacgcagtg

SEQ ID NO: 199197 - DNA, 75 bp, synthetic construct
  source 1..75: mol_type = other DNA
aaaaattgcgattgctgtggcatcgatgtggaaaaagaaccttggtgtagatgtcaaactgcaaaatcaggaatg

SEQ ID NO: 199198 - DNA, 75 bp, synthetic construct
  source 1..75: mol_type = other DNA
gttgtgcgctgttagtcagcagcatttctctttcgtatgctgcagatgttccgagcggcacagtactggcagaga

SEQ ID NO: 199199 - DNA, 75 bp, synthetic construct
  source 1..75: mol_type = other DNA
aatcaacaacgcacaggcgattattgatggtaaagccgcgcctgaccagcttggcgtcaccgcagttgatgccca

SEQ ID NO: 199200 - DNA, 75 bp, synthetic construct
  source 1..75: mol_type = other DNA
tggagcatatcctgtccagtgggctggcctgcgatgtgctgcgtataccggatgaaccgccccgccgctggtttg

SEQ ID NO: 199201 - DNA, 75 bp, synthetic construct
  source 1..75: mol_type = other DNA
ttgccgcactggctggaatcaacaacgcccaggcaattattgatggtaaggctacgccagctcaacttggcgtca

SEQ ID NO: 199202 - DNA, 75 bp, synthetic construct
  source 1..75: mol_type = other DNA
ggttaataaaaccgtggctaaaaggttatccgattaataatccagaagatgtggcctatagtcggacaatgtata

SEQ ID NO: 199203 - DNA, 75 bp, synthetic construct
  source 1..75: mol_type = other DNA
gatgatgacaatttgccggtggtgctcgatgccatcctgaacaaaggggcacgctacagcagcgtcgagttcttt

SEQ ID NO: 199204 - DNA, 75 bp, synthetic construct
  source 1..75: mol_type = other DNA
ggcacttcctggaagaatagaacgtcgctgccgtgacgttatgcggataatgctacctctggtgaaagagttggc

SEQ ID NO: 199205 - DNA, 75 bp, synthetic construct
  source 1..75: mol_type = other DNA
gcaatacgaagcatctgttaccaggtggcagacgatgcgcggcgtatccgggcggcgcagaccaccaccggtcag

SEQ ID NO: 199206 - DNA, 75 bp, synthetic construct
  source 1..75: mol_type = other DNA
gtctggttgtgaaggaaagcgattacccctgctggcttgatgaagatgacgaaaacctgcccgtggtgctcgatg

SEQ ID NO: 199207 - DNA, 75 bp, synthetic construct
  source 1..75: mol_type = other DNA
cacgttcctcataacacaaatgtatgaagggcgtcagcgcggttctcgtctactgtttaccgactctttcttcag

SEQ ID NO: 199208 - DNA, 75 bp, synthetic construct
  source 1..75: mol_type = other DNA
tgtgctgcgtattccgggcgagcctccgcgccggtggatggatttaaccctgttacatgaggtcatggcagaagc

SEQ ID NO: 199209 - DNA, 75 bp, synthetic construct
  source 1..75: mol_type = other DNA
cgccgattcgccattttttgatgattaaacccgttgccactctggatgatattctgcatcgcggtgactggtgcg

SEQ ID NO: 199210 - DNA, 75 bp, synthetic construct
  source 1..75: mol_type = other DNA
attttgcatcgcggcgactggtgcgcccagctccagcaggcgtggtatgaacacatcccattaagtgaaaaaatg

SEQ ID NO: 199211 - DNA, 75 bp, synthetic construct
  source 1..75: mol_type = other DNA
aatccgccccggcgatattttccgggataaatacggcagcacgataacgattaaaaccgtcgatgattttcgcgt

SEQ ID NO: 199212 - DNA, 75 bp, synthetic construct
  source 1..75: mol_type = other DNA
cgccgattcgccattttttgatgattaagcccgtcgccactctggatgacattctgcatcgcggtgactggtgcg

SEQ ID NO: 199213 - DNA, 75 bp, synthetic construct
  source 1..75: mol_type = other DNA
ggaaatagctggcatgacgtaagactggataatcaacagcatattgataaggcacttcctggaagaatagaacgt

SEQ ID NO: 199214 - DNA, 75 bp, synthetic construct
  source 1..75: mol_type = other DNA
gaaatttgcccaggagatggggtttctgccgccggtggtgcacattcgcgacaatatggatctgcaacctgcccg

SEQ ID NO: 199215 - DNA, 75 bp, synthetic construct
  source 1..75: mol_type = other DNA
gccggtacttccggcggacggaacgcaggtgtcttttccgtatgccggcgaatggctgaccgaagacgaaatcag

SEQ ID NO: 199216 - DNA, 75 bp, synthetic construct
  source 1..75: mol_type = other DNA
cgaaatggccgtcacgctgcaaatcgccgtctggggcaccgcgctggcagtcgttctctccatccccttcggcct

SEQ ID NO: 199217 - DNA, 75 bp, synthetic construct
  source 1..75: mol_type = other DNA
atgcaaaccatcaccatcgccccacccaagcgcagctggttctcgatcttcagctgggccgttgttctcgctgta

SEQ ID NO: 199218 - DNA, 75 bp, synthetic construct
  source 1..75: mol_type = other DNA
ctcgaagagatcctctacggcgtgctgccgcaggtgatgccgctgcttatctcctactccctctatcgcttcgaa

SEQ ID NO: 199219 - DNA, 75 bp, synthetic construct
  source 1..75: mol_type = other DNA
ctggcgcagggctggccggaagagacggatattgaacaactgaacccgcactatccgggctggatcagcatttat

SEQ ID NO: 199220 - DNA, 75 bp, synthetic construct
  source 1..75: mol_type = other DNA
cctgctgctggcgcagggctggccggaagagacggatattgaacaactgaacccgcactatccgggctggatcag

SEQ ID NO: 199221 - DNA, 75 bp, synthetic construct
  source 1..75: mol_type = other DNA
cttccggcagacggaacgcaggtgtcttttccgtatgccggtgaatggctgaccgaagacgaaatcagggctgta

SEQ ID NO: 199222 - DNA, 75 bp, synthetic construct
  source 1..75: mol_type = other DNA
caggtgtctttcccgtatgccggagaatggctgaccgaagacgaaatcagggctgtacttgcggcggtgcgcgat

SEQ ID NO: 199223 - DNA, 75 bp, synthetic construct
  source 1..75: mol_type = other DNA
ctatcttcctcaatgcctggctgatggaaatcgtcccgttaaaaacgcagttacgttttggctttctcctgatgg

SEQ ID NO: 199224 - DNA, 75 bp, synthetic construct
  source 1..75: mol_type = other DNA
gccggtacttccggcagacggaacgcaggtgtctttcccgtatgccggtgagtggctgaccgaagacgaaatcag

SEQ ID NO: 199225 - DNA, 75 bp, synthetic construct
  source 1..75: mol_type = other DNA
catttatgttctgctggatgcgccccggctggcgacgttactcatcaaccgtcacggcggcgtactgccgccgct

SEQ ID NO: 199226 - DNA, 75 bp, synthetic construct
  source 1..75: mol_type = other DNA
acccgaagtatccgggctggatcagcatttatgttctgctggatgcgccccggctggcgacgttactcatcaacc

SEQ ID NO: 199227 - DNA, 75 bp, synthetic construct
  source 1..75: mol_type = other DNA
gacgttgctgacccgccagacgcgccgctttcgcctggtcgtgaaggaaagcgatcacccctgctggctcgatga

SEQ ID NO: 199228 - DNA, 75 bp, synthetic construct
  source 1..75: mol_type = other DNA
atattctgatcgccaccggtggtcgtccgagccacccggatattccgggcgtggaatacggtattgattctgatg

SEQ ID NO: 199229 - DNA, 75 bp, synthetic construct
  source 1..75: mol_type = other DNA
tctgattggagatgatgctctgtcccgtgaatggctgaaggccaattccggtgcgctggctgaacagcatgcggc

SEQ ID NO: 199230 - DNA, 75 bp, synthetic construct
  source 1..75: mol_type = other DNA
caacgcgagccttttatcccctgcccgtcttggggatgctgctgttttgcgcagccggcggcagtcaggcggcat

SEQ ID NO: 199231 - DNA, 75 bp, synthetic construct
  source 1..75: mol_type = other DNA
ccgcaaagatcacgaatacagccttgatcactaccagcatcggttttatctgcgttccaaccgccacggcaaaaa

SEQ ID NO: 199232 - DNA, 75 bp, synthetic construct
  source 1..75: mol_type = other DNA
tgaaaggtgtcggcaaagacttccgaaacgctgactatatcgactatctgccagtgaatatgttggcaattttga

SEQ ID NO: 199233 - DNA, 75 bp, synthetic construct
  source 1..75: mol_type = other DNA
tgatcgccagccgtaccgcctatatcgaccgtattcatacttcctatgagaacgtgctcggtaaaaataacgttg

SEQ ID NO: 199234 - DNA, 75 bp, synthetic construct
  source 1..75: mol_type = other DNA
tgatctctgaaacgctggtcgaagtgatgaacgccgaaggcccacagttgcataccaacgccatcccgaaagcgg

SEQ ID NO: 199235 - DNA, 75 bp, synthetic construct
  source 1..75: mol_type = other DNA
atggcggagctgtaccgcacgcttccggcggcctttgatgacttctgcagcacgggtgtggcgctgcatcagggg

SEQ ID NO: 199236 - DNA, 75 bp, synthetic construct
  source 1..75: mol_type = other DNA
atatcatcgtgtttgatccgaaaggatgggcgctgttccgttccttcaaggccgtcaaggataagctggataccc

SEQ ID NO: 199237 - DNA, 75 bp, synthetic construct
  source 1..75: mol_type = other DNA
tctggtttcgcgatgcgattcagtatcatgagctcaaaaatatttttactgatgctgatgtgctctccgacagtt

SEQ ID NO: 199238 - DNA, 75 bp, synthetic construct
  source 1..75: mol_type = other DNA
gacacgttcgatcctacacatgatattgacctctactgcgacctggccagcggtcttgtgaatattgccattatg

SEQ ID NO: 199239 - DNA, 75 bp, synthetic construct
  source 1..75: mol_type = other DNA
aaagtggcggacccggaaggtggcgaacgtgcggtcatcaccttagatggtaaatatctgccgaccaaaccgttc

SEQ ID NO: 199240 - DNA, 75 bp, synthetic construct
  source 1..75: mol_type = other DNA
gaagtggatatgggccgcagtgtggcgaacaacatcacgcagtccggcggtacggagtggagcaagcgtgacaag

SEQ ID NO: 199241 - DNA, 75 bp, synthetic construct
  source 1..75: mol_type = other DNA
gataaagacaaggatatgccctttgatttactccgttgtaccacgccgaaatgttcggggcaaatgcactggaaa

SEQ ID NO: 199242 - DNA, 75 bp, synthetic construct
  source 1..75: mol_type = other DNA
aaaaaacttcatttaattaattggatgttaaagtcagagaataatgaagcaatgtttgaattctggcttttaaac

SEQ ID NO: 199243 - DNA, 75 bp, synthetic construct
  source 1..75: mol_type = other DNA
ttgggccgttggtggagatataagtggatcacttttcatccgtcgttgacaggatttgccccaggcctgattgtc

SEQ ID NO: 199244 - DNA, 75 bp, synthetic construct
  source 1..75: mol_type = other DNA
atgaaaagcaaacctttttatcttctctgcgtttttttgtggctgattgtcagttacgccagagccgcagatagc

SEQ ID NO: 199245 - DNA, 75 bp, synthetic construct
  source 1..75: mol_type = other DNA
tgtgcgcttttttgtggctggttgccagtcacgccagggccgcagatagcacgattactattcgcggctatgtca

SEQ ID NO: 199246 - DNA, 75 bp, synthetic construct
  source 1..75: mol_type = other DNA
cctgtttaaagagaccgacattctggaaatggtggacaggcacagcgcgatcctgactcaggatctcagtgatga

SEQ ID NO: 199247 - DNA, 75 bp, synthetic construct
  source 1..75: mol_type = other DNA
ccgtgggtaaaagcggcaatgatttgcattaccgcggctacgacattcttgatctggcggaacattgcgaatttg

SEQ ID NO: 199248 - DNA, 75 bp, synthetic construct
  source 1..75: mol_type = other DNA
agtctttctttccgggatttcggaaagctggatcgccatcggcctgacgctaggcgcatggattaactggaagct

SEQ ID NO: 199249 - DNA, 75 bp, synthetic construct
  source 1..75: mol_type = other DNA
agctggatcgccattggcctgacattaggcgcgtggattaactggaagctggtggccgggcggttgcgtgtgcat

SEQ ID NO: 199250 - DNA, 75 bp, synthetic construct
  source 1..75: mol_type = other DNA
acttcctgcatctgctgcacggcgaaaagccgtcgcaaagctgggaaaaggcgatgcatatctcgctggtgctgt

SEQ ID NO: 199251 - DNA, 75 bp, synthetic construct
  source 1..75: mol_type = other DNA
gctcgctcaatcgtccggcaggcaccactatccaggacatgatcaaactcgagcagaaaatgctgccggaactgc

SEQ ID NO: 199252 - DNA, 75 bp, synthetic construct
  source 1..75: mol_type = other DNA
ctcgccgcctacaaaacgaaactgaaagccctgcgcggtttaccggctaacgtgcgtaccgtgctggaagcctta

SEQ ID NO: 199253 - DNA, 75 bp, synthetic construct
  source 1..75: mol_type = other DNA
gtggctttatttttccttaacgccgtcattttccttttcatgttaatgaagtattttactaatcgagatattttc

SEQ ID NO: 199254 - DNA, 75 bp, synthetic construct
  source 1..75: mol_type = other DNA
atccgccccgatgacatcttcgcacgtctggatggtgaagtgtttggcttgatatttaccgaattgaataccgcc

SEQ ID NO: 199255 - DNA, 75 bp, synthetic construct
  source 1..75: mol_type = other DNA
aattctaccaacactcattttaagtcttgcatttttaagtggccttatctatttagttgaaactattgttgttat

SEQ ID NO: 199256 - DNA, 75 bp, synthetic construct
  source 1..75: mol_type = other DNA
ccgtcagcggcgatgcaaaaacgctttgccgaggccgatgcgcactatcattcggctccgccgtcacggttgcag

SEQ ID NO: 199257 - DNA, 75 bp, synthetic construct
  source 1..75: mol_type = other DNA
ttcggcggtcgctatcagacgcttcaggcacagtgcgtggctgatcctgactgttcgctggaaatggcccgtgaa

SEQ ID NO: 199258 - DNA, 75 bp, synthetic construct
  source 1..75: mol_type = other DNA
cggctttagtaacagatatgatgttcctgaacaaatgaccatcagtattggcacggttttttcaacgggtgacac

SEQ ID NO: 199259 - DNA, 75 bp, synthetic construct
  source 1..75: mol_type = other DNA
tgacttgcggcaccatcggcaccatgctgacctttgtggttaccggtccgattgtcgagcatagcggcccacagg

SEQ ID NO: 199260 - DNA, 75 bp, synthetic construct
  source 1..75: mol_type = other DNA
gtgccggaacggggcttggggttgcgcatctggtccatgtcgataagcgttgggtaagcttgccaggcgaaggcg

SEQ ID NO: 199261 - DNA, 75 bp, synthetic construct
  source 1..75: mol_type = other DNA
agcggtcattcgcgtttatcttgaagaacataaggtcgaggtgaaagacggctgtattgccatcgcttgcccaat

SEQ ID NO: 199262 - DNA, 75 bp, synthetic construct
  source 1..75: mol_type = other DNA
cgcgcagattgttgatgaagtctgcgattttgtggcgaatcagcaggcggttttcctctgtggtcactacatcct

SEQ ID NO: 199263 - DNA, 75 bp, synthetic construct
  source 1..75: mol_type = other DNA
tctgtgtatcaaaaaattcaccatggtcagcttgctaaatacatggtcaagaaggaaaaaacaaaggccgcgtaa

SEQ ID NO: 199264 - DNA, 75 bp, synthetic construct
  source 1..75: mol_type = other DNA
gaaaccagcgccagggcacatacgaaagctggcagtcacccggcccaatcaggtgtgggcaatggacctgaccta

SEQ ID NO: 199265 - DNA, 75 bp, synthetic construct
  source 1..75: mol_type = other DNA
ggttctgcgccagaacgcggtgacaacgccattttcaaaatggcgtccgattcttggcgaattacaagaactctc

SEQ ID NO: 199266 - DNA, 75 bp, synthetic construct
  source 1..75: mol_type = other DNA
gtcgcggtacttccgaccaggaaggcggcatggcatctatggtttatgccggtaaaatcattaaagacctcggtc

SEQ ID NO: 199267 - DNA, 75 bp, synthetic construct
  source 1..75: mol_type = other DNA
atgaatatcagcaaggaaacccgcgaaattctgcgtaattacagggccgtgattaatgcgcggcgtcgtgaaatg

SEQ ID NO: 199268 - DNA, 75 bp, synthetic construct
  source 1..75: mol_type = other DNA
atgaatatcagcacagaaacccgcgaaattctgctcaattacaaagccgtgattaatgcacgacgtcgtgagatg

SEQ ID NO: 199269 - DNA, 75 bp, synthetic construct
  source 1..75: mol_type = other DNA
cctaacgaaaaaacctggaaatctcacctggtgacctgtgccgcgatgtacgctgcaatcccgttaagctggctg

SEQ ID NO: 199270 - DNA, 75 bp, synthetic construct
  source 1..75: mol_type = other DNA
tcgacccgatgggtaacgttctcggttatatcggccacggcccgcgtctggttgcgatggatgctcatatcgata

SEQ ID NO: 199271 - DNA, 75 bp, synthetic construct
  source 1..75: mol_type = other DNA
ggatacccgtcggagcttgccattgctcaggtcgaagagatgcaggccgtttctgctgtgcttaagggcaaatac

SEQ ID NO: 199272 - DNA, 75 bp, synthetic construct
  source 1..75: mol_type = other DNA
atttgccgtctgagaatttcagatattgatctcaaggcaaaatgtatatatatccaccgactaaaaaaaggtttt

SEQ ID NO: 199273 - DNA, 75 bp, synthetic construct
  source 1..75: mol_type = other DNA
aagccagacagatttgcacaacatcaaatgcacccgctgcacgtggcagacgatatgcacaaggggctgacgtat

SEQ ID NO: 199274 - DNA, 75 bp, synthetic construct
  source 1..75: mol_type = other DNA
gcattaccgtggttacgatattattgatctggcggaacattgcgaatttgaagaagtggcgcatctgctgatcca

SEQ ID NO: 199275 - DNA, 75 bp, synthetic construct
  source 1..75: mol_type = other DNA
ttgaacaacgtcaggacaacaaaattatcgtccttccgccaattatgttggaccggaagaccgccagtttgtcgc

SEQ ID NO: 199276 - DNA, 75 bp, synthetic construct
  source 1..75: mol_type = other DNA
tggcgctggttcttgttgcgctgggctggcagtcgtggcggcttaacaatgccagtcacaccattgagacgcagg

SEQ ID NO: 199277 - DNA, 75 bp, synthetic construct
  source 1..75: mol_type = other DNA
cgaggaacgaccgaacaagcgaccgaacaattctgatctgcgcgattccggcaatcttgaacaggacgcagaccg

SEQ ID NO: 199278 - DNA, 75 bp, synthetic construct
  source 1..75: mol_type = other DNA
gaaacagaaatctcatcgacgcgttactggttggtgatgagattggtaatgaaaactttgtgccgctaatgcaaa

SEQ ID NO: 199279 - DNA, 75 bp, synthetic construct
  source 1..75: mol_type = other DNA
tactatgatgaacagtctgttgcccgcgaatatatggagatcattgtttcgaaaaaccgtcacgggaaaacgggg

SEQ ID NO: 199280 - DNA, 75 bp, synthetic construct
  source 1..75: mol_type = other DNA
ttatcggtggcctgctgattggtggattaacaccaaccgccagcgacgttctggcaacgctggagccggaagcgt

SEQ ID NO: 199281 - DNA, 75 bp, synthetic construct
  source 1..75: mol_type = other DNA
tttgaaattatccgggcgcaagccagaaacaggaatcttatcgacgcgttattggttggcgatgagattggcaat

SEQ ID NO: 199282 - DNA, 75 bp, synthetic construct
  source 1..75: mol_type = other DNA
gcgaatatatggaaatcattgtgtcaaaaaaccgtcatggtaagtctggaactgtttaccagcggtttgatgata

SEQ ID NO: 199283 - DNA, 75 bp, synthetic construct
  source 1..75: mol_type = other DNA
cgatgatttgcggcgctggtctgatactcctttgcctcctgacgttatcaggttgcgggaccgccccgcgctcgc

SEQ ID NO: 199284 - DNA, 75 bp, synthetic construct
  source 1..75: mol_type = other DNA
atgaaccggttgctgctggttgtgctggcgttattactggcgtcgctgggctggcagatgtggcggctggctgat

SEQ ID NO: 199285 - DNA, 75 bp, synthetic construct
  source 1..75: mol_type = other DNA
caccggaggtacagcttaccgtcagtggttgtccgcgggggacgccgtgtcagctggatcaggcagcgccgcgca

SEQ ID NO: 199286 - DNA, 75 bp, synthetic construct
  source 1..75: mol_type = other DNA
agcgcgcagctgagacaacgacaacaccgaattgaggaactgaagcgtgagaacgagggtttacgccgctgggct

SEQ ID NO: 199287 - DNA, 75 bp, synthetic construct
  source 1..75: mol_type = other DNA
ccgcgaatctactattcgtgctctgaacgccgcaggtttccgcatcactaacattactgatgtgactccgatccc

SEQ ID NO: 199288 - DNA, 75 bp, synthetic construct
  source 1..75: mol_type = other DNA
atgccaaaaggttctgttcctgccctgcaacaagaaatgctgcgacgtgtcagtaaacgttatgacgatgtagaa

SEQ ID NO: 199289 - DNA, 75 bp, synthetic construct
  source 1..75: mol_type = other DNA
ggagggtatgaaatgaaaccagtgactgtgacaattaacgccgttcctgcagatactgaaggcgctgaggagaaa

SEQ ID NO: 199290 - DNA, 75 bp, synthetic construct
  source 1..75: mol_type = other DNA
gccagccagaccatcagcacgcaggcaaacgagctgcagagcaaaagtcaggcactggcaaagagcaacagccag

SEQ ID NO: 199291 - DNA, 75 bp, synthetic construct
  source 1..75: mol_type = other DNA
gccggatcgaggaactgaaacgtgaaaacgaggatttgcgccgctgggctgacgctcctttgcctgctgacatta

SEQ ID NO: 199292 - DNA, 75 bp, synthetic construct
  source 1..75: mol_type = other DNA
cgaactaacgaagaaaaatagccagctgatcagtctgtccattctggctgaaaccaataacagggagcaggcgcg

SEQ ID NO: 199293 - DNA, 75 bp, synthetic construct
  source 1..75: mol_type = other DNA
agcacttcaggacaccgcaagggaacggcagaagcagaagtttctggagggattttttattgatgttgcctctat

SEQ ID NO: 199294 - DNA, 75 bp, synthetic construct
  source 1..75: mol_type = other DNA
tccggctgcggaaacgtccggcactcaccggaggtatggcttaccgtcagtggttgtccgcgagtgacgccgtgt

SEQ ID NO: 199295 - DNA, 75 bp, synthetic construct
  source 1..75: mol_type = other DNA
ttgggcgctggtcaatgaatcaacttaaaaaccttgtggtaaatacgcccgtaaccgtgacatacacacagacag

SEQ ID NO: 199296 - DNA, 75 bp, synthetic construct
  source 1..75: mol_type = other DNA
tcataccctgacacccatgaaaaaaggaaaaaggtattacgtgactggatatccttcatgcgctcccgttttaat

SEQ ID NO: 199297 - DNA, 75 bp, synthetic construct
  source 1..75: mol_type = other DNA
caatattcgcgccgagctgtggcgcaagctggcagtcaactgtgtgattaatccactgaccgccatctggaattg

SEQ ID NO: 199298 - DNA, 75 bp, synthetic construct
  source 1..75: mol_type = other DNA
aagaagttgcggcggtgattgaacgcgaagggcatcatacttctgcggaagatctgcgtgattatgtgatgcagg

SEQ ID NO: 199299 - DNA, 75 bp, synthetic construct
  source 1..75: mol_type = other DNA
atgagaaacaaacctttttatcttctgtgcgcttttttgtggctggcggtaagtcgcgctttggctgcggatagc

SEQ ID NO: 199300 - DNA, 75 bp, synthetic construct
  source 1..75: mol_type = other DNA
gcggcgaagcaatttaacaacattggcgcgacgactcctgttgttccatttcgtattttgctgtcaccctgtggt

SEQ ID NO: 199301 - DNA, 75 bp, synthetic construct
  source 1..75: mol_type = other DNA
tgaatcaaccaattttactgttgatctgatggaaaacgcggcgaagcaatttaacaacattggcgcgacgactcc

SEQ ID NO: 199302 - DNA, 75 bp, synthetic construct
  source 1..75: mol_type = other DNA
aatactgttaattcacaacggcatgggcaccatcgaagaattgcaaaacattcagcagccattactgatgggcac

SEQ ID NO: 199303 - DNA, 75 bp, synthetic construct
  source 1..75: mol_type = other DNA
atgaaataaaaaaaaataccgttaccaatggtaactcgatatcattaataaaaaaactcccatcacaatatgctc

SEQ ID NO: 199304 - DNA, 75 bp, synthetic construct
  source 1..75: mol_type = other DNA
gaaccgattcgttcggttgttctggaaaccaatgactctgtcgtcgttgtttggcacgcccaccctgggcaggaa

SEQ ID NO: 199305 - DNA, 75 bp, synthetic construct
  source 1..75: mol_type = other DNA
cacagctagtgcgcgtctgtaattataagggaaaaacgatgaagaataaggctgataacaaaaaaaggaacttcc

SEQ ID NO: 199306 - DNA, 75 bp, synthetic construct
  source 1..75: mol_type = other DNA
gaatatgattaccttgaccgtcagggtgtttacaacggcaaagataatttatctgaaaatagttatcgtattggt

SEQ ID NO: 199307 - DNA, 75 bp, synthetic construct
  source 1..75: mol_type = other DNA
tcacagtgaaagcatgatggaaatattgcgcatatggcttgaaacacttggcgacaatgaacgcgacaaacaaaa

SEQ ID NO: 199308 - DNA, 75 bp, synthetic construct
  source 1..75: mol_type = other DNA
ttgctgatctcgatgtgtggattgttgatgcatcacagttaactgtcgaggaaatacgcgccacaactgaacgaa

SEQ ID NO: 199309 - DNA, 75 bp, synthetic construct
  source 1..75: mol_type = other DNA
gtcgctcgatcagatgactgaacgcgctatcgctggcgcagggaacttgtcaacggattgcttacgtaatccggt

SEQ ID NO: 199310 - DNA, 75 bp, synthetic construct
  source 1..75: mol_type = other DNA
aaccgctcgacgaaatgttaggcggtattaacgctactgatttggtacttctcgccggacgccctgggtctggta

SEQ ID NO: 199311 - DNA, 75 bp, synthetic construct
  source 1..75: mol_type = other DNA
atgaagatcaagtgatgacgtttctgatgatcctgccaattgccctgttaaccgcaggcctgttaggcacgctgt

SEQ ID NO: 199312 - DNA, 75 bp, synthetic construct
  source 1..75: mol_type = other DNA
gacagcttgttgatactggcaggtgcattgattgcccagggggttatggattttcttccaaccatcacgatcctg

SEQ ID NO: 199313 - DNA, 75 bp, synthetic construct
  source 1..75: mol_type = other DNA
aatggtgaaaatagcatagctggtggttgtgatggtggcggtggaggaggaggaggtggtggtggtggtggtgac

SEQ ID NO: 199314 - DNA, 75 bp, synthetic construct
  source 1..75: mol_type = other DNA
tagaccgcgcatttattgcactttctcacagtgaaagcatgatggaaatattgcgcatatggcttgaaacacttg

SEQ ID NO: 199315 - DNA, 75 bp, synthetic construct
  source 1..75: mol_type = other DNA
gtgatatttatctttgaaacaatagaccgcgcatttcttgcactttctcacagtgaaaatatgttggaaatattt

SEQ ID NO: 199316 - DNA, 75 bp, synthetic construct
  source 1..75: mol_type = other DNA
acgcttcttgagcctgtaataatggaaatacaagaaatagaccaattgcacgacagatataacgaacagcacacc

SEQ ID NO: 199317 - DNA, 75 bp, synthetic construct
  source 1..75: mol_type = other DNA
tataacgaaaacacgaatgtaaaactcatcccacagatgaattacctgatggttgttgtggctttgtttttcctt

SEQ ID NO: 199318 - DNA, 75 bp, synthetic construct
  source 1..75: mol_type = other DNA
gcaacagcctgaacattatgatttatatattcctgccatcacctggcatgcacgtttcgctggtgatgctgccaa

SEQ ID NO: 199319 - DNA, 75 bp, synthetic construct
  source 1..75: mol_type = other DNA
gcaacagcctgaacattatgatttatatattcctgccatcacctggcatgcacgtttcgcttacgacaaagaaaa

SEQ ID NO: 199320 - DNA, 75 bp, synthetic construct
  source 1..75: mol_type = other DNA
ggctctctggggtatcaggcgggtaaaaatgtcagactgcaccgtcctgttaacgggcaggaacagcccaaactg

SEQ ID NO: 199321 - DNA, 75 bp, synthetic construct
  source 1..75: mol_type = other DNA
gagcacgaggtcacgcgtctcgatgcctctgacctgatttcgctggccggtaaggtggtcggttttttgtcgcct

SEQ ID NO: 199322 - DNA, 75 bp, synthetic construct
  source 1..75: mol_type = other DNA
gcagcagaaggggctcacagggaggagttagagaaacaacgcctggcgctggaacagaaaattcaggaagcgcat

SEQ ID NO: 199323 - DNA, 75 bp, synthetic construct
  source 1..75: mol_type = other DNA
tccgacgccaccgggcagaaagcagtcatcgtcatcatgggcgatgatccgaaagaagatctggcggtgctggcg

SEQ ID NO: 199324 - DNA, 75 bp, synthetic construct
  source 1..75: mol_type = other DNA
ggccgcatccggcaacccgcacgaggccgctctggcactgcgccgtgcccgtaaactgatggatgttcacggcat

SEQ ID NO: 199325 - DNA, 75 bp, synthetic construct
  source 1..75: mol_type = other DNA
ccgcgaccagagcagcataagccagaactacgccctggaactgtccggctcgcgctacttcatcgaacagccacc

SEQ ID NO: 199326 - DNA, 75 bp, synthetic construct
  source 1..75: mol_type = other DNA
ctttcctcgagcgccctgctggcaagctctccggcggcatgaaacagaagctcggcctgtgctgtgcactgatcc

SEQ ID NO: 199327 - DNA, 75 bp, synthetic construct
  source 1..75: mol_type = other DNA
gcggtagttggttgtaccgcactgtgcatcgaaaccggtgaagtggtttacttcaaagcccgtgcgactgtgctg

SEQ ID NO: 199328 - DNA, 75 bp, synthetic construct
  source 1..75: mol_type = other DNA
ctgcggcggcagctgaccgtaccggtcacgcactgttgcacaccctttatcagcagaacctgaaaaaccacacca

SEQ ID NO: 199329 - DNA, 75 bp, synthetic construct
  source 1..75: mol_type = other DNA
agaaactgaaaaagttgctggcgctggctgcatccggcaacccgcacgaggccgctcttgcactgcgccgtgccc

SEQ ID NO: 199330 - DNA, 75 bp, synthetic construct
  source 1..75: mol_type = other DNA
aggagcttaccgcgatgaacctgcccgatatgctgtcgctggccgctaaggtgattggttttttgtcaccggctt

SEQ ID NO: 199331 - DNA, 75 bp, synthetic construct
  source 1..75: mol_type = other DNA
gcggctgtgcgtgggtattttccacaccaaacggtatcgacgagagcaattttttctacgcgatatgccacgatg

SEQ ID NO: 199332 - DNA, 75 bp, synthetic construct
  source 1..75: mol_type = other DNA
tcagaccgatgaatttcctttgttccttcgctatttcaggttgcactgcctggaaaacagcgaacatgtcagtta

SEQ ID NO: 199333 - DNA, 75 bp, synthetic construct
  source 1..75: mol_type = other DNA
cattgcagaatctggcgtggaaagaggtagaaccgtatccgctggatgtgctggtggcggaaagccaggggatga

SEQ ID NO: 199334 - DNA, 75 bp, synthetic construct
  source 1..75: mol_type = other DNA
taccacaccttgtcggtgtatgaaaacgtcgattttttcgcccgcctgttcggtcacgacaaagcggagcgggaa

SEQ ID NO: 199335 - DNA, 75 bp, synthetic construct
  source 1..75: mol_type = other DNA
atttaacatcggcaacgtttggcaaaatattgcgtaaagagctgacggttatcggcagttggatgaactactcca

SEQ ID NO: 199336 - DNA, 75 bp, synthetic construct
  source 1..75: mol_type = other DNA
cagcgttaaccagcaaagggaaagacgagcgcgcggtgctggcttccagccaccattaccagggtaaatgcaaaa

SEQ ID NO: 199337 - DNA, 75 bp, synthetic construct
  source 1..75: mol_type = other DNA
ggcgcattatagggagttattccggcctgacaagaggaaatttaaaataattttccgaccgcgcattttttcagc

SEQ ID NO: 199338 - DNA, 75 bp, synthetic construct
  source 1..75: mol_type = other DNA
agaaccccgctgacccggcggcgtgtttgccgttgttccgtgtcagtggtggcgcattatagggagttattccgg

SEQ ID NO: 199339 - DNA, 75 bp, synthetic construct
  source 1..75: mol_type = other DNA
aggaaatttaaaataattttccgaccgcgcattttttcagcaaaagccccgttaatgtgccataaaacaagcaat

SEQ ID NO: 199340 - DNA, 75 bp, synthetic construct
  source 1..75: mol_type = other DNA
aaccgcgtaaaattctcgacagcgaagccattgagttgttgctcaaagaggggcatgtggtgatttgcagtggcg

SEQ ID NO: 199341 - DNA, 75 bp, synthetic construct
  source 1..75: mol_type = other DNA
tccgctggatgtgctggtggcggaaagccaggggatgattggctatatgctggcgcagagtttgagcgcacagcc

SEQ ID NO: 199342 - DNA, 75 bp, synthetic construct
  source 1..75: mol_type = other DNA
gcggcggtgtgccggtgacggatgacggagcagggagtgaagcggtgattgataaagatctcgccgctgcgttgc

SEQ ID NO: 199343 - DNA, 75 bp, synthetic construct
  source 1..75: mol_type = other DNA
ctcaacacgtcaacgggcgaatggcgtgagccggtcgtctgcgaaagcggcgaggacgcactaaaaaaggctgct

SEQ ID NO: 199344 - DNA, 75 bp, synthetic construct
  source 1..75: mol_type = other DNA
atgtcaaaaccaccgtgcactggaaacgacactggcaacgggcgcggatggcccatgagttcgcttatggagaac

SEQ ID NO: 199345 - DNA, 75 bp, synthetic construct
  source 1..75: mol_type = other DNA
tgccttaaccgctacggcgtgtttgcccgttcccatgctgcgcctacgcagtcggcatggacttataaaattcgc

SEQ ID NO: 199346 - DNA, 75 bp, synthetic construct
  source 1..75: mol_type = other DNA
atgactacccatctggtctggtttcgccaggatttacgtctgcacgataatctcgcactggctgccgcctgccgc

SEQ ID NO: 199347 - DNA, 75 bp, synthetic construct
  source 1..75: mol_type = other DNA
cgtagtagcggatcgatagagcccgcgccatccattacgctgaattatcctcgtcagtctttcgatactgcgcat

SEQ ID NO: 199348 - DNA, 75 bp, synthetic construct
  source 1..75: mol_type = other DNA
tttatctgtagaccccgccgaaaccgacgctgctcgcgccattgctgaacactactcaaagatatccaatcagga

SEQ ID NO: 199349 - DNA, 75 bp, synthetic construct
  source 1..75: mol_type = other DNA
cagcggatggttggtaacagtaaagccgatgcagcgttgctggatgaaatgatcaacaacatccagtttattccc

SEQ ID NO: 199350 - DNA, 75 bp, synthetic construct
  source 1..75: mol_type = other DNA
ggcaatagcaaagccgatgcggcgttgctggatgaaatgatcaacaacatcgtgtttattcccggtgacttcacc

SEQ ID NO: 199351 - DNA, 75 bp, synthetic construct
  source 1..75: mol_type = other DNA
tgaagcgtcaggaagaagtggctaagtccatctacgaccgccggatgaacagtattgaacaggcacttaaaatcg

SEQ ID NO: 199352 - DNA, 75 bp, synthetic construct
  source 1..75: mol_type = other DNA
atgtcaaaaccaccgtccactggaaacgacactggcgacgggcgcggatggcccatgagttcgattatggagaac

SEQ ID NO: 199353 - DNA, 75 bp, synthetic construct
  source 1..75: mol_type = other DNA
atgtcaaaaccagcgaacactggaagcgccactggcgtcgggcgcggatggcacatgagttcgcttatggagaac

SEQ ID NO: 199354 - DNA, 75 bp, synthetic construct
  source 1..75: mol_type = other DNA
accaacaaaaaagccgtcagtgacgaagcaaagcaagctgttgctgagcctgctgccagtgcgcccgttgagatc

SEQ ID NO: 199355 - DNA, 75 bp, synthetic construct
  source 1..75: mol_type = other DNA
cctcgctcgttttcattgccgccagctacggcgctttggcttgataaccagagcgccggacgctattacacctta

SEQ ID NO: 199356 - DNA, 75 bp, synthetic construct
  source 1..75: mol_type = other DNA
tcggtctggaaaagtactgctcctgggggctttatggcgagtacttcaacagtgaaaagccgtcgctggatgaca

SEQ ID NO: 199357 - DNA, 75 bp, synthetic construct
  source 1..75: mol_type = other DNA
ggagcgtgggctggctgatttccgctggcagggaaagcgggcggatgagtttaatgccatcacctgtgcctatta

SEQ ID NO: 199358 - DNA, 75 bp, synthetic construct
  source 1..75: mol_type = other DNA
tgagcaggccgccctgacaaaatttgccaataaaaaaggctatccactgacgttacgtcattaccgtctgtttgt

SEQ ID NO: 199359 - DNA, 75 bp, synthetic construct
  source 1..75: mol_type = other DNA
tcgctgctggccggtgccagagtcatccaggagggtcgtatcgaggtgctggcaggaaacatggccgacaaacgc

SEQ ID NO: 199360 - DNA, 75 bp, synthetic construct
  source 1..75: mol_type = other DNA
tttgcgggacaaaatcccccgcaaaatcccgctgacgttcaccctcgtgggctctccgtgcgtacgcccgatgct

SEQ ID NO: 199361 - DNA, 75 bp, synthetic construct
  source 1..75: mol_type = other DNA
ggaagttattgagggctttccggcggcacgtgaggcccatttcagtgcctttatgctgcgttacggggggctgac

SEQ ID NO: 199362 - DNA, 75 bp, synthetic construct
  source 1..75: mol_type = other DNA
cggcaaaactgccgcgtaccgaaggactgactggatccgatcgtcgcgaattcctggcgcaggccaaagagattg

SEQ ID NO: 199363 - DNA, 75 bp, synthetic construct
  source 1..75: mol_type = other DNA
gtaacaccgggcgttcaaccggaccacacctgcactatgaagtatggatcaaccagcaggctgtaaacccgctga

SEQ ID NO: 199364 - DNA, 75 bp, synthetic construct
  source 1..75: mol_type = other DNA
gacaagctggggcattttttccaggggctggtgcctgcactggtggcacgagaaatcctcgtgcgtgggatgtac

SEQ ID NO: 199365 - DNA, 75 bp, synthetic construct
  source 1..75: mol_type = other DNA
agtctgggatcgtaaagagaatgaggcgctgattgacgatattgtgcagttcatgcaggaggctattcagcagcc

SEQ ID NO: 199366 - DNA, 75 bp, synthetic construct
  source 1..75: mol_type = other DNA
aacggcagggtttatcctcgagtgtgcgccgttatccggtgccaatgaggccatcagtaaatcactggattactt

SEQ ID NO: 199367 - DNA, 75 bp, synthetic construct
  source 1..75: mol_type = other DNA
agcaggaggtaaaaggctggcaggtattactgtcgcagctgctgggtggctggaaaacgccggatggcagccagc

SEQ ID NO: 199368 - DNA, 75 bp, synthetic construct
  source 1..75: mol_type = other DNA
gcaactgctgtttacctttggcgtggaaccgaacattggtaaagaaaaaccaacgtttgtgtaccatttcccggc

SEQ ID NO: 199369 - DNA, 75 bp, synthetic construct
  source 1..75: mol_type = other DNA
ctggacttgagtaacgttgcagacaccgaagaagaccgcgacacgttgctgcaactgctgtttacctttggcgtg

SEQ ID NO: 199370 - DNA, 75 bp, synthetic construct
  source 1..75: mol_type = other DNA
ggggatgaatctctggttaatgaccagcccggaataccatatgaaacgcctgctggttgccggttgtgggccggt

SEQ ID NO: 199371 - DNA, 75 bp, synthetic construct
  source 1..75: mol_type = other DNA
acctcaggtaaaagtcgtttcattaaccatcaccgagaaaggctattgcctcgattcgcaaacgcgatcacttga

SEQ ID NO: 199372 - DNA, 75 bp, synthetic construct
  source 1..75: mol_type = other DNA
gcaggcgcgatgtttgtcagcaatgttcagccttatgaagagatgaagttacgcatgttaaacggtagccattca

SEQ ID NO: 199373 - DNA, 75 bp, synthetic construct
  source 1..75: mol_type = other DNA
gttgaccgcctggtgatgctggcattgggcgctgagacactggcggaagtcattgcctttagtgtcgaccgggca

SEQ ID NO: 199374 - DNA, 75 bp, synthetic construct
  source 1..75: mol_type = other DNA
agcaggagaacaacaaaacagacaataatcagggcagcagtaatcagagtcagaacaagaggaaaaagagaataa

SEQ ID NO: 199375 - DNA, 75 bp, synthetic construct
  source 1..75: mol_type = other DNA
caaaaagatgttccccaatctcgactggttctcagccgtttcctacaacatgatgggcgttcccaccgagatgtt

SEQ ID NO: 199376 - DNA, 75 bp, synthetic construct
  source 1..75: mol_type = other DNA
tccgcaaacgcgtggaaaacaaagaagtggtcattggttttggtcatccggtttataccatcgccgacccgcgtc

SEQ ID NO: 199377 - DNA, 75 bp, synthetic construct
  source 1..75: mol_type = other DNA
agacaataatcagggcagcagtaatcagagtcagaacaggaggaaaaagagaataatcaaagggaaggtgatgtg

SEQ ID NO: 199378 - DNA, 75 bp, synthetic construct
  source 1..75: mol_type = other DNA
tttgtgggctgttcatttaccctggacagtcagtgcggcaggttgtggctgtatcagcccccggcgacagggact

SEQ ID NO: 199379 - DNA, 75 bp, synthetic construct
  source 1..75: mol_type = other DNA
ttgacgttttgcggggacctgctctttgttccctccggtattcaccatcacctgtttgagaaccttcgccgcaag

SEQ ID NO: 199380 - DNA, 75 bp, synthetic construct
  source 1..75: mol_type = other DNA
cacgaatttatctcaatcaatggctgacaaaaattcgtcacgctcttagccagggacaatctcttaatacagata

SEQ ID NO: 199381 - DNA, 75 bp, synthetic construct
  source 1..75: mol_type = other DNA
acaattgaaactcctgaatcaccaaactcaggccaaagcaaagttattgacatcataaagagaactatggatgct

SEQ ID NO: 199382 - DNA, 75 bp, synthetic construct
  source 1..75: mol_type = other DNA
gggcaaaccaatacgcgcccatgaccggcgtgcaggccttgcgcgaggcgattgctcagaaaacggaacgtttgt

SEQ ID NO: 199383 - DNA, 75 bp, synthetic construct
  source 1..75: mol_type = other DNA
ggagaccattgctctggccacctacggggagattttctccatcacccgccaggccattatcaatgatgatctgaa

SEQ ID NO: 199384 - DNA, 75 bp, synthetic construct
  source 1..75: mol_type = other DNA
atgattcggtcaacacgtatttccctggggttattctttaattattttttatcgttaacgaaaattgatcctggt

SEQ ID NO: 199385 - DNA, 75 bp, synthetic construct
  source 1..75: mol_type = other DNA
tgatgttcctgaacaaatgaccatcagtattggcacggttttttcaacgggtgacacgcgtaatatctcgcttgt

SEQ ID NO: 199386 - DNA, 75 bp, synthetic construct
  source 1..75: mol_type = other DNA
gcgtaatatctcgcttgtcatgacggaagctgataaagcgttacgagaagcgaaaaatgatggtggcaacaaagt

SEQ ID NO: 199387 - DNA, 75 bp, synthetic construct
  source 1..75: mol_type = other DNA
ggggtttcgcgtcagggatggaagcccgtcagggcggagacagcttcgctggctccgttcacgacagcccgcccc

SEQ ID NO: 199388 - DNA, 75 bp, synthetic construct
  source 1..75: mol_type = other DNA
aggggaaaatggaacgtctgagtctggcagaggaggaacgcccccctgtggcggtgaccagcaaaaaagccgcca

SEQ ID NO: 199389 - DNA, 75 bp, synthetic construct
  source 1..75: mol_type = other DNA
ccggctgccgtgcgtcaggcactggcgaaagatccgcagaaaatttttaactatatccagcttacgcctgtgcgt

SEQ ID NO: 199390 - DNA, 75 bp, synthetic construct
  source 1..75: mol_type = other DNA
ccggcccatatttatgccggaaacggcaattttgtgggagacgggatccgccaggcgatgctggcccgtgccgga

SEQ ID NO: 199391 - DNA, 75 bp, synthetic construct
  source 1..75: mol_type = other DNA
ccaagatgatattgagtacgttaactgaaacgccagaagatgattcctcttcgccgacagaagtagtcaggcagc

SEQ ID NO: 199392 - DNA, 75 bp, synthetic construct
  source 1..75: mol_type = other DNA
tccgccacgcaacagtgctccacgcgtacaggataatgaacctgcagcttcccggacgccagtgcaggcagcagc

SEQ ID NO: 199393 - DNA, 75 bp, synthetic construct
  source 1..75: mol_type = other DNA
gatcgcaagtggggctgaacgcgctgaccgccacgctctacccaacgcaaagtcgcgccacgggcgtgagctggt

SEQ ID NO: 199394 - DNA, 75 bp, synthetic construct
  source 1..75: mol_type = other DNA
cctgtggtcaaaaaaattaccgcaccagaatatacgcccccggttgcagaccgtacttttgttgaggcaaaagag

SEQ ID NO: 199395 - DNA, 75 bp, synthetic construct
  source 1..75: mol_type = other DNA
atgactcaacgacgtgatctacaagcacttatcgatgctgctccggtcggcaagatgcagtggcgcgttatcatc

SEQ ID NO: 199396 - DNA, 75 bp, synthetic construct
  source 1..75: mol_type = other DNA
tatttaagcttgcccaaaaagaagaagagtcgaaagaactgtgcgcgcaggttgaggcactggagattatagtca

SEQ ID NO: 199397 - DNA, 75 bp, synthetic construct
  source 1..75: mol_type = other DNA
attgcagaggctaaagggaaaattaaaaataacgaagttgacgttgttttacttggcccgcaagttcgcttttag

SEQ ID NO: 199398 - DNA, 75 bp, synthetic construct
  source 1..75: mol_type = other DNA
atgaacatcagcacggaaagccgcgaaattctgcgtaattacaaagctgtgattaatgcgcggcgtcgtgaaatg

SEQ ID NO: 199399 - DNA, 75 bp, synthetic construct
  source 1..75: mol_type = other DNA
tacgttcgacgctggcgctgatgggaacggtgatcctgatgctgataatgggttacggcatcagtatggatgtgg

SEQ ID NO: 199400 - DNA, 75 bp, synthetic construct
  source 1..75: mol_type = other DNA
gagggatatgttctggcagttaatggtcgatctttcgcgccaggacaaagtgaccattttcatctccacccactt

SEQ ID NO: 199401 - DNA, 75 bp, synthetic construct
  source 1..75: mol_type = other DNA
tctgtttagctacagccgtcgcgaagcactggaactgcgccgcgatccggtccgttcgacgctggcgctgatggg

SEQ ID NO: 199402 - DNA, 75 bp, synthetic construct
  source 1..75: mol_type = other DNA
gtataaagaaccttcgcttacgtacatttatcggaattaaagacgaagagattaacaaccgtcaggatatcgtta

SEQ ID NO: 199403 - DNA, 75 bp, synthetic construct
  source 1..75: mol_type = other DNA
gggatgaagcaaaaacttgggctgtgctgtgcgttaatccacgacccggaactgttgattcttgatgaaccaaca

SEQ ID NO: 199404 - DNA, 75 bp, synthetic construct
  source 1..75: mol_type = other DNA
tacgtgacccccaccacccgcagcgaatttttgctcggcaaacagttaccgtatatcgcactgggaatgctgaac

SEQ ID NO: 199405 - DNA, 75 bp, synthetic construct
  source 1..75: mol_type = other DNA
agaaactgaacgcggacatcgtacatatcggccttggcgcttttcatcgcgctcatcaggcggtgtataccgatc

SEQ ID NO: 199406 - DNA, 75 bp, synthetic construct
  source 1..75: mol_type = other DNA
acaggcggcaaccacaaccggcacctggatgttggcacgaacatctggcgcgtgtctggtgccgttcgttccacg

SEQ ID NO: 199407 - DNA, 75 bp, synthetic construct
  source 1..75: mol_type = other DNA
ggggcgcctgcgttcgaataaatcgatgcttgatcgcaaagacttaaaaggaatgatccgggcactaaagaaagg

SEQ ID NO: 199408 - DNA, 75 bp, synthetic construct
  source 1..75: mol_type = other DNA
tttatgaaacgacgcgcaaaaattgtgcatcgcaacctggaactgtgcttcccggaaatgagcgaacaagaacgc

SEQ ID NO: 199409 - DNA, 75 bp, synthetic construct
  source 1..75: mol_type = other DNA
atggctgaccttaacgaccttcacagacagcttctgggaatgcagaagcaggtgcgttttgccactgcgcgcgcc

SEQ ID NO: 199410 - DNA, 75 bp, synthetic construct
  source 1..75: mol_type = other DNA
cgtgcctggtgccgtttgttccgcgtcgtaagccagacggcaaagggtatcagttgatcatgctgccgccagagt

SEQ ID NO: 199411 - DNA, 75 bp, synthetic construct
  source 1..75: mol_type = other DNA
gttcaccgccgctggataacgctgaaaccaccgcggcatggatgaataaagtgatcgaaaaatgcatcatgatgg

SEQ ID NO: 199412 - DNA, 75 bp, synthetic construct
  source 1..75: mol_type = other DNA
agcaattaaagaaggtacaaaagcaggtgccatatgctacagcactagctatgacaaaagttgttcgtcaaatag

SEQ ID NO: 199413 - DNA, 75 bp, synthetic construct
  source 1..75: mol_type = other DNA
gctcaaagcaaaggaaaatgtattcgtaggtgaggtggatggcgttaacgctgtctggcagcgtaagaaaccgat

SEQ ID NO: 199414 - DNA, 75 bp, synthetic construct
  source 1..75: mol_type = other DNA
ggtggctcgcttcagtaatccacatatcaaacataaaaccagccagattgcgatggatggttctcaaaagcttcc

SEQ ID NO: 199415 - DNA, 75 bp, synthetic construct
  source 1..75: mol_type = other DNA
tcggtcgacaccgtatttaaaatgatcggcccggatcacaaaattgttgtggaagcctttgacgatcccgatgtg

SEQ ID NO: 199416 - DNA, 75 bp, synthetic construct
  source 1..75: mol_type = other DNA
tttaccgttaaatcagttggttcggtggcggcaagaaagaacaatctgaccgcaaaggtttttgtccgcgatacc

SEQ ID NO: 199417 - DNA, 75 bp, synthetic construct
  source 1..75: mol_type = other DNA
gcttaaagcaaaggaaaatgtattcgtaggtgaggttgatggcgttaacgctgtctggcagcgtaagaagccgat

SEQ ID NO: 199418 - DNA, 75 bp, synthetic construct
  source 1..75: mol_type = other DNA
ccagcacggtggtggcaacgcatcttaaccacctcattagccagcatgccgcagagctgtttggtcgtcaggagg

SEQ ID NO: 199419 - DNA, 75 bp, synthetic construct
  source 1..75: mol_type = other DNA
tgaagaatttcaagtatcatatccctcaattataaatatacttccaagcgtcaataagtttggggggggcaggta

SEQ ID NO: 199420 - DNA, 75 bp, synthetic construct
  source 1..75: mol_type = other DNA
gatggatgatatgcgcttgtcggcaattttgctgccggtgtggattgtgttcctgtttgtggcgtttaaaacact

SEQ ID NO: 199421 - DNA, 75 bp, synthetic construct
  source 1..75: mol_type = other DNA
gctacggcgttgccgggatcatcgctttcctgattatgcgccagctcggcgagatggtggtcgaagagccggtat

SEQ ID NO: 199422 - DNA, 75 bp, synthetic construct
  source 1..75: mol_type = other DNA
ctttcgccgattaccctgagcgttgggctcctgacgcgcctgaactacatgggggccggggcatgaatggtttcg

SEQ ID NO: 199423 - DNA, 75 bp, synthetic construct
  source 1..75: mol_type = other DNA
tctctgcaccatgcgcacatggggaccgggacacgaatggtttcaggataatgccccgaacattaatgcgattgc

SEQ ID NO: 199424 - DNA, 75 bp, synthetic construct
  source 1..75: mol_type = other DNA
tctgaacaagtgattaaagatcagggtgcaaccaaccttaccgacgcgctcaaaaacgtccccggcgtgggttaa

SEQ ID NO: 199425 - DNA, 75 bp, synthetic construct
  source 1..75: mol_type = other DNA
cgaggcgcgaaaaatggcggaacaacttgatgacgcacgaaaactggtcgcccagcttacagaatgcctgaaaca

SEQ ID NO: 199426 - DNA, 75 bp, synthetic construct
  source 1..75: mol_type = other DNA
tgtactttcaatatatagcatcttaataatggcatacgtctcctcttgttatgcacagacgttgtggttatgttc

SEQ ID NO: 199427 - DNA, 75 bp, synthetic construct
  source 1..75: mol_type = other DNA
acatgtgtttcttcatccctctttttatacgtggtgctggttatataaacccctatgtgtttatgttattttcat

SEQ ID NO: 199428 - DNA, 75 bp, synthetic construct
  source 1..75: mol_type = other DNA
aacagtagcccgtttgtgatgattttccataatcttgacagcaatgtggtggcttctgcgctgaacttcgtcatt

SEQ ID NO: 199429 - DNA, 75 bp, synthetic construct
  source 1..75: mol_type = other DNA
aaaccgagttctggtttgcgctgattaaagtgctggcgatcatcggtatgatcggctttggcctgtggctgctgt

SEQ ID NO: 199430 - DNA, 75 bp, synthetic construct
  source 1..75: mol_type = other DNA
ctggcttaccacaccttggaaaatatcggcatcatcctgctggggctggggctggggctggggctggggctgggg

SEQ ID NO: 199431 - DNA, 75 bp, synthetic construct
  source 1..75: mol_type = other DNA
gcagctcactgctgaaccttatgcttttggcgatcagctacccttatctctgcgttatgcgcatatggggaccgg

SEQ ID NO: 199432 - DNA, 75 bp, synthetic construct
  source 1..75: mol_type = other DNA
aaaccggtactttcctggtggcggcggcgatctctcgcggcaaaattatctgccgtaacgcgcagccagatactc

SEQ ID NO: 199433 - DNA, 75 bp, synthetic construct
  source 1..75: mol_type = other DNA
agttcacgctgttgaacctggtggcagaagggaccggattcatcaccgaaacggtctttgaaaaccgctttatgc

SEQ ID NO: 199434 - DNA, 75 bp, synthetic construct
  source 1..75: mol_type = other DNA
ttatcacatcgatcgtggctacgagcacattgaagacaaattgcgcgcactgggcgctaacatcgagcgtgtgaa

SEQ ID NO: 199435 - DNA, 75 bp, synthetic construct
  source 1..75: mol_type = other DNA
acaggtgttggcacccgttgaaggcaagcctgattaccaggcattagctgacacgcttaagcgtgccttcaaaca

SEQ ID NO: 199436 - DNA, 75 bp, synthetic construct
  source 1..75: mol_type = other DNA
gggacagcattactcaaagacgtggccgctggaaaaacgccttgccccggtctttgtcgaaaatcgcgttatcaa

SEQ ID NO: 199437 - DNA, 75 bp, synthetic construct
  source 1..75: mol_type = other DNA
aaaccggtactttccttgtggcggcggcgatctctcgcggcaaaattatctgccgtaacgctcagccagatactc

SEQ ID NO: 199438 - DNA, 75 bp, synthetic construct
  source 1..75: mol_type = other DNA
cacattcacacgctattgatttaaccgaaccggaatctgttgtgaggttcgtatcggtacgaggcagagccacgc

SEQ ID NO: 199439 - DNA, 75 bp, synthetic construct
  source 1..75: mol_type = other DNA
gaacgtcaacagtttcaacggctattggtctggctggttgctaatgtctatccaacgttcactttcgccgattac

SEQ ID NO: 199440 - DNA, 75 bp, synthetic construct
  source 1..75: mol_type = other DNA
gatggggttctacaatcagcgaactcatgcttacgctggcagatattccctataagtttgttgatgtcagcggtt

SEQ ID NO: 199441 - DNA, 75 bp, synthetic construct
  source 1..75: mol_type = other DNA
accgttatctgtcacggcgttgaaaaactttccggcgcacaagttatggcgaccgatttacgtgcttcagcaagt

SEQ ID NO: 199442 - DNA, 75 bp, synthetic construct
  source 1..75: mol_type = other DNA
cgttaaagcttccgtcgatggtcgtctgaaaggcgcacatatcgtgatggataaagtcagcgttggcgcaacggt

SEQ ID NO: 199443 - DNA, 75 bp, synthetic construct
  source 1..75: mol_type = other DNA
tcagtttatgcgaggcgattggcacactcgaattgctaaagcagtcattgattgaaagcgcgaaagagtcctcag

SEQ ID NO: 199444 - DNA, 75 bp, synthetic construct
  source 1..75: mol_type = other DNA
tgaaaccagagacccgaattctggacctcggcagcggctcgggcgagatgctctgcacctgggcccgggatcatg

SEQ ID NO: 199445 - DNA, 75 bp, synthetic construct
  source 1..75: mol_type = other DNA
ctgaccatgcgccgctggctggaggccaatcctgacgatgacttcgccgccgaagtcagggccgagctaaacatc

SEQ ID NO: 199446 - DNA, 75 bp, synthetic construct
  source 1..75: mol_type = other DNA
aggtttttgttcgggatattcacaaacagcctgtctcgcaatcactggtccgggcgatcgtcgctgtggcccagg

SEQ ID NO: 199447 - DNA, 75 bp, synthetic construct
  source 1..75: mol_type = other DNA
ttacgtaatgacgacgccaaagccgtgcaacgtcagaacgaagtggaaaatctcgaaatgcataacgaaggatga

SEQ ID NO: 199448 - DNA, 75 bp, synthetic construct
  source 1..75: mol_type = other DNA
ccgattccggaaacctcctgcgatatcgcactggaaatcgctcgcattctgggtaaaccgtaccgccagggcttc

SEQ ID NO: 199449 - DNA, 75 bp, synthetic construct
  source 1..75: mol_type = other DNA
tctgagcagattatcgagatggcacgcgaagccggagcgaagaaagtgtacctcgcctcggcggcaccggaaatt

SEQ ID NO: 199450 - DNA, 75 bp, synthetic construct
  source 1..75: mol_type = other DNA
cccagacagtgcggcaattattcgccacgccgatacggcaatgtacagtgccaaagaaggcggtcgagggcaatt

SEQ ID NO: 199451 - DNA, 75 bp, synthetic construct
  source 1..75: mol_type = other DNA
gcggtaaaaatgaaatctatttgatctgctccggcaccgatatcaccgaagagcgccgtgcccaggaacgactgc

SEQ ID NO: 199452 - DNA, 75 bp, synthetic construct
  source 1..75: mol_type = other DNA
ggatttttgtttgccaaaccgatgcccgccgttgccttcgaacgctggtataaacgctatctgaagcgcgcataa

SEQ ID NO: 199453 - DNA, 75 bp, synthetic construct
  source 1..75: mol_type = other DNA
acaacctgtctcacagtcgctggtacgggcaattgtcgccgtagctcaggccttgaacctgcaggttattgccga

SEQ ID NO: 199454 - DNA, 75 bp, synthetic construct
  source 1..75: mol_type = other DNA
atgagagacaaggatttttgtttgctaaaccgatgcctgccgtggcttttgaacgctggtataaacgttatctga

SEQ ID NO: 199455 - DNA, 75 bp, synthetic construct
  source 1..75: mol_type = other DNA
aggtgtagagagtgcaaaagaagatgcctttttgaccaaaaatggcatcaatgagagacaaggatttttgtttgc

SEQ ID NO: 199456 - DNA, 75 bp, synthetic construct
  source 1..75: mol_type = other DNA
gccacatgcagcgtttgcagggcaatatgggcattggtcatgtgcgttaccctacggctggcagctccagcgctt

SEQ ID NO: 199457 - DNA, 75 bp, synthetic construct
  source 1..75: mol_type = other DNA
atggtggcttgtggtagcgtgctgttgcgccatgccatggcatccagaaaacaggatgccatcatggcagaccac

SEQ ID NO: 199458 - DNA, 75 bp, synthetic construct
  source 1..75: mol_type = other DNA
atggttgcttgtggcggagtgttgttgcgtcatgcgatggcatccagaaaacaggatgccatgatggaagaccac

SEQ ID NO: 199459 - DNA, 75 bp, synthetic construct
  source 1..75: mol_type = other DNA
cgtccatccttgccggtgaaaaaagacggtccgggcaaagcgattattgtgatcctttccgcgctgatcggcggt

SEQ ID NO: 199460 - DNA, 75 bp, synthetic construct
  source 1..75: mol_type = other DNA
ttttacgccgtttaaatatcagttaagcccgtcattgccagtgaaaaagacggtccgggtaaggcgattattgtg

SEQ ID NO: 199461 - DNA, 75 bp, synthetic construct
  source 1..75: mol_type = other DNA
gttgcggaattgaacggtgaattacgtaatcgtcaatatcttgttgagcaattaacaaaagcaaatgttgatgac

SEQ ID NO: 199462 - DNA, 75 bp, synthetic construct
  source 1..75: mol_type = other DNA
atatcaaaattgatcgtacagaagcatttaacctgtttatcaagaaatttcagtctgttagcttgcttgaggagt

SEQ ID NO: 199463 - DNA, 75 bp, synthetic construct
  source 1..75: mol_type = other DNA
atggtggcttgtggtagcgtgttattgcgctatgcgatggcatccagaaaacaggatgccatgatggcagaccac

SEQ ID NO: 199464 - DNA, 75 bp, synthetic construct
  source 1..75: mol_type = other DNA
gagtacctgcgttcatcaccttatgtgatggatcaattaaaagaagcgaaaatcgacccactggatctgcatcgc

SEQ ID NO: 199465 - DNA, 75 bp, synthetic construct
  source 1..75: mol_type = other DNA
tctgatcgaagccgttcgcgctgaaaaccccgatatccagcagtttgaatgctcggtgttcaacggcgtttacgt

SEQ ID NO: 199466 - DNA, 75 bp, synthetic construct
  source 1..75: mol_type = other DNA
ataaactggaaatcagaacccagtttgaaaaagaaaaactggctcaggatcgtattaaaacgaaaaaccagcttg

SEQ ID NO: 199467 - DNA, 75 bp, synthetic construct
  source 1..75: mol_type = other DNA
agaggcgaaaatagatgaactggatttgcatcgcgctattgttgcattgagcgaaaaaatgaaagcggttgatga

SEQ ID NO: 199468 - DNA, 75 bp, synthetic construct
  source 1..75: mol_type = other DNA
ggaactgaacggtgaattacgtaatcggcagtatcttgtcgagcaaggtaatgactccaacttattgatagtgtt

SEQ ID NO: 199469 - DNA, 75 bp, synthetic construct
  source 1..75: mol_type = other DNA
aaagctttaattatcatgaaaatgtcagcaaaaaccacgaacactatttgtggggtaacaccgcgtttctgctgg

SEQ ID NO: 199470 - DNA, 75 bp, synthetic construct
  source 1..75: mol_type = other DNA
ttgctgaaatatattagcgcagtcagcgcgatggctcactgcccgttcctgtcctccgtttcccctgatttcttt

SEQ ID NO: 199471 - DNA, 75 bp, synthetic construct
  source 1..75: mol_type = other DNA
caagtaagtttgttcgcggcgatgccatcgccgggatcctcatcatggtcattaacgttgtcggcgggttgctgg

SEQ ID NO: 199472 - DNA, 75 bp, synthetic construct
  source 1..75: mol_type = other DNA
attggcccttccagcggcggcgcagtcaaagacctcccggtgcatctgtatgaatccatggggcaaatgcaggca

SEQ ID NO: 199473 - DNA, 75 bp, synthetic construct
  source 1..75: mol_type = other DNA
caattgctatttagtaccgcaatgaactcctccctgaaattattaccaggtcaatggcaagacattaatttgacg

SEQ ID NO: 199474 - DNA, 75 bp, synthetic construct
  source 1..75: mol_type = other DNA
ctgttggtttggcagggaaaatactgtctattgacgcagtagaaaacggcagcgttattcgtatttcactggtta

SEQ ID NO: 199475 - DNA, 75 bp, synthetic construct
  source 1..75: mol_type = other DNA
tgcattggaggttaaaggcgactccatgactaaccctaatggcctcccaacaataccagaaggcgcaacagtgat

SEQ ID NO: 199476 - DNA, 75 bp, synthetic construct
  source 1..75: mol_type = other DNA
atgactaaccctaatggcctcccaacaataccagaaggtgcaacagtgattgtagatcctgatgcagaacctcgt

SEQ ID NO: 199477 - DNA, 75 bp, synthetic construct
  source 1..75: mol_type = other DNA
acctgtggttggctactgctgtcctctttcacagctccgttacccgttcctgcgtggctgatacccgtaacgcca

SEQ ID NO: 199478 - DNA, 75 bp, synthetic construct
  source 1..75: mol_type = other DNA
tttacttcggagacaacgacacgggctggacggcagattttgattacctgctgagggaagattcgttaacgggag

SEQ ID NO: 199479 - DNA, 75 bp, synthetic construct
  source 1..75: mol_type = other DNA
cctttcggacgcgaggaagcgaacctgttctttcaggtggtggcgaagcgctatgagaaaggggcgatgatcctg

SEQ ID NO: 199480 - DNA, 75 bp, synthetic construct
  source 1..75: mol_type = other DNA
tttgtttatcctatgaatgacatttaccatgccattctgaatttattgatgattcaatcatggggatttgagcga

SEQ ID NO: 199481 - DNA, 75 bp, synthetic construct
  source 1..75: mol_type = other DNA
gcgcattacatcaaggtaattcagcgcgaacagcttggctcatggaaagaacgcagtgacctggagcgtgagctg

SEQ ID NO: 199482 - DNA, 75 bp, synthetic construct
  source 1..75: mol_type = other DNA
cggcaagactgatgtgtaaacgcacacccatgctgacggaagcgttcgggattgaggttaacgcctcaaacatga

SEQ ID NO: 199483 - DNA, 75 bp, synthetic construct
  source 1..75: mol_type = other DNA
attggtgaagatgaggcgaaaaaacgtcgctccgaagtgactcaggaagccgatttttacggctcaatggacggg

SEQ ID NO: 199484 - DNA, 75 bp, synthetic construct
  source 1..75: mol_type = other DNA
gcatggcaccgttacctgaaatggtcgctaccagtcgtaatattgatgaaaaatataaaaactattacacagcgt

SEQ ID NO: 199485 - DNA, 75 bp, synthetic construct
  source 1..75: mol_type = other DNA
tcactgacccttgagcagttcgaggggcagccgtgcattctggcctttgacctggcgcgtaagctggatatgaac

SEQ ID NO: 199486 - DNA, 75 bp, synthetic construct
  source 1..75: mol_type = other DNA
gcatttaaacggatgcccatcacgctggagccgtggcagctatttgtgatctgctgtgcgtttggctgggtcaat

SEQ ID NO: 199487 - DNA, 75 bp, synthetic construct
  source 1..75: mol_type = other DNA
gaccgatgcactttaccagacgatgcaaaccgggatgggggcacgtcgtcagccgctgatttttggtatcaccac

SEQ ID NO: 199488 - DNA, 75 bp, synthetic construct
  source 1..75: mol_type = other DNA
gcgtgttaatgatattgccactttgcttattggcagggtgtgactatattgaaaaagcgactaaggtcgacgacc

SEQ ID NO: 199489 - DNA, 75 bp, synthetic construct
  source 1..75: mol_type = other DNA
gaatggtattcgagtaatgtcacctgggatgtgcgtaaatcctataccagacaggttcttgttattgatacatca

SEQ ID NO: 199490 - DNA, 75 bp, synthetic construct
  source 1..75: mol_type = other DNA
ttcataaaaagcagcaataaggcgaacatgatgtttattcatgaacatagtaacggatacaatgctctcagattg

SEQ ID NO: 199491 - DNA, 75 bp, synthetic construct
  source 1..75: mol_type = other DNA
acttattaagtgttcctgtatcaaatatgggtttctacgcgacatgggggggagaaaaacccaccgacatcaacg

SEQ ID NO: 199492 - DNA, 75 bp, synthetic construct
  source 1..75: mol_type = other DNA
gcgtgttaatgatatcgccactctgcatgttgacagggtgtgactatattggaaaagcaaaactaatcgacgatc

SEQ ID NO: 199493 - DNA, 75 bp, synthetic construct
  source 1..75: mol_type = other DNA
tgtcaggttccgacactgacgctggaaaatggcgagattatgacggagacggcggcgattgcattgatgattctc

SEQ ID NO: 199494 - DNA, 75 bp, synthetic construct
  source 1..75: mol_type = other DNA
ttcaggataatgccacgaatatcagtgcgattgctgatgctgtatgtcagttaccgaaattacaagaagtattaa

SEQ ID NO: 199495 - DNA, 75 bp, synthetic construct
  source 1..75: mol_type = other DNA
caggataatgcgcagaatatcagtgcgattgctgatgcagtatgtcagttgccaaagctacagcaagtattaaaa

SEQ ID NO: 199496 - DNA, 75 bp, synthetic construct
  source 1..75: mol_type = other DNA
caataggagtagatgcggcgaacatctcgcgcttagaaacgggtaagcagaaacaatttaccgaacaaacactga

SEQ ID NO: 199497 - DNA, 75 bp, synthetic construct
  source 1..75: mol_type = other DNA
tgggccgtatacgcagtatccgcaagaaatttgcccaggagatgggcttcctacccccagtggtgcacatccgcg

SEQ ID NO: 199498 - DNA, 75 bp, synthetic construct
  source 1..75: mol_type = other DNA
caggataatgccgcgaatatcagtgcgattgctgatgctgtatgtcagataccaaagttacaagaagtactaaaa

SEQ ID NO: 199499 - DNA, 75 bp, synthetic construct
  source 1..75: mol_type = other DNA
cacttcacccacaaagcatggcacagcagctctgaaaccatcgctaaaattaaatatgcaatgatcggtgacccg

SEQ ID NO: 199500 - DNA, 75 bp, synthetic construct
  source 1..75: mol_type = other DNA
acgttctgttacgccattacccccggcgatcctgagctggttttatgaagttcgcggtaaattgcaggaagccgg

SEQ ID NO: 199501 - DNA, 75 bp, synthetic construct
  source 1..75: mol_type = other DNA
caggataatgccacgaatatcagtgcgattgctgatgcagtatgtcagttaccaacgttacaagaaatactaaaa

SEQ ID NO: 199502 - DNA, 75 bp, synthetic construct
  source 1..75: mol_type = other DNA
atttccacgtcgaaccgtttgtcggcgctaatttgcagccggaagccctcgcctttaacggcattgacccgaacg

SEQ ID NO: 199503 - DNA, 75 bp, synthetic construct
  source 1..75: mol_type = other DNA
aaagttgtacgtaaaggcattaaagcgagcggctgtaaccgtgccattatggtggcgcacaacgccaatttcgac

SEQ ID NO: 199504 - DNA, 75 bp, synthetic construct
  source 1..75: mol_type = other DNA
ctggtgatttctgataaccagatttaccgtgaatggggaattactagcgaaaacgaacaccgattcatggtcttt

SEQ ID NO: 199505 - DNA, 75 bp, synthetic construct
  source 1..75: mol_type = other DNA
aggagttgtgatcgaggggcaggcacaccgtgctttagctgattgcaaaatgacattaggtgtcatcaaagcttt

SEQ ID NO: 199506 - DNA, 75 bp, synthetic construct
  source 1..75: mol_type = other DNA
agcagctattggcgcacaggctggagcggcactgaaaaaatgcgtactggaactgggcggttcggatccatttat

SEQ ID NO: 199507 - DNA, 75 bp, synthetic construct
  source 1..75: mol_type = other DNA
aactggctaatgacagcgagttcggtctttctgcgacgatctttaccgctgacgaaacacgagccagacagatgg

SEQ ID NO: 199508 - DNA, 75 bp, synthetic construct
  source 1..75: mol_type = other DNA
cggcgccagcgtgcaggtgcaggacgtgctgcaaaccggcggggcggtgaaacgctatgaaccgcattcgccgct

SEQ ID NO: 199509 - DNA, 75 bp, synthetic construct
  source 1..75: mol_type = other DNA
cgggtacacatcgtcatgccattgacggtgccagcgtgcaggtacaggacgtgctgcaaaccggcggggcggtga

SEQ ID NO: 199510 - DNA, 75 bp, synthetic construct
  source 1..75: mol_type = other DNA
taaagaaatgatcgagttggtcaagccaggttatatatttacaggcaatgctgaaagatatttatctaatgttac

SEQ ID NO: 199511 - DNA, 75 bp, synthetic construct
  source 1..75: mol_type = other DNA
tgccgtggaactttcctttatggcaggtgatgcgtggcgctgttcccatcattcttgcaggtaacggctacttac

SEQ ID NO: 199512 - DNA, 75 bp, synthetic construct
  source 1..75: mol_type = other DNA
aagcaaagtaaaatacttagagctagtcgtaaaaatctgtcttgcgaccggcgcaagatggaatgaagcggcaac

SEQ ID NO: 199513 - DNA, 75 bp, synthetic construct
  source 1..75: mol_type = other DNA
caataggagtggatgcggcgaatatctcgcgcctggaaacaggtaagcagaaacaattcactgaacaagccctga

SEQ ID NO: 199514 - DNA, 75 bp, synthetic construct
  source 1..75: mol_type = other DNA
actcgcgcattgctgctgtcacggtgaccggaagtgttcgtgctggagcggctattggcgcacaggctggagcgg

SEQ ID NO: 199515 - DNA, 75 bp, synthetic construct
  source 1..75: mol_type = other DNA
tgggcggggaaaagatggctggggcaggtaactactatccgccaacggttctggcgaatgttaccccagaaatga

SEQ ID NO: 199516 - DNA, 75 bp, synthetic construct
  source 1..75: mol_type = other DNA
tgccgtggaactttccgctatggcaggttatgcgcggcgctatccctattattctggcaggcaacggttatctac

SEQ ID NO: 199517 - DNA, 75 bp, synthetic construct
  source 1..75: mol_type = other DNA
gcggttgctcgtgatttatcacacgggctttcctttgctgagcaggtagtttctgaagcacattccgcaatagtg

SEQ ID NO: 199518 - DNA, 75 bp, synthetic construct
  source 1..75: mol_type = other DNA
tggtcgtcactggcatttgaaagttcgcaacaccaagcaggctctggatttgattgaggctaatcgccccggatt

SEQ ID NO: 199519 - DNA, 75 bp, synthetic construct
  source 1..75: mol_type = other DNA
tcattgcgtacgcaacacataaatatattctcaccgtggctaatggtgaatatcgctatttgaatggcggtgatt

SEQ ID NO: 199520 - DNA, 75 bp, synthetic construct
  source 1..75: mol_type = other DNA
atcctatggttgggatgttcgtaggtggattgctgggggctgcaatggctactgtactaacgggaaaaaggatca

SEQ ID NO: 199521 - DNA, 75 bp, synthetic construct
  source 1..75: mol_type = other DNA
tgtcagatgttaatcacaccaagaaagatgttgttcagagcgcacttaatactgatgaatcccctaatgattttt

SEQ ID NO: 199522 - DNA, 75 bp, synthetic construct
  source 1..75: mol_type = other DNA
gaccgtgtcaacggtactgattacattactactagacctaatggtacatccaaggataacttagaaaaccttcct

SEQ ID NO: 199523 - DNA, 75 bp, synthetic construct
  source 1..75: mol_type = other DNA
ttgccaaaatccgcattacccctgttccgcgaggaagcggcggatctgcttttgggtggtttcagacggtagtag

SEQ ID NO: 199524 - DNA, 75 bp, synthetic construct
  source 1..75: mol_type = other DNA
agatggaaggtttacagtacagtgaaatcccaatgctggcagggagtaacctgtcattaatgcagcaggcactca

SEQ ID NO: 199525 - DNA, 75 bp, synthetic construct
  source 1..75: mol_type = other DNA
gaaactgggcggcggcaccgttctacaacaaaaattcggctctaccagcgaattacgcgcgggtgtcaacggcgg

SEQ ID NO: 199526 - DNA, 75 bp, synthetic construct
  source 1..75: mol_type = other DNA
tggaaggcttgcagtacagtgaaatccccatgctggcgggtaacaatctgccattaatgcagcaggcgctcagtg

SEQ ID NO: 199527 - DNA, 75 bp, synthetic construct
  source 1..75: mol_type = other DNA
acaatccgggcgcgaaaatgctgccaacgcagttggtaaatgtaaaagcgtttaaaccagcgtcaaccaacaaaa

SEQ ID NO: 199528 - DNA, 75 bp, synthetic construct
  source 1..75: mol_type = other DNA
ccccaacatgatgaaagccgggatcgccgactggcagaaacgttatcccaataacccgggcgcgaaaatgctgcc

SEQ ID NO: 199529 - DNA, 75 bp, synthetic construct
  source 1..75: mol_type = other DNA
ggtgatcaacgccgacgaaaatatcctgcaaggctggctggatctgcagcgcgtctggtttgataaccgtaacga

SEQ ID NO: 199530 - DNA, 75 bp, synthetic construct
  source 1..75: mol_type = other DNA
catccaggtgcttttctgtttctatggccccggcggttccgggatggccacgcggtttcgtgacggaatgtttgt

SEQ ID NO: 199531 - DNA, 75 bp, synthetic construct
  source 1..75: mol_type = other DNA
tgatgatgcgcgagatcctgatactgacgcatacgccaagcagacaggccagcagcctcgccaacagaaaaatcc

SEQ ID NO: 199532 - DNA, 75 bp, synthetic construct
  source 1..75: mol_type = other DNA
tcgcgctggtggcagaagagctgcgtgccaaccattccggcgagcgaatcgtggcgcgttttgaggatgaagacg

SEQ ID NO: 199533 - DNA, 75 bp, synthetic construct
  source 1..75: mol_type = other DNA
ttcattatacggttatgatactggtgcaacactggcacgtaaatttctgaatgagttccttaaagaagtttgtca

SEQ ID NO: 199534 - DNA, 75 bp, synthetic construct
  source 1..75: mol_type = other DNA
ccattaacggcgctgaaagttcaaaccgaagttgcgcaactctctgacgatgatccgcaggcacggaaaaaagca

SEQ ID NO: 199535 - DNA, 75 bp, synthetic construct
  source 1..75: mol_type = other DNA
actgctcactctatcgcggctggactcactggataaccttcaggacgtcgcggagatcccgcttgaagatctcct

SEQ ID NO: 199536 - DNA, 75 bp, synthetic construct
  source 1..75: mol_type = other DNA
atggtcagtgatgatattgttttgatcggtgatcgctattacgtgaaagctacggcaacagtgagtgacggtgag

SEQ ID NO: 199537 - DNA, 75 bp, synthetic construct
  source 1..75: mol_type = other DNA
cgctacgacctcaccatcacgctgtcccgcaaaaacattcgtacctacaacgtccggacgctgaaagatgcgccc

SEQ ID NO: 199538 - DNA, 75 bp, synthetic construct
  source 1..75: mol_type = other DNA
cagccgcagatccccaacaacggggtaacgtggtgcgccttcggtatcactaccgttcctcagccgttgagccag

SEQ ID NO: 199539 - DNA, 75 bp, synthetic construct
  source 1..75: mol_type = other DNA
tttcccgcaaaaacacccgtacctacaacgttaaatctgtcgttgaccctaacgtcacgatagttaccggagact

SEQ ID NO: 199540 - DNA, 75 bp, synthetic construct
  source 1..75: mol_type = other DNA
atgaatattatatgtgataatcgttatttcctgatcgggatcaacaaaacaattgaagatgttatccagaaaaat

SEQ ID NO: 199541 - DNA, 75 bp, synthetic construct
  source 1..75: mol_type = other DNA
caaatataaatgtgcttatgaaaggcttggctgtcaattgaagcgttggttgctttatatgaatgttatatgtga

SEQ ID NO: 199542 - DNA, 75 bp, synthetic construct
  source 1..75: mol_type = other DNA
aataatgttgaattaagatcttcgaatgcaattttatatgcgtattatgggctatttgattttcttcgtgatatt

SEQ ID NO: 199543 - DNA, 75 bp, synthetic construct
  source 1..75: mol_type = other DNA
aacccgcaagcgaaagatctggcgctgacacagcgttgtttaataaagggcgatgtgcttgatggggtgaatcag

SEQ ID NO: 199544 - DNA, 75 bp, synthetic construct
  source 1..75: mol_type = other DNA
ctggtggcgcaaattccggcgttggttatttctaccgccgcgggggttattgttacgcgtgtcagcaccgatcag

SEQ ID NO: 199545 - DNA, 75 bp, synthetic construct
  source 1..75: mol_type = other DNA
atgatgaatgagaaacagacagaagaactggtggttaccctgaaacgtccggtgaaggatccggataccaggacg

SEQ ID NO: 199546 - DNA, 75 bp, synthetic construct
  source 1..75: mol_type = other DNA
aaatcgctaccgacccgtttgttggtaacctgaccttcttccgtgtttactccggtgtggttaactctggtgata

SEQ ID NO: 199547 - DNA, 75 bp, synthetic construct
  source 1..75: mol_type = other DNA
gaagatgccaaatgatgatagtgaatggcaattgaacggtaaagatcgcgccggtaaatcctggtctgtgcctgt

SEQ ID NO: 199548 - DNA, 75 bp, synthetic construct
  source 1..75: mol_type = other DNA
aaacccatcgccgggcgcgacccgcaaacggaagatctggcactgacgcagcgttgcttgataaagggggatgtt

SEQ ID NO: 199549 - DNA, 75 bp, synthetic construct
  source 1..75: mol_type = other DNA
ttttcttaaacgttggtttgggagaagcggcaaaacgggacgtgggaacaggggaaaatcagataccggatatgg

SEQ ID NO: 199550 - DNA, 75 bp, synthetic construct
  source 1..75: mol_type = other DNA
atcgcatcaggttaatgatattttagttcttcatgccgtcagcaaagagtttcgtctacgcctgaatgaattggt

SEQ ID NO: 199551 - DNA, 75 bp, synthetic construct
  source 1..75: mol_type = other DNA
gatatggtgctgtctccatatgaaatttgggataacggaacatttacatgtatgcgattccccacaaacgcacca

SEQ ID NO: 199552 - DNA, 75 bp, synthetic construct
  source 1..75: mol_type = other DNA
cgctgcgccatgccctcttttttgagaaaacgctcacgaacggtgaagataatccactctggcgtaccgtggtac

SEQ ID NO: 199553 - DNA, 75 bp, synthetic construct
  source 1..75: mol_type = other DNA
ctcactatgggcgcaatggtatatcggcctgatggtgccaccattaatgctggcgctgctgacgcaggaaaaagc

SEQ ID NO: 199554 - DNA, 75 bp, synthetic construct
  source 1..75: mol_type = other DNA
tcagagcagagaaaaacatcatggcaaaagcaccacgtaaaaccgctgaatttgttgatatggctggcaatgaaa

SEQ ID NO: 199555 - DNA, 75 bp, synthetic construct
  source 1..75: mol_type = other DNA
gaattcaacgttgaagcgaacgtaggtaaaccgcaggttgcttaccgtgaaactatccgccagaaagttaccgat

SEQ ID NO: 199556 - DNA, 75 bp, synthetic construct
  source 1..75: mol_type = other DNA
catgctgagtttcacgaaaccggacctttaccacctgtgtggttggggcaatcatggacagtattatggttgtgg

SEQ ID NO: 199557 - DNA, 75 bp, synthetic construct
  source 1..75: mol_type = other DNA
gaaaacgctctccagcggagaagataatccattatggcgcacagtcgtgctacgcgacggtttattagttcgtcg

SEQ ID NO: 199558 - DNA, 75 bp, synthetic construct
  source 1..75: mol_type = other DNA
tgcgcgacggcctgctggtgcgccgcacttgctgccagcgttatcgcttgccggatgtgcagcaatgtggtgact

SEQ ID NO: 199559 - DNA, 75 bp, synthetic construct
  source 1..75: mol_type = other DNA
atggtaccctcaacattttctcgtttgaaagccgcgcgttgtctgcctgttgttctggcagccctgattttcgcc

SEQ ID NO: 199560 - DNA, 75 bp, synthetic construct
  source 1..75: mol_type = other DNA
aagcagccgcagctacaggggaaattgctggcgaaaggctcctgggattatcaactggtggatgaactggtgccg

SEQ ID NO: 199561 - DNA, 75 bp, synthetic construct
  source 1..75: mol_type = other DNA
tgctggcgaaaggctcctgggattatcaactggtggatgaactggtgccgcagcctggcgatattgtgctgccga

SEQ ID NO: 199562 - DNA, 75 bp, synthetic construct
  source 1..75: mol_type = other DNA
acctgcgatcaacggtatcctggatgacggtaaagacactccggctgagcgtcacgcaagtgatgacgagccgtt

SEQ ID NO: 199563 - DNA, 75 bp, synthetic construct
  source 1..75: mol_type = other DNA
ttcctgaaagttgttaaccagatcaaaacccgtctgggcgcgaccccggttccgctgcagctggcgattggtgct

SEQ ID NO: 199564 - DNA, 75 bp, synthetic construct
  source 1..75: mol_type = other DNA
taacaaaatggaccgcgtgggtgcgaacttcctgaaagttgttaaccagatcaaaacccgtctgggcgcgaaccc

SEQ ID NO: 199565 - DNA, 75 bp, synthetic construct
  source 1..75: mol_type = other DNA
ttctctgttagctgtttattccgatcatatctaccgcaatcaaccaacgatgatccgcgagaataagccgctgat

SEQ ID NO: 199566 - DNA, 75 bp, synthetic construct
  source 1..75: mol_type = other DNA
ccgataggtcaggggcagacaatttcgcagccgtatatggtggcgcgaatgaccgaattactcgaactgacgccg

SEQ ID NO: 199567 - DNA, 75 bp, synthetic construct
  source 1..75: mol_type = other DNA
gtcggggaggcgaatttattatcgataccgtggaggccgtgcgttttgttcccttagtgaaaggggagctggctt

SEQ ID NO: 199568 - DNA, 75 bp, synthetic construct
  source 1..75: mol_type = other DNA
tggaacttctgtcgggttctggtcttagcaaggagcaacggtggaggcgatttcacttgcctacgccaccggaca

SEQ ID NO: 199569 - DNA, 75 bp, synthetic construct
  source 1..75: mol_type = other DNA
tgtttcagatgacagtaagcctgaaattcttcagttgctgaactctgtaaaagaacacattgcagagctggacca

SEQ ID NO: 199570 - DNA, 75 bp, synthetic construct
  source 1..75: mol_type = other DNA
ttactacaaaaatgcaatgttaccattagaaaacagtgaatcaccctttaaagatgttttttctaatacgcatga

SEQ ID NO: 199571 - DNA, 75 bp, synthetic construct
  source 1..75: mol_type = other DNA
atgcaatgttaccattagaaaacagtgactcaccctttaaagatgttttttctaatgcgcatgaagtcacagcag

SEQ ID NO: 199572 - DNA, 75 bp, synthetic construct
  source 1..75: mol_type = other DNA
cttaatgatctgcaaagaattaattaaaaatatgcagggcgatttgtcattagaaagtcatccaggcataggaac

SEQ ID NO: 199573 - DNA, 75 bp, synthetic construct
  source 1..75: mol_type = other DNA
agtcgatatagtgttatcacatttagttgcttcgccgcctcttaatgatgacattgctgcaaccaaaccactgat

SEQ ID NO: 199574 - DNA, 75 bp, synthetic construct
  source 1..75: mol_type = other DNA
gactcggtggcaagtattgttgcgcaagggaatttttacggtactaactattctgcggaagaaataagattatag

SEQ ID NO: 199575 - DNA, 75 bp, synthetic construct
  source 1..75: mol_type = other DNA
gacgctaaaccattcatcgaactactgacagaaacaaaaacacgtaaggcatatacggaggaagagatcacatta

SEQ ID NO: 199576 - DNA, 75 bp, synthetic construct
  source 1..75: mol_type = other DNA
ttgcggcgacggaagaactgatataccggagcaccagtcaacagagtatggggatattgttgtaaagcaaagcgc

SEQ ID NO: 199577 - DNA, 75 bp, synthetic construct
  source 1..75: mol_type = other DNA
acgtctgagcaacaaggaattacgttggttagcgagcaaaaaaaatcttgtgattgcagtacacaagtcccaaac

SEQ ID NO: 199578 - DNA, 75 bp, synthetic construct
  source 1..75: mol_type = other DNA
acgtttcaccctctggctggatgatttcggctcaggaaatgcaggcttaatgtggggactgtccgggatgtttga

SEQ ID NO: 199579 - DNA, 75 bp, synthetic construct
  source 1..75: mol_type = other DNA
cttattgttatacatggtttttcaattaagcgagtcgcagtgtcctgtggatatcacagcgtgtcgtatttcatt

SEQ ID NO: 199580 - DNA, 75 bp, synthetic construct
  source 1..75: mol_type = other DNA
caatacctcattgttaaagctggccattccgctgtgtaccgcattgatggcagtgcactgcgtggttcccccaca

SEQ ID NO: 199581 - DNA, 75 bp, synthetic construct
  source 1..75: mol_type = other DNA
ctgaatcatgacgaacatgttgatgtggtgatgatgaccctggagctggctgacgggcgtattccggtgattgcc

SEQ ID NO: 199582 - DNA, 75 bp, synthetic construct
  source 1..75: mol_type = other DNA
ttaaatcatgacgaacatgctgatgtggtgatgatgacgctggagctggctgatgggcgcattccggtgattgcc

SEQ ID NO: 199583 - DNA, 75 bp, synthetic construct
  source 1..75: mol_type = other DNA
aaggatatgcagagccagaacgtgaagctcatcttaggttacgtaacctgaatgcccttcgacaggctgccatga

SEQ ID NO: 199584 - DNA, 75 bp, synthetic construct
  source 1..75: mol_type = other DNA
agcagcgatgttttgcgcttttctaccaccgaaaccacagaacctgaacgtacgttgcagttatctgccgaacag

SEQ ID NO: 199585 - DNA, 75 bp, synthetic construct
  source 1..75: mol_type = other DNA
agtacgttggcagtcacctgaacgtgggttgattccaccgttggacttcatttcctacgccgaagagtcagggct

SEQ ID NO: 199586 - DNA, 75 bp, synthetic construct
  source 1..75: mol_type = other DNA
tctgctaccagaaacggtgggccgtctggcgaaagtaaaaaatattatcggaatcaaagaggcaacagggaactt

SEQ ID NO: 199587 - DNA, 75 bp, synthetic construct
  source 1..75: mol_type = other DNA
atataggctccagaattgcttattggtctgaaggaagtcagtcgccttttagaatggtcaatacaagtaattcta

SEQ ID NO: 199588 - DNA, 75 bp, synthetic construct
  source 1..75: mol_type = other DNA
ttacggggggggaatggtaaacaatattcgctagctaaaagaggggttaagaacctaaatgtgagtatccaaatt

SEQ ID NO: 199589 - DNA, 75 bp, synthetic construct
  source 1..75: mol_type = other DNA
acttcaacgctgtcgctggctttccgctgatgtcattatggtgctggttggcctgatttgcggcatcacgctctt

SEQ ID NO: 199590 - DNA, 75 bp, synthetic construct
  source 1..75: mol_type = other DNA
gaccgatatgaggcgagtcctgatttcacagagtattccgctgtgtctaacataggatacggatttatccagcaa

SEQ ID NO: 199591 - DNA, 75 bp, synthetic construct
  source 1..75: mol_type = other DNA
cgccgcactaatggttgagcgtatcgagtctcataacagtcctggctcgctcaactactgcgctgaaaaagacaa

SEQ ID NO: 199592 - DNA, 75 bp, synthetic construct
  source 1..75: mol_type = other DNA
taacgcctgatacatgcgctctgaaggcgtggaaaggacgccatgcgtttatcagctttgcgcactccgggcaga

SEQ ID NO: 199593 - DNA, 75 bp, synthetic construct
  source 1..75: mol_type = other DNA
tcgcggtgatggaaaaacatggcgatgtctacagcaacattcagcccgatcctgaattccgcctgcaagatatca

SEQ ID NO: 199594 - DNA, 75 bp, synthetic construct
  source 1..75: mol_type = other DNA
gccgcgcgcgaagcgcgtcaggcgctgcaaaacgacctcaacgtgatgctgttctccgataacgtctcaattgaa

SEQ ID NO: 199595 - DNA, 75 bp, synthetic construct
  source 1..75: mol_type = other DNA
taaccacctcattagtcaacatgccgcagaactgtttggtcgtcaggaggcgcagcagttactggatcgcgtggc

SEQ ID NO: 199596 - DNA, 75 bp, synthetic construct
  source 1..75: mol_type = other DNA
cagccgttgattgctgatgtgcgtgcgcgtctgcaaccgcagcagaaatacattcgtggcctgttctgcggcggc

SEQ ID NO: 199597 - DNA, 75 bp, synthetic construct
  source 1..75: mol_type = other DNA
tccgataacgtctcagttgaagatgaactggcgctcaaacagttggcccatgaaaaagggctgctgatgatgggg

SEQ ID NO: 199598 - DNA, 75 bp, synthetic construct
  source 1..75: mol_type = other DNA
ccgaagggcgcgagttgatcattctcgcctatgtgctgggcaccgatctcgatacgccatcattagaacaacaga

SEQ ID NO: 199599 - DNA, 75 bp, synthetic construct
  source 1..75: mol_type = other DNA
ggttttcagcagcgagttcgatactatcttgccgaatctggcgatgctgagcggtgttctgattctggtcagtgg

SEQ ID NO: 199600 - DNA, 75 bp, synthetic construct
  source 1..75: mol_type = other DNA
actgtggttgtgtgtccactgaaacattcatgcactggctgcgggtagcttacgaggctggcaactatccggata

SEQ ID NO: 199601 - DNA, 75 bp, synthetic construct
  source 1..75: mol_type = other DNA
tcgctggataatctgcaggatgtcgcggaaatcccgcttgaagacctcctgcaatcatcagtgatggatatttac

SEQ ID NO: 199602 - DNA, 75 bp, synthetic construct
  source 1..75: mol_type = other DNA
aaatctgctcgatgaaaaagtaccgattcgcgatatgcgcaccattctcgaaacgctggcggaacatgcgcccat

SEQ ID NO: 199603 - DNA, 75 bp, synthetic construct
  source 1..75: mol_type = other DNA
aattgagtacgcataccttcagacatctatgtctgaccgatctcgccagagctgactgggatattcatgagatcg

SEQ ID NO: 199604 - DNA, 75 bp, synthetic construct
  source 1..75: mol_type = other DNA
taccggtcgcgccgtgggtagcgttaacccgcgcagagtttgaaaaaggccttagcgataagcagttagcagaaa

SEQ ID NO: 199605 - DNA, 75 bp, synthetic construct
  source 1..75: mol_type = other DNA
tttggcttatctattttttttgctaatacgccgtattcagttgcgacattgcaaacaattgcgcttttagttcaa

SEQ ID NO: 199606 - DNA, 75 bp, synthetic construct
  source 1..75: mol_type = other DNA
ttggaaaaatatacggtcaagagaaaaatatcaccacctacaaccttgcacgtatgaatatgcttctgcatggag

SEQ ID NO: 199607 - DNA, 75 bp, synthetic construct
  source 1..75: mol_type = other DNA
gacctggaagatatgaatccacgacccggtggtgatgtctatctcacaccgatgaacatgaccacgaaaccctcc

SEQ ID NO: 199608 - DNA, 75 bp, synthetic construct
  source 1..75: mol_type = other DNA
tgttccgggtgccgttgcacatggtgcagaacaccgatcgcgccaccttcaacaatatcgaagagctggggttgg

SEQ ID NO: 199609 - DNA, 75 bp, synthetic construct
  source 1..75: mol_type = other DNA
ggttgttgccaatccgccattcagctatcgctgggaaccttcagaaacattagcggatgatgtgcgctttaaaaa

SEQ ID NO: 199610 - DNA, 75 bp, synthetic construct
  source 1..75: mol_type = other DNA
gcaccttccggggcctgttctcggagatcaatctggcgtctgacaagctgggcaagacctacatcgagcgcaacg

SEQ ID NO: 199611 - DNA, 75 bp, synthetic construct
  source 1..75: mol_type = other DNA
tttctctggataatcagataaaatcagcaactcaaaaacataacgaatttctaaaagagttaggtttagctcttt

SEQ ID NO: 199612 - DNA, 75 bp, synthetic construct
  source 1..75: mol_type = other DNA
tatcatctggcccccaactggtattcgctatggccagtattggctctcgccattattttctgtgtcatcggtttc

SEQ ID NO: 199613 - DNA, 75 bp, synthetic construct
  source 1..75: mol_type = other DNA
tgatcgtcacgggcaatttccctggcatgattttctttgaaatcattccggtgctgatcgtccagatgctgttca

SEQ ID NO: 199614 - DNA, 75 bp, synthetic construct
  source 1..75: mol_type = other DNA
ttcattttattccgaacgtggaaagaaattctggaatactggttgtgccgttctctcattaattctcgcatttat

SEQ ID NO: 199615 - DNA, 75 bp, synthetic construct
  source 1..75: mol_type = other DNA
tcaactgggcctgggttgaaggcttccgccaggcacgggatgaaggctgcgaagaggcttatcgtctctgggtgg

SEQ ID NO: 199616 - DNA, 75 bp, synthetic construct
  source 1..75: mol_type = other DNA
agaggcgtttgccattgagtttgtgaatgattccgggatgctggcggggatccccgatgagattgcgcgatattt

SEQ ID NO: 199617 - DNA, 75 bp, synthetic construct
  source 1..75: mol_type = other DNA
ttattcctggactccttcacctttattgtaaccggctcatttaaaccgtctggtctgtttcctccggctctacaa

SEQ ID NO: 199618 - DNA, 75 bp, synthetic construct
  source 1..75: mol_type = other DNA
tgatcaccatcggcgtctttgtgctgggctatctctactgcctgacccagtttcccggttttgcttccacaagag

SEQ ID NO: 199619 - DNA, 75 bp, synthetic construct
  source 1..75: mol_type = other DNA
aacgctattcggtgtggcaattcaaggattgatccagacctatattaattttgatggttcgctcagttcgtggtg

SEQ ID NO: 199620 - DNA, 75 bp, synthetic construct
  source 1..75: mol_type = other DNA
ttttgttgtttatttttatagcattacagcgtggattaacggtgctgtgggagaatcgtcagagttcgccagtga

SEQ ID NO: 199621 - DNA, 75 bp, synthetic construct
  source 1..75: mol_type = other DNA
ttattgaaatgcctcaggttaagaaggcgtttttcttcttttttaataaagaatttgacagccatgatttagctc

SEQ ID NO: 199622 - DNA, 75 bp, synthetic construct
  source 1..75: mol_type = other DNA
tttcggaagaatcgatcccgattaaccatcccatttatgacacactctctggccttgcgtggaaaattcccggcg

SEQ ID NO: 199623 - DNA, 75 bp, synthetic construct
  source 1..75: mol_type = other DNA
ttgtttatttttattgccttacagcgtgggctaacggtgctgtgggagaatcgtcagagttcaccagtgacaaga

SEQ ID NO: 199624 - DNA, 75 bp, synthetic construct
  source 1..75: mol_type = other DNA
gaagggggcgggagttctgtaagaaggatttggattgcggaaggttacgccacggcgcttaccattcatcatctg

SEQ ID NO: 199625 - DNA, 75 bp, synthetic construct
  source 1..75: mol_type = other DNA
ggtggattacacacagcccgttgacggcgagtcactggaaactcacgccccggcattctggtgctggctggaccg

SEQ ID NO: 199626 - DNA, 75 bp, synthetic construct
  source 1..75: mol_type = other DNA
ggattgttcagcccgcacgataagaagcactggttacgtacgctgtgcgaggtggattacacgcagcccgttgac

SEQ ID NO: 199627 - DNA, 75 bp, synthetic construct
  source 1..75: mol_type = other DNA
gatgcagaaattcagcgacccgatgctcgcccggtcactgcttcagtcccagcagaactcagacgaggcactgaa

SEQ ID NO: 199628 - DNA, 75 bp, synthetic construct
  source 1..75: mol_type = other DNA
ccgccttctggcgctggcttgaccgtgccgccggtggtcgtgcggaaaaacgcgacgtgattctggccgcactgt

SEQ ID NO: 199629 - DNA, 75 bp, synthetic construct
  source 1..75: mol_type = other DNA
ggcctccgtggtggacaccctgaagctgattattccgcagcaggaagccccctcccgccgcctgattggctttcg

SEQ ID NO: 199630 - DNA, 75 bp, synthetic construct
  source 1..75: mol_type = other DNA
atttgcggaaccgctttctcaggtataaaggtggtgattatatcccgtttcttgcaaacttcccggttgcaatgt

SEQ ID NO: 199631 - DNA, 75 bp, synthetic construct
  source 1..75: mol_type = other DNA
atataaatctaacacagctggatatttctagagttagagtcgctgattacgctacagctaaaatgcaaataattg

SEQ ID NO: 199632 - DNA, 75 bp, synthetic construct
  source 1..75: mol_type = other DNA
ccaccccgagattctcaactctggttggtgagtatccaaaaactcacaaacgaagaggccaaacaccatggcaaa

SEQ ID NO: 199633 - DNA, 75 bp, synthetic construct
  source 1..75: mol_type = other DNA
cgtctttttcgcatcagaattatggcggggcgtatggggccgacttcagtcgggccggattcgtgcgtagccggt

SEQ ID NO: 199634 - DNA, 75 bp, synthetic construct
  source 1..75: mol_type = other DNA
gaggaatcatttgttattaagtttaaaatttggacgtgataagcatgctgttaaaccagagttaaatgaataccc

SEQ ID NO: 199635 - DNA, 75 bp, synthetic construct
  source 1..75: mol_type = other DNA
tgcaacgcggcttgctggaagcggcaacccgtaagccagatttgattattctcgatctcggcctgcccgatggtg

SEQ ID NO: 199636 - DNA, 75 bp, synthetic construct
  source 1..75: mol_type = other DNA
aaaatcccgcttccgatcgacaaggtcagagcgttggctaaagcattggatgccgattcggtccgattgatgcta

SEQ ID NO: 199637 - DNA, 75 bp, synthetic construct
  source 1..75: mol_type = other DNA
ccggtcactgcttcagtcccagcagaactcagacgaggcactgaacatcaaacgggatgccgacccgacgtttga

SEQ ID NO: 199638 - DNA, 75 bp, synthetic construct
  source 1..75: mol_type = other DNA
catcgagacgctggaatccccgcgtgaacgtgccgcgttaactggcttctcactgatacgcctgccggaccagga

SEQ ID NO: 199639 - DNA, 75 bp, synthetic construct
  source 1..75: mol_type = other DNA
aacgctggaaacccacgcccccgcgttctggcgctggcttgaccgtgccgccggtggccgtgcggaaaaacgcga

SEQ ID NO: 199640 - DNA, 75 bp, synthetic construct
  source 1..75: mol_type = other DNA
gcgccataccaaacaggggatacagaccaacctgacgctgaaagaggaaagctacggcgactggctgccaaaatg

SEQ ID NO: 199641 - DNA, 75 bp, synthetic construct
  source 1..75: mol_type = other DNA
gaggcgacgcggaaagcgatttatgacgccatccggccaccggctgacagtcctttcactaccatgagcgaggcg

SEQ ID NO: 199642 - DNA, 75 bp, synthetic construct
  source 1..75: mol_type = other DNA
atgctgaaggaatacggactgaattacgagaagcgccataccaaacaggggatacagaccaacctgacgctgaaa

SEQ ID NO: 199643 - DNA, 75 bp, synthetic construct
  source 1..75: mol_type = other DNA
cccgcaaagggtttcccgatcgcgaatgttcaatgctgacgaccacgcacaaaaccggaggcgtgacgttccgcg

SEQ ID NO: 199644 - DNA, 75 bp, synthetic construct
  source 1..75: mol_type = other DNA
ccctttctctaccatgagcgaggcggagtttaccgccatgagcaccagtgagaaagccatgcgggtgcatgagca

SEQ ID NO: 199645 - DNA, 75 bp, synthetic construct
  source 1..75: mol_type = other DNA
tgccgccggtgttcggtgactggaatgatgcgtatacacagcacggcggggaggccacgcgtaaagccatgtatg

SEQ ID NO: 199646 - DNA, 75 bp, synthetic construct
  source 1..75: mol_type = other DNA
tgcctcggtggtggagaccctgaagctgattattccgcagcaggatacaccggcgcgtcgtctgattggttttcg

SEQ ID NO: 199647 - DNA, 75 bp, synthetic construct
  source 1..75: mol_type = other DNA
ctggcagctctttctcgaagtgaccggtcccggcgggaggggaaaaagtattctggctgaaatcgcgaccctgct

SEQ ID NO: 199648 - DNA, 75 bp, synthetic construct
  source 1..75: mol_type = other DNA
atgaaaacggcatctggaaaaatatccctgccgccgctttttcacggaatgtggctgacttattccagcgtctgc

SEQ ID NO: 199649 - DNA, 75 bp, synthetic construct
  source 1..75: mol_type = other DNA
tgtcctccgtgaacctcctttctctggcgagccttacccgtcagaagtccccggcctgtcagattgtgctggccg

SEQ ID NO: 199650 - DNA, 75 bp, synthetic construct
  source 1..75: mol_type = other DNA
ggatacatggactgacacatagtctgtcttcagcctcttctggagtctggacgtcaaccgcagatacagatggcg

SEQ ID NO: 199651 - DNA, 75 bp, synthetic construct
  source 1..75: mol_type = other DNA
tttttctcttattcgcctgcctgatcaggagaagtggagcggcgacggcgccgggcttaaggctataactggtgg

SEQ ID NO: 199652 - DNA, 75 bp, synthetic construct
  source 1..75: mol_type = other DNA
cagccatgttgaaagagtacgggctgagttatgagaagcgccgaaaaaatcagggcatacaaaccaatctcgcgc

SEQ ID NO: 199653 - DNA, 75 bp, synthetic construct
  source 1..75: mol_type = other DNA
cgtcagccgcgcctttatctgtatcatgcctatctggcgtatatggaagcccacggctacaggaataccctgagc

SEQ ID NO: 199654 - DNA, 75 bp, synthetic construct
  source 1..75: mol_type = other DNA
agcgaaaaggccatgcgtatctatgagcattacggcgaggcgctcgcggtcgatgccaacggccagcttctgtcc

SEQ ID NO: 199655 - DNA, 75 bp, synthetic construct
  source 1..75: mol_type = other DNA
ggcgaaatgctggagactcacgcgccgaatttctggcgctggcttgaccgggcggccggtaaaaatccacaaaag

SEQ ID NO: 199656 - DNA, 75 bp, synthetic construct
  source 1..75: mol_type = other DNA
gagtcctgcgagggcgtggtcgccctgccgccggtgttcggtgactggaatgatgcgtatacacagcacggcggg

SEQ ID NO: 199657 - DNA, 75 bp, synthetic construct
  source 1..75: mol_type = other DNA
tttgatttttgcggctatctggaagcactgccggagcctgagggaatgtatattggcaatgccaacatcattccg

SEQ ID NO: 199658 - DNA, 75 bp, synthetic construct
  source 1..75: mol_type = other DNA
caggggatgcagacgaaccttgcgctcagggaggaaagcaacgccgactggctgccccggtgcgatgaaactact

SEQ ID NO: 199659 - DNA, 75 bp, synthetic construct
  source 1..75: mol_type = other DNA
ccattacgccgattttgcccgtgatgtcgctgcgctgtttcagcgcctcggcgcacctttttcatccgggaaaat

SEQ ID NO: 199660 - DNA, 75 bp, synthetic construct
  source 1..75: mol_type = other DNA
agtgcggcgcgggtgatggcctgaaactgattgagaaggtgttcggcgtatcggcttcagaggctgccggtaaag

SEQ ID NO: 199661 - DNA, 75 bp, synthetic construct
  source 1..75: mol_type = other DNA
cctgtccggtgtgtggcggctccgaccgctttcgctttgacgataaagaggggcgcgggacgtggttctgtaacc

SEQ ID NO: 199662 - DNA, 75 bp, synthetic construct
  source 1..75: mol_type = other DNA
ggtgaaaggggcatgtcatatcatcgaggggcagaaacaggcaggaaaacgtctgtggatagcggagggctatgc

SEQ ID NO: 199663 - DNA, 75 bp, synthetic construct
  source 1..75: mol_type = other DNA
agctggccgtgattgttcgccagctaatgcagaggttcagcgacccgatgaccgcccgcgcactgctccagtcgc

SEQ ID NO: 199664 - DNA, 75 bp, synthetic construct
  source 1..75: mol_type = other DNA
ctggcagctctttcttgaggtgaccgggccgggagggagcgggaaaagtattctggccgaaattgcaacgatgct

SEQ ID NO: 199665 - DNA, 75 bp, synthetic construct
  source 1..75: mol_type = other DNA
gcgcgccgttctcagcgggcaaaatcgcgggcgtggtggacacgctgaagctgatgctgccgcagcaggccgcac

SEQ ID NO: 199666 - DNA, 75 bp, synthetic construct
  source 1..75: mol_type = other DNA
cggcacggcgtctgattggttttcgcaacggcgtactcgataccgccaccggcacattcagcccgcatcataaat

SEQ ID NO: 199667 - DNA, 75 bp, synthetic construct
  source 1..75: mol_type = other DNA
gacgcctgtgagggtgttgttgccctgccgccagtgttcggtgactggaatgatgcgttcgttcagaaaggtgaa

SEQ ID NO: 199668 - DNA, 75 bp, synthetic construct
  source 1..75: mol_type = other DNA
gttgttgattacgccgtcgctttcccgacacatggtcagcaccgggccagcaacgagctgcgtaaacagggggtt

SEQ ID NO: 199669 - DNA, 75 bp, synthetic construct
  source 1..75: mol_type = other DNA
caacgagctgcgcaaacagggcgtttttatctcagggagtggtgtccgttctgtctggctgcgccacaatcttga

SEQ ID NO: 199670 - DNA, 75 bp, synthetic construct
  source 1..75: mol_type = other DNA
gctgaagaaaggcgatcgcgttgcgttgatgatgcctaacttattgcaatatccggtggcgctgtttggcatttt

SEQ ID NO: 199671 - DNA, 75 bp, synthetic construct
  source 1..75: mol_type = other DNA
atgctcgtctattggctggatatagtcggcacagcggtatttgccatctccggcgttttgttagccggaaaattg

SEQ ID NO: 199672 - DNA, 75 bp, synthetic construct
  source 1..75: mol_type = other DNA
atgtggaacgacctgacattaccggatccgctattgccgaaactgtttacccgcgtgtgggtgaagacagacacc

SEQ ID NO: 199673 - DNA, 75 bp, synthetic construct
  source 1..75: mol_type = other DNA
atggcaaccaggctgaccgccaccatggccgacgatccgctcaatcatgtgctcgacggttatcaccgcttccgc

SEQ ID NO: 199674 - DNA, 75 bp, synthetic construct
  source 1..75: mol_type = other DNA
caaaccggtgtcgggcgcaccggggaactgtatgcctgtatgcactacggcgtgacgcctgatctgttaactacc

SEQ ID NO: 199675 - DNA, 75 bp, synthetic construct
  source 1..75: mol_type = other DNA
caacagtgaaacagtacaggacgtcatgctgggagcggtggaacgccgcttcggcacgatcttccgtcgtctcca

SEQ ID NO: 199676 - DNA, 75 bp, synthetic construct
  source 1..75: mol_type = other DNA
gaacacagagttgagtgcgtctatcctggaggacgttgctgttgtgcctcaaaaagccgttctggtgcagggaac

SEQ ID NO: 199677 - DNA, 75 bp, synthetic construct
  source 1..75: mol_type = other DNA
gggggaggtgatgaccttccgcaaactggaagaacgcagtcgcgcgtttgccgcttatttgcaacaagggttggg

SEQ ID NO: 199678 - DNA, 75 bp, synthetic construct
  source 1..75: mol_type = other DNA
tctgcagtggttcctgatgagcatttttcaattttcaatgatgccatttcatgtttggaaattgataggttttag

SEQ ID NO: 199679 - DNA, 75 bp, synthetic construct
  source 1..75: mol_type = other DNA
cctgtgcggtgattgtcgaacccatccagggggaaggcggtgtggtgccagccagcaacgcgtttttacaaggtc

SEQ ID NO: 199680 - DNA, 75 bp, synthetic construct
  source 1..75: mol_type = other DNA
atcattctggtccacccgttaaatcatttacccagatggatccttccggtgctggacgccgttggtctggcggtg

SEQ ID NO: 199681 - DNA, 75 bp, synthetic construct
  source 1..75: mol_type = other DNA
tatcacagcgtgacgttgatcgcgcagaaacagatttacttatcaatctgtcaactattacccagcgcggtctgg

SEQ ID NO: 199682 - DNA, 75 bp, synthetic construct
  source 1..75: mol_type = other DNA
aattagcagggcttttaagtatgcgcttgatggactcaccaataaaaaacgcccggcggcaaccgagcgttctga

SEQ ID NO: 199683 - DNA, 75 bp, synthetic construct
  source 1..75: mol_type = other DNA
gaaggtcagtcgtaccgactggcgatacatcgcggcgattttatgtgcgttccagatggcatctgatatcagtcc

SEQ ID NO: 199684 - DNA, 75 bp, synthetic construct
  source 1..75: mol_type = other DNA
tggccggttcatgccacctggcttaccgcccagatgtatttactggcgtatggcggcggaaaatattccctggat

SEQ ID NO: 199685 - DNA, 75 bp, synthetic construct
  source 1..75: mol_type = other DNA
cagccataaataaatttaggggatctaaattgcgcagcccgaaaattatttgcccggaatgtaacagcaattcaa

SEQ ID NO: 199686 - DNA, 75 bp, synthetic construct
  source 1..75: mol_type = other DNA
agcgagaaattgatcgcgctgaaactgatttactcatcaacctgtcaacgcttacccagcgcggtctggcaaaga

SEQ ID NO: 199687 - DNA, 75 bp, synthetic construct
  source 1..75: mol_type = other DNA
gaaagggaagaatcaccatcacctgctacggaaaagcgtggactgcggcttggtttgctatgggcggtgatgatg

SEQ ID NO: 199688 - DNA, 75 bp, synthetic construct
  source 1..75: mol_type = other DNA
cctttaatgcggaagccggtccgttaatcgcggtttgtatgggtgtgatcaccggcgttggcggcgggatcatcc

SEQ ID NO: 199689 - DNA, 75 bp, synthetic construct
  source 1..75: mol_type = other DNA
ttgtccacgctacggcttattacacattttccatctcgtcagagacggccagtatggtaggaatggttgtgacac

SEQ ID NO: 199690 - DNA, 75 bp, synthetic construct
  source 1..75: mol_type = other DNA
aatttcggcgcgcaaacactgatgaaacgcttgaaaaaatggttgagcatatggaattaaaagtcagtcaaattg

SEQ ID NO: 199691 - DNA, 75 bp, synthetic construct
  source 1..75: mol_type = other DNA
agaaattgcgcatattctgggacatacctcacttactgttgccaagtattacatcctggcgacgcctgcgctggc

SEQ ID NO: 199692 - DNA, 75 bp, synthetic construct
  source 1..75: mol_type = other DNA
attgaaaactacgaacctggtaagggaagaatcaccatcacctgctacggaaaagcgtggactgcggcttggttt

SEQ ID NO: 199693 - DNA, 75 bp, synthetic construct
  source 1..75: mol_type = other DNA
ttactcaatcaggtgtggggaccaaacgcggtcgaacacagtcactatttgcgtatttatatgggacatctgcga

SEQ ID NO: 199694 - DNA, 75 bp, synthetic construct
  source 1..75: mol_type = other DNA
atatgtcagcattctggcaattgcgtacgtggtaacggcaagttatttaatctcaaacgtaagccgtggatcatg

SEQ ID NO: 199695 - DNA, 75 bp, synthetic construct
  source 1..75: mol_type = other DNA
tcttctttcaccatttccattgcttcaactacgtcatgtggcactcgtgcctttaaggcttgtgatttagcattc

SEQ ID NO: 199696 - DNA, 75 bp, synthetic construct
  source 1..75: mol_type = other DNA
attgtcagcgcataatatgacaatgacaacctattataaatatgttcgtaaccgactggagagtgatattgttct

SEQ ID NO: 199697 - DNA, 75 bp, synthetic construct
  source 1..75: mol_type = other DNA
ccgactgcatgatcatctgtacgggtacatccagccgtcatgtcatgtctattgccgaccatgtggtgcaggagt

SEQ ID NO: 199698 - DNA, 75 bp, synthetic construct
  source 1..75: mol_type = other DNA
gactggattgtcgttgatttgggcgaagttattgtccatgtcatgcaggaagagagccgtcgcctgtatgaactg

SEQ ID NO: 199699 - DNA, 75 bp, synthetic construct
  source 1..75: mol_type = other DNA
atgtgcgcaaggcctgccgtgaacgcatcgctctgcgattcccgcgcgacaagctcagctcaagaacacctccga

SEQ ID NO: 199700 - DNA, 75 bp, synthetic construct
  source 1..75: mol_type = other DNA
cattccggcactggtgacggcaatgacgcagacgccatcgcttctggtcacgggggaatacaaatctgacagctc

SEQ ID NO: 199701 - DNA, 75 bp, synthetic construct
  source 1..75: mol_type = other DNA
cacgtccgctgaactcgctggcgctgtccgggctggatgtggtcgccatgtcacagcgtgaaagccgtaacgagc

SEQ ID NO: 199702 - DNA, 75 bp, synthetic construct
  source 1..75: mol_type = other DNA
caaaaactggagcaggatcccgcccgcccccgccatttcattaccgaaaccgggatcgggtatcggtttatgctt

SEQ ID NO: 199703 - DNA, 75 bp, synthetic construct
  source 1..75: mol_type = other DNA
acacgatcgacctgctttgctggcgctattacggcagaacagcaggtgttaccgaggcggtgatcgatgccaata

SEQ ID NO: 199704 - DNA, 75 bp, synthetic construct
  source 1..75: mol_type = other DNA
tctgcaggatgttaaccagctgaacggtcgcatccctgcggatgttgtgaatggcctgcacgtctttgccggtcg

SEQ ID NO: 199705 - DNA, 75 bp, synthetic construct
  source 1..75: mol_type = other DNA
gaagagatatcttctacaacaccgcctgtgcctgttagaaaaaaacataaagtaataatggggttagcgttagcc

SEQ ID NO: 199706 - DNA, 75 bp, synthetic construct
  source 1..75: mol_type = other DNA
gcgcattcttccggcgcttggtgtgaaggtcatgaaaaaccggcatcaggcctgcccgatgtgcggcggctctga

SEQ ID NO: 199707 - DNA, 75 bp, synthetic construct
  source 1..75: mol_type = other DNA
tgtggatttcaccccgccggtggacggtgaaacgctggagacccacgcccccgcgttctggcgctggcttgaccg

SEQ ID NO: 199708 - DNA, 75 bp, synthetic construct
  source 1..75: mol_type = other DNA
ccacggctacaggaatactctcagcctcaccatgttcggtaaggggctgccagccatgctgaaagagtacgggct

SEQ ID NO: 199709 - DNA, 75 bp, synthetic construct
  source 1..75: mol_type = other DNA
actggaaagatggtcgccgcagccgtcactccgataatacggatgtgcttctccgtatacaccatgttatcggag

SEQ ID NO: 199710 - DNA, 75 bp, synthetic construct
  source 1..75: mol_type = other DNA
taggagaattgccagcttttttagactctcgtacctattgggagtatcagcaatgggaagagcaaaataaaaata

SEQ ID NO: 199711 - DNA, 75 bp, synthetic construct
  source 1..75: mol_type = other DNA
gctggtcgagaaagtgtttggcgtgaccgcatcagaggctgccgggagggtggacgccgtgaccggcaacctgcc

SEQ ID NO: 199712 - DNA, 75 bp, synthetic construct
  source 1..75: mol_type = other DNA
atgaacaaaattaagtttgttatcttttctggcatccttggtttcagcctgaatgcctttgcgggtggtagcggt

SEQ ID NO: 199713 - DNA, 75 bp, synthetic construct
  source 1..75: mol_type = other DNA
tacgaaccaagacattaacaagacaaacaaggtcggagtccaaaaatatcgggccctaaccgaatgggttaaata

SEQ ID NO: 199714 - DNA, 75 bp, synthetic construct
  source 1..75: mol_type = other DNA
cgaccagatacaagatacagccccagaagagatatcttcgacaacaccgcctgtacctgttagaaaaaacataaa

SEQ ID NO: 199715 - DNA, 75 bp, synthetic construct
  source 1..75: mol_type = other DNA
caacgagctgcgtaaacagggcgtttttatctccggcaatgatgtccgttctgtctggttacgccataaccttga

SEQ ID NO: 199716 - DNA, 75 bp, synthetic construct
  source 1..75: mol_type = other DNA
gccctgcggtagttatgggcgttttgtccattgccctgccgcagattgcgctggccgctggcaccgatactggtg

SEQ ID NO: 199717 - DNA, 75 bp, synthetic construct
  source 1..75: mol_type = other DNA
aagggaaagtaaggggggtgtctgtctccggagtattttattataaggacggcacaacaagcaacttcgaagggg

SEQ ID NO: 199718 - DNA, 75 bp, synthetic construct
  source 1..75: mol_type = other DNA
ggatacatggactgacacatgatctgtctatagttaattccgaggtcaggacgttaaccgccgataccgatagcg

SEQ ID NO: 199719 - DNA, 75 bp, synthetic construct
  source 1..75: mol_type = other DNA
ttgaacaaccagacaatgacttttacccctgaacaattacgtaaacaggcacaggaaatgttgcgacaggcggaa

SEQ ID NO: 199720 - DNA, 75 bp, synthetic construct
  source 1..75: mol_type = other DNA
acaggaaatgttgcgacaggcggaacaactggaaaaaacaggtttaacaaaagatgccattcgtcgggatatggt

SEQ ID NO: 199721 - DNA, 75 bp, synthetic construct
  source 1..75: mol_type = other DNA
ttattctggtgcatgggtaaaagtcatcttgatgctattgagtaccacggagaaaccagcgcactggaaaagatt

SEQ ID NO: 199722 - DNA, 75 bp, synthetic construct
  source 1..75: mol_type = other DNA
tggggcgcagggactaccatcaatagccttacctgtgagggtaacggcacgcaaggtaatactggcactggcggt

SEQ ID NO: 199723 - DNA, 75 bp, synthetic construct
  source 1..75: mol_type = other DNA
ttcatagtcgttctaaaatccagctaactttttattcaaaagaagataacgcgacaatcacgagattaactgctc

SEQ ID NO: 199724 - DNA, 75 bp, synthetic construct
  source 1..75: mol_type = other DNA
ttgaacaaccagacaatgacttttacccctgagcaattacgtaaacaggcacaggaaatgttgcggcaggcggaa

SEQ ID NO: 199725 - DNA, 75 bp, synthetic construct
  source 1..75: mol_type = other DNA
aactggctgcgcaaacgcggcgtgcgctattgccagggatggttttttgcgaaggcgatgccgccgcaggtgttt

SEQ ID NO: 199726 - DNA, 75 bp, synthetic construct
  source 1..75: mol_type = other DNA
ttttctctttaagtaaacaagcctcagcagaaaaattctcaccattgattcatcaaagggaaataaccgtacagc

SEQ ID NO: 199727 - DNA, 75 bp, synthetic construct
  source 1..75: mol_type = other DNA
gagtgaagtgatgtctgatgatccgacattgcaatggggtgtgtatgatacggtgacgaaaacctttttctcgtt

SEQ ID NO: 199728 - DNA, 75 bp, synthetic construct
  source 1..75: mol_type = other DNA
cggggactcagggacaagtaatgacgccagcggagtttattccactggcggaacaaaaggggctaattgagcagg

SEQ ID NO: 199729 - DNA, 75 bp, synthetic construct
  source 1..75: mol_type = other DNA
gctggtcattcgccaggcagatttagtgagcgatgcagctgaacgctatcaggggcaagtttgcactccagccca

SEQ ID NO: 199730 - DNA, 75 bp, synthetic construct
  source 1..75: mol_type = other DNA
gtgtatgatacggtaacgaatgcttttttctcgttaagtaaattggcttcgacagaaacattttcacctctgatt

SEQ ID NO: 199731 - DNA, 75 bp, synthetic construct
  source 1..75: mol_type = other DNA
atatgatgcgtatggttcgcaacagttctattttccgaatttgctgaagtatgaccctgaacagcttctgcagtt

SEQ ID NO: 199732 - DNA, 75 bp, synthetic construct
  source 1..75: mol_type = other DNA
cagccggaacattcgtaaaactgccggatgaagtgtttaccactttgttcaaagaagcacgagcgcgaggcttaa

SEQ ID NO: 199733 - DNA, 75 bp, synthetic construct
  source 1..75: mol_type = other DNA
ccctcgggtgacactatggcaagggcttgccgatcaaagcaacctcaacggcgttgatgcggtaatcaacctggc

SEQ ID NO: 199734 - DNA, 75 bp, synthetic construct
  source 1..75: mol_type = other DNA
cccatgcgctcggtcatgcgctgcatcgcccggctattttgcgcgtccccgcaaccgccattcggctgttaatgg

SEQ ID NO: 199735 - DNA, 75 bp, synthetic construct
  source 1..75: mol_type = other DNA
actgggcgctgcttgcgaagtttcacagcaggccgtctataagtggcttcacaacaaagcaaaggtatcccctga

SEQ ID NO: 199736 - DNA, 75 bp, synthetic construct
  source 1..75: mol_type = other DNA
ctcgcccgtttctagctatgctgattgcagaacgttttgatccagaagcctttcgccttgcgaaacaagctggtg

SEQ ID NO: 199737 - DNA, 75 bp, synthetic construct
  source 1..75: mol_type = other DNA
ttgcttaaaggttcagttctgcgtagggaagttgatgtcgttttgggggattgtcttgttacttacataaataat

SEQ ID NO: 199738 - DNA, 75 bp, synthetic construct
  source 1..75: mol_type = other DNA
ggtttgtaactcactttaaatacaaccatcaggctttccctcacgatatgaaatttacaaaagtatttgatgccc

SEQ ID NO: 199739 - DNA, 75 bp, synthetic construct
  source 1..75: mol_type = other DNA
tggggggcaggaactactatcaacagcctgacttgtgaaggaaatggtactcagggggattccggtacaggtggt

SEQ ID NO: 199740 - DNA, 75 bp, synthetic construct
  source 1..75: mol_type = other DNA
gtcatacggtctttatgttacaaaaaaagcctacgctaaactggaaaacatagtctcttatgggcattcatctgg

SEQ ID NO: 199741 - DNA, 75 bp, synthetic construct
  source 1..75: mol_type = other DNA
gtcaccgaagaagaaccgccacataacgaatttacccataaactctgcgcccgttgggaggaaattgcctgtcgg

SEQ ID NO: 199742 - DNA, 75 bp, synthetic construct
  source 1..75: mol_type = other DNA
tctgccaaagccgctggaatataacgcaaaaactggtagatttgattaacgccagcgacacgccgccgtcagtgc

SEQ ID NO: 199743 - DNA, 75 bp, synthetic construct
  source 1..75: mol_type = other DNA
gcaaaatgcgcgggtacgcatggtgtcaggccgggtggtcagtggcgttgttgatgcagatgggaatattcttat

SEQ ID NO: 199744 - DNA, 75 bp, synthetic construct
  source 1..75: mol_type = other DNA
tttttggtcaacaaaagaaaaagatgtggttatcttgtgcgaatacgttcgtatcgccctgcgtcggcatatttt

SEQ ID NO: 199745 - DNA, 75 bp, synthetic construct
  source 1..75: mol_type = other DNA
aggtcgctatagcgttcgcggtacacttctgaatgtctggcttattggctctgatattgaaaatgagttacgaga

SEQ ID NO: 199746 - DNA, 75 bp, synthetic construct
  source 1..75: mol_type = other DNA
ggctttcctacattggtcttcttgtttctggcggtttgcctgttgggtatcgcctggaaattacaaaagaaaaga

SEQ ID NO: 199747 - DNA, 75 bp, synthetic construct
  source 1..75: mol_type = other DNA
gcctggaaagtcttctctcccgctctacaaatggtaaaaaaactcccggcattgcgacaaaaatactcagtcaaa

SEQ ID NO: 199748 - DNA, 75 bp, synthetic construct
  source 1..75: mol_type = other DNA
aatgtggcaatttgacatgccatttagtgaagcacttagcctgttttctgtattgtctgtcggtgatgctttggt

SEQ ID NO: 199749 - DNA, 75 bp, synthetic construct
  source 1..75: mol_type = other DNA
ttggcggtaatattgttgttggcctggttatttttaccattatcaccattgtacaatttatggttattacaaaag

SEQ ID NO: 199750 - DNA, 75 bp, synthetic construct
  source 1..75: mol_type = other DNA
gtttgccgttatgtcgttctggcctgccagcgtcaccttgatgacctggaaaattcagttaaaaaaaactatccg

SEQ ID NO: 199751 - DNA, 75 bp, synthetic construct
  source 1..75: mol_type = other DNA
agaacttcgccaatatgtccgatccgatgaaagagctggaagcagcgattgaatcgggacgctttcatcatgacg

SEQ ID NO: 199752 - DNA, 75 bp, synthetic construct
  source 1..75: mol_type = other DNA
gcaatcccatcatgacctggtgtatcggcaacgtggtcggcaaaaccattccgggtacggctcccgactgtggct

SEQ ID NO: 199753 - DNA, 75 bp, synthetic construct
  source 1..75: mol_type = other DNA
gtttatcgcgaatttttgttaagtcagcagcagcgtgcgaaaaataacgcccgtctggcaaacgtctttaaaaca

SEQ ID NO: 199754 - DNA, 75 bp, synthetic construct
  source 1..75: mol_type = other DNA
tgctacgacaaacggcgtgaagtgatcgaaatgcttgaagggattgtgcccaatgatgaactgttcgggattatt

SEQ ID NO: 199755 - DNA, 75 bp, synthetic construct
  source 1..75: mol_type = other DNA
aaacaggcgtgggaagtttttcgtccagccagactgatggcgcaacgcacggagccattgcgtgaagcatttggt

SEQ ID NO: 199756 - DNA, 75 bp, synthetic construct
  source 1..75: mol_type = other DNA
gatggtcttcccgatccggtgaaagccatggggcggatcctggtggaaaacctctgcattgatccgaaactggca

SEQ ID NO: 199757 - DNA, 75 bp, synthetic construct
  source 1..75: mol_type = other DNA
tccggagatgcctccgcccgcggtgatgtctcctggtattgaatatatggaggatggtcttcccgatccggtgaa

SEQ ID NO: 199758 - DNA, 75 bp, synthetic construct
  source 1..75: mol_type = other DNA
agctaacccgaatattggcgtgtcggtttatcgcgaatttttgttaagtcagcagcagcgtgcgaaaaataacgc

SEQ ID NO: 199759 - DNA, 75 bp, synthetic construct
  source 1..75: mol_type = other DNA
cgcgttcggcgtatttcaacctggtgagctggcagagctgcgaggataaatcactgactcttgagcagttcgagg

SEQ ID NO: 199760 - DNA, 75 bp, synthetic construct
  source 1..75: mol_type = other DNA
ggtttaccatattagcgcagccacaatgtcgcttgatgatgagagaaacagggctaagggcgaagcgtttactct

SEQ ID NO: 199761 - DNA, 75 bp, synthetic construct
  source 1..75: mol_type = other DNA
ctatacctactcatcctgaagcttctgttgaagaggctaaagactggctgacagcagaggaattcactcatattg

SEQ ID NO: 199762 - DNA, 75 bp, synthetic construct
  source 1..75: mol_type = other DNA
cgacagcgcactgcgattgcgcatccgtgaaatcgccgaaacccgggttcactatggttaccgcaggggtcacgt

SEQ ID NO: 199763 - DNA, 75 bp, synthetic construct
  source 1..75: mol_type = other DNA
tccccgccgacagtacgaagcgccttctttgctcatcggtcatagcctggggggatcggccatcctgtctatcgc

SEQ ID NO: 199764 - DNA, 75 bp, synthetic construct
  source 1..75: mol_type = other DNA
ctattgcagaaggttataatgcgataaaagttgatccgcttgaaatcgatctgcatggcggcgattgtgtctttc

SEQ ID NO: 199765 - DNA, 75 bp, synthetic construct
  source 1..75: mol_type = other DNA
acgaagtatttcatcctgaacaacggttcggtggctttagcgggtcgagtgttatccattgacgccacagagaat

SEQ ID NO: 199766 - DNA, 75 bp, synthetic construct
  source 1..75: mol_type = other DNA
gccggtgttgccctgtattgttttgcctgtgataacgagtttggcgcggaagtgtattccggtgccacgacggag

SEQ ID NO: 199767 - DNA, 75 bp, synthetic construct
  source 1..75: mol_type = other DNA
ctgatgttctcgccacaggggatgacggcggaaggatatcactatcgcaacctgttccagagtggctatttgctt

SEQ ID NO: 199768 - DNA, 75 bp, synthetic construct
  source 1..75: mol_type = other DNA
gctggaccacggccacgacttttatgccccgcagagtttcctgaccccggatggccgacgcattgtcatcgggtg

SEQ ID NO: 199769 - DNA, 75 bp, synthetic construct
  source 1..75: mol_type = other DNA
gctacagctgtccacttcacagcgtcagggccgttacaaaacgactctcaatcgtggtgtcatggccacgaagct

SEQ ID NO: 199770 - DNA, 75 bp, synthetic construct
  source 1..75: mol_type = other DNA
acggttcggacagcgacgcccgggtgattcaacgtgcgcgcactaacgcacgtcttgcggggattggtgaactga

SEQ ID NO: 199771 - DNA, 75 bp, synthetic construct
  source 1..75: mol_type = other DNA
tctttagcgataaccctgaacgttatgccgaactgtttggcggtgcgcaacaatggggccaacaggtatatgcca

SEQ ID NO: 199772 - DNA, 75 bp, synthetic construct
  source 1..75: mol_type = other DNA
tggatcttcaaaggcgagatcctgggtggtatggctgctgttgaacaaccggaaaaaaccggctgctcagcctaa

SEQ ID NO: 199773 - DNA, 75 bp, synthetic construct
  source 1..75: mol_type = other DNA
gtatgctcggtcagatgagcaaaggcaaagatttcctcaacctgttctcttataccggcagcgccaccgtgcatg

SEQ ID NO: 199774 - DNA, 75 bp, synthetic construct
  source 1..75: mol_type = other DNA
accctggcagccgctattgtgatgcgatccggctggcagccaggaacaccgctgctcgatccaatgtgtggttca

SEQ ID NO: 199775 - DNA, 75 bp, synthetic construct
  source 1..75: mol_type = other DNA
tccgcgcgaaagccaggcggcaaagcttgatcttaactatgtctcactggacggtaacattggctgtatggtcaa

SEQ ID NO: 199776 - DNA, 75 bp, synthetic construct
  source 1..75: mol_type = other DNA
gcagccaggaacaccgctgctcgatccgatgtgtggttccggtacgttgctgattgaagcggcgatgctggcgac

SEQ ID NO: 199777 - DNA, 75 bp, synthetic construct
  source 1..75: mol_type = other DNA
ttaccgcctgtatgacgccgatctaccggaatataacgtcgctgtagaccgctatgccgactgggtggtggtgca

SEQ ID NO: 199778 - DNA, 75 bp, synthetic construct
  source 1..75: mol_type = other DNA
accctggcagccgcgattgtgatgcgatccggctggcagccaggaacaccactgctcgatccaatgtgtggttct

SEQ ID NO: 199779 - DNA, 75 bp, synthetic construct
  source 1..75: mol_type = other DNA
tgttcacgtccaattgccgaaggcgagaactggatggagcgtgaacgttatatcggtgtctccggcgtgttgctg

SEQ ID NO: 199780 - DNA, 75 bp, synthetic construct
  source 1..75: mol_type = other DNA
tttttcactaattcgacttcccgatcaggagaagtggagcggtgacggggccggactaaaggccatcactggcgg

SEQ ID NO: 199781 - DNA, 75 bp, synthetic construct
  source 1..75: mol_type = other DNA
caacggcgtgctcgataccaggacagggttttttagcctgcacgataagaagcactggttgcgtacgttgtgcga

SEQ ID NO: 199782 - DNA, 75 bp, synthetic construct
  source 1..75: mol_type = other DNA
cacataaaggtttcccggagcatatttgccatgagctgacttcagctcataaaatcggtggggtgatgttccgcc

SEQ ID NO: 199783 - DNA, 75 bp, synthetic construct
  source 1..75: mol_type = other DNA
cacacccaactggcggaattgccacacctgcgcattgttgataaaggccgtcggtttgctcgtgtctgtcaggcc

SEQ ID NO: 199784 - DNA, 75 bp, synthetic construct
  source 1..75: mol_type = other DNA
ccaacgcaccagataattattgctgctgaccgcgatctcaacggtgcggggcaaacaaggggcgaagctgctgcc

SEQ ID NO: 199785 - DNA, 75 bp, synthetic construct
  source 1..75: mol_type = other DNA
agaccgctttcgatttgatgaccaggaagggcggggaacgtggttctgtaaccagtgcggggcaggtgatggcct

SEQ ID NO: 199786 - DNA, 75 bp, synthetic construct
  source 1..75: mol_type = other DNA
ggtattttggctttgacatattaggggctattccatttcatcgtccaacaaaatgggtgcagtacagagaagaaa

SEQ ID NO: 199787 - DNA, 75 bp, synthetic construct
  source 1..75: mol_type = other DNA
tgctggccgcgacgaaacgtggtaaagctctggcagcacggttaagtgtgcaactgaatgcggcgctggtgaacg

SEQ ID NO: 199788 - DNA, 75 bp, synthetic construct
  source 1..75: mol_type = other DNA
agctctggcggcgcggttgagcgtgcaactgaatgcagccctggtaaacgatgctacaaaagttgacgtggttga

SEQ ID NO: 199789 - DNA, 75 bp, synthetic construct
  source 1..75: mol_type = other DNA
tctggcaatagcgatgggctatgaagcagtccgtgcaggtatcaaagtgaaccgccccgggtttcctggagagtg

SEQ ID NO: 199790 - DNA, 75 bp, synthetic construct
  source 1..75: mol_type = other DNA
gaaccggtggtgcggttgaatgtggaatcgcgcggcgatgtaccgctgatggaagaaaagacaaaacttatcctt

SEQ ID NO: 199791 - DNA, 75 bp, synthetic construct
  source 1..75: mol_type = other DNA
ccttggaagcggagcgcaagaactatcaggcacagttaagcaaagaagatcgcatttacgtcaaaaagtccattc

SEQ ID NO: 199792 - DNA, 75 bp, synthetic construct
  source 1..75: mol_type = other DNA
gacgaagtgaacctggccggagggtatcgctgtgtaatcaccaatctggcaaccaacaacgtctttgatatgttg

SEQ ID NO: 199793 - DNA, 75 bp, synthetic construct
  source 1..75: mol_type = other DNA
cagtgaaagatctgccggtgcatctgttcgaaacgatggggcagattcaggccaaaatcccaaccgaggtgctgg

SEQ ID NO: 199794 - DNA, 75 bp, synthetic construct
  source 1..75: mol_type = other DNA
accaggaaaacccgcctgcagacgtgcgcagccgcaaacctctgcgcgctgccaaagttgaggttatggatgtag

SEQ ID NO: 199795 - DNA, 75 bp, synthetic construct
  source 1..75: mol_type = other DNA
caacaccgaaccggtggtgcgcctgaatgtggaatctcgcggtgatgttcaggttatggtaatccatactcaaga

SEQ ID NO: 199796 - DNA, 75 bp, synthetic construct
  source 1..75: mol_type = other DNA
caacgtatttttttagatctcttagacgaactgccagaaagtgaagcggataacttattaaaaactcttgaagag

SEQ ID NO: 199797 - DNA, 75 bp, synthetic construct
  source 1..75: mol_type = other DNA
tcatcatcaacgaacacaacctccaattatgaaacaagggttctaacaccacgacaacgtatttttttagatctc

SEQ ID NO: 199798 - DNA, 75 bp, synthetic construct
  source 1..75: mol_type = other DNA
actctgggtatcgttggtgaatctggctcgggtaaatcgcaaactgcgtttgccttaatggggctgctggctgcc

SEQ ID NO: 199799 - DNA, 75 bp, synthetic construct
  source 1..75: mol_type = other DNA
gcgctggaggttgtaaagcaggcgatcccagcacttgccatggcctatgacttcaaggaagccttcttctgcatc

SEQ ID NO: 199800 - DNA, 75 bp, synthetic construct
  source 1..75: mol_type = other DNA
ataaagatggagatctctttatgaactccaacatatttcttaagggacaagcgcattctatcaatgccaaacaac

SEQ ID NO: 199801 - DNA, 75 bp, synthetic construct
  source 1..75: mol_type = other DNA
atgaatttagacgacaacaactcatcaaaattcgtgatgagaaatgcgatggtaaagcggttaacgtggccagaa

SEQ ID NO: 199802 - DNA, 75 bp, synthetic construct
  source 1..75: mol_type = other DNA
atgtctttacaggaagaggaactcgtttccagtcatgccgggcagcctgagcaggcatcgtcgctgcttgatcaa

SEQ ID NO: 199803 - DNA, 75 bp, synthetic construct
  source 1..75: mol_type = other DNA
gagataggcagtggtgatgcttatccggggcgctggctggctattaaccctggaaccgctgccgggacgttacct

SEQ ID NO: 199804 - DNA, 75 bp, synthetic construct
  source 1..75: mol_type = other DNA
cacgcttgagtttgctgcgtttccgacgattctgttgtttaccacgttgttgcgtctggcacttaatgtggcttc

SEQ ID NO: 199805 - DNA, 75 bp, synthetic construct
  source 1..75: mol_type = other DNA
ttcggacagtttggcggtgaacccatcgctgccgtgctgggcgcttatgagttcaaaaataccgcacctgacatg

SEQ ID NO: 199806 - DNA, 75 bp, synthetic construct
  source 1..75: mol_type = other DNA
cgtttattcatctggattcggacagtttggtggggaacccatcgccgccgtactgggcgcttacgagttcaaaaa

SEQ ID NO: 199807 - DNA, 75 bp, synthetic construct
  source 1..75: mol_type = other DNA
cagcctttttctctgcaaactcggtacaaaaaccgaagcactttccgggaaaagacgcagaaaccaactataagc

SEQ ID NO: 199808 - DNA, 75 bp, synthetic construct
  source 1..75: mol_type = other DNA
cgtggcccgtgccgcaggttcctggcgatccattccggcaaaggactttttgttctacgccaacgccggggacga

SEQ ID NO: 199809 - DNA, 75 bp, synthetic construct
  source 1..75: mol_type = other DNA
atggggtgcgttggggttactgaaggggcgattcctttcgccgcagccgatccgttacgtgtaattccttccatc

SEQ ID NO: 199810 - DNA, 75 bp, synthetic construct
  source 1..75: mol_type = other DNA
gtgctatgcaggctggggtggtctgattgtgctgccggtggttgaaggcaagctgggttatatcgcagcagtggc

SEQ ID NO: 199811 - DNA, 75 bp, synthetic construct
  source 1..75: mol_type = other DNA
gtggggggtaaaggcatcgtcgttccggcagcgtggggcatgtttaccttccgcttaccgccgatgacctcgccg

SEQ ID NO: 199812 - DNA, 75 bp, synthetic construct
  source 1..75: mol_type = other DNA
taccgccgatgacctcgccgcgtagcctggacggcgaccgcaaaatggtgagtgattccctgcgcgtactggaac

SEQ ID NO: 199813 - DNA, 75 bp, synthetic construct
  source 1..75: mol_type = other DNA
accgtccgcagttctacttccgtactactgacgtgactggtaccatcgaactgccggaaggcgtagagatggtaa

SEQ ID NO: 199814 - DNA, 75 bp, synthetic construct
  source 1..75: mol_type = other DNA
caaaaccgcacgttaacgtaggtactatcggccacgttgaccaaggtaaaactacactgaccgctgcaatcacga

SEQ ID NO: 199815 - DNA, 75 bp, synthetic construct
  source 1..75: mol_type = other DNA
tctgtgcgcttgcgctttataaaaatccttaccgggaacattcgtaacgttttaaagcactatgatgagacgctc

SEQ ID NO: 199816 - DNA, 75 bp, synthetic construct
  source 1..75: mol_type = other DNA
ggggtgatgagccgtctgcaggcgctctatctgcgcgagcagggctttaacaatgtgaaggtgtatcgcccgtaa

SEQ ID NO: 199817 - DNA, 75 bp, synthetic construct
  source 1..75: mol_type = other DNA
acccaggaagatgtgctgtcgctgatctctggtggtttcgactctggcgtttccagttatatgctgatgcgccgc

SEQ ID NO: 199818 - DNA, 75 bp, synthetic construct
  source 1..75: mol_type = other DNA
gtactactgacgtgactggtaccatcgaactgccggaaggtgtagagatggtaatgccgggcgacaatatcaaaa

SEQ ID NO: 199819 - DNA, 75 bp, synthetic construct
  source 1..75: mol_type = other DNA
cgccaggcgctggacgctgcgggctttaaagatacggcgattatgtcgtattcgaccaagttcgcctcttccttt

SEQ ID NO: 199820 - DNA, 75 bp, synthetic construct
  source 1..75: mol_type = other DNA
gtggaaagaagatggcctcgtcgcccgcatgtcccgcatctgcaaagagaccgtgccggaaatggtggttatgtc

SEQ ID NO: 199821 - DNA, 75 bp, synthetic construct
  source 1..75: mol_type = other DNA
gccgcctgcgcaagtcacctgcactgcgcgctatgtttgaagagacaaccctgaccttaaacgatctggtgttgc

SEQ ID NO: 199822 - DNA, 75 bp, synthetic construct
  source 1..75: mol_type = other DNA
cgcagttctacttccgtactactgacgtgactggtaccatcgaactgccggaaggcgtagagatggtaatgccgg

SEQ ID NO: 199823 - DNA, 75 bp, synthetic construct
  source 1..75: mol_type = other DNA
tatcggccacgttgaccagggtaaaactacactgaccgctgcaatcacaaccgtactggctaaaacctacggcgg

SEQ ID NO: 199824 - DNA, 75 bp, synthetic construct
  source 1..75: mol_type = other DNA
tatcggccacgttgaccacggtaaaactacgctgaccgctgcaatcaccaccgtactggctaaaacctacggcgg

SEQ ID NO: 199825 - DNA, 75 bp, synthetic construct
  source 1..75: mol_type = other DNA
gaaaaagctcgtggtatcaccatcaacacttctcacgttgaatatgacaccccgacccgtcactacgcgcacgta

SEQ ID NO: 199826 - DNA, 75 bp, synthetic construct
  source 1..75: mol_type = other DNA
tatcggccacgttgaccagggtaaaactacgctgaccgctgcaatcacgaccgtactggctaaaacctacggcgg

SEQ ID NO: 199827 - DNA, 75 bp, synthetic construct
  source 1..75: mol_type = other DNA
tatcggccacgttgaccagggtaaaactaccctgaccgctgcaatcaccaccgtactggctaaaacctacggcgg

SEQ ID NO: 199828 - DNA, 75 bp, synthetic construct
  source 1..75: mol_type = other DNA
caaaaccgcacgttaacgtcggtactatcggccacgttgaccagggtaaaaccacgctgaccgctgcaatcacta

SEQ ID NO: 199829 - DNA, 75 bp, synthetic construct
  source 1..75: mol_type = other DNA
atgataaagcagtccaggaaatcgtccgcatcccccgggaatgacaacggtcagggtgttgattacggtagtgga

SEQ ID NO: 199830 - DNA, 75 bp, synthetic construct
  source 1..75: mol_type = other DNA
acaacactgaccgctgcaatcactaccgtactggctaaaacctacggcggtgctgctcgtgcattcgaccagatc

SEQ ID NO: 199831 - DNA, 75 bp, synthetic construct
  source 1..75: mol_type = other DNA
tatcggccacgttgaccaaggtaaaaccacactgaccgctgcaatcactaccgtactggctaaaacctacggcgg

SEQ ID NO: 199832 - DNA, 75 bp, synthetic construct
  source 1..75: mol_type = other DNA
caaaaccgcacgttaacgtgggtactatcggccacgttgaccagggtaaaaccaccctgaccgctgcaatcacta

SEQ ID NO: 199833 - DNA, 75 bp, synthetic construct
  source 1..75: mol_type = other DNA
gacgaagaaaatacaatctctgtaggttcttctactaaccaacgccgtattactaacgttgccgcaggtaaaaat

SEQ ID NO: 199834 - DNA, 75 bp, synthetic construct
  source 1..75: mol_type = other DNA
accgcctacaacatggacgcaccgcagaactctgtcggtgaattctcagtcggtagtgcggatggtcaacgtggg

SEQ ID NO: 199835 - DNA, 75 bp, synthetic construct
  source 1..75: mol_type = other DNA
gattcactggctgtcggtgaagactcgctggcaatgggtgcgaaaaccattgttaatggtgatgcagggatcggt

SEQ ID NO: 199836 - DNA, 75 bp, synthetic construct
  source 1..75: mol_type = other DNA
ctgatggttctatcgactatagcaatatcaccctcggtggtggcaacggcggtacgactcgtatcagcaacgtct

SEQ ID NO: 199837 - DNA, 75 bp, synthetic construct
  source 1..75: mol_type = other DNA
agacggtcaacgtcagatcacaaacgtcgcagctggttcagcggataccgatgcggttaacgtgggtcagttgaa

SEQ ID NO: 199838 - DNA, 75 bp, synthetic construct
  source 1..75: mol_type = other DNA
acgatgccgtggcgacgaataccaccaatatcgccactaacaccaccaacatctctaatctgactgagacggtga

SEQ ID NO: 199839 - DNA, 75 bp, synthetic construct
  source 1..75: mol_type = other DNA
actacactgaccgctgcaatcacgaccgtactggctaaaacctacggcggtgctgctcgtgcattcgaccagatc

SEQ ID NO: 199840 - DNA, 75 bp, synthetic construct
  source 1..75: mol_type = other DNA
agattgaagcggaagaagagaagttcgacttcagcattctcgataaagtggttgaggaagcgaataacgttgata

SEQ ID NO: 199841 - DNA, 75 bp, synthetic construct
  source 1..75: mol_type = other DNA
ggtgtccagtcagacgctgatcaacctgcgcctgattgataacgtctctgacacgctgatcctgcgtccgctgat

SEQ ID NO: 199842 - DNA, 75 bp, synthetic construct
  source 1..75: mol_type = other DNA
cgtctggaagctctgcgtgcagtgaacccgaacattcgtgacgacgaactgaccgccattgagagcaaccgtcag

SEQ ID NO: 199843 - DNA, 75 bp, synthetic construct
  source 1..75: mol_type = other DNA
accttcaagacaatctctaagtagtcatgtcaaggtttcggattgttttaattctaaaaagaagactctcaagtt

SEQ ID NO: 199844 - DNA, 75 bp, synthetic construct
  source 1..75: mol_type = other DNA
accactctgaccgctgcaatcacaaccgtactggctaaaacctacggcggtgctgctcgtgcattcgaccagatc

SEQ ID NO: 199845 - DNA, 75 bp, synthetic construct
  source 1..75: mol_type = other DNA
gttctactccaccatgggtttcctggtgcgtaagggcaacccgaaaaatatccacgactggaacgatctggtgcg

SEQ ID NO: 199846 - DNA, 75 bp, synthetic construct
  source 1..75: mol_type = other DNA
ctccgacgtgaagctgatttttccgaacccgaaaacctccggtaacgcgcgttacacctatttagccgcgtgggg

SEQ ID NO: 199847 - DNA, 75 bp, synthetic construct
  source 1..75: mol_type = other DNA
cgataccaacctgatcgccttcgccatgaacctgttcgatattatcggtatcaatcaggacgatcgcggcgacaa

SEQ ID NO: 199848 - DNA, 75 bp, synthetic construct
  source 1..75: mol_type = other DNA
gatgcctataaagacaaagcgcgtaaggcagcgattgataacgcgattcatcaggcgcaggaactggcgaacggc

SEQ ID NO: 199849 - DNA, 75 bp, synthetic construct
  source 1..75: mol_type = other DNA
tggaaacactggaagaacagcttattattatcgttgataagtatatctctaaacgataccagccgaacgataaaa

SEQ ID NO: 199850 - DNA, 75 bp, synthetic construct
  source 1..75: mol_type = other DNA
ttctatcctaaaaaaatttattccaaatcaaatcgtaacatagacaatgtcatggcaatgtttagctctgtatac

SEQ ID NO: 199851 - DNA, 75 bp, synthetic construct
  source 1..75: mol_type = other DNA
cgaactggatacgggtgatctgctggttccggtgaaaaaggttgaggcacttggttatcttgaagttgccatgcg

SEQ ID NO: 199852 - DNA, 75 bp, synthetic construct
  source 1..75: mol_type = other DNA
cacccagcctgattacgattaccaggatggtaaaagtattctgaaaggctaccgggcggtgagaacggtggaagt

SEQ ID NO: 199853 - DNA, 75 bp, synthetic construct
  source 1..75: mol_type = other DNA
ctatcagcccagcccaatggtgcggatgatgaaagccgatgccgcgccggtgtccgcccaggaaacttacgagca

SEQ ID NO: 199854 - DNA, 75 bp, synthetic construct
  source 1..75: mol_type = other DNA
tttcccttgcctgtgatgcgccgcgcaggggcggaaaacagcgatatgatgatttcctcagcgtggtacacttcc

SEQ ID NO: 199855 - DNA, 75 bp, synthetic construct
  source 1..75: mol_type = other DNA
atgaaaaatatcgttcctgattaccgtcttgatatggtgggcgaaccctgcccttatccggcagtcgcaaccctt

SEQ ID NO: 199856 - DNA, 75 bp, synthetic construct
  source 1..75: mol_type = other DNA
atgaaaaatatcgttcctgattaccgtcttgatatggtgggcgaaccctgcccttatccagcggtcgctactctt

SEQ ID NO: 199857 - DNA, 75 bp, synthetic construct
  source 1..75: mol_type = other DNA
ttcgcggtgtccgacactgtgttggtgatgaataaaggtcacatcatgcagattggctcaccgcaggatctctat

SEQ ID NO: 199858 - DNA, 75 bp, synthetic construct
  source 1..75: mol_type = other DNA
gttcccggcaaccttcagcgacggatacgttgatatctacggctatcatctgccgcgcccgctgcactttggtac

SEQ ID NO: 199859 - DNA, 75 bp, synthetic construct
  source 1..75: mol_type = other DNA
ttatttctccggagatccgaaaaccccaggttacggatcttcctctccccccacacaacgccacctcctgtcagc

SEQ ID NO: 199860 - DNA, 75 bp, synthetic construct
  source 1..75: mol_type = other DNA
agaaacaggcagaagttaaagagctaaaagctaaacgtgataaaacacgctctttcagcgtagtcgctaaagctt

SEQ ID NO: 199861 - DNA, 75 bp, synthetic construct
  source 1..75: mol_type = other DNA
atgggcaaaaccgaccgcagcgccaacccttcgccgggcaacaaaaatggcggactcgcgaacgtggtaaagaaa

SEQ ID NO: 199862 - DNA, 75 bp, synthetic construct
  source 1..75: mol_type = other DNA
ggagcaccggcgtcgatcaccagcttcgtggtgccgaccggttactcttttaaccttgatggttcgacgctgtat

SEQ ID NO: 199863 - DNA, 75 bp, synthetic construct
  source 1..75: mol_type = other DNA
aaaaacaggctgatgaaaaaactctgcaggaaaagcgggataaaacccgttcgttccgtgtcgtcgccagaagct

SEQ ID NO: 199864 - DNA, 75 bp, synthetic construct
  source 1..75: mol_type = other DNA
tcccagggcagccgtgcgctgatatggattattggcgcactcttactcagccttattgtggcaatggtcatgaag

SEQ ID NO: 199865 - DNA, 75 bp, synthetic construct
  source 1..75: mol_type = other DNA
atgggcaaaaccgaccgcagcgccaacccttcgccgggcaacaaaaagggcggactcgctaacgtggtaaagaaa

SEQ ID NO: 199866 - DNA, 75 bp, synthetic construct
  source 1..75: mol_type = other DNA
atgggcaaaaccgaccgcagcgccaacccttcgccgggcaacaaaaacggcggtctcgccaacgtggtaaagaaa

SEQ ID NO: 199867 - DNA, 75 bp, synthetic construct
  source 1..75: mol_type = other DNA
cagtggtgggctgatttccttgatgctaacagcaacgatatggtcaggccgtttgagtttgcttcaaataaataa

SEQ ID NO: 199868 - DNA, 75 bp, synthetic construct
  source 1..75: mol_type = other DNA
ccttgaccagcgccgactgatgctccagtggtgggctgacttccttgatgccaatcgaaacgatatggtcaggcc

SEQ ID NO: 199869 - DNA, 75 bp, synthetic construct
  source 1..75: mol_type = other DNA
gtaagcacttcgttcccctttgtaagcaggccatgaagatactcaaagagatccgacaactgacttatgaagaag

SEQ ID NO: 199870 - DNA, 75 bp, synthetic construct
  source 1..75: mol_type = other DNA
tcttgagcagcgaaggttgatgctacagtggtgggcagattttcttgatgcaaaccgggatgggatggtcaggcc

SEQ ID NO: 199871 - DNA, 75 bp, synthetic construct
  source 1..75: mol_type = other DNA
cgtggacttaccacactggcgattaaactcaatctgttgattttcattcgttccagtgaactccgctatgcacga

SEQ ID NO: 199872 - DNA, 75 bp, synthetic construct
  source 1..75: mol_type = other DNA
atgagtgaaaacaccatcaataaagcgctgcgtaagatgggctatgatacgaagcaagacatctgtggacacggc

SEQ ID NO: 199873 - DNA, 75 bp, synthetic construct
  source 1..75: mol_type = other DNA
ataactattataaattaattaattatccaatcatgatggttcatgatgaatggctaggtgatttaaccggtgtca

SEQ ID NO: 199874 - DNA, 75 bp, synthetic construct
  source 1..75: mol_type = other DNA
gttatctgtctggagattcaactctgtttcctcacaggagctctgttatggcaggtaaagttacggaagccgctg

SEQ ID NO: 199875 - DNA, 75 bp, synthetic construct
  source 1..75: mol_type = other DNA
taaacgttggtttgggagaagcggcaaaacggaatgtgggcaacggggaaaaccaaatccctgatatgtctttct

SEQ ID NO: 199876 - DNA, 75 bp, synthetic construct
  source 1..75: mol_type = other DNA
cggagaggtgacaccggaggcagaacggcaggtgaaacgtctgttatggcaggtgaggggctatgaatggacacc

SEQ ID NO: 199877 - DNA, 75 bp, synthetic construct
  source 1..75: mol_type = other DNA
aggcgtgacggaattcagcggcacgttgtatgttcctgaggtttcctggcagtggcagccctgcgctgtgcggat

SEQ ID NO: 199878 - DNA, 75 bp, synthetic construct
  source 1..75: mol_type = other DNA
agtcgctgttgtcacaggagaatggcagacaacatattgccggtgcctgggtgacatccctgagtgatgtttggg

SEQ ID NO: 199879 - DNA, 75 bp, synthetic construct
  source 1..75: mol_type = other DNA
gcaatccgtgaaggcggccgtaccgttggcgcgggcgttgtagcaaaagttctggacaccccgacccgtcactac

SEQ ID NO: 199880 - DNA, 75 bp, synthetic construct
  source 1..75: mol_type = other DNA
cgggcaccatcaagcctcacaccaagttcgaatctgaagtgtacattctgtccaaagatgaaggcggccgtcata

SEQ ID NO: 199881 - DNA, 75 bp, synthetic construct
  source 1..75: mol_type = other DNA
cgtcagcatgttatggaatgatagttagtcatgtggggcatacaccttcaggcgcaggaatcctgtcggcttctg

SEQ ID NO: 199882 - DNA, 75 bp, synthetic construct
  source 1..75: mol_type = other DNA
cgccgcgtctggcgcaggttgacccgcccgctcagccgacaatggaaactcaggatcggatagaaactgaaaata

SEQ ID NO: 199883 - DNA, 75 bp, synthetic construct
  source 1..75: mol_type = other DNA
aaggcgacgcagagtgggaagcgaaaatcctggaactggctggcttcctggattcttatattccggaaccagagc

SEQ ID NO: 199884 - DNA, 75 bp, synthetic construct
  source 1..75: mol_type = other DNA
tcgacgaagcacactctgccataaacaattcaatgataaacttactcgcacagggtcgtgccgctcaaattgcat

SEQ ID NO: 199885 - DNA, 75 bp, synthetic construct
  source 1..75: mol_type = other DNA
acgtctcccgcgagctgtttgcagccctgaataccccgtttgaacagcagtgggcaaaagataacggcggcgaca

SEQ ID NO: 199886 - DNA, 75 bp, synthetic construct
  source 1..75: mol_type = other DNA
gtacggaaaaagccgcaaaagcctacctgaactggctctacagcccgcaggcgcaaaccatcatcaccgactatt

SEQ ID NO: 199887 - DNA, 75 bp, synthetic construct
  source 1..75: mol_type = other DNA
ttgtcacttataaccaggtgaccgacgtacaaatcctgcacgacaaaggcaagctgatcccggcggactggcaaa

SEQ ID NO: 199888 - DNA, 75 bp, synthetic construct
  source 1..75: mol_type = other DNA
tgacccacaagatagatacaatgattattcatgatattaaacgggagatgccattgaaatacgggttatacaggg

SEQ ID NO: 199889 - DNA, 75 bp, synthetic construct
  source 1..75: mol_type = other DNA
acgccgcccatgcccgcacgagtcgctatttttctgataccacaaaagagcggtatcatcagtgcacaaacatca

SEQ ID NO: 199890 - DNA, 75 bp, synthetic construct
  source 1..75: mol_type = other DNA
cgggtcatcaaaacaggcgctggcgattttacagggcttaaaagccgacgttgtcacttataaccaggtgactga

SEQ ID NO: 199891 - DNA, 75 bp, synthetic construct
  source 1..75: mol_type = other DNA
acagtataccactcactgaatactcagctgaattactgacttcccataaagttaaggaggcaatttcatgcttcc

SEQ ID NO: 199892 - DNA, 75 bp, synthetic construct
  source 1..75: mol_type = other DNA
acttgacgcatccggctcaatgagtggccagttcagtaagggcaacgttcagtctgtgctggaccgcatcgccgt

SEQ ID NO: 199893 - DNA, 75 bp, synthetic construct
  source 1..75: mol_type = other DNA
actgaatcatatcttttgcatgttaaagaatatctggaaaagcgctttgataaacatatggaagaggcaggtaaa

SEQ ID NO: 199894 - DNA, 75 bp, synthetic construct
  source 1..75: mol_type = other DNA
cgcccggaagccatcaccttaagcaatcacggcgaagagagtcagcgttgtgttattcgccatgtcgcttacatg

SEQ ID NO: 199895 - DNA, 75 bp, synthetic construct
  source 1..75: mol_type = other DNA
atgagcttaagatactacataaaaaatattttatttggcctgtactgcacacttatatatatataccttataaca

SEQ ID NO: 199896 - DNA, 75 bp, synthetic construct
  source 1..75: mol_type = other DNA
atgagtttaagatactacataaaaaatattttgtttggcctatactgcgcacttatatatatatatcttataaca

SEQ ID NO: 199897 - DNA, 75 bp, synthetic construct
  source 1..75: mol_type = other DNA
ctgctgcgtggtatcaaacgtgaagaaatcgaacgtggtcaggtactggctaagccgggcaccatcaagccgcac

SEQ ID NO: 199898 - DNA, 75 bp, synthetic construct
  source 1..75: mol_type = other DNA
gccacgttttgtgcgcaatacctccgatcgctttgaagcgcgtttcagcctggttgaagtgacccaaagcccgtc

SEQ ID NO: 199899 - DNA, 75 bp, synthetic construct
  source 1..75: mol_type = other DNA
tttagatgatgcagagcagttgtttgcccaccatcaaccgactccggtcaccagcgttgatttgctggggcaggg

SEQ ID NO: 199900 - DNA, 75 bp, synthetic construct
  source 1..75: mol_type = other DNA
gccgatccgggcctgaatgtgaaactgtcgttcgatatcaacgaagatgtggcagcaccgtatattgccactggc

SEQ ID NO: 199901 - DNA, 75 bp, synthetic construct
  source 1..75: mol_type = other DNA
cgaccggttccggcggcgaaattcgcgatgaaggcgccaccgggcgcggcgcgaagccgaaagccggtctggttg

SEQ ID NO: 199902 - DNA, 75 bp, synthetic construct
  source 1..75: mol_type = other DNA
agcgagttgtggccacgttttgtgcgtaacacctccgatcgctttgaagcgcgtttcagcctggttgaagtgacc

SEQ ID NO: 199903 - DNA, 75 bp, synthetic construct
  source 1..75: mol_type = other DNA
gcgaagccgaaagccggcctggttggattctccgtttccaacctgcgtattccaggctttgaacagccgtgggaa

SEQ ID NO: 199904 - DNA, 75 bp, synthetic construct
  source 1..75: mol_type = other DNA
atggaacaaaaaacattatcagctgaaccccgcaggtcattttcaaatgattttaaacttcaaatggttaaactg

SEQ ID NO: 199905 - DNA, 75 bp, synthetic construct
  source 1..75: mol_type = other DNA
aaatggctcaggctctggcagaacgaagggcgtgtttcgcggcgtcttccggtaacgacctcttctgacactggc

SEQ ID NO: 199906 - DNA, 75 bp, synthetic construct
  source 1..75: mol_type = other DNA
cggcaggaagaatgcccgccggtcagcagactcaccggctggttccgctctccgacgcctggtacgtcagccagc

SEQ ID NO: 199907 - DNA, 75 bp, synthetic construct
  source 1..75: mol_type = other DNA
cgccgaagatgacccgcgatgtacaaacgctgaaagcgaaaggcgacgcgctggcccgtgaagggatcaccattg

SEQ ID NO: 199908 - DNA, 75 bp, synthetic construct
  source 1..75: mol_type = other DNA
acgacctgaaaggccagccgtgcggcgaggtgacaccacaggaacaacaggacgcagaaacgcggctggtggcgc

SEQ ID NO: 199909 - DNA, 75 bp, synthetic construct
  source 1..75: mol_type = other DNA
ttacggcacgccgcagaaaacgacgcaggcggcgcaggagcaggataaaaccacatcggcgcataaagtgatgcc

SEQ ID NO: 199910 - DNA, 75 bp, synthetic construct
  source 1..75: mol_type = other DNA
gatgatgagcacgcacaacttgaacgcctgctgaaatatggcccggcactcgccagccacgccccgcaaggcaaa

SEQ ID NO: 199911 - DNA, 75 bp, synthetic construct
  source 1..75: mol_type = other DNA
gcgtttcagcctggttgaagtgacccaaagcccgtcgctgctgttgcaggggatggtgggctcgcaaatgccgat

SEQ ID NO: 199912 - DNA, 75 bp, synthetic construct
  source 1..75: mol_type = other DNA
agttaccgctgtttgacgaactgtgtaagcgtgagcgcgcaccctacgcggtgattggcgaggccaccgaagaat

SEQ ID NO: 199913 - DNA, 75 bp, synthetic construct
  source 1..75: mol_type = other DNA
gcaatacctccgatcgctttgaagcgcgtttcagcttggttgaagtgacccaaagcccgtcgctgctgttgcagg

SEQ ID NO: 199914 - DNA, 75 bp, synthetic construct
  source 1..75: mol_type = other DNA
cctggcactggcggaagatgaaattgactatctgcaggatgctttcacaaagcttggtcgtaacccgaacgacat

SEQ ID NO: 199915 - DNA, 75 bp, synthetic construct
  source 1..75: mol_type = other DNA
cggtttctcctatggcgacgtattgggcgcaggtgaaggttgggcgaagtctattctgttcaacaaccgtgtacg

SEQ ID NO: 199916 - DNA, 75 bp, synthetic construct
  source 1..75: mol_type = other DNA
ctgactggacgcacgggcctggaggatttccacgccctggtcgcgtgcggtggtttctcctacggtgatgtgctg

SEQ ID NO: 199917 - DNA, 75 bp, synthetic construct
  source 1..75: mol_type = other DNA
gccgcaacacagattggcgatatcaaacgcattaaactttccgccaactggatggcggcggcaggccaccctggt

SEQ ID NO: 199918 - DNA, 75 bp, synthetic construct
  source 1..75: mol_type = other DNA
gaaacgggccgctacgatttccatcaggaaccggcgcacatcctgatgaaagtcgaaacccacaaccacccaacg

SEQ ID NO: 199919 - DNA, 75 bp, synthetic construct
  source 1..75: mol_type = other DNA
tgctgattgcgtccattatgttgggcaggcggtttccggtgaccgttttgtgattaccgccaacgggcagactgt

SEQ ID NO: 199920 - DNA, 75 bp, synthetic construct
  source 1..75: mol_type = other DNA
ctgacgcggtgaagcgtgtgttacatctgccgactgtggcggagaaaacctttctggtgaccatcggcgatcgca

SEQ ID NO: 199921 - DNA, 75 bp, synthetic construct
  source 1..75: mol_type = other DNA
agtacaaacgctgaaagcgaagggtgatgcgctggttcgtgaagggattaccattgctgacgcggtgaaacgcgt

SEQ ID NO: 199922 - DNA, 75 bp, synthetic construct
  source 1..75: mol_type = other DNA
atcgatctgccgctggacgtcctgcttggtaaaacgccgaagatgacccgcgatgtacaaacgctgaaagcgaag

SEQ ID NO: 199923 - DNA, 75 bp, synthetic construct
  source 1..75: mol_type = other DNA
agtcagtgaaacggcgagtggtatgcctgatccgacgttgcctgagcttcctgatggcacgctcagggccgacgg

SEQ ID NO: 199924 - DNA, 75 bp, synthetic construct
  source 1..75: mol_type = other DNA
gaggtctacacgaaggtgtttgcgctggatgtcgcggcgcgtcatcgtgtgcagttcgccatgccggaagccgat

SEQ ID NO: 199925 - DNA, 75 bp, synthetic construct
  source 1..75: mol_type = other DNA
tcgatgtggcggcccgacatcgtgtccagttccagatgcccggctccgatgcagtggctatgcttaaaggtcaaa

SEQ ID NO: 199926 - DNA, 75 bp, synthetic construct
  source 1..75: mol_type = other DNA
agagtattacattgttttcggggcgggtaatgactccaacttattgatagtgttttatgttcagataatgcccga

SEQ ID NO: 199927 - DNA, 75 bp, synthetic construct
  source 1..75: mol_type = other DNA
atgtcaggctccgttatacacagccagtctgcagtcatggtaccggcagtgtattctgccggacagtctgtgcaa

SEQ ID NO: 199928 - DNA, 75 bp, synthetic construct
  source 1..75: mol_type = other DNA
tgtcgccatagactacccagcagcgctggcacttcgccagatggctctcgttcagggcgaactcccgaaatacct

SEQ ID NO: 199929 - DNA, 75 bp, synthetic construct
  source 1..75: mol_type = other DNA
atgtggctgcacggcaccgggtgcagtttttgatgcctgagtctgatgctattgcgatgctgaaacaattatcct

SEQ ID NO: 199930 - DNA, 75 bp, synthetic construct
  source 1..75: mol_type = other DNA
cttaaattacagttggttataaggatttccttaactgcttctcctcaccatcatgttattttcgccacatcataa

SEQ ID NO: 199931 - DNA, 75 bp, synthetic construct
  source 1..75: mol_type = other DNA
gcagaatcaaaactctgaacacccggcgggtgaatgtcctgaagggtgaacagcgtcgggtcagtggtagtgccc

SEQ ID NO: 199932 - DNA, 75 bp, synthetic construct
  source 1..75: mol_type = other DNA
atgattcgtgttgcttgtgtaggtattaccgtgatggatcgtatttattacgtggaaggattaccgacggagagc

SEQ ID NO: 199933 - DNA, 75 bp, synthetic construct
  source 1..75: mol_type = other DNA
tggcggatgtgcgttggcatgacggggcgaaaaaagcgttcaccctggcgcggcaggcaggcgtgataactgtac

SEQ ID NO: 199934 - DNA, 75 bp, synthetic construct
  source 1..75: mol_type = other DNA
cgtggaagggttgccgacggagagcggtaaatacgtggcgaaaaattatacggaagttggcggcgggccagcggc

SEQ ID NO: 199935 - DNA, 75 bp, synthetic construct
  source 1..75: mol_type = other DNA
gactcaccggctggttccgctctccgactcctggtacgtcagccagctgcagacgatggtggccacactgaaaat

SEQ ID NO: 199936 - DNA, 75 bp, synthetic construct
  source 1..75: mol_type = other DNA
ggggcataagtccatcagctcaacggaggtctacacgaaggtgtttgcactggatgtggctgcacggcaccgagt

SEQ ID NO: 199937 - DNA, 75 bp, synthetic construct
  source 1..75: mol_type = other DNA
acctgctcgcccctgaagtgagtgccctgctccattacgtcccggatctgcgccgcaagatgctgctggccacac

SEQ ID NO: 199938 - DNA, 75 bp, synthetic construct
  source 1..75: mol_type = other DNA
gtattctgccggacagcctgcatcgctgcctgttgccattgattatccggctgctctggcactccgccagatgtc

SEQ ID NO: 199939 - DNA, 75 bp, synthetic construct
  source 1..75: mol_type = other DNA
cacgctgaaaatcccactggagcgcagaaacaaacgaaccggaagaatggagaaggcgcgcatctggggaatcac

SEQ ID NO: 199940 - DNA, 75 bp, synthetic construct
  source 1..75: mol_type = other DNA
gtttgtgcaactggccacgctgaagcaacgtgccgagaaggctgccagaacagcaggacgtctgcccgcctgcag

SEQ ID NO: 199941 - DNA, 75 bp, synthetic construct
  source 1..75: mol_type = other DNA
caggacagagaaagcgcggatctgggaagtgacggacagaacggtcaggacctggattggggaggcggttgccgc

SEQ ID NO: 199942 - DNA, 75 bp, synthetic construct
  source 1..75: mol_type = other DNA
atgaataacctggttccagttggatctccgtcatctcccggaacattgcttccggtggccatcgattaccctgcc

SEQ ID NO: 199943 - DNA, 75 bp, synthetic construct
  source 1..75: mol_type = other DNA
cactatgtcccggatctgcaccgcaagatgctgctggcaacactctggaacaccggtgcacgtattaacgaagct

SEQ ID NO: 199944 - DNA, 75 bp, synthetic construct
  source 1..75: mol_type = other DNA
gaggtctatacgaaggtgtttgctctggatgtggctgcacggcaccgggtgcagttttcgatgcctgagtccgat

SEQ ID NO: 199945 - DNA, 75 bp, synthetic construct
  source 1..75: mol_type = other DNA
actggatgtggctgcgcggcaccgggtgctgtttgcgatgcctgagtccgatgcagtgtctatgctcaaaagaat

SEQ ID NO: 199946 - DNA, 75 bp, synthetic construct
  source 1..75: mol_type = other DNA
ccatttgtgcagcttgcgaccctgaaacaacggaccgaaaagacagccagaacggcaggaagatcgccggccggt

SEQ ID NO: 199947 - DNA, 75 bp, synthetic construct
  source 1..75: mol_type = other DNA
atgggacataagtccatcagttcaactgaagtctacacgaaggtgtttgcgctggatgtagctgcacggcaccgg

SEQ ID NO: 199948 - DNA, 75 bp, synthetic construct
  source 1..75: mol_type = other DNA
caaaaccgcacgttaacgtaggtactatcggccacgttgaccagggtaaaaccactctgaccgctgcaatcacga

SEQ ID NO: 199949 - DNA, 75 bp, synthetic construct
  source 1..75: mol_type = other DNA
caaaaccgcacgttaacgtaggtactatcggccacgttgaccatggtaaaaccacgctgaccgctgcaatcacga

SEQ ID NO: 199950 - DNA, 75 bp, synthetic construct
  source 1..75: mol_type = other DNA
tatcggccacgttgaccacggtaaaacaactctgaccgctgcaatcaccaccgtactggctaaaacctacggcgg

SEQ ID NO: 199951 - DNA, 75 bp, synthetic construct
  source 1..75: mol_type = other DNA
caaaaccgcacgttaacgtgggtactatcggccacgttgaccaaggtaaaaccactctgaccgctgcaatcacga

SEQ ID NO: 199952 - DNA, 75 bp, synthetic construct
  source 1..75: mol_type = other DNA
tatcggccacgttgaccatggtaaaaccaccctgaccgctgcaatcacaaccgtactggctaaaacctacggcgg

SEQ ID NO: 199953 - DNA, 75 bp, synthetic construct
  source 1..75: mol_type = other DNA
tatcggccacgttgaccatggtaaaacaacgctgaccgctgcaatcacgaccgtactggctaaaacctacggcgg

SEQ ID NO: 199954 - DNA, 75 bp, synthetic construct
  source 1..75: mol_type = other DNA
tatcggccacgttgaccatggtaaaacaaccctgaccgctgcaatcaccaccgtactggctaaaacctacggcgg

SEQ ID NO: 199955 - DNA, 75 bp, synthetic construct
  source 1..75: mol_type = other DNA
tgctcgtgaagcggtgagtggtatgccggacccgatgctgccggaggtgtccagaggtcatggcagagcggacga

SEQ ID NO: 199956 - DNA, 75 bp, synthetic construct
  source 1..75: mol_type = other DNA
gataacgcgccggaagaaaaggctcgtggtatcaccatcaacacttctcacattgaatacgacaccccgacccgt

SEQ ID NO: 199957 - DNA, 75 bp, synthetic construct
  source 1..75: mol_type = other DNA
tatcggccacgttgaccatggtaaaacgacgctgaccgctgcaatcacaaccgtactggctaaaacctacggcgg

SEQ ID NO: 199958 - DNA, 75 bp, synthetic construct
  source 1..75: mol_type = other DNA
tatcggccacgttgaccacggtaaaaccactctgaccgctgcaatcacaaccgtactggctaaaacctacggcgg

SEQ ID NO: 199959 - DNA, 75 bp, synthetic construct
  source 1..75: mol_type = other DNA
gtgaagaagttgaaatcgttggtaatcaaagagactcagaagtctacctgtactggcgttgaaatgttccgcaaa

SEQ ID NO: 199960 - DNA, 75 bp, synthetic construct
  source 1..75: mol_type = other DNA
ctcagtacgacttcccgggcgacgacactccgatcgttcgtggttctgctctgaaagcgctggaaggcgacgcag

SEQ ID NO: 199961 - DNA, 75 bp, synthetic construct
  source 1..75: mol_type = other DNA
ataatctgaacggcattatcgccgcagattgtcagcaggtggatgaaaccatgctgccgaaacgcacctggtgga

SEQ ID NO: 199962 - DNA, 75 bp, synthetic construct
  source 1..75: mol_type = other DNA
ctcagtacgacttcccgggtgacgacactccgatcgttcgtggttctgctttgaaagcgctggaaggcgacgcag

SEQ ID NO: 199963 - DNA, 75 bp, synthetic construct
  source 1..75: mol_type = other DNA
tatcggccacgttgaccagggtaaaacgactctgaccgctgcaatcacaaccgtactggctaaaacctacggcgg

SEQ ID NO: 199964 - DNA, 75 bp, synthetic construct
  source 1..75: mol_type = other DNA
tatcggccacgttgaccagggtaaaacaactctgaccgctgcaatcacgaccgtactggctaaaacctacggcgg

SEQ ID NO: 199965 - DNA, 75 bp, synthetic construct
  source 1..75: mol_type = other DNA
cagacttcatcgccccttctgccgcgatggatggtcaggtacaggcgattcgccaggcgctggacgctgcgggct

SEQ ID NO: 199966 - DNA, 75 bp, synthetic construct
  source 1..75: mol_type = other DNA
gtggtatcactatcaacacttctcacgttgaatacgacaccccgacccgtcactacgcgcacgtagactgcccgg

SEQ ID NO: 199967 - DNA, 75 bp, synthetic construct
  source 1..75: mol_type = other DNA
atgctaaccgcccagaagaagatattttcactggctggcatgtcgccaaaatccagcaatatgacggcaaaatca

SEQ ID NO: 199968 - DNA, 75 bp, synthetic construct
  source 1..75: mol_type = other DNA
caagattatcgtgacctgaacgaccagtttgatcgtattgtttctgtggggatgttcgagcacgtcggaccgaaa

SEQ ID NO: 199969 - DNA, 75 bp, synthetic construct
  source 1..75: mol_type = other DNA
ccgtatcgccaacgaattacttagccgtgccggtatagccattaacggttctgccccggcggatattcgtgtgaa

SEQ ID NO: 199970 - DNA, 75 bp, synthetic construct
  source 1..75: mol_type = other DNA
accagaccacacgtaaaccatcacggcgcataccgtggcagcacatgacaaaagagcaacgaaaaaaccacagac

SEQ ID NO: 199971 - DNA, 75 bp, synthetic construct
  source 1..75: mol_type = other DNA
atggctgtgcttcgtacgttaccgggcagaatcaaaactctgaacacccgacgggtgaatattctgaagggtgaa

SEQ ID NO: 199972 - DNA, 75 bp, synthetic construct
  source 1..75: mol_type = other DNA
acatggcgtctaactatgacgtaagtgtggtgggtgtcaccatttctgctgaacagcagaaaatggctcaggatc

SEQ ID NO: 199973 - DNA, 75 bp, synthetic construct
  source 1..75: mol_type = other DNA
ctgaatgcttgcgctggtgctttccgcgcccgcgatattcagctctggcaagtggtgttctcacgtgggatcgaa

SEQ ID NO: 199974 - DNA, 75 bp, synthetic construct
  source 1..75: mol_type = other DNA
attcgttaatgatgatctgttcccgaccctgaaaaacctgaccgccccgatcgataaaaatccgcgaggctttgt

SEQ ID NO: 199975 - DNA, 75 bp, synthetic construct
  source 1..75: mol_type = other DNA
cggcattgaagtgccagtgcaaattcgtcacgacaacactctgaacaaaccgctttcctcccgggatgagcaact

SEQ ID NO: 199976 - DNA, 75 bp, synthetic construct
  source 1..75: mol_type = other DNA
ggcgaaggcgttaaaaccaaaatcaaaaagctgcttaccgaagagtgcaacctgcatactatcgtgcgtttaccg

SEQ ID NO: 199977 - DNA, 75 bp, synthetic construct
  source 1..75: mol_type = other DNA
ttgagcagtcatgaactgaacgggcgattaagcgaactcttaagtcatattcctcttgaggtgatggcaacctgt

SEQ ID NO: 199978 - DNA, 75 bp, synthetic construct
  source 1..75: mol_type = other DNA
gggaagaagcgttaaccattattgataaacggttgggcgtgcagttaccgaaagatgaagtgggctttggtaatg

SEQ ID NO: 199979 - DNA, 75 bp, synthetic construct
  source 1..75: mol_type = other DNA
cagcagaagcccacaggggcgacaccgtggcggcatatgaccaaacggcagcgaaaaaaccgcagacgcgttaac

SEQ ID NO: 199980 - DNA, 75 bp, synthetic construct
  source 1..75: mol_type = other DNA
tgctcgtgaagcggcgggtggtatgccggacccgacgctgccggaggtagtggcagagcggacgacatcatcgga

SEQ ID NO: 199981 - DNA, 75 bp, synthetic construct
  source 1..75: mol_type = other DNA
caaaaccgcacgttaacgtaggtactatcggccacgttgaccaaggtaaaacaacactgaccgctgcaatcacta

SEQ ID NO: 199982 - DNA, 75 bp, synthetic construct
  source 1..75: mol_type = other DNA
gcggataaatgtcctgaagggggaacagcgtcgtgtcagtggcagtgcccgggtttccctcaagcgtcgtatctg

SEQ ID NO: 199983 - DNA, 75 bp, synthetic construct
  source 1..75: mol_type = other DNA
ttggcgttccgttcttctggccctccgctgcaatgccaaatactgtaatcgacagctggtccggtatggtgtttt

SEQ ID NO: 199984 - DNA, 75 bp, synthetic construct
  source 1..75: mol_type = other DNA
tatcggccacgttgaccatggtaaaacaacactgaccgctgcaatcacaaccgtactggctaaaacctacggcgg

SEQ ID NO: 199985 - DNA, 75 bp, synthetic construct
  source 1..75: mol_type = other DNA
caaaaccgcacgttaacgtcggtactatcggccacgttgaccaaggtaaaacaactctgaccgctgcaatcacaa

SEQ ID NO: 199986 - DNA, 75 bp, synthetic construct
  source 1..75: mol_type = other DNA
acaaacttttctcagtttgccgggaatataggcggaggtgcgggacacgcaattaactttcatgatggcatcgcc

SEQ ID NO: 199987 - DNA, 75 bp, synthetic construct
  source 1..75: mol_type = other DNA
caaatactgtaatcgacagctggtccagtatggtgtttttgaagttcaacggggcgaaattttctgcctctgatt

SEQ ID NO: 199988 - DNA, 75 bp, synthetic construct
  source 1..75: mol_type = other DNA
ggtccagtatggtgtttttgaagttcaacggcgcgaaattctctgccactgattaccctgtgctggcgaaagtgt

SEQ ID NO: 199989 - DNA, 75 bp, synthetic construct
  source 1..75: mol_type = other DNA
ttgtgttcaaagtcgacaaaccactgaatgcagcctttccttcagataccagcgtctcagcgttaatcattggac

SEQ ID NO: 199990 - DNA, 75 bp, synthetic construct
  source 1..75: mol_type = other DNA
atacctgatatgggtagcttcacgctttctgtttcaggtactggatatcaaaaattaccatcaggttttattctt

SEQ ID NO: 199991 - DNA, 75 bp, synthetic construct
  source 1..75: mol_type = other DNA
agaaggcgcggcacgaccagctgcttaccgcgcttcgtgcgctgctgttaagtcgcaagaatccgtttggtgata

SEQ ID NO: 199992 - DNA, 75 bp, synthetic construct
  source 1..75: mol_type = other DNA
ctctgccaggtaaggtattcagcggtaagctggcagccattagtccagccgttcccggcgagcttatcagtcgac

SEQ ID NO: 199993 - DNA, 75 bp, synthetic construct
  source 1..75: mol_type = other DNA
ggtgctatttcgactggacccgacgcgttatcaggcgcgggtggatcggctgatggcggatatcgttaccgcaga

SEQ ID NO: 199994 - DNA, 75 bp, synthetic construct
  source 1..75: mol_type = other DNA
cgggagctgctggcagaataaggtgaagccggaactgttggtggtcacttttggcaaaggatttggcgtcagcgg

SEQ ID NO: 199995 - DNA, 75 bp, synthetic construct
  source 1..75: mol_type = other DNA
cgtctggctggaaggccaaaagctgctgcgtgagggttactatcctggcatgaagtacgatctggagttgaaaga

SEQ ID NO: 199996 - DNA, 75 bp, synthetic construct
  source 1..75: mol_type = other DNA
agcttctgactggcgacgatgagttttgcggcaccataggtaaggactatgcaaaatgcagaagtaccgaacctt

SEQ ID NO: 199997 - DNA, 75 bp, synthetic construct
  source 1..75: mol_type = other DNA
ctacaagagcgcattctcgacggcaatgagtttggggttattgagcgccgcaagcgtctttgtgttgttgcgctt

SEQ ID NO: 199998 - DNA, 75 bp, synthetic construct
  source 1..75: mol_type = other DNA
cgcagcaggccggtattgatcagtcgcatccggcgctgcaacgctggtatgcctcaatccatgaaacgcagaacg

SEQ ID NO: 199999 - DNA, 75 bp, synthetic construct
  source 1..75: mol_type = other DNA
gacagggcgatcgattcgctgaataccccggaaaatctcgatgtgctttccggcgtgtttgccccggaactacaa

SEQ ID NO: 200000 - DNA, 75 bp, synthetic construct
  source 1..75: mol_type = other DNA
gtcggtgatggtggcgctgggaaaagcgattgatgcaggtgaccatgatgcggcctctcgtctgttcggcaaatt

SEQ ID NO: 200001 - DNA, 75 bp, synthetic construct
  source 1..75: mol_type = other DNA
ttgatggtcgacgatgcccatggtacgggcgttattggagagcaaggacgcgggagctgctggcagaataaggtg

SEQ ID NO: 200002 - DNA, 75 bp, synthetic construct
  source 1..75: mol_type = other DNA
gcatccggcgctgcaatgctggtatgcctcgatccatgaaacgcagaacgatcgcgaagtcgtcagtttgtatgc

SEQ ID NO: 200003 - DNA, 75 bp, synthetic construct
  source 1..75: mol_type = other DNA
cgatgaagtgcaggaagaagaagggcaagttgaagcggtagtagatgccgcattgcgtccgaaacgcagtctgtg

SEQ ID NO: 200004 - DNA, 75 bp, synthetic construct
  source 1..75: mol_type = other DNA
gagaacgtgcctgagtaccagaacactgcttcgatggaagtgatccgttcggtactctcttcgttgggttactcc

SEQ ID NO: 200005 - DNA, 75 bp, synthetic construct
  source 1..75: mol_type = other DNA
tcagcggaaaatatacagttcacttatgattttataaaaaatgaaaaaggaatgttttttgcaaccacctatggc

SEQ ID NO: 200006 - DNA, 75 bp, synthetic construct
  source 1..75: mol_type = other DNA
gcgggggcggagatggttctgtcgctgagcggtatgggggccattgataatgccggggatgatgagcatgaggcg

SEQ ID NO: 200007 - DNA, 75 bp, synthetic construct
  source 1..75: mol_type = other DNA
gtcgccattctggcaggcattgtctgtggctgcctcactgcgttaatccaggcattctggcaaggagcgcccgat

SEQ ID NO: 200008 - DNA, 75 bp, synthetic construct
  source 1..75: mol_type = other DNA
gcgtctggatcctgattcgtattctgaaagatgagctgattctggcgtactccactgccagctctgaaagcgtac

SEQ ID NO: 200009 - DNA, 75 bp, synthetic construct
  source 1..75: mol_type = other DNA
ttgaagactctgcccaacagatttttcccgattattttcctgcagatgttcctccaaaagagtccttggatgctg

SEQ ID NO: 200010 - DNA, 75 bp, synthetic construct
  source 1..75: mol_type = other DNA
tgtagataactcacgagaaaacgggttgttatctccagagcaattacattcactatggccaaatataaagtgtat

SEQ ID NO: 200011 - DNA, 75 bp, synthetic construct
  source 1..75: mol_type = other DNA
ggtggatgattcgcagatctaccgtcaaaacaagatagcattaaggctattattgctaactgggtgcagggtggg

SEQ ID NO: 200012 - DNA, 75 bp, synthetic construct
  source 1..75: mol_type = other DNA
aggatgaagattggcgattacggcagcatgacattgaaagatgcacgctacgcggtggcagaatacaaagagcta

SEQ ID NO: 200013 - DNA, 75 bp, synthetic construct
  source 1..75: mol_type = other DNA
tcccacgggatcgacggttttgaacttgaaaaggttcagcctgttcgtaccaaggaaagccgcatccaggacatt

SEQ ID NO: 200014 - DNA, 75 bp, synthetic construct
  source 1..75: mol_type = other DNA
caggagccagtcagttcgtcattactgcgatgctggcggccgggagtagtttgtgggttgctgcactgaccgtga

SEQ ID NO: 200015 - DNA, 75 bp, synthetic construct
  source 1..75: mol_type = other DNA
atgctgcttgtgggctatattatttaaacgtagaaaatatagagtcattgtttaatgaaaatgataaacaagaat

SEQ ID NO: 200016 - DNA, 75 bp, synthetic construct
  source 1..75: mol_type = other DNA
ccatcgccaacaagccatacgacggtccaagcgagatagctgatcgtgatggcctgtcagccaggataagcccaa

SEQ ID NO: 200017 - DNA, 75 bp, synthetic construct
  source 1..75: mol_type = other DNA
gttgtgctggcatcacgataaccattaccggatgcgtggttttaatgagctgaaagaaacgctgcacaataatcg

SEQ ID NO: 200018 - DNA, 75 bp, synthetic construct
  source 1..75: mol_type = other DNA
tgctggggcaggctgcgttgctaatggaagcctcgacctgggtcgcctttgcttttggcggtattgtggcgatgt

SEQ ID NO: 200019 - DNA, 75 bp, synthetic construct
  source 1..75: mol_type = other DNA
cctgttgttgttgatcgtcgcaggcgtctggtcgctacaaccagcgcacatttctgtctctgcaccacccagctc

SEQ ID NO: 200020 - DNA, 75 bp, synthetic construct
  source 1..75: mol_type = other DNA
gacagggcgatcgcttcactcaataccccggaaaatctcgatgtgctttccggcgtgtttgccccggaactacaa

SEQ ID NO: 200021 - DNA, 75 bp, synthetic construct
  source 1..75: mol_type = other DNA
atcgatttttacacgccttgcgtaaagcggcacggcgcggggtgcggatcaaactgatcattcagggcgaaccgg

SEQ ID NO: 200022 - DNA, 75 bp, synthetic construct
  source 1..75: mol_type = other DNA
ctgcaatcgctaaaattacctgagtacatggactttgttgcttcccgtccatgctgtgggtgtggagcggcggga

SEQ ID NO: 200023 - DNA, 75 bp, synthetic construct
  source 1..75: mol_type = other DNA
atgctcagagaccatcatgcaacactagcaggattactgctgcttagtcacagtgccagcgccgtacaggctgac

SEQ ID NO: 200024 - DNA, 75 bp, synthetic construct
  source 1..75: mol_type = other DNA
atgaacaagaaaatttggtttatggaaggtttatcctcccagcgagatattattcagggggtaaaatcatttgca

SEQ ID NO: 200025 - DNA, 75 bp, synthetic construct
  source 1..75: mol_type = other DNA
atactgcgcaggatctcccggtactgggagcggataccattgttgtcctgaatggggaagtgttagagaaaccgc

SEQ ID NO: 200026 - DNA, 75 bp, synthetic construct
  source 1..75: mol_type = other DNA
atgatgaacacggaaggtaataacggtgacaaacctctgggactatggaatgtggtttccataggtatcggggcg

SEQ ID NO: 200027 - DNA, 75 bp, synthetic construct
  source 1..75: mol_type = other DNA
gtattagccttgcaactttaaatttaggtacatcagctgccggatatggtattggcatcggtactcctaagacgg

SEQ ID NO: 200028 - DNA, 75 bp, synthetic construct
  source 1..75: mol_type = other DNA
tgagatatattcaggcacactgactcctggtaacgcagctactctttgttctgatgtgactaacagtattacatt

SEQ ID NO: 200029 - DNA, 75 bp, synthetic construct
  source 1..75: mol_type = other DNA
ctctggctgaagctggcgtgaccattggtaacttcttcagtaatgacctgatgaccgcctatggtcgccgccagc

SEQ ID NO: 200030 - DNA, 75 bp, synthetic construct
  source 1..75: mol_type = other DNA
caggattggcagtatcgtaccagcgcagcaggaagggtacgtacttattggccttgatctcacatacagcgatgg

SEQ ID NO: 200031 - DNA, 75 bp, synthetic construct
  source 1..75: mol_type = other DNA
aagcgggtcaggccgtgaacaacctgcaaaaaatctttgatgacaagccggacagggcgatcgcttcactcaata

SEQ ID NO: 200032 - DNA, 75 bp, synthetic construct
  source 1..75: mol_type = other DNA
ttttgaatttgcgcagtcgcagtttgagcaccgaaaagagaatgatcagcgtacatatgatcttaatgtcaggaa

SEQ ID NO: 200033 - DNA, 75 bp, synthetic construct
  source 1..75: mol_type = other DNA
gtaggctatgctgcgaaagcgggtcaggccgtgaacaacctgcagaaaatctttgatgataagccggacagggcg

SEQ ID NO: 200034 - DNA, 75 bp, synthetic construct
  source 1..75: mol_type = other DNA
tcaaaaggccaggggggaacaggccagagatgatagtgcggcctctgcatctgagtttatccgtggtctgaaaca

SEQ ID NO: 200035 - DNA, 75 bp, synthetic construct
  source 1..75: mol_type = other DNA
gcgattgatgcaggtgaccatgatgcggcctctcgtctgttcggaaaattatcggatgccaaccccattaaaata

SEQ ID NO: 200036 - DNA, 75 bp, synthetic construct
  source 1..75: mol_type = other DNA
ggaagctgtcagtcaccgacatcaacctttatgaaaacactgtgagtctggacggtcagccctatccgctgtcgc

SEQ ID NO: 200037 - DNA, 75 bp, synthetic construct
  source 1..75: mol_type = other DNA
agtcaccgacatcaacctttatgaaaacactgtgagtctggacggtaagtcctatccgctgtcattcgctattaa

SEQ ID NO: 200038 - DNA, 75 bp, synthetic construct
  source 1..75: mol_type = other DNA
ttaacaaacgagctgaggctgagcgtatcgctaaagagctggcatctcagaaagagcgtatgcgtgaagagaaca

SEQ ID NO: 200039 - DNA, 75 bp, synthetic construct
  source 1..75: mol_type = other DNA
cagcaggaagggtacgtacttattggtcttgatctcacatacagcgatggctccaccgcgcataaacctgtaaca

SEQ ID NO: 200040 - DNA, 75 bp, synthetic construct
  source 1..75: mol_type = other DNA
attatcgaaatgcgtcacttgggctatctcagcagagactgcaactggaaaaatataaccagcgacggcttgagt

SEQ ID NO: 200041 - DNA, 75 bp, synthetic construct
  source 1..75: mol_type = other DNA
tgcgaggcaatggaaatgcttgaagctctggctgaagctggtgtagctattggcaacttcttcagtaatgacctg

SEQ ID NO: 200042 - DNA, 75 bp, synthetic construct
  source 1..75: mol_type = other DNA
aacacctttcctcacttatgaaactttaaaaggtggaaaacaggttacgatttggggtaaagacctgaaaaatca

SEQ ID NO: 200043 - DNA, 75 bp, synthetic construct
  source 1..75: mol_type = other DNA
ctggcaacgggttcaacaactggccgccgacgctcgtcaagggcctgtacggatgttaggcatacctctgccact

SEQ ID NO: 200044 - DNA, 75 bp, synthetic construct
  source 1..75: mol_type = other DNA
cggcaatagctggcgaaattgcgctgggcgtttttcgcccaacggcggtgtatggccctggcgacaaagagctaa

SEQ ID NO: 200045 - DNA, 75 bp, synthetic construct
  source 1..75: mol_type = other DNA
agctgcttgaacagtatcaccgtgccggacagcaacgactggccgccgtgcaacgggccatgcagcagggggccg

SEQ ID NO: 200046 - DNA, 75 bp, synthetic construct
  source 1..75: mol_type = other DNA
tgccgtataccatgatgataaagaagatcatcctcatgtacatgttaatattaaacttcgtgatgaagaaacagg

SEQ ID NO: 200047 - DNA, 75 bp, synthetic construct
  source 1..75: mol_type = other DNA
tgggcgtgatccgaaatctcctaagttatcgggaagacatatacatgccagtaaatcggcttttaatcataaagt

SEQ ID NO: 200048 - DNA, 75 bp, synthetic construct
  source 1..75: mol_type = other DNA
gggtcagtggttaagcgccgaaactgtacagacgcaaacctatgaattatgcgatggcgtcgccggcggctatga

SEQ ID NO: 200049 - DNA, 75 bp, synthetic construct
  source 1..75: mol_type = other DNA
gtgaattaacccatgccgactggtcggcaagtaataaccgtatttctgaagatattaattggtttcccgggatta

SEQ ID NO: 200050 - DNA, 75 bp, synthetic construct
  source 1..75: mol_type = other DNA
taggtgtattttctcctttagaggcaaggcgtgaaaatctttcaaaaattaatagactaagcgttgaagatattg

SEQ ID NO: 200051 - DNA, 75 bp, synthetic construct
  source 1..75: mol_type = other DNA
tggttaagcgccgaaactatacagacgcaaacctatgaattatgcgatggcgtcgccggcggctatgactggcaa

SEQ ID NO: 200052 - DNA, 75 bp, synthetic construct
  source 1..75: mol_type = other DNA
agagagcggcttttgccaacgttttctgtttatctcttcgctggcggcgcgccatcccgagctctcctggtatgc

SEQ ID NO: 200053 - DNA, 75 bp, synthetic construct
  source 1..75: mol_type = other DNA
tcaatgataatctcacctgggtgcgcggttcgctggaagatactcattcacttagcgagctggttgccggagcca

SEQ ID NO: 200054 - DNA, 75 bp, synthetic construct
  source 1..75: mol_type = other DNA
cggagtggcagaattactctgaaacggcaagtgtgcaacagcaaaactggagcgtgctggcgcgggctattgagc

SEQ ID NO: 200055 - DNA, 75 bp, synthetic construct
  source 1..75: mol_type = other DNA
tgatggtcgatgatgcccacggcacgggcgttatcggggagcaggggcgcggcagctgctggttgcaaaaggtaa

SEQ ID NO: 200056 - DNA, 75 bp, synthetic construct
  source 1..75: mol_type = other DNA
gactgcgcctgactttaaccacagctcatgaaacgcaggatatcgaccgtctggtggaggtgctgcatggcaaca

SEQ ID NO: 200057 - DNA, 75 bp, synthetic construct
  source 1..75: mol_type = other DNA
tccgggaatgtcagcggttatagcgtggtgcatcaggcgctggaagaacaactggccgagtggcttggctattcg

SEQ ID NO: 200058 - DNA, 75 bp, synthetic construct
  source 1..75: mol_type = other DNA
cgtgcagtgatcacagcttatacccgtaacttcaagcatttggcattaccaaccggaccccgcttttcgtttcgc

SEQ ID NO: 200059 - DNA, 75 bp, synthetic construct
  source 1..75: mol_type = other DNA
ctctccgcgatttttagatgcctctaagaaaacgacctttgataaaggagaagttttaagtttctttgaagccct

SEQ ID NO: 200060 - DNA, 75 bp, synthetic construct
  source 1..75: mol_type = other DNA
aagacttggttaactaatattgaagatgaatcaaataaattatttttagatttcatcgcattttcgatacttgaa

SEQ ID NO: 200061 - DNA, 75 bp, synthetic construct
  source 1..75: mol_type = other DNA
tggtggcggatgatcgccagtatctgaacttttcctgcaatgattacctcggcttaagccatcatccggacatca

SEQ ID NO: 200062 - DNA, 75 bp, synthetic construct
  source 1..75: mol_type = other DNA
tggtgcatcaggcactggaagaagagctggccgagtggcttggctattcgcgggcactgctgtttatctctggtt

SEQ ID NO: 200063 - DNA, 75 bp, synthetic construct
  source 1..75: mol_type = other DNA
tggcgcatcaggcgctggaagaagaactggccgagtggctgggctattcgcgggcactgctatttatctctggtt

SEQ ID NO: 200064 - DNA, 75 bp, synthetic construct
  source 1..75: mol_type = other DNA
cgttttcgtgccggagtacaggatttgccgtttacgcttgctgattcatgcagcgccatccagccattgatcgtc

SEQ ID NO: 200065 - DNA, 75 bp, synthetic construct
  source 1..75: mol_type = other DNA
cgcgtctgcttacagcctcctgtccggggcagcaactggtggtgacagaaggcgtgtttagcatggacggtgata

SEQ ID NO: 200066 - DNA, 75 bp, synthetic construct
  source 1..75: mol_type = other DNA
tggtggcagatggtcgccagtatctgaacttttccagtaacgattacctcggtttaagccatcatccgcacatca

SEQ ID NO: 200067 - DNA, 75 bp, synthetic construct
  source 1..75: mol_type = other DNA
atgctgattctgatttcacctgcgaaaacgcttgattatcaaagcccgttggctaccacgcgctatacgttgccg

SEQ ID NO: 200068 - DNA, 75 bp, synthetic construct
  source 1..75: mol_type = other DNA
ggccgaaaccttcaacgaagacgatttcgattttgcccaacagcatttgcggatgctttccggcctgtacggcgt

SEQ ID NO: 200069 - DNA, 75 bp, synthetic construct
  source 1..75: mol_type = other DNA
tgccgcgaacctgaacaccattcgccttgtcaccacacctgcaacagatacccgtgacgccatcatggaaagtga

SEQ ID NO: 200070 - DNA, 75 bp, synthetic construct
  source 1..75: mol_type = other DNA
gcaatctgcgtttgattaatcgcatcgccacgctgtatggcattgaactgggatattacagccgtttgcgcctgt

SEQ ID NO: 200071 - DNA, 75 bp, synthetic construct
  source 1..75: mol_type = other DNA
tgcgccgcttgaattgaataagtcttttacacctgcatcgacggcattaagtaaaaatagtgaaacgcttggtca

SEQ ID NO: 200072 - DNA, 75 bp, synthetic construct
  source 1..75: mol_type = other DNA
aatagaggtaaagaatattatctgttcttggatgaggtgcaaaggaatctgaatgttatttattctgcgtatcgt

SEQ ID NO: 200073 - DNA, 75 bp, synthetic construct
  source 1..75: mol_type = other DNA
gacacaaaggccatgataattgcgtcctatcctgccgaacagcgtgaagccgtctccgccgcgctgaagctggaa

SEQ ID NO: 200074 - DNA, 75 bp, synthetic construct
  source 1..75: mol_type = other DNA
ctggccctaccggtgcatacgaatattttgcgaagagtgccagcggaaaagttgcagatgccagggcaaccagcc

SEQ ID NO: 200075 - DNA, 75 bp, synthetic construct
  source 1..75: mol_type = other DNA
atccggcgaaaaaaacgatcgccccggacaccgccccccgtctcatgcagagaaaaaattcctgtttcaggccag

SEQ ID NO: 200076 - DNA, 75 bp, synthetic construct
  source 1..75: mol_type = other DNA
tcggaaccccttaacgttatcgctcaaaccatgtcgtttcgtgaaatgctgttacgccagcgggttaacgagggg

SEQ ID NO: 200077 - DNA, 75 bp, synthetic construct
  source 1..75: mol_type = other DNA
gggattgccgagaaacagtatcaacgccatccgtcactgaatgactaccgccgcctgatcccctcgctaatgtga

SEQ ID NO: 200078 - DNA, 75 bp, synthetic construct
  source 1..75: mol_type = other DNA
ctggttatcaccgaagcaacgcagaccacaccggcggtaatggaaagtgacgccgcgttccggatgcgcatacag

SEQ ID NO: 200079 - DNA, 75 bp, synthetic construct
  source 1..75: mol_type = other DNA
atcgcctggcgcaatctgcgtttaattaatcgcatcgccacgctgtatggcattgaactggggtattacagccgt

SEQ ID NO: 200080 - DNA, 75 bp, synthetic construct
  source 1..75: mol_type = other DNA
caggcatcgacagctttgagattggtcagatggtggggcgtcagctaccgtttatgaccattatcgtgctgttct

SEQ ID NO: 200081 - DNA, 75 bp, synthetic construct
  source 1..75: mol_type = other DNA
gatctcggtgaaaaccgggcagtttgacatcatccgctcgtctattctttcgataacccctgaccagcgcctgca

SEQ ID NO: 200082 - DNA, 75 bp, synthetic construct
  source 1..75: mol_type = other DNA
agctcaaactgaaaggatacgtcgccgcctcatggacggtggcaatcgcccttgccgtggctttgctgttctata

SEQ ID NO: 200083 - DNA, 75 bp, synthetic construct
  source 1..75: mol_type = other DNA
tgaccgctaccgtaacactgtggagtatcccgccgtttaaagccctgttcgcttctggcggcgcgctttatgaat

SEQ ID NO: 200084 - DNA, 75 bp, synthetic construct
  source 1..75: mol_type = other DNA
cggttacacggcaggtcaggtgctgcgcgcctggacaccgttcctgttcctgaccgccaccgtaacgctgtggag

SEQ ID NO: 200085 - DNA, 75 bp, synthetic construct
  source 1..75: mol_type = other DNA
aaatgccggtcgccaacgcgctggcctccgtgatttatggcttcttctacggtttgtggcccattgcctggatta

SEQ ID NO: 200086 - DNA, 75 bp, synthetic construct
  source 1..75: mol_type = other DNA
ggtttacgggactgaagcggggctaccgtctggcagagctggttatgatgcatgtgatcttacccagcaatagtg

SEQ ID NO: 200087 - DNA, 75 bp, synthetic construct
  source 1..75: mol_type = other DNA
tgtgcgggagtcagatgcgttttacggggctgaagcggagctaccgtctggcagagctggtcctgatgcatgagc

SEQ ID NO: 200088 - DNA, 75 bp, synthetic construct
  source 1..75: mol_type = other DNA
gattgccgttagcccactggcgctggtggatatggcgtttatcgcctggcgcaatctgcgtttgattaatcgcat

SEQ ID NO: 200089 - DNA, 75 bp, synthetic construct
  source 1..75: mol_type = other DNA
ggtttgtggcccatcgcgtggatcattattgcagcggtgttcgtctataagatctcggtgaaaaccgggcagttt

SEQ ID NO: 200090 - DNA, 75 bp, synthetic construct
  source 1..75: mol_type = other DNA
cgagatcctgacgccaatgctggcatggtatgaccgccgcggtgaagagtacctggcaacgcttagtgaggcaga

SEQ ID NO: 200091 - DNA, 75 bp, synthetic construct
  source 1..75: mol_type = other DNA
ttagccagccgtacactgtgtctggacgtgcgcaaaggtgaatggtcagcgaaagcagcggcattgttacatatc

SEQ ID NO: 200092 - DNA, 75 bp, synthetic construct
  source 1..75: mol_type = other DNA
aatcctgtcactggcgctgagcttgctgaaggagaaccgagcctgtacatagatttgtgtaattgcctgattttg

SEQ ID NO: 200093 - DNA, 75 bp, synthetic construct
  source 1..75: mol_type = other DNA
ccggcgaaagtgtacgaaagccaggacgacgcggtagaagcgattctcggcggcaaagttgtcgcgggcgatgtg

SEQ ID NO: 200094 - DNA, 75 bp, synthetic construct
  source 1..75: mol_type = other DNA
aaacgctggaacaatacgacattgtcgtgactcaggatgacgcggtgaaaagcatgttccgcgcaggcccggctg

SEQ ID NO: 200095 - DNA, 75 bp, synthetic construct
  source 1..75: mol_type = other DNA
gtagtaattcgctatgaaggcccgaaaggcggtccggggatgcaggaaatgctctacccaaccagtttcctgaaa

SEQ ID NO: 200096 - DNA, 75 bp, synthetic construct
  source 1..75: mol_type = other DNA
gcattcgtactacacaggcattctcgcaggattgccgttgggattctctcgatgacgatcgcgcaaatggctgca

SEQ ID NO: 200097 - DNA, 75 bp, synthetic construct
  source 1..75: mol_type = other DNA
gatgacgatcgcgcaaacggctgtatccgctcgctggaacacgcctacagcaaagacggcggcctggcggtgctc

SEQ ID NO: 200098 - DNA, 75 bp, synthetic construct
  source 1..75: mol_type = other DNA
aaacgctggaacaatacgacgttatgctgacccaggatgacgcggtaaaaaatatgttccgcgcaggccctgcgg

SEQ ID NO: 200099 - DNA, 75 bp, synthetic construct
  source 1..75: mol_type = other DNA
taagtttgacattacacatgatagtagagatgagaatattaatatcttgatttctgtcatttatgacttggataa

SEQ ID NO: 200100 - DNA, 75 bp, synthetic construct
  source 1..75: mol_type = other DNA
gctgaccggcggcttacatcgatattcgatgggggggcatgaccgcgttaagttgcatgatctcgaccatcgttg

SEQ ID NO: 200101 - DNA, 75 bp, synthetic construct
  source 1..75: mol_type = other DNA
gctaaaacagacaaaattaaagttgatattatcagtgaggaacatgataaacgtattgctgaaaactacgtcttt

SEQ ID NO: 200102 - DNA, 75 bp, synthetic construct
  source 1..75: mol_type = other DNA
gctgattccgttgagtatatggtcaacgctcactgcgccgatgccatggtttgcatctctaactgcgacaaaatc

SEQ ID NO: 200103 - DNA, 75 bp, synthetic construct
  source 1..75: mol_type = other DNA
gtatcctcggggaactggatcgcgcgggattactgaatcgcaatgtgaaaaacgtgctcggtctgacgttgccgc

SEQ ID NO: 200104 - DNA, 75 bp, synthetic construct
  source 1..75: mol_type = other DNA
tacgcctgaatattccggtgatctttgtttccggtggtccgatggaggccggaaaaaccaaactgtccgatcaga

SEQ ID NO: 200105 - DNA, 75 bp, synthetic construct
  source 1..75: mol_type = other DNA
cggttcctgctccgggatgtttactgctaactcaatgaactgcctgaccgaagcactgggcctgtcgcagccggg

SEQ ID NO: 200106 - DNA, 75 bp, synthetic construct
  source 1..75: mol_type = other DNA
tcttcatcatccacaaacaaagatattaaatcgctcaattttgatgtgaagttaccgcttaatgtcgtcacagaa

SEQ ID NO: 200107 - DNA, 75 bp, synthetic construct
  source 1..75: mol_type = other DNA
tgtggatgttgagcacggtccgttgcccatcacaatgttaatgcgtggtaatgtcatccccgcactggcagcggc

SEQ ID NO: 200108 - DNA, 75 bp, synthetic construct
  source 1..75: mol_type = other DNA
acgcaaattcagcctggtgtcgaaaagtttattaaagattttaacgatgctaaaaagaaaggtgaacatgcctac

SEQ ID NO: 200109 - DNA, 75 bp, synthetic construct
  source 1..75: mol_type = other DNA
acgtcgatgatggcgtgcaggatatccagaatgatgtcaatcaattggctgacagtctcgaatctgtattgaagt

SEQ ID NO: 200110 - DNA, 75 bp, synthetic construct
  source 1..75: mol_type = other DNA
atgtgtatctaccttaacttaatgattttgataaaaatcattaggggattcatcagtgcagagtatggaaagttt

SEQ ID NO: 200111 - DNA, 75 bp, synthetic construct
  source 1..75: mol_type = other DNA
gcaaaaaccaggctggatcgcgtaaaagacaaagattatatcaatgtcaatctgacctacgaacttgataagtta

SEQ ID NO: 200112 - DNA, 75 bp, synthetic construct
  source 1..75: mol_type = other DNA
agagtgcgcctgcagcctgatatggaacatcttcttgccgggctcatcgctattgatgctgccagagctgccgtg

SEQ ID NO: 200113 - DNA, 75 bp, synthetic construct
  source 1..75: mol_type = other DNA
gtattctcggcgaactggatcgtgcggggttactgaaccgtgatgtgaaaaacgtacttggcctgacgttgccgc

SEQ ID NO: 200114 - DNA, 75 bp, synthetic construct
  source 1..75: mol_type = other DNA
ctgtatctccaactgcgacaaaatcacccctgggatgttgatggcttccctgcgattaaatattccggtgatctt

SEQ ID NO: 200115 - DNA, 75 bp, synthetic construct
  source 1..75: mol_type = other DNA
aagggtttactgttgattattccaatggcttcggtgatggaatggatgcttatgaggaaaacatccgcgctgctg

SEQ ID NO: 200116 - DNA, 75 bp, synthetic construct
  source 1..75: mol_type = other DNA
gcaggggcagaagccaagccaaatcgatataaaaaaggagaaaactattttctgtggcctgataacctagcatta

SEQ ID NO: 200117 - DNA, 75 bp, synthetic construct
  source 1..75: mol_type = other DNA
ccacagcgatgctccggctatcgggcggatcacttctggtcaggatttgctggcgcaggcacgcacactcagtga

SEQ ID NO: 200118 - DNA, 75 bp, synthetic construct
  source 1..75: mol_type = other DNA
agcccctggcgtacgggtttatgacgcaggatgacctgatgaagcgttttttaagtgtggcgacagattttgcgc

SEQ ID NO: 200119 - DNA, 75 bp, synthetic construct
  source 1..75: mol_type = other DNA
gatctcggtaaaaaccgggcagtttgacatcatccgttcgtccattctttcgataacccctgaccagcgcctgca

SEQ ID NO: 200120 - DNA, 75 bp, synthetic construct
  source 1..75: mol_type = other DNA
cccattctcgtcgcaggccaggttaccgggctggacagctttgaaatcggtcagatggttggtcgtcagttaccc

SEQ ID NO: 200121 - DNA, 75 bp, synthetic construct
  source 1..75: mol_type = other DNA
gtggcggactttgccagaactaacgggatatcactcatcccggtatcggttgacggacaggttgcggcctcgctg

SEQ ID NO: 200122 - DNA, 75 bp, synthetic construct
  source 1..75: mol_type = other DNA
cacggcgtatatgaagatgcagaacttctggaccagtcaggccagccgtttcagcgcggtggctaccaaatccct

SEQ ID NO: 200123 - DNA, 75 bp, synthetic construct
  source 1..75: mol_type = other DNA
cgatagtgggctggcactggtataacgaacctcagaaacaggatgaggaggaaacgccgccaccggccactgttc

SEQ ID NO: 200124 - DNA, 75 bp, synthetic construct
  source 1..75: mol_type = other DNA
attgatgcgcattgatacgggtcaccaaacggtggaaatcacccttgatgatgcctacaaacgttatcaagccgc

SEQ ID NO: 200125 - DNA, 75 bp, synthetic construct
  source 1..75: mol_type = other DNA
aagaaaatagatatacaggctgtattattttatgatgtgagccgttttggtcgttttcaaaatagtgatgaagct

SEQ ID NO: 200126 - DNA, 75 bp, synthetic construct
  source 1..75: mol_type = other DNA
ttggcgttaccacgttgctttatatctcgctggcgctggttttgcttagcgatgtatcggcattagagttagaaa

SEQ ID NO: 200127 - DNA, 75 bp, synthetic construct
  source 1..75: mol_type = other DNA
ccatttctgtttctgactgccacggtgacactctggagtcttcctccctttaaaacactgttcgcaccgggcggt

SEQ ID NO: 200128 - DNA, 75 bp, synthetic construct
  source 1..75: mol_type = other DNA
aatatttccagaaattacggctgaaatcgttgatacagacgccaatgatgcgaaggttgcagctatctccgctgg

SEQ ID NO: 200129 - DNA, 75 bp, synthetic construct
  source 1..75: mol_type = other DNA
atgcctacaaacgttatcaagcctcaccaaatccactggaagaagtggctacggatatgctgaaacagcttgcag

SEQ ID NO: 200130 - DNA, 75 bp, synthetic construct
  source 1..75: mol_type = other DNA
tgttgtaccttatggtaaaaaactacgtcgtcagtgcagcgatgatgaggggcgtatgattgatgaatggatatt

SEQ ID NO: 200131 - DNA, 75 bp, synthetic construct
  source 1..75: mol_type = other DNA
acaagaagcaggagtctatggtaacgaatcaaatattaacaagactgttcgtttcccaaatcgttttgagcaaga

SEQ ID NO: 200132 - DNA, 75 bp, synthetic construct
  source 1..75: mol_type = other DNA
gacacaatgtgctgatgcccttgctcaagcagaggaagcattcagcgctgaagagaaagcattctggcttgccaa

SEQ ID NO: 200133 - DNA, 75 bp, synthetic construct
  source 1..75: mol_type = other DNA
aaataaatccactaaactgaaaaacccttcttctcaaaacaccagagcgatgaagcgtgctcctgtgaggagtag

SEQ ID NO: 200134 - DNA, 75 bp, synthetic construct
  source 1..75: mol_type = other DNA
ctgaaccagaagaaatcgtattaccaaaaacacgctccggctcttcgactaatgaagtacaaagacccgtattgg

SEQ ID NO: 200135 - DNA, 75 bp, synthetic construct
  source 1..75: mol_type = other DNA
aagagccacagaacaagctgttcgtgatgctgccaagcaggaagcagttgaagtctacaaaacattcagcgaact

SEQ ID NO: 200136 - DNA, 75 bp, synthetic construct
  source 1..75: mol_type = other DNA
aaagcagcagtagctttagataatgaagaaaaagcgctatggcttgctaaagccactgaaacgaaccgccctgca

SEQ ID NO: 200137 - DNA, 75 bp, synthetic construct
  source 1..75: mol_type = other DNA
cccctgttctggttgttcctgaaccaaatgcatccactaaactgaaaaccccatctcttcaaaacaccagagcga

SEQ ID NO: 200138 - DNA, 75 bp, synthetic construct
  source 1..75: mol_type = other DNA
tgactacccggcaacagaagagcagcaacctgttcttacaacatctgaaccacacagaagaccagccgtaaaatc

SEQ ID NO: 200139 - DNA, 75 bp, synthetic construct
  source 1..75: mol_type = other DNA
actgccagaagaactttgttgataagggaatgattgccgatatcgcatttcatgatttagacggtaaaaatcccc

SEQ ID NO: 200140 - DNA, 75 bp, synthetic construct
  source 1..75: mol_type = other DNA
agtggcgttgatggacgatcactgggcgacggttggctccagtaatctcgatccgctcagtttgtcgctgaatct

SEQ ID NO: 200141 - DNA, 75 bp, synthetic construct
  source 1..75: mol_type = other DNA
gatgagaatcaaagagctgttttggttgcaccagctcctcatactcgtatgcgtggcgttaaatcttaccgtgat

SEQ ID NO: 200142 - DNA, 75 bp, synthetic construct
  source 1..75: mol_type = other DNA
agccgctgaaacaaaccgtcctccaatgaagcgtatccatagtgccaaatggcgtagtaaagcagcacaagagca

SEQ ID NO: 200143 - DNA, 75 bp, synthetic construct
  source 1..75: mol_type = other DNA
ggctaaacaggattacgcggtacgcctcgaagggccgattgtcgaagatattctccagtttgagctggaaaacct

SEQ ID NO: 200144 - DNA, 75 bp, synthetic construct
  source 1..75: mol_type = other DNA
atgtgctggtcgatggcgatgaagccgggaagaagtatgccgctacggtgcgcagcctgttgaataacgatcggg

SEQ ID NO: 200145 - DNA, 75 bp, synthetic construct
  source 1..75: mol_type = other DNA
acttctggtccggtaacgtgctaagtccggccaaactccgcgacaagtggacccagctcgaaatcaaccgtaaca

SEQ ID NO: 200146 - DNA, 75 bp, synthetic construct
  source 1..75: mol_type = other DNA
ataatctgaacggcattattgccgcagatcaaatgtcatcatccacgatcgtcattttaaccagacgctgcgcga

SEQ ID NO: 200147 - DNA, 75 bp, synthetic construct
  source 1..75: mol_type = other DNA
aagccgaacgagaacatttaacggcgttaccggcgctggatatggaacattttatgtatcgccagggattttccg

SEQ ID NO: 200148 - DNA, 75 bp, synthetic construct
  source 1..75: mol_type = other DNA
cagaatcgagattagttcgagggtttgcaaacagggtatggccttcacatgtaccgacgataaaaaaggggaatt

SEQ ID NO: 200149 - DNA, 75 bp, synthetic construct
  source 1..75: mol_type = other DNA
ctatacaggaagcgatagttatattaaatcgccaatatcatctccgacattacatgatatttctattcgggcaaa

SEQ ID NO: 200150 - DNA, 75 bp, synthetic construct
  source 1..75: mol_type = other DNA
caacgggagagaacatcatctgcatattattttgaccttccgcgagtcgctgccaggccgacatcgggttcgccg

SEQ ID NO: 200151 - DNA, 75 bp, synthetic construct
  source 1..75: mol_type = other DNA
gagtgcggaagacggcagcgtgatgacactccgcagttttctcgataaagacggacatccgattgatgtcgagga

SEQ ID NO: 200152 - DNA, 75 bp, synthetic construct
  source 1..75: mol_type = other DNA
cattcgttttaatcgtccgtcatcgctgtttgcacgctgctggctgctggtggaaggggaaacagaaacctgggt

SEQ ID NO: 200153 - DNA, 75 bp, synthetic construct
  source 1..75: mol_type = other DNA
ttttttcgtctcatcgcaatgaaagaaatgagatcttgtcagtctccgatttttcaatgctcgaaccaaaaagtg

SEQ ID NO: 200154 - DNA, 75 bp, synthetic construct
  source 1..75: mol_type = other DNA
ttaactaaaaaacaggcatggacagagcttaatcataaatggaatgataattttttcattcgctatgataaaata

SEQ ID NO: 200155 - DNA, 75 bp, synthetic construct
  source 1..75: mol_type = other DNA
tgtcatggcggaaaccgcgcaactggttaccgataccaaagcctttaccgacgctatcaaagcaggtgatatcga

SEQ ID NO: 200156 - DNA, 75 bp, synthetic construct
  source 1..75: mol_type = other DNA
aaggagcacttgctgaaggaactgagaatgaagctgagctttaccgttccttaactcaaaatggcaatgatagcc

SEQ ID NO: 200157 - DNA, 75 bp, synthetic construct
  source 1..75: mol_type = other DNA
gaaatcaaccgtaacaagcaacaggctggcgtgacagctagcaaaccaatgggcatgccaggacaacttctggtc

SEQ ID NO: 200158 - DNA, 75 bp, synthetic construct
  source 1..75: mol_type = other DNA
agttgaaaaaagccggtgttgatgtactgggtattagcaccgataaacccgaaaaactcttccgttttgcggaaa

SEQ ID NO: 200159 - DNA, 75 bp, synthetic construct
  source 1..75: mol_type = other DNA
gaaaaactctcccgttttgcggaaaaagagctgcttaactttacgctcctgtctgatgaggaccaccaggtgtgc

SEQ ID NO: 200160 - DNA, 75 bp, synthetic construct
  source 1..75: mol_type = other DNA
attttccagtgccggatgtggcacaaaaggagccgcgcgtggcagatctcgatgatggttatacgcgcattgcaa

SEQ ID NO: 200161 - DNA, 75 bp, synthetic construct
  source 1..75: mol_type = other DNA
atgaccattaacttccgccgtagcgcactgcaactgagcgtggctacgctgttctcttctgcttttatggctaac

SEQ ID NO: 200162 - DNA, 75 bp, synthetic construct
  source 1..75: mol_type = other DNA
aaggtcgataccattctggcgaaataccgtactaaagacggttttgaaacctacgacaagctgaccgatgccgac

SEQ ID NO: 200163 - DNA, 75 bp, synthetic construct
  source 1..75: mol_type = other DNA
acgctattaaagcaggcgatatcgaaaaagcgaaagcactgtatgcgccgacgcgccagcactatgagcgcatcg

SEQ ID NO: 200164 - DNA, 75 bp, synthetic construct
  source 1..75: mol_type = other DNA
cgccttcgggcattgtagatatagggtttgatatcgtatcaagagtcgttgaccagtcttctatttggtccccgg

SEQ ID NO: 200165 - DNA, 75 bp, synthetic construct
  source 1..75: mol_type = other DNA
atgatggcaatgcagggcgaaggattatcggcagctcttgcggaagtagttcgtttttttgctgtgttaggtttt

SEQ ID NO: 200166 - DNA, 75 bp, synthetic construct
  source 1..75: mol_type = other DNA
accggaagtgatttctctggtgacagtgtgagcggtagtgaccagtcacaaaataacggtgctgatacgggttct

SEQ ID NO: 200167 - DNA, 75 bp, synthetic construct
  source 1..75: mol_type = other DNA
acagctactcatcgggataaccgcgaacatgatgattttgccgatgatagcttatcgggtaataataaatcttga

SEQ ID NO: 200168 - DNA, 75 bp, synthetic construct
  source 1..75: mol_type = other DNA
ttgcttgggtttggtggctcgaaatggacttctgatatagcaataaattacttacgcacagtattatcgattggt

SEQ ID NO: 200169 - DNA, 75 bp, synthetic construct
  source 1..75: mol_type = other DNA
catgggtgttgtgttatgcaggagttatattacttgggtttggtggctcgaaatggacttctgacattgcaataa

SEQ ID NO: 200170 - DNA, 75 bp, synthetic construct
  source 1..75: mol_type = other DNA
aaaattgattttagatacattaaaaaatgattatatagcttcatatgatcattggtggcgagataaaacagagca

SEQ ID NO: 200171 - DNA, 75 bp, synthetic construct
  source 1..75: mol_type = other DNA
cctgcttcgaggttaaataataaggaccttgcaagattttgtaagctaaatcctcatagattattacctacttac

SEQ ID NO: 200172 - DNA, 75 bp, synthetic construct
  source 1..75: mol_type = other DNA
atttctggaggtaagcgtgatcaatattcttttacttatgctgcttataaaagtgatgtaaatatatattcatta

SEQ ID NO: 200173 - DNA, 75 bp, synthetic construct
  source 1..75: mol_type = other DNA
tgggcgctgccgcagccgctggcgctacctcagcagctggcggtatggatgccctgaaagctgccttccagtctg

SEQ ID NO: 200174 - DNA, 75 bp, synthetic construct
  source 1..75: mol_type = other DNA
cgctacgctgccgcgaagacgctatatcgccgcagccagcgtaaggctgagcgccagcgtcagcgtgcgtctatt

SEQ ID NO: 200175 - DNA, 75 bp, synthetic construct
  source 1..75: mol_type = other DNA
gaaaagatacttatgagagttaatcgagccattcaatttgtctatccttggaatgtgagtgaacctcaaagggaa

SEQ ID NO: 200176 - DNA, 75 bp, synthetic construct
  source 1..75: mol_type = other DNA
tggcatccagctatttgtgatgacattaattattggtattgggcaatcatttatagatcagtatttttctgttat

SEQ ID NO: 200177 - DNA, 75 bp, synthetic construct
  source 1..75: mol_type = other DNA
ttagtatatcaaagctttcatttaatgaattatacaaaatgacaataagcttagatatattgaagaaatatattg

SEQ ID NO: 200178 - DNA, 75 bp, synthetic construct
  source 1..75: mol_type = other DNA
tcggaaacaaaaatatctttaagtaatgacgctctgttattaagagatatattcgagttatctaagcaaaccagt

SEQ ID NO: 200179 - DNA, 75 bp, synthetic construct
  source 1..75: mol_type = other DNA
tgtttttggagaaggagggtgtcactactatttcaatggagtaaaacaaccgtctcatcttattttcttaaataa

SEQ ID NO: 200180 - DNA, 75 bp, synthetic construct
  source 1..75: mol_type = other DNA
aattatataataaattattcggtatcgaagagattgtcagagattccagtaagcaaagcaaaattcatcatgaga

SEQ ID NO: 200181 - DNA, 75 bp, synthetic construct
  source 1..75: mol_type = other DNA
atattagaaaaatgcaatcgtcataactggtcaataaatgaaataaaaaatgacctgttaaagttctctataaga

SEQ ID NO: 200182 - DNA, 75 bp, synthetic construct
  source 1..75: mol_type = other DNA
agtagaaaaatttggcaccagcatctctcagattcgtttagaaacaatggctgctattaagttgtctcaagttgc

SEQ ID NO: 200183 - DNA, 75 bp, synthetic construct
  source 1..75: mol_type = other DNA
accgctgctggaaggccagaacctgttatgacgaagcgaaatatttgctggctctcgaagcgagacactcgccct

SEQ ID NO: 200184 - DNA, 75 bp, synthetic construct
  source 1..75: mol_type = other DNA
aacttcagaaggtgaagaacgcgaacggtgattatatctggcgcgaccgtttacaggcgggtgatcctgatacgt

SEQ ID NO: 200185 - DNA, 75 bp, synthetic construct
  source 1..75: mol_type = other DNA
acactcgcttcggactctcttgcggtctggtttcccccgagcgggaaaaattcgatcaactgttgctggaggcgc

SEQ ID NO: 200186 - DNA, 75 bp, synthetic construct
  source 1..75: mol_type = other DNA
atacctaagaggaaatcatggtgcttctgtgaaacatattgaatttcacggggataaggggggcaacatatatga

SEQ ID NO: 200187 - DNA, 75 bp, synthetic construct
  source 1..75: mol_type = other DNA
gggaaaattatcctttggctgaaataatgaataaaaatgctgaggttgttacaggtaataaaaatgtgaagataa

SEQ ID NO: 200188 - DNA, 75 bp, synthetic construct
  source 1..75: mol_type = other DNA
atactgaaacctgtacgtacggtgacatatccgccttatcccggacttgtcagtcatggtgctggttcaggctcg

SEQ ID NO: 200189 - DNA, 75 bp, synthetic construct
  source 1..75: mol_type = other DNA
cgaaggtgtttgcgctggatgtggctgcacggcaccgggtgcagttttcgatgcctgagtccgatgctgtcacaa

SEQ ID NO: 200190 - DNA, 75 bp, synthetic construct
  source 1..75: mol_type = other DNA
acccggagcaactggcggtgcataacaaggccgtggcgctggcgaaagcggaaggcatcagctacgaagccgccg

SEQ ID NO: 200191 - DNA, 75 bp, synthetic construct
  source 1..75: mol_type = other DNA
aaggatatatcttattccggtaatgaaacaaagttaaataatacatatatcgagccaagtaaatttattggtgcg

SEQ ID NO: 200192 - DNA, 75 bp, synthetic construct
  source 1..75: mol_type = other DNA
ggccttggctgggatgcgcgttcaacagacggtcaggactttgacctggatgcttcagcattcctgctggcctca

SEQ ID NO: 200193 - DNA, 75 bp, synthetic construct
  source 1..75: mol_type = other DNA
aaaacgacgtcagcagagttcgctgaagccgacccggaacgtctggcgctgcatcagaaagcgctggaactgtcg

SEQ ID NO: 200194 - DNA, 75 bp, synthetic construct
  source 1..75: mol_type = other DNA
tcctttgccgagaagctggttggcgatggccgactggctcctaaagcgaagtcggttgtcgtggccattctggac

SEQ ID NO: 200195 - DNA, 75 bp, synthetic construct
  source 1..75: mol_type = other DNA
ccggtactcataccgatatgcacggcacgaaattgccgttcacgcaaagcgatcttgccgcctgcgtgaaagcct

SEQ ID NO: 200196 - DNA, 75 bp, synthetic construct
  source 1..75: mol_type = other DNA
atgaccgtttcgccgctgaaaagccgtaattaccggggcgatctggcgcttgaagccaaattcttcaaagcgatc

SEQ ID NO: 200197 - DNA, 75 bp, synthetic construct
  source 1..75: mol_type = other DNA
actgctatttcagacaaaaggatccgtcagcgccagtttcatgccagaaaagttacgacacgcgagttctctgtt

SEQ ID NO: 200198 - DNA, 75 bp, synthetic construct
  source 1..75: mol_type = other DNA
atggcgcgaaatggtcggcgatggcgacggtggtgattattggcctggggctggcgcagatgaccgtgctggcgc

SEQ ID NO: 200199 - DNA, 75 bp, synthetic construct
  source 1..75: mol_type = other DNA
gtaaataccgcaggcgaccgcacagggatgaaactccttcaggacacctataacctgtatggtttctacgccaaa

SEQ ID NO: 200200 - DNA, 75 bp, synthetic construct
  source 1..75: mol_type = other DNA
aatcaaactggacgcggtacctggggatgtcgacaaaattattttcgttgtcactatccatgatgctcaggctcg

SEQ ID NO: 200201 - DNA, 75 bp, synthetic construct
  source 1..75: mol_type = other DNA
gtaaaactgatgcaaaccaaagatatgcgtaatgaacacgatcttatctgttcctgggtattcgacaaagatccg

SEQ ID NO: 200202 - DNA, 75 bp, synthetic construct
  source 1..75: mol_type = other DNA
atttcagtcagcagtatattgatatgccgattaatcaggctcttattgacgcgctgaccgaatcggtaaatacct

SEQ ID NO: 200203 - DNA, 75 bp, synthetic construct
  source 1..75: mol_type = other DNA
tgtctctactaacattgagtatatattccagttttagtttttctgaagaattaaatctggattttattcatggca

SEQ ID NO: 200204 - DNA, 75 bp, synthetic construct
  source 1..75: mol_type = other DNA
gtcgacggccatcagccaggtgaaaggggattttatgctggggcgctcgcagacccggacagagctgttctctga

SEQ ID NO: 200205 - DNA, 75 bp, synthetic construct
  source 1..75: mol_type = other DNA
tcatcctgcacgaccgcttccagtccgccgggctggggctgagccagccgctgggtgtctggggggccttctcgg

SEQ ID NO: 200206 - DNA, 75 bp, synthetic construct
  source 1..75: mol_type = other DNA
ttcctcaggcgtatttactgagtaaggcagaccctgcacgctgggattatggtgtgaatggtggacgtctgaaat

SEQ ID NO: 200207 - DNA, 75 bp, synthetic construct
  source 1..75: mol_type = other DNA
ccggggggctgggcgttacccagatgctgggcggtctgggggctatgtcgctcagcgcgaacgtgtcaaaagccc

SEQ ID NO: 200208 - DNA, 75 bp, synthetic construct
  source 1..75: mol_type = other DNA
tatctctgctggccctaagtatatggtactcccacttcagcctagctgatgagcttaatctggattttatacagg

SEQ ID NO: 200209 - DNA, 75 bp, synthetic construct
  source 1..75: mol_type = other DNA
cttcgccgaacaggccacgaaggagcgtgtcggcgacacggtgaaagtggatgtgacggagtttgcagaagccga

SEQ ID NO: 200210 - DNA, 75 bp, synthetic construct
  source 1..75: mol_type = other DNA
cgcgttccattttctatatcacctttacggcttactgggtgctgggcttgccaagcggctatattctggcactga

SEQ ID NO: 200211 - DNA, 75 bp, synthetic construct
  source 1..75: mol_type = other DNA
gccagcaggcttctggatcggttttattatcggcctgacttctgctgccattatgatgatgctgcgtatgcgttt

SEQ ID NO: 200212 - DNA, 75 bp, synthetic construct
  source 1..75: mol_type = other DNA
ttgctgagtatgaggatatattcagagatgaagcagcgtcgtctttttaaattatctctgttggcactgagtata

SEQ ID NO: 200213 - DNA, 75 bp, synthetic construct
  source 1..75: mol_type = other DNA
ttctccggcagtgtttccggttctgtgctgggtacgacagaaacgggtccgctctttaccaaagagtcgtctgac

SEQ ID NO: 200214 - DNA, 75 bp, synthetic construct
  source 1..75: mol_type = other DNA
gaatggcagctcaacactctgcgcgaagaggcgtaccgcgacacactgtcgcaggatgcagcaggtgcacaattc

SEQ ID NO: 200215 - DNA, 75 bp, synthetic construct
  source 1..75: mol_type = other DNA
catcaacggttctcagctgtttaacaccaatatgctgatccagcagaacagcgaaatcatcaatcagcttgccgg

SEQ ID NO: 200216 - DNA, 75 bp, synthetic construct
  source 1..75: mol_type = other DNA
cagcgaaagcattcagcgccgcgcacggcaccgatgccaccaacaaaatcaccaacgtcaaagccggtgaactgg

SEQ ID NO: 200217 - DNA, 75 bp, synthetic construct
  source 1..75: mol_type = other DNA
tatcgccacgaacaccaccaacatcaccaacctgactgacgctgttgacagcctcggtgacgattccctgctgtg

SEQ ID NO: 200218 - DNA, 75 bp, synthetic construct
  source 1..75: mol_type = other DNA
caaagaacccaagattgggatgacaactccaaattgcgtttagcaaatgctattcagcgtattcgtgaagaagaa

SEQ ID NO: 200219 - DNA, 75 bp, synthetic construct
  source 1..75: mol_type = other DNA
atgcttttagccggtgatggtcttttgattcagttatggaagcattggtggcgaggagacctatctcaacaagaa

SEQ ID NO: 200220 - DNA, 75 bp, synthetic construct
  source 1..75: mol_type = other DNA
acgtcagatcaccaacgtcgcggctggttcagcggataccgatgcggttaacgtaggtcagttgaaagtaacgga

SEQ ID NO: 200221 - DNA, 75 bp, synthetic construct
  source 1..75: mol_type = other DNA
cgcaccgacttatgccatcgctggcggcagttacagcaacgtcggtgacgcgctggaagcgatcgataccacgct

SEQ ID NO: 200222 - DNA, 75 bp, synthetic construct
  source 1..75: mol_type = other DNA
tggcgaagcatcagtagcgttagggattagttccactgcagaggggcaacgaagtatcgctgtgggcgcatcggc

SEQ ID NO: 200223 - DNA, 75 bp, synthetic construct
  source 1..75: mol_type = other DNA
ataactcagcaccagatccaaatatggcccctatagttgaccgctcaattgcatactacattggacaaaaagcct

SEQ ID NO: 200224 - DNA, 75 bp, synthetic construct
  source 1..75: mol_type = other DNA
gctgatggctctgtagactacagcaacatcactctcggtggtggtaatggcggtacgactcgcatcagcaacgtc

SEQ ID NO: 200225 - DNA, 75 bp, synthetic construct
  source 1..75: mol_type = other DNA
gatggttctattactgcgccgacttacaccattgcaaatgccgagtacaacaacgtcggtgacgccctggatgcg

SEQ ID NO: 200226 - DNA, 75 bp, synthetic construct
  source 1..75: mol_type = other DNA
gttgacagtctcggtgacgattccctgctgtggaacgctacggcgggtgcattcagtgccaaacacggcaccaac

SEQ ID NO: 200227 - DNA, 75 bp, synthetic construct
  source 1..75: mol_type = other DNA
gagagccgaatctacagagaaaatgctgaacgacgagttcaggaagctcgaagaatctgtaaacagggaactgac

SEQ ID NO: 200228 - DNA, 75 bp, synthetic construct
  source 1..75: mol_type = other DNA
ccggcgaattctcctccggcatgatggcggactgggccaacgatgataagaaactgctgacctggcgtgaagaaa

SEQ ID NO: 200229 - DNA, 75 bp, synthetic construct
  source 1..75: mol_type = other DNA
aaaatggttttaaagtgggtacttacgaagaactgatcccgcaggcggatctggtggttaacctgacgccggaca

SEQ ID NO: 200230 - DNA, 75 bp, synthetic construct
  source 1..75: mol_type = other DNA
ctggtctcgatatctcctacgctctgcgtaaagaagcgattgccgaaaagcgcgcatcctggcgtaaagcgaccg

SEQ ID NO: 200231 - DNA, 75 bp, synthetic construct
  source 1..75: mol_type = other DNA
agcgtgggcggccgcaactggcggtcatcgtgctggcgtgctggagtcttccttcgtggcggaagtgaaatctga

SEQ ID NO: 200232 - DNA, 75 bp, synthetic construct
  source 1..75: mol_type = other DNA
aaaatggttttaaggttggcacttatgaagagctgatcccgcaggcggatttggtggttaacctgacgccagaca

SEQ ID NO: 200233 - DNA, 75 bp, synthetic construct
  source 1..75: mol_type = other DNA
cgaactgccgctgattgccaacactatcgctcgtaagcgtctgtacgaaatgaacgtggttatctctgataccgc

SEQ ID NO: 200234 - DNA, 75 bp, synthetic construct
  source 1..75: mol_type = other DNA
cgtttatggcagaattgcagccaggtgatctgggtaaagctatcccggaaggggcggtagataacgcgcaactgc

SEQ ID NO: 200235 - DNA, 75 bp, synthetic construct
  source 1..75: mol_type = other DNA
aagaatctgtaaacagggaactgacctcaaacgaatctttaatcaggaacgctatcaacgaccatacagcagccc

SEQ ID NO: 200236 - DNA, 75 bp, synthetic construct
  source 1..75: mol_type = other DNA
gaacctggaagaaatcaggaagcaggaagagacattgcagaaactgaacgcgaagacatggggcgtggagtttgt

SEQ ID NO: 200237 - DNA, 75 bp, synthetic construct
  source 1..75: mol_type = other DNA
atggtcgattccggcatcattgaagagtctgcatattatgaatcactgcacgagctgccgctgattgccaacacc

SEQ ID NO: 200238 - DNA, 75 bp, synthetic construct
  source 1..75: mol_type = other DNA
ggtgcggtagataacgcgcagttgcgtgatgtgaacgaagcgattcgcagccatgcgattgagcaggtaggtaag

SEQ ID NO: 200239 - DNA, 75 bp, synthetic construct
  source 1..75: mol_type = other DNA
ctggtctcgatatctcctacgctctgcgtaaagaagcgattgccgagaagcgcgcgtcctggcgtaaagcgaccg

SEQ ID NO: 200240 - DNA, 75 bp, synthetic construct
  source 1..75: mol_type = other DNA
gcgtggtgctggaggttgatccggacagagccattattactcaggaaatcggagacagacgctatctgcaacgaa

SEQ ID NO: 200241 - DNA, 75 bp, synthetic construct
  source 1..75: mol_type = other DNA
taatcgttcaggatactggcgacaattctgcagataacattggtggtatttattaccggaccattcagtattgtg

SEQ ID NO: 200242 - DNA, 75 bp, synthetic construct
  source 1..75: mol_type = other DNA
gaaatggataagcaaggattcaagagcctttcaactacagagagtggcgttctggatataaaaattaaagcaata

SEQ ID NO: 200243 - DNA, 75 bp, synthetic construct
  source 1..75: mol_type = other DNA
cgaaaatttcagattggaacgaccaaattcagcacacatgagccacatccaaagaatgtgatggataaaggcgca

SEQ ID NO: 200244 - DNA, 75 bp, synthetic construct
  source 1..75: mol_type = other DNA
attgagaaggccgggataaaactgaataaagaggaacacgaccagttatataaagccatattattactggttggc

SEQ ID NO: 200245 - DNA, 75 bp, synthetic construct
  source 1..75: mol_type = other DNA
aacaggataaatactgatgctgctcaggcgcttctgcgtcaggatcatgcagacagaaagtatttcctggctggt

SEQ ID NO: 200246 - DNA, 75 bp, synthetic construct
  source 1..75: mol_type = other DNA
cagggggatacaacctggcgtacaacgtggccgttgtgccgccgatgaagctgaacccaatcatcacccgcgtgt

SEQ ID NO: 200247 - DNA, 75 bp, synthetic construct
  source 1..75: mol_type = other DNA
gtggttagcgcccatttctggccgctggcgatgaccgcgatcctcggttatctggtcaatagtgcggtaagaacg

SEQ ID NO: 200248 - DNA, 75 bp, synthetic construct
  source 1..75: mol_type = other DNA
cttccgacgctggtggttagttatgcgctgggtgtgctgctgaaagggcaactggcgctggcgacgttgctggcg

SEQ ID NO: 200249 - DNA, 75 bp, synthetic construct
  source 1..75: mol_type = other DNA
cgctgctgttcggctactttggtcgcaagatctaccgcccggggctgcatttctccctggcgtccgtctcctcga

SEQ ID NO: 200250 - DNA, 75 bp, synthetic construct
  source 1..75: mol_type = other DNA
ttaacttctacaagctgctgtcggtggtggggattatcaactttccggcgctgctcgggctgatggtggtgtcga

SEQ ID NO: 200251 - DNA, 75 bp, synthetic construct
  source 1..75: mol_type = other DNA
ggccagcatagctcggcttatgatttagctgtgctttctcgcgctatcatccacggcgagcccgagttttatcat

SEQ ID NO: 200252 - DNA, 75 bp, synthetic construct
  source 1..75: mol_type = other DNA
atattgcgttggctacgatgagaaaaccctgcccgctagcgcgccgaaaaacggtcactataaagcctatattct

SEQ ID NO: 200253 - DNA, 75 bp, synthetic construct
  source 1..75: mol_type = other DNA
taaagataagctggatgttccgattaagatgatctggaactatgccggtaactgcctgattaaccagcactcgga

SEQ ID NO: 200254 - DNA, 75 bp, synthetic construct
  source 1..75: mol_type = other DNA
gatctttaaaaagcgcgcccacaagggcatcacgttgcttataaagccttccgtgaagatccgcaggcaaatcca

SEQ ID NO: 200255 - DNA, 75 bp, synthetic construct
  source 1..75: mol_type = other DNA
atcatgatattgcaaaacttgtgaacgcaattgaaaatagtgatttttctctgctcgctgacagcacttgccaaa

SEQ ID NO: 200256 - DNA, 75 bp, synthetic construct
  source 1..75: mol_type = other DNA
cagtgacgaaattcatgtgcatctggaagctggcaaagtagttacaaagctgtctatcgactggcaacagcgcat

SEQ ID NO: 200257 - DNA, 75 bp, synthetic construct
  source 1..75: mol_type = other DNA
gatgcgccacctgtatgcccagtcgcgagaagcgattcctgaattgccgacctttgaagagtttcgtaagcaggg

SEQ ID NO: 200258 - DNA, 75 bp, synthetic construct
  source 1..75: mol_type = other DNA
gcggttgtattaacgtactgaccactcaacgtccgtctcctcttgccaaggggaatccatcacatacgaaccttg

SEQ ID NO: 200259 - DNA, 75 bp, synthetic construct
  source 1..75: mol_type = other DNA
tacggtgactactcttccgcgcaaattgcggaaggtttgaactatacctacggcggctgggcagatggtaacagc

SEQ ID NO: 200260 - DNA, 75 bp, synthetic construct
  source 1..75: mol_type = other DNA
taacgggttattgtgggataaaaccatgaatgttgacggcctgaaaacgggtcatacttctggtgccgggtttaa

SEQ ID NO: 200261 - DNA, 75 bp, synthetic construct
  source 1..75: mol_type = other DNA
agatgccgcactggttaacggtctggcgtacgtcatgatcaccgaaaatctggttgatcaggaattcctcgataa

SEQ ID NO: 200262 - DNA, 75 bp, synthetic construct
  source 1..75: mol_type = other DNA
tggtaccggtacgttgggcggtaccatgactcgttcctggccgccaggaaatactctcgttgcgcgtctgatgaa

SEQ ID NO: 200263 - DNA, 75 bp, synthetic construct
  source 1..75: mol_type = other DNA
catgtcgtggacggtgaaatcaaatacgtcgaaacggataataccggtgatgacaattacgacggcctgcatcag

SEQ ID NO: 200264 - DNA, 75 bp, synthetic construct
  source 1..75: mol_type = other DNA
gatgatgaaaaaagacgcttatgattatgcctttgacagggaaaaacagtgctatgttctgactcgtaattccca

SEQ ID NO: 200265 - DNA, 75 bp, synthetic construct
  source 1..75: mol_type = other DNA
ggaatttggtgcagagcatgtgttgcgttacatcttacaggtgaaagaacgggatggtcgggtacttaacggggg

SEQ ID NO: 200266 - DNA, 75 bp, synthetic construct
  source 1..75: mol_type = other DNA
tattcagtatcccccagacgtttttagtcaacaagacggatcccagtcgctgggattacggcgtaccggcagttc

SEQ ID NO: 200267 - DNA, 75 bp, synthetic construct
  source 1..75: mol_type = other DNA
gaacatctgaaaccggtccgctctttaccaaagaatctgctgatacagtgggtattgtcagtattccgggagttg

SEQ ID NO: 200268 - DNA, 75 bp, synthetic construct
  source 1..75: mol_type = other DNA
ttgattcaacgtcagtgtatctgagtggctcttattcaaaatatgctcgctatgataaagctgactattcagctt

SEQ ID NO: 200269 - DNA, 75 bp, synthetic construct
  source 1..75: mol_type = other DNA
gggtgatttattgttagggaagtcccagacccggagtgaactgttttcagattttaatttctacggtattgccct

SEQ ID NO: 200270 - DNA, 75 bp, synthetic construct
  source 1..75: mol_type = other DNA
taacgtgccggacgatatagagtttgagagcacatcatacaaggtggtgccgaccgaaaaggcaatgatttaccg

SEQ ID NO: 200271 - DNA, 75 bp, synthetic construct
  source 1..75: mol_type = other DNA
gaataacagcaacgaactggacaaagcgtttgattccgatacggggctgttctggctgggaagcctagattatgg

SEQ ID NO: 200272 - DNA, 75 bp, synthetic construct
  source 1..75: mol_type = other DNA
gcagggcgatttgttactgggtaaatcccaaacacgtactgaactgttttctgactttaatttctacggagcggc

SEQ ID NO: 200273 - DNA, 75 bp, synthetic construct
  source 1..75: mol_type = other DNA
acaatgaaaaaaccggtacggctgagttaaacattacgccggcagatgaaaaaaacaatatgctctgtttctctc

SEQ ID NO: 200274 - DNA, 75 bp, synthetic construct
  source 1..75: mol_type = other DNA
attttaatttttatggcgtatcagttcgctctaacagtaacatgcgcccgtgggaggcacgcggatatgcaccgg

SEQ ID NO: 200275 - DNA, 75 bp, synthetic construct
  source 1..75: mol_type = other DNA
cgatgcgaaaacggaactggggctgaatgcagggtttatttcaaacaatggtgttctgctgatgaacatgctggc

SEQ ID NO: 200276 - DNA, 75 bp, synthetic construct
  source 1..75: mol_type = other DNA
agtccggtggtctgggtgtcacgcagatgctgggtggtctgggcgctgtatcgctcagcgcaaacgtctcgaagg

SEQ ID NO: 200277 - DNA, 75 bp, synthetic construct
  source 1..75: mol_type = other DNA
gtccgtctgactcaccgtctgaccgatacgccagcgattgtctctaccgacgcggacgaaatgagcactcagatg

SEQ ID NO: 200278 - DNA, 75 bp, synthetic construct
  source 1..75: mol_type = other DNA
ggtagaactgctgctggatcaggcgctgctggcagagcgcggtacgctggaagatccgaacctgtttattcgtcg

SEQ ID NO: 200279 - DNA, 75 bp, synthetic construct
  source 1..75: mol_type = other DNA
cgttgggggcaacaaaactttactacggtgcaaattttgcaccgtgggaaaaaggtcggaacgcatctggtatgg

SEQ ID NO: 200280 - DNA, 75 bp, synthetic construct
  source 1..75: mol_type = other DNA
ccccacgggcaacagttccgcgcgttgatgcaaaaagagctggagttcaacaaaatcggcatgatcgaaaccagc

SEQ ID NO: 200281 - DNA, 75 bp, synthetic construct
  source 1..75: mol_type = other DNA
tgttacgtcaatccctcgctgatttcccagcttaaatcgctggaaatcgatctgtttattttttcttgtgaaggg

SEQ ID NO: 200282 - DNA, 75 bp, synthetic construct
  source 1..75: mol_type = other DNA
tatctggtgaactcagccgtgcgcacgctgctgttcggctactttggtcgcaagatctaccgcccggggctgcat

SEQ ID NO: 200283 - DNA, 75 bp, synthetic construct
  source 1..75: mol_type = other DNA
ttctgctaatgaatatgctgactgaaccagaaaagatccgcattgatatgggaaatggaatgcagtgtcattttt

SEQ ID NO: 200284 - DNA, 75 bp, synthetic construct
  source 1..75: mol_type = other DNA
gtgctgcaattgctgtgtattgtggggctactgcgctcagtgggtaacccgattggctcgctgctgatggcgaaa

SEQ ID NO: 200285 - DNA, 75 bp, synthetic construct
  source 1..75: mol_type = other DNA
gccctgaccgagtcggtaaatacctggggccgtaagctgattgccgacggcgcactgcttggctttgagtgctgg

SEQ ID NO: 200286 - DNA, 75 bp, synthetic construct
  source 1..75: mol_type = other DNA
ttctgcaattgatatcgcacatcgagtggattgggatttcagagaagcggagcgacttgctaaagagcaggcgaa

SEQ ID NO: 200287 - DNA, 75 bp, synthetic construct
  source 1..75: mol_type = other DNA
agacaggtgtttttttaccaagtggtatagccaaatcagctgaaaaattgaattcgcacggtgaatttaatcgtc

SEQ ID NO: 200288 - DNA, 75 bp, synthetic construct
  source 1..75: mol_type = other DNA
tatcgaaaaaggactgcattggctctcgaaatatttggataataaacatggaaaaacaatcaccctgccagcttt

SEQ ID NO: 200289 - DNA, 75 bp, synthetic construct
  source 1..75: mol_type = other DNA
gtattatgtgcaattgcaactcattggtctgctttgccttttttgcttttatatccttttgtctattcaacaaaa

SEQ ID NO: 200290 - DNA, 75 bp, synthetic construct
  source 1..75: mol_type = other DNA
ggtatcgcttctgcaatggcaatgaccggtctgccgcaggcttacacgccgggagccagcatggcctctattggt

SEQ ID NO: 200291 - DNA, 75 bp, synthetic construct
  source 1..75: mol_type = other DNA
ccagttgcagaacgccattggtgcagtcgcaaccacaccaaccaaatactatcacgccaactcaacggctgaaga

SEQ ID NO: 200292 - DNA, 75 bp, synthetic construct
  source 1..75: mol_type = other DNA
taccgatgctgttaacggttcccagttaaacgcaaccaatattctggttacgcaaaatagccaaatgattaacca

SEQ ID NO: 200293 - DNA, 75 bp, synthetic construct
  source 1..75: mol_type = other DNA
actacccgcaaccagttgaccagtaaccaaagtattcttatgaatctggtggatgggccgttcaagaaattgatc

SEQ ID NO: 200294 - DNA, 75 bp, synthetic construct
  source 1..75: mol_type = other DNA
gattctggagtccactcctgggcagatgaccgcggcggtagatgtctctaaggctgggatcagcaaaacgtttac

SEQ ID NO: 200295 - DNA, 75 bp, synthetic construct
  source 1..75: mol_type = other DNA
atggaaatagttatgcctcagattagccggaccgcactggtaccctacagcgcggagcaaatgtatcagttagtg

SEQ ID NO: 200296 - DNA, 75 bp, synthetic construct
  source 1..75: mol_type = other DNA
acgccgtgactgtacgccagttgcaaaacgccattggtgcggtcgccactacgccgaccaagtactaccatgcca

SEQ ID NO: 200297 - DNA, 75 bp, synthetic construct
  source 1..75: mol_type = other DNA
accaccaacatcgccactaacaccaccaacatcaccaacctgacggattccgttggcgaccttaaggacgattct

SEQ ID NO: 200298 - DNA, 75 bp, synthetic construct
  source 1..75: mol_type = other DNA
gaccagcgtaatcactgatgtggcgaacggtacgatttcagcagccagtaaagatgcggttaacggctctcagtt

SEQ ID NO: 200299 - DNA, 75 bp, synthetic construct
  source 1..75: mol_type = other DNA
gccattaatggctcacaactttatggcgtagcggattcatttacgtcatatcttggtggtggtgctgatatcagc

SEQ ID NO: 200300 - DNA, 75 bp, synthetic construct
  source 1..75: mol_type = other DNA
ggtggtgatgcagaagtcaacgctgacggaactatcactgcaccgacttacaccattgcaaataccgattacaac

SEQ ID NO: 200301 - DNA, 75 bp, synthetic construct
  source 1..75: mol_type = other DNA
cacttcactgggcgacgctctgctgtgggatgaaacggcaagtgcattcagcgccggccacggtggcaatgccag

SEQ ID NO: 200302 - DNA, 75 bp, synthetic construct
  source 1..75: mol_type = other DNA
tgcaatcgcactgggaaatgggagtattaccggtggggcaaatgccattgctcttggacaaggcagttatgccgg

SEQ ID NO: 200303 - DNA, 75 bp, synthetic construct
  source 1..75: mol_type = other DNA
ctatcgactacagcaacatcactcttggtggtggcaacggcggtacgactcgcatcagcaacgtttccgcaggcg

SEQ ID NO: 200304 - DNA, 75 bp, synthetic construct
  source 1..75: mol_type = other DNA
aacaacgacgcggtgaactacgcgcagttgaagcaaagtgtgcaggaaacgaagcaatacaccgatcagcgcatg

SEQ ID NO: 200305 - DNA, 75 bp, synthetic construct
  source 1..75: mol_type = other DNA
cgcaagtgcaaaccatgcaaacagcattgcaatggggaatggttctcagactacccgtggtgcgcagaccaacta

SEQ ID NO: 200306 - DNA, 75 bp, synthetic construct
  source 1..75: mol_type = other DNA
cgaaaactgtcgttaatggtaatgcaggtattggtatcggtttgaacactctggttctggctgatgcgatcaacg

SEQ ID NO: 200307 - DNA, 75 bp, synthetic construct
  source 1..75: mol_type = other DNA
gaattccgttggtgaccttaaggatgatgccctgctgtggaatgatgctaaaaatgcattcagtgcagctcatga

SEQ ID NO: 200308 - DNA, 75 bp, synthetic construct
  source 1..75: mol_type = other DNA
tggtgaccttcaggctgatgccctgctctggaacgaaactaaaaaggcattcagtgcagctcacggccaggatac

SEQ ID NO: 200309 - DNA, 75 bp, synthetic construct
  source 1..75: mol_type = other DNA
cactgacgccgttaacggctctcagctcaaaaccaccaacgataacgtggcgaccaacaccaccaacatcgccac

SEQ ID NO: 200310 - DNA, 75 bp, synthetic construct
  source 1..75: mol_type = other DNA
cactgacgccgttaacggctcacagctcaaaaccaccaacgacaacgtgccgaccaacaccaccaacatcgccac

SEQ ID NO: 200311 - DNA, 75 bp, synthetic construct
  source 1..75: mol_type = other DNA
ggtgacgatggtaaatatcgtcaaatcatcaacgtagccgatggttccgaagcccatgacgccgttacggttcgc

SEQ ID NO: 200312 - DNA, 75 bp, synthetic construct
  source 1..75: mol_type = other DNA
cactgacgccgttaacggctcgcagctcaaaaccaccaacgataacgtgtcgaccaacaccaccaacatcgccac

SEQ ID NO: 200313 - DNA, 75 bp, synthetic construct
  source 1..75: mol_type = other DNA
cactgacgccgttaacggctcccagctcaaaaccaccaacgacaacgtgacgaccaacaccaccaacatcgccac

SEQ ID NO: 200314 - DNA, 75 bp, synthetic construct
  source 1..75: mol_type = other DNA
cactgacgccgttaacggctcccagctcaaaaccaccaacgaaaacgtgccgaccaacaccaccaacatcgccac

SEQ ID NO: 200315 - DNA, 75 bp, synthetic construct
  source 1..75: mol_type = other DNA
tgtcgattggcgatgatggtaagtaccgtcagatcatcaacgttgccgatggtactgaatcccatgacgccgtga

SEQ ID NO: 200316 - DNA, 75 bp, synthetic construct
  source 1..75: mol_type = other DNA
gcacagcattcagtgccgcgcacggcaccgaagccaccagcaaaatcactaacgtcaccgctggcaacctgactg

SEQ ID NO: 200317 - DNA, 75 bp, synthetic construct
  source 1..75: mol_type = other DNA
attgctatcggttctaacgcacgcgcaaatcatgccgacagcattgcaatgggtaatggttctcagactacccgt

SEQ ID NO: 200318 - DNA, 75 bp, synthetic construct
  source 1..75: mol_type = other DNA
gacgccgcaagcgcattcaccgctgcacacggcaccgaaaccaccagcaaaataactaacgtcaccgctggaaca

SEQ ID NO: 200319 - DNA, 75 bp, synthetic construct
  source 1..75: mol_type = other DNA
cctgacgaatgatgttgccgccaacaccaccagtatcaccaacctgactgatacagtgactaaccttggtgccga

SEQ ID NO: 200320 - DNA, 75 bp, synthetic construct
  source 1..75: mol_type = other DNA
agctggagcaatggctttcggtcaggcaggaaaggcagatggtgtaaattctattgcgttgggtaatagtagtct

SEQ ID NO: 200321 - DNA, 75 bp, synthetic construct
  source 1..75: mol_type = other DNA
ctcgtccagcagggtattgccgttattgtcatctcttccgaattacctgaagtgctcggccttagcgatcgggta

SEQ ID NO: 200322 - DNA, 75 bp, synthetic construct
  source 1..75: mol_type = other DNA
gcagccggaatgagcgaagacgatattatcactatgatggtagggcgagaattaacggcactttaccctaacgaa

SEQ ID NO: 200323 - DNA, 75 bp, synthetic construct
  source 1..75: mol_type = other DNA
atctctaacctgactgagacggtgactaaccttggtgaagatgcgctgaaatgggataaggacaatggtgtcttc

SEQ ID NO: 200324 - DNA, 75 bp, synthetic construct
  source 1..75: mol_type = other DNA
gaaaatttatattgatggcaaacaggtagatattcgtaactgtcagcaagccatcgcccaggggattgcgatggt

SEQ ID NO: 200325 - DNA, 75 bp, synthetic construct
  source 1..75: mol_type = other DNA
cactctgtggggaaaatgggtctggtaaatcaacgctgatgaaagtgctgtgtggtatttatccccatggttcct

SEQ ID NO: 200326 - DNA, 75 bp, synthetic construct
  source 1..75: mol_type = other DNA
acattaccaaaaccttcggcagtgtgaaggcgattgataacgtcagcttgcggttgaatgctggcgaaatcgtct

SEQ ID NO: 200327 - DNA, 75 bp, synthetic construct
  source 1..75: mol_type = other DNA
ggtgatgctctggacgcgatcgactcaaccctggatgatgcgctgctctgggacgcaaccgccggtgaaaatggt

SEQ ID NO: 200328 - DNA, 75 bp, synthetic construct
  source 1..75: mol_type = other DNA
gcagtgaagacggtcaacgtcagatcaccaacgtcgcagcaggttcggcggataccgatgcggttaacgtgggtc

SEQ ID NO: 200329 - DNA, 75 bp, synthetic construct
  source 1..75: mol_type = other DNA
tggaccaacctataatatcgggggcactgattacgataacgtaggtgaagcattagccgctattgactcctcagt

SEQ ID NO: 200330 - DNA, 75 bp, synthetic construct
  source 1..75: mol_type = other DNA
cgtcgccagcgcagcaaacgccatcgcaatgggtgcagataccgaagctgctgaaaatgcgacggctattggctt

SEQ ID NO: 200331 - DNA, 75 bp, synthetic construct
  source 1..75: mol_type = other DNA
catcctcaaattctgtgggggagtattcgatggcgctcgggcgatatgcgaattcgggaggtggttattcgatcg

SEQ ID NO: 200332 - DNA, 75 bp, synthetic construct
  source 1..75: mol_type = other DNA
cagcaaaatcaccaacgtcgccgcaggtagcctggctgatgacagtactgatgcggtaaacggtgcacagttgaa

SEQ ID NO: 200333 - DNA, 75 bp, synthetic construct
  source 1..75: mol_type = other DNA
ccaatatcgccgataacactgctgatatcgccactaacactacggatattgccaccaacactgccaatatcgccg

SEQ ID NO: 200334 - DNA, 75 bp, synthetic construct
  source 1..75: mol_type = other DNA
gttaacggttcccagttgaaagaaaccaaagacgatgtggccaccaacacagccaatatcgccgataacactgct

SEQ ID NO: 200335 - DNA, 75 bp, synthetic construct
  source 1..75: mol_type = other DNA
aatgcaagtcaggcatctggcgaatccagtattgcattaggtagcaccagtgaggccagcgaacaaaatgcgatt

SEQ ID NO: 200336 - DNA, 75 bp, synthetic construct
  source 1..75: mol_type = other DNA
aaggttctcgtaacaccagcgtatcggaagaaggtgttgtgattggttatgacaccacggatggcgaactgcttg

SEQ ID NO: 200337 - DNA, 75 bp, synthetic construct
  source 1..75: mol_type = other DNA
cgccatcggcagcaatgcccacgcaaaccatgcaaacagtattgcgatgggtaatggctctgagactacgcgtgg

SEQ ID NO: 200338 - DNA, 75 bp, synthetic construct
  source 1..75: mol_type = other DNA
atcgtcaaatcatcaacgtcgcggatggttctgaagctcacgacgccgttaccgtgcgccagttgcaaaacgcca

SEQ ID NO: 200339 - DNA, 75 bp, synthetic construct
  source 1..75: mol_type = other DNA
tatcactacaccaacttatgccatcgctggcggcagttacaacaacgtcggtgacgcgctggaagcgatcgatac

SEQ ID NO: 200340 - DNA, 75 bp, synthetic construct
  source 1..75: mol_type = other DNA
taaatataatacacgcaagattagtgagcaatttcttaagttttctgatttgccagacaaaattgatgagattga

SEQ ID NO: 200341 - DNA, 75 bp, synthetic construct
  source 1..75: mol_type = other DNA
gatctcatgccggagatatctggtattttccaggtgaatgcttactggtaccttccgtttttatggcatggctgg

SEQ ID NO: 200342 - DNA, 75 bp, synthetic construct
  source 1..75: mol_type = other DNA
cgctgacggcgctttgcgtcacgggcgggatttttctggcgtcatgggggctgattcagtggcaggaaagccgga

SEQ ID NO: 200343 - DNA, 75 bp, synthetic construct
  source 1..75: mol_type = other DNA
gccagcagcatccggtcacccagtttactgacctgctgcgaggcattattcacgccgacgaaaaactggcacggg

SEQ ID NO: 200344 - DNA, 75 bp, synthetic construct
  source 1..75: mol_type = other DNA
tactgcttcctgttataggagaatcgccggcaggtgaaaatattgagtatgatctggtgtatagcgaaatacggg

SEQ ID NO: 200345 - DNA, 75 bp, synthetic construct
  source 1..75: mol_type = other DNA
aaaccagacataccatcagtgaaatcactgagttactgagccgttttttaccacaaggcgtacaggataccaatg

SEQ ID NO: 200346 - DNA, 75 bp, synthetic construct
  source 1..75: mol_type = other DNA
aaggaataaatataaactcctggctattagagttttataacaatattgaagacctaattgccttagatatttaca

SEQ ID NO: 200347 - DNA, 75 bp, synthetic construct
  source 1..75: mol_type = other DNA
tcggcaaacgggatgcctttcagtttctcggtgttggcgaggaaaacatcacgcttgccggtgtgctttatcccg

SEQ ID NO: 200348 - DNA, 75 bp, synthetic construct
  source 1..75: mol_type = other DNA
ggcggtcagtaatattttgcaggaactggaaagcgaaaaacgggtggtgaatatcgacgatgaaagccagacgcg

SEQ ID NO: 200349 - DNA, 75 bp, synthetic construct
  source 1..75: mol_type = other DNA
gccacagagaacgaactggcccggcggcaggaagagctgctctggaagctggtcaaagggcggatactgtacccg

SEQ ID NO: 200350 - DNA, 75 bp, synthetic construct
  source 1..75: mol_type = other DNA
aacttaataatactagatattcacaatcatttaaataaattaggatgctccgtaattggtgattcctgtgatcgt

SEQ ID NO: 200351 - DNA, 75 bp, synthetic construct
  source 1..75: mol_type = other DNA
ttctaatttctatagcaacattgagaacttaataatactagatattcacaatcatttaaataaattaggatgctc

SEQ ID NO: 200352 - DNA, 75 bp, synthetic construct
  source 1..75: mol_type = other DNA
ttcagtctctcatcaaagcaggagaggctggtaagtttggagatgggcgaggcctgtatctgaaagtcccaccaa

SEQ ID NO: 200353 - DNA, 75 bp, synthetic construct
  source 1..75: mol_type = other DNA
cgtgatattcctcagtcggtcactattttagccagcagcggatggaagatcagcagttgcaaacgctgggcgaag

SEQ ID NO: 200354 - DNA, 75 bp, synthetic construct
  source 1..75: mol_type = other DNA
ttcaatggtgcggcaaatggttaaaaccggaacaatggaaggttttgttgattagcggtcatgcagtggcaacaa

SEQ ID NO: 200355 - DNA, 75 bp, synthetic construct
  source 1..75: mol_type = other DNA
atgatctggcagcctgagttcacagataaaacactctccaggaaacccggggcggttcagtattcagtgaagcaa

SEQ ID NO: 200356 - DNA, 75 bp, synthetic construct
  source 1..75: mol_type = other DNA
aagcaaccatcagttgcctcagggactggctgcttacgcgctcaatattattcgagaacgctataacgatttcgg

SEQ ID NO: 200357 - DNA, 75 bp, synthetic construct
  source 1..75: mol_type = other DNA
gtgcgatgcatgaactgaacattcagaccatttgtgcagaaaccagtgctgccaaaggccgtgttgaacgggcgc

SEQ ID NO: 200358 - DNA, 75 bp, synthetic construct
  source 1..75: mol_type = other DNA
ctggccgcatacgcgctgaatattattcgcgaacgctataacgatttcggtccgactctggcctgtgaaaaactg

SEQ ID NO: 200359 - DNA, 75 bp, synthetic construct
  source 1..75: mol_type = other DNA
gcattacgtgctgatctgaggtttgctcagtcccatgtgccaggagagccagatatgccgacatgctttcagaaa

SEQ ID NO: 200360 - DNA, 75 bp, synthetic construct
  source 1..75: mol_type = other DNA
agagagagtttaaattcttgcagcaggaagctgaagataaatatgattccagaatatcaagctatatccttcgtc

SEQ ID NO: 200361 - DNA, 75 bp, synthetic construct
  source 1..75: mol_type = other DNA
ttaggcggttgaagcatccacaaatcccagaaagggtatacaagaaggatattgcccctactattggtcaacttt

SEQ ID NO: 200362 - DNA, 75 bp, synthetic construct
  source 1..75: mol_type = other DNA
tgaagcgcatggcaagtctgattgagtacacgacagcatgggctattggtcagggtgtcagatttaccgacagga

SEQ ID NO: 200363 - DNA, 75 bp, synthetic construct
  source 1..75: mol_type = other DNA
tctgtgacgttgtcactgctctattttattctttatatgtgttcatggagcactttgctctggaagggattagcg

SEQ ID NO: 200364 - DNA, 75 bp, synthetic construct
  source 1..75: mol_type = other DNA
tgatctacccctctgcttccagcgcgatgatacgcaggcaatcactcgcttcttcgagtcactgaaaagtcagct

SEQ ID NO: 200365 - DNA, 75 bp, synthetic construct
  source 1..75: mol_type = other DNA
actaacaccaccaacatcaccaacctgacggattccgttggcgaccttaaggacgattctctgctgtggaacaaa

SEQ ID NO: 200366 - DNA, 75 bp, synthetic construct
  source 1..75: mol_type = other DNA
accaacctgactgacgctgttaacggtctcggtgacgactccctgctgtggaacaaagcggctggcgcattcagc

SEQ ID NO: 200367 - DNA, 75 bp, synthetic construct
  source 1..75: mol_type = other DNA
tgcgatcaacggtattgctatcggttctaacgcacgcgcaaatcatgccgacagcattgcaatgggtaatggttc

SEQ ID NO: 200368 - DNA, 75 bp, synthetic construct
  source 1..75: mol_type = other DNA
gcaggtgaaaacggtgcgtttaacgccagccatgatggcaaagccagtgtcatcaccaacgtagccaatggtcag

SEQ ID NO: 200369 - DNA, 75 bp, synthetic construct
  source 1..75: mol_type = other DNA
ttcgccagttgcaaaacgccattggtgcagtcgcaaccacaccaaccaaatactatcacgccaactcaacggctg

SEQ ID NO: 200370 - DNA, 75 bp, synthetic construct
  source 1..75: mol_type = other DNA
ttgaagcaaagtgtgcaggaaacgaagcaatacaccgatcagcgcatggttgagatggataacaaactgtccaaa

SEQ ID NO: 200371 - DNA, 75 bp, synthetic construct
  source 1..75: mol_type = other DNA
tacgccacctccgccgctggaacggctgacgtttgagacagaaatcacttcggaatatctggttaatctggaagg

SEQ ID NO: 200372 - DNA, 75 bp, synthetic construct
  source 1..75: mol_type = other DNA
tatcgctggccgtcaaattcccgtatcggtaaacgggatgcctttcagtttctcggtgtgggtgaggaaaacatc

SEQ ID NO: 200373 - DNA, 75 bp, synthetic construct
  source 1..75: mol_type = other DNA
atgggtaacggttctcagaccacccgtggtgcacagactggctacaccgcctacaacatggacgcaccgcagaac

SEQ ID NO: 200374 - DNA, 75 bp, synthetic construct
  source 1..75: mol_type = other DNA
gtggccattggtcaaggtagcagcagctccgttgataccggcattgccttgggtagcagctccgtttccagtcgc

SEQ ID NO: 200375 - DNA, 75 bp, synthetic construct
  source 1..75: mol_type = other DNA
cgtgggagaggctctccagagcatcgataataacacgctgcactgggacgaaaaaaataagaaatacagtgccag

SEQ ID NO: 200376 - DNA, 75 bp, synthetic construct
  source 1..75: mol_type = other DNA
ggcgctgggagcaagtagcaaagctaacggcacagacagcattgccttaggcagactatctctcgccagcgcagc

SEQ ID NO: 200377 - DNA, 75 bp, synthetic construct
  source 1..75: mol_type = other DNA
gtgcgttacgacaccaaagctgatggttctatcgactatagcaatatcaccctcggtggcggcaacggtggtacg

SEQ ID NO: 200378 - DNA, 75 bp, synthetic construct
  source 1..75: mol_type = other DNA
cattgccttgggtagtaacagcaatgcatctggtgataacgccgttgcgctgggtagtacaagtcaggcatatgg

SEQ ID NO: 200379 - DNA, 75 bp, synthetic construct
  source 1..75: mol_type = other DNA
agcaggtattggctctaccgctgtggggtataacactgttgccaaaggcgatagcagcgtggcaatcggtcatgg

SEQ ID NO: 200380 - DNA, 75 bp, synthetic construct
  source 1..75: mol_type = other DNA
cctgacggattccgttggcgaccttaaggacgattccctgctgtggaacaaagcggctggcgcattcagcgccgc

SEQ ID NO: 200381 - DNA, 75 bp, synthetic construct
  source 1..75: mol_type = other DNA
cgttaaccccgatggcgtctcctgcgactgcggacgctatggctgtctggaaaccgttgcctcgttaagcgcatt

SEQ ID NO: 200382 - DNA, 75 bp, synthetic construct
  source 1..75: mol_type = other DNA
gtgaggaaagtcagaaacgattatggataacggccagcacctatgattttggcggcatttctgcgcaggtggatt

SEQ ID NO: 200383 - DNA, 75 bp, synthetic construct
  source 1..75: mol_type = other DNA
ctgatcggtgaacgcagcccgacaatgcgcggtgacgtgctgacgcaactgtccttactggtggaaagcgacgaa

SEQ ID NO: 200384 - DNA, 75 bp, synthetic construct
  source 1..75: mol_type = other DNA
aacattgatggtaatgattacaccaatgttggtgctgcacttgacgccattaacacctcacttagcgactcactc

SEQ ID NO: 200385 - DNA, 75 bp, synthetic construct
  source 1..75: mol_type = other DNA
tactctgaatacatccattgacgctctggaacaggatgcgctgctttgggatggcactgcattcagtgcagcgca

SEQ ID NO: 200386 - DNA, 75 bp, synthetic construct
  source 1..75: mol_type = other DNA
cgacggtactgttaaagcaccaacctacaatttaaaaaatggtaacaaaaataacgttggcgatgcgctcactgt

SEQ ID NO: 200387 - DNA, 75 bp, synthetic construct
  source 1..75: mol_type = other DNA
cggatattgcgactaataccgccgatatagctacaaacgctagcagtatcactactctgaacgcggacgttgata

SEQ ID NO: 200388 - DNA, 75 bp, synthetic construct
  source 1..75: mol_type = other DNA
caaagggtactatttccgccaccagcaccgatgtagtaaacggctctcaattgtacgacctgcagcaggatgccc

SEQ ID NO: 200389 - DNA, 75 bp, synthetic construct
  source 1..75: mol_type = other DNA
ttatgcgtcagacgctgccctaccagagcatgcagcgcagcgcggattatagctgggcgtcaaactctcgcatcg

SEQ ID NO: 200390 - DNA, 75 bp, synthetic construct
  source 1..75: mol_type = other DNA
tgccctgcgtgaggcgctgaaagcacaatgcctggcagtagatgcaaacgcctgcgtcgataacccgatggctga

SEQ ID NO: 200391 - DNA, 75 bp, synthetic construct
  source 1..75: mol_type = other DNA
tacggtcacccgacgccaacccaggtcaacgtcaaagcgacggcgggtaaatgcatcctgatttccggtcacgat

SEQ ID NO: 200392 - DNA, 75 bp, synthetic construct
  source 1..75: mol_type = other DNA
cgctctgattaacggtgcccctgacacgctggacacactgaaagaaattgccgcagccattaacaatgacccgaa

SEQ ID NO: 200393 - DNA, 75 bp, synthetic construct
  source 1..75: mol_type = other DNA
tttcgccaccagcgtgccggatgactgtctgatcctgactctcgcctgtggtaaatatcgctttaacaaactcga

SEQ ID NO: 200394 - DNA, 75 bp, synthetic construct
  source 1..75: mol_type = other DNA
ctcgaatgttcaatggaaatcggtcagatgaacttcaaagtgatgagcattctggatgcaggcgaaaccggtaaa

SEQ ID NO: 200395 - DNA, 75 bp, synthetic construct
  source 1..75: mol_type = other DNA
cttgcaactggtgagcgatgatctcggtgaactgcaacgtcaggcggcggaatttacgccaaataaagataaagc

SEQ ID NO: 200396 - DNA, 75 bp, synthetic construct
  source 1..75: mol_type = other DNA
gcaatagaagtatttggaaccggtggatctaatgataatggactggctaaagtcgtttacccaattgcactgcct

SEQ ID NO: 200397 - DNA, 75 bp, synthetic construct
  source 1..75: mol_type = other DNA
tttaaacttatggggtacacgacaacaaggacatcagtaaccttaaaagtatcagccggaaatggtttgtatgga

SEQ ID NO: 200398 - DNA, 75 bp, synthetic construct
  source 1..75: mol_type = other DNA
cggggagaataatacagcggggatttgctatgacatcaagtcaaactaacattttattcccgataccatttccgt

SEQ ID NO: 200399 - DNA, 75 bp, synthetic construct
  source 1..75: mol_type = other DNA
gttaactcaactggtacttcaagaacgggttttacagcccgtatgtcaggcgtcggtgggtttaatctttgctat

SEQ ID NO: 200400 - DNA, 75 bp, synthetic construct
  source 1..75: mol_type = other DNA
acggggcactctggagcagcagactggccgaatactaaatctggatggagtaaggggccggatggggtaattaca

SEQ ID NO: 200401 - DNA, 75 bp, synthetic construct
  source 1..75: mol_type = other DNA
atgaagattcaggcctattatgaaagctgcctgaacccacaactgatcaccccttcagaaagccttatcgaataa

SEQ ID NO: 200402 - DNA, 75 bp, synthetic construct
  source 1..75: mol_type = other DNA
accaggtaaagctgtcagcgcagaaactggaagaactgctcgcatcaatggttaaggatgaggttgatcgcaatg

SEQ ID NO: 200403 - DNA, 75 bp, synthetic construct
  source 1..75: mol_type = other DNA
gtgccgaaactggcgcgagaaattggcggcgaacccagcaaaacgccgctggatctccagctacgccagcagtaa

SEQ ID NO: 200404 - DNA, 75 bp, synthetic construct
  source 1..75: mol_type = other DNA
gctgcaaatcttgctggtgaatcacatcaaccatgccaatgaggtagatgaaacgttccgtcaggcgatggctaa

SEQ ID NO: 200405 - DNA, 75 bp, synthetic construct
  source 1..75: mol_type = other DNA
tatggtgccgaaactggcgcgcgagattggcggcgaacccagtaaaacgccgctggatctccagctacgccagca

SEQ ID NO: 200406 - DNA, 75 bp, synthetic construct
  source 1..75: mol_type = other DNA
tggctctgctaagggatataaaaagagcgagttgggggcgattcctgaagattgggtagtcacaagcattggaca

SEQ ID NO: 200407 - DNA, 75 bp, synthetic construct
  source 1..75: mol_type = other DNA
tgcagcatctattcctgataacaaaaaatatattcttagccagagaacaattcttttacaaatagatagagagaa

SEQ ID NO: 200408 - DNA, 75 bp, synthetic construct
  source 1..75: mol_type = other DNA
gggttgtatccacgatattaaacctgacaaccaacataattgattatcgcggcagaactcccaaaaaacttggaa

SEQ ID NO: 200409 - DNA, 75 bp, synthetic construct
  source 1..75: mol_type = other DNA
gttgtctgcatcgctgacataccgcagttttatctccacggatttagccgcgcctgcggcggtaccgtatacgct

SEQ ID NO: 200410 - DNA, 75 bp, synthetic construct
  source 1..75: mol_type = other DNA
acattccaggcagctgcaatggccgtcgcgctgccagccaggaacaaagacggtacgcaggatctgcagttcgcc

SEQ ID NO: 200411 - DNA, 75 bp, synthetic construct
  source 1..75: mol_type = other DNA
cctcatccggggaagaggtgatcatcgaaaccctgcaaataaacatcggtactggtgtttattatctttgtaaag

SEQ ID NO: 200412 - DNA, 75 bp, synthetic construct
  source 1..75: mol_type = other DNA
ttatcgatcgcatggagaaaggcaatccggacgatcctcttttgcgtcaggtacttacctcgcaagatgagtttg

SEQ ID NO: 200413 - DNA, 75 bp, synthetic construct
  source 1..75: mol_type = other DNA
gtgacagcattagcggttgaggcggaatctgctatcgccgttcgactgtccagcgcttttgagacgctgtgcgca

SEQ ID NO: 200414 - DNA, 75 bp, synthetic construct
  source 1..75: mol_type = other DNA
cccgccgatctgagcgccaagtcctggacggtgatgcgctttagcgaaaccgaacagaacggcaagctggagtgg

SEQ ID NO: 200415 - DNA, 75 bp, synthetic construct
  source 1..75: mol_type = other DNA
caaagcgccaacgccagcggaggggaataacaccacgcagattgcgaccaccgcgtttgttcaggccgctattac

SEQ ID NO: 200416 - DNA, 75 bp, synthetic construct
  source 1..75: mol_type = other DNA
tgtagctggtcttctcacataccttggtttgggagaattatctctggctggcactgcatcgggtgtcattggtct

SEQ ID NO: 200417 - DNA, 75 bp, synthetic construct
  source 1..75: mol_type = other DNA
ccgctgattattcaggaacaaggaagcttttctgctggtggtaccatcatcaccgccccaggaacatttgatgcg

SEQ ID NO: 200418 - DNA, 75 bp, synthetic construct
  source 1..75: mol_type = other DNA
ccactgtctttgaaggtaaagctaaatattctacctatgatgatgcagtcggtgtaaccagcagcatgttaaaaa

SEQ ID NO: 200419 - DNA, 75 bp, synthetic construct
  source 1..75: mol_type = other DNA
ccgtttaaagcaaaatacctgaaattgacagatagctcagtgaattcaggtgatgtgttatcttctctggttatg

SEQ ID NO: 200420 - DNA, 75 bp, synthetic construct
  source 1..75: mol_type = other DNA
cgcttaccaatttgagtggaaaggatgtagctggtcttctcacataccttggtttgggagaagccagattgcatt

SEQ ID NO: 200421 - DNA, 75 bp, synthetic construct
  source 1..75: mol_type = other DNA
gggcaaacctgtattgattgccataaagggatagcgcacaagctgcccgatatgcgtgaagtcgagccaggtttt

SEQ ID NO: 200422 - DNA, 75 bp, synthetic construct
  source 1..75: mol_type = other DNA
gtctgattaagcgcctgtggaaatggtggcgtacccccagccgtctggcgctggggacgctgctgttgatcggtt

SEQ ID NO: 200423 - DNA, 75 bp, synthetic construct
  source 1..75: mol_type = other DNA
tatgttatggtctcttaaattctctcgaagctgccatagcgtatctttaactggatataggattatgagattatg

SEQ ID NO: 200424 - DNA, 75 bp, synthetic construct
  source 1..75: mol_type = other DNA
tacctgggaaagtacgccggatggtcgtgaaggatttcagaacatattcctgcgccgcggattctccacgtatat

SEQ ID NO: 200425 - DNA, 75 bp, synthetic construct
  source 1..75: mol_type = other DNA
gctataagccgcaactggctgaaggcagcgggcgcacccagaccgtgcgcatggtgttgattaccagcagcacgg

SEQ ID NO: 200426 - DNA, 75 bp, synthetic construct
  source 1..75: mol_type = other DNA
aacaatacacagattgccaccacggcttttgtgaaatcggcgattgcagcaatggtgggttctgcacctgcggca

SEQ ID NO: 200427 - DNA, 75 bp, synthetic construct
  source 1..75: mol_type = other DNA
tttgaaggtaaagctaaatactcgacctatgatgatgcagtcggtgtaaccagcagcatgttaaaaattagctgt

SEQ ID NO: 200428 - DNA, 75 bp, synthetic construct
  source 1..75: mol_type = other DNA
cctttaaaaattacccatatggcggtcggcgatggcggcggaacattgccaacgccggacgcaaagcagacagca

SEQ ID NO: 200429 - DNA, 75 bp, synthetic construct
  source 1..75: mol_type = other DNA
tgacggatattggcgcggcgaaacttgccagcgccgccgcgctcggtgtgccgttaaaaattacccatatggcgg

SEQ ID NO: 200430 - DNA, 75 bp, synthetic construct
  source 1..75: mol_type = other DNA
gctggacacactgaaagaaattgccgcagccattaacaatgacccgaaattcagcaccaccattaacaatgcgct

SEQ ID NO: 200431 - DNA, 75 bp, synthetic construct
  source 1..75: mol_type = other DNA
tctgcaatcagaaaacggcttcctcggtttaggcccggtcacgacagcgcatccagatctggtgaacgctggcgg

SEQ ID NO: 200432 - DNA, 75 bp, synthetic construct
  source 1..75: mol_type = other DNA
aacatgcggtgcatatgctggttactgaactggctgtctttcgttttattgacggcaaaatgtggctcaccgaaa

SEQ ID NO: 200433 - DNA, 75 bp, synthetic construct
  source 1..75: mol_type = other DNA
gaacaggtgatccctgaaaacgagggtggttggtggattcgtgaagtgggcctgtttgatgaatccggggcattg

SEQ ID NO: 200434 - DNA, 75 bp, synthetic construct
  source 1..75: mol_type = other DNA
cagcactgtttctggcagggtgtagccatcataaggcaccaccgccaaacgccaggctttctgactcaattactg

SEQ ID NO: 200435 - DNA, 75 bp, synthetic construct
  source 1..75: mol_type = other DNA
cttttgtgaaatcggcgattgcagcaatggtaggttctgcacctgcggcactggatacactgaacgaactggcgt

SEQ ID NO: 200436 - DNA, 75 bp, synthetic construct
  source 1..75: mol_type = other DNA
cgctgactaatttgagtggaaaggatgtagctggtcttctcacataccttggtttgggagaagcggcaaaaagga

SEQ ID NO: 200437 - DNA, 75 bp, synthetic construct
  source 1..75: mol_type = other DNA
ctctgattaatggtgcgcctgccacgctggacacactgaaagaaattgccgcagccattaacaatgacccgaaat

SEQ ID NO: 200438 - DNA, 75 bp, synthetic construct
  source 1..75: mol_type = other DNA
tttatgatgatgaaggcgtactcattgcggtggcgaactgcccggaaacgtacaaaccgcagttacaggaaggca

SEQ ID NO: 200439 - DNA, 75 bp, synthetic construct
  source 1..75: mol_type = other DNA
ataatccgacatttaccggagaaccaaaagcgccgactcctgatgcaggaaataacaccacgcggattgcgacca

SEQ ID NO: 200440 - DNA, 75 bp, synthetic construct
  source 1..75: mol_type = other DNA
aaatggaaagatcttatggtgacctttttcgacgagaatcacgcccgtgctattggattgcatccgggcagatta

SEQ ID NO: 200441 - DNA, 75 bp, synthetic construct
  source 1..75: mol_type = other DNA
gatctgccgttgtttaaaggcattccgattcatgtgtttatcgctggtcgcagcatccgtgatgccgcttctccg

SEQ ID NO: 200442 - DNA, 75 bp, synthetic construct
  source 1..75: mol_type = other DNA
cgcctacgaaaccactcgcctgattgccgaagaagtcgacattatcgaagtgggcaccattctgtgcgtgggcga

SEQ ID NO: 200443 - DNA, 75 bp, synthetic construct
  source 1..75: mol_type = other DNA
ctgatgtccagtcagcttgttggtgacaggattgaatacgggctgcgtgagttctcctggtcaggtgaacaggct

SEQ ID NO: 200444 - DNA, 75 bp, synthetic construct
  source 1..75: mol_type = other DNA
aaatgagcttcccgcagttcagccgtctgctgccgtaccgtgattacaaccaggagtccggtctgttcatgaatg

SEQ ID NO: 200445 - DNA, 75 bp, synthetic construct
  source 1..75: mol_type = other DNA
tcttatgacgacgatgaagaagaggaagaagacgagaagcaagaagacatgatgcgtctgctgcggggcaactaa

SEQ ID NO: 200446 - DNA, 75 bp, synthetic construct
  source 1..75: mol_type = other DNA
gcaaaaaaacactgatgcgatatactttttagctacagcctacaaaggcaatggcatacctgcaaacaatgaaaa

SEQ ID NO: 200447 - DNA, 75 bp, synthetic construct
  source 1..75: mol_type = other DNA
aaattcaatttctgctcgaccagaatcaatgggtattactgacaaagcctatgccgacaaattaaaaaaattaga

SEQ ID NO: 200448 - DNA, 75 bp, synthetic construct
  source 1..75: mol_type = other DNA
atgaccaaaattgcatgcgtgggtatcacagttcaggacaggatttattctttgctcactctgccggatggcggc

SEQ ID NO: 200449 - DNA, 75 bp, synthetic construct
  source 1..75: mol_type = other DNA
tgatgctaaaaggctggtcgctgattggcgatgcgctgtcgcactctattgtcccgggtgttgcggggggtcata

SEQ ID NO: 200450 - DNA, 75 bp, synthetic construct
  source 1..75: mol_type = other DNA
gccgttaataccgcaggcgatcgcacggggatgaaactgctacaggatacctataacctgtatggtttctacgcc

SEQ ID NO: 200451 - DNA, 75 bp, synthetic construct
  source 1..75: mol_type = other DNA
gaggaaacttatgatcaaaacggaataaaatatattacatgctatcaaaatgatcagaaattatcgtctttagac

SEQ ID NO: 200452 - DNA, 75 bp, synthetic construct
  source 1..75: mol_type = other DNA
aatgggtgaatgagctaccggacggcgaaccggtattggtgcgggtgatttcaatgactggcggcaaaaagctaa

SEQ ID NO: 200453 - DNA, 75 bp, synthetic construct
  source 1..75: mol_type = other DNA
aagcgcgtcaggtcagcggaatggagtataccttgtgtaactccttcggctttggaggtactaacggttcgttga

SEQ ID NO: 200454 - DNA, 75 bp, synthetic construct
  source 1..75: mol_type = other DNA
ggcggtgaaaaccatcttcggtgaagctgcaagccgtgtgttggtaagctccacgaaatctatgaccggtcacct

SEQ ID NO: 200455 - DNA, 75 bp, synthetic construct
  source 1..75: mol_type = other DNA
ggtccacgtaagatcagcccattcttcgttccgtcaacgattgtgaacatggtggcaggtcatctgactatcatg

SEQ ID NO: 200456 - DNA, 75 bp, synthetic construct
  source 1..75: mol_type = other DNA
tgaaagcgctttacccgcacaaaatcgtactggcagacgccaaaattgccgatgcgggcaaaatcctctctcgta

SEQ ID NO: 200457 - DNA, 75 bp, synthetic construct
  source 1..75: mol_type = other DNA
caacaccgccaaaggcgcgctggacgtagcaaaagagtttaacggcgacgtgcagatcgaactgaccggttactg

SEQ ID NO: 200458 - DNA, 75 bp, synthetic construct
  source 1..75: mol_type = other DNA
gccctgctccactacgtcccggatctgcaccgcaggatgctgctggccactctctggaataccggcgcacggatt

SEQ ID NO: 200459 - DNA, 75 bp, synthetic construct
  source 1..75: mol_type = other DNA
tagacctggagaaaggtttctggtggagcaactcaaaccaagaaattcagggcattatcggtatcgaacgttcac

SEQ ID NO: 200460 - DNA, 75 bp, synthetic construct
  source 1..75: mol_type = other DNA
cgtttgcgctattcgtgcaaggtgaacgggttttaaattgtactgaatatactcctgttgatatgaaaataattg

SEQ ID NO: 200461 - DNA, 75 bp, synthetic construct
  source 1..75: mol_type = other DNA
ggatacagctatcactctggacgggggaatggagaaaatgtcagccagttttaaagtctctggctccgattctgg

SEQ ID NO: 200462 - DNA, 75 bp, synthetic construct
  source 1..75: mol_type = other DNA
ggcagtgaaaaccatcttcggtgaagctgcaagccgtgtgctggtaagttccacgaaatccatgactggtcacct

SEQ ID NO: 200463 - DNA, 75 bp, synthetic construct
  source 1..75: mol_type = other DNA
taaccaggcgttgattgatgcgctgaccgagtcagtgaatgcctacgggcgcaaactgattggcgacggcgcgct

SEQ ID NO: 200464 - DNA, 75 bp, synthetic construct
  source 1..75: mol_type = other DNA
caacgggccgagaaagccgccagaacggccggccgtgctccggccggtagtcaggctcatcgcctggttccgctt

SEQ ID NO: 200465 - DNA, 75 bp, synthetic construct
  source 1..75: mol_type = other DNA
aagcaaaagcccacgctaaatacctttcacggtcgctcaatatcaatctaagctacgcccgggatgcagtggcat

SEQ ID NO: 200466 - DNA, 75 bp, synthetic construct
  source 1..75: mol_type = other DNA
gatgcgtgttgctgtaaatatgttatgttcccggcatggatatggacaggctatagcagaaaaatgcggttattc

SEQ ID NO: 200467 - DNA, 75 bp, synthetic construct
  source 1..75: mol_type = other DNA
ttggtgcgattgcgttacgcctgcatatgagtgagagtttgttaaagataaaactgaaaaatgaagggcacatgt

SEQ ID NO: 200468 - DNA, 75 bp, synthetic construct
  source 1..75: mol_type = other DNA
gcaaaccgccgaaactggatgacaaaaatcgtccgaccttcgcctatggccgtctgattcacgaacactgcgaac

SEQ ID NO: 200469 - DNA, 75 bp, synthetic construct
  source 1..75: mol_type = other DNA
gtttttactgatgacaacggcatcccgcccccaaagcgtcgtacaggtattgcagctgcacgacgtgcagcaaag

SEQ ID NO: 200470 - DNA, 75 bp, synthetic construct
  source 1..75: mol_type = other DNA
ttaattaccagccagagattttccggagataccacggatatgtttcttatgatggcatgcctgtcgctgtttgaa

SEQ ID NO: 200471 - DNA, 75 bp, synthetic construct
  source 1..75: mol_type = other DNA
tcagaccctgcaacagcgtctggacaaaacccgtcagcttaaacaggggatgatgcaggagttgttaaccgggaa

SEQ ID NO: 200472 - DNA, 75 bp, synthetic construct
  source 1..75: mol_type = other DNA
tagtcggattggcaggacaaggaaagactcgagggactgtagcaattaatcgcattgaattatgtactaatcagt

SEQ ID NO: 200473 - DNA, 75 bp, synthetic construct
  source 1..75: mol_type = other DNA
tataacctcgacagtcgttatgaggaactgagaagtttatctactggtgatggggggcgtggtgggttgaatctt

SEQ ID NO: 200474 - DNA, 75 bp, synthetic construct
  source 1..75: mol_type = other DNA
atcgtgtgcgtttatgttacccacacgtcaaagtttacgatggcatcactaaccaggaagttctcgaaccactct

SEQ ID NO: 200475 - DNA, 75 bp, synthetic construct
  source 1..75: mol_type = other DNA
taatgtaggttttgggagtacggaatttcatgtattaagggaaaatgaagactccgattctcgcttcatctattt

SEQ ID NO: 200476 - DNA, 75 bp, synthetic construct
  source 1..75: mol_type = other DNA
cgtttgccacagtttgcgttgcgcaaagatggctctgctaagggatataaaaagagcgagttgggggagattcct

SEQ ID NO: 200477 - DNA, 75 bp, synthetic construct
  source 1..75: mol_type = other DNA
gtcgcccgcacttcgatgctggtcgttttgccaaagagttcggtgatgaaggccaccgcgaaggttggtgcctgt

SEQ ID NO: 200478 - DNA, 75 bp, synthetic construct
  source 1..75: mol_type = other DNA
tcggtaactatctcggcggcaaactggcagatcgttcagttaacggcacgttgaaaggctttttgttgttgctga

SEQ ID NO: 200479 - DNA, 75 bp, synthetic construct
  source 1..75: mol_type = other DNA
gggcgccagctcaggcggctaaacagcaagcggctccggcagcaggcccctgcatcagcggctggcgtgaaagaa

SEQ ID NO: 200480 - DNA, 75 bp, synthetic construct
  source 1..75: mol_type = other DNA
gcgcgccagctcaggcggctaaacaggaagcggctccggcagcaggcccctgcatcagcggctggcgtgaaagaa

SEQ ID NO: 200481 - DNA, 75 bp, synthetic construct
  source 1..75: mol_type = other DNA
ccgctgttgcttgattatgccaccagcgccattgcatttggcaaaacccgtgtcgcctggcataaaggtgtgccc

SEQ ID NO: 200482 - DNA, 75 bp, synthetic construct
  source 1..75: mol_type = other DNA
ataaaggttacgccctggcggtgatgtgcgaaattctcggtggtgcgctttctggtggtaaaaccacttatcagg

SEQ ID NO: 200483 - DNA, 75 bp, synthetic construct
  source 1..75: mol_type = other DNA
ccgctgttgctcgattacgccaccagcgccatcgcatttgggaaaactcgcgtcgcctggcataaaggcgtcccc

SEQ ID NO: 200484 - DNA, 75 bp, synthetic construct
  source 1..75: mol_type = other DNA
gctgattgcacaagcggaaaaactcggtgcgcttacctacattgatgctccgattgggacgacattccagcaggt

SEQ ID NO: 200485 - DNA, 75 bp, synthetic construct
  source 1..75: mol_type = other DNA
tgtggttgggctggttgccggtgtcagcgtgatggcggtgcgtgaactgggtcgtcagcaaaagaaagataacgc

SEQ ID NO: 200486 - DNA, 75 bp, synthetic construct
  source 1..75: mol_type = other DNA
gccgaacccgcacaacttccttgcgaccgttgcgcacatcatcacttacggtaaaccgccgaagctggataacaa

SEQ ID NO: 200487 - DNA, 75 bp, synthetic construct
  source 1..75: mol_type = other DNA
gcgcgccagctcaggcggctaaacagcaagcggctccggcagcaggcccgtgcatcagcggctggcgtgaaagaa

SEQ ID NO: 200488 - DNA, 75 bp, synthetic construct
  source 1..75: mol_type = other DNA
gcggctgccgcggcaaaagacgttaacgttccggatatcggcagcgacgaagttgaagtgaccgaaatcctggtg

SEQ ID NO: 200489 - DNA, 75 bp, synthetic construct
  source 1..75: mol_type = other DNA
attctcacggcattaaccgtcgtggtttcatgaagctttgtgcagcattagccgccaccatggggttaagtagca

SEQ ID NO: 200490 - DNA, 75 bp, synthetic construct
  source 1..75: mol_type = other DNA
ccacaaaaaggtggcagcattgctgattggtgcaactgggttaagaaagcctgggacaaaatttttagttctgag

SEQ ID NO: 200491 - DNA, 75 bp, synthetic construct
  source 1..75: mol_type = other DNA
ttgacgatgctcagcgtggatttatcgctccgctgctggatgaaggtattctgcgtgatgcgaacggtaaaattt

SEQ ID NO: 200492 - DNA, 75 bp, synthetic construct
  source 1..75: mol_type = other DNA
gcgtttccggtgaaggccatattacttgcggtcattgccgtaattgccgtggtggtcgtactcatctgtgccgca

SEQ ID NO: 200493 - DNA, 75 bp, synthetic construct
  source 1..75: mol_type = other DNA
ggtattatggcagcggcggtggcgaaacacgttggtgcacgcaatgtggtgatcactgatgttaacgaataccgc

SEQ ID NO: 200494 - DNA, 75 bp, synthetic construct
  source 1..75: mol_type = other DNA
attcggtgttactcaacagtgaggcaaccatattccggcgccgttactacaacaacggggcgcacatgggcttta

SEQ ID NO: 200495 - DNA, 75 bp, synthetic construct
  source 1..75: mol_type = other DNA
aaagagaagatcgcccagtccaaagggctgggtaacttccgaaatatgtttatcaacatcccgaagggcgacccg

SEQ ID NO: 200496 - DNA, 75 bp, synthetic construct
  source 1..75: mol_type = other DNA
gttaacaacgatcctgaagtaccagaaaggttgcaccttaactttgatttaagttacacagaatcaacggataag

SEQ ID NO: 200497 - DNA, 75 bp, synthetic construct
  source 1..75: mol_type = other DNA
actggacggcgaacatctcacgctgcgcatccagtggcgtgccgctgatggcgtcattaatgaaacggaggtggt

SEQ ID NO: 200498 - DNA, 75 bp, synthetic construct
  source 1..75: mol_type = other DNA
gggattgtgtcgattggattgcatcatcctgtggcgaattgtctcgattacgcgcaacttttaaaggaaaagtac

SEQ ID NO: 200499 - DNA, 75 bp, synthetic construct
  source 1..75: mol_type = other DNA
aagcccgatcttcaaagatggctttatcaatgaacagcaactggaagagttaacgatgctcggtggtgtcgggga

SEQ ID NO: 200500 - DNA, 75 bp, synthetic construct
  source 1..75: mol_type = other DNA
gacaccatgaaccacggcggccgtattgcgatgctgggtattccgccgtctgatatgtctatcgactggaccaaa

SEQ ID NO: 200501 - DNA, 75 bp, synthetic construct
  source 1..75: mol_type = other DNA
ggcggtcgtacccatctgtgccgcaacaccattggtgtcggtgttaaccgtacgggctgcttcgccgaatatctg

SEQ ID NO: 200502 - DNA, 75 bp, synthetic construct
  source 1..75: mol_type = other DNA
caccggtatatcgactggccggttgaccgggccattccccatgtggtgcgtgagtctgttgatgccatccgtcgc

SEQ ID NO: 200503 - DNA, 75 bp, synthetic construct
  source 1..75: mol_type = other DNA
gaaatccccccgtcgttacaccttaattttacgctggaagatgtggaaaatgtggtgtctgcgctggctgatgaa

SEQ ID NO: 200504 - DNA, 75 bp, synthetic construct
  source 1..75: mol_type = other DNA
catggctgcttatgccgccagcaaatctgccctgcaaggcatggcgcgcgggctggcccgtgattttggaccgcg

SEQ ID NO: 200505 - DNA, 75 bp, synthetic construct
  source 1..75: mol_type = other DNA
ggctttaccgcattgaaggtggcactccgtccgttattggcatttaccagcgcccatcctctgcaatcgtcgatg

SEQ ID NO: 200506 - DNA, 75 bp, synthetic construct
  source 1..75: mol_type = other DNA
cgacagagtacatcagggactggcaacaaccgcgccacgcagtggggcgtgaaggaacggggatccccgcacctg

SEQ ID NO: 200507 - DNA, 75 bp, synthetic construct
  source 1..75: mol_type = other DNA
atgctggaagatctgcgtgccaacagctggagtttacgcccgtgctgcatggttcttgcctatcgtgttgctcat

SEQ ID NO: 200508 - DNA, 75 bp, synthetic construct
  source 1..75: mol_type = other DNA
ggatgagcgcaagctgatgttacagtggtgggctgattttctggatgcgaacagagagaagggtatcagtccgtt

SEQ ID NO: 200509 - DNA, 75 bp, synthetic construct
  source 1..75: mol_type = other DNA
atgggcgcttttacaggtaagacagttctcatcctcggtggtagccgtggaataggtgccgctatcgtacgtcgt

SEQ ID NO: 200510 - DNA, 75 bp, synthetic construct
  source 1..75: mol_type = other DNA
atgagtaaaaagaaaaaatcccccgtgttacacgatggcgtggcaaaaaaaacagccagcaaaatgacttttatt

SEQ ID NO: 200511 - DNA, 75 bp, synthetic construct
  source 1..75: mol_type = other DNA
ttggtgataccggtaccaaagatgaatttctgaatatcaagaatatcagtgcgcaggaccaacttgttgcgcacc

SEQ ID NO: 200512 - DNA, 75 bp, synthetic construct
  source 1..75: mol_type = other DNA
tggtggcggcatgagtcacgcggcaatgacagcagctgtcaccaacctgctgatattcggtgatgtcggactgct

SEQ ID NO: 200513 - DNA, 75 bp, synthetic construct
  source 1..75: mol_type = other DNA
attacctgctgaaaaccgagcgcgattttggtattcgcgttctcgaccgctatgcaatgtatctgaaatcacagc

SEQ ID NO: 200514 - DNA, 75 bp, synthetic construct
  source 1..75: mol_type = other DNA
aggttattccgatgcgtcgcctgattatggaggggatcaacagcgacccggatatccggagactggggcaggtgg

SEQ ID NO: 200515 - DNA, 75 bp, synthetic construct
  source 1..75: mol_type = other DNA
ggccgggcttggtgacccactgaaatcccgcgaggcatattacagggatgaggttatcccgatgcgccgcctgat

SEQ ID NO: 200516 - DNA, 75 bp, synthetic construct
  source 1..75: mol_type = other DNA
aataattccgcaccgttactgtcacaaaccctcgcaccaggaaaagacaaactcgataatttattgtcagcgcat

SEQ ID NO: 200517 - DNA, 75 bp, synthetic construct
  source 1..75: mol_type = other DNA
ctcgaaacaccgtttgtctcactgatcaaatacagcatgcagtgtgtcgggctgcctgtagagacatattgctta

SEQ ID NO: 200518 - DNA, 75 bp, synthetic construct
  source 1..75: mol_type = other DNA
gacgaacggattggttattcagccagcagcctggccgggcagccgtataaaggccgcaacggtcgtgtggaaggt

SEQ ID NO: 200519 - DNA, 75 bp, synthetic construct
  source 1..75: mol_type = other DNA
ggtagcctgactgttacaggcggtgcgcatggtgttgagaacattggtgacaacggcacggttaacaacaaagga

SEQ ID NO: 200520 - DNA, 75 bp, synthetic construct
  source 1..75: mol_type = other DNA
aggcagcggtcacgcagctggcggccatcatagaacaagggttaagcggaaaagagtgggtcatgcttaccgttg

SEQ ID NO: 200521 - DNA, 75 bp, synthetic construct
  source 1..75: mol_type = other DNA
gtaatgtacgcaggtaactggcaaggaaatgtatggcaacccattgagattcaggagaaagcggttcgcggaact

SEQ ID NO: 200522 - DNA, 75 bp, synthetic construct
  source 1..75: mol_type = other DNA
atggggttagccttgaccgcggctgttatatttattggctcgaccgtggggtattcacacttgaaaagtacacct

SEQ ID NO: 200523 - DNA, 75 bp, synthetic construct
  source 1..75: mol_type = other DNA
tggtagtgtcggcatgcttgctatagcagattcaacagcagaaaatcagggtaaaattacactggattctatgtg

SEQ ID NO: 200524 - DNA, 75 bp, synthetic construct
  source 1..75: mol_type = other DNA
tattacaaaatggtaaagatccggcaccgtctcccattgttttactggctactaacggagggagcgccactaatg

SEQ ID NO: 200525 - DNA, 75 bp, synthetic construct
  source 1..75: mol_type = other DNA
gggaactggtcattcacccgcattttgttctggtttatgaagttgacagccagtggggaaaagtgtatatcctgc

SEQ ID NO: 200526 - DNA, 75 bp, synthetic construct
  source 1..75: mol_type = other DNA
gatgctcacagtatccggcgtgtgactacgtccgtcctctgaaatcttcagcggatggacatattgtcaaagttc

SEQ ID NO: 200527 - DNA, 75 bp, synthetic construct
  source 1..75: mol_type = other DNA
cgttgggggcaacagaactttactacggtgcaaattttacaccgggggaaaaaggttggcacagaacgaatctgg

SEQ ID NO: 200528 - DNA, 75 bp, synthetic construct
  source 1..75: mol_type = other DNA
tgggggcaacaaaactttactacggtgcaaattttgcaccgtgggaaaaaggtcggtacggaacgcatctggtat

SEQ ID NO: 200529 - DNA, 75 bp, synthetic construct
  source 1..75: mol_type = other DNA
gaagtggtggataagccggttcgtcgtcaggattttctggcgtatttcagtaaccgcgaaccctgcctgattggc

SEQ ID NO: 200530 - DNA, 75 bp, synthetic construct
  source 1..75: mol_type = other DNA
gcaaggattttctgacattcttcagtaaccgggagccttgcctgattggcatggaggcttgtgggggctctcagc

SEQ ID NO: 200531 - DNA, 75 bp, synthetic construct
  source 1..75: mol_type = other DNA
gcggatggacatatcgtcaaagttctggagggacagatttgccctgcatgcggcgcaaatctggtcttacgccag

SEQ ID NO: 200532 - DNA, 75 bp, synthetic construct
  source 1..75: mol_type = other DNA
ctccaccctttaagactgagccagatgattggatccagccggggctgacttatctgaaagggcggtttggggcgg

SEQ ID NO: 200533 - DNA, 75 bp, synthetic construct
  source 1..75: mol_type = other DNA
ctgccattgattttgtcctgagattaacgctgacaataatcattatttcaccggtgatttatttctcctgggatg

SEQ ID NO: 200534 - DNA, 75 bp, synthetic construct
  source 1..75: mol_type = other DNA
tggcagatttggtgaccggcgctgccgcctgactgttattggcgagagcggcgaaattgacgattttgccctcgc

SEQ ID NO: 200535 - DNA, 75 bp, synthetic construct
  source 1..75: mol_type = other DNA
aggtggcgcactggccgctggtcaccctggaatccgtcagtgaaggcggcatgttttcccggttgagcgattatt

SEQ ID NO: 200536 - DNA, 75 bp, synthetic construct
  source 1..75: mol_type = other DNA
aaagattggcacagaacgcatctggtatggcgataaagaaaagattgcgcttggaaccgaacaagagttctggat

SEQ ID NO: 200537 - DNA, 75 bp, synthetic construct
  source 1..75: mol_type = other DNA
tacgccgtagtgatcaataaaaacgtggtcgcgggggatgatttcaccattcgccacggcgtcactatcggcaat

SEQ ID NO: 200538 - DNA, 75 bp, synthetic construct
  source 1..75: mol_type = other DNA
ttggtgcaacagccatcaacgaggaaatgaaactggcggcggtacgcgcgattgcagaactggcccatgcggaac

SEQ ID NO: 200539 - DNA, 75 bp, synthetic construct
  source 1..75: mol_type = other DNA
atctggcgctggcctactcacctggcgtcgccgcgccttgtcttgaaatcgagaaagatccgttaaaagcctaca

SEQ ID NO: 200540 - DNA, 75 bp, synthetic construct
  source 1..75: mol_type = other DNA
ccgatcgcatcggtacgtcgtatcgtcaacatggtggcgctggccgtggttgaagcgcaaacccaaccgctgtaa

SEQ ID NO: 200541 - DNA, 75 bp, synthetic construct
  source 1..75: mol_type = other DNA
cgtggtgtttatagattaggtgccaacggagggaatacaggaacggaaaaccgcccccgtaatattgcgtttaac

SEQ ID NO: 200542 - DNA, 75 bp, synthetic construct
  source 1..75: mol_type = other DNA
ggtgatagttagtcatgtggggtatacaccttcaggcgcaggaatcctgtcggcttctgcaattacatcaaatca

SEQ ID NO: 200543 - DNA, 75 bp, synthetic construct
  source 1..75: mol_type = other DNA
ctggacacgctgaatgaattggcggcagcgctgggaaatgatccaaactttgccaccactgtaacgaatgcgctg

SEQ ID NO: 200544 - DNA, 75 bp, synthetic construct
  source 1..75: mol_type = other DNA
tggcggcaatcttcagaaaagcatatacgcaaggccgggggcttgatgctgccgatgccggagggactctgattc

SEQ ID NO: 200545 - DNA, 75 bp, synthetic construct
  source 1..75: mol_type = other DNA
gccactccaccgacaggctggctgaaatgcaacggagcggctttttcggctgaagaatatcccaaactggcaaag

SEQ ID NO: 200546 - DNA, 75 bp, synthetic construct
  source 1..75: mol_type = other DNA
attcagtaccaccattaacaattcactggcacaaaaagcgccgctgtcgagtccggcactcactggaacgccaac

SEQ ID NO: 200547 - DNA, 75 bp, synthetic construct
  source 1..75: mol_type = other DNA
gctctgttgtcgcactccaactttggttcttctgactgcccgtcgtcgagcaaaatgcgtcaggcgctggaactg

SEQ ID NO: 200548 - DNA, 75 bp, synthetic construct
  source 1..75: mol_type = other DNA
gtaatccgacggtgatcggtgcgatcatggttcagcgcggcgaagccgatgcaatgatctgcggtacggtggggg

SEQ ID NO: 200549 - DNA, 75 bp, synthetic construct
  source 1..75: mol_type = other DNA
aataataccacgcggattgcgaccactgagtttgttcaggccgctattactgctctgattaacggtgcgccagcc

SEQ ID NO: 200550 - DNA, 75 bp, synthetic construct
  source 1..75: mol_type = other DNA
gatcttcgtggcgagtttattcgtggctgggatgacgggcgtggagtggacagtgggcgagcgttattgagtgct

SEQ ID NO: 200551 - DNA, 75 bp, synthetic construct
  source 1..75: mol_type = other DNA
cgctgactaatttgagtggaaaggatgtagctggtcttctcgcataccttggtttgggagatgcattaattggtg

SEQ ID NO: 200552 - DNA, 75 bp, synthetic construct
  source 1..75: mol_type = other DNA
ggcaaaacatcttgccgcaccggacccgcattcacagtacgcgccaaaagcaagcccgacatttaccggaacccc

SEQ ID NO: 200553 - DNA, 75 bp, synthetic construct
  source 1..75: mol_type = other DNA
ctggcaggcaaacaaccgctggacaatacgttgactaatttgagtggaaaagatgttgctggtcttctcgcatac

SEQ ID NO: 200554 - DNA, 75 bp, synthetic construct
  source 1..75: mol_type = other DNA
gttgatgaggctcatcatatctcagcctcatcatggcagacaattcgcaaacgatttaaaaacaaacgtgtagtg

SEQ ID NO: 200555 - DNA, 75 bp, synthetic construct
  source 1..75: mol_type = other DNA
cgggctgcctgaaggcatgcccgtctgctggtgcaatcattcagtacgctaacgggattgtcgatttccagtcgg

SEQ ID NO: 200556 - DNA, 75 bp, synthetic construct
  source 1..75: mol_type = other DNA
tacgtgctgcatcatgccgatcagccggagctgtatcatggtctgccgaaagatccgaagatcgatacctcggta

SEQ ID NO: 200557 - DNA, 75 bp, synthetic construct
  source 1..75: mol_type = other DNA
cgcttaccaatttgagtggaaaggatgtagctggtcttctcacataccttggtatcggagaaatctatgcaccga

SEQ ID NO: 200558 - DNA, 75 bp, synthetic construct
  source 1..75: mol_type = other DNA
gagaacaacagcatatgggataaatgaaacccgtccacggaatattgcatttaactatatcgtgagggctgcctg

SEQ ID NO: 200559 - DNA, 75 bp, synthetic construct
  source 1..75: mol_type = other DNA
tgtagctggtcttctcacataccttggtttgggagaaggctctgcattacctgtcggtgtgcctgttccgtggcc

SEQ ID NO: 200560 - DNA, 75 bp, synthetic construct
  source 1..75: mol_type = other DNA
tcggcgatggcggagggacattgccaacgccggacgcaaagcagactgcactggtaaatgagaaacgccgggctg

SEQ ID NO: 200561 - DNA, 75 bp, synthetic construct
  source 1..75: mol_type = other DNA
cgcttaccaatttgagtggaaaggatgtagctggtcttctcaaataccttggtttgggagcatcggctttcgggc

SEQ ID NO: 200562 - DNA, 75 bp, synthetic construct
  source 1..75: mol_type = other DNA
aaacatctgtgccgacagattcaaacggcaatgtgtttatcacattacctgacacgtttttaaatcgggttgttt

SEQ ID NO: 200563 - DNA, 75 bp, synthetic construct
  source 1..75: mol_type = other DNA
aagctggtttcgagcataatggtataagagaaatatttaattttgtcaaaatgattattataagagtattggata

SEQ ID NO: 200564 - DNA, 75 bp, synthetic construct
  source 1..75: mol_type = other DNA
gatgcatgaccaggcggtgaaagatgggcaaacctgtattgattgccataaagggatagcgcacaagctgcccga

SEQ ID NO: 200565 - DNA, 75 bp, synthetic construct
  source 1..75: mol_type = other DNA
atgacggttatttttgcacgattgaagtcaccgcaacctcaaccgtaacgctggatacactgacggaaaaacatg

SEQ ID NO: 200566 - DNA, 75 bp, synthetic construct
  source 1..75: mol_type = other DNA
ggtagctttttggatatgaccacggggccaaataataatactgtcggcgcatttacctcttcaacattgacacca

SEQ ID NO: 200567 - DNA, 75 bp, synthetic construct
  source 1..75: mol_type = other DNA
caacccgacagatctcagcgctaagtcttggacagtgatgcgctttagcgaaaccacccagaacgataagctgga

SEQ ID NO: 200568 - DNA, 75 bp, synthetic construct
  source 1..75: mol_type = other DNA
ttgagatggcagaatcgcgccaatccctgaagtctgagatggctgatttacgccagtctctgaaagttgagatgg

SEQ ID NO: 200569 - DNA, 75 bp, synthetic construct
  source 1..75: mol_type = other DNA
cgggcagcgtggtgctcgactctgtcccggacaacgcgctggtggtgggagaaaaagcgcgagtgaaggtaatta

SEQ ID NO: 200570 - DNA, 75 bp, synthetic construct
  source 1..75: mol_type = other DNA
cggtgccaacgtcattattcttggtgatatcacgcttggtaacaacgtcaccgtgggcgcgggcagcgtggtgct

SEQ ID NO: 200571 - DNA, 75 bp, synthetic construct
  source 1..75: mol_type = other DNA
acgtcctcaacaatctgtgggcggccccgctgctggtgctgtatcgcattatcaccgaatgctttttcggttatg

SEQ ID NO: 200572 - DNA, 75 bp, synthetic construct
  source 1..75: mol_type = other DNA
atgaccctgactgaactgaaaaaggttattgctgatatctatcccggtcagacacagttttatgtgattgaattt

SEQ ID NO: 200573 - DNA, 75 bp, synthetic construct
  source 1..75: mol_type = other DNA
tgcacgattgaagtcaccgcaacctcaaccgtaacgctggatacgctgacggaaaaacatgcagagcaggaaaat

SEQ ID NO: 200574 - DNA, 75 bp, synthetic construct
  source 1..75: mol_type = other DNA
atgctggaagatctgcgcgccaacagctggagtttacgcccgtgctgcatggttctcgcctatcgcgtcgctcat

SEQ ID NO: 200575 - DNA, 75 bp, synthetic construct
  source 1..75: mol_type = other DNA
ctgaaagcgccgctgtcgagtccggcacttaccggaacgccaacagcacctactgcggcgcagtcggtcaacaat

SEQ ID NO: 200576 - DNA, 75 bp, synthetic construct
  source 1..75: mol_type = other DNA
ttcagtaccaccattaacaatgcgctggcactaaaagcaccgttgtcgagtccggcactcaccggaacgccaaca

SEQ ID NO: 200577 - DNA, 75 bp, synthetic construct
  source 1..75: mol_type = other DNA
gagggagtattggtaacacaggtggaagcgaaactcgtccgcgaaatattgcatttaactttatcgtgagggctg

SEQ ID NO: 200578 - DNA, 75 bp, synthetic construct
  source 1..75: mol_type = other DNA
cgcttaccaatttgagtgggaaggatgttgccggtcttcttgcataccttggtttgggagaaggtgctccagcta

SEQ ID NO: 200579 - DNA, 75 bp, synthetic construct
  source 1..75: mol_type = other DNA
ctgcttccgcaatcacaaaaagcggctttcgtggtttttccagcgtagtgactgccgcaaatcctgtatcgggct

SEQ ID NO: 200580 - DNA, 75 bp, synthetic construct
  source 1..75: mol_type = other DNA
ggcaaaacatcttgccgcaccggacccccattcacagtatgcacccaaagaaagtccgacgtttaccgggacacc

SEQ ID NO: 200581 - DNA, 75 bp, synthetic construct
  source 1..75: mol_type = other DNA
gcaggtaaacaaccgctggacaatacgctgactaatttgagtggaaaggatgtcgctggtcttctcacatacctt

SEQ ID NO: 200582 - DNA, 75 bp, synthetic construct
  source 1..75: mol_type = other DNA
aaaggcttatccgacaaataaattgcctgatttacgtggtgagtttattcgtggctgggatgacgggcgtggagc

SEQ ID NO: 200583 - DNA, 75 bp, synthetic construct
  source 1..75: mol_type = other DNA
ttcgtgatgaccgcagaaggtccaacattaaccggttttaattccgcttacagaactgcatcaaccagttccaca

SEQ ID NO: 200584 - DNA, 75 bp, synthetic construct
  source 1..75: mol_type = other DNA
aaggttttactcagttaagcagtgcaattaacagtgaatcagaaacactggccgcaacaccgaaagcggttaagg

SEQ ID NO: 200585 - DNA, 75 bp, synthetic construct
  source 1..75: mol_type = other DNA
tgattcaggacggactctcctgtctgctcaggacgggagcattgaggcacacggccatgattacaatggggtcat

SEQ ID NO: 200586 - DNA, 75 bp, synthetic construct
  source 1..75: mol_type = other DNA
ctgaaatgcaacggtgcggctttttctgctgaagaatacccggaactggcaaaggcttacccgacaaataaattg

SEQ ID NO: 200587 - DNA, 75 bp, synthetic construct
  source 1..75: mol_type = other DNA
gttttggtctggtcaggtcaccaaccactggctcttatcgtctggttaccagaccgacagaaactgtttctgata

SEQ ID NO: 200588 - DNA, 75 bp, synthetic construct
  source 1..75: mol_type = other DNA
tattaatagttttactttcgataatgaagaaaaacttcagaaaaataacaagattaatacgcttaaatctggtgt

SEQ ID NO: 200589 - DNA, 75 bp, synthetic construct
  source 1..75: mol_type = other DNA
tattaagcgtactttctgttctctctttcggtgccttcgctgccgattccattaatgctgcacaagcgcaaaacc

SEQ ID NO: 200590 - DNA, 75 bp, synthetic construct
  source 1..75: mol_type = other DNA
cattaagtgtgctttctgttctctctttcggtgcattcgctgccgactccattgatgctgcacaagcacaaaatc

SEQ ID NO: 200591 - DNA, 75 bp, synthetic construct
  source 1..75: mol_type = other DNA
aggcaccagctgctccggtgctcccggttccgactcagcaggagcgcttcatacgattacctgaagtgatgcacc

SEQ ID NO: 200592 - DNA, 75 bp, synthetic construct
  source 1..75: mol_type = other DNA
aaaggcttaagccgcgatgcttcaacttgcctgcggttgaccaatgaaggtcgtttctgggcaagcaatattttg

SEQ ID NO: 200593 - DNA, 75 bp, synthetic construct
  source 1..75: mol_type = other DNA
ttggcggtaaaaatgtggcctggctgcactctgaagtcaccgcatggatggtcgggcgcattgccggacgcaaac

SEQ ID NO: 200594 - DNA, 75 bp, synthetic construct
  source 1..75: mol_type = other DNA
gccggtttctgatgccgttcaggagcgctttatccgcctgcccgaagtgatgcatctgtgtggcctgtcccggtc

SEQ ID NO: 200595 - DNA, 75 bp, synthetic construct
  source 1..75: mol_type = other DNA
taaaagccgcgaagctgaacatcaggcttttcttgactggctgctggaaacagcacaaacccatcaggtggatgc

SEQ ID NO: 200596 - DNA, 75 bp, synthetic construct
  source 1..75: mol_type = other DNA
atgcaagctgttttttcttccccgtctcccgcccctgtgacgccactgatgccgcagccggacatcacacaggag

SEQ ID NO: 200597 - DNA, 75 bp, synthetic construct
  source 1..75: mol_type = other DNA
gtcggttctgctatcacgcgtcttgaacacatttgtcagtggtacaacacagcgatgaaaaaggcggtgctatga

SEQ ID NO: 200598 - DNA, 75 bp, synthetic construct
  source 1..75: mol_type = other DNA
gccggtttctgataccgttcacgaacgctttatccgtctgcccgaagtgatgcatctgtgcggcctgtcccgctc

SEQ ID NO: 200599 - DNA, 75 bp, synthetic construct
  source 1..75: mol_type = other DNA
tcgcgacgggacgccaggcgcagtgctgtgccccattccttttttacgcccgcgtgacattattaccagccaggc

SEQ ID NO: 200600 - DNA, 75 bp, synthetic construct
  source 1..75: mol_type = other DNA
tctggcactggaagaactggatgaatcgcagcagcaacgtctgcagcatcttttcaccacgacgttgcataccct

SEQ ID NO: 200601 - DNA, 75 bp, synthetic construct
  source 1..75: mol_type = other DNA
tcacgccacattttgctttagacggtgatcagccatttaaagacaggcgcgccatgatgccgtttcgtggagcca

SEQ ID NO: 200602 - DNA, 75 bp, synthetic construct
  source 1..75: mol_type = other DNA
attgaacctgaaaccatcaaagtactcgatcccgcttgtggctcgggccacatattgattgaagcctataacgtg

SEQ ID NO: 200603 - DNA, 75 bp, synthetic construct
  source 1..75: mol_type = other DNA
gcaaacggaaattcgcgccccggtgagtggatgggtgactaaccttactacccgcatcggcgattacgctgatac

SEQ ID NO: 200604 - DNA, 75 bp, synthetic construct
  source 1..75: mol_type = other DNA
gtcagcagggattatccgcatatagcgtatttctggttgatgagtttgccgggctgaacggcccggacgatccag

SEQ ID NO: 200605 - DNA, 75 bp, synthetic construct
  source 1..75: mol_type = other DNA
atgacattagcagcaatcaccatgaccgccccggaagccgcagccagcccggtgcagatgtaccgcgcgacctac

SEQ ID NO: 200606 - DNA, 75 bp, synthetic construct
  source 1..75: mol_type = other DNA
gacgtataaaaaagtgcatgatgccggttttcgctgggcaccagaacaggcgctgtttgtggctccagcctggac

SEQ ID NO: 200607 - DNA, 75 bp, synthetic construct
  source 1..75: mol_type = other DNA
gtactctactaactgatcctacctgtaggatttctgtttcgcagaatgattttggtgttattccgggatcaccaa

SEQ ID NO: 200608 - DNA, 75 bp, synthetic construct
  source 1..75: mol_type = other DNA
gaggcattcccgaaacaaatctctctcggcggtaaaaacgtggcgtgggcgcactcagaaatcacggcatggatg

SEQ ID NO: 200609 - DNA, 75 bp, synthetic construct
  source 1..75: mol_type = other DNA
agcaagaagaaccggaacacttccgtctggattacttcagtgtgcagtcgggttctaacgatatcgccactgccg

SEQ ID NO: 200610 - DNA, 75 bp, synthetic construct
  source 1..75: mol_type = other DNA
gtttggcctgcctggtcaggatgcacaaacctggggagaagatctggctattgcccgtgatatcggcctcgacgg

SEQ ID NO: 200611 - DNA, 75 bp, synthetic construct
  source 1..75: mol_type = other DNA
tgctgtgcgtgctttctggctgcgcacaaaaatctaaatctctgccgcccgcattcagcggtcagggtagccctg

SEQ ID NO: 200612 - DNA, 75 bp, synthetic construct
  source 1..75: mol_type = other DNA
gaccatctacgaactcatccgtaagggggaatttccgccgcaggtgagtcttggcggtaaaaatgtggcctggct

SEQ ID NO: 200613 - DNA, 75 bp, synthetic construct
  source 1..75: mol_type = other DNA
tcggcggtaaaaacgtggcgtgggcgcactcagaaatcacggcatggatgactgaccgcattgccgaacgcaacc

SEQ ID NO: 200614 - DNA, 75 bp, synthetic construct
  source 1..75: mol_type = other DNA
gccgggattggcgtcctggaaatgttatcggcgatatatgacgcgccagcgtcttttttatcgtctgcgtctgcg

SEQ ID NO: 200615 - DNA, 75 bp, synthetic construct
  source 1..75: mol_type = other DNA
ttctccctgcatgttgcctgccactttaagcgcatgcaccagaacatcgtcgacaaaatcgagtatctgaactgc

SEQ ID NO: 200616 - DNA, 75 bp, synthetic construct
  source 1..75: mol_type = other DNA
atatttatatagcgattaattcaccagagatatttatgtggtttgttctctcgtcagtatttaacactaaaagag

SEQ ID NO: 200617 - DNA, 75 bp, synthetic construct
  source 1..75: mol_type = other DNA
gctacagtcccaacttccccatacctgaaaatcgaagtcgtcaacggcaaagctgttattttctccctgcatgtt

SEQ ID NO: 200618 - DNA, 75 bp, synthetic construct
  source 1..75: mol_type = other DNA
cgagagctgtattgaagcatttcatgaggccgaaaccagcctgactcacactgctttccgctgtaatcaacggga

SEQ ID NO: 200619 - DNA, 75 bp, synthetic construct
  source 1..75: mol_type = other DNA
caggggagccgaaaggctcgccggtttccttgagcgccggtactgcgaaccctgttcagttcaccacccatgagt

SEQ ID NO: 200620 - DNA, 75 bp, synthetic construct
  source 1..75: mol_type = other DNA
ctccgactgattggtgggcaaatcgcacctgatcacggtgagatcctttttgatggtgagaatattccggcgatg

SEQ ID NO: 200621 - DNA, 75 bp, synthetic construct
  source 1..75: mol_type = other DNA
gtttctcacgatgtgccggaagtattaagtattgcggatcacgcctggattctggcggacaaaaagattgtcgct

SEQ ID NO: 200622 - DNA, 75 bp, synthetic construct
  source 1..75: mol_type = other DNA
ttgccctggagccggatctcatcatgtttgatgagccgtttgttggacaagatccgatcaccatgggcgtactgg

SEQ ID NO: 200623 - DNA, 75 bp, synthetic construct
  source 1..75: mol_type = other DNA
gatttatcttattgtggaaaatatttatttaatggttttgatgtgtctaatatagattataaagaacagcttttt

SEQ ID NO: 200624 - DNA, 75 bp, synthetic construct
  source 1..75: mol_type = other DNA
gtccttccggtgtcggaaaaagttccctgttgaacatacttggcttgttggacagcgaattttatgggagttatg

SEQ ID NO: 200625 - DNA, 75 bp, synthetic construct
  source 1..75: mol_type = other DNA
cgcgacagcgcccgttttgcgatagcctgcgcggcaatttcacgcgccagcggcagcttaaacaaccctaccctg

SEQ ID NO: 200626 - DNA, 75 bp, synthetic construct
  source 1..75: mol_type = other DNA
tcgccctgtttctttttatgccattaggcggaatcggtggcgtcatgctcgcaggttatacctttattttgcgtg

SEQ ID NO: 200627 - DNA, 75 bp, synthetic construct
  source 1..75: mol_type = other DNA
atttggtggcttttaccatcgcttgctactgctaaacgctcgttatctgctttcctcccacgctaatcctgcaat

SEQ ID NO: 200628 - DNA, 75 bp, synthetic construct
  source 1..75: mol_type = other DNA
acccatccgtgaacttcatcgcgcgcttgaacgtctgaacttccagattgtttacccgaacgaccgtgacgactt

SEQ ID NO: 200629 - DNA, 75 bp, synthetic construct
  source 1..75: mol_type = other DNA
ttaccttgcttgcatgatgagtttaatattatttttaaagtgattggtaagatctcagaaactaataaaaatata

SEQ ID NO: 200630 - DNA, 75 bp, synthetic construct
  source 1..75: mol_type = other DNA
ccaaaagctgggagccgaaattattggcactacgctttctggctataccacgcctgaaacgccagaagagccgga

SEQ ID NO: 200631 - DNA, 75 bp, synthetic construct
  source 1..75: mol_type = other DNA
aacaaaacatcccggaaaacatcgtaaagagatattctcatattgatgatatgccctattttgtttttgagtttt

SEQ ID NO: 200632 - DNA, 75 bp, synthetic construct
  source 1..75: mol_type = other DNA
tgattttgggtttgggcctgttgtaaaaaatataaatgacttatctgaacaactaaatctaatagttgataataa

SEQ ID NO: 200633 - DNA, 75 bp, synthetic construct
  source 1..75: mol_type = other DNA
atagcgcccgattgggagaaggtgtcggtgaattagcccatcagatgttaatgagcgatagctgtaaaatcgcca

SEQ ID NO: 200634 - DNA, 75 bp, synthetic construct
  source 1..75: mol_type = other DNA
ctggcaccttataaagcgggtgccgggatttgcaccccggaattgtcaacggcgatatacgacgcgccagcgtct

SEQ ID NO: 200635 - DNA, 75 bp, synthetic construct
  source 1..75: mol_type = other DNA
actcaatcgctggttccgtgatggaaggggacgtcgcgtccacattatacgctgggagcctgaaacacagcgggt

SEQ ID NO: 200636 - DNA, 75 bp, synthetic construct
  source 1..75: mol_type = other DNA
ttcttccgcttctacagggcatataggtatatgtcctgttcgtcttggagcaggcgtacaaaataaaattcttga

SEQ ID NO: 200637 - DNA, 75 bp, synthetic construct
  source 1..75: mol_type = other DNA
tctttgatggcaacaagcgtaccagtcgccatatgatgaacggctggttaatgcgccacggttacaatcccatta

SEQ ID NO: 200638 - DNA, 75 bp, synthetic construct
  source 1..75: mol_type = other DNA
gcaaaggctgaagcaagcgggctcgacgatatcgcagcaattttttccggtcaccatacactattagacgatcct

SEQ ID NO: 200639 - DNA, 75 bp, synthetic construct
  source 1..75: mol_type = other DNA
ggcgtttattccgtttattcagcaggcgtggattctggcgcagcgatatgatgcggtggtggcgaatccgccgta

SEQ ID NO: 200640 - DNA, 75 bp, synthetic construct
  source 1..75: mol_type = other DNA
aaccggcagtatgggggatatgtttgctgaaaataccgcgttaacccaaaccgacagcgcagaatatcagctgct

SEQ ID NO: 200641 - DNA, 75 bp, synthetic construct
  source 1..75: mol_type = other DNA
agcgtatagatatcccgaagaaaatgttggttcaaaacttaaagaacgttatcaatctgacatttctgttgaact

SEQ ID NO: 200642 - DNA, 75 bp, synthetic construct
  source 1..75: mol_type = other DNA
tattcgactttctgattttcgcggagcggcaaatcagggaccacgagcacttgaagcaataaataataaagattg

SEQ ID NO: 200643 - DNA, 75 bp, synthetic construct
  source 1..75: mol_type = other DNA
ctaattaataatgaaacaatcatttcattaatacagttagagtactcaggttttgatggtgccaccgttcctatt

SEQ ID NO: 200644 - DNA, 75 bp, synthetic construct
  source 1..75: mol_type = other DNA
ggctcactgattcaggtaccgcaggaagaagaagcggaactgaaggcgtttctcgatgcactgtatcaactggaa

SEQ ID NO: 200645 - DNA, 75 bp, synthetic construct
  source 1..75: mol_type = other DNA
gctaaaactcatttcccgtacagtaaatcagacctctttgcgatgtttatgcagcatgccttttatttgcttaaa

SEQ ID NO: 200646 - DNA, 75 bp, synthetic construct
  source 1..75: mol_type = other DNA
gtgaagccacacgtctgaaacgcgaacgcgacagcctgatcaaaaaattcagcgaactgcgcagctatgacgatc

SEQ ID NO: 200647 - DNA, 75 bp, synthetic construct
  source 1..75: mol_type = other DNA
gcttttaatgcacaagtgaatatgcagtcatggatgttcctgtctagatatgaactccttcgtgaatttttgtta

SEQ ID NO: 200648 - DNA, 75 bp, synthetic construct
  source 1..75: mol_type = other DNA
ggccactacaaatgattttaagaaaatccctggttctcctatagcttactggatcagtcattctcttttaaatgt

SEQ ID NO: 200649 - DNA, 75 bp, synthetic construct
  source 1..75: mol_type = other DNA
atccgccgtatatgggaagtaattttttatgccctattctaaaaaatttcatttcagatttttatagttttggta

SEQ ID NO: 200650 - DNA, 75 bp, synthetic construct
  source 1..75: mol_type = other DNA
ctgaaggtgcgtacaaaaccttcccggcagacaatgacggcatcctgccgctgatggatgacgagtggtttgagg

SEQ ID NO: 200651 - DNA, 75 bp, synthetic construct
  source 1..75: mol_type = other DNA
atttcaaaatgttatactcaggatgcagtaagaataagatgaaaacaaatatacagtcacatgcaaaggatatct

SEQ ID NO: 200652 - DNA, 75 bp, synthetic construct
  source 1..75: mol_type = other DNA
tcctgccgggaacaccgttatatgacacaattgtgattgtcactggtgagagtgtgcgcagggattatatgtcgg

SEQ ID NO: 200653 - DNA, 75 bp, synthetic construct
  source 1..75: mol_type = other DNA
gaaaggaataatgagtatttctgcttttactctaaagttgttccgccgaaatttcatcatttctttgtgttggat

SEQ ID NO: 200654 - DNA, 75 bp, synthetic construct
  source 1..75: mol_type = other DNA
tatttccgcctcgcgccggagcataaccagattgttaaccatctgatttaccccattcctgacccggcaatgccc

SEQ ID NO: 200655 - DNA, 75 bp, synthetic construct
  source 1..75: mol_type = other DNA
atgcacagtacaggcaaaatcaatcctgacggtggaacacgaacaggaacgattacgccaggcaattgactttac

SEQ ID NO: 200656 - DNA, 75 bp, synthetic construct
  source 1..75: mol_type = other DNA
cggcaaatgcgtcacgccggaaagtattaaccagattgcgctattacaagtccgctataacgatactctgcgcct

SEQ ID NO: 200657 - DNA, 75 bp, synthetic construct
  source 1..75: mol_type = other DNA
aggctacagcgttcccctgattattactgccagtgacataatgtctcatcggtccgtcagcagaaaaatcagtgc

SEQ ID NO: 200658 - DNA, 75 bp, synthetic construct
  source 1..75: mol_type = other DNA
ttgccatcatgaaaagatggaatacctcaaaaacttaaatgcaacatctgctaatttaaacaaggaaattgcata

SEQ ID NO: 200659 - DNA, 75 bp, synthetic construct
  source 1..75: mol_type = other DNA
cgactgcaaagaaaatgcgggcggcgactattactggactttcttcccacagcctacgtgtcagcacgcagaagt

SEQ ID NO: 200660 - DNA, 75 bp, synthetic construct
  source 1..75: mol_type = other DNA
aagaagaaataaataaagcattatcctttttgaaaagttatttaaatggattaacaaataatccattgattaata

SEQ ID NO: 200661 - DNA, 75 bp, synthetic construct
  source 1..75: mol_type = other DNA
ccggataaccgcgttgtggtttatatgggcgatgaccagaaattcgaatacatctataaatttgtctcggaaggc

SEQ ID NO: 200662 - DNA, 75 bp, synthetic construct
  source 1..75: mol_type = other DNA
gcagcgtttactgcacgctcaccaacaacagcgatcgcggtaaggaaggaaaagcgccagtggatgcggccaacc

SEQ ID NO: 200663 - DNA, 75 bp, synthetic construct
  source 1..75: mol_type = other DNA
ccctttgtacttataaggacgtatcggataatatcagccccgttatggctttcttcgatgctatgtccattcttt

SEQ ID NO: 200664 - DNA, 75 bp, synthetic construct
  source 1..75: mol_type = other DNA
cgccgtatatgggggggaaagggatgaatggtgatctgaaagagtttgctaaaaaacaattcccggacagcaagt

SEQ ID NO: 200665 - DNA, 75 bp, synthetic construct
  source 1..75: mol_type = other DNA
gcagctgattctggaaaacaatattttcggcctggacatcgatgatcgtgcggcgcagctttccggatttgcgat

SEQ ID NO: 200666 - DNA, 75 bp, synthetic construct
  source 1..75: mol_type = other DNA
taccagaaagtaaggcgcagttggttgaaatgaagctttccggtaatcaggacgaagctctgtaccgtgaactgc

SEQ ID NO: 200667 - DNA, 75 bp, synthetic construct
  source 1..75: mol_type = other DNA
tcaatttcttaatagaacagggatcacatggcaaacagtcacttccaaaaaaaatgctttccgtttaaaacagaa

SEQ ID NO: 200668 - DNA, 75 bp, synthetic construct
  source 1..75: mol_type = other DNA
aaagatgccgtgattggcaaagtggtgaagagcgaagatattcctgccgccacccagctgtttacgccaaactgg

SEQ ID NO: 200669 - DNA, 75 bp, synthetic construct
  source 1..75: mol_type = other DNA
ttttagcgcagcgatatgatgcagtggtggcgaatcctccgtatatgggcagtaagggaatgaatggtgagctga

SEQ ID NO: 200670 - DNA, 75 bp, synthetic construct
  source 1..75: mol_type = other DNA
caaaaagtatttcatttcgtattaaaccaaaacatctccaatacagttcgggatcacctgttattttttgcgagg

SEQ ID NO: 200671 - DNA, 75 bp, synthetic construct
  source 1..75: mol_type = other DNA
atttgcggagatttcaggcgaagtcgtacaaacaactgcatgggtaatgaacaattatgagatcaataaatatca

SEQ ID NO: 200672 - DNA, 75 bp, synthetic construct
  source 1..75: mol_type = other DNA
gtgcctggtgtatctgcatcgctataacgatgccacgctgtcgagaatgcgtaccgaatatgttgtaccgctgct

SEQ ID NO: 200673 - DNA, 75 bp, synthetic construct
  source 1..75: mol_type = other DNA
gtcgagttatgagcaactaagaaacaatttattggaagaccatacatttattactatggctcacctcggtgcacg

SEQ ID NO: 200674 - DNA, 75 bp, synthetic construct
  source 1..75: mol_type = other DNA
atatgctgctgatacgtacactggcattgttcacgagtgctaaaacgctgggatcgctgattcaggtaccgcagg

SEQ ID NO: 200675 - DNA, 75 bp, synthetic construct
  source 1..75: mol_type = other DNA
ggaaagtaagctggatatcgcggagctttggaccaagctgaatttccaccagcaggtgcaacgcggcagcatggg

SEQ ID NO: 200676 - DNA, 75 bp, synthetic construct
  source 1..75: mol_type = other DNA
gattagatagagctcgcattattgaactcaagcttgcgggtaacaaagacgaagagctgtatcgtgaactgctgt

SEQ ID NO: 200677 - DNA, 75 bp, synthetic construct
  source 1..75: mol_type = other DNA
tgaatattgtatccctgcaggagagtaagctggatatcgctgaactgtggaccaagctgaacttccaccagcagg

SEQ ID NO: 200678 - DNA, 75 bp, synthetic construct
  source 1..75: mol_type = other DNA
attgaaccggaacgtattaaagtgctggacccggcctgtggctccgggcatatcctgaccgaagcttataaagtg

SEQ ID NO: 200679 - DNA, 75 bp, synthetic construct
  source 1..75: mol_type = other DNA
ggctggacaaagcgcgcctcgtggagatgaagctggctggcgatcgtgatgaagagctgtaccgtgaactgttgc

SEQ ID NO: 200680 - DNA, 75 bp, synthetic construct
  source 1..75: mol_type = other DNA
gtcaatgatgatatcgaactggtactgccggataacctgactcgcaccgactccattctgcgcgggctggtggac

SEQ ID NO: 200681 - DNA, 75 bp, synthetic construct
  source 1..75: mol_type = other DNA
agcttaagagtgctgaatcgggagctgccaccacgcgcctgaaaaaagaactggatgggttgaccaaaaagttca

SEQ ID NO: 200682 - DNA, 75 bp, synthetic construct
  source 1..75: mol_type = other DNA
tggaatggatgaatatgacatctgaaatgcaagagattgaaaggcagaataatgagattttcatcaaggaatatg

SEQ ID NO: 200683 - DNA, 75 bp, synthetic construct
  source 1..75: mol_type = other DNA
acctgttggtgatggtgagataatatcaaaaattgataggttgatatcaattcataagtgcgattgggatagtta

SEQ ID NO: 200684 - DNA, 75 bp, synthetic construct
  source 1..75: mol_type = other DNA
tctactgaacacgcttgtcgagctgcaagagtcaggtgactcaatgcaaaagcctgcggcgaaggaattgataga

SEQ ID NO: 200685 - DNA, 75 bp, synthetic construct
  source 1..75: mol_type = other DNA
tttcaagatattacgctatttagttcagattcgattttgaatgatgagaaatttcgttcaaatacatttgcagac

SEQ ID NO: 200686 - DNA, 75 bp, synthetic construct
  source 1..75: mol_type = other DNA
attgatctggacgacggcgttaaggttaactacggcaaatttggcgatctgctggcggatgtgaaggccattacc

SEQ ID NO: 200687 - DNA, 75 bp, synthetic construct
  source 1..75: mol_type = other DNA
tttgttaataatgaagacctttacctgcctgtgttagcatttattaatagtgatattattatctctttaataaag

SEQ ID NO: 200688 - DNA, 75 bp, synthetic construct
  source 1..75: mol_type = other DNA
gtcaatgatgatatcgaactggtattgccggataacctgactcgcaccgactctattctgcgcgggctggtggac

SEQ ID NO: 200689 - DNA, 75 bp, synthetic construct
  source 1..75: mol_type = other DNA
gtccggggcgttgttcactgatatgaacgtatttgacaacgtcgcctatccactgcgcgaacatacccaacttcc

SEQ ID NO: 200690 - DNA, 75 bp, synthetic construct
  source 1..75: mol_type = other DNA
acgaactaccagaggtcggagttctacaggctgcgtttgcccgtctgatcggtatgggggggtatgatgtttttt

SEQ ID NO: 200691 - DNA, 75 bp, synthetic construct
  source 1..75: mol_type = other DNA
acctcacagcatcataattgctgagggtgtggctaccgccctgtcgtgccatttaattcgccctgacgcaatgac

SEQ ID NO: 200692 - DNA, 75 bp, synthetic construct
  source 1..75: mol_type = other DNA
cagttggcttaatgatggcggtgccgcaaagttgctttggcatcttaaaggggtggatctctcaggttttgaccc

SEQ ID NO: 200693 - DNA, 75 bp, synthetic construct
  source 1..75: mol_type = other DNA
gataaatatgggcctgttccggcggatgcgacggaagaacagcggcaggcatatctggcaaaactgcgtgatacg

SEQ ID NO: 200694 - DNA, 75 bp, synthetic construct
  source 1..75: mol_type = other DNA
gcgcacgctaatgacagtatcagcccgatatttgacaaggagaaagagcagaggcgtctgcagacagtggggctt

SEQ ID NO: 200695 - DNA, 75 bp, synthetic construct
  source 1..75: mol_type = other DNA
cgttgtttgccagtagtttcctcagcgctacactattacccggtaattccgaagtcgtgctggttgcaatgttgc

SEQ ID NO: 200696 - DNA, 75 bp, synthetic construct
  source 1..75: mol_type = other DNA
ggatatatccttaccgagcaggattactgtgtggttgtgggggcaatcaatatggatattcgcggaatggcggat

SEQ ID NO: 200697 - DNA, 75 bp, synthetic construct
  source 1..75: mol_type = other DNA
ttaaagcgaacaaagtaaaaaactggtacagccggatccacactctgaaaccaacacaaaatgaactggaaattt

SEQ ID NO: 200698 - DNA, 75 bp, synthetic construct
  source 1..75: mol_type = other DNA
atgctgcaaatcagccgttcgcgcgttgcggcgcatattatggatttaatgcgcaaaggccggattaaaggcaaa

SEQ ID NO: 200699 - DNA, 75 bp, synthetic construct
  source 1..75: mol_type = other DNA
gggaaaaacggcagttttacaatcgcgttaataaattatttgatataagaatccagcaccttcagaacgacatcc

SEQ ID NO: 200700 - DNA, 75 bp, synthetic construct
  source 1..75: mol_type = other DNA
atctacaagaaatattatcaaagaatgaaaatccttatttagtaaaggaatttaaaatatggataagtgaaatta

SEQ ID NO: 200701 - DNA, 75 bp, synthetic construct
  source 1..75: mol_type = other DNA
taaagatccttatttagtaaaagagtttaatgtatggataaaagaaattaagaaaaatattaaaataaaagccgg

SEQ ID NO: 200702 - DNA, 75 bp, synthetic construct
  source 1..75: mol_type = other DNA
gtcagtcacagtggaatcagtctgagcggtggtggcagcttcggggataaatttcagggtaacatgccgggtggc

SEQ ID NO: 200703 - DNA, 75 bp, synthetic construct
  source 1..75: mol_type = other DNA
ctacggcgataccgactcaacgtttgtctggctgaaaggcgcacattcggaagaagaagcggcgaaaatcggtcg

SEQ ID NO: 200704 - DNA, 75 bp, synthetic construct
  source 1..75: mol_type = other DNA
cgaaactatcgacaaactgatggcgggcgaactggatgcccgactggtttaccgtaaacggctccgccgcccgct

SEQ ID NO: 200705 - DNA, 75 bp, synthetic construct
  source 1..75: mol_type = other DNA
cttcgatccacgcctggcatcgtcgatcaccatgcgtggtcatcagatcatgcggcaaaccaaaacgttgattga

SEQ ID NO: 200706 - DNA, 75 bp, synthetic construct
  source 1..75: mol_type = other DNA
ggtgtgctcggcaccaccgcctgccgtttcttcgatccacgcctggcatcgtcgatcaccatgcgcggtcatcag

SEQ ID NO: 200707 - DNA, 75 bp, synthetic construct
  source 1..75: mol_type = other DNA
gagctttacctgcgtatcttccgcaacgagccatatcaggagtacgtccgcgaaaccatcgacaaactgatggcg

SEQ ID NO: 200708 - DNA, 75 bp, synthetic construct
  source 1..75: mol_type = other DNA
gcaacggacaacgggccgttgcaggttacgcttgcgccgcaagagtccgtggcatttattcccgccgatcatgtt

SEQ ID NO: 200709 - DNA, 75 bp, synthetic construct
  source 1..75: mol_type = other DNA
tggcgcaacccattacctatgaagatttcttgcctgttagcgcggcggggatcttccagtcaaatctgggtaatg

SEQ ID NO: 200710 - DNA, 75 bp, synthetic construct
  source 1..75: mol_type = other DNA
tcaacggcaacaggattatcgccgatgtgggccacgacctgctgataagcagccagcaggacaccagtaagtacg

SEQ ID NO: 200711 - DNA, 75 bp, synthetic construct
  source 1..75: mol_type = other DNA
cagcgattatcggtggttgggttaatgtgattagtgcagggaatggagttgtaggcacagttggctggaatgcaa

SEQ ID NO: 200712 - DNA, 75 bp, synthetic construct
  source 1..75: mol_type = other DNA
gatggtattgaagcgctgaaatctgcgttctggaatttctcttcgttttcgctggaaaccgttgcccaggaattg

SEQ ID NO: 200713 - DNA, 75 bp, synthetic construct
  source 1..75: mol_type = other DNA
cgaaaagcgcctgcgtgaaggtggcgttaccgtctacgaggccgatgtgcgcccgccagaacgctatctgatgga

SEQ ID NO: 200714 - DNA, 75 bp, synthetic construct
  source 1..75: mol_type = other DNA
cagtgagcaggaaaaagttgcgcaatttttgtcacgcgaaggaattcgtcatttccttgctcgtctcgacataga

SEQ ID NO: 200715 - DNA, 75 bp, synthetic construct
  source 1..75: mol_type = other DNA
accgcggcgaaaccctgaccgttaacaacattaatgactatggcgccgatgtcgcagtgaaagtggccgttaaat

SEQ ID NO: 200716 - DNA, 75 bp, synthetic construct
  source 1..75: mol_type = other DNA
ggccaatcagaaaaatgaaggccagaacgtgctgcagctggcgatccgttcgcgctttaaatttatttatcgtcc

SEQ ID NO: 200717 - DNA, 75 bp, synthetic construct
  source 1..75: mol_type = other DNA
gtcagccgcattgcgcggggggacggaaaaaacctgaatgataaagtggtgatgctggctccgcaatccggtcag

SEQ ID NO: 200718 - DNA, 75 bp, synthetic construct
  source 1..75: mol_type = other DNA
ttcagacccgtaagctatacaccgtaccacaggtatcagctgtaccggatggactggttaaagccgtgcgtttct

SEQ ID NO: 200719 - DNA, 75 bp, synthetic construct
  source 1..75: mol_type = other DNA
agaatccagagctgtggacggagctacatcacgatcctgattacggcagcgttgatgagaattgccacttccata

SEQ ID NO: 200720 - DNA, 75 bp, synthetic construct
  source 1..75: mol_type = other DNA
gcaaaggcgagaccctgaccgttaacaacattaatgattatggtgcagatgtcgcagtgaaagttaccgtcaaat

SEQ ID NO: 200721 - DNA, 75 bp, synthetic construct
  source 1..75: mol_type = other DNA
agcatggcaggttggtgaatcgctgaaacctggcgataaccgttgtgctggggtaagaaatgaatattccgcgtt

SEQ ID NO: 200722 - DNA, 75 bp, synthetic construct
  source 1..75: mol_type = other DNA
tgtcaccatcatggatcccgatccggattcagcggtgatttctcgttttttcgaatccctgaaagccaaaattca

SEQ ID NO: 200723 - DNA, 75 bp, synthetic construct
  source 1..75: mol_type = other DNA
gagcccctttcaagccaagaacaggaacaggaacaagaacaggaaagggataaaacccttctggtccatggcgaa

SEQ ID NO: 200724 - DNA, 75 bp, synthetic construct
  source 1..75: mol_type = other DNA
tggatttctattggcatcctcgcccttgtggcactaatcctctggcgctatacacgaaatcgtaatttaatggat

SEQ ID NO: 200725 - DNA, 75 bp, synthetic construct
  source 1..75: mol_type = other DNA
gtgttatctctcgcaatactgtttgctgtaacgcatatacatcaacttatcgtatttattgagagagtcgcatga

SEQ ID NO: 200726 - DNA, 75 bp, synthetic construct
  source 1..75: mol_type = other DNA
ggagcgcacatcactggcgtggtttcgtaccatgctgggctacggcgcgttgatggcgttggctatcaaacacaa

SEQ ID NO: 200727 - DNA, 75 bp, synthetic construct
  source 1..75: mol_type = other DNA
cgcgattctggctgggagaaacggggaaagaactcagaaaggcaggcgcagaagcgcaggtggttgctttttacc

SEQ ID NO: 200728 - DNA, 75 bp, synthetic construct
  source 1..75: mol_type = other DNA
acatcctgctggagataaccacgctggtggataacgcattggatctggctgaaattactgaagaatattcacact

SEQ ID NO: 200729 - DNA, 75 bp, synthetic construct
  source 1..75: mol_type = other DNA
atgattatggcgatttgcagatcaatattctttttacttctcgccagatgattatcgaaaccttcatttgtccgg

SEQ ID NO: 200730 - DNA, 75 bp, synthetic construct
  source 1..75: mol_type = other DNA
gattcaattttgcagacgatgcaggggcgggtacttgatggtgatttaatcactggatgggaaaaacgccaggtg

SEQ ID NO: 200731 - DNA, 75 bp, synthetic construct
  source 1..75: mol_type = other DNA
tggcaatgattccatagatctggatgcaggttgcgttcttctggatgtggcaggtaataaaattgacaccatctg

SEQ ID NO: 200732 - DNA, 75 bp, synthetic construct
  source 1..75: mol_type = other DNA
tcaatatttccagttgtattcgtctgcacggccacaatacctcaacttacctctccgtcgccaacccgcaggaag

SEQ ID NO: 200733 - DNA, 75 bp, synthetic construct
  source 1..75: mol_type = other DNA
cggcaaatataaaggtcgtaaacctaatcaagccagatatgacgcaattaacaggttgattgagagcggaagctc

SEQ ID NO: 200734 - DNA, 75 bp, synthetic construct
  source 1..75: mol_type = other DNA
tcgccggaattcagcaaggggcttcgaagaggctttaaaggggcttctaagccaagaacaggaacaggagaaaga

SEQ ID NO: 200735 - DNA, 75 bp, synthetic construct
  source 1..75: mol_type = other DNA
aagcctggagataaccgttgtgcaggtgtcaggaatgagtatgcatcattacctgaaaacgcctttctgtcagcc

SEQ ID NO: 200736 - DNA, 75 bp, synthetic construct
  source 1..75: mol_type = other DNA
tagccgaaattctgtaaggggcttcgaaggggcttttaaggggcttcgaagccaagaacaggagcaggagaaaga

SEQ ID NO: 200737 - DNA, 75 bp, synthetic construct
  source 1..75: mol_type = other DNA
cagtgtatatccacctcctggtgagcgcgtcacgaaatgtcacgcgaggtcacattgatgtcacgacagaagatt

SEQ ID NO: 200738 - DNA, 75 bp, synthetic construct
  source 1..75: mol_type = other DNA
gcgtttctatgagcaggttaagcgtgaaaatccgccagccgaaactggagcatggaaagacgctgttgattgggt

SEQ ID NO: 200739 - DNA, 75 bp, synthetic construct
  source 1..75: mol_type = other DNA
gaagatgggtgcatgtgtgttgacggggtcggtgagtatgtaagtcactcgctgcctggtggaacgtaccagcta

SEQ ID NO: 200740 - DNA, 75 bp, synthetic construct
  source 1..75: mol_type = other DNA
ggaataccagggtcaaggtctggccacccgcgccgcaaaattagcaatggactatggctttaccgtacttaatct

SEQ ID NO: 200741 - DNA, 75 bp, synthetic construct
  source 1..75: mol_type = other DNA
gaaattaaccacgtccatcgccgcgcagaatttcagataatcatctccccggaataccagggtaaaggtctggca

SEQ ID NO: 200742 - DNA, 75 bp, synthetic construct
  source 1..75: mol_type = other DNA
tggtggcgctggcgtttgtctggggctggctgacagctgactggcggcgcgacagtctggagctggcaatcaata

SEQ ID NO: 200743 - DNA, 75 bp, synthetic construct
  source 1..75: mol_type = other DNA
atgactgataaaaccattgcgttttcgctactcgatctggcccccattcccgaaggttcttcagcgcgagaagca

SEQ ID NO: 200744 - DNA, 75 bp, synthetic construct
  source 1..75: mol_type = other DNA
gtctgtctgacgagtttgtcagcatgtacaacagcgccgtcgccggtaccgaacgtgcgttatcaggaaaacctg

SEQ ID NO: 200745 - DNA, 75 bp, synthetic construct
  source 1..75: mol_type = other DNA
tattcacccttgctctggcatttatagccggctggaaaacggccggctggcagcgggacagtattgatctgactg

SEQ ID NO: 200746 - DNA, 75 bp, synthetic construct
  source 1..75: mol_type = other DNA
tcgtcgccgccatggcattagcggcagagcaggcgggcgcggtcgccattcgtattgaaggtgtggcaaatctgc

SEQ ID NO: 200747 - DNA, 75 bp, synthetic construct
  source 1..75: mol_type = other DNA
atgccgtttgagttcgccggaatcatccgcggtctgtatgaacgcgtgcccaacattgataacgccattatttcc

SEQ ID NO: 200748 - DNA, 75 bp, synthetic construct
  source 1..75: mol_type = other DNA
tctaagtggcgattacacgctgattctggtcgatggacgacgtcagagcggtcgggaatccagaccaaatggcag

SEQ ID NO: 200749 - DNA, 75 bp, synthetic construct
  source 1..75: mol_type = other DNA
aaaaaccggatatcagtatacgtggtctaagtggcgattacacgctgattctggtcgatggacgacgtcagagcg

SEQ ID NO: 200750 - DNA, 75 bp, synthetic construct
  source 1..75: mol_type = other DNA
ttaccgcctacattgaagatgttgatgcgctggcacaggcgggcgcggacattatcgcgattgatggcaccgatc

SEQ ID NO: 200751 - DNA, 75 bp, synthetic construct
  source 1..75: mol_type = other DNA
aaaaaatcgcggctaacggtggcctgattgtctcctgtcagccggtgccggacagcccgctcgacaaacctgaaa

SEQ ID NO: 200752 - DNA, 75 bp, synthetic construct
  source 1..75: mol_type = other DNA
ctaaccactcaccattggtgatcgccgaacagttcggcacgctcaatacgctctatccggggcgaatcgatttgg

SEQ ID NO: 200753 - DNA, 75 bp, synthetic construct
  source 1..75: mol_type = other DNA
tgatatatctgctgtagtaagtgaatgtatatcctcattatctccaatttttatttatatacctgaagatcgtaa

SEQ ID NO: 200754 - DNA, 75 bp, synthetic construct
  source 1..75: mol_type = other DNA
aaaacattagaaacgatccaagatgcattacaaaatagtttcatagatcgttcttgcatgctttcaattgctaac

SEQ ID NO: 200755 - DNA, 75 bp, synthetic construct
  source 1..75: mol_type = other DNA
atggctctcactgatgtcaaagtaagaaacaccaaacccgccgataagcctgtaaagctcacagacagcagcggc

SEQ ID NO: 200756 - DNA, 75 bp, synthetic construct
  source 1..75: mol_type = other DNA
ctccgactgattggcgggcagatcgcgccagataacggcgagatcctttttgatggcgagaatattccggcaatg

SEQ ID NO: 200757 - DNA, 75 bp, synthetic construct
  source 1..75: mol_type = other DNA
taaaaaaaggtgacattataatgggccgaagaggagaaatgggtcgttgtgcactgattaatgataaagaggatg

SEQ ID NO: 200758 - DNA, 75 bp, synthetic construct
  source 1..75: mol_type = other DNA
ttggcctgctcgcttttctgctgccttgcgcactggcattgagcacaactgttcatgccgaaactaacaaactgg

SEQ ID NO: 200759 - DNA, 75 bp, synthetic construct
  source 1..75: mol_type = other DNA
gtgcagcaggcgctgagtatgtcgctggtgggtgataaagcgaaagtgcgtcatggcttgcagtcgatcctgcgc

SEQ ID NO: 200760 - DNA, 75 bp, synthetic construct
  source 1..75: mol_type = other DNA
ttaacggacagatttttgaccaccaggcgcggctgcattcgtttgatctggcgatggatgtgaaggaagagttgt

SEQ ID NO: 200761 - DNA, 75 bp, synthetic construct
  source 1..75: mol_type = other DNA
gtgcagcaggcgctgagtatgtcgctggtgggcgataaagcgaaagtgcgtcatggtttgcagtcgatcctgcgc

SEQ ID NO: 200762 - DNA, 75 bp, synthetic construct
  source 1..75: mol_type = other DNA
catggagcgccagtggcctgagccaaaagatggtgagcctcgcttgcacattaaagaacccggcaactctccggt

SEQ ID NO: 200763 - DNA, 75 bp, synthetic construct
  source 1..75: mol_type = other DNA
gcagaacgtgcactatcaggaaaatctgctgacaaagtgcccggaaaaactgccgcgcctgcaggggaaagcagg

SEQ ID NO: 200764 - DNA, 75 bp, synthetic construct
  source 1..75: mol_type = other DNA
gaaaccgacgccgatgagattatggttaacgggcagattttcgaccaccaggcgcgcctgcattcgtttgagctg

SEQ ID NO: 200765 - DNA, 75 bp, synthetic construct
  source 1..75: mol_type = other DNA
atggacgaactgatcagaaaggcactctttaaaccctatctgaagttgaataagcaaagcagcgagacgcagcag

SEQ ID NO: 200766 - DNA, 75 bp, synthetic construct
  source 1..75: mol_type = other DNA
ccgtcgcacgattgcatcacatgaatatctcagtcaggatgaaccgccccgggtttcctggagagtgttttatct

SEQ ID NO: 200767 - DNA, 75 bp, synthetic construct
  source 1..75: mol_type = other DNA
cattgttaagcgcgccagcaaatactggccccgtcgcgatcgcctggatacagctatcgactacctgaacactca

SEQ ID NO: 200768 - DNA, 75 bp, synthetic construct
  source 1..75: mol_type = other DNA
cgcacgcccgctatcccgtatgaggatttaagcgtggcgcgctacagccgtggatttacgccatcgcgcccgggt

SEQ ID NO: 200769 - DNA, 75 bp, synthetic construct
  source 1..75: mol_type = other DNA
tgcttcccttatgttccaaaacattccgtcgcacgattgcatcacatgaatatctcagtcaggaagaagctgtca

SEQ ID NO: 200770 - DNA, 75 bp, synthetic construct
  source 1..75: mol_type = other DNA
ggaggaagtagcccgtgggatagcttccccgacgaaatggccagaaaagccattgttaagcgcgccagcaaatac

SEQ ID NO: 200771 - DNA, 75 bp, synthetic construct
  source 1..75: mol_type = other DNA
gtgatcgtggtgatattgttggcgtttactgcacagttaagacgccagcaggtgattatctaacggaagagatga

SEQ ID NO: 200772 - DNA, 75 bp, synthetic construct
  source 1..75: mol_type = other DNA
tggaaagagtccccctaaagcagactgacagacatcacaaatccccgggtggggatttgtgtataagagacaggg

SEQ ID NO: 200773 - DNA, 75 bp, synthetic construct
  source 1..75: mol_type = other DNA
ttatcaggcctacgagtcggatacacatccggcatcacacagactctgaaaccgtggggggggggggcccccccc

SEQ ID NO: 200774 - DNA, 75 bp, synthetic construct
  source 1..75: mol_type = other DNA
cagctatcgactacctgaacactcaggccggtgaaggtatcatcctgaatgctgatcatatccctgtgaaccgcc

SEQ ID NO: 200775 - DNA, 75 bp, synthetic construct
  source 1..75: mol_type = other DNA
tcgcaatggataagacatgggaagaaaacctgctcccagtctgttcgcaaattttccgtcgtgatattcgcgatt

SEQ ID NO: 200776 - DNA, 75 bp, synthetic construct
  source 1..75: mol_type = other DNA
aaattgcagcagaacgtacaagccatttacgcagaatgcaaagcgaaactggaggttgccagtgagcaaactgta

SEQ ID NO: 200777 - DNA, 75 bp, synthetic construct
  source 1..75: mol_type = other DNA
agaatagttttaaacaaaataccccactccccctctgccaacccaatacagattttaaagattatatagccgatg

SEQ ID NO: 200778 - DNA, 75 bp, synthetic construct
  source 1..75: mol_type = other DNA
aaaggaggaaataagttacttgagttgtcgatggattacagtattgacctcttacacgctgataacgcattaacc

SEQ ID NO: 200779 - DNA, 75 bp, synthetic construct
  source 1..75: mol_type = other DNA
gttgacatttgccaccaggaagagcgtaaggccgatattgcttttcagaatgtgacaagttttggtgatgatgtg

SEQ ID NO: 200780 - DNA, 75 bp, synthetic construct
  source 1..75: mol_type = other DNA
ataaccaacccccatcagaaaataaattggcgatacaatatgcacaggttgacgcttcactacttggagagtatg

SEQ ID NO: 200781 - DNA, 75 bp, synthetic construct
  source 1..75: mol_type = other DNA
cggcggcgctgcaagctgtacctgaacaaaatattgatataacaaatagcgaaaacgcattaattattaaaatga

SEQ ID NO: 200782 - DNA, 75 bp, synthetic construct
  source 1..75: mol_type = other DNA
ctgggcctgccgctctcgtgctgttcgaccgtctgactgggagcagtggatggaggtaacagaggttgtaccggc

SEQ ID NO: 200783 - DNA, 75 bp, synthetic construct
  source 1..75: mol_type = other DNA
actttagccctcagggtatgcacatcagcgacgacgtgaaaggaacctctccggaccgccttacaggaacagatg

SEQ ID NO: 200784 - DNA, 75 bp, synthetic construct
  source 1..75: mol_type = other DNA
ttcaacaagattcctcgccaagaacacaatagtatcatcaataatttaatatcattgagcacagcaaaaacaatt

SEQ ID NO: 200785 - DNA, 75 bp, synthetic construct
  source 1..75: mol_type = other DNA
tggtgctgaagtggataacttttatcgaattaccccgaaaatatctaataatacatctaaccagagacaaccaaa

SEQ ID NO: 200786 - DNA, 75 bp, synthetic construct
  source 1..75: mol_type = other DNA
tttactcattgcgacagttgatggtcggtgcctacttatggaagtgaagccaacagaccgaatgaccttgagtct

SEQ ID NO: 200787 - DNA, 75 bp, synthetic construct
  source 1..75: mol_type = other DNA
gatgcatggaaatgggaaaatggcgttacgttttcagtaaaaatagaagctaaagatggtagagcaacccgctat

SEQ ID NO: 200788 - DNA, 75 bp, synthetic construct
  source 1..75: mol_type = other DNA
tgacgctccctggcgtgcaggttcctatggaatatgcgcgtgacgggcaaatcgtactcaacattgcgccgcgtg

SEQ ID NO: 200789 - DNA, 75 bp, synthetic construct
  source 1..75: mol_type = other DNA
cgcattaaccgaacatgagcttgtggcgctgtgggaaaatatcacggggacgataaaatatcatccaacgcaatg

SEQ ID NO: 200790 - DNA, 75 bp, synthetic construct
  source 1..75: mol_type = other DNA
tcacggctctgagcttcggctgcttccgtcacgatggcgagaacgttacggtggtcctttcacgtgatggtgact

SEQ ID NO: 200791 - DNA, 75 bp, synthetic construct
  source 1..75: mol_type = other DNA
atgactatgactaaagacagctatcagttcggcattgagccagtacgtatcaccgacaccgacaacattcggatt

SEQ ID NO: 200792 - DNA, 75 bp, synthetic construct
  source 1..75: mol_type = other DNA
ctattacaacggtgaagacaagggtgtattcatgctggctaaacgcttcacggctctgagcttcggttgcttccg

SEQ ID NO: 200793 - DNA, 75 bp, synthetic construct
  source 1..75: mol_type = other DNA
cctgtctgtcctttggctgcttccgtcatgatggtgagcatatcaccgtggtcctctctcgcgatggtgactctc

SEQ ID NO: 200794 - DNA, 75 bp, synthetic construct
  source 1..75: mol_type = other DNA
gctacgaccgtcaagatgggcactggctcagctactgccgtcctgcctgtagtcaaacgcctgaagttcaccaag

SEQ ID NO: 200795 - DNA, 75 bp, synthetic construct
  source 1..75: mol_type = other DNA
gtattacaacggtgaagaccgtggcgtgttcatgatggctaagcgttttacggctctgagcttcggttgcttccg

SEQ ID NO: 200796 - DNA, 75 bp, synthetic construct
  source 1..75: mol_type = other DNA
cgtagcaaaaacaatgaatctggatcagaggactgtagcgccactgatcgttcagttttttggagatgtaaacga

SEQ ID NO: 200797 - DNA, 75 bp, synthetic construct
  source 1..75: mol_type = other DNA
caggcggcgatggatcagattcacgagcgcgacctggtcgagctgattaaagcctgcacccagccggtgctgggt

SEQ ID NO: 200798 - DNA, 75 bp, synthetic construct
  source 1..75: mol_type = other DNA
tccggagccagagtggcgatttatagcctgacagaaggcgcggtaagacgcgcgaaacggatgctggaaacgctg

SEQ ID NO: 200799 - DNA, 75 bp, synthetic construct
  source 1..75: mol_type = other DNA
ctgactggtagcctgaccgctaaggcagacactatcatagacgcgctgtatgagtacaccgagtcttctttcggt

SEQ ID NO: 200800 - DNA, 75 bp, synthetic construct
  source 1..75: mol_type = other DNA
cagacgctatcatggacgctctgtatgagaacacagagtcttctttcggttctgaggtgtctgactacggtatta

SEQ ID NO: 200801 - DNA, 75 bp, synthetic construct
  source 1..75: mol_type = other DNA
cctgccgacccgtaacagcttaccgactccaatcattgctcacactctggctgaccgctctgtgctggtccctgt

SEQ ID NO: 200802 - DNA, 75 bp, synthetic construct
  source 1..75: mol_type = other DNA
cattgagcctgttcgtatcaccgacaccgacaacctccagattaacgaaggcttgccgactaacgcagacccgca

SEQ ID NO: 200803 - DNA, 75 bp, synthetic construct
  source 1..75: mol_type = other DNA
aggcgtagaacatctctatgaagtcggcccgggcaaagtgcttactggcctgacgaaacgcattgtcgacaccct

SEQ ID NO: 200804 - DNA, 75 bp, synthetic construct
  source 1..75: mol_type = other DNA
ttaacttcaactctccgggccaggtggttattgcgggtcataaagaagctgttgagcgtgcaggcgccgcctgta

SEQ ID NO: 200805 - DNA, 75 bp, synthetic construct
  source 1..75: mol_type = other DNA
gggccagccgaagaactgaataaaacctggcaaacccagccagcattgttgactgcatccgttgcactgtaccgc

SEQ ID NO: 200806 - DNA, 75 bp, synthetic construct
  source 1..75: mol_type = other DNA
ttatgcgcgccggttctaccggtagccagaaatactccaccatgatgtgggcgggtgaccagaacgtggactgga

SEQ ID NO: 200807 - DNA, 75 bp, synthetic construct
  source 1..75: mol_type = other DNA
cctgggtgaatactccgcgctggtttgcgctggtgtgattgattttgctgatgcggtgcgtctggttgagatgcg

SEQ ID NO: 200808 - DNA, 75 bp, synthetic construct
  source 1..75: mol_type = other DNA
tatccaattgtcgaagaaacgtttgcagaagcttctgcggcgctgggctacgatctgtgggcgctgacccagcag

SEQ ID NO: 200809 - DNA, 75 bp, synthetic construct
  source 1..75: mol_type = other DNA
cggcgtttcgtcgtgcggggttcctgttcacgcgtggacgtcagcaggttgaggtcaccccggagcagcttgccc

SEQ ID NO: 200810 - DNA, 75 bp, synthetic construct
  source 1..75: mol_type = other DNA
gaagccgaagccgaagccgaagccggacaggatgctccccggaaaaagaccggcaataaagccagacaggaaaaa

SEQ ID NO: 200811 - DNA, 75 bp, synthetic construct
  source 1..75: mol_type = other DNA
tttagccgaagccggacaggatgctccccggaaaaagaccggcaataaagccagacaggcgaaaaaggctcgcgc

SEQ ID NO: 200812 - DNA, 75 bp, synthetic construct
  source 1..75: mol_type = other DNA
tttagccgaagccgaagccggacaggatgctccccggaaaaagaccggtaacaaagcgaaacaggcccgcgcatg

SEQ ID NO: 200813 - DNA, 75 bp, synthetic construct
  source 1..75: mol_type = other DNA
gactggaagcggagccatgcctcactgtacgaatactacagacgcctggtgatgatgcgggagccgtggcggatg

SEQ ID NO: 200814 - DNA, 75 bp, synthetic construct
  source 1..75: mol_type = other DNA
aagccgaagccggacaggatgctccccggaaaaagaccggtagcaagcgaaaccggcgagaaaggcccgtgcatg

SEQ ID NO: 200815 - DNA, 75 bp, synthetic construct
  source 1..75: mol_type = other DNA
attggtcgggcgatttatgatcagagtgtggaaaatgattccagcctgattcccgacgttaaacctaacgttccc

SEQ ID NO: 200816 - DNA, 75 bp, synthetic construct
  source 1..75: mol_type = other DNA
tctgctcacgatcgataaaacgccctttcagatcgccgagctgaacgcacaggctcagctggcgaaagcgcaatc

SEQ ID NO: 200817 - DNA, 75 bp, synthetic construct
  source 1..75: mol_type = other DNA
atgataatggacacaagcaagcctttagctctattaacatttccagtggtcgtgcaacagttatactttcagatg

SEQ ID NO: 200818 - DNA, 75 bp, synthetic construct
  source 1..75: mol_type = other DNA
tgacctcgctgataatgacttttttcggcatccccatactggcgcaatttttggcagcggttgttgccatgctgg

SEQ ID NO: 200819 - DNA, 75 bp, synthetic construct
  source 1..75: mol_type = other DNA
atgaaagtctacgcgatgcagggcgacaccatcgacgcgctttgcgcccggtattacgggcgcactgagggcgtg

SEQ ID NO: 200820 - DNA, 75 bp, synthetic construct
  source 1..75: mol_type = other DNA
tggccgaactcggcgcagtgctgccacatggcacggtggtcgaactgcccgacgtccagtcatcccccgtaactg

SEQ ID NO: 200821 - DNA, 75 bp, synthetic construct
  source 1..75: mol_type = other DNA
taaaggataaaaatggaaatcttacaccggtatatacaaatggtggtttcctaactggaggaactatcagtgctt

SEQ ID NO: 200822 - DNA, 75 bp, synthetic construct
  source 1..75: mol_type = other DNA
gaccagggaatgcaactgagtatgaaagacaaagactatcacccactaattggtcgaacaggtgtggatgtaggt

SEQ ID NO: 200823 - DNA, 75 bp, synthetic construct
  source 1..75: mol_type = other DNA
aagacctaaatgcaggtaaaaatcttcaatttacaggaaataatggagaggttattttacacgactctatagatc

SEQ ID NO: 200824 - DNA, 75 bp, synthetic construct
  source 1..75: mol_type = other DNA
atcatatgactctaaaaaggggaacttacaatggagatatgataaaaacgcaggagtgggaacattaagtcaaga

SEQ ID NO: 200825 - DNA, 75 bp, synthetic construct
  source 1..75: mol_type = other DNA
acaatatgcgttttggtctggagttggagaagtcggcgtttgggagatataatatagacaactctataaatgcta

SEQ ID NO: 200826 - DNA, 75 bp, synthetic construct
  source 1..75: mol_type = other DNA
atcatatgactctaaaaaggggagcttacaatggagatatgataaagacgcaggagtgggaacattaagtcaaga

SEQ ID NO: 200827 - DNA, 75 bp, synthetic construct
  source 1..75: mol_type = other DNA
tacatctggcagattatcaatttcgccagatgggagctggttggttggcaaaccttatgcttccctggttgggcg

SEQ ID NO: 200828 - DNA, 75 bp, synthetic construct
  source 1..75: mol_type = other DNA
tacagcttgatgccgaagataaaaaagcgatcgccgcactggattgcaacgaccgcctggttagcccggaaggtc

SEQ ID NO: 200829 - DNA, 75 bp, synthetic construct
  source 1..75: mol_type = other DNA
gaaaaactccctgctatcgcagataaagatatcggtttcattctcaagaataccggcatgacgctactttccagc

SEQ ID NO: 200830 - DNA, 75 bp, synthetic construct
  source 1..75: mol_type = other DNA
gtggcgaaagcgaaatagaaaaacgcgtccagactgtactggaacaggttggcttacctttcgacgccgctcgtc

SEQ ID NO: 200831 - DNA, 75 bp, synthetic construct
  source 1..75: mol_type = other DNA
aaataaaaatcgaaaagcttaaagaatataaaaccaccctgatcaacagcgccgtgacaggaaaaatcaagatca

SEQ ID NO: 200832 - DNA, 75 bp, synthetic construct
  source 1..75: mol_type = other DNA
atatgtgcaaaagccagttggatcttgtgcatatcgttgttgatgcggggaaggcttgtgatggcggaatggcgg

SEQ ID NO: 200833 - DNA, 75 bp, synthetic construct
  source 1..75: mol_type = other DNA
gatttcgttaccccgaaaaacctgttggaagtcttgcttaataaaggggctaatgatgccgtaaatgtaatcaga

SEQ ID NO: 200834 - DNA, 75 bp, synthetic construct
  source 1..75: mol_type = other DNA
aagggaaactaatgctggatgatactcagctcaaattagatttagacctcccagaaggtgagattgtcccattgc

SEQ ID NO: 200835 - DNA, 75 bp, synthetic construct
  source 1..75: mol_type = other DNA
tactgagtaagctgggggctgcgaagaatgaagatgacatcaccaatagcaaagggaaaagcggccacaacagag

SEQ ID NO: 200836 - DNA, 75 bp, synthetic construct
  source 1..75: mol_type = other DNA
aaaaggcggtggaaaaatattgtgagatccatgatttgacggatgagcagtatgttgagttgcttgaccgtatgc

SEQ ID NO: 200837 - DNA, 75 bp, synthetic construct
  source 1..75: mol_type = other DNA
tctgctggtcagccacgatgcagatgtcatcgcgcacatgtctgaccgggcggcaatgatggatggagggaaaat

SEQ ID NO: 200838 - DNA, 75 bp, synthetic construct
  source 1..75: mol_type = other DNA
cccaagacctcacgtgggcaatatttctatggtgagggggtgagtgcagcccgcgacattctggctccgaaaggc

SEQ ID NO: 200839 - DNA, 75 bp, synthetic construct
  source 1..75: mol_type = other DNA
aggcggcaatatcggagcggcaggttctgtcagctatatgtttgacaatacgggtgtgattgtatttaaaggaac

SEQ ID NO: 200840 - DNA, 75 bp, synthetic construct
  source 1..75: mol_type = other DNA
cgcgggcggcgaagccctgcctgccacccgttgcagtctggcaattgcttcttacacggctactggaaaaacact

SEQ ID NO: 200841 - DNA, 75 bp, synthetic construct
  source 1..75: mol_type = other DNA
atgaaaactctacctgctacaatttcgcgggcggcgaagccctgtctgacgcccgtggctgcctggcaaatgtta

SEQ ID NO: 200842 - DNA, 75 bp, synthetic construct
  source 1..75: mol_type = other DNA
gagttctcaaggcattgcgtgataatacagagctccggagaatatttacagaacaaagcaacacacaagaaccaa

SEQ ID NO: 200843 - DNA, 75 bp, synthetic construct
  source 1..75: mol_type = other DNA
gggcctgtgcgcacttcacgaataacgtcgcgtatgcatttcaactggcgggctacacggctgccatcatcgcct

SEQ ID NO: 200844 - DNA, 75 bp, synthetic construct
  source 1..75: mol_type = other DNA
agtgatggacgtcaccggctggctggggggctataacttccagtgggcgtggtcgagtgcatgggcttgtgcgca

SEQ ID NO: 200845 - DNA, 75 bp, synthetic construct
  source 1..75: mol_type = other DNA
cgatattctccgcgcccgtaaggcctgtggactgatgacacgtaacggctacagagcggtgacagatatcactac

SEQ ID NO: 200846 - DNA, 75 bp, synthetic construct
  source 1..75: mol_type = other DNA
atgcaaaccagcccgctgttaacacagcttatggaagcactgcgctgtctgtcgggcgttggcccgaagtcggcg

SEQ ID NO: 200847 - DNA, 75 bp, synthetic construct
  source 1..75: mol_type = other DNA
tgaccctttctcctgaactggcacgcctggcaaggcaatattcatatcacggatttgctgaaggtaaaaagaata

SEQ ID NO: 200848 - DNA, 75 bp, synthetic construct
  source 1..75: mol_type = other DNA
atctgccactgcataaccatatgtcgctccaggagcaaaacatcgttatcgaggtactgcatgactattttaaat

SEQ ID NO: 200849 - DNA, 75 bp, synthetic construct
  source 1..75: mol_type = other DNA
gataccagtttatgcctacctcaggatataagtgatacatcgctaaatcgttatcgtcacgctgttcagcgcatt

SEQ ID NO: 200850 - DNA, 75 bp, synthetic construct
  source 1..75: mol_type = other DNA
aatgtttttcattcggcaatgctcacgaaaattgagcgcctgaaaccgttccatgtcattattttctcaccgttt

SEQ ID NO: 200851 - DNA, 75 bp, synthetic construct
  source 1..75: mol_type = other DNA
cacctctatctgagcttgtttccacaggtgagttagcacatctactaaatcttaaagcccaaacaattagaaaat

SEQ ID NO: 200852 - DNA, 75 bp, synthetic construct
  source 1..75: mol_type = other DNA
ttttgcgaccggggtccgatgcccgcaaaagccgccgtcatattcgcgcactgcgacgggattttgtcgatcaac

SEQ ID NO: 200853 - DNA, 75 bp, synthetic construct
  source 1..75: mol_type = other DNA
agtgatggacgtcaccggctggctgggggctataacttccagtgggcgtggtcgagtgcgtgggcttgtgcgcag

SEQ ID NO: 200854 - DNA, 75 bp, synthetic construct
  source 1..75: mol_type = other DNA
aatttccagctactggcaaccgggtgaatttgtcagtatcaatctgctaccggatgtggacctcgaaaccttcct

SEQ ID NO: 200855 - DNA, 75 bp, synthetic construct
  source 1..75: mol_type = other DNA
ggcagaaagtgaatctgttgcttaaacgcggtcagcaggaatacgtcttcccgacccaggtggcgcgcgtgatgg

SEQ ID NO: 200856 - DNA, 75 bp, synthetic construct
  source 1..75: mol_type = other DNA
ttgcacactcctgcacctcagagttactggcacacctgaatcaataccatgaaattgatgaatcagcaatacttg

SEQ ID NO: 200857 - DNA, 75 bp, synthetic construct
  source 1..75: mol_type = other DNA
agttaacggattctacaagaaaaataatacagaccttccagaatggctatccccctttaaagaggaacataaaat

SEQ ID NO: 200858 - DNA, 75 bp, synthetic construct
  source 1..75: mol_type = other DNA
atgctgaatgttgcagtctcccgtgcgaaggatagcttcctggtcttcggcgatatggatctgtttgagatccag

SEQ ID NO: 200859 - DNA, 75 bp, synthetic construct
  source 1..75: mol_type = other DNA
cgcccaacaaactctgccgattatcgacacgtcgctttttggctgcgtttacgctatttctgccaactgtattta

SEQ ID NO: 200860 - DNA, 75 bp, synthetic construct
  source 1..75: mol_type = other DNA
gctaccgctcttttaactgcgttaaaaaatatgcacgcccgcttactggagcatgccagtttgctctggcagcct

SEQ ID NO: 200861 - DNA, 75 bp, synthetic construct
  source 1..75: mol_type = other DNA
ttgtgcggcggcatgatgatgatgatcctgccgagcagttccgatgctacagcccttttaaccgcattgaaaaac

SEQ ID NO: 200862 - DNA, 75 bp, synthetic construct
  source 1..75: mol_type = other DNA
atgaaatgcaaatcggtatcaaaaaaatcgccgcgctatacgtggtatatcgcaccaccgacgctggtggcgctg

SEQ ID NO: 200863 - DNA, 75 bp, synthetic construct
  source 1..75: mol_type = other DNA
ttctgcgacctgggtcggatgctcgtaaaagccgtcgtcatattcgcgcactgcgccgggattttgtcgaccaac

SEQ ID NO: 200864 - DNA, 75 bp, synthetic construct
  source 1..75: mol_type = other DNA
taatctggcgaaaattgttggcgtggcgctggcgtggttagcgttcgccattctgcgacctggatctgatgcccg

SEQ ID NO: 200865 - DNA, 75 bp, synthetic construct
  source 1..75: mol_type = other DNA
tattgttatttatactgaacctactgaccttcataaaggaatcgcggctctaaaagcagctggaatcactgagtt

SEQ ID NO: 200866 - DNA, 75 bp, synthetic construct
  source 1..75: mol_type = other DNA
tctgtcagctatatgtttgacaatacgggtgtgattgtatttaaagggacagaccctgaccatatttttgaaatt

SEQ ID NO: 200867 - DNA, 75 bp, synthetic construct
  source 1..75: mol_type = other DNA
ttccgcggtaatttcagcattaaagataaattgcaggagaaaattgcgctgaccgacgccatcgtcagccagtca

SEQ ID NO: 200868 - DNA, 75 bp, synthetic construct
  source 1..75: mol_type = other DNA
ccatgccaggcgcagcatcggcactaacgctgcccgcctggtaaaagggattcccttccgggaactccactcata

SEQ ID NO: 200869 - DNA, 75 bp, synthetic construct
  source 1..75: mol_type = other DNA
ctattgtcgttacggaaataggtgactgtatcagtacatggaatgaggtgcttcttggcattgaagaggaaggca

SEQ ID NO: 200870 - DNA, 75 bp, synthetic construct
  source 1..75: mol_type = other DNA
cagaagatttagaaatctttgaagggcttgttgatgcccttgaagatgacgatgatgtacaaaaagtttatcata

SEQ ID NO: 200871 - DNA, 75 bp, synthetic construct
  source 1..75: mol_type = other DNA
gactggagtctggacgatggcctggcgtcggttgtcccggcggcgctgtcgctggcaatgaccggacatggcctg

SEQ ID NO: 200872 - DNA, 75 bp, synthetic construct
  source 1..75: mol_type = other DNA
tggcgagttctacggcggcgttgtcgatctcactaatccggaagcctacgcctggttcaaggaagtgatcaaaaa

SEQ ID NO: 200873 - DNA, 75 bp, synthetic construct
  source 1..75: mol_type = other DNA
ccccggaataccatgaactggcgctgtgggaagacaaagcaacgctgcgttttgaatgtgctgacacatacattt

SEQ ID NO: 200874 - DNA, 75 bp, synthetic construct
  source 1..75: mol_type = other DNA
cgcggttatctggcaaaagatgcctctggcggcgactatctggtggagtttggcgagttctatggcggcgttgtc

SEQ ID NO: 200875 - DNA, 75 bp, synthetic construct
  source 1..75: mol_type = other DNA
aagataatccttgtttatcgattggctcaggtattgcggatattgatatgttccgtggcaatttcagcattaaag

SEQ ID NO: 200876 - DNA, 75 bp, synthetic construct
  source 1..75: mol_type = other DNA
cccgtatgaccaccgtcttcaccaccctgaaaccttacctgaaagaggccgtcgcgctgaatgcgaagtccggcc

SEQ ID NO: 200877 - DNA, 75 bp, synthetic construct
  source 1..75: mol_type = other DNA
ggagtcgtgtggagggggtgatatttaacagcccgaacaagctcaccctcgcgacccgtggcagggagatgtttg

SEQ ID NO: 200878 - DNA, 75 bp, synthetic construct
  source 1..75: mol_type = other DNA
atcgtttacctccccgctggatgttcctgaaaattgaaaccgatgaaggtgtggtcggttggggcgagcccgtga

SEQ ID NO: 200879 - DNA, 75 bp, synthetic construct
  source 1..75: mol_type = other DNA
ccgggatcgaccaggcgttatgggatatcaaaggcaaagtgctgaatgcgccggtctggcaactgatgggcggcc

SEQ ID NO: 200880 - DNA, 75 bp, synthetic construct
  source 1..75: mol_type = other DNA
tttactgccggatacggtttcgaccgtcaggaactcgctggacaaaaaccgcctggaacgccagaactactccgt

SEQ ID NO: 200881 - DNA, 75 bp, synthetic construct
  source 1..75: mol_type = other DNA
acgggaattggtacgggtgcagctatgggcgctgctgttggtggtctccccggtgcggctattggtgctgtcata

SEQ ID NO: 200882 - DNA, 75 bp, synthetic construct
  source 1..75: mol_type = other DNA
acagggaataagtgatgcagacagacgacgtgaagaaattgaggcgtcaaacaagatgatggcggcgcaacagaa

SEQ ID NO: 200883 - DNA, 75 bp, synthetic construct
  source 1..75: mol_type = other DNA
tccacggtcgcgtcagcgcgccgatggcgaaagtgctgattaaagagctggaaccgtatcgcccgctgtttattg

SEQ ID NO: 200884 - DNA, 75 bp, synthetic construct
  source 1..75: mol_type = other DNA
ggcgataaaaccatgtgtgatgtgtgggtgccggtggtggaatcgttacgtcagtccagcgagcaaaatctctct

SEQ ID NO: 200885 - DNA, 75 bp, synthetic construct
  source 1..75: mol_type = other DNA
attggtcaccaggatcccggcgcgacctccgtgatgtttatgatgcaaatgctggcgttagccgcaaaagagtaa

SEQ ID NO: 200886 - DNA, 75 bp, synthetic construct
  source 1..75: mol_type = other DNA
tatcgcgcggggagcgtcaggcaaaagaagccatggtggagggggtgaaaaaacactgcagcgcctaccggatgg

SEQ ID NO: 200887 - DNA, 75 bp, synthetic construct
  source 1..75: mol_type = other DNA
acaaaaaccgcctggaacgccagaactactccgtcagccataatgggcgttgggattacggcaccagcgaactga

SEQ ID NO: 200888 - DNA, 75 bp, synthetic construct
  source 1..75: mol_type = other DNA
atgcaaatcaccaacatgcattgcagtggacagaccgtttcacttgccgcgggggattatcacgcgaccattgtg

SEQ ID NO: 200889 - DNA, 75 bp, synthetic construct
  source 1..75: mol_type = other DNA
catcagatcgttaaaacgcccaatatagacaggcttgcccaggaaggcgtcaaatttaccgactattatgcacct

SEQ ID NO: 200890 - DNA, 75 bp, synthetic construct
  source 1..75: mol_type = other DNA
cctgcgttagcggtgtggcacatacctatatggcggcagaacggctggaaaagttgtgtcagcaggaaaagtgga

SEQ ID NO: 200891 - DNA, 75 bp, synthetic construct
  source 1..75: mol_type = other DNA
gcagtttgccgatggggtgaagtcatccctcaaaaacaagcattcgtcatagaacgaattacgaaaggcaagctg

SEQ ID NO: 200892 - DNA, 75 bp, synthetic construct
  source 1..75: mol_type = other DNA
gtaataaccactgctgcatgcggatacactgagaagaatgccaccgggaatgtgttgctgctgtttctccttctg

SEQ ID NO: 200893 - DNA, 75 bp, synthetic construct
  source 1..75: mol_type = other DNA
cacgtcattttgccatgctttactttcctgaccatgggctgtcggccagcgacagtaccaatcctgttcatcatg

SEQ ID NO: 200894 - DNA, 75 bp, synthetic construct
  source 1..75: mol_type = other DNA
aggctttaaacaccaagaaagaaaaaatcacctgctccgcttttgtccattcagaaactctcttccttgccgttc

SEQ ID NO: 200895 - DNA, 75 bp, synthetic construct
  source 1..75: mol_type = other DNA
atggcaatagttcgcaaagtaaccctaagaggcgatatctttaaaggcgagactattacattcgactaccccgca

SEQ ID NO: 200896 - DNA, 75 bp, synthetic construct
  source 1..75: mol_type = other DNA
cagcgtccccccgcctgcatacggcctcttaatcaggtcgataacttatttattctgccggtcgctgagtgtatt

SEQ ID NO: 200897 - DNA, 75 bp, synthetic construct
  source 1..75: mol_type = other DNA
atgatttaaatgaagatgcggaatttgatgagaatggagttgaggtttttgacgaaaaggccttaagtagaagag

SEQ ID NO: 200898 - DNA, 75 bp, synthetic construct
  source 1..75: mol_type = other DNA
gggctgatggctgaccggctggtgaaaatgctcggcctcgaaccgggctttattatctgcccgttccgcggcgag

SEQ ID NO: 200899 - DNA, 75 bp, synthetic construct
  source 1..75: mol_type = other DNA
cgattgtgcagttattgctggaacacggtgccagcccgcatctgaccgataaatatggcaaaacgccactggaac

SEQ ID NO: 200900 - DNA, 75 bp, synthetic construct
  source 1..75: mol_type = other DNA
atcattttctggtcagtgccgcgattctggtgttcatggttattttctggcggacacaccaccgtggtcaacgta

SEQ ID NO: 200901 - DNA, 75 bp, synthetic construct
  source 1..75: mol_type = other DNA
atcattttctggtcagtgccgcgattcaggtattcatggtgattttctggcgaacacaccgccgtggtcaccgta

SEQ ID NO: 200902 - DNA, 75 bp, synthetic construct
  source 1..75: mol_type = other DNA
tattcatggtgattttctggcgaacacaccaccgcggtcaccgtaactggctggcactgctgctgttcgtattat

SEQ ID NO: 200903 - DNA, 75 bp, synthetic construct
  source 1..75: mol_type = other DNA
cgtctaaggaaatgtgcggagaagaccgtgatgcagcgctgacttttctgattcagcttgaggctatgactgcac

SEQ ID NO: 200904 - DNA, 75 bp, synthetic construct
  source 1..75: mol_type = other DNA
caaggtttcgcggtgctgtcgtatgtgtatgaacacgaaaaacgcgacttagccagccgtattgtttccacccag

SEQ ID NO: 200905 - DNA, 75 bp, synthetic construct
  source 1..75: mol_type = other DNA
catcccggacaccgtgggctacaccatgccatttgagttcgccggaatcatcagcgggctgtatgaacgcgtacc

SEQ ID NO: 200906 - DNA, 75 bp, synthetic construct
  source 1..75: mol_type = other DNA
atggttaaaggaactgttgtggggacaactgacacattgcgtgaaatgcagcgttataaacaactgagtcagcac

SEQ ID NO: 200907 - DNA, 75 bp, synthetic construct
  source 1..75: mol_type = other DNA
attgcctcaatggtttgttcggcattgatgatgcgaaagatgcagataccgacgagcataaacatcagcagaacg

SEQ ID NO: 200908 - DNA, 75 bp, synthetic construct
  source 1..75: mol_type = other DNA
gtggcgatgacgagccggtcgatgaggacaaacgcgagaaaaccgagcgagtcggcgctgaacaccagacgatgc

SEQ ID NO: 200909 - DNA, 75 bp, synthetic construct
  source 1..75: mol_type = other DNA
cacggcaactattaccgatggcgaaaacagtcatacggcaaccgctcttgcacgagaggaagaaagcaagaaagg

SEQ ID NO: 200910 - DNA, 75 bp, synthetic construct
  source 1..75: mol_type = other DNA
atgaatatcagaaaactgttttgtccgggcaacacaccccagattttattcttttttattgtttctgtaataacc

SEQ ID NO: 200911 - DNA, 75 bp, synthetic construct
  source 1..75: mol_type = other DNA
gtgttgattggtgatcggtattacgtgaaagccacggcaactattaccgatggcgaaaacagtcatacggcaacc

SEQ ID NO: 200912 - DNA, 75 bp, synthetic construct
  source 1..75: mol_type = other DNA
ggcgttcgccaaagcgtggaagatgctcgaagtgaaccgccccgggtttcctggagagtgttttatctgtgaact

SEQ ID NO: 200913 - DNA, 75 bp, synthetic construct
  source 1..75: mol_type = other DNA
ttcgtattatgctcagtaaacagctggccgttgcggatggttaaaggaactgttgtggggacaactgacacattg

SEQ ID NO: 200914 - DNA, 75 bp, synthetic construct
  source 1..75: mol_type = other DNA
tcagcagaaaaatcagtgtccgtcagcagaaaaatcagtgcccgtcatttcgcaggcatttttcagtggctgact

SEQ ID NO: 200915 - DNA, 75 bp, synthetic construct
  source 1..75: mol_type = other DNA
aaatcctctccgaaggtgatattcctgcacatgatggggtctcatccgaacccgtgtgaccggcttcactcctgg

SEQ ID NO: 200916 - DNA, 75 bp, synthetic construct
  source 1..75: mol_type = other DNA
gctgaatgctgtaagtgaagcagcaaaaacagcattaattaaaaaaggcttccagcttgaagggttccattctgt

SEQ ID NO: 200917 - DNA, 75 bp, synthetic construct
  source 1..75: mol_type = other DNA
gactgggcgagatgaaaaactcgctgtgcaaaagcggctatctgcgcctggtgcaaaagtattgtccccggcttt

SEQ ID NO: 200918 - DNA, 75 bp, synthetic construct
  source 1..75: mol_type = other DNA
ccgatggttaaagcgaaagacgaacgccgtgagcgtcgcgatgatttcgcaaacgaaaccgctgatgatgctgaa

SEQ ID NO: 200919 - DNA, 75 bp, synthetic construct
  source 1..75: mol_type = other DNA
caacgcacctgaattgcgatgctatgcagaagcagataacataataaaagctgaaaaattagtgttagaagtttt

SEQ ID NO: 200920 - DNA, 75 bp, synthetic construct
  source 1..75: mol_type = other DNA
cggttattcagacttgcgggtggtttaatcatgtaacgctgactaaaattggttcaccatacgtcatttcagcgt

SEQ ID NO: 200921 - DNA, 75 bp, synthetic construct
  source 1..75: mol_type = other DNA
ggcttgtctgcatcaaagctgatgcgctgaatgctgtaagtgaagcagcaaaaacagcattaattaaaaaaggct

SEQ ID NO: 200922 - DNA, 75 bp, synthetic construct
  source 1..75: mol_type = other DNA
aaacttggactgggaacactgagcgatttcaggctgctctatacgggatgcggtgacagcagagtgaaacggaat

SEQ ID NO: 200923 - DNA, 75 bp, synthetic construct
  source 1..75: mol_type = other DNA
gtgcgctggcggatacatcctctccgaaggtcattttcctgcacatgatgggttctcatccgaatccgtgtgacc

SEQ ID NO: 200924 - DNA, 75 bp, synthetic construct
  source 1..75: mol_type = other DNA
aagagtccggtccggcctgtcatcagacgggccacaacagcggcgtgatccatgccggggtttattacacgcccg

SEQ ID NO: 200925 - DNA, 75 bp, synthetic construct
  source 1..75: mol_type = other DNA
tggttcatcctgaccagagcgaacaggttccgggcatgatcgagcgctacactgctgccatcactggtgcagaag

SEQ ID NO: 200926 - DNA, 75 bp, synthetic construct
  source 1..75: mol_type = other DNA
ggcattgcctggtccaccatggccgccgagggagaggtttccactacagtgacaccgccattgagacggccctga

SEQ ID NO: 200927 - DNA, 75 bp, synthetic construct
  source 1..75: mol_type = other DNA
atgcgtcattacgaaatcgtttttatggtccatcctgaccagagcgaacaggttccgggcatgatcgagcgctac

SEQ ID NO: 200928 - DNA, 75 bp, synthetic construct
  source 1..75: mol_type = other DNA
agccagccgtattgtctccacccagcatcatcaccacgatctctcggtcgccacgctgcatgtgcacattaatca

SEQ ID NO: 200929 - DNA, 75 bp, synthetic construct
  source 1..75: mol_type = other DNA
atgaaagtatactccttaattgtgaggaggagattgtttgtggaagtgactttgacttgtcagtagacaatggtg

SEQ ID NO: 200930 - DNA, 75 bp, synthetic construct
  source 1..75: mol_type = other DNA
tagatgctttaccaacaagagatgctcttttgcctgtcatcgtgattttatttgcagcatctaaaaagaatagtt

SEQ ID NO: 200931 - DNA, 75 bp, synthetic construct
  source 1..75: mol_type = other DNA
aagctgttgcagaggatgatagagctaaagcaaaggaatgggcaagaaaatataatcttgatgctattttttcta

SEQ ID NO: 200932 - DNA, 75 bp, synthetic construct
  source 1..75: mol_type = other DNA
agctgttgcagatgatgatcgaattaaagcgcgtaaatggtcaactaaatacaagcttgatgctatattttctac

SEQ ID NO: 200933 - DNA, 75 bp, synthetic construct
  source 1..75: mol_type = other DNA
tcattattccatgcaggaaaatattccttgtataatggttactgggagccatataccttttgagcgcaatggact

SEQ ID NO: 200934 - DNA, 75 bp, synthetic construct
  source 1..75: mol_type = other DNA
ccgatagcaatattgcttttggaactagtggtgcacgcggtttggttgttgattttacccatgatgtttgtgctg

SEQ ID NO: 200935 - DNA, 75 bp, synthetic construct
  source 1..75: mol_type = other DNA
ggtgaaatcacaaaagaggatgagctcgcaattgtaaatagtgaatatacattttctcctgtaggtgtattacct

SEQ ID NO: 200936 - DNA, 75 bp, synthetic construct
  source 1..75: mol_type = other DNA
ttaccgggagccacataccttttgatcgtaatggtttgaaattctaccgaccagatggtgaaatcacaaaagagg

SEQ ID NO: 200937 - DNA, 75 bp, synthetic construct
  source 1..75: mol_type = other DNA
gctacttccgtacccgcaggctgcatttcaccgatcgcgaggcactggaaaactggcaggcaaaaaggctgcatc

SEQ ID NO: 200938 - DNA, 75 bp, synthetic construct
  source 1..75: mol_type = other DNA
ttatgtggagagtgacgatgaaagaagagccaaatctattatcgactctacattgaaatatatatcaaaaatata

SEQ ID NO: 200939 - DNA, 75 bp, synthetic construct
  source 1..75: mol_type = other DNA
aaattcgcattaaagatgtttctatagattttacattggactcatccataccaaatttatatccgtgtcctgacg

SEQ ID NO: 200940 - DNA, 75 bp, synthetic construct
  source 1..75: mol_type = other DNA
cgcaaagcggtattgtttttggtacaagtggtgctcgcggtttagtgaaagattttactcatgatgtttgtgcgg

SEQ ID NO: 200941 - DNA, 75 bp, synthetic construct
  source 1..75: mol_type = other DNA
catcacgctcaaatgggaatttaaaatcaattatttacgatgcgagaatatcaagcggaaacgccatgtctcact

SEQ ID NO: 200942 - DNA, 75 bp, synthetic construct
  source 1..75: mol_type = other DNA
aatttctctcagagctggatgttttatcaaaagagagcatgcctggttgtggtcttgtttttgagctataccaac

SEQ ID NO: 200943 - DNA, 75 bp, synthetic construct
  source 1..75: mol_type = other DNA
aagtgcagaactgcaacaaaatgggcaagtacaggacagcattagcacaaaactgtcttttgtggataacagctg

SEQ ID NO: 200944 - DNA, 75 bp, synthetic construct
  source 1..75: mol_type = other DNA
tattgcgtctaactcagtgtttcttgtacatgtaaacaatggccaggctgaccagttgaatgttaccgacaaact

SEQ ID NO: 200945 - DNA, 75 bp, synthetic construct
  source 1..75: mol_type = other DNA
cgcaggcggcgaagctatgtctgtcgcccgtggctgtctggcaaatgctgcttgcacgcctgctggaacaacatt

SEQ ID NO: 200946 - DNA, 75 bp, synthetic construct
  source 1..75: mol_type = other DNA
aaagtttttaaagagtgagaagaagaatatcttattaatttttatggagttcactgaaaataaaaaaggcgcctg

SEQ ID NO: 200947 - DNA, 75 bp, synthetic construct
  source 1..75: mol_type = other DNA
actggcagatgcggtggcaaacgtcttaaccatgacgttgctgaaaaaagcgcagttgaagtccacggtgatgcc

SEQ ID NO: 200948 - DNA, 75 bp, synthetic construct
  source 1..75: mol_type = other DNA
tgcaaaacgttgttgaaagggttggatgaagctatcgcccggcgcggaactaaaactgaagatttctctgaggaa

SEQ ID NO: 200949 - DNA, 75 bp, synthetic construct
  source 1..75: mol_type = other DNA
aaaagcgcgaaatgaaatgggcgaactggcctatatggtgccggtgaaagaactgacgggaacggtcactttccg

SEQ ID NO: 200950 - DNA, 75 bp, synthetic construct
  source 1..75: mol_type = other DNA
ctcgttatgtgcgttcctatgcacctgcacagcaaagtgttgcgccagggagcgaatggatcgggatgcaggtga

SEQ ID NO: 200951 - DNA, 75 bp, synthetic construct
  source 1..75: mol_type = other DNA
cagcaaccaaccgctggcgcacacggttgtgctgcttaatagcggtggcgacgctacccaggcggccgctatttt

SEQ ID NO: 200952 - DNA, 75 bp, synthetic construct
  source 1..75: mol_type = other DNA
ttatcagctacgaccaggcactctccagcgagccggttgcgcctggcgcaactaaccgcagcgagcggcgagtaa

SEQ ID NO: 200953 - DNA, 75 bp, synthetic construct
  source 1..75: mol_type = other DNA
gaaacggtcttgcgtgatgcttccggcgagaaacgttttgaaggagaaaaagacagcaggatgcttatgacgtta

SEQ ID NO: 200954 - DNA, 75 bp, synthetic construct
  source 1..75: mol_type = other DNA
ccacacgtccactggcaattctggacttaggtgcaggctctaccgatgcctccatcatcaatcagaaaggggaaa

SEQ ID NO: 200955 - DNA, 75 bp, synthetic construct
  source 1..75: mol_type = other DNA
ccggcgatttaacactggaaaaagtacgtgctgttcgccgcagtgcgaaagagcgcgtcttcgtaaccaatgccc

SEQ ID NO: 200956 - DNA, 75 bp, synthetic construct
  source 1..75: mol_type = other DNA
ttctgccgggcgcacaacgcgcgttgatgtagctgctggtgccgatgccattatgaaagcggtcggtgagtgccc

SEQ ID NO: 200957 - DNA, 75 bp, synthetic construct
  source 1..75: mol_type = other DNA
ggcttaaatgatcgctatctggcagaagagatcaaaaaatacccactggcaaaagttgaaagcctgttccactta

SEQ ID NO: 200958 - DNA, 75 bp, synthetic construct
  source 1..75: mol_type = other DNA
tccgtggtagcgaggggccgcgcaatgcggtagctaccgggctactcatctcctggcacaaggagtcggttcatg

SEQ ID NO: 200959 - DNA, 75 bp, synthetic construct
  source 1..75: mol_type = other DNA
cgactggtcgccgggcgggggaatatccgtggtagcgaaggtccgcgcaacgcggtagctactgggctactcatc

SEQ ID NO: 200960 - DNA, 75 bp, synthetic construct
  source 1..75: mol_type = other DNA
atgaataaaatatactccctgaaatattgccatataactaaaagcctgattgctgtctccgaactggcccgcagg

SEQ ID NO: 200961 - DNA, 75 bp, synthetic construct
  source 1..75: mol_type = other DNA
ctctttgattccggggcttattttgacctgattggtaaatatctccatcacgataatgagtacacggcgagtttt

SEQ ID NO: 200962 - DNA, 75 bp, synthetic construct
  source 1..75: mol_type = other DNA
gtacacgagctgggatatgcatggaaagaaagggaatgacctgaacgcaggaaaaaacctcctgttcaccggcaa

SEQ ID NO: 200963 - DNA, 75 bp, synthetic construct
  source 1..75: mol_type = other DNA
atgattatcgctcgtgagctgggcttaaatgatcgttatctggcagaagaaatcaaaaagtacccgttggcaaaa

SEQ ID NO: 200964 - DNA, 75 bp, synthetic construct
  source 1..75: mol_type = other DNA
aaacccgacgaactggtgcccattcccggtgatataacgctggaaaaagtgcgaaccattcgtcgcagtgcaaaa

SEQ ID NO: 200965 - DNA, 75 bp, synthetic construct
  source 1..75: mol_type = other DNA
ttctgccgggcgcacaactcgggttgatgttgccgctggtgccgatgcaataatgaaagcagtcggtgaatgccc

SEQ ID NO: 200966 - DNA, 75 bp, synthetic construct
  source 1..75: mol_type = other DNA
tgaccggctcaatctcattatccgctatcaggcaccggggaaggactggcaggaattcaggttttactggatatg

SEQ ID NO: 200967 - DNA, 75 bp, synthetic construct
  source 1..75: mol_type = other DNA
aaattaccggcggggaggtgtcgctgacactgctgaacacccaggcctacaccggatgcccctggccgctgattg

SEQ ID NO: 200968 - DNA, 75 bp, synthetic construct
  source 1..75: mol_type = other DNA
gaaccggcttatcaccggcgatttttacccggcatttctgttctacggtgtgcgcggtggcgcaaaacgtcggcg

SEQ ID NO: 200969 - DNA, 75 bp, synthetic construct
  source 1..75: mol_type = other DNA
atgcgcgtcgcccaggaagagattttcgggccggtcgcctgtctgctgccgtttaaagacgaagctgaaggtctg

SEQ ID NO: 200970 - DNA, 75 bp, synthetic construct
  source 1..75: mol_type = other DNA
ctccggggtaacgagcaggtgtaccagtgtcaggtggcatttgtattgccgggtgagcgggtcatgatggccttc

SEQ ID NO: 200971 - DNA, 75 bp, synthetic construct
  source 1..75: mol_type = other DNA
gatgacggcaaccggcgcggatggtggggtgaccttgagcaggactaccgggtcggctcccggctgtggctgctg

SEQ ID NO: 200972 - DNA, 75 bp, synthetic construct
  source 1..75: mol_type = other DNA
tatcccgtctatccaagccgcattcgacaacccgaactcccaagccgttgtacttcgcataaacagccctggcgg

SEQ ID NO: 200973 - DNA, 75 bp, synthetic construct
  source 1..75: mol_type = other DNA
gggagagagagcttattgagaagtacatgttcaccttgcataaggagcaggtgaaagatcgccgctggcgggctc

SEQ ID NO: 200974 - DNA, 75 bp, synthetic construct
  source 1..75: mol_type = other DNA
gggagaaagaactcattgagaagtacatgttcaccctgcataaagagcaggtgaaagaccggcgctggcggacca

SEQ ID NO: 200975 - DNA, 75 bp, synthetic construct
  source 1..75: mol_type = other DNA
attttcagcagccgaacgaaatgcgcttcaaccgcgcgcgcgttcggcgtgcctttgtcaccatcggccagcgcc

SEQ ID NO: 200976 - DNA, 75 bp, synthetic construct
  source 1..75: mol_type = other DNA
ggcttgctcttacggagtcgcctttccctggcccacggcagaaagctgatgatgttgtgcagggtgtgatcgacc

SEQ ID NO: 200977 - DNA, 75 bp, synthetic construct
  source 1..75: mol_type = other DNA
ttcttgggctggatatggatattgatcaggggtctttcctggactgggggcaacgtaggttgcggaatggttttg

SEQ ID NO: 200978 - DNA, 75 bp, synthetic construct
  source 1..75: mol_type = other DNA
ctccgtactggagtttgatgagcccaccgggaaagatgtcggcgagctggggtatccctaccagatgaatcagga

SEQ ID NO: 200979 - DNA, 75 bp, synthetic construct
  source 1..75: mol_type = other DNA
caatggtgactaatctgttgtttgattatggcggcgataaagacctgatgaatgggattatcaggcgatggaaca

SEQ ID NO: 200980 - DNA, 75 bp, synthetic construct
  source 1..75: mol_type = other DNA
cgatcgataacgccagcccgctggaaaaaattcgtctcgtgcgccggcaggcgaaagagaaagtgtttgtcacca

SEQ ID NO: 200981 - DNA, 75 bp, synthetic construct
  source 1..75: mol_type = other DNA
gtaagaaattcgattacctcaattcaaccactgacgacgtagagatcgaggatattgcgaccgcactttcccaca

SEQ ID NO: 200982 - DNA, 75 bp, synthetic construct
  source 1..75: mol_type = other DNA
gcgtatttctgtagtcctgtctgaacagcaggcgttccaggtgcgtaaatggagtgaatcgacacgccataagct

SEQ ID NO: 200983 - DNA, 75 bp, synthetic construct
  source 1..75: mol_type = other DNA
aagagtgtccgtcatactttccgaacagcaagcctttcgggtacgtatgtggagtgatcaggctcgccagaagtt

SEQ ID NO: 200984 - DNA, 75 bp, synthetic construct
  source 1..75: mol_type = other DNA
gctacaccgcgccggaacgtatcaaccactggatcaccgccttctgcttcatcctggcggcggtgagcgggcttg

SEQ ID NO: 200985 - DNA, 75 bp, synthetic construct
  source 1..75: mol_type = other DNA
cttcggaacatgttcgtaacatattgattgataacggactgaatgtgcccgcatttgttgttggcaatggctgtg

SEQ ID NO: 200986 - DNA, 75 bp, synthetic construct
  source 1..75: mol_type = other DNA
aatggcgtcgggagagcgcagaactgattcgggaagcgtttcttgaatcattgtgtccagatgtcgttttcatta

SEQ ID NO: 200987 - DNA, 75 bp, synthetic construct
  source 1..75: mol_type = other DNA
ggtatccctaccagatgaatcaggatgagtcagtcagacttctggcgcatgtggtgtcgaaatacattgtgcggc

SEQ ID NO: 200988 - DNA, 75 bp, synthetic construct
  source 1..75: mol_type = other DNA
atcatcaatccagttcgtccaggccagtcatacggcatgttcataaatcgctttaatgagttgatggagcagcgt

SEQ ID NO: 200989 - DNA, 75 bp, synthetic construct
  source 1..75: mol_type = other DNA
tgagttttacagtgtcggccagcatagcgttttaaccagccacctcgttccgcaggagtttgcattagaagcact

SEQ ID NO: 200990 - DNA, 75 bp, synthetic construct
  source 1..75: mol_type = other DNA
caaagaggatatgtcagccaccgagcttaaagggctttatgaaagctgtgatgttttggttgctccaggttgcgc

SEQ ID NO: 200991 - DNA, 75 bp, synthetic construct
  source 1..75: mol_type = other DNA
gaagacgacaattcaaaaatagatttaatattatccttcgaacatccatgggcatcaaaagaaagaatgcttata

SEQ ID NO: 200992 - DNA, 75 bp, synthetic construct
  source 1..75: mol_type = other DNA
cacctcagatagcgaaagcctggcgttttgtccgtgagcgtttccgcagttaccagacagagcttaagtcccggg

SEQ ID NO: 200993 - DNA, 75 bp, synthetic construct
  source 1..75: mol_type = other DNA
tcagcgtctgaccgttccgtatgaggccagaacgttgaccgatgacggattgattaccattgatccggggaatat

SEQ ID NO: 200994 - DNA, 75 bp, synthetic construct
  source 1..75: mol_type = other DNA
accttttttatcgccacgacggcgcaccagcggtgcaacgccgagactgcaatgccaaaccgaacgcgtcagcgc

SEQ ID NO: 200995 - DNA, 75 bp, synthetic construct
  source 1..75: mol_type = other DNA
cgtggatcagcgtcaacgacaagatgccggtcgtcggtgtgcctgttcattgccagcttaaaggatgttggtcgg

SEQ ID NO: 200996 - DNA, 75 bp, synthetic construct
  source 1..75: mol_type = other DNA
gagaacccgggcaaagtcagaatagcggcaggcatcaactcaaaagaggataatgtcatgagccactttaatgat

SEQ ID NO: 200997 - DNA, 75 bp, synthetic construct
  source 1..75: mol_type = other DNA
gacattcaagcgattcatggaagacaaggcgctgacaaagccactttcccgccttgtttataccaatctgaaaac

SEQ ID NO: 200998 - DNA, 75 bp, synthetic construct
  source 1..75: mol_type = other DNA
gtgctattactcgtcaggggattcggaacagtattgattatatgagccgtgagtcagagctaccagtgatgagtg

SEQ ID NO: 200999 - DNA, 75 bp, synthetic construct
  source 1..75: mol_type = other DNA
cagaacgataaaaccaaaccaaagcagcatttcataaagcttaagacactgaacaagggcgtggagaaaacatat

SEQ ID NO: 201000 - DNA, 75 bp, synthetic construct
  source 1..75: mol_type = other DNA
cgctcgataaaaacggtgttcagcatggctggaaaacggttcacagaaatgagtggcagttagaaaatctggggg

SEQ ID NO: 201001 - DNA, 75 bp, synthetic construct
  source 1..75: mol_type = other DNA
gactgctgcgacagcatgttctgcgaaggccattttggcaccaggattgaggtattttactacggtacccaggga

SEQ ID NO: 201002 - DNA, 75 bp, synthetic construct
  source 1..75: mol_type = other DNA
atcggtaaccccatacagacggactccggtaccagcaaccgaatttgcagctgaattgcgtaagagtgacgtttt

SEQ ID NO: 201003 - DNA, 75 bp, synthetic construct
  source 1..75: mol_type = other DNA
atgacgttaaagcgacccataagcaacagcatggacttaatcagtctgttaaagatgcacataatacagcaccaa

SEQ ID NO: 201004 - DNA, 75 bp, synthetic construct
  source 1..75: mol_type = other DNA
catgtacaaatggtaagcacagtaacggttatccgatactgaatctggcaacgtggtcaacttctctttcctgtt

SEQ ID NO: 201005 - DNA, 75 bp, synthetic construct
  source 1..75: mol_type = other DNA
aaggctatgcgatggtcgagtccagtgaagggccgctgtggtggcaagagattgatgttccggcacaagggctgg

SEQ ID NO: 201006 - DNA, 75 bp, synthetic construct
  source 1..75: mol_type = other DNA
gcgatggtgatgagctgaaacgtggtggtaaaccgccggtcaatcacgtcaatattgtcgcgcagcaggcgctgc

SEQ ID NO: 201007 - DNA, 75 bp, synthetic construct
  source 1..75: mol_type = other DNA
tctcggatgactcatgattattatgaacatcagaagatagcaacattactcggaggtcagacaagagctgaaaaa

SEQ ID NO: 201008 - DNA, 75 bp, synthetic construct
  source 1..75: mol_type = other DNA
tatcactaatcttaccgataaaccgcaaaaactgaacgttgccctgaccgccagtggtttgcttgaactggtcag

SEQ ID NO: 201009 - DNA, 75 bp, synthetic construct
  source 1..75: mol_type = other DNA
gttccgcaaccaatggtggaatcgatgtatgttccccactggcgggcgactggcgcggctgaagatctgttgatt

SEQ ID NO: 201010 - DNA, 75 bp, synthetic construct
  source 1..75: mol_type = other DNA
caactcgatggtgcagccacgctggtgctgactttctctatccccctcgacccggatcaggatttctcgcgtgtt

SEQ ID NO: 201011 - DNA, 75 bp, synthetic construct
  source 1..75: mol_type = other DNA
tcgaaaagaattggcaagaaactattctcgaatgactcatgattattacgagcatcaaaaaattgcaaccctttt

SEQ ID NO: 201012 - DNA, 75 bp, synthetic construct
  source 1..75: mol_type = other DNA
ggtattgagtatttggctgacgcaaaaaaacaactgctcattataacttcccaaaaggtcaatcgtaggctaacg

SEQ ID NO: 201013 - DNA, 75 bp, synthetic construct
  source 1..75: mol_type = other DNA
cgtcaaaacaactcaatgatttaaatgagttatctcaaaagttaatagaagaactcaaggagttacctgagcgtg

SEQ ID NO: 201014 - DNA, 75 bp, synthetic construct
  source 1..75: mol_type = other DNA
taaggcaaacggacagtatttcagtaaaccgcaaaagctctctggtagagaacttgagcgatttaataaattaat

SEQ ID NO: 201015 - DNA, 75 bp, synthetic construct
  source 1..75: mol_type = other DNA
cctcttaattgtactaatttttcatatttggttaagggagtcagaaagtataaggcaaatggacaatatttcagt

SEQ ID NO: 201016 - DNA, 75 bp, synthetic construct
  source 1..75: mol_type = other DNA
caccgaaactggggtgcacgtgtctagggcatcacttaagggggagggggtgcttaaatctgatgaattaagtga

SEQ ID NO: 201017 - DNA, 75 bp, synthetic construct
  source 1..75: mol_type = other DNA
tgtggtgatggaaaagccgctggggacatcgctggcaacttcccgtgaaatcaacgatcaggtgggtgaatactt

SEQ ID NO: 201018 - DNA, 75 bp, synthetic construct
  source 1..75: mol_type = other DNA
tctgtgacttggtcattttcggcgcgaaaggcgaccttgcgcgtcgtaaattgctgccttccctgtatcaactgg

SEQ ID NO: 201019 - DNA, 75 bp, synthetic construct
  source 1..75: mol_type = other DNA
cgcgtctggatttttgtaatcttgatgtcaatgacacggccgcattcaaccgccttggcgcgatgctggatcaaa

SEQ ID NO: 201020 - DNA, 75 bp, synthetic construct
  source 1..75: mol_type = other DNA
acgcctttaaatgattccctcaaggtcatggaaaggaatgtcgataaaactgtttccaagattgagcagcgtctt

SEQ ID NO: 201021 - DNA, 75 bp, synthetic construct
  source 1..75: mol_type = other DNA
ttaccgcaggggtttggctctggtctggtggcaatccctgatggcgtgctccagacacgtaccgattttggtaaa

SEQ ID NO: 201022 - DNA, 75 bp, synthetic construct
  source 1..75: mol_type = other DNA
acatcgctggcaacttcccgtgaaatcaacgatcaggtgggtgaatacttcgaagagtgtcaggtttaccgtatc

SEQ ID NO: 201023 - DNA, 75 bp, synthetic construct
  source 1..75: mol_type = other DNA
aaggcgcgatcgtggttaacgggcagaacatcaatctggtgcgcgataaagacggccaactcaaagttgccgata

SEQ ID NO: 201024 - DNA, 75 bp, synthetic construct
  source 1..75: mol_type = other DNA
agcgtgtttccatcgcaagggcgctggcaatggaaccggaagttttactgtttgatgaacctacctcggcgctcg

SEQ ID NO: 201025 - DNA, 75 bp, synthetic construct
  source 1..75: mol_type = other DNA
ggcgcgccggagcagttatttggtaacccgcaaagccctcgtctgcaacagttccttaaaggttcgctgaaataa

SEQ ID NO: 201026 - DNA, 75 bp, synthetic construct
  source 1..75: mol_type = other DNA
tccattactgaggcgtgggcgatggacaatgatgcgccgaaaccgtatcaggccggaacctggggacccgttgcc

SEQ ID NO: 201027 - DNA, 75 bp, synthetic construct
  source 1..75: mol_type = other DNA
atatggtccagaaccatctgctgcaaattctctgcatgattgcaatgtctccgccgtctgatctgagcgccgata

SEQ ID NO: 201028 - DNA, 75 bp, synthetic construct
  source 1..75: mol_type = other DNA
gtatgggcggcgcaacgcttccggcgatgagtaactccggttctggtaaccaggggatcaccgcgacaatgcccg

SEQ ID NO: 201029 - DNA, 75 bp, synthetic construct
  source 1..75: mol_type = other DNA
aaaaataatcacagtgaaaatgcttcaaatagtctggatgtattagctacaagtgcaatcaaagcaggtacagcc

SEQ ID NO: 201030 - DNA, 75 bp, synthetic construct
  source 1..75: mol_type = other DNA
ttgttctggcgcgagataaccccgcttgctgttcctatcttcatggagaatgcctgtgtcctgttgatgggggtc

SEQ ID NO: 201031 - DNA, 75 bp, synthetic construct
  source 1..75: mol_type = other DNA
ttaagtagtgatactctccctaaagtcgctaaacagatgggcttgatgattgataaagcgggtggttgggctgaa

SEQ ID NO: 201032 - DNA, 75 bp, synthetic construct
  source 1..75: mol_type = other DNA
acacaggaactatttggtaatgcaactgctatgagccggttaatggggcttagtaacgatgagctaaacggcatt

SEQ ID NO: 201033 - DNA, 75 bp, synthetic construct
  source 1..75: mol_type = other DNA
aaagacagaaaggtgtttatgaggttgttgatgttggctacgaccattatcagaacgataaaacaaagtctaagc

SEQ ID NO: 201034 - DNA, 75 bp, synthetic construct
  source 1..75: mol_type = other DNA
aaatggtcgtaagtcagctttcgctcataaagtcaaaaatggtggaaagaactatagccgcaatgttcaggaacg

SEQ ID NO: 201035 - DNA, 75 bp, synthetic construct
  source 1..75: mol_type = other DNA
tttcgaatcaaagatactgatggtaagagaacggatataaagaaaaaagatttaagagagatcaggacgggcttt

SEQ ID NO: 201036 - DNA, 75 bp, synthetic construct
  source 1..75: mol_type = other DNA
gaattgtttaacaatgccacaatgaatattgcaagattcaatcatccagaattaaccaacgtaaagcaagaagca

SEQ ID NO: 201037 - DNA, 75 bp, synthetic construct
  source 1..75: mol_type = other DNA
ggttatgctgatgacggttatgaaacagcgttagcattagcttcaatgattccacaaatcagaggtgtcactctt

SEQ ID NO: 201038 - DNA, 75 bp, synthetic construct
  source 1..75: mol_type = other DNA
cttgagaagtattttaagagccaatattacagcttgagcagtaaatccaagacacttggaaacgaagcttttaat

SEQ ID NO: 201039 - DNA, 75 bp, synthetic construct
  source 1..75: mol_type = other DNA
agagcttgataaagcgatgaaagacgggaaggttctttccgctgatactctccctaaagtcgctaaacagatggg

SEQ ID NO: 201040 - DNA, 75 bp, synthetic construct
  source 1..75: mol_type = other DNA
agaagttctattacagccttgatgacactaaacgaaaactacttgatgaagtcggtgatggttttatcaattttg

SEQ ID NO: 201041 - DNA, 75 bp, synthetic construct
  source 1..75: mol_type = other DNA
cttgaaggctggattttacagactaagaagttctattacagccttgatgacactaaacgaaaactacttgatgaa

SEQ ID NO: 201042 - DNA, 75 bp, synthetic construct
  source 1..75: mol_type = other DNA
tttgccgcgttgatgcgtgagcaggccacgatgcgcggtatcactacgctggtatttagcggcggggttattcat

SEQ ID NO: 201043 - DNA, 75 bp, synthetic construct
  source 1..75: mol_type = other DNA
cgcgatgccctatgaccgtccgtttaccgtcatggcggcgtttccgctgtgtccggcctgtgacaaagaatatcg

SEQ ID NO: 201044 - DNA, 75 bp, synthetic construct
  source 1..75: mol_type = other DNA
gaaaagaaaaatggcaagtggttggattgccgttatagacaatccaaagtatatcaatacatatggaaaagtatt

SEQ ID NO: 201045 - DNA, 75 bp, synthetic construct
  source 1..75: mol_type = other DNA
gctcttcccgcagagtttaccggcgggcgatggcggattgtctctggggcagggggttattgctgcggcgcgttg

SEQ ID NO: 201046 - DNA, 75 bp, synthetic construct
  source 1..75: mol_type = other DNA
tggcgcttgctggtggcgatctggctgcaaagcagccgtggcgtaacctgctggcacagtgtctgcgctttgtgc

SEQ ID NO: 201047 - DNA, 75 bp, synthetic construct
  source 1..75: mol_type = other DNA
cgggctatgtctccagccagtgggcgcgcgaaatgaatctgccgacgcaaacggtgctgcatcatcatgcccacg

SEQ ID NO: 201048 - DNA, 75 bp, synthetic construct
  source 1..75: mol_type = other DNA
gcttcaatatggtcattatggctttttttgctgctatcgatcttggtactactgtcgttgtggcatttagtctcg

SEQ ID NO: 201049 - DNA, 75 bp, synthetic construct
  source 1..75: mol_type = other DNA
tttcgatcgcggctcttatcaatttaccaggaagtgcactcggttcagcctccacaataatcaccggtcgaagac

SEQ ID NO: 201050 - DNA, 75 bp, synthetic construct
  source 1..75: mol_type = other DNA
ttgccggggttatggcatcgttttacacccaggatccacaggttaaacatgtcggtgatgctgccaacttactga

SEQ ID NO: 201051 - DNA, 75 bp, synthetic construct
  source 1..75: mol_type = other DNA
agcttgtcgctgtgcggcgttgaggattttcttcaggtggtggcggcttaccgtaatttcgtgcagcagaagtaa

SEQ ID NO: 201052 - DNA, 75 bp, synthetic construct
  source 1..75: mol_type = other DNA
ctacgacgaggaaagcctgtcgctgtgcggcgttgaggacttcttgcaggtagtggcggcttatcgcgattttgt

SEQ ID NO: 201053 - DNA, 75 bp, synthetic construct
  source 1..75: mol_type = other DNA
acggcgctttgtggggcggcgagtgcctgcgggtgaactatcgcgaatgtgagcacctgggcggcttgcctgcag

SEQ ID NO: 201054 - DNA, 75 bp, synthetic construct
  source 1..75: mol_type = other DNA
cgacgatgcccgccagtcgctgaaacaactggctgaacagtcgatcgatacctcggcactggaagcgctagcgga

SEQ ID NO: 201055 - DNA, 75 bp, synthetic construct
  source 1..75: mol_type = other DNA
cgtattcatcgtcataaaacaggtgcgttaattcgtgccgccgttcgtcttggtgcgttaagcgccggagataaa

SEQ ID NO: 201056 - DNA, 75 bp, synthetic construct
  source 1..75: mol_type = other DNA
cggaatgtgcggtggtcaggcattagatttagatgcggaaggcaaacacgtacctctggacgcgcttgagcgtat

SEQ ID NO: 201057 - DNA, 75 bp, synthetic construct
  source 1..75: mol_type = other DNA
ctttatagtgtaatttttcttagaaagctgcatgacagaaaccttcacggcctcaaacgaaaaggtgaagccaga

SEQ ID NO: 201058 - DNA, 75 bp, synthetic construct
  source 1..75: mol_type = other DNA
cgtattcatcgccacaaaacaggcgcattaattcgcgccgccgtccgtcttggcgcgttaagtgccggagaaaaa

SEQ ID NO: 201059 - DNA, 75 bp, synthetic construct
  source 1..75: mol_type = other DNA
aaaccatgcagtatggcgcattattaggtggtaagcgcctgcgaccgttcctggtttatgctactggtcaaatgc

SEQ ID NO: 201060 - DNA, 75 bp, synthetic construct
  source 1..75: mol_type = other DNA
gcttttcccgcagagtttacctgcgggtgatggtggattatctctggggcagggggttattgctgcggctcgctg

SEQ ID NO: 201061 - DNA, 75 bp, synthetic construct
  source 1..75: mol_type = other DNA
ggctatgtaccggatgcgctggctttgccgccgggttttaaaaatgtgccgccgatgctgtgtcttggcgcagat

SEQ ID NO: 201062 - DNA, 75 bp, synthetic construct
  source 1..75: mol_type = other DNA
gctctttccacagagtttaccggcgggcgatggcgggttgtctctggggcagggggttattgctgcggcgcgcat

SEQ ID NO: 201063 - DNA, 75 bp, synthetic construct
  source 1..75: mol_type = other DNA
gaacaggcgctggaggatttgcagggcattgccgacggattcttaatacataaccgcgacatcgtgcagcggatg

SEQ ID NO: 201064 - DNA, 75 bp, synthetic construct
  source 1..75: mol_type = other DNA
gcggcattacaggcagctattgcacagttaaaaatgggaaacattgttgccatcaaagggattggcggatttcat

SEQ ID NO: 201065 - DNA, 75 bp, synthetic construct
  source 1..75: mol_type = other DNA
cgcagttgcatcagcactgcccgccgctggcgcgtattgatagcgtcgagcgtgtaccgtttatctggacgcaac

SEQ ID NO: 201066 - DNA, 75 bp, synthetic construct
  source 1..75: mol_type = other DNA
gcgagtaatgtgctgcaaatcgagcgccatattcttggtactgacggtaagagcaaatcgctggactcgttacgt

SEQ ID NO: 201067 - DNA, 75 bp, synthetic construct
  source 1..75: mol_type = other DNA
gtaactaacagtggctcccagccgttatggctgcgtgtggatgccagcggttatccgcaatccgcacctttacct

SEQ ID NO: 201068 - DNA, 75 bp, synthetic construct
  source 1..75: mol_type = other DNA
ctgcccgttcgatacaggatttaccgggtaaatggcaggcgcaaacctctttctctgccgagccgctgactggcg

SEQ ID NO: 201069 - DNA, 75 bp, synthetic construct
  source 1..75: mol_type = other DNA
gggcgataaccagtatcgaatgtgggatttccacgtcgaagatttcatgcctgagcgtatggcgctgaatctgag

SEQ ID NO: 201070 - DNA, 75 bp, synthetic construct
  source 1..75: mol_type = other DNA
tcatgtcaatattgttgcacaacaggcacagccggtaacgctcaacgaacagggtgaaggtacggttacgctgcc

SEQ ID NO: 201071 - DNA, 75 bp, synthetic construct
  source 1..75: mol_type = other DNA
aatcgtctggatatctttacccaaagcctggaaaacggcgcggctcagcaaggaattgaagtctcgttattaaat

SEQ ID NO: 201072 - DNA, 75 bp, synthetic construct
  source 1..75: mol_type = other DNA
atagatctcgctccgcgacgccaaaacgtgcggttggtgtgttgcatttgccgcttggcgatgaaaaccgtcgtc

SEQ ID NO: 201073 - DNA, 75 bp, synthetic construct
  source 1..75: mol_type = other DNA
agccgtggttcattgcttcccggtaaagttgtggaaggattgccggtaatggcactcaacgttaacaatgtcgat

SEQ ID NO: 201074 - DNA, 75 bp, synthetic construct
  source 1..75: mol_type = other DNA
cggtatgtggcatattcgcgctaacacgggcgataaccagtatcggatgtgggatttccacgtcgaagattttat

SEQ ID NO: 201075 - DNA, 75 bp, synthetic construct
  source 1..75: mol_type = other DNA
accagaatctggcgaacggcagcgccagcctggagcaaagtggtggtgaagtgcagaacttgctgaaccagatgc

SEQ ID NO: 201076 - DNA, 75 bp, synthetic construct
  source 1..75: mol_type = other DNA
acagggccatgtgcaactggaaaacgataaaaatgcggcgctgttgctggcgcgtaaagatggtcagacaacgct

SEQ ID NO: 201077 - DNA, 75 bp, synthetic construct
  source 1..75: mol_type = other DNA
gcggttgccgttgatgaataccaaccggtaacgctggtgtatctggcgcgggcggtgacgccgggaacgtatcag

SEQ ID NO: 201078 - DNA, 75 bp, synthetic construct
  source 1..75: mol_type = other DNA
cactacagagtgcaggtaaggcgctgacattgctggatctctctgaagtccagcttgatggcgctgccacgctgg

SEQ ID NO: 201079 - DNA, 75 bp, synthetic construct
  source 1..75: mol_type = other DNA
atggatggttccagtacaaagcgtaataataagaacatgaaaatgaaatggtatgaactggctagatccagaatg

SEQ ID NO: 201080 - DNA, 75 bp, synthetic construct
  source 1..75: mol_type = other DNA
caagtgtttttgcaaccacttaacccgcagtttccaatcatcccatgcaatgagaactgcaacattgtaggcaag

SEQ ID NO: 201081 - DNA, 75 bp, synthetic construct
  source 1..75: mol_type = other DNA
ggtacgctctcattcactgttggtggaacagaatggaatatccaggggtatatggtctataccgtcgtgctcatt

SEQ ID NO: 201082 - DNA, 75 bp, synthetic construct
  source 1..75: mol_type = other DNA
ctggctttctacgctaggcttaacagcgatcgcctggttgacggccccctttgccggggttatggcatcgtttta

SEQ ID NO: 201083 - DNA, 75 bp, synthetic construct
  source 1..75: mol_type = other DNA
gagtatgtggggatgccgagtggtagtaggttatgcgctgggaattatgcttggctggggcgtggttggcgtttg

SEQ ID NO: 201084 - DNA, 75 bp, synthetic construct
  source 1..75: mol_type = other DNA
tacttataaatggtagcatgaatatttttaatattattattagcggtatattgatttacgggcttttctcctggc

SEQ ID NO: 201085 - DNA, 75 bp, synthetic construct
  source 1..75: mol_type = other DNA
ttaaatgagaaagggcagactctgactcaggcaaccagtgacgctcaggggcatgtgcagctggaaaatgataaa

SEQ ID NO: 201086 - DNA, 75 bp, synthetic construct
  source 1..75: mol_type = other DNA
taatggtgagctacgagtcatggcgcaggcctggacagcggatgacttcggcagcagcgaaagtaaagtggttgt

SEQ ID NO: 201087 - DNA, 75 bp, synthetic construct
  source 1..75: mol_type = other DNA
tggctgggtgattacggtagtccactgcgcgacaacgcgttgatgctctccttgctggaagaaaataaactgcta

SEQ ID NO: 201088 - DNA, 75 bp, synthetic construct
  source 1..75: mol_type = other DNA
caaagatgcgttggagccgatactggagccgtgctttcatgcctactcctatggttaccgaccacacaaatccgc

SEQ ID NO: 201089 - DNA, 75 bp, synthetic construct
  source 1..75: mol_type = other DNA
actgaaaagctgtttggagttatcatttatatcgttttgggttttattgcactcgattatcgtcgtatgcacagt

SEQ ID NO: 201090 - DNA, 75 bp, synthetic construct
  source 1..75: mol_type = other DNA
gatttccacgtcgaagattttatgccagagcgcatggcgctgaatctggccggtgagaaaacccctctcatgccg

SEQ ID NO: 201091 - DNA, 75 bp, synthetic construct
  source 1..75: mol_type = other DNA
gtgttgggcctgagcaagcaggaagcgcgcgagcgggcggtgaagtatctggcgaaagtcgggatagacgaacgt

SEQ ID NO: 201092 - DNA, 75 bp, synthetic construct
  source 1..75: mol_type = other DNA
cattcactgctgtcatgctcagcctggctttaccaggaatggcgattggggctgagacgggtagcggaatctgtc

SEQ ID NO: 201093 - DNA, 75 bp, synthetic construct
  source 1..75: mol_type = other DNA
ggcaagagcaatactaaccagcctatgaccgcaacagaagccggattctacgacgtacatctctgggaattccca

SEQ ID NO: 201094 - DNA, 75 bp, synthetic construct
  source 1..75: mol_type = other DNA
aaaatcgtatcaccattaactactttgccatgccgcccagcacttttggcgcaatttgcaaagggcttggggagg

SEQ ID NO: 201095 - DNA, 75 bp, synthetic construct
  source 1..75: mol_type = other DNA
ccgataaactgcgcgtcggtgattttgccgtcgcggtcggcaacccgtttggtcttgggcaaaccgccacctccg

SEQ ID NO: 201096 - DNA, 75 bp, synthetic construct
  source 1..75: mol_type = other DNA
ataccagcacctcttcgtcggccagcgctggaaggtgcaacgttgagcgatggtcagctaaaagatggcggcaaa

SEQ ID NO: 201097 - DNA, 75 bp, synthetic construct
  source 1..75: mol_type = other DNA
attgtattagatggaaaagttgggttgtcaattaaaactgactgtggctgtaaaccaataaattatgatttttca

SEQ ID NO: 201098 - DNA, 75 bp, synthetic construct
  source 1..75: mol_type = other DNA
ttgcggctttatgcggtttgttggctctgtctggttgtgcctctaaaatcaccctgccggataaatattctggtt

SEQ ID NO: 201099 - DNA, 75 bp, synthetic construct
  source 1..75: mol_type = other DNA
aataaacctgttatcaaagtcgttcgtcagggcgaaggtaaagacctgaataacgaaagtacgccaatggctttc

SEQ ID NO: 201100 - DNA, 75 bp, synthetic construct
  source 1..75: mol_type = other DNA
tggagggcgaagcactgaaggaatgtctgcgccccaaccgcagggttgaaataaccggggaaacatcagtgactg

SEQ ID NO: 201101 - DNA, 75 bp, synthetic construct
  source 1..75: mol_type = other DNA
tctgtgatatttataaacgccatgaacaccttccccttctaaaacaccattatctttgcgatgaaaattttgatt

SEQ ID NO: 201102 - DNA, 75 bp, synthetic construct
  source 1..75: mol_type = other DNA
atgagaataaaacactcgaatatgataaatatgaatatgaatatgatgaaagaagccattgatgttttgataaac

SEQ ID NO: 201103 - DNA, 75 bp, synthetic construct
  source 1..75: mol_type = other DNA
tattgcccggggattcagggctgaaaggatacatgcaacgggccgtggatatgatgcacccgtggtgttctgccc

SEQ ID NO: 201104 - DNA, 75 bp, synthetic construct
  source 1..75: mol_type = other DNA
aggggacagccagtcaggatcagaaaatcccggaagaattcaaaaaatttttcggtgatgatttaccggagcaac

SEQ ID NO: 201105 - DNA, 75 bp, synthetic construct
  source 1..75: mol_type = other DNA
taaacagcttggattctcgcaagagcaggcttttgtcacttttggtgcttttgctgcgctggtctatggcctcat

SEQ ID NO: 201106 - DNA, 75 bp, synthetic construct
  source 1..75: mol_type = other DNA
cattctgcggctgaaagatctggattttgaagtgccagtcagccgcagcaaagttaaagaattccgccagttaat

SEQ ID NO: 201107 - DNA, 75 bp, synthetic construct
  source 1..75: mol_type = other DNA
cggcttcggtaaaaagtcctgcatgggggagtccggcgattgagcgacagatgtccgatggtacctggtttaaca

SEQ ID NO: 201108 - DNA, 75 bp, synthetic construct
  source 1..75: mol_type = other DNA
gatgcatcttaaacgccacgatttaccgcgcactggcgtggttcacggtttttccggcagcctgcaacaggccga

SEQ ID NO: 201109 - DNA, 75 bp, synthetic construct
  source 1..75: mol_type = other DNA
gcattagcggaaaattatcaaccgctgtatgcctcgttagggttgcatccggggatgttagaaaaacatagcgat

SEQ ID NO: 201110 - DNA, 75 bp, synthetic construct
  source 1..75: mol_type = other DNA
atgaatacaacaacacccactgggatgctgcaacaacctcgcccatttttcatgatcttttttgtcgaattatgg

SEQ ID NO: 201111 - DNA, 75 bp, synthetic construct
  source 1..75: mol_type = other DNA
cgacaccaacaattcatattccaaaaaaaataatttatttacacggtgggaacagggtatttcggattaacggag

SEQ ID NO: 201112 - DNA, 75 bp, synthetic construct
  source 1..75: mol_type = other DNA
ccgctagaagtggaagtgacgctcgataccagcacttcttcgtcggccagcgccgagatgatcacaccagcgctg

SEQ ID NO: 201113 - DNA, 75 bp, synthetic construct
  source 1..75: mol_type = other DNA
aaaaagacgatgtgatcattggcgtaaaccgcgatcgggtgaactcaattgctgaaatgcgcaaagtgctggcaa

SEQ ID NO: 201114 - DNA, 75 bp, synthetic construct
  source 1..75: mol_type = other DNA
cccagcctgcaacgcggtgaaggtgaagcgatgcttaccgccctcacccatcttagcgttcgccgctggagcaga

SEQ ID NO: 201115 - DNA, 75 bp, synthetic construct
  source 1..75: mol_type = other DNA
cggatagcgactatttttgtcgcgtcttccggcgtcagtttggcctgacgccgggagagtacagcgcccgttttc

SEQ ID NO: 201116 - DNA, 75 bp, synthetic construct
  source 1..75: mol_type = other DNA
agctaaactgcgcattatcgcaggaaggcttgagtggcaattggggactgcatattggcgcaacgctggaaaaac

SEQ ID NO: 201117 - DNA, 75 bp, synthetic construct
  source 1..75: mol_type = other DNA
aggggaatttaatgccacgtttaccccggaagccgtagtaaaagtgaccgatgtgttgttggcaagccatgaaaa

SEQ ID NO: 201118 - DNA, 75 bp, synthetic construct
  source 1..75: mol_type = other DNA
tgaactggatgcgatatttttggtcgcggcgtcagctacgacaaaccaattatcgtcagctgcggctctggtgta

SEQ ID NO: 201119 - DNA, 75 bp, synthetic construct
  source 1..75: mol_type = other DNA
gcgctcaacaaaggcaaagttgactctgcctctgcggttattattctcgaaagctatttcgagcagggatattaa

SEQ ID NO: 201120 - DNA, 75 bp, synthetic construct
  source 1..75: mol_type = other DNA
cgcgttctcaagcaactatgaactttatgcctcgatgtcagcgcgagtgatgagctgcctggaagagctggcccc

SEQ ID NO: 201121 - DNA, 75 bp, synthetic construct
  source 1..75: mol_type = other DNA
cgcggcgtcagctatgacaaacccattatcgtcagttgcggatctggggtaacggcagccgtcgtgttgctggcg

SEQ ID NO: 201122 - DNA, 75 bp, synthetic construct
  source 1..75: mol_type = other DNA
ctcgcgacgctggatgtgccaaacgtaaaattatacgacggtgcgtggagtgaatggggcgcacgggcagattta

SEQ ID NO: 201123 - DNA, 75 bp, synthetic construct
  source 1..75: mol_type = other DNA
cgatggcattctggttcaactgccgttaccggcgggtattgataacgtcaaagtgctggaacgtattcacccgga

SEQ ID NO: 201124 - DNA, 75 bp, synthetic construct
  source 1..75: mol_type = other DNA
tataacgtcggtcgtctgtgccagcgcgcgccgcgtctgcgtccctgcaccccgcgcggtatcgtcacgctgctt

SEQ ID NO: 201125 - DNA, 75 bp, synthetic construct
  source 1..75: mol_type = other DNA
gcaccactaccgtgacccaccgtttcactaaaaatctgcgtcaccacgtagaaaatgccgatctactgatcgttg

SEQ ID NO: 201126 - DNA, 75 bp, synthetic construct
  source 1..75: mol_type = other DNA
aacaaagtcggcatttacagccgtccggcaaaactaagcgatagtgtgcatgatggcgatcgggtggagatttat

SEQ ID NO: 201127 - DNA, 75 bp, synthetic construct
  source 1..75: mol_type = other DNA
atgattaaagacgcgattttttcaccgtgcggtcaatatcgctactcgttatcacgagtctgggacgaatcaaaa

SEQ ID NO: 201128 - DNA, 75 bp, synthetic construct
  source 1..75: mol_type = other DNA
gcaagcacaatgtgcttcgtcttaaacgccacaggtgaaccgagacaccctctgtatatgaaaaatgacagtgtt

SEQ ID NO: 201129 - DNA, 75 bp, synthetic construct
  source 1..75: mol_type = other DNA
acgagggattgcgccatcctggcaaatgaaacgcgacatgctctcccctgcgtacaccacccgctggaaagatat

SEQ ID NO: 201130 - DNA, 75 bp, synthetic construct
  source 1..75: mol_type = other DNA
agaaaaccgtaatcggatcttgaagctactggggctgcagccagttggtgaggtatggggagtaggacgcagact

SEQ ID NO: 201131 - DNA, 75 bp, synthetic construct
  source 1..75: mol_type = other DNA
aacagcagattgtctgtagtcgcagttttggtgaacgaatcacagacaaagatgccatgcaccaggctgttgttc

SEQ ID NO: 201132 - DNA, 75 bp, synthetic construct
  source 1..75: mol_type = other DNA
aatttcgtaaaatcagttcacttgaaagcctggaaaaactctacgatcaccttaattacaccctgacggacgatc

SEQ ID NO: 201133 - DNA, 75 bp, synthetic construct
  source 1..75: mol_type = other DNA
ggtgatctaccccatcgccttttttgtctgcttgtttggtcaaatgatcttacccgccaatagtggacacgtgac

SEQ ID NO: 201134 - DNA, 75 bp, synthetic construct
  source 1..75: mol_type = other DNA
ttatggctgttctggagtcgctttctcccgcagttgagccctactcaattgatgaaatgttcattgatttgcggg

SEQ ID NO: 201135 - DNA, 75 bp, synthetic construct
  source 1..75: mol_type = other DNA
ttttcttcgtttctggttgctgatgttcgttgcgcctctgctgctggccgtcgggataacgctaatactgcgtct

SEQ ID NO: 201136 - DNA, 75 bp, synthetic construct
  source 1..75: mol_type = other DNA
cccgccgaaacagcagattgtctgcagcaggtcttttggggagcgtatcacaacgtatgaagccctgcgtcaggc

SEQ ID NO: 201137 - DNA, 75 bp, synthetic construct
  source 1..75: mol_type = other DNA
tcggtggtgtgcttgccctgacatcacacaatccgaaacgaacggagaaactgctttcactgcagccggtggaag

SEQ ID NO: 201138 - DNA, 75 bp, synthetic construct
  source 1..75: mol_type = other DNA
ctgctctcactacagccggtggaagaaatctggggagtaggtcgcaggatctcaaaaacgcttaatacgatgggc

SEQ ID NO: 201139 - DNA, 75 bp, synthetic construct
  source 1..75: mol_type = other DNA
ctatgcgctgtatgcagatttaagcagtcgagtgatgcgcactttggaggagatggcaccacgagtagaggttta

SEQ ID NO: 201140 - DNA, 75 bp, synthetic construct
  source 1..75: mol_type = other DNA
cagcaagccaaagtgctgaccgtgttcatacgaaccagcccctttaaggacaacgagccgcaatacagcaactcc

SEQ ID NO: 201141 - DNA, 75 bp, synthetic construct
  source 1..75: mol_type = other DNA
aaagtcgtggacggtattaaccattctggacttgggaaagtgtggtttgcggggcgaggcatagctcctgagtgg

SEQ ID NO: 201142 - DNA, 75 bp, synthetic construct
  source 1..75: mol_type = other DNA
aacttctttaccaccatgcaactggtgatggcgggtaacgatacgcaaggcttgcgttacggcacgattgagaca

SEQ ID NO: 201143 - DNA, 75 bp, synthetic construct
  source 1..75: mol_type = other DNA
cgtgaaagaaaaagaaggtgctggccatcttaatgaaaccgtgtggctgattgactggaaaaacccagaagcaaa

SEQ ID NO: 201144 - DNA, 75 bp, synthetic construct
  source 1..75: mol_type = other DNA
ctcgccgcccaggctttatggcaactgctgttaccgcttattatttttgccctgaccgcgttagtcgcaaaatgg

SEQ ID NO: 201145 - DNA, 75 bp, synthetic construct
  source 1..75: mol_type = other DNA
ctcattttgaaaaagtccgtgacgaagtaaaactggccagtggcgatttggtagaaatgaaacgctttgagcctg

SEQ ID NO: 201146 - DNA, 75 bp, synthetic construct
  source 1..75: mol_type = other DNA
agcaaatgtcggtgttattggacgagctgattgagcttcgtcgccaaaaagcgattgaataccaagagtatctgg

SEQ ID NO: 201147 - DNA, 75 bp, synthetic construct
  source 1..75: mol_type = other DNA
ttctgccagaagccatgtttgttggcttcaccggcacccccttgatgaagaaagacaagaaaaaatcggttgaag

SEQ ID NO: 201148 - DNA, 75 bp, synthetic construct
  source 1..75: mol_type = other DNA
atgtcacacaacctggagcaccagaaagtccacaccagaatggtgaaagaggttctgaaatccgtcgccagagcc

SEQ ID NO: 201149 - DNA, 75 bp, synthetic construct
  source 1..75: mol_type = other DNA
acggtttgtacagctgggctacaaaattggcgtaggcggtactatcacctatccacgcgccagtaaaacccgcga

SEQ ID NO: 201150 - DNA, 75 bp, synthetic construct
  source 1..75: mol_type = other DNA
cagcctgcaacgcgcggcacaagcgggcgtaggcaagatcattgttccggcgacagaggcggaaaattttgcccg

SEQ ID NO: 201151 - DNA, 75 bp, synthetic construct
  source 1..75: mol_type = other DNA
ccgtaactatgcagttagttctggagaagtacttgtggaaggccatgtcccatcaaatgctattagaccttgtta

SEQ ID NO: 201152 - DNA, 75 bp, synthetic construct
  source 1..75: mol_type = other DNA
acgcgctgggccgcctgttgcgcagtgacacgctgcacagtacgcgcactttcagctacaaccgccttgaccaga

SEQ ID NO: 201153 - DNA, 75 bp, synthetic construct
  source 1..75: mol_type = other DNA
gtgatgcgctgggcaatcccaccgatatcaccttaccggacgggcagtatctcagtcatctttactacggcagcg

SEQ ID NO: 201154 - DNA, 75 bp, synthetic construct
  source 1..75: mol_type = other DNA
gatgacatttagcacgcaaccagcaggcgtaccagagactgactggctggcagataaagatattgcttttatcgg

SEQ ID NO: 201155 - DNA, 75 bp, synthetic construct
  source 1..75: mol_type = other DNA
atggcattaacgaccaaaaaaaagcggtttgctgatgcgttatcaaagggcgcaaatcccacggaagccgcgata

SEQ ID NO: 201156 - DNA, 75 bp, synthetic construct
  source 1..75: mol_type = other DNA
gtaaaaaagaggtaaaaaaactcaatgctaccaatgtttcatcaaaccgctttcccatccctaagccaccaacag

SEQ ID NO: 201157 - DNA, 75 bp, synthetic construct
  source 1..75: mol_type = other DNA
gtgccaaagagttgagacaggtaaaatcggtgatgaaggatattcatgggagaagggaaatcccaaatacaggcc

SEQ ID NO: 201158 - DNA, 75 bp, synthetic construct
  source 1..75: mol_type = other DNA
ttttaccgttcacgcgctggatgtagaacgtattgatgtcgatgaaggtgccagcggcgcgatggtcgggtttaa

SEQ ID NO: 201159 - DNA, 75 bp, synthetic construct
  source 1..75: mol_type = other DNA
aatatgacatggttaaaaatctggctggcacctaagttatatctaatcgaatacgcagcatcactaattaaatag

SEQ ID NO: 201160 - DNA, 75 bp, synthetic construct
  source 1..75: mol_type = other DNA
gactatgatttgggaaagtgacggtaggttaagtgcttttgtcttaccattagtagcagtttttattctatggtt

SEQ ID NO: 201161 - DNA, 75 bp, synthetic construct
  source 1..75: mol_type = other DNA
cacacacagggatcgggtaaaagcctgacgatggtctggctggcgaagtggatccgtgaaaatgtgccaaactcc

SEQ ID NO: 201162 - DNA, 75 bp, synthetic construct
  source 1..75: mol_type = other DNA
gatttcttcaccactatgcagttagtgatggcgggcaacgatacgcagggcctgcgctacggcaccatcgaaacc

SEQ ID NO: 201163 - DNA, 75 bp, synthetic construct
  source 1..75: mol_type = other DNA
ttttctatcctggcgaagttcacaaaccgctttgtgcggtgggagcccccgctcaggtacggaaagcagtagtta

SEQ ID NO: 201164 - DNA, 75 bp, synthetic construct
  source 1..75: mol_type = other DNA
cgatggctgaagcgattgaaaataacgttcgcagaaccattgttgatgaaaacccagtaaacccgaaatactacg

SEQ ID NO: 201165 - DNA, 75 bp, synthetic construct
  source 1..75: mol_type = other DNA
gcattaccgagttcgagcgggaagtgaaacagcgttttattgaagagccggggcaaatgcgcctgcttatcgtgg

SEQ ID NO: 201166 - DNA, 75 bp, synthetic construct
  source 1..75: mol_type = other DNA
agccagaccgagctggcaggaaaagtagcgattgtgaccagctatcgccccgatgccgccagcatcaaaggcgaa

SEQ ID NO: 201167 - DNA, 75 bp, synthetic construct
  source 1..75: mol_type = other DNA
taaaaaagtgattctggccgggaccaataattatctcggtttaacctttaatcatgatgccatcgccgaaggtca

SEQ ID NO: 201168 - DNA, 75 bp, synthetic construct
  source 1..75: mol_type = other DNA
aataattatcttggtttaaccttcaatgccgaggccattgcaaaaggacagtcagcgttagcaacgcaaggaacc

SEQ ID NO: 201169 - DNA, 75 bp, synthetic construct
  source 1..75: mol_type = other DNA
atggggctatacgataaatatgcgcgccttgctggcgagcgcctgcaatttagtgacaacgggttaacaccgttt

SEQ ID NO: 201170 - DNA, 75 bp, synthetic construct
  source 1..75: mol_type = other DNA
cgacatggataaatatggttccacggatgttcgtaaggcattgattaataaatgggtcagcgaagtgaagatggg

SEQ ID NO: 201171 - DNA, 75 bp, synthetic construct
  source 1..75: mol_type = other DNA
tgattgcttctgccgttgcgctggcgactttaacgggtgccgcgcaggcaaaaggccggctggtggtctattgca

SEQ ID NO: 201172 - DNA, 75 bp, synthetic construct
  source 1..75: mol_type = other DNA
attattcgtttccgccataacgatgctaaagatctggaacggcgcatggttcgcctcggtgaacgggcaaaagag

SEQ ID NO: 201173 - DNA, 75 bp, synthetic construct
  source 1..75: mol_type = other DNA
tcgttgttgctggaaactgatgcgccggatatgccgctaaatggttttcaggggcagcctaaccgcccggagcag

SEQ ID NO: 201174 - DNA, 75 bp, synthetic construct
  source 1..75: mol_type = other DNA
atccgcgcgccagtaaaacccgcgatgtgatagcgaagttgccgctgtcatcgttgttgctggaaaccgacgcgc

SEQ ID NO: 201175 - DNA, 75 bp, synthetic construct
  source 1..75: mol_type = other DNA
ggtggcagtgggggagatcggtctggatctctttggcgatgatccacaattcgatcaccaacagtggttgctcga

SEQ ID NO: 201176 - DNA, 75 bp, synthetic construct
  source 1..75: mol_type = other DNA
gcgagttacgaccggaaccggcggatgagattgccgaagtgttgcttaataacacctatacgttgtttaacgtgc

SEQ ID NO: 201177 - DNA, 75 bp, synthetic construct
  source 1..75: mol_type = other DNA
gatgcatcttaaacgccacgatttaccgtgcactggcgtggttcatggtttttccggcagcctgcaacaggccga

SEQ ID NO: 201178 - DNA, 75 bp, synthetic construct
  source 1..75: mol_type = other DNA
gcgttggcagaaaattttccgccgctgtatgccgccttagggttgcatccggggatgttggaaaaacacaccgag

SEQ ID NO: 201179 - DNA, 75 bp, synthetic construct
  source 1..75: mol_type = other DNA
gcaacggttccggtagcaccctggcaaaagtcgatgctgaaaagaaaaacccccaggctgacgtctggtacggcg

SEQ ID NO: 201180 - DNA, 75 bp, synthetic construct
  source 1..75: mol_type = other DNA
ctatggcaatacgctgaaaaacttgacgatacctattgcgctggttgccatgcccctattgccgccgaccattac

SEQ ID NO: 201181 - DNA, 75 bp, synthetic construct
  source 1..75: mol_type = other DNA
gaatacggcaatcaatggcgtcaggcgtctttacagggtgcgcttaccgatcccgcattagcggaccgtaaaccg

SEQ ID NO: 201182 - DNA, 75 bp, synthetic construct
  source 1..75: mol_type = other DNA
ggcaaacagccgatcgttctgttgcagggttatcaaatgcagggcagtgaaaacacgctctacctggcggcaggt

SEQ ID NO: 201183 - DNA, 75 bp, synthetic construct
  source 1..75: mol_type = other DNA
ttacgcctggaacccgcagatgaaattgccgaagtgttgcttaataacacgtatacgttgtttaacgtgccgtag

SEQ ID NO: 201184 - DNA, 75 bp, synthetic construct
  source 1..75: mol_type = other DNA
ttgatttgccgttttatcgatacccactgccattttgatttcccgccgtttagtggcgatgaagaggccagcctg

SEQ ID NO: 201185 - DNA, 75 bp, synthetic construct
  source 1..75: mol_type = other DNA
tattttttctgctcatggcagtagtggtgggtggcggtgggttattgctggcgcaaaaagtcttacataaaacgt

SEQ ID NO: 201186 - DNA, 75 bp, synthetic construct
  source 1..75: mol_type = other DNA
cagaaactgctttttgcctgtcgtgccactcgatgagtaaaccgtttgaggagtatcagggaactgtccactttt

SEQ ID NO: 201187 - DNA, 75 bp, synthetic construct
  source 1..75: mol_type = other DNA
aaccgcaggagtcaagaaagaaagccaaaaagccggggcatcgcagaaaaaaacggtggtcccggaaagaatgcc

SEQ ID NO: 201188 - DNA, 75 bp, synthetic construct
  source 1..75: mol_type = other DNA
gcattgccccggcacgtaacgccgcccgcggcgaaacggcgattggtattggcttcctgcatgactactcgctgg

SEQ ID NO: 201189 - DNA, 75 bp, synthetic construct
  source 1..75: mol_type = other DNA
atgcgagggaaaaaacgcattgggttattttttctgctcatagcagtagtggtgggtagcggtgggttattgttg

SEQ ID NO: 201190 - DNA, 75 bp, synthetic construct
  source 1..75: mol_type = other DNA
accgtcaatgcatggccgtccattgccaaaggaatgggggcgcgaaccagcatgagcgaaaacgaactggacatt

SEQ ID NO: 201191 - DNA, 75 bp, synthetic construct
  source 1..75: mol_type = other DNA
gaatatcagggaactgtccacttttcgaaccagaaagggatacgtgcggaatgtgccgattgccatattccaaag

SEQ ID NO: 201192 - DNA, 75 bp, synthetic construct
  source 1..75: mol_type = other DNA
cgttttatcatgctaaagcccaggctgttggtgcagctgacagtctgaaaacgtttatggaaaccccgctcgccc

SEQ ID NO: 201193 - DNA, 75 bp, synthetic construct
  source 1..75: mol_type = other DNA
catatgattatggagaatattccccgtgaagccctgctgcttccctttacgttactggttctgacctttgtactg

SEQ ID NO: 201194 - DNA, 75 bp, synthetic construct
  source 1..75: mol_type = other DNA
acagccagtcagcgaatcccgaccgttaccttcaccaacaataagtcagaatttctcccggttaatcattacagg

SEQ ID NO: 201195 - DNA, 75 bp, synthetic construct
  source 1..75: mol_type = other DNA
ccgctggggacggggacagcgagctacagtggcagtatgagtaatgaccgttatgtgaatatggccggctacact

SEQ ID NO: 201196 - DNA, 75 bp, synthetic construct
  source 1..75: mol_type = other DNA
gtgagatgtccggttatttatctttttgtgaatctggtgatgcgtggaatgaaagacagaataccttttgcagtc

SEQ ID NO: 201197 - DNA, 75 bp, synthetic construct
  source 1..75: mol_type = other DNA
tcccttctaactgggttgcggcgcttattctgctgggcactgcgccgttaatcccgttgtttatggcgttagttg

SEQ ID NO: 201198 - DNA, 75 bp, synthetic construct
  source 1..75: mol_type = other DNA
tggagatacgcccgaatccggcagaagggatgctgtacatcaatatgccacaggcctggctggaatattccgatg

SEQ ID NO: 201199 - DNA, 75 bp, synthetic construct
  source 1..75: mol_type = other DNA
gaaccgggataacgattcggcgtttgttcgtctgtccgtgccgtggggaaccggtacggccagctacagcggcag

SEQ ID NO: 201200 - DNA, 75 bp, synthetic construct
  source 1..75: mol_type = other DNA
aggggccattggttatcgtgagttcgaagttctgaaaggtagccgtctgtttgctgtgttgcggatgtctgataa

SEQ ID NO: 201201 - DNA, 75 bp, synthetic construct
  source 1..75: mol_type = other DNA
tgagagtgctggcgttctggcacttacgcaacaacgtctttctccacctaaaataactcccccccgagagtcagc

SEQ ID NO: 201202 - DNA, 75 bp, synthetic construct
  source 1..75: mol_type = other DNA
tctttgtcgacgggcaaatcagcgaaagcagctcgctcctggcacagacacagcggcggctgagtccgccgcccg

SEQ ID NO: 201203 - DNA, 75 bp, synthetic construct
  source 1..75: mol_type = other DNA
ggagaaaccctgaacgtcggctgggacggccggacacagtgtgtggtggacatcccggcacatccggacccggca

SEQ ID NO: 201204 - DNA, 75 bp, synthetic construct
  source 1..75: mol_type = other DNA
ccttatgcctggcggcagataaaggtgacctgtgccgcctggtcatcacggattcgcatgctgcgggttgaattc

SEQ ID NO: 201205 - DNA, 75 bp, synthetic construct
  source 1..75: mol_type = other DNA
atgttaactggggcttttctctatctgcctttggtgttcatgcttgaggcagatagcctcaagcacccgcagcaa

SEQ ID NO: 201206 - DNA, 75 bp, synthetic construct
  source 1..75: mol_type = other DNA
atgaaaacatttcactggaaagtgaagccggatatggaggtgaactcgcagtcatcggtgcgtgaagtgcgtttt

SEQ ID NO: 201207 - DNA, 75 bp, synthetic construct
  source 1..75: mol_type = other DNA
cgacaagccgaccacacaggagtacgacgcgggtctggaactcagctatgagctcgattttttcggcaaacttaa

SEQ ID NO: 201208 - DNA, 75 bp, synthetic construct
  source 1..75: mol_type = other DNA
ttaatgctctcagtatagtccatcgagcaagattgactattatgatggatttcaaaacacaaacaaagatttcat

SEQ ID NO: 201209 - DNA, 75 bp, synthetic construct
  source 1..75: mol_type = other DNA
tgacctgtgccgcctggtcatcacgggttcgcatgctgcgggttgaattcagagcggagtttaagcaggtggtga

SEQ ID NO: 201210 - DNA, 75 bp, synthetic construct
  source 1..75: mol_type = other DNA
tgacctgtgccgcctggtcatcacgggttcgcatgctgagggttgaattcagcgccgagtttaagcaggtggtga

SEQ ID NO: 201211 - DNA, 75 bp, synthetic construct
  source 1..75: mol_type = other DNA
tggtggtggtagcagaacacttcggagcggatgatgaacggctggcgcgtgcgctgatgctttctcatttgagcg

SEQ ID NO: 201212 - DNA, 75 bp, synthetic construct
  source 1..75: mol_type = other DNA
tgcgctttggtgatggctattcccagcgtgtgcctgccgggctgaacgctgacctgaaaacgtacagcgtgacgc

SEQ ID NO: 201213 - DNA, 75 bp, synthetic construct
  source 1..75: mol_type = other DNA
tgacctgtgccgcctggtcatcacgggttcgcatgctgcgggttgaattcagggcagagtttaagcaggtggtga

SEQ ID NO: 201214 - DNA, 75 bp, synthetic construct
  source 1..75: mol_type = other DNA
ccgggatggcatggctggtggatgggcgttatgaaacgatctcaatggcgatcagcagtatgatcggtgatgtta

SEQ ID NO: 201215 - DNA, 75 bp, synthetic construct
  source 1..75: mol_type = other DNA
tgtgcgttagcaagccattcgatgcagcaaacggatcggcagattatcgagattatggcgagcaaggccagataa

SEQ ID NO: 201216 - DNA, 75 bp, synthetic construct
  source 1..75: mol_type = other DNA
attgtgggtatgtacgccgcgccatccggcagtacgctgttgatcgaccgcaattgtcataaatcgctggcgcat

SEQ ID NO: 201217 - DNA, 75 bp, synthetic construct
  source 1..75: mol_type = other DNA
acccgtgatgatgccagacggctggaagattttctggcagagcacgggggctggaaggcgtttctgtggacgccg

SEQ ID NO: 201218 - DNA, 75 bp, synthetic construct
  source 1..75: mol_type = other DNA
tgacatgcgctaaatggacctccaggataaatatgctgcgtgtggaattcagtgcggagtttaaacaggtggtga

SEQ ID NO: 201219 - DNA, 75 bp, synthetic construct
  source 1..75: mol_type = other DNA
ctcacttaattttagtgttgaggatattacagggctaactccggccaaattcagaaagggggctttcttgcatgc

SEQ ID NO: 201220 - DNA, 75 bp, synthetic construct
  source 1..75: mol_type = other DNA
gctaaaattgacaagccagaagaaatcctttcatcaagctacatagcaaatccactgactattgctggtgcgaaa

SEQ ID NO: 201221 - DNA, 75 bp, synthetic construct
  source 1..75: mol_type = other DNA
atgaaaaccttccgctggaaagtgaaacccgggatggatgtgacatcggctccttccgtcagggcggtgcgcttt

SEQ ID NO: 201222 - DNA, 75 bp, synthetic construct
  source 1..75: mol_type = other DNA
tgacctgtgccgggtggtcattacgggttcgtatgctgagggttgaattcagtgctgactttaaacaggtggtga

SEQ ID NO: 201223 - DNA, 75 bp, synthetic construct
  source 1..75: mol_type = other DNA
gtgacaaacgcgaaaggccgtgagctggggatggtggcagacagcggtctggcctggctgagcggagtgaatccg

SEQ ID NO: 201224 - DNA, 75 bp, synthetic construct
  source 1..75: mol_type = other DNA
ttttgctggtatgtcagaagctgaggcattaaaaccatctcttattacagtatgggctcgttggtctgtgtcttt

SEQ ID NO: 201225 - DNA, 75 bp, synthetic construct
  source 1..75: mol_type = other DNA
aaccgccgccattatctacttgtatccttccccattggtgtgtaatgctggagcctttgttatcggtttctcagc

SEQ ID NO: 201226 - DNA, 75 bp, synthetic construct
  source 1..75: mol_type = other DNA
ctatccgccgtttggcgccagcgtgacaaacgcgaaaggccgtgaactggggatggtggcagacagtggtctggc

SEQ ID NO: 201227 - DNA, 75 bp, synthetic construct
  source 1..75: mol_type = other DNA
gcggaaaaaaacgttccaggtggacactgcatatgtgccgtatctgactcgtccgggccaggttcgttacaagct

SEQ ID NO: 201228 - DNA, 75 bp, synthetic construct
  source 1..75: mol_type = other DNA
gtacagccaccagacttactgggaccgccggacatctgactattacacgctgtcggtgaaccgttacttcgatgc

SEQ ID NO: 201229 - DNA, 75 bp, synthetic construct
  source 1..75: mol_type = other DNA
gctggatacgggtggctaccccgcgctcatggaatgctttccgaaagcctctggttcggcggtcatactggttaa

SEQ ID NO: 201230 - DNA, 75 bp, synthetic construct
  source 1..75: mol_type = other DNA
cgttagtctggctggaaggtgtttcatcagtactgttcggtgttgccgcgttctcgaccttttatgtaattgtcg

SEQ ID NO: 201231 - DNA, 75 bp, synthetic construct
  source 1..75: mol_type = other DNA
agttctgttcgtggacgccttgatgtagaagttattgagcaggatggacgaaagcaaacatttcaggttgatacg

SEQ ID NO: 201232 - DNA, 75 bp, synthetic construct
  source 1..75: mol_type = other DNA
atctgtactgttcggcgttgccgcattctcaaccttttatgtgatagtggtgtggatgccaaaatatgcgatggc

SEQ ID NO: 201233 - DNA, 75 bp, synthetic construct
  source 1..75: mol_type = other DNA
cgccatttatcctagctgttctttgtatctatttcagctattttctacatggcatcagcgttattacgcttgcac

SEQ ID NO: 201234 - DNA, 75 bp, synthetic construct
  source 1..75: mol_type = other DNA
aaccgctgctatcatttatctgtacccttctccactggtgtgtaatgcaggggcttttgttatcggcttttctgc

SEQ ID NO: 201235 - DNA, 75 bp, synthetic construct
  source 1..75: mol_type = other DNA
cgacggcgctgcaaactgtacctgaacaaaatattgatgtaacaaatagcgaaagcgcattaattattaaaatga

SEQ ID NO: 201236 - DNA, 75 bp, synthetic construct
  source 1..75: mol_type = other DNA
gccatactggcgaattaatgaagaatcatgttactggcgtgatgctttattccgtgcattacgtgaattattcag

SEQ ID NO: 201237 - DNA, 75 bp, synthetic construct
  source 1..75: mol_type = other DNA
cgccaccaccatgccttacattcctggttttctctccttccgcgaatatcctgcgctgctggcagcgtgggagat

SEQ ID NO: 201238 - DNA, 75 bp, synthetic construct
  source 1..75: mol_type = other DNA
cagccgcaagccggccagcagttcagcggtcagccacaggccaccggcacagcggcagcggcgggaaacgagccg

SEQ ID NO: 201239 - DNA, 75 bp, synthetic construct
  source 1..75: mol_type = other DNA
cagttcagcggccagccacaaaccaccggcacagcggcaggaaacgaatcgcctccgttcgacgctgatataccg

SEQ ID NO: 201240 - DNA, 75 bp, synthetic construct
  source 1..75: mol_type = other DNA
ttgaaaaacagccagcaactatgcgccggataattggtaagcatctggccgtccctcgctggcaggagacatgtg

SEQ ID NO: 201241 - DNA, 75 bp, synthetic construct
  source 1..75: mol_type = other DNA
cacaatccggcgaggcgctgcacggtttgctggcgctggcccgccatcaactggcctgtcagccggcatttatcg

SEQ ID NO: 201242 - DNA, 75 bp, synthetic construct
  source 1..75: mol_type = other DNA
ggactggcgcaaagtcaggtgttacatcggttggcaatactggagatcccaggggttgtgcgccagcagggaagt

SEQ ID NO: 201243 - DNA, 75 bp, synthetic construct
  source 1..75: mol_type = other DNA
actacttacctgcctccaccgccgatatggctgccgcccatctgcattcgatggctctggcacaactgcgcggtc

SEQ ID NO: 201244 - DNA, 75 bp, synthetic construct
  source 1..75: mol_type = other DNA
gcaattgatgagttgcgtggggcattctcaaaacgccgtcaggttggcgcaagtgagtatgcatatattagtttt

SEQ ID NO: 201245 - DNA, 75 bp, synthetic construct
  source 1..75: mol_type = other DNA
acaaacgacgttatgcgcggctatcgatcgcacgctgtggctgtgtgaatccaacggcagaccggatgaaaagga

SEQ ID NO: 201246 - DNA, 75 bp, synthetic construct
  source 1..75: mol_type = other DNA
attgaagcagcctgctttggcgccacacttcaggaagctgcacgtaacaaattagaagcagacatgctggatgca

SEQ ID NO: 201247 - DNA, 75 bp, synthetic construct
  source 1..75: mol_type = other DNA
atggcaaacgccccgcttgatcgcggggcttttatcaacccgaaaaaggtgattatcatggcttcaagaggtgtt

SEQ ID NO: 201248 - DNA, 75 bp, synthetic construct
  source 1..75: mol_type = other DNA
tcaataggtaatcgctggcagattggccatgaagatgaaatcttcgcgttctcgctatctaatagtattacgaat

SEQ ID NO: 201249 - DNA, 75 bp, synthetic construct
  source 1..75: mol_type = other DNA
gacaacacttgatcgccttcaggaacaatggcctgaacgtaaggaggatattcttaatgaaatccaacggcagcg

SEQ ID NO: 201250 - DNA, 75 bp, synthetic construct
  source 1..75: mol_type = other DNA
atgtctggaaaaaatccattctggaattatgattataatgcagcacaacgcaacagagaaattgttgactcatat

SEQ ID NO: 201251 - DNA, 75 bp, synthetic construct
  source 1..75: mol_type = other DNA
agaaataaggtatccaaaagattggactaacgcggtaatgctatcacagcaggttgaaagacgagtggttttgaa

SEQ ID NO: 201252 - DNA, 75 bp, synthetic construct
  source 1..75: mol_type = other DNA
acgctgtatgcaaaaggtctgacctgcaaagctgacactctcggtagcggtggttacgtttatctggctgtttat

SEQ ID NO: 201253 - DNA, 75 bp, synthetic construct
  source 1..75: mol_type = other DNA
ccataccggagaatctcccctgcaaacagtgggggctaaagagtacgatcacaccctgttttggagctcggctgg

SEQ ID NO: 201254 - DNA, 75 bp, synthetic construct
  source 1..75: mol_type = other DNA
ttcaacaatcaggtaggcggcgttacagaaacagatctgatgcagcacctgatcgacactctcgcatctaacaaa

SEQ ID NO: 201255 - DNA, 75 bp, synthetic construct
  source 1..75: mol_type = other DNA
atggctcttaacagtctgcaatatgcaggggtgagagaaaccgaattacttctgcttgataaaataaaaatcgac

SEQ ID NO: 201256 - DNA, 75 bp, synthetic construct
  source 1..75: mol_type = other DNA
gaattaacagacacagaattatcaatcattcaaagtatgcctggcgtttacttcaatccacgcccacgcaaaaca

SEQ ID NO: 201257 - DNA, 75 bp, synthetic construct
  source 1..75: mol_type = other DNA
attatgattataatgcggcgcaacgtaatagagaaattgtagactcttaccaacaggcaaatgaggcaaggctgg

SEQ ID NO: 201258 - DNA, 75 bp, synthetic construct
  source 1..75: mol_type = other DNA
acagcaaacaagttggggggagatgcacctgctggttacgatcaagttatggataacaaagggttactcatcgct

SEQ ID NO: 201259 - DNA, 75 bp, synthetic construct
  source 1..75: mol_type = other DNA
gaaaaaggcaccatcatctcagtggcaccacagggactctatcaggtcgtcaacccgggaacaccaccgttcatt

SEQ ID NO: 201260 - DNA, 75 bp, synthetic construct
  source 1..75: mol_type = other DNA
acaaactgacgggcggcctgcagttacccaatgatgaaaccggagactgccagctgtttacccagaatctggcgc

SEQ ID NO: 201261 - DNA, 75 bp, synthetic construct
  source 1..75: mol_type = other DNA
gagcttatatcacagggagaatctctgggcagtgtgacagaaaaaacaggtatctctcgatcgacgtacttcagg

SEQ ID NO: 201262 - DNA, 75 bp, synthetic construct
  source 1..75: mol_type = other DNA
cgttaagtccggtaagtgtgaggagcacaggcgggcggcatggcgtgcagaggatgccagacgaggacaccgccg

SEQ ID NO: 201263 - DNA, 75 bp, synthetic construct
  source 1..75: mol_type = other DNA
cgtcgaacgtgaacggctggtttgtgcaattgatgaattgcgtggggcattctcaaaacgccgtcaggtcggtgc

SEQ ID NO: 201264 - DNA, 75 bp, synthetic construct
  source 1..75: mol_type = other DNA
aagtgagtccgcatatattagttttctaacggttagccaacggcggtcattgtttttacatgcagggttaagtga

SEQ ID NO: 201265 - DNA, 75 bp, synthetic construct
  source 1..75: mol_type = other DNA
tggacaagcagccagaaggattacgtagtctgattggtaaatatcttgcagcgccccgctggcaggatagctgtg

SEQ ID NO: 201266 - DNA, 75 bp, synthetic construct
  source 1..75: mol_type = other DNA
ttgtcgatccccaggttacacggctgattactgaagccctgaataataaccgcgatttgagaatggctgccctga

SEQ ID NO: 201267 - DNA, 75 bp, synthetic construct
  source 1..75: mol_type = other DNA
aaaattgccaccaaatctgtcttcacaaattttgctgcagcgaccggatattatggaagcggaatatcagctgaa

SEQ ID NO: 201268 - DNA, 75 bp, synthetic construct
  source 1..75: mol_type = other DNA
aaattatcaacagtcctatgctttcgttgagcagcagctcgtgaccgggagtacgaacgttctggcacttgaaca

SEQ ID NO: 201269 - DNA, 75 bp, synthetic construct
  source 1..75: mol_type = other DNA
cgttaggtggaaatgctaacgccgggctggaagtgctgaaagacgcaactgcgcaggcaatttccgatgccaaag

SEQ ID NO: 201270 - DNA, 75 bp, synthetic construct
  source 1..75: mol_type = other DNA
cgtgagggaagcaagtcggcggcggcaacgcctcagcgtgccaagaaacgaccagaaggcaggtctaacggcctg

SEQ ID NO: 201271 - DNA, 75 bp, synthetic construct
  source 1..75: mol_type = other DNA
tggtggcgggtatatcggaaaacggaaagcccttgatgccattctcgaaaagttaatccaggaggccgcccaatg

SEQ ID NO: 201272 - DNA, 75 bp, synthetic construct
  source 1..75: mol_type = other DNA
atgacagtgatgacgctcaatcttgttgaaaaacagccagcagctatgcgccggataattggtaagcatctggcc

SEQ ID NO: 201273 - DNA, 75 bp, synthetic construct
  source 1..75: mol_type = other DNA
gctggcgcatcaggtgcttgagcattaccagctcgcacagcttcccgtttcagcgctgcaaatgccgttgcattg

SEQ ID NO: 201274 - DNA, 75 bp, synthetic construct
  source 1..75: mol_type = other DNA
ggcaggcgctacaaaccgcacgtcatattcaggcacaaacttactttattgatttgccttgctgggcgcagagtg

SEQ ID NO: 201275 - DNA, 75 bp, synthetic construct
  source 1..75: mol_type = other DNA
ccaacggcaggccggacgaaaaagaatttcacacccatttgcatagctggcaggcgctgtgccatatcctgcgcg

SEQ ID NO: 201276 - DNA, 75 bp, synthetic construct
  source 1..75: mol_type = other DNA
cgcaaaccattgctcatcaccaacaactggaacagcaggcactggcagcactgcaacactggggagttttccatg

SEQ ID NO: 201277 - DNA, 75 bp, synthetic construct
  source 1..75: mol_type = other DNA
cggtgcggctcttggcgcgctaatgcgtctggaacatcccaacgccagtgccgaagcggcgctgacgatgctggc

SEQ ID NO: 201278 - DNA, 75 bp, synthetic construct
  source 1..75: mol_type = other DNA
ccgatccgattctgctaacgttgatagacacattagcgggtgacggattcggtaaacttgccccttctacgccac

SEQ ID NO: 201279 - DNA, 75 bp, synthetic construct
  source 1..75: mol_type = other DNA
cccaggaaaatcaatttgccgaaatgggccaggcgctggaagtgctatatgccttatggcggctggatgaaatta

SEQ ID NO: 201280 - DNA, 75 bp, synthetic construct
  source 1..75: mol_type = other DNA
agggaagtacactgacacttgcaggcaacggtgaagaacgctggaaattaacccgcccgcttagccagcatgcgg

SEQ ID NO: 201281 - DNA, 75 bp, synthetic construct
  source 1..75: mol_type = other DNA
tcacgccctacagtgaaaagcgccttgatgtgctggcaggatacctttccggtatgcctgccccggtctggcaaa

SEQ ID NO: 201282 - DNA, 75 bp, synthetic construct
  source 1..75: mol_type = other DNA
cactcctggaagccgcacgcaataaattagaagccgatatgctggacacaggaggaatcggcaacatcaccacat

SEQ ID NO: 201283 - DNA, 75 bp, synthetic construct
  source 1..75: mol_type = other DNA
ccggcgctggatcgcggcgcggctcttggcgcactgatgcgtctggaacatcccaacgccagtgccgaagcggcg

SEQ ID NO: 201284 - DNA, 75 bp, synthetic construct
  source 1..75: mol_type = other DNA
tccggcaccatagtccggcctgcgcccgtctggtgaaatcgctaattgaaagcaagcaaccgcgatacgtgttga

SEQ ID NO: 201285 - DNA, 75 bp, synthetic construct
  source 1..75: mol_type = other DNA
gtgcagtcgtctattgaacgaacagtatcaggagtccgctgcacgaatgatgacctcaagccggttctggtcgcg

SEQ ID NO: 201286 - DNA, 75 bp, synthetic construct
  source 1..75: mol_type = other DNA
acttaccgctacccaaaaaatttgacgatctgattttcccctggcttggcccgacgcgtaccagcgaactggccg

SEQ ID NO: 201287 - DNA, 75 bp, synthetic construct
  source 1..75: mol_type = other DNA
ccgccagtcccctgatgacccgcctgcaggacgagctgcgcacggaatctgtccgcgctcaggcccgtgaacagt

SEQ ID NO: 201288 - DNA, 75 bp, synthetic construct
  source 1..75: mol_type = other DNA
acaggtcgtgaaacttttgaatgccagcaatctaaagcagacaagggtgggcttatggggatttggttttgattt

SEQ ID NO: 201289 - DNA, 75 bp, synthetic construct
  source 1..75: mol_type = other DNA
gcttgtggggatttggttatgatttcgaagatatgaaggttcgctgttggtacgaacaccatttccctctattgc

SEQ ID NO: 201290 - DNA, 75 bp, synthetic construct
  source 1..75: mol_type = other DNA
ttgggatgatatctgggaagacggactggaagctgaaaagctacgggaagcattgctgtcattagaacatgcttt

SEQ ID NO: 201291 - DNA, 75 bp, synthetic construct
  source 1..75: mol_type = other DNA
caaacgacgaagtttaataaagaccactttatcaagcgtggtgtaacggaatatctgtgtcctcattgcttagca

SEQ ID NO: 201292 - DNA, 75 bp, synthetic construct
  source 1..75: mol_type = other DNA
atgacgctttatagcgggatgaacaatgccagcggcaaagtcattactgatattgatcatctgcgccagtcggtg

SEQ ID NO: 201293 - DNA, 75 bp, synthetic construct
  source 1..75: mol_type = other DNA
tggttctctgctgtcggcactgatagaccagccacaaaatccggcactacgcctgcaggtcatgtcggcagtgta

SEQ ID NO: 201294 - DNA, 75 bp, synthetic construct
  source 1..75: mol_type = other DNA
ataccagcggtaaagccattactgatattgaccatctgcgccagtcggtgcgggacattttgctgacgccgcagg

SEQ ID NO: 201295 - DNA, 75 bp, synthetic construct
  source 1..75: mol_type = other DNA
ataccagcggtaaaaccattactgatattggccatctgcgccagtcggtgcgggacattttgctgacgccgcagg

SEQ ID NO: 201296 - DNA, 75 bp, synthetic construct
  source 1..75: mol_type = other DNA
atgacgctttatatcggtatgaataataccagcggtaaaaccattactgatattggccatctgcgccagtcggtg

SEQ ID NO: 201297 - DNA, 75 bp, synthetic construct
  source 1..75: mol_type = other DNA
ctgaccgggcggcgtaataacggtgtgcctgtgtccctttccgtatcaacaggagcagagaatggcagtgattga

SEQ ID NO: 201298 - DNA, 75 bp, synthetic construct
  source 1..75: mol_type = other DNA
tgtccgctgggaacatccacaaacgggaattatcccaccggatcagtttattcctctggcggagtcatccggtct

SEQ ID NO: 201299 - DNA, 75 bp, synthetic construct
  source 1..75: mol_type = other DNA
agcgatatttgacagccttcatcagcacaatattacctttgcgctggatgactttggtacgggttatgcgaccta

SEQ ID NO: 201300 - DNA, 75 bp, synthetic construct
  source 1..75: mol_type = other DNA
gccagaagccagagcgatatttgacagccttcatcagcataacattacctttgcgctggatgactttggtacggg

SEQ ID NO: 201301 - DNA, 75 bp, synthetic construct
  source 1..75: mol_type = other DNA
tcttattgtgataatgacccgtcagttgatgaaacaaacagcagatattctgttgccagtaaaacatttgctacc

SEQ ID NO: 201302 - DNA, 75 bp, synthetic construct
  source 1..75: mol_type = other DNA
accggatgcgccttatgtctcggatcgtcgctggaaaaaagcgatccgattattgcaggccagcgcctttttagc

SEQ ID NO: 201303 - DNA, 75 bp, synthetic construct
  source 1..75: mol_type = other DNA
cggcttttaccgtgattcgtcagggcggtatgttcagccgtcgcccacaatatcaacttccagccaacgttaccg

SEQ ID NO: 201304 - DNA, 75 bp, synthetic construct
  source 1..75: mol_type = other DNA
gtcttgtcggctttgtcatatatttctgggttttttcattttctgttggcttttacaagccgcaattcaagaaag

SEQ ID NO: 201305 - DNA, 75 bp, synthetic construct
  source 1..75: mol_type = other DNA
ggaaaaccatgaatttaaaccgtggatccaaccggttttctgcgcgcagactggggtactgacgggctgtgaggt

SEQ ID NO: 201306 - DNA, 75 bp, synthetic construct
  source 1..75: mol_type = other DNA
caggcggacttaatgatcggtaaaggcgttcactttttgcagggctatttgtactctccgccggttccgggtaat

SEQ ID NO: 201307 - DNA, 75 bp, synthetic construct
  source 1..75: mol_type = other DNA
ttcccggtcgattttattaagatcgataagtcatttgtgcaaatggcgagtgtcgacgaaatctccggtcatatt

SEQ ID NO: 201308 - DNA, 75 bp, synthetic construct
  source 1..75: mol_type = other DNA
tttttgcagggctatttgtactctccgccagtaccgggtaataaatttatctctgaatgggtaatgaaagcaggt

SEQ ID NO: 201309 - DNA, 75 bp, synthetic construct
  source 1..75: mol_type = other DNA
ccgggtttgaaaaggagtgtctgaacctggttaagaaattaggcaacgataaaatcaaactggttctcgagttga

SEQ ID NO: 201310 - DNA, 75 bp, synthetic construct
  source 1..75: mol_type = other DNA
ttgcgctggatgattttggtacgggttatgcgacctatcgttatttgcaggcgtttccggtcgattttattaaga

SEQ ID NO: 201311 - DNA, 75 bp, synthetic construct
  source 1..75: mol_type = other DNA
cggcctggtggccgcaattggtgcggaaacggcactggcggtactgcaatcgaaagtgtttgatttcccgtggga

SEQ ID NO: 201312 - DNA, 75 bp, synthetic construct
  source 1..75: mol_type = other DNA
tcaaaattccggtggacattgaacacgccaccgaaattaaaggcccgcgtggtgaagatgctccggcgtatggct

SEQ ID NO: 201313 - DNA, 75 bp, synthetic construct
  source 1..75: mol_type = other DNA
gcagatggcgatcctggtcaacgaggccaattacatgtttgtgcttcagccgtggtgtgttgtagaccttaacga

SEQ ID NO: 201314 - DNA, 75 bp, synthetic construct
  source 1..75: mol_type = other DNA
cggcctggtggccgcaattggtgcggaaacggcactggcagtgttgcaggcgaaagtgtttgatttcccgtggga

SEQ ID NO: 201315 - DNA, 75 bp, synthetic construct
  source 1..75: mol_type = other DNA
atggtggtgctggtcaccgcctgcggcatgttgctgttgctggcgcaggtgcaggtgggaatgcgtcagcgtcat

SEQ ID NO: 201316 - DNA, 75 bp, synthetic construct
  source 1..75: mol_type = other DNA
ctgtcgctttgcggcggctggctgggtgcgcgactgcttaagggtaaggcgctgttcaggcagtttgcggggtga

SEQ ID NO: 201317 - DNA, 75 bp, synthetic construct
  source 1..75: mol_type = other DNA
gcacacatgtattaattggcatgggaagcgccctgtttatgattgtttcgaaatatggttttgctgacgtgctgt

SEQ ID NO: 201318 - DNA, 75 bp, synthetic construct
  source 1..75: mol_type = other DNA
aatatgtgaacgaggcactgaaggatgagcactggatctgcgggcaacgatttacaattgctgatgcctatctgt

SEQ ID NO: 201319 - DNA, 75 bp, synthetic construct
  source 1..75: mol_type = other DNA
gccaaaactgccgaagagcgcgacggttatattgcttatatcgatgaactctataatgccaaccgtctgaccgaa

SEQ ID NO: 201320 - DNA, 75 bp, synthetic construct
  source 1..75: mol_type = other DNA
aagacaaggcaacaggaaagcgggtggctatcctggttaatgaagcaaattatatgtttgttctccagccgtggt

SEQ ID NO: 201321 - DNA, 75 bp, synthetic construct
  source 1..75: mol_type = other DNA
tggtaaaagacctttaataaatagaagtgagttaaatgcattaatgactaaacggggatttaatgttgtcttttt

SEQ ID NO: 201322 - DNA, 75 bp, synthetic construct
  source 1..75: mol_type = other DNA
caaaaattaccatttacagctgacattagtgaacggtaatacggtatcaatgctcgactggtttaagcagcaaaa

SEQ ID NO: 201323 - DNA, 75 bp, synthetic construct
  source 1..75: mol_type = other DNA
aaagatcatctcgcaatttacggcgtaaaaaatgccttactggcaccaggctatagagccactaagaaggctgac

SEQ ID NO: 201324 - DNA, 75 bp, synthetic construct
  source 1..75: mol_type = other DNA
ccgtgcgcgcccggaaagccaggaattgaatatcctgcgcgggattctggcttctattgagcagcagaataaagg

SEQ ID NO: 201325 - DNA, 75 bp, synthetic construct
  source 1..75: mol_type = other DNA
ggctggttaatccactggtgaaacccgactcccaggcgattgccctggcagcaggggccagcgatgtgattggta

SEQ ID NO: 201326 - DNA, 75 bp, synthetic construct
  source 1..75: mol_type = other DNA
gttttttccagctactgaaacgtgaacggataaagaaaaagatctacggaacgcgagaagaagctcgcggtgata

SEQ ID NO: 201327 - DNA, 75 bp, synthetic construct
  source 1..75: mol_type = other DNA
ggtggtggagctgaccgggcggcgtaataacggtgtgcctgtttccctttccgtatcaacaggagcagggaatgg

SEQ ID NO: 201328 - DNA, 75 bp, synthetic construct
  source 1..75: mol_type = other DNA
attctctgaaattattgagagtgcaattcgccgctttcttaatactcatggtagcattgtcagcaatacaactgc

SEQ ID NO: 201329 - DNA, 75 bp, synthetic construct
  source 1..75: mol_type = other DNA
gtctgtttacccgtgcgcgcccggaaagccaggagttgaatatcctgcgcgggattctggcttctattgagcagc

SEQ ID NO: 201330 - DNA, 75 bp, synthetic construct
  source 1..75: mol_type = other DNA
tgctttagaaccaggatttatatggagagcatatagccctgcctcattagaattttatggcattgaacgaaaata

SEQ ID NO: 201331 - DNA, 75 bp, synthetic construct
  source 1..75: mol_type = other DNA
aagcaagactagtagatcaactaggtaaattctttggaaaaccatgctccaaagatgcatattttattgatgctt

SEQ ID NO: 201332 - DNA, 75 bp, synthetic construct
  source 1..75: mol_type = other DNA
actgctcacccgatcattgcctaaatggaccggagtaccgtttatggctcaaagatcatctcgcgatttacggcg

SEQ ID NO: 201333 - DNA, 75 bp, synthetic construct
  source 1..75: mol_type = other DNA
gctttttccagttgttgaaacgcgaacggataaagaaaaagttctacggaacgcgggaagaagcccgcagtgata

SEQ ID NO: 201334 - DNA, 75 bp, synthetic construct
  source 1..75: mol_type = other DNA
ctgcctcttactctactaaggacccacgaaggctggctgtatcttgccgtggttgttgatctgttctcacgcaaa

SEQ ID NO: 201335 - DNA, 75 bp, synthetic construct
  source 1..75: mol_type = other DNA
aataaccataactatgatgggggaagtgttgtcgaaattagacagcttgaaattggtaaacaagggtattggcca

SEQ ID NO: 201336 - DNA, 75 bp, synthetic construct
  source 1..75: mol_type = other DNA
ggcagatgcgcttggtgtattcggtgatgcagcagtacagaaagttctggataacctgtcacagcaaaaacttgt

SEQ ID NO: 201337 - DNA, 75 bp, synthetic construct
  source 1..75: mol_type = other DNA
ggactcgacaacgatcaagcacacatgcttacagcatttaaaatcgctctcgcctcactggaacgcgaacagatt

SEQ ID NO: 201338 - DNA, 75 bp, synthetic construct
  source 1..75: mol_type = other DNA
gtgagtctcgcttgcacattaaagaacgcggcaactctccggtaactccgggtggttggataagctgtagtgatc

SEQ ID NO: 201339 - DNA, 75 bp, synthetic construct
  source 1..75: mol_type = other DNA
aaaccgtgccattggtcgtttcaattcctcattttctgctttagctcaggcgcttgaaaatcaggaaatgccaga

SEQ ID NO: 201340 - DNA, 75 bp, synthetic construct
  source 1..75: mol_type = other DNA
tttaatcgaaatcgctcctggcgtcgatttacaaaaagatattctcgacaaaatggatttcaccccagtgatttc

SEQ ID NO: 201341 - DNA, 75 bp, synthetic construct
  source 1..75: mol_type = other DNA
acattcaggttcatcgtgccttatctaagatggacctgactgatcataagtcaatgcacaatctacttagtttta

SEQ ID NO: 201342 - DNA, 75 bp, synthetic construct
  source 1..75: mol_type = other DNA
tttcacgtatttatcaggaaatatcttggatgacgtaactcactggatgccgctaccagaaccgccgaaggaggt

SEQ ID NO: 201343 - DNA, 75 bp, synthetic construct
  source 1..75: mol_type = other DNA
aactggcacgaattgcactggcatcactggaacgcgaacagattcgccacgagcatgccaaatggtctgactcca

SEQ ID NO: 201344 - DNA, 75 bp, synthetic construct
  source 1..75: mol_type = other DNA
tcgaattgttcattaaatccccgcttgataacggacttactcgtggcgaacaaatggaactggcacgaattgcac

SEQ ID NO: 201345 - DNA, 75 bp, synthetic construct
  source 1..75: mol_type = other DNA
taatgatggcaagcccacttgggatgacggtgatggcgaagacctgtatctcaaagaggtaacccactggatgca

SEQ ID NO: 201346 - DNA, 75 bp, synthetic construct
  source 1..75: mol_type = other DNA
atgatggcaccgaatatccggatccgcactcagttacgcactggcgtgaaatgccagcagcaccgcagcaggagg

SEQ ID NO: 201347 - DNA, 75 bp, synthetic construct
  source 1..75: mol_type = other DNA
gcaatgtggaatggcaatcgctgggatgatggcaccgaatatccggatccgcactcagttacgcactggcgtgaa

SEQ ID NO: 201348 - DNA, 75 bp, synthetic construct
  source 1..75: mol_type = other DNA
ccggggcaccgtcgcaagctgacgcgcgacgttgcgatcgggctgcgtaagcgccagcaaaagcgtatcgccagc

SEQ ID NO: 201349 - DNA, 75 bp, synthetic construct
  source 1..75: mol_type = other DNA
aaaagatggaccaatgagcagccaagaattgatatctatattgatcagataataactgtctcagggggtgatgct

SEQ ID NO: 201350 - DNA, 75 bp, synthetic construct
  source 1..75: mol_type = other DNA
cctcaaaccatgcctgcgccgatatgctgccagccgtagtagtctccccccgtggctttcgaaaaagaaaaaatc

SEQ ID NO: 201351 - DNA, 75 bp, synthetic construct
  source 1..75: mol_type = other DNA
gcgacacatgcggtgaagtgttgatgcatatcaaccacccgcaggcacttacgtcgcttatccatgcgagcgagc

SEQ ID NO: 201352 - DNA, 75 bp, synthetic construct
  source 1..75: mol_type = other DNA
tttaattatgtgacagaaacatgcagagaattcaatggtattacaacaacaggacgtatgctctatcgaaacttg

SEQ ID NO: 201353 - DNA, 75 bp, synthetic construct
  source 1..75: mol_type = other DNA
atgtctatgccattaagcaatgcccttcagagtcaaattattacagatgatcacttccttcatcatccaaaagtc

SEQ ID NO: 201354 - DNA, 75 bp, synthetic construct
  source 1..75: mol_type = other DNA
atgaaagcctgtcctcagcatagtaccgggaaggagggagtgaccatctcattaaatatctatcttctgcctctt

SEQ ID NO: 201355 - DNA, 75 bp, synthetic construct
  source 1..75: mol_type = other DNA
ccgcgccgaaagtgtctgagatccagtcgattttaattggtcgcttcagcacgacattttctgcattagcagaaa

SEQ ID NO: 201356 - DNA, 75 bp, synthetic construct
  source 1..75: mol_type = other DNA
tttcttatgtcgggcacactgcggcggacgcacagcaaaagcttgctcaatacattcaacaagttgatgaccgag

SEQ ID NO: 201357 - DNA, 75 bp, synthetic construct
  source 1..75: mol_type = other DNA
atgagagtagaaaataataatgtttctgggcaaaaccatgatccggaacagattgatttgattgatttactggtc

SEQ ID NO: 201358 - DNA, 75 bp, synthetic construct
  source 1..75: mol_type = other DNA
gacacccgcagttgccgtactgaaatcatgccagcaacaactgaaacagccctcaaaccatgccagcgccgatat

SEQ ID NO: 201359 - DNA, 75 bp, synthetic construct
  source 1..75: mol_type = other DNA
gtttttttacctttttttctgctggagctatcggcggtgaagaggtttctcagtctgtcgatatggccttcactg

SEQ ID NO: 201360 - DNA, 75 bp, synthetic construct
  source 1..75: mol_type = other DNA
tatcctggtattatcctgttggctctgacactaggatgtctggaatatacccttgaagaaggagcgcgctgggga

SEQ ID NO: 201361 - DNA, 75 bp, synthetic construct
  source 1..75: mol_type = other DNA
gaaatcaaggttacagtcagttggacaactatcaaaactatttgggctaaagggtgtgagcacttttcaatagta

SEQ ID NO: 201362 - DNA, 75 bp, synthetic construct
  source 1..75: mol_type = other DNA
cgtaccagcgcggcatctgatgcgcgtatgggcggcgcaacgcttccggcgatgagtaactccggttctggtaac

SEQ ID NO: 201363 - DNA, 75 bp, synthetic construct
  source 1..75: mol_type = other DNA
gcaaatacaccgcacaggacgctaccactgcgcgaaaagggatagttcagctcagtagcgccaccaacagcacat

SEQ ID NO: 201364 - DNA, 75 bp, synthetic construct
  source 1..75: mol_type = other DNA
acagagctttcacatatttatcaggcaatatcttggatgacgtaacccactggatgccactaccggaaccgccgc

SEQ ID NO: 201365 - DNA, 75 bp, synthetic construct
  source 1..75: mol_type = other DNA
atgatctggcagcctgagttcacagataaaacactctccaggaaacccggggcggttcagagtgatatgagcgct

SEQ ID NO: 201366 - DNA, 75 bp, synthetic construct
  source 1..75: mol_type = other DNA
tgttcagttatgcctggtggcctgccgtgatcggctgatacgcctgttacttctgcttcccgtgatactgctgcc

SEQ ID NO: 201367 - DNA, 75 bp, synthetic construct
  source 1..75: mol_type = other DNA
cttccactctgactctgctgctgcaaaaaccgttaaaactgcatgatatggaagtggttcatatctcctttgagc

SEQ ID NO: 201368 - DNA, 75 bp, synthetic construct
  source 1..75: mol_type = other DNA
gctggaaaagggactttatgaacgtagccacgccatccgcctgtgtttattagcggcattaagcggcgaaagcgt

SEQ ID NO: 201369 - DNA, 75 bp, synthetic construct
  source 1..75: mol_type = other DNA
gtggtatgacgcgcaaagcctgaatttgatacaacaacaaattgatgtattgatgaccggtcacgcctggcaaca

SEQ ID NO: 201370 - DNA, 75 bp, synthetic construct
  source 1..75: mol_type = other DNA
gcagagctggttattccgccggaggtgggcggtttctggatgcgtgagcttggcctgtacgatgatgctggaacg

SEQ ID NO: 201371 - DNA, 75 bp, synthetic construct
  source 1..75: mol_type = other DNA
gtaaatatactgcgcaggatgccagcacgacgcgaaaaggccttgtccagctcagtagcgccaccaacagcacgt

SEQ ID NO: 201372 - DNA, 75 bp, synthetic construct
  source 1..75: mol_type = other DNA
gactaatcgacaaacattcagcggtggcctttctggtgaactatccggcaatgcttctacagctgcaaaattaaa

SEQ ID NO: 201373 - DNA, 75 bp, synthetic construct
  source 1..75: mol_type = other DNA
cgtggccgcatattggaactgggttgtaaatccaattgattacaaaaaatatagagctttcacgtatttatcagg

SEQ ID NO: 201374 - DNA, 75 bp, synthetic construct
  source 1..75: mol_type = other DNA
cgctttgtttattgccctgctggtgatagtcgcgctgtggccggggccgaaatggccgcgtatgtgcgcccgtct

SEQ ID NO: 201375 - DNA, 75 bp, synthetic construct
  source 1..75: mol_type = other DNA
ttacgctggcgagttttttacccttaaccggtgtgctgtgtgtggttctgctggcgatcctcgcggatcagtcga

SEQ ID NO: 201376 - DNA, 75 bp, synthetic construct
  source 1..75: mol_type = other DNA
gcgtcgccagttgtggttatggctgcccattttattaccagcgctgccgctggtggcaggccagtacacgctggc

SEQ ID NO: 201377 - DNA, 75 bp, synthetic construct
  source 1..75: mol_type = other DNA
cgtagtgaacacagaatacgggtattacgtgcaatgctggtctgaaggtcaagggtggcttggtgatgatatcag

SEQ ID NO: 201378 - DNA, 75 bp, synthetic construct
  source 1..75: mol_type = other DNA
aaaagaggcactggaagccgcagccgaaccagacgatctcagcgagtgggctgatatgcagttcctgttgtggga

SEQ ID NO: 201379 - DNA, 75 bp, synthetic construct
  source 1..75: mol_type = other DNA
atggctacgccgttacggtacgcattaatcttgttgctgtgggcgatggtggtggtgatttattcaccgctgatc

SEQ ID NO: 201380 - DNA, 75 bp, synthetic construct
  source 1..75: mol_type = other DNA
ggcatcactggaacgcgaacagattcgccacgagcatgccaaatggtctgactccacatttggctgcgttggccc

SEQ ID NO: 201381 - DNA, 75 bp, synthetic construct
  source 1..75: mol_type = other DNA
gcgttagaacaactgtggttcttctgggtagtgcccattgtcggcggtattattggtggtctgatttaccggaca

SEQ ID NO: 201382 - DNA, 75 bp, synthetic construct
  source 1..75: mol_type = other DNA
gttttggtactttctggcttgtatttggtggctgcggtagcgctgtgctggcggcaacatttccggaattaggta

SEQ ID NO: 201383 - DNA, 75 bp, synthetic construct
  source 1..75: mol_type = other DNA
ctggcgatccttgcagatcaatcgacgatcaatgacgaggcgctattcaatagcctgacgatgggactggcaacg

SEQ ID NO: 201384 - DNA, 75 bp, synthetic construct
  source 1..75: mol_type = other DNA
agcgttaagcagcggcggcagcaacagtattcttgccacccaggcgctatggcaactactgttgccgctattggt

SEQ ID NO: 201385 - DNA, 75 bp, synthetic construct
  source 1..75: mol_type = other DNA
ggccaaaatcttcttttacgtgaaatgtccgcttatgctacgccctacgctgattgccttcgcggtgggattttc

SEQ ID NO: 201386 - DNA, 75 bp, synthetic construct
  source 1..75: mol_type = other DNA
tcgcagctgaaatcttctgaagcaggcggcgtgcgctacgacaccaaagctgatagttctatcgactatagcaat

SEQ ID NO: 201387 - DNA, 75 bp, synthetic construct
  source 1..75: mol_type = other DNA
ccgtaggtaatggggatatgacacttattcaaactgaagatggaaaaaatatattaatcgattgccgtattaggg

SEQ ID NO: 201388 - DNA, 75 bp, synthetic construct
  source 1..75: mol_type = other DNA
tttgttgggaaggtgttagagatcgtttaaccaataaatattctatgtcatggttagattatgacattttacaag

SEQ ID NO: 201389 - DNA, 75 bp, synthetic construct
  source 1..75: mol_type = other DNA
aatcaaagttattcttcatattttgaagctcatttattgggtccttcacccaagaaagatcttgatgagttggaa

SEQ ID NO: 201390 - DNA, 75 bp, synthetic construct
  source 1..75: mol_type = other DNA
tcaggaattgtatcattaaaatataatgaggggatcgtttactggataaatcaggttaatcctatcgccatctat

SEQ ID NO: 201391 - DNA, 75 bp, synthetic construct
  source 1..75: mol_type = other DNA
gatctcacgtttgctggtcgcacatgagattcaggccatccgagcaagttcgaatgtactgtcgcaattaagcca

SEQ ID NO: 201392 - DNA, 75 bp, synthetic construct
  source 1..75: mol_type = other DNA
aggtgataacaaaactgcttattttttaagtggaggtgatgctgaggttgtgtgctgggaaggtgtgaaagatcg

SEQ ID NO: 201393 - DNA, 75 bp, synthetic construct
  source 1..75: mol_type = other DNA
ctctgaagggagtcagaagagatggtttaaataaaagagccacttattatgaacccgaattttatgatgcaagag

SEQ ID NO: 201394 - DNA, 75 bp, synthetic construct
  source 1..75: mol_type = other DNA
ttcaacactggcaggcgctggcgttttccggtgggttactgatgttaatcataacaaacgcagttactacgccat

SEQ ID NO: 201395 - DNA, 75 bp, synthetic construct
  source 1..75: mol_type = other DNA
agccgggcatgccttacctggatattatcaggaaagccaggaaaacttttgcagtacccgtctttgcctatcagg

SEQ ID NO: 201396 - DNA, 75 bp, synthetic construct
  source 1..75: mol_type = other DNA
gtaccgttatcgcatcagagcaaataatatttttcattctataagaccatcggttaattatttaactcaacgcgg

SEQ ID NO: 201397 - DNA, 75 bp, synthetic construct
  source 1..75: mol_type = other DNA
ctcaattagttgtaccaactgtgtcagttagagaaagaatcaatgcatttggaagtctgatcagtgcctgttttg

SEQ ID NO: 201398 - DNA, 75 bp, synthetic construct
  source 1..75: mol_type = other DNA
ttaagaggtgactcatgtgcagcaggaagccgggacagtgcttttattgctacgacaactagtttaattgaaact

SEQ ID NO: 201399 - DNA, 75 bp, synthetic construct
  source 1..75: mol_type = other DNA
gcactgcaatgcgctcgggcactcgggctgacgccgttaaggttgccgtaccgacaccttaccgaaggcacaatg

SEQ ID NO: 201400 - DNA, 75 bp, synthetic construct
  source 1..75: mol_type = other DNA
agatcctcaaatctcccacctacagcgatgtggatctgacttgctttgttgagaaggcgaagtcctcatctcttt

SEQ ID NO: 201401 - DNA, 75 bp, synthetic construct
  source 1..75: mol_type = other DNA
cgtggggtttaaaccagagccttacgagttgaatcccggtttcggcaagacaacggaaagcatctacctgatggt

SEQ ID NO: 201402 - DNA, 75 bp, synthetic construct
  source 1..75: mol_type = other DNA
agcgatttgcttcgtggattgtcgaacgaattgctgaatatggtttcgttgaaaatcaagactttatgattattt

SEQ ID NO: 201403 - DNA, 75 bp, synthetic construct
  source 1..75: mol_type = other DNA
catggccgatatttatggccggaatggttgtgatggcctgtctcggcggaacaggattatggggctggtcgcagc

SEQ ID NO: 201404 - DNA, 75 bp, synthetic construct
  source 1..75: mol_type = other DNA
gcgctgggctgacttctggccggtacaggtacattccagaatatcactgctcagttgggtcacagaaaaaatgca

SEQ ID NO: 201405 - DNA, 75 bp, synthetic construct
  source 1..75: mol_type = other DNA
ccatgctgatggcaccgataagatgatcggttttcgaatttccgatggaaagattctgaagtctccaacctatag

SEQ ID NO: 201406 - DNA, 75 bp, synthetic construct
  source 1..75: mol_type = other DNA
aaattatgctcgaagaaaaagaagagcaaagaaggattaaagaacagcttcgtgaagaggaaagagctcgtagag

SEQ ID NO: 201407 - DNA, 75 bp, synthetic construct
  source 1..75: mol_type = other DNA
tgttttggatgccttcaatggaagagttgacagtattttatcaaaagtcaaacacaacaattttggaaaactttc

SEQ ID NO: 201408 - DNA, 75 bp, synthetic construct
  source 1..75: mol_type = other DNA
tcttattagcatttcttgcccctgttctagctgtaatattatttaaacaaagtaaaaaacacaaagcggctatag

SEQ ID NO: 201409 - DNA, 75 bp, synthetic construct
  source 1..75: mol_type = other DNA
tacttcattgaatgcgagaaacgtttaagacaacaagaaacaaaagtggagaaggtcttgtcaggcttcatgccc

SEQ ID NO: 201410 - DNA, 75 bp, synthetic construct
  source 1..75: mol_type = other DNA
gctgaaccagttacaggaagacgggcacgacgtatcgggcgcggcggcggagctgaccactatgttctgctacat

SEQ ID NO: 201411 - DNA, 75 bp, synthetic construct
  source 1..75: mol_type = other DNA
tattattagcatttctcgcccctgttctagctataatattatttaagcaaagtaaagaacacaaagccgccatag

SEQ ID NO: 201412 - DNA, 75 bp, synthetic construct
  source 1..75: mol_type = other DNA
tgagttcgtcagagcgtgaaagtgaactggccgctgaaaatgcccgcctgaagcggcaactggcggagcaggcag

SEQ ID NO: 201413 - DNA, 75 bp, synthetic construct
  source 1..75: mol_type = other DNA
acagctatgacgcatttttagatgcagtatgcgagctggtagccgaagctgaccaacgttttggctgtaaaggtt

SEQ ID NO: 201414 - DNA, 75 bp, synthetic construct
  source 1..75: mol_type = other DNA
ctcgccgttatgctgaatttactggtttttattcgttccagtgaactcagataagcccggtggtctgaaattgat

SEQ ID NO: 201415 - DNA, 75 bp, synthetic construct
  source 1..75: mol_type = other DNA
gtgaaaagcaatgctgacttgttgatgccacgtgaaaaaatgctgaagttgggtattagcgcgttaacggatatt

SEQ ID NO: 201416 - DNA, 75 bp, synthetic construct
  source 1..75: mol_type = other DNA
gtgaaaagcaatgcagaattgttgatgccacgcgaaaaaatgctgaagttgggcattagctcgttaacggatgtt

SEQ ID NO: 201417 - DNA, 75 bp, synthetic construct
  source 1..75: mol_type = other DNA
ctgaactggcgcggcgttactacaacgtgcggatgcgtgaagaaagccctttactcagcccggagatgacgaggg

SEQ ID NO: 201418 - DNA, 75 bp, synthetic construct
  source 1..75: mol_type = other DNA
gcattgaccacggtaaaacgccagcatcgccctgctctggatctttctcgcctgcctgaacttgtgtcgcgtatt

SEQ ID NO: 201419 - DNA, 75 bp, synthetic construct
  source 1..75: mol_type = other DNA
gcattgaccacggtaaaacgccagcatcgccctgctctcgatctttcccgcctgcctgaacttttgtcgcgtatt

SEQ ID NO: 201420 - DNA, 75 bp, synthetic construct
  source 1..75: mol_type = other DNA
gcattgaccacggtaaaacgccagcatcgccctgctctcgatctttctcgcctgcctgaacttctgtcgcgtatt

SEQ ID NO: 201421 - DNA, 75 bp, synthetic construct
  source 1..75: mol_type = other DNA
cttgctgttatgctgaatttactggtttttattcgttccagtgaactcagataagcccgatggtctgaaattgat

SEQ ID NO: 201422 - DNA, 75 bp, synthetic construct
  source 1..75: mol_type = other DNA
ctagcagttatgctgaatttactggtttttattcgttccagtgaactcagataagcccgctggtctgaaattgat

SEQ ID NO: 201423 - DNA, 75 bp, synthetic construct
  source 1..75: mol_type = other DNA
gcattgaccacggtaaaacgccagcatcgccctgctctggatctttcgcgcctgcctgaacttttgtcgcgtatt

SEQ ID NO: 201424 - DNA, 75 bp, synthetic construct
  source 1..75: mol_type = other DNA
tgaatcccagctttatgcctggcgcagtaaacagcagcaacaaatgagttcgtcagagcgcgaaagcgaactggc

SEQ ID NO: 201425 - DNA, 75 bp, synthetic construct
  source 1..75: mol_type = other DNA
aatcaggcggcgctggcagaatttatgcgcgggctgggttttgtgccgttgattgccaccactgcgttagccacg

SEQ ID NO: 201426 - DNA, 75 bp, synthetic construct
  source 1..75: mol_type = other DNA
taccggattctctatcgcggttgccatttacttcctcaacgaatccctgggccgtccggtacagaaaatggcggc

SEQ ID NO: 201427 - DNA, 75 bp, synthetic construct
  source 1..75: mol_type = other DNA
aaccaggcagctctggcggaatttatgcgcggactgggttttgtgccgttgattgccaccaccgcgttagccact

SEQ ID NO: 201428 - DNA, 75 bp, synthetic construct
  source 1..75: mol_type = other DNA
gataatgttttattagttcgaggcagtagaggacttgtgaaagttagcacatcaaaaaaaccagagttaattaaa

SEQ ID NO: 201429 - DNA, 75 bp, synthetic construct
  source 1..75: mol_type = other DNA
atgactgctggcgctcacggggtgccgcgtgaagtgacagaaggcgttatcgacgggcttaattatcccaatcat

SEQ ID NO: 201430 - DNA, 75 bp, synthetic construct
  source 1..75: mol_type = other DNA
ctggggcgtccggtacagaaaatggcggcacctgtggtggcagtgatgatcaccggcattctgctgaatgttctt

SEQ ID NO: 201431 - DNA, 75 bp, synthetic construct
  source 1..75: mol_type = other DNA
acggcaaggcggtttttcaggaaggtgatcgggagctggtagccgcttaccagatgaaatcctctccggttccgg

SEQ ID NO: 201432 - DNA, 75 bp, synthetic construct
  source 1..75: mol_type = other DNA
aatggcacaaaacagcttcggctagatgtccagaaaccggtgtggcacaactcacttcgattacctacgaatgaa

SEQ ID NO: 201433 - DNA, 75 bp, synthetic construct
  source 1..75: mol_type = other DNA
ctcgctgaacgcatcggtgtggccgccgcagcccgtgaactcagcctttatgaatcacagctctacaactggcgc

SEQ ID NO: 201434 - DNA, 75 bp, synthetic construct
  source 1..75: mol_type = other DNA
gtttgaagaacgcacgtcgcggattatcaaaaatttaccgtatatcgccattgtcggggcgctgatcgccgccgt

SEQ ID NO: 201435 - DNA, 75 bp, synthetic construct
  source 1..75: mol_type = other DNA
taccagtttggctggaagcaaagcctgatcgctgccgtggtggtgttaatgacccgtgtggtggtggtgcgctat

SEQ ID NO: 201436 - DNA, 75 bp, synthetic construct
  source 1..75: mol_type = other DNA
acttcctcgttatgaaggtcaattacttttttggaaaatgtggacgctcaaagaagcttacatcaaatatcgagg

SEQ ID NO: 201437 - DNA, 75 bp, synthetic construct
  source 1..75: mol_type = other DNA
ggaaaattgttgatcatattgcagatgttaatatgccttacagcgacattgcacgagagtatctgatcagagaag

SEQ ID NO: 201438 - DNA, 75 bp, synthetic construct
  source 1..75: mol_type = other DNA
cctaatgtttcagataaagttcttcggataattctgagttatactgattatgttaatcgtgttatatggagaaaa

SEQ ID NO: 201439 - DNA, 75 bp, synthetic construct
  source 1..75: mol_type = other DNA
gaatttcgtgtcctgatcaccgttttcgctttcctggcttcaatctggtatagcgttgcgcagttcaggaaggaa

SEQ ID NO: 201440 - DNA, 75 bp, synthetic construct
  source 1..75: mol_type = other DNA
gctcgtgaatatctcttggctgaaggtatcccagctgatcggatcataaaaactggtagccctatgtttgaggtt

SEQ ID NO: 201441 - DNA, 75 bp, synthetic construct
  source 1..75: mol_type = other DNA
ttgttggaacccgtcctgagattatccgtttgtcgagggttcttgctaagtttgatgaatactgcgagcatatta

SEQ ID NO: 201442 - DNA, 75 bp, synthetic construct
  source 1..75: mol_type = other DNA
tagttatgtacaagtgttaaatgaattagctgaaaaatataagtatccaattattgtttctactcacccaagaac

SEQ ID NO: 201443 - DNA, 75 bp, synthetic construct
  source 1..75: mol_type = other DNA
cgcacgactacctgcgctggtgtttaaccggcgtcaaaggctgcgaagagagcaatatttccgagtccaatctct

SEQ ID NO: 201444 - DNA, 75 bp, synthetic construct
  source 1..75: mol_type = other DNA
gtggaagaaaccggctgttttggcgcggcgcttgccgcccgcgtcggcaccggggtttatcacaacttcagcgaa

SEQ ID NO: 201445 - DNA, 75 bp, synthetic construct
  source 1..75: mol_type = other DNA
cggcgctcgctgcccgtgtcggtacgggcgtttatcgcaacttcagcgaggcccagcgcagctcgcaacatccgc

SEQ ID NO: 201446 - DNA, 75 bp, synthetic construct
  source 1..75: mol_type = other DNA
atgcgtatgtctctgatgtttgcggccgtgactcttttaaccggtattaacctgttgtttattccgtttcagcct

SEQ ID NO: 201447 - DNA, 75 bp, synthetic construct
  source 1..75: mol_type = other DNA
acaacatgagcagcgggcaatatgacccacgcctcaccgactggctggggatcagtgaaatcaatcacgccctgc

SEQ ID NO: 201448 - DNA, 75 bp, synthetic construct
  source 1..75: mol_type = other DNA
tttatcgttcacgaagccagccccacctcttccggcaacctcgaatggtttaccgcacagtggggagaaatctcg

SEQ ID NO: 201449 - DNA, 75 bp, synthetic construct
  source 1..75: mol_type = other DNA
gttggtgctgggtgatacaaactcctgtatttctgcaattccagccaaacgccgtaaagtgcctatcttccatat

SEQ ID NO: 201450 - DNA, 75 bp, synthetic construct
  source 1..75: mol_type = other DNA
atcttctcgcagtcatatctgctgtacgttatcgcacagggtactgatgttggtaacgtggctaacaaggccaac

SEQ ID NO: 201451 - DNA, 75 bp, synthetic construct
  source 1..75: mol_type = other DNA
gcccagcggaaccgccaacaggtcaatgcagctaaccttttccggctctgttcctgacacactggtaagcagtcg

SEQ ID NO: 201452 - DNA, 75 bp, synthetic construct
  source 1..75: mol_type = other DNA
gacagcgccgaccaaccttgttagcctgctgaaaacgctcacgccgtcatccggcacgttggcaccattcttcga

SEQ ID NO: 201453 - DNA, 75 bp, synthetic construct
  source 1..75: mol_type = other DNA
gaagcgcacgaacgcccggaaggcttcgaagaaggggcagtaatgatggtcggtcttgaatctgagcgcgtttta

SEQ ID NO: 201454 - DNA, 75 bp, synthetic construct
  source 1..75: mol_type = other DNA
atggctgattcgaatctcaatgagccggtaacaattcaggctgcgcgccttgatgcttcaattttgccacgcaat

SEQ ID NO: 201455 - DNA, 75 bp, synthetic construct
  source 1..75: mol_type = other DNA
cggtaatcatccaagctacgcggctcgatacatcaatccttccacgcaatatcttctcgcagtcatatctgctgt

SEQ ID NO: 201456 - DNA, 75 bp, synthetic construct
  source 1..75: mol_type = other DNA
tgatgcttcaattttgccacgcaatatattcagccagtcttacctactatatgtcataaatcagggagctgatgt

SEQ ID NO: 201457 - DNA, 75 bp, synthetic construct
  source 1..75: mol_type = other DNA
aaagacggctttcttgccacaaatggcagcacgttaaccattcagtcgaatggtgcggcgtttactgccacaacc

SEQ ID NO: 201458 - DNA, 75 bp, synthetic construct
  source 1..75: mol_type = other DNA
aattttcccgctcttaatttacgtgaagttcatgaacgtccggaaggtttcgaagaagctgccgtaatgttcgtt

SEQ ID NO: 201459 - DNA, 75 bp, synthetic construct
  source 1..75: mol_type = other DNA
atcttctcgcagtcgtatctgctttacgttattgcacagggtgctgatgttggtaatgtggcgaacaaggccaac

SEQ ID NO: 201460 - DNA, 75 bp, synthetic construct
  source 1..75: mol_type = other DNA
atatttagccagtcttacctgctgtatgtcataaatcaaggtgctgatgtcggcgcaattgccgggaaggcaaat

SEQ ID NO: 201461 - DNA, 75 bp, synthetic construct
  source 1..75: mol_type = other DNA
tacaggaccacgaaacaaggatcactaacgcagaagcggcgatagtcggccttgattcgcgattaacgacagcag

SEQ ID NO: 201462 - DNA, 75 bp, synthetic construct
  source 1..75: mol_type = other DNA
ccagcccgtcctggttgttctatgctgattctatctggcgtcagggggatgatataaacctgtatggccccggca

SEQ ID NO: 201463 - DNA, 75 bp, synthetic construct
  source 1..75: mol_type = other DNA
ggattttaacgtcacggtgaagctgaacctggtgaagggaaaatacgccaacatcggctacaccattgccgccgt

SEQ ID NO: 201464 - DNA, 75 bp, synthetic construct
  source 1..75: mol_type = other DNA
gggttcgaaaccgtggacggcaagctggcgctttcgggagcgaactactttaaaaacttcaatgagcagatcatt

SEQ ID NO: 201465 - DNA, 75 bp, synthetic construct
  source 1..75: mol_type = other DNA
cctgcatcatgcggcggatgactcattcccgagcgatcacggtacggtgattttcacctttgcactggcattttt

SEQ ID NO: 201466 - DNA, 75 bp, synthetic construct
  source 1..75: mol_type = other DNA
taaactctatcaacgtctgcaatcgtggtatcgcttctgttttgcattaccgatccgcaaaggctgggtgcgtga

SEQ ID NO: 201467 - DNA, 75 bp, synthetic construct
  source 1..75: mol_type = other DNA
attgtacgtaaaggcccgctgttcccgctgaactcgctgatgtaccacgggatagtcagcgccgagaatgcctat

SEQ ID NO: 201468 - DNA, 75 bp, synthetic construct
  source 1..75: mol_type = other DNA
ttccggtgggttactgatgttaatcataacaaacgcagttactacgccattgataatacgcttttggtaatggtg

SEQ ID NO: 201469 - DNA, 75 bp, synthetic construct
  source 1..75: mol_type = other DNA
ttaatcagccggacgcgctaatccagcgaatacaactgtctgtcatgccgttgccgcagtcgctggagagcggcg

SEQ ID NO: 201470 - DNA, 75 bp, synthetic construct
  source 1..75: mol_type = other DNA
gccagttcgtcatgggcggcgatccctgtacttataaggaatccggtgaactgcaggctgaaatgagtaaactga

SEQ ID NO: 201471 - DNA, 75 bp, synthetic construct
  source 1..75: mol_type = other DNA
atgcaaaaccccatttttaccccgcctaatcctgaacagcgccgcacccttttagaagagtacggctttaagttc

SEQ ID NO: 201472 - DNA, 75 bp, synthetic construct
  source 1..75: mol_type = other DNA
ttgcgcaatccgccaactattgccgaagcaaataacccgcatgaacacgctaaaaagaaaaagagagacactgat

SEQ ID NO: 201473 - DNA, 75 bp, synthetic construct
  source 1..75: mol_type = other DNA
gctgttaagtgatgttttgtggtggctacgtaatccgccagttattgccaaagtgaataacccatacgaaaacgc

SEQ ID NO: 201474 - DNA, 75 bp, synthetic construct
  source 1..75: mol_type = other DNA
ttagcgatttttattgccaaagatttaattactgtagtaccgctgctggctacggtgctttggctatgggggttt

SEQ ID NO: 201475 - DNA, 75 bp, synthetic construct
  source 1..75: mol_type = other DNA
gaggccggacagggcgcttatgatgcacaggtcaggaacgatgagcaggatgtgattctcgctgaccatgagcag

SEQ ID NO: 201476 - DNA, 75 bp, synthetic construct
  source 1..75: mol_type = other DNA
atggctgattcgaatctcaatgtgccggtaatcatccaggctacgcggctcgatacatcaatccttccacgcaat

SEQ ID NO: 201477 - DNA, 75 bp, synthetic construct
  source 1..75: mol_type = other DNA
cggtaatcatccaggctacgcggctcgatacatcagtccttccacgcaatatcttctcgcagtcatatctgctgt

SEQ ID NO: 201478 - DNA, 75 bp, synthetic construct
  source 1..75: mol_type = other DNA
ttcgcgccctgcttactcattctggtgttagcggggaacaaattgtcggtatcggcatctccgcacagggaaagg

SEQ ID NO: 201479 - DNA, 75 bp, synthetic construct
  source 1..75: mol_type = other DNA
gtggaagaaaccggctgttttggcgcggcgcttgcagcccgcgtcggcaccggtgtttatcgcgatttcagcgaa

SEQ ID NO: 201480 - DNA, 75 bp, synthetic construct
  source 1..75: mol_type = other DNA
ttgttcgatttcacaaagaaggaatcattgcagacattacaagcgcgatgggaaagatgatgcttacgatgttgt

SEQ ID NO: 201481 - DNA, 75 bp, synthetic construct
  source 1..75: mol_type = other DNA
ctctaccagaagctgcaattatggtatcgcttctgtttcgccttacctatacgtaaaggctgggtgcgtggctga

SEQ ID NO: 201482 - DNA, 75 bp, synthetic construct
  source 1..75: mol_type = other DNA
ttcccaagcgatcacggcacggtgatatttacctttgcgctggcatttttatgctggcatcgcctgtggtcaggc

SEQ ID NO: 201483 - DNA, 75 bp, synthetic construct
  source 1..75: mol_type = other DNA
cctgtttgtttcctggacgatggggcacttatttccgcacgaccgtccgtttgttgatcatatcggctataactt

SEQ ID NO: 201484 - DNA, 75 bp, synthetic construct
  source 1..75: mol_type = other DNA
tgatagctgaggcctacagccgagatcagcaaaagcctgagctggtttcgttcaaagaagtgagtcgctgggggc

SEQ ID NO: 201485 - DNA, 75 bp, synthetic construct
  source 1..75: mol_type = other DNA
gccgcgagaagatatgccggaattgctcacaccggaacggggctccgcgctgttcaacgatgcgatgcagttatt

SEQ ID NO: 201486 - DNA, 75 bp, synthetic construct
  source 1..75: mol_type = other DNA
tattctctcttattaacgcgacgccagactctgcgccgtggatgatctcgttggcgatttttattgctaaagatt

SEQ ID NO: 201487 - DNA, 75 bp, synthetic construct
  source 1..75: mol_type = other DNA
gcattgaccacggtaaaacgccagcatcgccctgctctagatctttctcgcctgcctgaacttatgtcgcgtatt

SEQ ID NO: 201488 - DNA, 75 bp, synthetic construct
  source 1..75: mol_type = other DNA
atgataatgattgctaatcctagcgataggtttaccgatagcaagggatttctctggcttgcaaatgataaaaat

SEQ ID NO: 201489 - DNA, 75 bp, synthetic construct
  source 1..75: mol_type = other DNA
cagttacggcattacgttttgctaccatcgtgcctggcgcttagtgctggcatcatgctgatgctaatgaatttg

SEQ ID NO: 201490 - DNA, 75 bp, synthetic construct
  source 1..75: mol_type = other DNA
gacgccggtgatgctgtatcacaaacagttacggcattatgtattgctaccatcgtgcctggcgcttatttctgg

SEQ ID NO: 201491 - DNA, 75 bp, synthetic construct
  source 1..75: mol_type = other DNA
ccgaacatcctccggcaagcctgcccgtgcggaagcgaaaaaacgttatcagaaggcttatgctgcaagccttca

SEQ ID NO: 201492 - DNA, 75 bp, synthetic construct
  source 1..75: mol_type = other DNA
cctacggcactgtaaaagggatgacgccggaagaagttgaagcgaccggcgcacagattatccttggtaacacct

SEQ ID NO: 201493 - DNA, 75 bp, synthetic construct
  source 1..75: mol_type = other DNA
gcccaatccttaccgattctggcggcttccaggttttcagcctcggcgatattcgtaaaattaccgaacagggcg

SEQ ID NO: 201494 - DNA, 75 bp, synthetic construct
  source 1..75: mol_type = other DNA
gtcgcaatggcgcaagattacggcgcagatattcgcctggtggcgtttatgcaatatctgcgagtgctgttcgtc

SEQ ID NO: 201495 - DNA, 75 bp, synthetic construct
  source 1..75: mol_type = other DNA
gctttccagcgccatcgtgggttggttattggtgcgctatagctcactgcctggaaataccggggcctggggttc

SEQ ID NO: 201496 - DNA, 75 bp, synthetic construct
  source 1..75: mol_type = other DNA
tgatcgccggaatcatctttagtatgcgcggaattactctgcaacttccccgatccgcttttctcgccgcccaag

SEQ ID NO: 201497 - DNA, 75 bp, synthetic construct
  source 1..75: mol_type = other DNA
tacgctgggcagtggctggggagtgttgctgccaggattgctgattgcagggctgatgtatgcggatttatcgcc

SEQ ID NO: 201498 - DNA, 75 bp, synthetic construct
  source 1..75: mol_type = other DNA
tacgccggtattgcacttttctttgtggctgcggtactgactctgtggtcaatgttgcaatatttgagcgctgcg

SEQ ID NO: 201499 - DNA, 75 bp, synthetic construct
  source 1..75: mol_type = other DNA
ccgccgcgctcattttctgcgtcgcggcggtgactgactggttcgatggttttctggcacgccgctggaaccaga

SEQ ID NO: 201500 - DNA, 75 bp, synthetic construct
  source 1..75: mol_type = other DNA
gccatatttgcatctctggccccagcctgatgagtggctactttggcgacatagcttcacaaaacgagattgccg

SEQ ID NO: 201501 - DNA, 75 bp, synthetic construct
  source 1..75: mol_type = other DNA
gaactcaaatactacacgtttagttcgttattaataaagcaaaaccatctcattttcctgctaccaccctttttt

SEQ ID NO: 201502 - DNA, 75 bp, synthetic construct
  source 1..75: mol_type = other DNA
agagctcgtacgaaagtacgggttttttttcgcattttatctgcctgtacggcagtgagcttgtcattattggca

SEQ ID NO: 201503 - DNA, 75 bp, synthetic construct
  source 1..75: mol_type = other DNA
tttctaagctgcctgtacggcagtgaaccgatcgagcagcgcaatatgctggccgcattttttctaagctgcctg

SEQ ID NO: 201504 - DNA, 75 bp, synthetic construct
  source 1..75: mol_type = other DNA
cccccctcaccgccatattcaaagaagagctcgtacgaaagtacgagttttttttcgcattttatctgcctgtac

SEQ ID NO: 201505 - DNA, 75 bp, synthetic construct
  source 1..75: mol_type = other DNA
atggagtatgttacctgtgaatttctaagctgcctgtacggcagtgaacgcgttcgcaaaggttttaccgcaccc

SEQ ID NO: 201506 - DNA, 75 bp, synthetic construct
  source 1..75: mol_type = other DNA
aatactacacgtttagcccgttgttaataaagcaaaaccatctcattttcctgctaccacccttttttatcctta

SEQ ID NO: 201507 - DNA, 75 bp, synthetic construct
  source 1..75: mol_type = other DNA
atctgctggacggttatctgtatgtcaccggacgcattaaagatctgattattattcgtggccgtaatatctggc

SEQ ID NO: 201508 - DNA, 75 bp, synthetic construct
  source 1..75: mol_type = other DNA
agcgggattcatggagcacaaaactgcaagggttgctggcaagctgccagcctgcggcgattatcactggtgatg

SEQ ID NO: 201509 - DNA, 75 bp, synthetic construct
  source 1..75: mol_type = other DNA
cctgaaaaaaggcgaacgcgtggcgctgattgccgaaacgagtagcgggtttgtagaggctttttttgcctgtca

SEQ ID NO: 201510 - DNA, 75 bp, synthetic construct
  source 1..75: mol_type = other DNA
tggacaatcatccagtggcaacagacacctgttcggtcatgtgaaaaatttacgcatttggcataaagaattaac

SEQ ID NO: 201511 - DNA, 75 bp, synthetic construct
  source 1..75: mol_type = other DNA
aagggccaataaatataggcggtcaatcaatatcaggtaacaggcatttatttggacacgtgcgcaatttacgta

SEQ ID NO: 201512 - DNA, 75 bp, synthetic construct
  source 1..75: mol_type = other DNA
aatatgacaggcggtgctgcctcaaggattacagcgagagtcagaaaggacgaagctaccggatggatttttgca

SEQ ID NO: 201513 - DNA, 75 bp, synthetic construct
  source 1..75: mol_type = other DNA
aagtcatcgctaaaacgctgaacaactggtggaatcaggctaaacgcgcagccgagcaaaaagcaggcgttccgt

SEQ ID NO: 201514 - DNA, 75 bp, synthetic construct
  source 1..75: mol_type = other DNA
tgacgtttatttctgccagaggatatgtcaaaacgggtaatgactccaacttattgatagtgttttatgttcaga

SEQ ID NO: 201515 - DNA, 75 bp, synthetic construct
  source 1..75: mol_type = other DNA
ccagtcagtgcggaaaaacgtcactcacacaatgcctgcgcggagagaatattcagtatcagaagacgcaggcaa

SEQ ID NO: 201516 - DNA, 75 bp, synthetic construct
  source 1..75: mol_type = other DNA
cctcctgtatttcaggcaggcgtaagcctgccagggttttccggcggcccggcaggccatacccccgccggagcg

SEQ ID NO: 201517 - DNA, 75 bp, synthetic construct
  source 1..75: mol_type = other DNA
cgcaaaatttttagccgggttcatggctaaaaattttgtggccggtgcatctcaccctggacagatggaacggga

SEQ ID NO: 201518 - DNA, 75 bp, synthetic construct
  source 1..75: mol_type = other DNA
gtgctcgagctaaaatggcaggatattatggataaaggaatttacattgagcaaaacaagactggtgctaaacaa

SEQ ID NO: 201519 - DNA, 75 bp, synthetic construct
  source 1..75: mol_type = other DNA
tcggttcaaccattgcattgattggcacatttgctgcgcttggggcttcatggggaattccatttattttattgg

SEQ ID NO: 201520 - DNA, 75 bp, synthetic construct
  source 1..75: mol_type = other DNA
ttgacggctatagcggggatcccttcgtttattgtcaccgttgctactatggggatcttccgtggtatcgcttat

SEQ ID NO: 201521 - DNA, 75 bp, synthetic construct
  source 1..75: mol_type = other DNA
ccagccgtagtgcaccagactatcgccagtcctggcggttagcgggcatctggcggcgagcgattaatctgctga

SEQ ID NO: 201522 - DNA, 75 bp, synthetic construct
  source 1..75: mol_type = other DNA
tcgcctgagctacatggcaaaacagcgtaccaagcgctacagcagtgccgaacgctcattcggctgtagtcaggg

SEQ ID NO: 201523 - DNA, 75 bp, synthetic construct
  source 1..75: mol_type = other DNA
gcggtttctacgggatgcaggccattcatacccgcgcacacctgttgcaggccatttatgaaggggtggtattca

SEQ ID NO: 201524 - DNA, 75 bp, synthetic construct
  source 1..75: mol_type = other DNA
tactgccagtcatattgtttcccttacttttcgcaggtaatgcttacgcagcacgtccttatatcgagttcctgc

SEQ ID NO: 201525 - DNA, 75 bp, synthetic construct
  source 1..75: mol_type = other DNA
gccccttcagaggagcgaaagctcctcctgccgtccacttcacaggggtttctccccgcagtggacctttccgat

SEQ ID NO: 201526 - DNA, 75 bp, synthetic construct
  source 1..75: mol_type = other DNA
gctgattgcagggctgatgtatgcggatttatcgccggatcagtggcggattgtcattctgatgggattagtatt

SEQ ID NO: 201527 - DNA, 75 bp, synthetic construct
  source 1..75: mol_type = other DNA
tcatactccctttgcccctgaaagttccgggctttaccaagagtatggcctggcatgaacgaactcatcgtgacc

SEQ ID NO: 201528 - DNA, 75 bp, synthetic construct
  source 1..75: mol_type = other DNA
gacgcgtgaacttgccgtgcagatccacgccgacgcggagccgctggcgcaagctaccggtctgaagctgggcct

SEQ ID NO: 201529 - DNA, 75 bp, synthetic construct
  source 1..75: mol_type = other DNA
atgccagttttgcagtggggaatgttatgtgtgctctcacttctcctttctattggtttcctcgcggttcatctc

SEQ ID NO: 201530 - DNA, 75 bp, synthetic construct
  source 1..75: mol_type = other DNA
gcaggtgcggcagttctggttacgcggatgatgctgggcgataacgctgaagcggttaatcaacagatcatctgg

SEQ ID NO: 201531 - DNA, 75 bp, synthetic construct
  source 1..75: mol_type = other DNA
gagttaccggaatggctgctggcgatagcatatatggcgattggctggcggattgggctgggtttcgataagcaa

SEQ ID NO: 201532 - DNA, 75 bp, synthetic construct
  source 1..75: mol_type = other DNA
aaaaaaaatggggaatttaaaacatctagtgaaattatcaaaatcagactagatgaaatattttctgtaatggga

SEQ ID NO: 201533 - DNA, 75 bp, synthetic construct
  source 1..75: mol_type = other DNA
ctttaccattcgtaaagtcagtgttttgcctgagtccgtgcctgccggttttgacgtgctgaaagatctgaatga

SEQ ID NO: 201534 - DNA, 75 bp, synthetic construct
  source 1..75: mol_type = other DNA
acccaggcaaaccatgaactggcaagtctgagtcgcgtatacggatggggatatgagcgtgggtatgtgaaaaat

SEQ ID NO: 201535 - DNA, 75 bp, synthetic construct
  source 1..75: mol_type = other DNA
tgttttatcgaccagttggtgttgcttcggtaaataaggaaacctttaaaaaattacgagtgaataatagcagca

SEQ ID NO: 201536 - DNA, 75 bp, synthetic construct
  source 1..75: mol_type = other DNA
tgccggaattgtcatctacgggacacgtattatttatccggcagaaaaaaaagaagtgatggtgcagttgatgaa

SEQ ID NO: 201537 - DNA, 75 bp, synthetic construct
  source 1..75: mol_type = other DNA
tccaagccggtaatggtaatcaggctacaagtactcaatatgtagatgtaatttcgggtactgcaaacctgcctt

SEQ ID NO: 201538 - DNA, 75 bp, synthetic construct
  source 1..75: mol_type = other DNA
gctgatggtggaagctgacgaatgtctttatcgctcgaagaaagacgggcgaaaccgcaccagcacaatgcgcta

SEQ ID NO: 201539 - DNA, 75 bp, synthetic construct
  source 1..75: mol_type = other DNA
ccgtcgcagtgccttcggtgaaccccgtcgatggtctgttgatggcggagaaaatccgtaaaggtgtggaactgc

SEQ ID NO: 201540 - DNA, 75 bp, synthetic construct
  source 1..75: mol_type = other DNA
attgtgtcggttattgcctcggtagtcattggcggagcggggagtctggcgttcccgctgcctgcattaatctgg

SEQ ID NO: 201541 - DNA, 75 bp, synthetic construct
  source 1..75: mol_type = other DNA
cgggcgatggcatgtagtgcgttaatagaatcaggtttgtggtcccgcgatgcagttgaacgtcagatgagccat

SEQ ID NO: 201542 - DNA, 75 bp, synthetic construct
  source 1..75: mol_type = other DNA
attgatggtcgaagctgatacgtgtctctatcggtcgaagaaagacgggcgtaaccgcaccagtaccatgcgtta

SEQ ID NO: 201543 - DNA, 75 bp, synthetic construct
  source 1..75: mol_type = other DNA
acctgtctgtatcgctcgaagaaagatgggcgcaaccgtaccagcactatgcgttacggtgaggaagttgtctga

SEQ ID NO: 201544 - DNA, 75 bp, synthetic construct
  source 1..75: mol_type = other DNA
gtctgtggtcatggattccgggcgatggcatgtagtgcgttaatagaatcaggtttgtggtcccgcgatgcagtt

SEQ ID NO: 201545 - DNA, 75 bp, synthetic construct
  source 1..75: mol_type = other DNA
taatggttcagtggtgggccgattatcttgatgctaacactcaggaatatataaccccctacgactttgcaaaaa

SEQ ID NO: 201546 - DNA, 75 bp, synthetic construct
  source 1..75: mol_type = other DNA
ctacaaaatggccgatggcggcggtttgtatcttgaggtgacgagcaaaggatctaaatactggcgcatgaaata

SEQ ID NO: 201547 - DNA, 75 bp, synthetic construct
  source 1..75: mol_type = other DNA
atgcatgtacaccccatttcaactttccgtttgttccaggaaggtcatctgctacgtaatagcatcgctattttt

SEQ ID NO: 201548 - DNA, 75 bp, synthetic construct
  source 1..75: mol_type = other DNA
gatgctacagtggtgggcagattttctggatgcgaacagagaacaatgtatcagcccgtttgaatatgcaaagat

SEQ ID NO: 201549 - DNA, 75 bp, synthetic construct
  source 1..75: mol_type = other DNA
tgccactcagcaaacaggctgtagccatactggcagaactacagacatgggctggtgaaaatggtctgatcttta

SEQ ID NO: 201550 - DNA, 75 bp, synthetic construct
  source 1..75: mol_type = other DNA
gcagattttctggatgcgaacagagataagggtatcagcccgtttgaatatgcaaagattaacaatccattaaaa

SEQ ID NO: 201551 - DNA, 75 bp, synthetic construct
  source 1..75: mol_type = other DNA
ttcccttcctcctgcatttcctgtcagaatgactgtacagcgcgcagattgcctttttattgaccaccttaatat

SEQ ID NO: 201552 - DNA, 75 bp, synthetic construct
  source 1..75: mol_type = other DNA
ccctgagggttatggggtatgacacaacccaggatgtctgtggtcatggattccgggcgatggcatgtagtgcgt

SEQ ID NO: 201553 - DNA, 75 bp, synthetic construct
  source 1..75: mol_type = other DNA
tacgcgatatcactaccctcaaaacccctgacctgcttattcctatccgtgcagcagaaagtaaagagatttatg

SEQ ID NO: 201554 - DNA, 75 bp, synthetic construct
  source 1..75: mol_type = other DNA
gcattgaccacggtaaaacgccagcatcgccctgctctagatctttcacgcctgcctgaacttttgtcgcgtatt

SEQ ID NO: 201555 - DNA, 75 bp, synthetic construct
  source 1..75: mol_type = other DNA
ctgaatatcttgaagaaagaaaattaatgctgcaatggtgggctgattacattgatgctaacaagaatggatcta

SEQ ID NO: 201556 - DNA, 75 bp, synthetic construct
  source 1..75: mol_type = other DNA
gcagaacttcagacatgggcaggtgaaaatggtctgatctttacgggagcacatgacccacgtaaaccaatcagt

SEQ ID NO: 201557 - DNA, 75 bp, synthetic construct
  source 1..75: mol_type = other DNA
ggcgactgatgctacagtggtgggccgattttctggatgcaaacagagaaagatttatcagtccatttgaatatg

SEQ ID NO: 201558 - DNA, 75 bp, synthetic construct
  source 1..75: mol_type = other DNA
cagattttctggatgcaaacagggaggagtgtatcagtccgtttgaatatgcaaagattaacaatccattaaaat

SEQ ID NO: 201559 - DNA, 75 bp, synthetic construct
  source 1..75: mol_type = other DNA
gcctgtagttctttgattgagtccggcttatggtcaagggatgctgttgaacgacagatgagtcatcaggaacgc

SEQ ID NO: 201560 - DNA, 75 bp, synthetic construct
  source 1..75: mol_type = other DNA
gtctgcagcaaagaatatctgctgtaatgcgttacgccgtacagtctggcatcatcagatataacccggctctgg

SEQ ID NO: 201561 - DNA, 75 bp, synthetic construct
  source 1..75: mol_type = other DNA
aaatactgtaaataaagccctgagggtgatggggtatgacacaacccaggaagtctgtggccatggattccgggc

SEQ ID NO: 201562 - DNA, 75 bp, synthetic construct
  source 1..75: mol_type = other DNA
tctttgattgaatcgggattgtggtcgagggatgcagtagagcggcagatgagtcatcaggaacgtagctcagta

SEQ ID NO: 201563 - DNA, 75 bp, synthetic construct
  source 1..75: mol_type = other DNA
ctagctgttatgctgaatttactggtttttattcgttccagtgaactcagataggcccgttggtctgaaattgat

SEQ ID NO: 201564 - DNA, 75 bp, synthetic construct
  source 1..75: mol_type = other DNA
tcttcatcctctttcaacaatgacaatttcagcggtggtggcggttcatccggcggtggcggcgcgtcaggaaga

SEQ ID NO: 201565 - DNA, 75 bp, synthetic construct
  source 1..75: mol_type = other DNA
aacgtaatattgctgagttaaaaactcgagatttattagcacctattaaagccgtggagatgtctggacgtcttg

SEQ ID NO: 201566 - DNA, 75 bp, synthetic construct
  source 1..75: mol_type = other DNA
gtgcagccacactcaatcagggaacacgtctgtgctcccatgacgatacgcaaaaaatttacgcttacctttccc

SEQ ID NO: 201567 - DNA, 75 bp, synthetic construct
  source 1..75: mol_type = other DNA
ctggcagttatgctgaatttactggtttttattcgttccagtgaactcagatatgcccgttggtctgaaattgat

SEQ ID NO: 201568 - DNA, 75 bp, synthetic construct
  source 1..75: mol_type = other DNA
ctagcggttatgctgaatttactggtttttattcgttccagtgaactcagatatgcccgttggtctgaaattgat

SEQ ID NO: 201569 - DNA, 75 bp, synthetic construct
  source 1..75: mol_type = other DNA
cagaaaaccaatttgaagacatcatgacggtgaaaaatgaaatatttagcgccccaccttatccaaactggacgg

SEQ ID NO: 201570 - DNA, 75 bp, synthetic construct
  source 1..75: mol_type = other DNA
attgggaaggcctggatggtcctgcgcgtattggttatttacacagtcgccgcactcgggcgcgtgagatatttg

SEQ ID NO: 201571 - DNA, 75 bp, synthetic construct
  source 1..75: mol_type = other DNA
tgctgcttacattcataaagcagaacatctggaagaacggcgactgatgctacagtggtgggccgattttctgga

SEQ ID NO: 201572 - DNA, 75 bp, synthetic construct
  source 1..75: mol_type = other DNA
gcccagtcaggcattatcacctataaccctgccttggatatggctggcgcgttaaccacagtgaaacgccagcac

SEQ ID NO: 201573 - DNA, 75 bp, synthetic construct
  source 1..75: mol_type = other DNA
gcagtggtgggctgattttctggatgctaacagggaacagagtgtcagcccttttgactatgcaaaaattaataa

SEQ ID NO: 201574 - DNA, 75 bp, synthetic construct
  source 1..75: mol_type = other DNA
atctggatgagcgaaagctgatgttgcagtggtgggctgattttctggatgctaacagggaacagagtgtcagcc

SEQ ID NO: 201575 - DNA, 75 bp, synthetic construct
  source 1..75: mol_type = other DNA
atgagtttcgccagcttgaagagcaagttctggaaattgaatccggggccatcctggtcataagcggaagcctgc

SEQ ID NO: 201576 - DNA, 75 bp, synthetic construct
  source 1..75: mol_type = other DNA
atgaacggcttttcatttcagtaccaaggtattgcctttaaagcctctcaattgggtaaaaaatatggctggtct

SEQ ID NO: 201577 - DNA, 75 bp, synthetic construct
  source 1..75: mol_type = other DNA
caccgtaaataaagccctgagggttatggggtatgacacaacccaggatgtctgtggtcatggattccgggcgat

SEQ ID NO: 201578 - DNA, 75 bp, synthetic construct
  source 1..75: mol_type = other DNA
gttccagtgaactcagatacgcccgctggtctgaaattgatattgacaatgccatgtggactattccagccgaac

SEQ ID NO: 201579 - DNA, 75 bp, synthetic construct
  source 1..75: mol_type = other DNA
ttgtctggagattcagggggccagtctaactggcgtctccgttatcgtattctgggtaaggagaagactctggca

SEQ ID NO: 201580 - DNA, 75 bp, synthetic construct
  source 1..75: mol_type = other DNA
tgttagcacccgttcctttcacagccagtcattctcctcaggaacaatcagttaggaataaccagcaccacacac

SEQ ID NO: 201581 - DNA, 75 bp, synthetic construct
  source 1..75: mol_type = other DNA
aaaacgccagcatcgccccgctcttgatctttctcgcctgcctgaacttttgtcgcgtattggcagttacaaagg

SEQ ID NO: 201582 - DNA, 75 bp, synthetic construct
  source 1..75: mol_type = other DNA
ccattacaaatcccgtactcactcgacctacggcaacattgatgtcctgaaggctgcctgccgtcaggaggtgtg

SEQ ID NO: 201583 - DNA, 75 bp, synthetic construct
  source 1..75: mol_type = other DNA
gtcccgcgatgctgtggaacgtcagatgagccatcaggaacgtaacggtgtacgtgctgcttacattcataaagc

SEQ ID NO: 201584 - DNA, 75 bp, synthetic construct
  source 1..75: mol_type = other DNA
gccaccaccggtgaaaagccagagtaccgttggcgctggtgacagcatggtcggcgcgatgacactgaaactggc

SEQ ID NO: 201585 - DNA, 75 bp, synthetic construct
  source 1..75: mol_type = other DNA
aacgtcagatgagccatcaggaacgtaacggtgtacgtgctgcttacattcataaagcagaacatctggaagaac

SEQ ID NO: 201586 - DNA, 75 bp, synthetic construct
  source 1..75: mol_type = other DNA
gagtcatcaggagcgcaacggagtacgtgccgcgtatattcataaagcagaacatctggaagaacgtcggcttat

SEQ ID NO: 201587 - DNA, 75 bp, synthetic construct
  source 1..75: mol_type = other DNA
gtgggccgattttcttgatgcgaaccgggagaaggggatcagtccgtttgaatacgcaaatgttaacaatccgct

SEQ ID NO: 201588 - DNA, 75 bp, synthetic construct
  source 1..75: mol_type = other DNA
agcggtcatcgactacagctttcacggtgtcattcaacatattaatcacgctatcctcgacgaaattccgatgat

SEQ ID NO: 201589 - DNA, 75 bp, synthetic construct
  source 1..75: mol_type = other DNA
ggcgtgatgacgggacgtataacaccggaacgttttgttgaattaaccagcgcaatgcccgccaggctgtttggc

SEQ ID NO: 201590 - DNA, 75 bp, synthetic construct
  source 1..75: mol_type = other DNA
tctaaaggcgatttcagccgctgcccaaatggcttgcccggtgtggaaaaccgcatgcagttgctgttctccagt

SEQ ID NO: 201591 - DNA, 75 bp, synthetic construct
  source 1..75: mol_type = other DNA
ggataaacgcgacattctgggagaaatggaaatctctgccaggatgatgatcaccggcggtgatccgaaggaaga

SEQ ID NO: 201592 - DNA, 75 bp, synthetic construct
  source 1..75: mol_type = other DNA
cttcagtttttttaaccgagggggagatgtcctgacgtttgatcccctgaacaaactggatcgtacccagaatgc

SEQ ID NO: 201593 - DNA, 75 bp, synthetic construct
  source 1..75: mol_type = other DNA
aagaaattgatgcctctggctgttacgttttccctggcggcgtggatgtccatacgcatttcaatattgatgtcg

SEQ ID NO: 201594 - DNA, 75 bp, synthetic construct
  source 1..75: mol_type = other DNA
ggtgtgatccagcacattaatcacgccatcctcgacgaaatcccgatgatggtcgaggaagggctgagcagtttt

SEQ ID NO: 201595 - DNA, 75 bp, synthetic construct
  source 1..75: mol_type = other DNA
cgccaggttctgatggcgacgtagtgattatcgacccacgtcagagccaacaaattcagcattgtcatctccacg

SEQ ID NO: 201596 - DNA, 75 bp, synthetic construct
  source 1..75: mol_type = other DNA
tgggctttacctggaattccagcatattgccacctgtcatgccaggcgatacccgccgtgctctcagtatctata

SEQ ID NO: 201597 - DNA, 75 bp, synthetic construct
  source 1..75: mol_type = other DNA
aacggtgtccggagatttggctacacccccgaaggatggctggcttacgaaacctgggaaacccacgggcagagc

SEQ ID NO: 201598 - DNA, 75 bp, synthetic construct
  source 1..75: mol_type = other DNA
tacaatagccaccttcctgatgaagagctcggcggctggcggcatacctactcgcggagcgtcgaggtcaacgcc

SEQ ID NO: 201599 - DNA, 75 bp, synthetic construct
  source 1..75: mol_type = other DNA
aaaatgatgctgctatcgccagtaagcgggcggagtttatcgctgccgggctaaccgcgccgcgctatcacgcat

SEQ ID NO: 201600 - DNA, 75 bp, synthetic construct
  source 1..75: mol_type = other DNA
gagaccccggagggcatgatgccggtgatgaccgactttgcggaaagtctctggttcacgccgccggtgtcggat

SEQ ID NO: 201601 - DNA, 75 bp, synthetic construct
  source 1..75: mol_type = other DNA
aaggaacgcagtacaaaggccatgtaacgggggcaaagcgttcaatctaccgacgaagctgccggaaggttatca

SEQ ID NO: 201602 - DNA, 75 bp, synthetic construct
  source 1..75: mol_type = other DNA
ttgtctgaccatgcccccggaagaggtgaaagatatcagccggttccgcgcgctcacgccggagcaggaatcggt

SEQ ID NO: 201603 - DNA, 75 bp, synthetic construct
  source 1..75: mol_type = other DNA
ccctgaccatggtctcgatgaccaatatgattaataacatcgcggagcgtgaccagttcctggaccgggatatag

SEQ ID NO: 201604 - DNA, 75 bp, synthetic construct
  source 1..75: mol_type = other DNA
cgattcgtggtctgacgatgccgacgacagtttttccggcagcgatatgttcgacggcctaagcgatattaccga

SEQ ID NO: 201605 - DNA, 75 bp, synthetic construct
  source 1..75: mol_type = other DNA
gggtattggggattttggcgatctcaaagcgatgctggtggatgtggcaaaacgtggcgggtcgttcattggcct

SEQ ID NO: 201606 - DNA, 75 bp, synthetic construct
  source 1..75: mol_type = other DNA
ccgacgaagctgccggaaggttatcacacgctgacactcacccaggacgaccagcgcgcgcattgccgggtgatt

SEQ ID NO: 201607 - DNA, 75 bp, synthetic construct
  source 1..75: mol_type = other DNA
gacatcacgccgttcggcaccgaagggcgctcaccggcacggctggaagaattacgtgatattctgaaagatgcg

SEQ ID NO: 201608 - DNA, 75 bp, synthetic construct
  source 1..75: mol_type = other DNA
gacgaactcgccccgctcagctcgtggctgcgctggctaccgatgtgcttcgacccggcgcgggacaagcgccag

SEQ ID NO: 201609 - DNA, 75 bp, synthetic construct
  source 1..75: mol_type = other DNA
agctggctgcgtgcgctgcccatgtgttttgacccggatacggacaggaagcagtggtacacgcgtctgatgtgg

SEQ ID NO: 201610 - DNA, 75 bp, synthetic construct
  source 1..75: mol_type = other DNA
atccgctcaataagctcgaccgcacccagaacgcgcatctgctgctgttcggcccgaccggggcgggcaagtcgg

SEQ ID NO: 201611 - DNA, 75 bp, synthetic construct
  source 1..75: mol_type = other DNA
gcgaaggtctatcacgccaatccgtccatcattgactttttgccctgggcagaatttctcgatgaagagcagtgt

SEQ ID NO: 201612 - DNA, 75 bp, synthetic construct
  source 1..75: mol_type = other DNA
ttactgccaagatgaggacgacaccgcaaactggctggccgcactgcatgattacgccgtaccggaagcgaagga

SEQ ID NO: 201613 - DNA, 75 bp, synthetic construct
  source 1..75: mol_type = other DNA
caacggaaggcagtgcagcactgcaattgaatgtgcgctatgaaggcaaactcaatcaggcgcattttgcattat

SEQ ID NO: 201614 - DNA, 75 bp, synthetic construct
  source 1..75: mol_type = other DNA
ttaagggaaaagacttctcgttaaagcgtaccgagccaaatcagcgcccaaaaggtctgcacttggataagctgg

SEQ ID NO: 201615 - DNA, 75 bp, synthetic construct
  source 1..75: mol_type = other DNA
attatgcgtccggtaagcgcatcctctcacgccacgagacaactttccgggctaaaaattcactctaatttgtat

SEQ ID NO: 201616 - DNA, 75 bp, synthetic construct
  source 1..75: mol_type = other DNA
gtagaaaaggggaaaaaagaaacatcaacctcgaaagcaatatcaccagtaattacttatccggcggcggtgaat

SEQ ID NO: 201617 - DNA, 75 bp, synthetic construct
  source 1..75: mol_type = other DNA
caataattgacgctattcagggggcgagcacaaacgaacttaacgctcttgctgagatcaaagacgccattctct

SEQ ID NO: 201618 - DNA, 75 bp, synthetic construct
  source 1..75: mol_type = other DNA
catatggtcgccatcagctttgaccggcatttattctatccactgttgtctttggaagataaagacgcagtgcca

SEQ ID NO: 201619 - DNA, 75 bp, synthetic construct
  source 1..75: mol_type = other DNA
gcgtgacgcgttatgtgctgaaactgaatctgcaggggtgtggtgacggtggcgcagtgacatcagccagttcgg

SEQ ID NO: 201620 - DNA, 75 bp, synthetic construct
  source 1..75: mol_type = other DNA
atgaactggacaacaacagggctctgtctgagtgcgctgctggtcagctgcagtatgactacttcgttgcgggct

SEQ ID NO: 201621 - DNA, 75 bp, synthetic construct
  source 1..75: mol_type = other DNA
catttgtttatacccgccgcgaaccgctgggcgtagtggcggggattggcgcatggaactacccgatccagattg

SEQ ID NO: 201622 - DNA, 75 bp, synthetic construct
  source 1..75: mol_type = other DNA
atgtacacttcaggctacgcaaatcgttcttcgatgttctcctccacagcaagcaaaattgcgcgtgtctctacg

SEQ ID NO: 201623 - DNA, 75 bp, synthetic construct
  source 1..75: mol_type = other DNA
gctggagacgaatgaggtggagctgccgctgcaaaaaagcacggaaggcatcatgacgcgttatgtgctgaagct

SEQ ID NO: 201624 - DNA, 75 bp, synthetic construct
  source 1..75: mol_type = other DNA
gcaggcgacagaccgtgcgcaggggaaaccgtgcatgaacccgcggggtaacacagctctgttgcgtctgcaact

SEQ ID NO: 201625 - DNA, 75 bp, synthetic construct
  source 1..75: mol_type = other DNA
cccggttctgcatcaactattggggcagacgttgatcaccaccgatggtaaaaccttgttaggtgcagatgataa

SEQ ID NO: 201626 - DNA, 75 bp, synthetic construct
  source 1..75: mol_type = other DNA
cttataacctgaaggaagggcaggacgttacaacacagcaaaagagcgcctatgccgctgctaacgtcctggata

SEQ ID NO: 201627 - DNA, 75 bp, synthetic construct
  source 1..75: mol_type = other DNA
agaaaacaagggcaagaagggaaaaaacaccagcaaacctactgagacgggcaggagtcaggaaggcaaagaggg

SEQ ID NO: 201628 - DNA, 75 bp, synthetic construct
  source 1..75: mol_type = other DNA
gcgcccggttcagcaaaggcatttactgaagccgttaaagaaaaatctgtacgtgcgatcgaagaacaaacgaaa

SEQ ID NO: 201629 - DNA, 75 bp, synthetic construct
  source 1..75: mol_type = other DNA
tgcaaacagtcacactaagtgttcaaacaaggttctggactacggctaactcatcagttaagtttgtttccgacc

SEQ ID NO: 201630 - DNA, 75 bp, synthetic construct
  source 1..75: mol_type = other DNA
ggtaaccaaccacaaccgattaatccagagaacgctgatgttaataccggctctccatcgagtttgcttgagcgg

SEQ ID NO: 201631 - DNA, 75 bp, synthetic construct
  source 1..75: mol_type = other DNA
aagctgttaaaaaagagacaaacagcaaactgagctttcataagcaactggttttgaaccgctttatgttccatt

SEQ ID NO: 201632 - DNA, 75 bp, synthetic construct
  source 1..75: mol_type = other DNA
aggcgaactggagtttgaaaacttcaacgccgcgtcggtcaatatcaaaattgtcggtaacaatgttcacccggg

SEQ ID NO: 201633 - DNA, 75 bp, synthetic construct
  source 1..75: mol_type = other DNA
gtttttatcacctgacgagcatgaaaggcaccgttgagcgtgccgatatgcactacatcattcgtgatttcgacc

SEQ ID NO: 201634 - DNA, 75 bp, synthetic construct
  source 1..75: mol_type = other DNA
acattccacacggcgatattcgcatcgcctttacgccagatgaagaggtgggcaaaggggcaaaacactttgatg

SEQ ID NO: 201635 - DNA, 75 bp, synthetic construct
  source 1..75: mol_type = other DNA
cagcaccgatggctgaaggcaaagccacgaagtcatcacctgagcgcattcaatcgctcactcctgacattcagc

SEQ ID NO: 201636 - DNA, 75 bp, synthetic construct
  source 1..75: mol_type = other DNA
cgataatcgacgcaatacaaacggcaaacgcgaaagagctagctgcgctttcagaaataataaaagcacttgagt

SEQ ID NO: 201637 - DNA, 75 bp, synthetic construct
  source 1..75: mol_type = other DNA
aactcaacaattgcgagggctattagcccgcttaccaggagcgccggtagttggctgaataatggtattcaacaa

SEQ ID NO: 201638 - DNA, 75 bp, synthetic construct
  source 1..75: mol_type = other DNA
acgatattgcgcagtcagcctacagcctgtttaacggtgtggggcgtattcaggggcgtaaggatggcggtaacc

SEQ ID NO: 201639 - DNA, 75 bp, synthetic construct
  source 1..75: mol_type = other DNA
cggctgttttggtgttcatctttttgcgcagtcgtcggcaggaaaaaccacgacagtggaagcagcaacaagtct

SEQ ID NO: 201640 - DNA, 75 bp, synthetic construct
  source 1..75: mol_type = other DNA
gtcgctggacatcgaaaacagtgaagattaacggaacacagcagcgatttatcgtgctgattgatcaggcagaag

SEQ ID NO: 201641 - DNA, 75 bp, synthetic construct
  source 1..75: mol_type = other DNA
cgcgttgaaagtcgcgccgatggtgttttctgggtaacgcccaaagtggataagcagtcaggcgaaattatccgg

SEQ ID NO: 201642 - DNA, 75 bp, synthetic construct
  source 1..75: mol_type = other DNA
agtcatcatttttgcgggtagtgatgcctgggcacatgcgaaacagtggcaggaacaggacgggcgactggctgg

SEQ ID NO: 201643 - DNA, 75 bp, synthetic construct
  source 1..75: mol_type = other DNA
caggtgataaaaactggacgaccaaaacgataaaggttaacggaatacagcaacgctttattgtgcttcttgacc

SEQ ID NO: 201644 - DNA, 75 bp, synthetic construct
  source 1..75: mol_type = other DNA
ggtatgtcgagccaatacccaataccagagcagaggagctgaatcataaggaaacctggttgagtgacaggatgc

SEQ ID NO: 201645 - DNA, 75 bp, synthetic construct
  source 1..75: mol_type = other DNA
tctcatggccaaaagaaacattgaaagaatcgacaaaaaattacttgaaaacagctgcttactgtgtagtgagca

SEQ ID NO: 201646 - DNA, 75 bp, synthetic construct
  source 1..75: mol_type = other DNA
gaatttaatggcaaaaagaaacattgaacgtattgataaatctttgattgaaaatagttgcttgctttgcagtga

SEQ ID NO: 201647 - DNA, 75 bp, synthetic construct
  source 1..75: mol_type = other DNA
tcctgaaatgctcaaactttcgtgggatgccacccggcacggactgacggtggaagctgccgcacgtaatgatgg

SEQ ID NO: 201648 - DNA, 75 bp, synthetic construct
  source 1..75: mol_type = other DNA
cagggaggaagggttaatgacattgcgcaatccgcctacagcctgtttaacggtgtgggcaggattcaggggcgc

SEQ ID NO: 201649 - DNA, 75 bp, synthetic construct
  source 1..75: mol_type = other DNA
gaataaactggcggaatacctgcaacgtcagggagatcgtactgtgtgggaggtcacatcaacagccggatggca

SEQ ID NO: 201650 - DNA, 75 bp, synthetic construct
  source 1..75: mol_type = other DNA
tgtttttcctgccgacggcggtatcagccggcataaccctttataccgattctcaacatcctcctgtaaacccgc

SEQ ID NO: 201651 - DNA, 75 bp, synthetic construct
  source 1..75: mol_type = other DNA
aacgccgccagccagcagcgccattgtgccgctggaagcagaaatggtgacgttgtgcattgatggtgggaaaaa

SEQ ID NO: 201652 - DNA, 75 bp, synthetic construct
  source 1..75: mol_type = other DNA
aagtcaggtggtgcaataatgactactctggcatcaggtgttagcaggaataacagcttacagaatgcaatagca

SEQ ID NO: 201653 - DNA, 75 bp, synthetic construct
  source 1..75: mol_type = other DNA
tgactttgagaaggcaaaaacacattcatcaaatttacgagcatcactacgttctcagcgtgaagaactggccgc

SEQ ID NO: 201654 - DNA, 75 bp, synthetic construct
  source 1..75: mol_type = other DNA
tggatatggggtttagcgacgcaattgatgaagtcatcggttttgcgccagcttcacgccagacgcttctcttct

SEQ ID NO: 201655 - DNA, 75 bp, synthetic construct
  source 1..75: mol_type = other DNA
tatgtcgcagtgcgacaggcagttgctcataaggcatggaagcagttacagagcgggaagattaaaggaaaaacg

SEQ ID NO: 201656 - DNA, 75 bp, synthetic construct
  source 1..75: mol_type = other DNA
cgctgtgcattgatggtgggaaaaaagccaaaatgcgccctggtgatgtgctgggggcgctgactggtgatatcg

SEQ ID NO: 201657 - DNA, 75 bp, synthetic construct
  source 1..75: mol_type = other DNA
atgactagtctaaaaattagtattaagactatcacttatttaagtgatactggttgtctggagattcagggggcc

SEQ ID NO: 201658 - DNA, 75 bp, synthetic construct
  source 1..75: mol_type = other DNA
agttgcagaggaaaacgctgtcgaaacatgcggagatggcgaaggcgttcgactatatcctgaatcactggaatg

SEQ ID NO: 201659 - DNA, 75 bp, synthetic construct
  source 1..75: mol_type = other DNA
atggtttacgctggattgaagacgaaagtaatcaggacgactcatacgatcgtaactttctgcgcctgcgcgtag

SEQ ID NO: 201660 - DNA, 75 bp, synthetic construct
  source 1..75: mol_type = other DNA
ccgccccaaacgcgccaaaatggaaaagcctgaagtaaaccttgtggcgatgttaaaagacgctttgactaacag

SEQ ID NO: 201661 - DNA, 75 bp, synthetic construct
  source 1..75: mol_type = other DNA
aacctgaccaggtacgtacaccgtggcatgaattctggcgacgatttcgccgtcagcatatggcgatgaccgccg

SEQ ID NO: 201662 - DNA, 75 bp, synthetic construct
  source 1..75: mol_type = other DNA
tcttggcgttgacagagttatacgccatagaagcggagatacgcggcagtccggcagaggaacggctcgcagtca

SEQ ID NO: 201663 - DNA, 75 bp, synthetic construct
  source 1..75: mol_type = other DNA
tttggtcttacaacagtacaggccgccagtcttatttctgctgcatttatttcccgctggtttggtgggcttgtg

SEQ ID NO: 201664 - DNA, 75 bp, synthetic construct
  source 1..75: mol_type = other DNA
gcgtacacatgatgctattgacggtaagccattcagtggtgcaggtgtggttaaaaatgagtcttctccggaaat

SEQ ID NO: 201665 - DNA, 75 bp, synthetic construct
  source 1..75: mol_type = other DNA
aacgcattgaaattgaacatttccgtaatgaggcaaacaatcaggaaccgttctggttgcacagcggaaaacgtt

SEQ ID NO: 201666 - DNA, 75 bp, synthetic construct
  source 1..75: mol_type = other DNA
tttgcaaaattgttaagcaattctcttttattgacagtgtcagaatctacagcgcgcgtccatgctttaacaaac

SEQ ID NO: 201667 - DNA, 75 bp, synthetic construct
  source 1..75: mol_type = other DNA
tcatcttcacttacttgcacacaaccctgagtcttttgacaaacagttttcagaacaatcagttagtaaaactca

SEQ ID NO: 201668 - DNA, 75 bp, synthetic construct
  source 1..75: mol_type = other DNA
ccgctggtttggtggactggttctgggagcaatgggagacaggtatggacgtcgtatagcgatggttgtcagtat

SEQ ID NO: 201669 - DNA, 75 bp, synthetic construct
  source 1..75: mol_type = other DNA
gtcagtgaagaacaactgctcaacgatctgagcaacgttgatctactggtgatcgacgagatcggcgtgcagacc

SEQ ID NO: 201670 - DNA, 75 bp, synthetic construct
  source 1..75: mol_type = other DNA
ccgtggccgatattatgtcggcgatgaaagataccttcaggaatagcggtaccagcgaagaacaactgcttaacg

SEQ ID NO: 201671 - DNA, 75 bp, synthetic construct
  source 1..75: mol_type = other DNA
cgcggtaaatccgtattgatcatcaccgtggccgatattatgtcggcgatgaaagataccttcaggaatagcggt

SEQ ID NO: 201672 - DNA, 75 bp, synthetic construct
  source 1..75: mol_type = other DNA
ggcaatccggcgcgtgaaatcaaaccgaccaccattttgcatgttgcggcaaaagccgatgtggaacaggggctg

SEQ ID NO: 201673 - DNA, 75 bp, synthetic construct
  source 1..75: mol_type = other DNA
aggctgaacgtctgctgaaagcagatgcggcaacgctgctggcgctactgaccagcgatgatgcactgaccgatg

SEQ ID NO: 201674 - DNA, 75 bp, synthetic construct
  source 1..75: mol_type = other DNA
aacgcctgcaaaaaatgatgcctgcccatatcaaacctgcattcaaaacgggtgaagaactactggcctggcaga

SEQ ID NO: 201675 - DNA, 75 bp, synthetic construct
  source 1..75: mol_type = other DNA
atgtcgatcttttctgattacagttccagtagtgaaatgcacaataatttaacaattgaattattatttagcact

SEQ ID NO: 201676 - DNA, 75 bp, synthetic construct
  source 1..75: mol_type = other DNA
gaaaatatcgacattgttccgctgtatctcgctgcggaacgtccggttctggaacgcgacggtatgttgatgatg

SEQ ID NO: 201677 - DNA, 75 bp, synthetic construct
  source 1..75: mol_type = other DNA
agagaaatcccgcgctaaagagcgaatctactctttccgtgaccgcttccatcgctgggatccgaaaaatcagcg

SEQ ID NO: 201678 - DNA, 75 bp, synthetic construct
  source 1..75: mol_type = other DNA
cgttgctgcatgtcgataccggctggaaattccgcgagatgtatgagttccgcgatcgtacggcgaaagcctacg

SEQ ID NO: 201679 - DNA, 75 bp, synthetic construct
  source 1..75: mol_type = other DNA
gaacgtcagggtcgcgtgattgaccgcgaccaggcggggtctatggagttgaaaaaacgtcaggggtatttttaa

SEQ ID NO: 201680 - DNA, 75 bp, synthetic construct
  source 1..75: mol_type = other DNA
tgctggccgctgaccggcgcagtagagtcaaacgcgcaaacactgcccgagatcatcgaagagatgctggtttcc

SEQ ID NO: 201681 - DNA, 75 bp, synthetic construct
  source 1..75: mol_type = other DNA
taaaaaacggatggtgcgtttccgtacgctgggctgctggccgctgaccggtgcggtggagtcaaatgcacaaac

SEQ ID NO: 201682 - DNA, 75 bp, synthetic construct
  source 1..75: mol_type = other DNA
tcatctttgctctctggctgcgtaaaaacatcccggaagcggaagactggaaagagaaacacgggggtaaagcac

SEQ ID NO: 201683 - DNA, 75 bp, synthetic construct
  source 1..75: mol_type = other DNA
gggcttgcgaacgcagcagcacccattaaaaatgtgtttccgcttttgttgttggttcttgttttaattactaat

SEQ ID NO: 201684 - DNA, 75 bp, synthetic construct
  source 1..75: mol_type = other DNA
cagaaaaaatggtgtggattacttttatctccaggagaaaaaagtatacgaagccccgaaatattcttttgttta

SEQ ID NO: 201685 - DNA, 75 bp, synthetic construct
  source 1..75: mol_type = other DNA
attgatgacaaccgtatcgacctgcaaccgggcgaagtaattaaaaacggatggtgcgtttccgtacgctgggct

SEQ ID NO: 201686 - DNA, 75 bp, synthetic construct
  source 1..75: mol_type = other DNA
aacgtttgtggtgatcctgctgattggtctggatatgccttctcgtgttcagcgttggctgcgcccggaagcatt

SEQ ID NO: 201687 - DNA, 75 bp, synthetic construct
  source 1..75: mol_type = other DNA
gatcggcatggggatggcaggagaatacggttccagcgccacctatgtgattgaaagctggccaaaacacctgcg

SEQ ID NO: 201688 - DNA, 75 bp, synthetic construct
  source 1..75: mol_type = other DNA
gaaattccgcgagatgtatgagttccgcgatcgtacggcgaaagcctacggctgcgagctgctggtgcataaaaa

SEQ ID NO: 201689 - DNA, 75 bp, synthetic construct
  source 1..75: mol_type = other DNA
cgggatgtggccggggaatatctggaaatggcgggggccatagccctggcagttaacccggtgacagggcctgtg

SEQ ID NO: 201690 - DNA, 75 bp, synthetic construct
  source 1..75: mol_type = other DNA
atgggttcgagttgaacttagcggtgggacaatacatggacatcccatatcacttgatgaattccgaaggctaac

SEQ ID NO: 201691 - DNA, 75 bp, synthetic construct
  source 1..75: mol_type = other DNA
cgcgtgtacagcagtcgtgacgaacgtacggaaggaatgtttggtcagggctggagtgtaatgtatgaagtcagc

SEQ ID NO: 201692 - DNA, 75 bp, synthetic construct
  source 1..75: mol_type = other DNA
gggaaagagggaccgaaccggatactgtattttcacacggatgtgaacggtgcgccggaagagatgacggacagc

SEQ ID NO: 201693 - DNA, 75 bp, synthetic construct
  source 1..75: mol_type = other DNA
ccggggacgcatcactgaaatcagcggtgaacagcagcgtccgtgcatccgtctgcattatgaactggcggcgca

SEQ ID NO: 201694 - DNA, 75 bp, synthetic construct
  source 1..75: mol_type = other DNA
agttaaatcaaaacaggaagcccatgatttattgatggaggcctttcctgatgctcaaaaagtaagagggagcgg

SEQ ID NO: 201695 - DNA, 75 bp, synthetic construct
  source 1..75: mol_type = other DNA
aacgaaactcagaactttgaagccgttgttcagtatcagttcgactttggtctgcgtccttccttgggttatgtt

SEQ ID NO: 201696 - DNA, 75 bp, synthetic construct
  source 1..75: mol_type = other DNA
aacggtgttgcaacctatcgtaactccgatttctttggtctggtcgatggtctgaattttgcagttcagtatcaa

SEQ ID NO: 201697 - DNA, 75 bp, synthetic construct
  source 1..75: mol_type = other DNA
acggcacaagagaaaaaacatattagtgaattaattgagtccgccgctgaaaatgcctataatataataatagga

SEQ ID NO: 201698 - DNA, 75 bp, synthetic construct
  source 1..75: mol_type = other DNA
gctgacctggcgctttctgctgcccaacagcacaccaccggtgcgggtactggaagcccgctacagaacaaggag

SEQ ID NO: 201699 - DNA, 75 bp, synthetic construct
  source 1..75: mol_type = other DNA
cgcaagatctggggatgcgcaaacctgaagcacgaatttaccagcatgttttgcaggcggaaggtttttcaccca

SEQ ID NO: 201700 - DNA, 75 bp, synthetic construct
  source 1..75: mol_type = other DNA
catgcataaactgcgtgagcaggggcatcgcgtggtggtgctttccaataccaaccgcctgcataccaccttctg

SEQ ID NO: 201701 - DNA, 75 bp, synthetic construct
  source 1..75: mol_type = other DNA
tacgggtatgacgacagcggccacctgacggaggtgatactggcggacggccgcacggtgaattaccagtcggac

SEQ ID NO: 201702 - DNA, 75 bp, synthetic construct
  source 1..75: mol_type = other DNA
acagggaaacggggctgcactacaatctgcacaggtactatgatccggatgtcgggcggttcatggtaacggatc

SEQ ID NO: 201703 - DNA, 75 bp, synthetic construct
  source 1..75: mol_type = other DNA
agtacctcgacagggaaacggggctgcactacaatctgcacaggtactatgatccggatgtcgggcggtttacgc

SEQ ID NO: 201704 - DNA, 75 bp, synthetic construct
  source 1..75: mol_type = other DNA
cctctatagttatgttccaaacccgttatcatggatagatcctcttggattatcaccagtaagccctaaaacaat

SEQ ID NO: 201705 - DNA, 75 bp, synthetic construct
  source 1..75: mol_type = other DNA
tgaggtacctctgaatgacagaggcattccgagtactaatccgaatgaaacacatatagggatcaggaatccaaa

SEQ ID NO: 201706 - DNA, 75 bp, synthetic construct
  source 1..75: mol_type = other DNA
ctggcagcgggacgggcagggccgggtgcgcagccggacggacgcgacggggcgcaggacggcgttcgggtacga

SEQ ID NO: 201707 - DNA, 75 bp, synthetic construct
  source 1..75: mol_type = other DNA
ggcgagctggcagtacgacgcggcgggaaacctgctggggcggcgtgcgggggaaagggccacggcagaaaacag

SEQ ID NO: 201708 - DNA, 75 bp, synthetic construct
  source 1..75: mol_type = other DNA
aggcatgggacggcgcctggcgatggaggcggtactgccgggacacggtttttacagccccggcgaagggctggc

SEQ ID NO: 201709 - DNA, 75 bp, synthetic construct
  source 1..75: mol_type = other DNA
tggtggagtgatgctgatgacacatggtatttatgcgtagaagttgatgtgataactgctgttccctcacatatc

SEQ ID NO: 201710 - DNA, 75 bp, synthetic construct
  source 1..75: mol_type = other DNA
gtctgaatctgtactacgacgaccggggacgcatcactgaaatcagcggcgagcagcagcgtccgtgcatccgtc

SEQ ID NO: 201711 - DNA, 75 bp, synthetic construct
  source 1..75: mol_type = other DNA
aatttttatgggacggaatgcggctggcgcaggagagcaggccggagggaacaggcagcctgtatatctacagcg

SEQ ID NO: 201712 - DNA, 75 bp, synthetic construct
  source 1..75: mol_type = other DNA
cacttggattgtgtcctaaatctgacttcaaatggggaaatccaaaaagtaagcctacatacggtcacacctttt

SEQ ID NO: 201713 - DNA, 75 bp, synthetic construct
  source 1..75: mol_type = other DNA
ggagacagccgatggccgtacggaatacgtccatgatgcggcagaccagctactggaaatccgccgccagcggca

SEQ ID NO: 201714 - DNA, 75 bp, synthetic construct
  source 1..75: mol_type = other DNA
atattaataggtatcaagaaactccccgaagatcaacgtcccagggaaaaaacgctacgaaaattgtttacctgt

SEQ ID NO: 201715 - DNA, 75 bp, synthetic construct
  source 1..75: mol_type = other DNA
tgcaccagaagataaaaatatatctggagacagtttgtttatttatctgcgtaatgttaatgttttattgcgact

SEQ ID NO: 201716 - DNA, 75 bp, synthetic construct
  source 1..75: mol_type = other DNA
catttacaagtgttagctcatttttggaaccaaatgacctttttattaaagttgatttgtcacgcccggatgatt

SEQ ID NO: 201717 - DNA, 75 bp, synthetic construct
  source 1..75: mol_type = other DNA
cggcggtacgggcacagctattgtagttcaggctgcaggcaaaaacgtttctttcgatgggactgcaggtgacgc

SEQ ID NO: 201718 - DNA, 75 bp, synthetic construct
  source 1..75: mol_type = other DNA
cgcgaatgatggtatttctgttgcgcagactactgaaggtgcgctgaatgaaattaacaacaacctgcagcgtgt

SEQ ID NO: 201719 - DNA, 75 bp, synthetic construct
  source 1..75: mol_type = other DNA
tgactacatgcttacaagaggaaggcttgcgaacttcgcgaaaacccagctcccaaaatcaaagtttcaggaata

SEQ ID NO: 201720 - DNA, 75 bp, synthetic construct
  source 1..75: mol_type = other DNA
cagaggcaattgaaactgctggtggccagtctgagttagcccggaaactaactgcaagttccgggaaggaagtta

SEQ ID NO: 201721 - DNA, 75 bp, synthetic construct
  source 1..75: mol_type = other DNA
acagaaaaatagtagaccatattgctgacatcaatttgccatatagctcaattgctagagaacaccttttacgtg

SEQ ID NO: 201722 - DNA, 75 bp, synthetic construct
  source 1..75: mol_type = other DNA
taaattgcaacctgaagctttacttattcttggtgatacaaatagtgctctagtttccattgcagctaaaagacg

SEQ ID NO: 201723 - DNA, 75 bp, synthetic construct
  source 1..75: mol_type = other DNA
cttatttgtgatattaaaaattattatgcatatagtcttctgttatccggaaaatcgataaagtgtattgatact

SEQ ID NO: 201724 - DNA, 75 bp, synthetic construct
  source 1..75: mol_type = other DNA
actaggaatagaaaccaccagaaagttaccagcatcattaaagaaatttttcagtcaacgtataggcaaccaaca

SEQ ID NO: 201725 - DNA, 75 bp, synthetic construct
  source 1..75: mol_type = other DNA
gtgatggatgaggccgaccgcatgctggatatgggatttagtgacgccattgatgatgtcatccgttttgcgcca

SEQ ID NO: 201726 - DNA, 75 bp, synthetic construct
  source 1..75: mol_type = other DNA
ggcaagttgccagcccgcagccattatcactggtgatgagtggttgccactggtcaatgccgcgacgcataacaa

SEQ ID NO: 201727 - DNA, 75 bp, synthetic construct
  source 1..75: mol_type = other DNA
cgcaactcatcgttctggaaaaacagaagtgtaccagcgtcaggccgggtttatctccgggccaggaaaggtact

SEQ ID NO: 201728 - DNA, 75 bp, synthetic construct
  source 1..75: mol_type = other DNA
ctggcgtggatattaaaacagagtgatttaatctccattcttagtggggctactgcaccggaacaggtacgcgaa

SEQ ID NO: 201729 - DNA, 75 bp, synthetic construct
  source 1..75: mol_type = other DNA
cacatgaataaaaagcactggatttcggtgtatcccggcgaggaaatctctgaatcgttgctcagcgatctgatc

SEQ ID NO: 201730 - DNA, 75 bp, synthetic construct
  source 1..75: mol_type = other DNA
catgcataaactgcgtgagcaggggcatcgcgtggtggtgctttccaatactaaccgcctgcatactaccttctg

SEQ ID NO: 201731 - DNA, 75 bp, synthetic construct
  source 1..75: mol_type = other DNA
gcatttatttgcgtcaatacgctttgggctaacaggttgacgaaagaggctatccttaatgaatcaatttcagaa

SEQ ID NO: 201732 - DNA, 75 bp, synthetic construct
  source 1..75: mol_type = other DNA
ggaattaacccaaagccaaaatggtgcatttatttgcgtcaatacactttgggcgaacaggttgacgaaagaagc

SEQ ID NO: 201733 - DNA, 75 bp, synthetic construct
  source 1..75: mol_type = other DNA
ccactggtcaatgccgcgacgcataacaaccccgaattacatgttttaagccacgcctggtttaaggcattaccg

SEQ ID NO: 201734 - DNA, 75 bp, synthetic construct
  source 1..75: mol_type = other DNA
cattatcactggtgatgagtggttgccgctggtcaatgccgccacgcataacaaccccgaattgcatgtattaag

SEQ ID NO: 201735 - DNA, 75 bp, synthetic construct
  source 1..75: mol_type = other DNA
actggatctttcctgctggcgcgtcgctggtattggtgcagaacccatctccgcagaacaactccatcaattcgc

SEQ ID NO: 201736 - DNA, 75 bp, synthetic construct
  source 1..75: mol_type = other DNA
cgaagcgttacttagcgatctgatcaacgattcgtggaatctggtggttgatggcttatctaaacgcgatcaaaa

SEQ ID NO: 201737 - DNA, 75 bp, synthetic construct
  source 1..75: mol_type = other DNA
cacatgaacaaaaaacactggatttcggtgtaccctggcgatgaaatcactgaagcgttacttcttgatttgatc

SEQ ID NO: 201738 - DNA, 75 bp, synthetic construct
  source 1..75: mol_type = other DNA
aaaaatccctgttaaatcagcagatatacccgagcattaagccagggtatcacatgaataaaaagcactggattt

SEQ ID NO: 201739 - DNA, 75 bp, synthetic construct
  source 1..75: mol_type = other DNA
aatgcgccgtaataccttacaccacggcgctggtgatggttattcctgctctttggccttgcgacgctggcggta

SEQ ID NO: 201740 - DNA, 75 bp, synthetic construct
  source 1..75: mol_type = other DNA
ggatcagtgcaggggaattatatcaaccgtgtggtgaagcgccactattgccggataacaagcaaaacaaaggcg

SEQ ID NO: 201741 - DNA, 75 bp, synthetic construct
  source 1..75: mol_type = other DNA
acacgagcctttagagcttgtgattttgcgtttgttgtacccgttgccatttctattcctctgttggattggtgg

SEQ ID NO: 201742 - DNA, 75 bp, synthetic construct
  source 1..75: mol_type = other DNA
ttcgactttggtctgcgtccatctttaggttatgtgctatcgaaaggaaaagatattgaaggtatcggtgatgag

SEQ ID NO: 201743 - DNA, 75 bp, synthetic construct
  source 1..75: mol_type = other DNA
tcagcgtttgttgattataaaatcaaccaactggatagcgataacaaattgaatattaataatgatgatattgtc

SEQ ID NO: 201744 - DNA, 75 bp, synthetic construct
  source 1..75: mol_type = other DNA
tggtaatgggaattgtggcatctgcatctgttcaagccgcagaggtttataacaaggatggtaataaactggata

SEQ ID NO: 201745 - DNA, 75 bp, synthetic construct
  source 1..75: mol_type = other DNA
agttgggtctcaaggtggtaatgctggctggcaaccacgacctcgaaaccaacaattccgtatacagcgccaatg

SEQ ID NO: 201746 - DNA, 75 bp, synthetic construct
  source 1..75: mol_type = other DNA
ataattccgctcgatttaattgaagtgcgctccggctcttatctcgaagaggatgatgtggtgcgcttcgcggat

SEQ ID NO: 201747 - DNA, 75 bp, synthetic construct
  source 1..75: mol_type = other DNA
agaacatcctcaaaacaatgggtgcaaaaggtgtcgtgtgcaacttcatccgtaagtcatcaatgatggaaggta

SEQ ID NO: 201748 - DNA, 75 bp, synthetic construct
  source 1..75: mol_type = other DNA
aactcaggctgccagatcatcgtttccgatggaagcataataagctttttctgcttctgccggaggagtatggcc

SEQ ID NO: 201749 - DNA, 75 bp, synthetic construct
  source 1..75: mol_type = other DNA
cagccagttgaagaatatcgattttactaaccatcccgccgcagccgatccggtaacgatgcgcgctatccaaaa

SEQ ID NO: 201750 - DNA, 75 bp, synthetic construct
  source 1..75: mol_type = other DNA
atgtctgttaccgaacatgcgcagcgtcgtgctgcgcgtgcggatgcgctcatcaccgcgcaactagctttcgcc

SEQ ID NO: 201751 - DNA, 75 bp, synthetic construct
  source 1..75: mol_type = other DNA
gcaaaaaacgcgtctcgcttttgccgggttgaaatataaagatttgggttctttcgactatggtcgtaacctggg

SEQ ID NO: 201752 - DNA, 75 bp, synthetic construct
  source 1..75: mol_type = other DNA
attgtgacccgtctggaatggctgtccacatcaaaagaccagtcccattaccggcttacactcagttcccgtctg

SEQ ID NO: 201753 - DNA, 75 bp, synthetic construct
  source 1..75: mol_type = other DNA
gtggacgaatccttccagccaactgcagttggttttgctgaagcgctgaacaacaaagataaaccagaagatgcg

SEQ ID NO: 201754 - DNA, 75 bp, synthetic construct
  source 1..75: mol_type = other DNA
ttcaggcttgtacccaggataaaaaagccagctttaaagataaagttaaaggcgaatgggacaaaattaagaaag

SEQ ID NO: 201755 - DNA, 75 bp, synthetic construct
  source 1..75: mol_type = other DNA
tgaagcgggagacgataccagcccggagccggaaaccgaatctggtgcgttttacgcccggcttcaccacgagcg

SEQ ID NO: 201756 - DNA, 75 bp, synthetic construct
  source 1..75: mol_type = other DNA
gtgatatctgcaccggaacaatgggcaacctgaccgcgctggccggagagaggctggggctttttgcccggaccg

SEQ ID NO: 201757 - DNA, 75 bp, synthetic construct
  source 1..75: mol_type = other DNA
tccgtccggcagaaatcccgcgtccggtcatcccgggcacgcttccggcacggattgagagtcgcgagaagaacg

SEQ ID NO: 201758 - DNA, 75 bp, synthetic construct
  source 1..75: mol_type = other DNA
atctggcacaaacccagaacgcctcggacttgattggtggcgtgagcaaaagcggtgaccgctatgtcgaccaca

SEQ ID NO: 201759 - DNA, 75 bp, synthetic construct
  source 1..75: mol_type = other DNA
agggcggtcgccagtggcataacactaaacttgagcatatccagaataccaggttgttggctggtgggcaatgct

SEQ ID NO: 201760 - DNA, 75 bp, synthetic construct
  source 1..75: mol_type = other DNA
ataaaccaactagatagcgataataagctgaacatcaataatgatgatattgtcgcggttggcatgacctatcag

SEQ ID NO: 201761 - DNA, 75 bp, synthetic construct
  source 1..75: mol_type = other DNA
accattgccgacagcctgaagtttggtaaggccgtgctaaataagctggggaaaatcaacaaactgcataagaat

SEQ ID NO: 201762 - DNA, 75 bp, synthetic construct
  source 1..75: mol_type = other DNA
gctattgagcgtaagtcaggtcagtctggctgcggtcagccaggtcgtggcggtgcgcgtctggcctgcgtccag

SEQ ID NO: 201763 - DNA, 75 bp, synthetic construct
  source 1..75: mol_type = other DNA
ttatccggccaatgctcaggacatgcaggacccattgctggcgctgctggaagattacaataaaggcgacctcga

SEQ ID NO: 201764 - DNA, 75 bp, synthetic construct
  source 1..75: mol_type = other DNA
cggcccgaatgatgctctcgctggacaaaaaagcaatcggcgaaaaactcatcaacggtcgtcagataaacccga

SEQ ID NO: 201765 - DNA, 75 bp, synthetic construct
  source 1..75: mol_type = other DNA
ctatgagccagatgtcagcgcgcaaggtgagctgattctcaacgaaaaactggctaaacagctggtaactgctgc

SEQ ID NO: 201766 - DNA, 75 bp, synthetic construct
  source 1..75: mol_type = other DNA
agtctatcaatgccgaagtgacaaactctgccatcgagctgaaagtgttgatcgagcagatgcgcgagcaaatcc

SEQ ID NO: 201767 - DNA, 75 bp, synthetic construct
  source 1..75: mol_type = other DNA
tttgcgacgcgttacgttgagacctggccttgccggaaaccttattacagggcaaatactacctgttagcttatt

SEQ ID NO: 201768 - DNA, 75 bp, synthetic construct
  source 1..75: mol_type = other DNA
agacaggaaaaagaaatcaatggctctgtaatatatccggccctatcattatcaccaacacttctgaacgatgaa

SEQ ID NO: 201769 - DNA, 75 bp, synthetic construct
  source 1..75: mol_type = other DNA
aagagaatattgcggggtaatattgagacaggaaaaagaaatcaatggctctgtaatatatccggccctatcatt

SEQ ID NO: 201770 - DNA, 75 bp, synthetic construct
  source 1..75: mol_type = other DNA
atatgaagttcatccaaatgaatcacatacgcagaatgcgcctgaaaatgacataccccatgtcaaatggaaaga

SEQ ID NO: 201771 - DNA, 75 bp, synthetic construct
  source 1..75: mol_type = other DNA
ctgccaccacctttccggacggcagaacgcagcgccatctgtactacggcagcggccatctccagcagataaacc

SEQ ID NO: 201772 - DNA, 75 bp, synthetic construct
  source 1..75: mol_type = other DNA
ggaccacggcggggtggagcagaacctgcgctaccagggacagtacctcgacagggaaacggggctgcactacaa

SEQ ID NO: 201773 - DNA, 75 bp, synthetic construct
  source 1..75: mol_type = other DNA
agtctatcaatgccgaagtaacaaactccgccattgagctgaaggtgttgatcgagcaaatgcgcgaacagatcc

SEQ ID NO: 201774 - DNA, 75 bp, synthetic construct
  source 1..75: mol_type = other DNA
gcggcgggcaggctggtgaagtataccagcccgatggggaggataacgcgctggcaacgcgacgggcaggggcgg

SEQ ID NO: 201775 - DNA, 75 bp, synthetic construct
  source 1..75: mol_type = other DNA
catacgcagaatgcgcctgaaaatgacataccccatgtcaaatggaaagattgggaatcgggaaaatctagcgga

SEQ ID NO: 201776 - DNA, 75 bp, synthetic construct
  source 1..75: mol_type = other DNA
gactggctgaatggccatgaaaactatccgatagcgttgtccggtgaatggccagatactgctgataatttcaga

SEQ ID NO: 201777 - DNA, 75 bp, synthetic construct
  source 1..75: mol_type = other DNA
tatacggacctgctgtaactatgggcatagaccaggttccaactattcaggaatcagatatcattgttacattat

SEQ ID NO: 201778 - DNA, 75 bp, synthetic construct
  source 1..75: mol_type = other DNA
gatggcgataagttaatccgcgatctgccgttcagctcattaattttcgcccgtcagtggtttgtggttggtgag

SEQ ID NO: 201779 - DNA, 75 bp, synthetic construct
  source 1..75: mol_type = other DNA
tcacgatcgcgaagaagtgacggtgcatgtccgccgtatctgggctgcggtgggtggtcgtcgcgacgagcgata

SEQ ID NO: 201780 - DNA, 75 bp, synthetic construct
  source 1..75: mol_type = other DNA
ctttatggaacggatcgctgcacaggggaccgttgttacagcgacatgcattggtcaggttggaaccaccatacc

SEQ ID NO: 201781 - DNA, 75 bp, synthetic construct
  source 1..75: mol_type = other DNA
caatggcaaaaggcatcacctacgcgggtttactttaaggtaaatgtcgatgcttcactaaatcccccaagtgat

SEQ ID NO: 201782 - DNA, 75 bp, synthetic construct
  source 1..75: mol_type = other DNA
acttgcgactgatggtgtgcttgatgcttacgtatggtcaaacagaactgcagaaacagtaaataaaggaacaac

SEQ ID NO: 201783 - DNA, 75 bp, synthetic construct
  source 1..75: mol_type = other DNA
atttacatctgtgtgtatggtggaactgatgaggatgtagcggagtcaattttccagacgtacaaccctggagca

SEQ ID NO: 201784 - DNA, 75 bp, synthetic construct
  source 1..75: mol_type = other DNA
atgacgatattaaatacggctgttcctgatgtaaccatcactgaaaacggtctttcggttcccgacatagcggat

SEQ ID NO: 201785 - DNA, 75 bp, synthetic construct
  source 1..75: mol_type = other DNA
aggacgcatctacattagcagcgttacttgcgactgatggtgtgcttgatgcttacgtatggtcaaacagaactg

SEQ ID NO: 201786 - DNA, 75 bp, synthetic construct
  source 1..75: mol_type = other DNA
tgtgggtgtactccgtcgataatggccctatggcgcaaagcctgatggataccggacaggtgacctggttgcggg

SEQ ID NO: 201787 - DNA, 75 bp, synthetic construct
  source 1..75: mol_type = other DNA
tgccgttcagttcattaatttttgcccgccagtggtttgtggtgggggaactcctgcagcatttgccgccagaag

SEQ ID NO: 201788 - DNA, 75 bp, synthetic construct
  source 1..75: mol_type = other DNA
gctggttaattgtaaccaggtgaatcatttgataccaacgagggttttagtgaaaggaggtgaaatcacctgtaa

SEQ ID NO: 201789 - DNA, 75 bp, synthetic construct
  source 1..75: mol_type = other DNA
tgttccgacaatcttcaactcgttaccacagcggtgagcgtcagttatttacgttatgccgcgcaaggatatttc

SEQ ID NO: 201790 - DNA, 75 bp, synthetic construct
  source 1..75: mol_type = other DNA
agacagaacgattgttgacggcctgtttgacaaagcgtttctggtaattggcgtcggttcgagccaggaaaaagt

SEQ ID NO: 201791 - DNA, 75 bp, synthetic construct
  source 1..75: mol_type = other DNA
gatacgggatctgcattcagaactcatatgagtaatgctggcccacttgatcagcaggatgaatatcagtctctt

SEQ ID NO: 201792 - DNA, 75 bp, synthetic construct
  source 1..75: mol_type = other DNA
atacgatgctccctatccttggtgggatcgtcaacgaaacattctccggcgcttttggcatgatgtcagccaatg

SEQ ID NO: 201793 - DNA, 75 bp, synthetic construct
  source 1..75: mol_type = other DNA
cgttcggtatgatgtcagccaacgccgggattagcatcatagaatcactggccctgattgctgtttacattgcgc

SEQ ID NO: 201794 - DNA, 75 bp, synthetic construct
  source 1..75: mol_type = other DNA
ttatggtgttatggctgataaatcagggtgtaggtcttgccgatacggtctggaatacgtatgccgcaaatccat

SEQ ID NO: 201795 - DNA, 75 bp, synthetic construct
  source 1..75: mol_type = other DNA
gcgtaacggtatctccttcaatcaccggttctggtgccgcgcagcagctgcatctgatcatcaaaccgcttgatg

SEQ ID NO: 201796 - DNA, 75 bp, synthetic construct
  source 1..75: mol_type = other DNA
gtggcgctggttatggtctggttttatcgttaaccatgcgaccagcactaatgataacaggattgatagcagctt

SEQ ID NO: 201797 - DNA, 75 bp, synthetic construct
  source 1..75: mol_type = other DNA
tagtgggtcgtggtggcgctggttatggtctggttttatcgttaaccatgcgaccagcactaatgataacaggat

SEQ ID NO: 201798 - DNA, 75 bp, synthetic construct
  source 1..75: mol_type = other DNA
ctgcctggtggatttacaattaaggaaacacaagaactttacgaagatttggttcgaagccacataagtcaggct

SEQ ID NO: 201799 - DNA, 75 bp, synthetic construct
  source 1..75: mol_type = other DNA
gctgggtatcgggtgcatttggcgctatggggattgttatgccactggttatccctttatggatagctggcgata

SEQ ID NO: 201800 - DNA, 75 bp, synthetic construct
  source 1..75: mol_type = other DNA
gcaggatgcgattaatggagcagctcataatcttcctgtagccgggcaagcgacaatggaatacggagatatatt

SEQ ID NO: 201801 - DNA, 75 bp, synthetic construct
  source 1..75: mol_type = other DNA
ggatgatttcaaagagaatgtccagaaagacggatggtttatggctggcgcatggagtatgaaactgatccgtgt

SEQ ID NO: 201802 - DNA, 75 bp, synthetic construct
  source 1..75: mol_type = other DNA
cattctgggataaagtccatctcgatcccacaatgctgctgattttactggcattgctggtttacagcgccctgg

SEQ ID NO: 201803 - DNA, 75 bp, synthetic construct
  source 1..75: mol_type = other DNA
gcaaagcgtaccttaattcatgaccatcttgatcactgcctggaggatgcgcttcatgccgatcatgccggaact

SEQ ID NO: 201804 - DNA, 75 bp, synthetic construct
  source 1..75: mol_type = other DNA
ctggataagctgtcatgtattgacgactggctgtgccggttttcctcaataatgtatcaccgttttgataaagaa

SEQ ID NO: 201805 - DNA, 75 bp, synthetic construct
  source 1..75: mol_type = other DNA
aacttcgcgagaacgtacctgtcggtatccaggctgccaggcgtttgttagagaggactggcggtaatgttgatg

SEQ ID NO: 201806 - DNA, 75 bp, synthetic construct
  source 1..75: mol_type = other DNA
actctggcctgagttattcaaccgggaaaaaccaaaaccacttaaagtggggatacctgacgatctgatacagga

SEQ ID NO: 201807 - DNA, 75 bp, synthetic construct
  source 1..75: mol_type = other DNA
caaaaagcgaatgctaggagttaaatcggttggatgggttgaagcagagattgatgaatggttaacacggcgtag

SEQ ID NO: 201808 - DNA, 75 bp, synthetic construct
  source 1..75: mol_type = other DNA
gccaagcgggtgctaatacatgatcacctcgatcactgtctggaagatgtgctcagcaatgaacatgagccttcc

SEQ ID NO: 201809 - DNA, 75 bp, synthetic construct
  source 1..75: mol_type = other DNA
attgatgaacagcgttatacactgacggaattgattatacgtaaaaataaggatgccggagatgctttaagtaat

SEQ ID NO: 201810 - DNA, 75 bp, synthetic construct
  source 1..75: mol_type = other DNA
tatccaggctgccaggcgtttgttagagaagactggtggtgatgttgatgaagccattaagttgtttcatattga

SEQ ID NO: 201811 - DNA, 75 bp, synthetic construct
  source 1..75: mol_type = other DNA
atgatttgcgataatagtaattattttttatacagtcttcttttttcaggggggcctgttaaatgcatatgtgct

SEQ ID NO: 201812 - DNA, 75 bp, synthetic construct
  source 1..75: mol_type = other DNA
agaatgttttgttggctacaaactatgatattgcagaagctcttcggcgtattgatgaacaacgctatacactga

SEQ ID NO: 201813 - DNA, 75 bp, synthetic construct
  source 1..75: mol_type = other DNA
aactggatagtgaagtagactctatattactgcaatttgtgaaggataatattgaggttttcccacgtcgccaca

SEQ ID NO: 201814 - DNA, 75 bp, synthetic construct
  source 1..75: mol_type = other DNA
aactggatagtgaagccgacgctatattactgcaatttgtaaaggataatattgagattttcccacgtcgccaca

SEQ ID NO: 201815 - DNA, 75 bp, synthetic construct
  source 1..75: mol_type = other DNA
tcaggtacgcgacgctcgcccgcctctggtcgtcattagccgttcccatgcggatgcggagctgaaagagtatct

SEQ ID NO: 201816 - DNA, 75 bp, synthetic construct
  source 1..75: mol_type = other DNA
acgaatatttgggacaccgccgctggtcatgctgtggctgcagctgccggagcgcacgttcacgactggcagggt

SEQ ID NO: 201817 - DNA, 75 bp, synthetic construct
  source 1..75: mol_type = other DNA
acagtatagcattaccttcgattgcagatcctaaggctgttgtgtggctaggggacaacacattcggtataggta

SEQ ID NO: 201818 - DNA, 75 bp, synthetic construct
  source 1..75: mol_type = other DNA
ggcgcgcagtggctggaagaaaaccgcgaacaggtggagatgatcgaagaacgcatcaaagcgcgttgcgttggt

SEQ ID NO: 201819 - DNA, 75 bp, synthetic construct
  source 1..75: mol_type = other DNA
tcagaacatgagcactgcggacacggtcaccagcatgaacacggtcaatgctgcggtggtcgccacggtcgcggc

SEQ ID NO: 201820 - DNA, 75 bp, synthetic construct
  source 1..75: mol_type = other DNA
acagcctggaacggtatcattgcttaccttctgataggtttcctgactgcaggggaatggctgatacgttgttag

SEQ ID NO: 201821 - DNA, 75 bp, synthetic construct
  source 1..75: mol_type = other DNA
cgccgaacgctctatagatgaaatccgggagatgtacggaacggatggagttaagaaagcaaaaggccgctacaa

SEQ ID NO: 201822 - DNA, 75 bp, synthetic construct
  source 1..75: mol_type = other DNA
gcgtccggcgaaatataaattcaccgatgttaacggtgaaactaaaacctggaccggtcagggccgtacaccgaa

SEQ ID NO: 201823 - DNA, 75 bp, synthetic construct
  source 1..75: mol_type = other DNA
tttgattttctcatggctaacattgacaaaattaatcagtttcaaagcactgatgaaaacgcacgttacaactac

SEQ ID NO: 201824 - DNA, 75 bp, synthetic construct
  source 1..75: mol_type = other DNA
tgttccggtctgcgaactgttagggccaggcaagcaacgcgaggctattaccgtcctcggttatctgttttatat

SEQ ID NO: 201825 - DNA, 75 bp, synthetic construct
  source 1..75: mol_type = other DNA
ttcccggatgcgcggattaccgttgatcccaacggtgcatggctgcttgatgaagctatttctctgtgcaaaggg

SEQ ID NO: 201826 - DNA, 75 bp, synthetic construct
  source 1..75: mol_type = other DNA
cactgttcgtgcattgaagaaacgcttcccggatgcgcggattaccgttgatcccaacggtgcctggctgcttga

SEQ ID NO: 201827 - DNA, 75 bp, synthetic construct
  source 1..75: mol_type = other DNA
tagcggaagtcagcgaaattgacgaggcgaagcggcaatggttgcaggggatgcgtcaccccgttgatacggtaa

SEQ ID NO: 201828 - DNA, 75 bp, synthetic construct
  source 1..75: mol_type = other DNA
caagcaaactaccggataaagcgatggactacctgaagcgaaacggactgataagcgcggaggatattttacgat

SEQ ID NO: 201829 - DNA, 75 bp, synthetic construct
  source 1..75: mol_type = other DNA
ctacataacggcaagcgcgacaatctggagatcagccccaatttatgggcgggcgttggcttagtgcgcggcggt

SEQ ID NO: 201830 - DNA, 75 bp, synthetic construct
  source 1..75: mol_type = other DNA
ccggttgatcacggttatctgcaacaaattgcgcaagcggcggatcgtctgggttataccggtgtgctgatccca

SEQ ID NO: 201831 - DNA, 75 bp, synthetic construct
  source 1..75: mol_type = other DNA
agaagcaacgattaagccgggtaatggtattgagcaggcaactcactggatgccgctaccggagccaccgcagga

SEQ ID NO: 201832 - DNA, 75 bp, synthetic construct
  source 1..75: mol_type = other DNA
tcgtggaaattgccatgcgcaaggctggcaactctccggtaactctggggcgtttacctggtggtttcaccattg

SEQ ID NO: 201833 - DNA, 75 bp, synthetic construct
  source 1..75: mol_type = other DNA
gctttaagtggcgaaaagatgaaaaagaaagatcgcgatgctgatttgcgctggattcatggcgtaatagttcag

SEQ ID NO: 201834 - DNA, 75 bp, synthetic construct
  source 1..75: mol_type = other DNA
tacgtcaaatgtgggacgatctggcggacgtttacggtcataaaacggcgctgatttgtgaatccagcggcggag

SEQ ID NO: 201835 - DNA, 75 bp, synthetic construct
  source 1..75: mol_type = other DNA
tagcgaaagtcagcgaagttgacgaggcgaagcggcaatggttgcaggggatgcgtcaccccgttgatacggtaa

SEQ ID NO: 201836 - DNA, 75 bp, synthetic construct
  source 1..75: mol_type = other DNA
cgagcggtatatgagctatggcaaggcttatggtttatgcgaatggtttgaggttgagcagtttcagaatccctg

SEQ ID NO: 201837 - DNA, 75 bp, synthetic construct
  source 1..75: mol_type = other DNA
tgaaatctgcattaaaggcgtaccagggaaaaccatcttcaaagaatattttcttaacccgcaagccactgccag

SEQ ID NO: 201838 - DNA, 75 bp, synthetic construct
  source 1..75: mol_type = other DNA
atcgattgccagtgtactgcggcgatggcggcgttttctgccggagccacctttgtgctggtcgagaaatacagc

SEQ ID NO: 201839 - DNA, 75 bp, synthetic construct
  source 1..75: mol_type = other DNA
tggcggcgttttctgccggggccacctttgtgctggtcgagaaatacagcgcccgcgccttctggggacaggtac

SEQ ID NO: 201840 - DNA, 75 bp, synthetic construct
  source 1..75: mol_type = other DNA
ccagacaaacggcttgttttttttcaaatggagctggccctgccataataagtttatcaaataatggtgaatcac

SEQ ID NO: 201841 - DNA, 75 bp, synthetic construct
  source 1..75: mol_type = other DNA
ctgttaaactaaaagtagtatttgcaacattagtgcttttttttgtgtctgcggttattgctgtctcagtgttaa

SEQ ID NO: 201842 - DNA, 75 bp, synthetic construct
  source 1..75: mol_type = other DNA
acttttagtatccctgttacctgccacacgttccgtcacagcttctgtatgcacctgatccagcatggggttccg

SEQ ID NO: 201843 - DNA, 75 bp, synthetic construct
  source 1..75: mol_type = other DNA
tccacctttgaagagccaactcaggttgtagctttagcacatcatttcggtgttcattaccttgctgaaaaagag

SEQ ID NO: 201844 - DNA, 75 bp, synthetic construct
  source 1..75: mol_type = other DNA
acacaaagagtcgccttgaagacatgatgcgtgagttaagccatcgacataacctcgcaacacaaccacacaaag

SEQ ID NO: 201845 - DNA, 75 bp, synthetic construct
  source 1..75: mol_type = other DNA
tatcctactattcttataataagacacggagaaaggtgtgatcgatcaaaaaatcaatgtttttctgaaccagat

SEQ ID NO: 201846 - DNA, 75 bp, synthetic construct
  source 1..75: mol_type = other DNA
ccagatggcgtttgacaacggtatgagctggaataacgccctgcgttatgatgtgcataatctcgatagcagtcg

SEQ ID NO: 201847 - DNA, 75 bp, synthetic construct
  source 1..75: mol_type = other DNA
tgctgtcagatgctgcaccggaagttgcaaacggtctggccttcaacgtggtagcgaaaggcgacccgcgtgctg

SEQ ID NO: 201848 - DNA, 75 bp, synthetic construct
  source 1..75: mol_type = other DNA
agcacagggctattgctgggagagataaagaaaccggaagctgtcagtcagtggggaaggatgttgtataagcgt

SEQ ID NO: 201849 - DNA, 75 bp, synthetic construct
  source 1..75: mol_type = other DNA
cccagaattcacgtagcgacgccatcgggaccgggcgcgtgacatatgcctacttcgattatgccgatgcgctgg

SEQ ID NO: 201850 - DNA, 75 bp, synthetic construct
  source 1..75: mol_type = other DNA
agttcccaaagagcacagcaagggcggcgagaagattgtaagacctgtgccggatgccatgcgcaaattcattga

SEQ ID NO: 201851 - DNA, 75 bp, synthetic construct
  source 1..75: mol_type = other DNA
tctaacagcaacggaaaatggatctggaataccgatacgggtgtaattagcggcgtgaatcctaatgcaccgtta

SEQ ID NO: 201852 - DNA, 75 bp, synthetic construct
  source 1..75: mol_type = other DNA
ctgatgaacaaaacgccttattcgaagaaatggatgctaatgaactggtcaaaatgttagccattcttcgaggaa

SEQ ID NO: 201853 - DNA, 75 bp, synthetic construct
  source 1..75: mol_type = other DNA
tgaagtagtattggaagcactgagtatgaaactagctgataaaggagatgctacggatacactaggtcttgcgct

SEQ ID NO: 201854 - DNA, 75 bp, synthetic construct
  source 1..75: mol_type = other DNA
ccatcgcccttggggtgaaggctggaaagctgtccgctcaacaatctactttttccatacaaaaagaaaagataa

SEQ ID NO: 201855 - DNA, 75 bp, synthetic construct
  source 1..75: mol_type = other DNA
gatgcgcaaacggtagaagactcggtcactcaggtgattgagcaaaatatgaatgggcttgatggcctgatgtac

SEQ ID NO: 201856 - DNA, 75 bp, synthetic construct
  source 1..75: mol_type = other DNA
aattaaacgattggatagaacatgaaaagttgcaagagcagcaggaggatgagatgcgcgaacaacgcttcgaat

SEQ ID NO: 201857 - DNA, 75 bp, synthetic construct
  source 1..75: mol_type = other DNA
aacaacgacgtattcattttatccattatgatgatgtgacagagtcccctatcgcgaatatcgacgtgaatgtat

SEQ ID NO: 201858 - DNA, 75 bp, synthetic construct
  source 1..75: mol_type = other DNA
gccttgaagatgaggatggacaggtgacgcactggtgccatatttcggctttaccggaattacgggagatacaca

SEQ ID NO: 201859 - DNA, 75 bp, synthetic construct
  source 1..75: mol_type = other DNA
tccaccgtggcgcgctataacggcaaacctgctgccgggatcgccatcaaactggctgccggagcaaacgccctg

SEQ ID NO: 201860 - DNA, 75 bp, synthetic construct
  source 1..75: mol_type = other DNA
ctcaaatcaggctcccgcgctatatgccatttcactggtcgtggtgttcctcgccctcgccgcactttatgaaag

SEQ ID NO: 201861 - DNA, 75 bp, synthetic construct
  source 1..75: mol_type = other DNA
gtggcgctgtctgatatcaaccagacaatttccaccgccttcggcagcagctacgtgaacgacttcctcaactag

SEQ ID NO: 201862 - DNA, 75 bp, synthetic construct
  source 1..75: mol_type = other DNA
gatgcgtttacgcccgatcctgatgacctctctggcctttattcttggcgtactgccactggttatcagtcatgg

SEQ ID NO: 201863 - DNA, 75 bp, synthetic construct
  source 1..75: mol_type = other DNA
attctcggtacgttcgcgattttgtcggcggtcggttttaccatcaacaccctcaccatgttcgggatggtgtta

SEQ ID NO: 201864 - DNA, 75 bp, synthetic construct
  source 1..75: mol_type = other DNA
aaaaataatgtccagtcggtgtttaccgttggcggcttcggctttagcggccagggacaaaacaacggtctggca

SEQ ID NO: 201865 - DNA, 75 bp, synthetic construct
  source 1..75: mol_type = other DNA
ggggtgatttattattcaccttccatattctgggggcatttagttaaaaaaattaaagctcgttgccaatgtcct

SEQ ID NO: 201866 - DNA, 75 bp, synthetic construct
  source 1..75: mol_type = other DNA
ttcctcaatgggtaattgatgctggaatgctaaaagagggatccccaattgaacgttattttcgtctctttgaaa

SEQ ID NO: 201867 - DNA, 75 bp, synthetic construct
  source 1..75: mol_type = other DNA
cgcggaagaaaatagcagtgtcgccgggccgttatttaaactctgcgagcgccgtcagggtatcgcgggcgttaa

SEQ ID NO: 201868 - DNA, 75 bp, synthetic construct
  source 1..75: mol_type = other DNA
ttagatttattttgcgatagtaaaaacaaacataaaaataaatgtgaagtactgtataattgggcagataatatt

SEQ ID NO: 201869 - DNA, 75 bp, synthetic construct
  source 1..75: mol_type = other DNA
atgaaattattattaatcattgatgattacataccagaaagcacccgtgtgggtgctaaaatgtttcatgagtta

SEQ ID NO: 201870 - DNA, 75 bp, synthetic construct
  source 1..75: mol_type = other DNA
cgatggatgttgcacctgaatatgccgatatacggcaggtggagtcatcgacggcggtgttgtacttgtttagcg

SEQ ID NO: 201871 - DNA, 75 bp, synthetic construct
  source 1..75: mol_type = other DNA
acttttcatggaagaaaagcttgacccgattttccatgctgattcatatggttaccgaccaggcaaatcagctca

SEQ ID NO: 201872 - DNA, 75 bp, synthetic construct
  source 1..75: mol_type = other DNA
caaaagcactggtctgggcatcatatctggatgtgcgtcgcaacaagggagcccccggatgcgacgggcagactt

SEQ ID NO: 201873 - DNA, 75 bp, synthetic construct
  source 1..75: mol_type = other DNA
tagcgtcttatgtgcagtctccgcgctattaccgtgcgttaatggctggcggcgcccgttacgacctgaaggggc

SEQ ID NO: 201874 - DNA, 75 bp, synthetic construct
  source 1..75: mol_type = other DNA
tctttacggaactgcttgctgctggggttaaaatttatcagtttgaaggcgggttactgcataccaagagcgtgc

SEQ ID NO: 201875 - DNA, 75 bp, synthetic construct
  source 1..75: mol_type = other DNA
tcatccgcgacattcaactcgcgcgccataatattgagatggtgttctatatttggcagcccggcggcatggcgg

SEQ ID NO: 201876 - DNA, 75 bp, synthetic construct
  source 1..75: mol_type = other DNA
tgccgacattaattgtccttttcccggcggcagttctggctggtcagtcttcatttgaagcaaaagtggtaaaaa

SEQ ID NO: 201877 - DNA, 75 bp, synthetic construct
  source 1..75: mol_type = other DNA
acatgataaggtgatatttttttatggggggaatattgggcatgctcaagatatgagcaacctcatgcgtttggt

SEQ ID NO: 201878 - DNA, 75 bp, synthetic construct
  source 1..75: mol_type = other DNA
gtaaactggctccttatgcttacagcacgcatttcaaggatcatattgtcacacgcaacggcgaagacctggttg

SEQ ID NO: 201879 - DNA, 75 bp, synthetic construct
  source 1..75: mol_type = other DNA
gaggagaatataaccctctgaaatatccggaaatagtagaacagttaaaatcactgacatccttactcagtagaa

SEQ ID NO: 201880 - DNA, 75 bp, synthetic construct
  source 1..75: mol_type = other DNA
atttctctatggaggaaatattggtcatgcccaagatatgagaaatttgctacgattggttcgtagaatgcttcc

SEQ ID NO: 201881 - DNA, 75 bp, synthetic construct
  source 1..75: mol_type = other DNA
acagtagccaggagagtgcattgcagttagatgccttccactggaaagaagacggcatcagtgataaaggtgtga

SEQ ID NO: 201882 - DNA, 75 bp, synthetic construct
  source 1..75: mol_type = other DNA
ccagcaacatggttattaaccagggcattatcaatctggagaaaaacggaaattacgatggcggcttgggcgcga

SEQ ID NO: 201883 - DNA, 75 bp, synthetic construct
  source 1..75: mol_type = other DNA
aagatgggtaggtactacaacacgaagattttgcgtgattcctgtgatgctattgaagccgaactacgacgtcga

SEQ ID NO: 201884 - DNA, 75 bp, synthetic construct
  source 1..75: mol_type = other DNA
atttcgaatacatcccgccagtgacttgccgcgtggttgatgagttcctggctgaacatgaagacgatgaggatg

SEQ ID NO: 201885 - DNA, 75 bp, synthetic construct
  source 1..75: mol_type = other DNA
cgcatccgtgaactccaccacgccatagaactggcgcagcagtctggcgatctggacgcggaatcaaacgccgta

SEQ ID NO: 201886 - DNA, 75 bp, synthetic construct
  source 1..75: mol_type = other DNA
atccgctggtggagctgctctccgaccatcctgaatcacagtatgacttgctcgaaacacgacacgccctggaag

SEQ ID NO: 201887 - DNA, 75 bp, synthetic construct
  source 1..75: mol_type = other DNA
aaatccggtgtaaagtggaatatcctggctttacgactggatgcgaatacctgggccatatggggtatggcccgt

SEQ ID NO: 201888 - DNA, 75 bp, synthetic construct
  source 1..75: mol_type = other DNA
aatacatcccgccagtaacttgccgcatagttgatgacttcctggctgaacatgaagacgaggacgatgatgatg

SEQ ID NO: 201889 - DNA, 75 bp, synthetic construct
  source 1..75: mol_type = other DNA
ttgagcgcatcaaatagaccttacaaaatccgttgtaaaggcgaataccctggctttactactggatgcgaatac

SEQ ID NO: 201890 - DNA, 75 bp, synthetic construct
  source 1..75: mol_type = other DNA
ttaagctggaaggaaaaccgcttccgtcacagacgccgacactgaaatgggcctgtctgaaactggcgaaactga

SEQ ID NO: 201891 - DNA, 75 bp, synthetic construct
  source 1..75: mol_type = other DNA
atggctaagcggcacgccacgctcgccgaacggtggacgcatgctattacgctctggttgcggattctggcgatt

SEQ ID NO: 201892 - DNA, 75 bp, synthetic construct
  source 1..75: mol_type = other DNA
catttgctattacgctctggctgcgcattctggcgattgtttccacttcgcagttgtggatgcagtacgtccccg

SEQ ID NO: 201893 - DNA, 75 bp, synthetic construct
  source 1..75: mol_type = other DNA
ctgccagtctatagcgcggcgacctttttctgccttattgcgctgaaggccacgcggcggcgggcaaaatatgtt

SEQ ID NO: 201894 - DNA, 75 bp, synthetic construct
  source 1..75: mol_type = other DNA
agggtttgataaagctatcaatgatgtaaaatcacgaatatatgccttgcgaaagttgaattgctattcactaag

SEQ ID NO: 201895 - DNA, 75 bp, synthetic construct
  source 1..75: mol_type = other DNA
ggaagcacgccagcaatccccggctggctgcgtgatggtattcgccgcccgtattcgtcaggaggtgtgccatgc

SEQ ID NO: 201896 - DNA, 75 bp, synthetic construct
  source 1..75: mol_type = other DNA
tagccgctgacacgctggttgatgcgcgcaagatggttaaggagatgggctatactgcggctttctggaaagggc

SEQ ID NO: 201897 - DNA, 75 bp, synthetic construct
  source 1..75: mol_type = other DNA
tcgctcaacgtgctggccccgggggggcggctctcgatcatcagcttccactcgctggaagaccgcattgtgaaa

SEQ ID NO: 201898 - DNA, 75 bp, synthetic construct
  source 1..75: mol_type = other DNA
cgctttatgcgtgaaaacagccgcggtccgcaagttccggcagggttaccgatgactgaagagcagctcaaaaaa

SEQ ID NO: 201899 - DNA, 75 bp, synthetic construct
  source 1..75: mol_type = other DNA
ctttatgcgcgatggtccgctggacatgcgtatggacccaacccgtgggcagtcagccgctgaatggctacaaac

SEQ ID NO: 201900 - DNA, 75 bp, synthetic construct
  source 1..75: mol_type = other DNA
acggttgcatcgtcagggtaaagacatcgggcagtacatttacctgcgtcgctatgagcgtagccgcaagcacag

SEQ ID NO: 201901 - DNA, 75 bp, synthetic construct
  source 1..75: mol_type = other DNA
agcatcacgcgctggtggcgaccattcgcacggaagaaccgcatgatgcggtggcgcggcaggttttccatggcg

SEQ ID NO: 201902 - DNA, 75 bp, synthetic construct
  source 1..75: mol_type = other DNA
aaaactcagtgattcactacgcgctgtggaacaaagcgcagcagtcgtcagatatcactctgttggcccccgcag

SEQ ID NO: 201903 - DNA, 75 bp, synthetic construct
  source 1..75: mol_type = other DNA
tgattgtggcttacaactggttaatagtaccgctgctagatgcgtttggaattgtagttattcaagtcccattag

SEQ ID NO: 201904 - DNA, 75 bp, synthetic construct
  source 1..75: mol_type = other DNA
tatgcgtcgcgaattgctggatcagcttaacaaacagttgggtaaccagctgatgatggccattaacctgcaaat

SEQ ID NO: 201905 - DNA, 75 bp, synthetic construct
  source 1..75: mol_type = other DNA
agtacgctgtcgttacgtcagttggagtctcgcgtttcgcaggcgctggacgagttgcaaaacgcacaaaacgat

SEQ ID NO: 201906 - DNA, 75 bp, synthetic construct
  source 1..75: mol_type = other DNA
atccgtaggtcttggttttggtttacaagagatcttcggtaacttcgtctccggtttgatcattctgttcgaacg

SEQ ID NO: 201907 - DNA, 75 bp, synthetic construct
  source 1..75: mol_type = other DNA
ccgcatcgcggatttgcgtctcgaacagtttgaagtcaaccagcagcgtgacgcgctgttccagagcgatgcgtt

SEQ ID NO: 201908 - DNA, 75 bp, synthetic construct
  source 1..75: mol_type = other DNA
cagcaacaacaaacactcccctcggcagatgaactggaaaacatgaccaaccgcatcgcggatttgcgtctcgaa

SEQ ID NO: 201909 - DNA, 75 bp, synthetic construct
  source 1..75: mol_type = other DNA
ggaagtgctggtgctgtcgcggctgaatatgcgtcagggcgcgtcgtatgccattacaaccatccttaactacat

SEQ ID NO: 201910 - DNA, 75 bp, synthetic construct
  source 1..75: mol_type = other DNA
catttatctggcggaattttttcatggcacaaagctgaagccgcagggattgcccggaaacaagaagtaacgagt

SEQ ID NO: 201911 - DNA, 75 bp, synthetic construct
  source 1..75: mol_type = other DNA
aaaagtgaaggataagctgcatttgtcagtgatgtccgaagttaaccgtcaggttatgcgtctgcaacagagatg

SEQ ID NO: 201912 - DNA, 75 bp, synthetic construct
  source 1..75: mol_type = other DNA
gtaaagaaaacgaatgtagaagggcagattgaaacgaataaagaagagattgaaaaggtaacattccactggcgt

SEQ ID NO: 201913 - DNA, 75 bp, synthetic construct
  source 1..75: mol_type = other DNA
accatgcagctcaacatcagcgaactgctgtggtcgttctgtaaaaaactggcgatcttctggctggtgtttggc

SEQ ID NO: 201914 - DNA, 75 bp, synthetic construct
  source 1..75: mol_type = other DNA
atttattgcttttgtttttgtcttgttatgccagaacacggcgtttgcgcgggcgtcatcgaatggtgatctgcc

SEQ ID NO: 201915 - DNA, 75 bp, synthetic construct
  source 1..75: mol_type = other DNA
gttaattgaagtgggcggcgtaggctatgaagtgcatatgccgatgacctgtttttatgaactccctgaagcggg

SEQ ID NO: 201916 - DNA, 75 bp, synthetic construct
  source 1..75: mol_type = other DNA
ggtggcgcaggccggttcattcaacatgaccgacatcgtcaacagccaggcgcatgtgtggaacgtcatcccgca

SEQ ID NO: 201917 - DNA, 75 bp, synthetic construct
  source 1..75: mol_type = other DNA
taatacggcagcagcaatagctggtgctacaggtaatgccagtaaggataccgggaatgataatagctgggatac

SEQ ID NO: 201918 - DNA, 75 bp, synthetic construct
  source 1..75: mol_type = other DNA
atgaaaaaactgttactgatctgtttgccggtgcttctcactggctgtggcgcgtttaatcaactggttgaacgt

SEQ ID NO: 201919 - DNA, 75 bp, synthetic construct
  source 1..75: mol_type = other DNA
gttgctgaaacagtgccgcgagcgcgggctgctggcacccattactgacgtggttaaacgtggcgcgctgtatat

SEQ ID NO: 201920 - DNA, 75 bp, synthetic construct
  source 1..75: mol_type = other DNA
gccaaaacagctgaagttctcgctccgcttggtgtttctgtcaccggtattcatagcgttgccgatcctgttgcc

SEQ ID NO: 201921 - DNA, 75 bp, synthetic construct
  source 1..75: mol_type = other DNA
gaatcagtctgagcggtggtggcagcttcggggataaatttcagggtaacatgccgggtggcatgatatccgccg

SEQ ID NO: 201922 - DNA, 75 bp, synthetic construct
  source 1..75: mol_type = other DNA
ttactatttagtgtatgatggtgattttaaggtgcttgcgtggcttccatttccatcagatgtccttcctgctcc

SEQ ID NO: 201923 - DNA, 75 bp, synthetic construct
  source 1..75: mol_type = other DNA
tgcggctgaatatggagtagcgcaggaaagaaaaagaatatttatcgtaggaatccgtaatgatttcaaagttaa

SEQ ID NO: 201924 - DNA, 75 bp, synthetic construct
  source 1..75: mol_type = other DNA
tttccagaaactgaacgggcttctattaatatgaagtatacagtagttggcaatgctgttccgcctcctttattt

SEQ ID NO: 201925 - DNA, 75 bp, synthetic construct
  source 1..75: mol_type = other DNA
atgaccaatattaatacagcttgtgtgaaaaataatgccagttatcaagttaataacgcatcacctaacaaagaa

SEQ ID NO: 201926 - DNA, 75 bp, synthetic construct
  source 1..75: mol_type = other DNA
agaagaagaaacaatattttctgacgcagaactaaaagctattctgcctatgcgtcgcatgtacggggttggtga

SEQ ID NO: 201927 - DNA, 75 bp, synthetic construct
  source 1..75: mol_type = other DNA
aaattaatatttctgatagttataaactgaaatttcttaatcttgattataacaagctagcatcgctggatctct

SEQ ID NO: 201928 - DNA, 75 bp, synthetic construct
  source 1..75: mol_type = other DNA
cgtcgtagttttgccagcactgagcgtgtggagcgtcttgaaaaccggatgaccgaaatggaaacccgctacgcc

SEQ ID NO: 201929 - DNA, 75 bp, synthetic construct
  source 1..75: mol_type = other DNA
ttttcgcagcaggtggtgttgcgcggtaaaaagcccgacacgctgtgggttaacaagcgagtggtagagtgccct

SEQ ID NO: 201930 - DNA, 75 bp, synthetic construct
  source 1..75: mol_type = other DNA
ttgcccaactgaatgaacgtattttagcggcggacaacacgccgctttatattaagtttgccgaaacagtaaaaa

SEQ ID NO: 201931 - DNA, 75 bp, synthetic construct
  source 1..75: mol_type = other DNA
cgtgggttccggcgcatttaattcatgatgttgatgccatcgggatttctctttatgactacttccgcagccagc

SEQ ID NO: 201932 - DNA, 75 bp, synthetic construct
  source 1..75: mol_type = other DNA
tcgctcagcgtgctggccccgggtgggcggctttcgatcatcagttttcattcgctggaagatcgtatagtgaaa

SEQ ID NO: 201933 - DNA, 75 bp, synthetic construct
  source 1..75: mol_type = other DNA
aggcaggaaaggctttgctggaacgaattagagaaggtaactggagcgatcaggtactcatcgctcccagtttgt

SEQ ID NO: 201934 - DNA, 75 bp, synthetic construct
  source 1..75: mol_type = other DNA
tatgtctcccaaccgcgttattaacgccgcgctgccaccggtattttccaccggggcgtcacaattgccggaatt

SEQ ID NO: 201935 - DNA, 75 bp, synthetic construct
  source 1..75: mol_type = other DNA
ggcaagcgcgcctggaatcagccttgccgatgttaactacgtaccgcaaaacaccagcgacgcgccagccattcc

SEQ ID NO: 201936 - DNA, 75 bp, synthetic construct
  source 1..75: mol_type = other DNA
ctactccagcgatttgccacttttactgctaccgccgcatcaacagacccggctgtgggaagcctttctggcctg

SEQ ID NO: 201937 - DNA, 75 bp, synthetic construct
  source 1..75: mol_type = other DNA
atgaaacggaaaatatggcgggcattttgctcttattacgcacagcatccctttgagaaagacgatgaagtgatc

SEQ ID NO: 201938 - DNA, 75 bp, synthetic construct
  source 1..75: mol_type = other DNA
gctctgaataccatgagctttccggacgcgctaaagatatgggatccgccgcggtgctgattgccattatcgtcg

SEQ ID NO: 201939 - DNA, 75 bp, synthetic construct
  source 1..75: mol_type = other DNA
ccctctgtttatcagcaggggtgctggcgagtgcgcctggaatcagcctggccaacgtcaactacgtaccgcaaa

SEQ ID NO: 201940 - DNA, 75 bp, synthetic construct
  source 1..75: mol_type = other DNA
accgatggcttactgaaactgaaagtgaaaacgaactccagttccagcgtgttggtcgggcctctatttggttct

SEQ ID NO: 201941 - DNA, 75 bp, synthetic construct
  source 1..75: mol_type = other DNA
ggtgctggagaaagtacggtaaggacggcccttgctcagcttgagaaggatggctggctttcccgtaagcagcgc

SEQ ID NO: 201942 - DNA, 75 bp, synthetic construct
  source 1..75: mol_type = other DNA
cgcaaccagaccctgaagtcgtgattactgatcaggcaattttggttctgacccatttgaaccaaatcagcggat

SEQ ID NO: 201943 - DNA, 75 bp, synthetic construct
  source 1..75: mol_type = other DNA
gcatacaacgctctgattgggggagcatctgcattaattcttcactttaatataaatgctggtagctgcccggct

SEQ ID NO: 201944 - DNA, 75 bp, synthetic construct
  source 1..75: mol_type = other DNA
ctgcattacttttgatttgtgctggcatagcaattcgctctcttccttcggcttacttattatttggcggtacga

SEQ ID NO: 201945 - DNA, 75 bp, synthetic construct
  source 1..75: mol_type = other DNA
tttcctctgctggctctttttttatggctgccacagtggcgaagccaacaacatgcaaatttgagtacctcgcgc

SEQ ID NO: 201946 - DNA, 75 bp, synthetic construct
  source 1..75: mol_type = other DNA
agtttattgagaaaggttaccgtaccgcccgtcgtcataccggtgcttatatcaccatcacacagaacatcgtcg

SEQ ID NO: 201947 - DNA, 75 bp, synthetic construct
  source 1..75: mol_type = other DNA
ttattatcactggtcagttagatgctctgaatatccagcaactgcaggcgtacaccgctatagggcaattgaact

SEQ ID NO: 201948 - DNA, 75 bp, synthetic construct
  source 1..75: mol_type = other DNA
atgaaaaacagaaaaaccaatgtgacggtcgtggggaaaaccgatagcggtaagacatccatcagcgttgacgtt

SEQ ID NO: 201949 - DNA, 75 bp, synthetic construct
  source 1..75: mol_type = other DNA
ttgactcgaaggcaatagagcctgcaaagttcgttaaaacatctaataatgctcagttgctaaaggaaaggttga

SEQ ID NO: 201950 - DNA, 75 bp, synthetic construct
  source 1..75: mol_type = other DNA
gtgaagtggataagaaaaagggaatgcgaaagtattcgtttgcagcccctgcaaatgtcgttgccgggaagtggt

SEQ ID NO: 201951 - DNA, 75 bp, synthetic construct
  source 1..75: mol_type = other DNA
agtaagttattcacactttcaagtgcaaataccgctgcccgtaatgcatcatttaacttgtggggaaattcgtca

SEQ ID NO: 201952 - DNA, 75 bp, synthetic construct
  source 1..75: mol_type = other DNA
gttcatatgcggcaggttatttttcgacgtatcagactaatgagcgcgcaatccattccattgtaacaagcctta

SEQ ID NO: 201953 - DNA, 75 bp, synthetic construct
  source 1..75: mol_type = other DNA
gcaaaaacaggattgtccttatcgctggcattctgatgattgccactacattacgcgtcaccttcaccggcgcag

SEQ ID NO: 201954 - DNA, 75 bp, synthetic construct
  source 1..75: mol_type = other DNA
ggggagcaattcaaagtcttgatgatgctgttagctgatctcgattatgaaaattacatccaaattgcccaagcc

SEQ ID NO: 201955 - DNA, 75 bp, synthetic construct
  source 1..75: mol_type = other DNA
acactgctacaggggaagaggtaggtagttttgtcgcagttatccgacccaaacagaagtcagcttttgagaggc

SEQ ID NO: 201956 - DNA, 75 bp, synthetic construct
  source 1..75: mol_type = other DNA
acctgctgtctgcacgtgtgattgccgttacaggtttaatcgcagcacttggcaatttaggtctatgcccaatag

SEQ ID NO: 201957 - DNA, 75 bp, synthetic construct
  source 1..75: mol_type = other DNA
gttatcaggttgccagtgtggttggcggtggatttacaccttttattgccgctgcactcatcacttactttgccg

SEQ ID NO: 201958 - DNA, 75 bp, synthetic construct
  source 1..75: mol_type = other DNA
tgggatggctggttcagacttcaggatatgcaggatatggttgagggttacctggtgatgaagtctcttgatcag

SEQ ID NO: 201959 - DNA, 75 bp, synthetic construct
  source 1..75: mol_type = other DNA
tcccgacaacagcggccaggcgctcccgctcacgtatgtctgttgccgggagcaggcagaggacggcgcctgctg

SEQ ID NO: 201960 - DNA, 75 bp, synthetic construct
  source 1..75: mol_type = other DNA
gattggctggcttttcaggagtaaagctgacagtaatgagcaacgcattatgtatgttctgctgaccgctcatat

SEQ ID NO: 201961 - DNA, 75 bp, synthetic construct
  source 1..75: mol_type = other DNA
atcaataaagtcccgtataacttcgttgacgtgaatgtacaggggattcaggtgtggcatttgagagaagtggtc

SEQ ID NO: 201962 - DNA, 75 bp, synthetic construct
  source 1..75: mol_type = other DNA
tcctcagcctttcatttttacttgccgcatgtagttcgattccgcagaatatcaaaggcaacaaccaaccagata

SEQ ID NO: 201963 - DNA, 75 bp, synthetic construct
  source 1..75: mol_type = other DNA
tttctacggcgggcggttcttttggtatttttgatggtaacgtgttggcgctgtctctgcgtgctgtccagagta

SEQ ID NO: 201964 - DNA, 75 bp, synthetic construct
  source 1..75: mol_type = other DNA
ttccagttataagtaaaattcctcttataggctggattttcagtagcaaggcatacagcaatgaacagcgtatta

SEQ ID NO: 201965 - DNA, 75 bp, synthetic construct
  source 1..75: mol_type = other DNA
cgttattgttaaccctgatgttaaaggagccgtaacggtatttaatgctgatgttaatcccacaaatattgataa

SEQ ID NO: 201966 - DNA, 75 bp, synthetic construct
  source 1..75: mol_type = other DNA
ggcgctttgctgggaacctgcggttatctgctgttcttctgggtttccgtctggtcactgccggtggcgttggtt

SEQ ID NO: 201967 - DNA, 75 bp, synthetic construct
  source 1..75: mol_type = other DNA
tcacggaccggcagtacagctacaacggtcaggatgaactgctgaagacgcggcacagccggcggggggaaaagg

SEQ ID NO: 201968 - DNA, 75 bp, synthetic construct
  source 1..75: mol_type = other DNA
ggaaacggggctgcactacaatctgcaccgttactatgatccggatgtcgggcggttcatagtaacggatccgat

SEQ ID NO: 201969 - DNA, 75 bp, synthetic construct
  source 1..75: mol_type = other DNA
acgtgattactcgtattatggggctgctgctgatggcattagggattgaatttattgttaatggaatcaaaggga

SEQ ID NO: 201970 - DNA, 75 bp, synthetic construct
  source 1..75: mol_type = other DNA
aatcagaaaccgcggtacgtgaaagcattggtgtggtgccattggcgttgccgttgatggcggggccaggggcga

SEQ ID NO: 201971 - DNA, 75 bp, synthetic construct
  source 1..75: mol_type = other DNA
aacctgtcggtagcgatcatcttgtggattgcgctttttcttggcgacacgattctgcaactttttggcatctcg

SEQ ID NO: 201972 - DNA, 75 bp, synthetic construct
  source 1..75: mol_type = other DNA
atgacggacagtgacgggaaaatcgtgtgggagacggggtatcaggtctggggtaacacgatacaggagaaggac

SEQ ID NO: 201973 - DNA, 75 bp, synthetic construct
  source 1..75: mol_type = other DNA
atgactatgttccagtattacaaacgatcacggcattttgttttttcagcatttattgtttttgtcttgttatgc

SEQ ID NO: 201974 - DNA, 75 bp, synthetic construct
  source 1..75: mol_type = other DNA
tggctgaaagcgtatcaacaaaaactggcttccgccgtaggttccctgcgtaacgacagccagctcaacacacca

SEQ ID NO: 201975 - DNA, 75 bp, synthetic construct
  source 1..75: mol_type = other DNA
gcagcctgtatatctacagtgaccaggggagttatgaaccgctggcgcgggtggacaaggcgggcaaagagggac

SEQ ID NO: 201976 - DNA, 75 bp, synthetic construct
  source 1..75: mol_type = other DNA
gctggatcgatccccttggattaacgaagaagtgtatgggcgtgagtgaatctggacatcatgttcctgcggttc

SEQ ID NO: 201977 - DNA, 75 bp, synthetic construct
  source 1..75: mol_type = other DNA
cacaggtactatgatccggatgtcgggcggttcatggtaacggacccgatagggctaagaggcgggttaaacctg

SEQ ID NO: 201978 - DNA, 75 bp, synthetic construct
  source 1..75: mol_type = other DNA
gtatcacagtagagcaattggatgaactgagaacacaaactaaaggtacaggctgctcaatgattcaggtcttga

SEQ ID NO: 201979 - DNA, 75 bp, synthetic construct
  source 1..75: mol_type = other DNA
tctgaacaactacattagtgatgaagacatagaacgagatttatcgcagtggatgaatgcaccgttagctgattt

SEQ ID NO: 201980 - DNA, 75 bp, synthetic construct
  source 1..75: mol_type = other DNA
tggggagatatggggcattatatggacgctgatttttattcagaaatatattggtcttctaataccgcaggtgga

SEQ ID NO: 201981 - DNA, 75 bp, synthetic construct
  source 1..75: mol_type = other DNA
gtatcgcaacgctgatccccgtgttgaatggtgttcaccaggcgggtctgagtaccacgatagaattcattagcg

SEQ ID NO: 201982 - DNA, 75 bp, synthetic construct
  source 1..75: mol_type = other DNA
tatacaacaaagccgatttgtttagtagtcgtaatcgggggagtttaacttgtcctcttatacgtggcgctataa

SEQ ID NO: 201983 - DNA, 75 bp, synthetic construct
  source 1..75: mol_type = other DNA
cgaacaaaagtttatataaaagttggcgataaagttaaaactcctttattacaacgtgtcttaatgggtaagttt

SEQ ID NO: 201984 - DNA, 75 bp, synthetic construct
  source 1..75: mol_type = other DNA
gtgcaatcaggtacaaacgtgccctatatgaaaattagcgcaattgattacagtcaaaatatcaacggtgattac

SEQ ID NO: 201985 - DNA, 75 bp, synthetic construct
  source 1..75: mol_type = other DNA
ccatcgtcagtaaatctgacgcggaaacacgccttaaagagtacggcgttaaaagtatcaatgtgcctgacggcg

SEQ ID NO: 201986 - DNA, 75 bp, synthetic construct
  source 1..75: mol_type = other DNA
cagtgacgcgctgctgaacgacattgccgcagacaaccctgagctggcagcgtcaatgcgcgagaacattgccgc

SEQ ID NO: 201987 - DNA, 75 bp, synthetic construct
  source 1..75: mol_type = other DNA
ttcacgtcagcgacctagcagagttcatcgacaaaaagagaaaggaagcaaaggaagaacttaaaagaatgcagt

SEQ ID NO: 201988 - DNA, 75 bp, synthetic construct
  source 1..75: mol_type = other DNA
caactggctaacgatccgaactcgaccattgtcgccaaatcagatgccgatgctcgcctgaaagagtacggtgtg

SEQ ID NO: 201989 - DNA, 75 bp, synthetic construct
  source 1..75: mol_type = other DNA
gatccgtgcagaggccagtgacgactctatcggaaaagcgtaccgcgctttcgccgcctgtctgattaaccgggg

SEQ ID NO: 201990 - DNA, 75 bp, synthetic construct
  source 1..75: mol_type = other DNA
tgacgacttggcgccgttgatagcccagcgtgcgcaacagattcgcgaaagcatgcagatgtcgcctgtggctgg

SEQ ID NO: 201991 - DNA, 75 bp, synthetic construct
  source 1..75: mol_type = other DNA
tacaaaaatgccggaaagacccgtcgtcaaggcgctgaactggcatgggatcaacgtttcgcaggagattttcgc

SEQ ID NO: 201992 - DNA, 75 bp, synthetic construct
  source 1..75: mol_type = other DNA
atttggtcgtgtcgataatttattcgataaaggatatgtcggctcggtgattgttaatgaatcgaatggtcgata

SEQ ID NO: 201993 - DNA, 75 bp, synthetic construct
  source 1..75: mol_type = other DNA
gcggttcacgctatcagtgaagcggatctcatcattattgggcctggcagtttttataccagcctgatgccaatt

SEQ ID NO: 201994 - DNA, 75 bp, synthetic construct
  source 1..75: mol_type = other DNA
gatgcgctgaaccggaaagttctgctgaatgaatctgttctggatgtcgctctgcagcgggcagaagagctggca

SEQ ID NO: 201995 - DNA, 75 bp, synthetic construct
  source 1..75: mol_type = other DNA
ttaaatggtcaagctcatcaaacggtgtaacgaaggtaaaaatcgggtttatcgtcgaggtgattcctcctggtg

SEQ ID NO: 201996 - DNA, 75 bp, synthetic construct
  source 1..75: mol_type = other DNA
ttgaccgtgtcgataatttgtttgataaagaatatatcggttccgttattgtcaatgaatcaaatgggcgttatt

SEQ ID NO: 201997 - DNA, 75 bp, synthetic construct
  source 1..75: mol_type = other DNA
gccgggtgctgtgaaagaattttcacggaagaagctgataacctaaacgtacttcttggtattaaggcgctggaa

SEQ ID NO: 201998 - DNA, 75 bp, synthetic construct
  source 1..75: mol_type = other DNA
ccggggtaaagcacgactcggcgcacaccgaccatgtgaccatccagaactacaagcgcaacgtgctgcgtaccc

SEQ ID NO: 201999 - DNA, 75 bp, synthetic construct
  source 1..75: mol_type = other DNA
ccgggaaacagcagcgcggggaaggttttgaactgcgtaccgatctgtggggtgcagtacgggcaaagaaaggca

SEQ ID NO: 202000 - DNA, 75 bp, synthetic construct
  source 1..75: mol_type = other DNA
ttaaaggcgctggatcaccttagcgtgcggcctctggaagccatcaatttaattcgtaatctgctgaaagtggat

SEQ ID NO: 202001 - DNA, 75 bp, synthetic construct
  source 1..75: mol_type = other DNA
ctggaggccagcgatattccgtatcgtcatgaccgccagttgttacatagcgcgctggaaaaggcattacaggct

SEQ ID NO: 202002 - DNA, 75 bp, synthetic construct
  source 1..75: mol_type = other DNA
gtgctgcgcacccctgccaacaacaaaatccggctggatgatgagcgcggcaaagagcatatcaaggtcagtacc

SEQ ID NO: 202003 - DNA, 75 bp, synthetic construct
  source 1..75: mol_type = other DNA
gaaacgctgaatgcgcaggttattgagctgaaacagcaactgtcccgtatggaaacggaaagtaaggctgctgct

SEQ ID NO: 202004 - DNA, 75 bp, synthetic construct
  source 1..75: mol_type = other DNA
aaccgttcacctggcaacaaaaaacgctttatctcacggtaagtattggcgtcggtagtggttgcgcatcgtacc

SEQ ID NO: 202005 - DNA, 75 bp, synthetic construct
  source 1..75: mol_type = other DNA
ctccgttaaacaaagctatttccggtcgttacgatggcggtttcccatgtggtcgtatcgtagaagtattcgggc

SEQ ID NO: 202006 - DNA, 75 bp, synthetic construct
  source 1..75: mol_type = other DNA
atcaaagcacaaaacgtgaaagttaataatgaaagtatcttactgcctccattttcgaataacgacattacatta

SEQ ID NO: 202007 - DNA, 75 bp, synthetic construct
  source 1..75: mol_type = other DNA
gctggcgaaacgtgcctgggacgagcgagaagtgccggtcggcgcggtattagtgcataacaatcgggtaatcgg

SEQ ID NO: 202008 - DNA, 75 bp, synthetic construct
  source 1..75: mol_type = other DNA
aaggtattctggcggatgagtgcgcggcgctgctcagtgatttttttcgcatgcgccgccaggaaattaaggccc

SEQ ID NO: 202009 - DNA, 75 bp, synthetic construct
  source 1..75: mol_type = other DNA
gaaagcgcccctgaggttggtgaggggcgtagcgggaacggaatacccgttaatggcgatcaaaactcacttctt

SEQ ID NO: 202010 - DNA, 75 bp, synthetic construct
  source 1..75: mol_type = other DNA
catttttccgggctgatgtacgccgtactcagcctgtttttttgcgatccggatatgcatccggcggatttcagc

SEQ ID NO: 202011 - DNA, 75 bp, synthetic construct
  source 1..75: mol_type = other DNA
atgaaacaccctttagaaaccttgaccaccgcagcaggcattttgctgatggctttcctctcttgcctgctgctt

SEQ ID NO: 202012 - DNA, 75 bp, synthetic construct
  source 1..75: mol_type = other DNA
ttgaagaggtgaaaccagttgcagaacccgcgtccggtgaaagcaccgggaagaatatgtcatctctggccggaa

SEQ ID NO: 202013 - DNA, 75 bp, synthetic construct
  source 1..75: mol_type = other DNA
acattgagtttatttcgattacggaagggataaaaattagcacttcaattggccgctttgcctacacgatgctga

SEQ ID NO: 202014 - DNA, 75 bp, synthetic construct
  source 1..75: mol_type = other DNA
tcctgatggacagcccggaagcactggggcacgcactgtgtaatctgctgccggagatggtgcagggtttccgcg

SEQ ID NO: 202015 - DNA, 75 bp, synthetic construct
  source 1..75: mol_type = other DNA
ccggagatggtgcagggtttccgcgtggtgaccccttccggtgaaatctgcgtacccgcacaggagacgcacccg

SEQ ID NO: 202016 - DNA, 75 bp, synthetic construct
  source 1..75: mol_type = other DNA
ggcacacattaaatcactggatatctggtttaagggtgatgttgtggaacgttatgattttcgtcagaccgcaag

SEQ ID NO: 202017 - DNA, 75 bp, synthetic construct
  source 1..75: mol_type = other DNA
caactgatggtcaggagatgtggagctactccagcatgacgggagaaagccaactatctaactacataccggggc

SEQ ID NO: 202018 - DNA, 75 bp, synthetic construct
  source 1..75: mol_type = other DNA
gaacctgtggccaccgtgtttcagtatcatgtttttcagagagtatctttgtaaaaaaacatatttctgaaatat

SEQ ID NO: 202019 - DNA, 75 bp, synthetic construct
  source 1..75: mol_type = other DNA
tgatggttggtgcaatgggaatgatcgggattggcatgaaaaaatgaagggctatatctgcgattttttacgtaa

SEQ ID NO: 202020 - DNA, 75 bp, synthetic construct
  source 1..75: mol_type = other DNA
tactggacgagccagaaggctttgaattacatgaccgactggcaatatcaagcgctatgttcatatcgaaagccc

SEQ ID NO: 202021 - DNA, 75 bp, synthetic construct
  source 1..75: mol_type = other DNA
ttatcatacttccgcttggtggctgtaccgttcatggcaataaatccctaactgatgaaaatcatcagacggtta

SEQ ID NO: 202022 - DNA, 75 bp, synthetic construct
  source 1..75: mol_type = other DNA
tgtgatgattgcttttgtggcatatttttggattgtgatgattgcttttgtggcatatttggctttcatttttga

SEQ ID NO: 202023 - DNA, 75 bp, synthetic construct
  source 1..75: mol_type = other DNA
cctcttttgctactgtcagcagcgattgcgctggcggttacaatttcgataagatcttatgggcgatttttatcg

SEQ ID NO: 202024 - DNA, 75 bp, synthetic construct
  source 1..75: mol_type = other DNA
ttgaatcaaaaggattcatgtatcaagggagcattcaatcggcggatgtcgaaaatgaatttcctggaattcttt

SEQ ID NO: 202025 - DNA, 75 bp, synthetic construct
  source 1..75: mol_type = other DNA
gatcaggaagaagacttatttcagtcaaatgtttttcggaagtgtcttttattcgccatcaccgaattgagttta

SEQ ID NO: 202026 - DNA, 75 bp, synthetic construct
  source 1..75: mol_type = other DNA
gaaaacgccgacaagctgtacatcgtacaggttgatgtgggtgaaaaaacgctgcaaaccgtgaccagcctggtg

SEQ ID NO: 202027 - DNA, 75 bp, synthetic construct
  source 1..75: mol_type = other DNA
tggtataaacctcaattaaaaaaagaatatcagatgctttgttataataatagttggtattatattcttgctcgt

SEQ ID NO: 202028 - DNA, 75 bp, synthetic construct
  source 1..75: mol_type = other DNA
atcgctgggatctggaagaagaagcggaaaacttaattcaggaacaaagtgaagatgatcaaggctgggtctggt

SEQ ID NO: 202029 - DNA, 75 bp, synthetic construct
  source 1..75: mol_type = other DNA
ccagaaactgtccgatgacgcgacgacggcgaacgccgacccggcggatatggccgcgcagatagcattgataac

SEQ ID NO: 202030 - DNA, 75 bp, synthetic construct
  source 1..75: mol_type = other DNA
tgataaccagccggataaatgacctgaccgcctcggtgattttgatgcacgcgccgaaaggtgtggcggtcgcca

SEQ ID NO: 202031 - DNA, 75 bp, synthetic construct
  source 1..75: mol_type = other DNA
tcaggtacgcgaaatggccgacattatcagcgaactgaacagcctgagcgataaaatccagaaactgtctgacga

SEQ ID NO: 202032 - DNA, 75 bp, synthetic construct
  source 1..75: mol_type = other DNA
tcagcgccgacgcgcaggataaggcgcagggtcaggtacgcgaaatggccgacattatcagcgaactgaacagcc

SEQ ID NO: 202033 - DNA, 75 bp, synthetic construct
  source 1..75: mol_type = other DNA
tgattgccaataaaggcgcagtatcggtacaggcgcagcacgatctgatggagttactggcgaaaaaatcgatag

SEQ ID NO: 202034 - DNA, 75 bp, synthetic construct
  source 1..75: mol_type = other DNA
atgtgaccattcagaactacaagcgtaacgtgctgcgcaccccggcgaacaacaaaatccgcctcgacgatgagc

SEQ ID NO: 202035 - DNA, 75 bp, synthetic construct
  source 1..75: mol_type = other DNA
tcttctttcgacaatgacaatttcagcggtggcggcggttcatctggtggcggtggcgcttccgggcgctggtaa

SEQ ID NO: 202036 - DNA, 75 bp, synthetic construct
  source 1..75: mol_type = other DNA
gacctggaagaagaagcggaaaacttaattcaggaacaaagtgaagatgatcaaggttgggtctggttaccctga

SEQ ID NO: 202037 - DNA, 75 bp, synthetic construct
  source 1..75: mol_type = other DNA
cattggttagcgaattttcgtcaacatcgctgggatctggaagaagaagctgaaagcttgattcaggatcaaggc

SEQ ID NO: 202038 - DNA, 75 bp, synthetic construct
  source 1..75: mol_type = other DNA
aaatcacccttaacggcggtggcagctacatccggctggatgcctgcgggatagaagcgggaacgccgggagaat

SEQ ID NO: 202039 - DNA, 75 bp, synthetic construct
  source 1..75: mol_type = other DNA
tttccacgccggataaaccgcgcacggtggcgccttatgccacctatcgcgtgggactctatttcggtggtgata

SEQ ID NO: 202040 - DNA, 75 bp, synthetic construct
  source 1..75: mol_type = other DNA
tgcgtgaaattctcgctctcccgcttttcagtgacttagttcagtgtggtttcccaagtccagcagctgattacg

SEQ ID NO: 202041 - DNA, 75 bp, synthetic construct
  source 1..75: mol_type = other DNA
tttcaccattaagcggttgcagctaagcccggctcccgcgctactgccaatgaatagccggatgtcaccgatcta

SEQ ID NO: 202042 - DNA, 75 bp, synthetic construct
  source 1..75: mol_type = other DNA
caatcgccggttgaattaaaacgtgcctatggtgaatcggcttccctcgggaacctggcggctgacgctttactg

SEQ ID NO: 202043 - DNA, 75 bp, synthetic construct
  source 1..75: mol_type = other DNA
cttaaaagatactttatagactcatttgctaaaacaagtatcactgacagagaaaagaatatatatcctgtgatt

SEQ ID NO: 202044 - DNA, 75 bp, synthetic construct
  source 1..75: mol_type = other DNA
ggtattgccaatatgtcattatctatatacgcatactcgacatgtcgtttctggtcaaaagaaagtgtggctgta

SEQ ID NO: 202045 - DNA, 75 bp, synthetic construct
  source 1..75: mol_type = other DNA
acgtatttcgtcaaagccgcgggcgattctatgatcgaagccgggatcagcgacggtgatctgctggtagtggac

SEQ ID NO: 202046 - DNA, 75 bp, synthetic construct
  source 1..75: mol_type = other DNA
cgcttccgtgttcgcagtaggcgaagacggtaaagtgctgtcagatgcgcatttcattttcttcaataacaaaac

SEQ ID NO: 202047 - DNA, 75 bp, synthetic construct
  source 1..75: mol_type = other DNA
cgaatatcgcgttgataaactacccgaagcaggccgcctttggtcgtaccctgccaaagaataagatctacgaac

SEQ ID NO: 202048 - DNA, 75 bp, synthetic construct
  source 1..75: mol_type = other DNA
agtctcgcggacttggtcgcacgtgtcgaaatggttgcagccaagcagcgtgaggttgagaaagctgccagtaga

SEQ ID NO: 202049 - DNA, 75 bp, synthetic construct
  source 1..75: mol_type = other DNA
cagttgagtcaggcaaaattccctattgtgcagggcaatgttttttatcagaacagcagtaaatcattctgggat

SEQ ID NO: 202050 - DNA, 75 bp, synthetic construct
  source 1..75: mol_type = other DNA
aaacgaaacaggtgattgatagttggaacaaaaagctggatgaagtcagcaaacggtggcgcaatcgccggttga

SEQ ID NO: 202051 - DNA, 75 bp, synthetic construct
  source 1..75: mol_type = other DNA
aattattgatatcatgaataccatgccatttgatgctgtgacaatgggaaatcatgaattcgatcatggctggga

SEQ ID NO: 202052 - DNA, 75 bp, synthetic construct
  source 1..75: mol_type = other DNA
tttttaaaattgcttcttcgagtaattcggttgttgtggataaaaatacgctcactcaaaaaaacctcctcgaaa

SEQ ID NO: 202053 - DNA, 75 bp, synthetic construct
  source 1..75: mol_type = other DNA
tcttgagcgtacggtacgcgaactcaacggcgagtcctgcatatccctggaagaagcaccaccggcaaaacagca

SEQ ID NO: 202054 - DNA, 75 bp, synthetic construct
  source 1..75: mol_type = other DNA
agtgtggtttgcggggcgaggaaccgcccctgaatggcaaatgaaacgggaaatgctatcgccttcgtatacaac

SEQ ID NO: 202055 - DNA, 75 bp, synthetic construct
  source 1..75: mol_type = other DNA
caactggcgttaacaaactctggtggtatccgcaatgagatccccgcaggggcgatcacgatgggcggcgttatc

SEQ ID NO: 202056 - DNA, 75 bp, synthetic construct
  source 1..75: mol_type = other DNA
acgctgagcggaatgctgctggcggcctggtattatggcgctttagatgcgcgctccggtcgcccgttttttgcc

SEQ ID NO: 202057 - DNA, 75 bp, synthetic construct
  source 1..75: mol_type = other DNA
aaaagccccgtaagcaacactcgcctgaatttcgcaatgaagccctgaagcttgcagaacgcatcggtgttgctg

SEQ ID NO: 202058 - DNA, 75 bp, synthetic construct
  source 1..75: mol_type = other DNA
tgagcgggccgcagagaaactacgtggggagcgtcagtattgccggcaggtgacgacatttgtacggacatcccc

SEQ ID NO: 202059 - DNA, 75 bp, synthetic construct
  source 1..75: mol_type = other DNA
cctcgaaaacaatacatttttcagtattacaggtatagatgagtctctctatgaaaagcatataatctttatcac

SEQ ID NO: 202060 - DNA, 75 bp, synthetic construct
  source 1..75: mol_type = other DNA
ctgtaggagatacaataaaattgtctaattatgagcatgttgagtttagctttaattcatttagtaaggattact

SEQ ID NO: 202061 - DNA, 75 bp, synthetic construct
  source 1..75: mol_type = other DNA
tggtatatgtggtgtcagtggcggataaggataagtacacgtcggcagttccgtcagcactgcgacagcgttgtc

SEQ ID NO: 202062 - DNA, 75 bp, synthetic construct
  source 1..75: mol_type = other DNA
tggccacgatcacggtcatgaacacggtggcgaaggctgctgtggcggtaaaggcaacggcggttgcggttgcca

SEQ ID NO: 202063 - DNA, 75 bp, synthetic construct
  source 1..75: mol_type = other DNA
aggtatgcgcttcctggctgaaaccgaccagggtccagtaccggttgaaattactgcggttgaagacgatcacgt

SEQ ID NO: 202064 - DNA, 75 bp, synthetic construct
  source 1..75: mol_type = other DNA
agaagacggtgtattggttgatgagtctccggtaagtgcgccgctggactacctgcatggtcacggttctctgat

SEQ ID NO: 202065 - DNA, 75 bp, synthetic construct
  source 1..75: mol_type = other DNA
attctgctgccagacctgatgaccgttgagcaggaagatattattcctaacgactacgccggtaacatgggatat

SEQ ID NO: 202066 - DNA, 75 bp, synthetic construct
  source 1..75: mol_type = other DNA
gccggatataaacccagcctgtggcaactaatgatgatcgcacgccgccggaaaacgatgattttgtgcgcaagt

SEQ ID NO: 202067 - DNA, 75 bp, synthetic construct
  source 1..75: mol_type = other DNA
tatcaaaattatatttcatatggcaaataagcctttttaagaccctagcgaataaacgacgtagttcagtgaata

SEQ ID NO: 202068 - DNA, 75 bp, synthetic construct
  source 1..75: mol_type = other DNA
gcagcgttatccgcgtacgccgggcaatatggcggcggtatttaaatatatcgcctcactggcggatgaactgcg

SEQ ID NO: 202069 - DNA, 75 bp, synthetic construct
  source 1..75: mol_type = other DNA
cgccactggacctacgctcataacgggcaattgagaggctacaaatcactggaaaccggcaacttccgtccggta

SEQ ID NO: 202070 - DNA, 75 bp, synthetic construct
  source 1..75: mol_type = other DNA
atgtgcgaattgctcgggatgagcgccaacgtccctaccgatatctgctttagtttcaccggacttgtacagcgt

SEQ ID NO: 202071 - DNA, 75 bp, synthetic construct
  source 1..75: mol_type = other DNA
ttccggcgttcgataaagttgtgttctcttgtccggtactggagccgaccggcccgctgcacacccagttcggtt

SEQ ID NO: 202072 - DNA, 75 bp, synthetic construct
  source 1..75: mol_type = other DNA
ggtgaattccgccagggtcagatggttccggcgttcgataaagttgtgttctcttgtccggtactggagccaacc

SEQ ID NO: 202073 - DNA, 75 bp, synthetic construct
  source 1..75: mol_type = other DNA
aaatcatggcgctgcggcaaggagggctggtgttgcagaattatcgcctgatcgacgccacgttgtatgtcacgc

SEQ ID NO: 202074 - DNA, 75 bp, synthetic construct
  source 1..75: mol_type = other DNA
tacggatgcgcagtccgggaaaattattcgcaacagtattattccggcatttaaaaaaggcgacctggctggcgg

SEQ ID NO: 202075 - DNA, 75 bp, synthetic construct
  source 1..75: mol_type = other DNA
acattaaatttatttccttttggtcttgtaatggtgcccgttatattattttattttgcacctgacagttttctc

SEQ ID NO: 202076 - DNA, 75 bp, synthetic construct
  source 1..75: mol_type = other DNA
gaagcgttttctgtatccataaatgcaaaagtattttgtatgcgtggttttaaatttattgatggtgaatattaa

SEQ ID NO: 202077 - DNA, 75 bp, synthetic construct
  source 1..75: mol_type = other DNA
cttgcaacaaggtattggtgatattgaaacccgattatcagaaaatgatttagtcaataatacatcgcccgatca

SEQ ID NO: 202078 - DNA, 75 bp, synthetic construct
  source 1..75: mol_type = other DNA
ccgctgtttatgttgtgcatcggtgcgctgtgtgtgctgatttcgaccttcgcggtcagcgcctcgtcgttgttc

SEQ ID NO: 202079 - DNA, 75 bp, synthetic construct
  source 1..75: mol_type = other DNA
aaatcagtctggtcattgccggaaggtcgcattctgactggagcagttaccgtattgacagtgatttcctgaaag

SEQ ID NO: 202080 - DNA, 75 bp, synthetic construct
  source 1..75: mol_type = other DNA
gtcctgtggcagcccggccagcgtgtgcggattgtcagcgaaccccacggcatcgatgccatcttttttctgatg

SEQ ID NO: 202081 - DNA, 75 bp, synthetic construct
  source 1..75: mol_type = other DNA
agccggatgtttactctgatgcggcaactggactggctctctttgttgaattttgaagtgctacacgccagccgt

SEQ ID NO: 202082 - DNA, 75 bp, synthetic construct
  source 1..75: mol_type = other DNA
gattgatgatggctggctggtgattagtggctttaatcccatcagttttatgggattacgcaaacttgtgccttc

SEQ ID NO: 202083 - DNA, 75 bp, synthetic construct
  source 1..75: mol_type = other DNA
tttttgattaaatgctttaatggtgatggttatgttctttattataaaagaatagaaatcagtgcaaataaacag

SEQ ID NO: 202084 - DNA, 75 bp, synthetic construct
  source 1..75: mol_type = other DNA
atgcagtttgctggcgtgttgagtcagggcggtgagtttgcctttgtcctcttttctaccgcttcttcacaacgc

SEQ ID NO: 202085 - DNA, 75 bp, synthetic construct
  source 1..75: mol_type = other DNA
cgtcaagtgtgtatccaggcgtcagggttttgctgagtagtgttgaagcgtttcgtttacgtttttatgctaatg

SEQ ID NO: 202086 - DNA, 75 bp, synthetic construct
  source 1..75: mol_type = other DNA
ggaatgacagaacatcaacttaatgcgcagctgacaaagattgaccgtgagcgctctgatggagaaagaagatag

SEQ ID NO: 202087 - DNA, 75 bp, synthetic construct
  source 1..75: mol_type = other DNA
tgggatgcactggctaaagctgccgccggtcgcggcttatggccgtggtttgagcctgacggtacgctggttgtg

SEQ ID NO: 202088 - DNA, 75 bp, synthetic construct
  source 1..75: mol_type = other DNA
gtagcgcactggaacctgttaacgatgcagccagacaggcaaaagcaaaggtagtaggaaaggtgactatggcag

SEQ ID NO: 202089 - DNA, 75 bp, synthetic construct
  source 1..75: mol_type = other DNA
gcaaagcacaaaggcgaaccaacggttgtcgttgctgagcatgagccgctgaacgatgcggatagcgctgatgat

SEQ ID NO: 202090 - DNA, 75 bp, synthetic construct
  source 1..75: mol_type = other DNA
gaaaatataattgtatttatactataaagtcagaatttgaagaaaaaaatagtgaatattacacccagtttatta

SEQ ID NO: 202091 - DNA, 75 bp, synthetic construct
  source 1..75: mol_type = other DNA
ttcttaattatgctgaattaaacgaaaaggggctggcaaaactcgtcaaagaaatcagcaaaggtggttacaaga

SEQ ID NO: 202092 - DNA, 75 bp, synthetic construct
  source 1..75: mol_type = other DNA
atgcggagatggcgaaggcgttcgaatatatcctgaatcaccagaaaccggatctgcgcggcggaaaagccccag

SEQ ID NO: 202093 - DNA, 75 bp, synthetic construct
  source 1..75: mol_type = other DNA
gttactcctcgcgcccaccagaaattctgctcactcacccactaccggaaagccgtctggctgatgcccgtaacc

SEQ ID NO: 202094 - DNA, 75 bp, synthetic construct
  source 1..75: mol_type = other DNA
gctgactggcggcaaagcccgctgttcagcgatgaggagcggctggcgctggaatacgccgaagccgcgagcgtt

SEQ ID NO: 202095 - DNA, 75 bp, synthetic construct
  source 1..75: mol_type = other DNA
gcgcaaatgtgcctgtgtgagttttgcgtggatatcaccagtatgaaagtcgccgagcgcactggcagcaccgat

SEQ ID NO: 202096 - DNA, 75 bp, synthetic construct
  source 1..75: mol_type = other DNA
ctggagcgcaaacgctcaccgctcgatccggtagtacgatcgcttgtcagcgcgcgcattgcgcaaatgtgcctg

SEQ ID NO: 202097 - DNA, 75 bp, synthetic construct
  source 1..75: mol_type = other DNA
ttaaggagtcgaattttatcctgaattccttactgcttgcacctgtgggtgaatctcacctggttactgtcggtg

SEQ ID NO: 202098 - DNA, 75 bp, synthetic construct
  source 1..75: mol_type = other DNA
acgataaccccgccggtctgaatgccaatgtcacaggttttatgactgacttctccaacaagattgtctcttatt

SEQ ID NO: 202099 - DNA, 75 bp, synthetic construct
  source 1..75: mol_type = other DNA
tagtcattccctgtctcggattttcagccagcagcatagctgctgcagaggatgtgatgattgtctctgcatccg

SEQ ID NO: 202100 - DNA, 75 bp, synthetic construct
  source 1..75: mol_type = other DNA
gtattccaccaaagacacaatgtcagtgttaagtaacggcgtgttgcagtttgagctttatcgtcagcaaggaat

SEQ ID NO: 202101 - DNA, 75 bp, synthetic construct
  source 1..75: mol_type = other DNA
acagtgccggtaagagtacgctgtatgccggtgattacttccagacgggatcatcaacaacaggatatgtgatac

SEQ ID NO: 202102 - DNA, 75 bp, synthetic construct
  source 1..75: mol_type = other DNA
gaaagacggagttgtccttgccagcacaggtgaaactttccggcagaaaagctggtcggtatttgctgaggatga

SEQ ID NO: 202103 - DNA, 75 bp, synthetic construct
  source 1..75: mol_type = other DNA
gcacataggcagtgaaactcatagttatgtgcttcatatactgaactctcgtccacatccggaacaaagctatcg

SEQ ID NO: 202104 - DNA, 75 bp, synthetic construct
  source 1..75: mol_type = other DNA
gtttgaagcgcgaacattatccggttatccggtgctggtgagcgaagaaaatggcgttgtcacggggtatgcctc

SEQ ID NO: 202105 - DNA, 75 bp, synthetic construct
  source 1..75: mol_type = other DNA
ttataaccacgctgtactgcatacggcagctatctggaacgaccagactgtggatacagataaccgcattgcctg

SEQ ID NO: 202106 - DNA, 75 bp, synthetic construct
  source 1..75: mol_type = other DNA
gtttggcgactggcgtagtttcgatggttttcgccataccgtggaacattcggtttatgtccatcccgatcatca

SEQ ID NO: 202107 - DNA, 75 bp, synthetic construct
  source 1..75: mol_type = other DNA
actagtctaaaaactagtattaagactatcacttatttaagtgatattggttgtctggagattcagggggccagt

SEQ ID NO: 202108 - DNA, 75 bp, synthetic construct
  source 1..75: mol_type = other DNA
cagtttattcgtaaaaacattaagcaggaaattgatgagccagctactgttcttggtacaacaagtcccgcagga

SEQ ID NO: 202109 - DNA, 75 bp, synthetic construct
  source 1..75: mol_type = other DNA
agttacagttacaccctgggtgaagaaagtcagagttcatgccgattaccacgtggaaatcgacaaacattacta

SEQ ID NO: 202110 - DNA, 75 bp, synthetic construct
  source 1..75: mol_type = other DNA
cggtgattacttccagacgggggcatcaacaacgggctatgtgatacctgagcgaaattactggatgtcgctgaa

SEQ ID NO: 202111 - DNA, 75 bp, synthetic construct
  source 1..75: mol_type = other DNA
tcatactttcaccttcggaacatggaaatcgtatctgaactggaacgagacggaaaataaaggtcgtgagcttgt

SEQ ID NO: 202112 - DNA, 75 bp, synthetic construct
  source 1..75: mol_type = other DNA
cgacgtgacgcatttgagcagttggaccgcccggcactgggaccactgccggtgcatccctatcgctatgtcgcc

SEQ ID NO: 202113 - DNA, 75 bp, synthetic construct
  source 1..75: mol_type = other DNA
aggaatctaaccttatcctgaattcattgctgcttacccctctgggagaatctcatctggttactgtggggggcg

SEQ ID NO: 202114 - DNA, 75 bp, synthetic construct
  source 1..75: mol_type = other DNA
tggtttgatatggataccacccgacagcgttacgataaccaggatggtcaactgggtagcctgacagggggatat

SEQ ID NO: 202115 - DNA, 75 bp, synthetic construct
  source 1..75: mol_type = other DNA
gagcgacacatcagccacgcgtattccttatcccacggagtcacagaattataatcttggtgcgcgtattgactg

SEQ ID NO: 202116 - DNA, 75 bp, synthetic construct
  source 1..75: mol_type = other DNA
gacgccggacgtgtgctacaaaacgcggtattacccgcattccccgtgcgccgtcgcgccacagaaaaggtttaa

SEQ ID NO: 202117 - DNA, 75 bp, synthetic construct
  source 1..75: mol_type = other DNA
cagttaagcggcggtcagctccagcgcgtctgcctggctcgcgcgctggcggtcgaaccgaaactgctgattctg

SEQ ID NO: 202118 - DNA, 75 bp, synthetic construct
  source 1..75: mol_type = other DNA
atgactttacttaacgtctccgacctttcacaccagtacgcacacggtggattcagcggtaagcaccagcatcag

SEQ ID NO: 202119 - DNA, 75 bp, synthetic construct
  source 1..75: mol_type = other DNA
gtcgttatcatggtggttctgatgactggcgtacaccgtatcgtttatttcgtaatctgcatcgtgagtttaact

SEQ ID NO: 202120 - DNA, 75 bp, synthetic construct
  source 1..75: mol_type = other DNA
aagcacatcttcacaaacccgctttgccatgaaatccgtattcttcatcgcgcagttaaataccttccaccagca

SEQ ID NO: 202121 - DNA, 75 bp, synthetic construct
  source 1..75: mol_type = other DNA
ccctgaaaagcggtgaaaccgtcgccctgctgggacgcagcggctgcggaaaaagcaccctcgcgcggctgctgg

SEQ ID NO: 202122 - DNA, 75 bp, synthetic construct
  source 1..75: mol_type = other DNA
gaccactaaagaccctcaggtttgggcttcagtcgcttcaggtattaatctatggtcaaaagacggggagcaaag

SEQ ID NO: 202123 - DNA, 75 bp, synthetic construct
  source 1..75: mol_type = other DNA
acggacaactatgttcaatctcctgcaatcgttggcatatgaaccggaaacttttgaacgttgcgtcaggctgct

SEQ ID NO: 202124 - DNA, 75 bp, synthetic construct
  source 1..75: mol_type = other DNA
ttggatctgaccctctagatagaacctctgtaatctatgttgatacaggtgctgacccagccccctcggcaacgg

SEQ ID NO: 202125 - DNA, 75 bp, synthetic construct
  source 1..75: mol_type = other DNA
ccctgaaaagcggtgaaaccgtcgccctgctgggacgcagtggctgcggaaagagtaccctcgcgcggctgctgg

SEQ ID NO: 202126 - DNA, 75 bp, synthetic construct
  source 1..75: mol_type = other DNA
acacgcttgatgaatgggggactgtaaataaaggacgtaacctgcggtttagatatgtgctggaacagcgactgc

SEQ ID NO: 202127 - DNA, 75 bp, synthetic construct
  source 1..75: mol_type = other DNA
acttcgattcgaattagtcaaccttcatccttggcaggagtttactgaaatcgatctggatcgttgcatgtcgct

SEQ ID NO: 202128 - DNA, 75 bp, synthetic construct
  source 1..75: mol_type = other DNA
gagctccaatccaatcagtaccatgatctgggagaagccttaagagctgtcgaaggagtggatgtggaaagcggt

SEQ ID NO: 202129 - DNA, 75 bp, synthetic construct
  source 1..75: mol_type = other DNA
agcgagcgttacgaagcctcggcggaatttactcaggtctggcgacgtttattgctgggtgagactgtcgatttc

SEQ ID NO: 202130 - DNA, 75 bp, synthetic construct
  source 1..75: mol_type = other DNA
atgagtctgaatatgttctggtttttaccgacccacggtgacgggcattatcttggaacggaagaaggttcacgc

SEQ ID NO: 202131 - DNA, 75 bp, synthetic construct
  source 1..75: mol_type = other DNA
agcgtcagggctcatcggtcacatcactgagcgacacagcagccacgcgtattccttatcccacggagtcacaga

SEQ ID NO: 202132 - DNA, 75 bp, synthetic construct
  source 1..75: mol_type = other DNA
gttcatgcctcctctggccgcgattgagcgtattgaggttatcagggggccgatgtccacactgtatggctctga

SEQ ID NO: 202133 - DNA, 75 bp, synthetic construct
  source 1..75: mol_type = other DNA
atgagaaaaaactgaccaacgcagccgccagtgtttccgtaatcagtcaggaggaattgcagtccagccagtacc

SEQ ID NO: 202134 - DNA, 75 bp, synthetic construct
  source 1..75: mol_type = other DNA
tggagatcagccccaatttatgggcgggcgttggcttagtgcgcggcggtgccgggacggcgctggtgggcgatg

SEQ ID NO: 202135 - DNA, 75 bp, synthetic construct
  source 1..75: mol_type = other DNA
gtgtcacatccaataatccatatcggtcgttatcatggtggttctgatgactggcgtacaccgtatcgtttattt

SEQ ID NO: 202136 - DNA, 75 bp, synthetic construct
  source 1..75: mol_type = other DNA
gaaagcaacggacaaggatatgttctggcttgatatggatactgcacgacagcgttatgataaccgggacggcca

SEQ ID NO: 202137 - DNA, 75 bp, synthetic construct
  source 1..75: mol_type = other DNA
gaaaccggaagaaagtgtcagttatgaagctgggatatattatgataatttgaaagggctgaacacaaatattac

SEQ ID NO: 202138 - DNA, 75 bp, synthetic construct
  source 1..75: mol_type = other DNA
ctcggcatccggctatgagaaaaaactgactaatgcagccgccagtgtatccgtgatcaatcaggaggaattgca

SEQ ID NO: 202139 - DNA, 75 bp, synthetic construct
  source 1..75: mol_type = other DNA
gggatcagcggcgtatccgggcagggacgtacgaatctactcggtaaccccgaactgaagccggaagagagtgta

SEQ ID NO: 202140 - DNA, 75 bp, synthetic construct
  source 1..75: mol_type = other DNA
agacggggttgttctcaccagtacaggcgaaaccttccggcagaaaagctggtcggcatttgttgaggatgagtg

SEQ ID NO: 202141 - DNA, 75 bp, synthetic construct
  source 1..75: mol_type = other DNA
tgaccaccactgtcgttgccgttgacatcattctccagcagcactttgtcggcttcgacggcaaggtctgcgcgg

SEQ ID NO: 202142 - DNA, 75 bp, synthetic construct
  source 1..75: mol_type = other DNA
gtgcgcagccgatatttccgacaaaggtgaaggcgggggaatacacgggagcgctgacctttgtggtcacgtatc

SEQ ID NO: 202143 - DNA, 75 bp, synthetic construct
  source 1..75: mol_type = other DNA
caccggcagcggtacagggtggcgtgccacagacgtcagcagacggtgatgcggacgtgaaaatgctcatggcta

SEQ ID NO: 202144 - DNA, 75 bp, synthetic construct
  source 1..75: mol_type = other DNA
aacatggtcgggtacgggtgaagtttcactgggaccgttatcacgggatgacggaggagagttcgtgctgggtgc

SEQ ID NO: 202145 - DNA, 75 bp, synthetic construct
  source 1..75: mol_type = other DNA
agatattgccgatccgaaagaattagctcttcatcaaaaagaggttagacgtcttggggctagttatctttctga

SEQ ID NO: 202146 - DNA, 75 bp, synthetic construct
  source 1..75: mol_type = other DNA
tgaccaccaccgtgacagccggtgccgcactgacgcaacagcgctttgtcggggccgataacgcgccctgtcagg

SEQ ID NO: 202147 - DNA, 75 bp, synthetic construct
  source 1..75: mol_type = other DNA
agcaacggtcacgttctgcgggtttgcctggtcagcaccgaaagccagaaagtcgtgtgtgaattactggggcgt

SEQ ID NO: 202148 - DNA, 75 bp, synthetic construct
  source 1..75: mol_type = other DNA
atgatccgtcgcatcgtttatttcctgtaccacaaatacaaccgtatccctcgtcccgggcagtggtacaccacg

SEQ ID NO: 202149 - DNA, 75 bp, synthetic construct
  source 1..75: mol_type = other DNA
gttatgtctggtaaaggcccggaaaaaacattctcactccatcttgataacgttaataatattgttgcacgtctt

SEQ ID NO: 202150 - DNA, 75 bp, synthetic construct
  source 1..75: mol_type = other DNA
cgtaactttgaaggccgtatccatccgctggttaaaaccaactggctggcctcgccgccgctggtggttgcctat

SEQ ID NO: 202151 - DNA, 75 bp, synthetic construct
  source 1..75: mol_type = other DNA
aaatgtttccggtggtcaacatgctaccggcattacttctggcaatgccgctttccgccgcctggaacgtctggt

SEQ ID NO: 202152 - DNA, 75 bp, synthetic construct
  source 1..75: mol_type = other DNA
tgtatcaccgatacaactgttgcccccgtgtggggcagtggattgccaccagcaacggtcacgttctgcgggttt

SEQ ID NO: 202153 - DNA, 75 bp, synthetic construct
  source 1..75: mol_type = other DNA
agactaacgcaacggtcgtgcgctacggtttacccggtcagtgcgctgttatgcgcgatactggcggcgctgata

SEQ ID NO: 202154 - DNA, 75 bp, synthetic construct
  source 1..75: mol_type = other DNA
tgcataccagttgtaattactgtattcagtatgtggtatcgccctatcccaaatatgatcattaatatggtaatg

SEQ ID NO: 202155 - DNA, 75 bp, synthetic construct
  source 1..75: mol_type = other DNA
cactggattcatagttgttttaatatgcataccagttgtaattactgtattcagtatgtggtatcgccctatccc

SEQ ID NO: 202156 - DNA, 75 bp, synthetic construct
  source 1..75: mol_type = other DNA
gaaccgatctattacgagaaagtcaaacagaccatagataactcaatgttaaaaattctccataccctgaaatga

SEQ ID NO: 202157 - DNA, 75 bp, synthetic construct
  source 1..75: mol_type = other DNA
tcaagatattttaaacttaatgtttttacatcatgctaaaatattaccgagaaaatataattgtatttatactat

SEQ ID NO: 202158 - DNA, 75 bp, synthetic construct
  source 1..75: mol_type = other DNA
tttgatctattatcagatgagtcaattatcaaaaaattaaagtatccggatcaagatattttaaacttaatgttt

SEQ ID NO: 202159 - DNA, 75 bp, synthetic construct
  source 1..75: mol_type = other DNA
ttggattttaaacatcttactcaatttaaagatataattgaactggacaagcgccccgttaaacttgatgaacgg

SEQ ID NO: 202160 - DNA, 75 bp, synthetic construct
  source 1..75: mol_type = other DNA
atggttacgctttggggaaattatgaggggatctctcagtggtgggcacctattttgctggtgacactgcgtgcc

SEQ ID NO: 202161 - DNA, 75 bp, synthetic construct
  source 1..75: mol_type = other DNA
tgacgaacagtttttaagctggggctggcgcattcctttcctgtttagcatcgtactggtactgggagcattgtg

SEQ ID NO: 202162 - DNA, 75 bp, synthetic construct
  source 1..75: mol_type = other DNA
tgcgtgacggtatggcggcagacggcgtgtcgcagcgcaaatataactacatgcgcgctgagcaaatctaccgcg

SEQ ID NO: 202163 - DNA, 75 bp, synthetic construct
  source 1..75: mol_type = other DNA
accttaggagatataaagctggtatgcccaactgaaataacagaagcaagaaaagagagtttgaaatttaccatt

SEQ ID NO: 202164 - DNA, 75 bp, synthetic construct
  source 1..75: mol_type = other DNA
caaacatagatagattagatattttctttgatactgtaagcctcagttcagccataggtatcatttttgttttta

SEQ ID NO: 202165 - DNA, 75 bp, synthetic construct
  source 1..75: mol_type = other DNA
agttggttacggtgtagggttactactttcaaccggactggtttcactgatcagcatgatgactactgatgagca

SEQ ID NO: 202166 - DNA, 75 bp, synthetic construct
  source 1..75: mol_type = other DNA
ggtcggcttcaaccggcgaagcagactgggctctatcgccgctgtttgcctcgcagaactggccaccgacgctgt

SEQ ID NO: 202167 - DNA, 75 bp, synthetic construct
  source 1..75: mol_type = other DNA
ccccattccctacgagcaggccgcgctgctggagaaaaacaaaaatatcgagctgatggccagcccgtcgattat

SEQ ID NO: 202168 - DNA, 75 bp, synthetic construct
  source 1..75: mol_type = other DNA
tcgcagaactggccgccgacgctgtttaatactgcgttttacagcaataagcaggtggatgacgagcttgcccag

SEQ ID NO: 202169 - DNA, 75 bp, synthetic construct
  source 1..75: mol_type = other DNA
tgctaatcgggcggctcaacttggcataaagcagtggcccttacctacaggatgggatgatacaaaactaaaaca

SEQ ID NO: 202170 - DNA, 75 bp, synthetic construct
  source 1..75: mol_type = other DNA
attaacaccatgtctcaggttccgactatcagccaactgctgccgttaccggcgtcagatgatgatgatctgaaa

SEQ ID NO: 202171 - DNA, 75 bp, synthetic construct
  source 1..75: mol_type = other DNA
atgccggacagcgggcggcagaagttgaaggtaaagggcaaaaagagagcggcgtgcggatgttctacactggct

SEQ ID NO: 202172 - DNA, 75 bp, synthetic construct
  source 1..75: mol_type = other DNA
aaaacttttcgttgattactgtggacctaccgttggcgttaccgaccctgagaccggagaaataagaactgctca

SEQ ID NO: 202173 - DNA, 75 bp, synthetic construct
  source 1..75: mol_type = other DNA
accctacctaccagcagatgcttgagcattataatgtcgcagttttgcctgcgcggccacgtaaaccgaaagata

SEQ ID NO: 202174 - DNA, 75 bp, synthetic construct
  source 1..75: mol_type = other DNA
gattactgtggacctaccgttggcgttaccgaccctgagaccggagaaataagaactgctcaggtcatcgtagct

SEQ ID NO: 202175 - DNA, 75 bp, synthetic construct
  source 1..75: mol_type = other DNA
gctgccaaagatgtggttgttgccgtgggatcgaacttcaccacgctcgatccgtatgatgcgaatgacacattg

SEQ ID NO: 202176 - DNA, 75 bp, synthetic construct
  source 1..75: mol_type = other DNA
tattgcctacgcgcaaagttatcaaccgtggccttacgatccggcgaaagcgcgtgaactattgaaagaggcggg

SEQ ID NO: 202177 - DNA, 75 bp, synthetic construct
  source 1..75: mol_type = other DNA
gcttctgccttggactcctgaaccttcataaaaatacagtaaagccagacttaatgcagcatgtgcaagagctct

SEQ ID NO: 202178 - DNA, 75 bp, synthetic construct
  source 1..75: mol_type = other DNA
cagcatgccacctggacgccagagcgtcttctggaatgggcggggcacataggcagtgaaactcatagttatgtg

SEQ ID NO: 202179 - DNA, 75 bp, synthetic construct
  source 1..75: mol_type = other DNA
tggtggcggactaccacaagaacagttccctggcaaaagctgggaggaatcgtggcacgacaattcaggacattg

SEQ ID NO: 202180 - DNA, 75 bp, synthetic construct
  source 1..75: mol_type = other DNA
caaaacagacggcaaacctttcgcgccaacttactatcgctgcgaacttgatgaccgtctggtgggcgtcgtggt

SEQ ID NO: 202181 - DNA, 75 bp, synthetic construct
  source 1..75: mol_type = other DNA
ctcgcgtaagaagccagcgcatgaatcttttattcagaattttgtcgcgattattgtcctgttttgcgccagcgg

SEQ ID NO: 202182 - DNA, 75 bp, synthetic construct
  source 1..75: mol_type = other DNA
aaatccagaatgaattattacgctctgtaaataacgagcttgaggatatggctcagttacttgaatcgataaaaa

SEQ ID NO: 202183 - DNA, 75 bp, synthetic construct
  source 1..75: mol_type = other DNA
acttgttccgtgggtaaatgataaatacgctgaattagaaccatctgccatggttataaataatgcgggagtatt

SEQ ID NO: 202184 - DNA, 75 bp, synthetic construct
  source 1..75: mol_type = other DNA
aagggacgaaaaatactggtagtgttgaaaaatctattgaatacagtattctgcaacaaatactctacaaaaata

SEQ ID NO: 202185 - DNA, 75 bp, synthetic construct
  source 1..75: mol_type = other DNA
ttttcaattggcgccatacgctcaggcatttgtcggggtacttgtagattcagagagggatgcacatcgaggtga

SEQ ID NO: 202186 - DNA, 75 bp, synthetic construct
  source 1..75: mol_type = other DNA
aggcctggcaaatggcattttgtcgaacacgtttcctgagattgacaacttctccggtaatgactccaacttatt

SEQ ID NO: 202187 - DNA, 75 bp, synthetic construct
  source 1..75: mol_type = other DNA
atatgtttgaccctgacttcactcttgcagcccgtttgaaggttgaggagatatttcagaaaacttttcatgaag

SEQ ID NO: 202188 - DNA, 75 bp, synthetic construct
  source 1..75: mol_type = other DNA
gtgaaatgcgccaaccttccggcgatggttttagcaaccttactcggagcattaatcggcgaaatttgtctgctg

SEQ ID NO: 202189 - DNA, 75 bp, synthetic construct
  source 1..75: mol_type = other DNA
attcagagagggacgcgcatcgaggtaacgaccctgccagtcgcattaggaccgagataggccatggtgtaggta

SEQ ID NO: 202190 - DNA, 75 bp, synthetic construct
  source 1..75: mol_type = other DNA
tgggcaatcctgagcgctcaggcaaggaatgcaattgcacttgttgagaatcgtctgggatttgaattgcaggaa

SEQ ID NO: 202191 - DNA, 75 bp, synthetic construct
  source 1..75: mol_type = other DNA
ttttcaggggagctttgatttcctccccatcgtcagccaaatcgccccgcagccgattttatgtaaagacttcat

SEQ ID NO: 202192 - DNA, 75 bp, synthetic construct
  source 1..75: mol_type = other DNA
tctgcgccgcgctgcgggagctgaacaagtgccgggatattctctgggatattaccgccaccagagaacagcagc

SEQ ID NO: 202193 - DNA, 75 bp, synthetic construct
  source 1..75: mol_type = other DNA
tctgtgctgcgctgcgtgagctgaacaagcaccgggatattgtccgacagattgtcgattcctccagtcgtattg

SEQ ID NO: 202194 - DNA, 75 bp, synthetic construct
  source 1..75: mol_type = other DNA
atcatgtgcgacttatgtgattacaacgaaaataaaaatcatcacaccccatttaaaatcagggaaccggacata

SEQ ID NO: 202195 - DNA, 75 bp, synthetic construct
  source 1..75: mol_type = other DNA
cggatgaactggcactgatgttcggaattacctcccgccgggcgaattcatcgctggcaatggcaatcagcaaag

SEQ ID NO: 202196 - DNA, 75 bp, synthetic construct
  source 1..75: mol_type = other DNA
aaacggcggatgaactggcactgatgttcggaattacctcccgccgggcgaattcatcgctggcgatggcaatca

SEQ ID NO: 202197 - DNA, 75 bp, synthetic construct
  source 1..75: mol_type = other DNA
atggtctgattttaccatcgctgcatgtggctaaccgcgagctgcgccgggcaaaaggtcaggttcagaagtggg

SEQ ID NO: 202198 - DNA, 75 bp, synthetic construct
  source 1..75: mol_type = other DNA
agaagtctccaccgaccaggcgcgctggcataaccgctattggatcgacagcgaagggcaaattcgccagtcgga

SEQ ID NO: 202199 - DNA, 75 bp, synthetic construct
  source 1..75: mol_type = other DNA
actggcagaaaattgaagcactgaaaccgttcggcggcattcgtatcgaagacaacgtggtgatccacgaaaaca

SEQ ID NO: 202200 - DNA, 75 bp, synthetic construct
  source 1..75: mol_type = other DNA
cgaaccgctgccgaactccttctggactgaagatgtagaagtgatcgcgctgccaaaagccgatggcattggtag

SEQ ID NO: 202201 - DNA, 75 bp, synthetic construct
  source 1..75: mol_type = other DNA
ggacgctacgacagcacaaaaaggaattgtccagctcagtagtgcaaccaacagcgcatctgaaacgcttgccgc

SEQ ID NO: 202202 - DNA, 75 bp, synthetic construct
  source 1..75: mol_type = other DNA
tcgcggcgggtgtgaccctgctgccgaatacttccggggcgaaaacagcggaagaagccattttcgccgcccatc

SEQ ID NO: 202203 - DNA, 75 bp, synthetic construct
  source 1..75: mol_type = other DNA
ggcgctggaaatgggagccgatgcggtattggtaaatacggcaattgctgtcgcggacgatcccgtcaacatggc

SEQ ID NO: 202204 - DNA, 75 bp, synthetic construct
  source 1..75: mol_type = other DNA
gcgggagctgaacaagcaccgggatattgttcgacagattgtcgattcatccggtcgtattgtgtcggaaaagtg

SEQ ID NO: 202205 - DNA, 75 bp, synthetic construct
  source 1..75: mol_type = other DNA
tgttttttctgttgatatttttcttcctgttattgtttctgcgatgttcacgcgtttctttattcgtcgcattcc

SEQ ID NO: 202206 - DNA, 75 bp, synthetic construct
  source 1..75: mol_type = other DNA
atgaaaaaaatcttagtagtttgcggaaacggaattgcctcatcttccatcatggtctctgtactgcaggacttc

SEQ ID NO: 202207 - DNA, 75 bp, synthetic construct
  source 1..75: mol_type = other DNA
tcggtgataaaaacgtccggggcacgaagtacgctgatggcgcggagttcagttatgaccgcgcgacccatacgc

SEQ ID NO: 202208 - DNA, 75 bp, synthetic construct
  source 1..75: mol_type = other DNA
tgaatgtggcgctatgtacagttatcgtgctggcgctttttttctaccgccgaaaagatgccacgcataaaccgc

SEQ ID NO: 202209 - DNA, 75 bp, synthetic construct
  source 1..75: mol_type = other DNA
ttttaatctgctgttctgcgtgctggtaatacgcgcacgcgggaacgtcgcaagaatttttccattgttgaggtg

SEQ ID NO: 202210 - DNA, 75 bp, synthetic construct
  source 1..75: mol_type = other DNA
tagcaacgggctggctggaagtgttttttaatctgctgttctgcgtgctggtgatacgcgcacgcgggaacgtca

SEQ ID NO: 202211 - DNA, 75 bp, synthetic construct
  source 1..75: mol_type = other DNA
tcttattgtgtccgctcctggcatcttgctcgggtaatggattttataaagataatctgggtgtaatcgataaaa

SEQ ID NO: 202212 - DNA, 75 bp, synthetic construct
  source 1..75: mol_type = other DNA
tcttgtaggaagtaatgatggttttgatcaggctacagttaatggaacaataattcagctaccaaacgtggattc

SEQ ID NO: 202213 - DNA, 75 bp, synthetic construct
  source 1..75: mol_type = other DNA
aagcgcgttagtgagtatattcaaaagctgaataaacaattagaacgtcaggttactattgatgttgctgtatac

SEQ ID NO: 202214 - DNA, 75 bp, synthetic construct
  source 1..75: mol_type = other DNA
cgtagtaatcgaggttgcggcaagtatcagcctgaagggaaaaaccattgatttgaccgctgacaccaccacggt

SEQ ID NO: 202215 - DNA, 75 bp, synthetic construct
  source 1..75: mol_type = other DNA
tactcagacgtcgataaaccgccgttcagtgataaaaacgtccggggtacgaaatacgctgatggcgcggagttc

SEQ ID NO: 202216 - DNA, 75 bp, synthetic construct
  source 1..75: mol_type = other DNA
catgaagatattcttttctgtctaaaaaatgtaatggttaacatttatggcctctcgccagaagcacatgaaaga

SEQ ID NO: 202217 - DNA, 75 bp, synthetic construct
  source 1..75: mol_type = other DNA
aagctgcaaaaaatctggtggcccaagaatatgagtataaggatttcaaagcggcgcagagtgattgctgtatgc

SEQ ID NO: 202218 - DNA, 75 bp, synthetic construct
  source 1..75: mol_type = other DNA
cgtcgcgatatggatgtaacgatcgttgttcattcgcctggcagcattggttcaacaccttcagttgaggttcag

SEQ ID NO: 202219 - DNA, 75 bp, synthetic construct
  source 1..75: mol_type = other DNA
tgattttcccagcacagccactgaccacgctaacaccagaacagattactgatattactgatagtgtgcgcaaag

SEQ ID NO: 202220 - DNA, 75 bp, synthetic construct
  source 1..75: mol_type = other DNA
gaagaacccagtgaaacagacgacattgtttggtcttacctttcacgggaaacgccagccaccgatgctttcctg

SEQ ID NO: 202221 - DNA, 75 bp, synthetic construct
  source 1..75: mol_type = other DNA
aaagaatgcattgacgtaattcgtgaagaagtaaagcgatggaatgattcccgcgccgctggcattcgcattaaa

SEQ ID NO: 202222 - DNA, 75 bp, synthetic construct
  source 1..75: mol_type = other DNA
caattccagaatcacgggatattgaggatgacaatgacaatatggatgacgtatctctcgcggaagatttcgggt

SEQ ID NO: 202223 - DNA, 75 bp, synthetic construct
  source 1..75: mol_type = other DNA
tcacgaagcccagcgacaaccacgaagccgcattacttgccctgcgtttactgtatgaacagggacatggcgtat

SEQ ID NO: 202224 - DNA, 75 bp, synthetic construct
  source 1..75: mol_type = other DNA
gatatatttagcgatcgagaagccagctacatgtcgcatgaaaaccacttcggctacgcggcctgcgctgccctt

SEQ ID NO: 202225 - DNA, 75 bp, synthetic construct
  source 1..75: mol_type = other DNA
attttggtccccggcagtttaccgttcgcttcgatgaaaacctcaacccggttatctacgatcaacaaaacgttc

SEQ ID NO: 202226 - DNA, 75 bp, synthetic construct
  source 1..75: mol_type = other DNA
gccggaaggcgattttgaccgctcattctctgatggcgttctcgaagatatcgccgcccagcttggaaaaggagg

SEQ ID NO: 202227 - DNA, 75 bp, synthetic construct
  source 1..75: mol_type = other DNA
tggatggatttctgaaaggtaaatgcatcccatgtgatttaaaggttaacgaaacaaacgctgaatatctggtgc

SEQ ID NO: 202228 - DNA, 75 bp, synthetic construct
  source 1..75: mol_type = other DNA
cgttctgctggaatcacgattgataaccttgaggctaaatgcgcgaagatggctgctgaaaatacctcgcttaag

SEQ ID NO: 202229 - DNA, 75 bp, synthetic construct
  source 1..75: mol_type = other DNA
ttaatacccaaaagaaactcactgctcactatgaatggcttcaaatcaacctgactgatacctacgaactagtta

SEQ ID NO: 202230 - DNA, 75 bp, synthetic construct
  source 1..75: mol_type = other DNA
cgagaaattgcttaatcacagtgaattgactcacgccccctgcgcccctggcacgctcgaaacactgtcacgttt

SEQ ID NO: 202231 - DNA, 75 bp, synthetic construct
  source 1..75: mol_type = other DNA
atggctattggtgagcctgtcatggtcgatacagcccaggaacccagactttctcgactcttttctaaccgggtc

SEQ ID NO: 202232 - DNA, 75 bp, synthetic construct
  source 1..75: mol_type = other DNA
cttaataatttagaaaaaacatttattaagaaaagcattatcgataactttaattcgcgcctgaaggattcatat

SEQ ID NO: 202233 - DNA, 75 bp, synthetic construct
  source 1..75: mol_type = other DNA
tattgagcgccaatggtgagcgcagcccggtcaacgatcatccgttctgtctgttcaatccacaggaagatgcgc

SEQ ID NO: 202234 - DNA, 75 bp, synthetic construct
  source 1..75: mol_type = other DNA
tcgaacactacgcgcagaatgacccagacgcctatggctattccggcgcactgtgccgcgccaaccaggggatca

SEQ ID NO: 202235 - DNA, 75 bp, synthetic construct
  source 1..75: mol_type = other DNA
ttgtgctgcgtgccagagcgaataatagcggacgcaatccgaactggaccagctacgaaaaactacgcacggtta

SEQ ID NO: 202236 - DNA, 75 bp, synthetic construct
  source 1..75: mol_type = other DNA
ataaggacggcaacggtaaggcggacacggcagacaaggctctggcggatgcaaaagctcatttggaaaaggcac

SEQ ID NO: 202237 - DNA, 75 bp, synthetic construct
  source 1..75: mol_type = other DNA
gtggccgatgcggaagctgcagtcaaggcagcggaagcgaagaaagcagaagcagacgatgctgccgcgcaggct

SEQ ID NO: 202238 - DNA, 75 bp, synthetic construct
  source 1..75: mol_type = other DNA
tggcataaccgctactggatcgacagcgaagggcaaattcgccagtcggaacagtatcttggcgcggattatttc

SEQ ID NO: 202239 - DNA, 75 bp, synthetic construct
  source 1..75: mol_type = other DNA
gtatccattcccaaccctgatgatgcgtcaaaacgacctgtcggcgctcgcgtggtggacctgcaaggtaaaaaa

SEQ ID NO: 202240 - DNA, 75 bp, synthetic construct
  source 1..75: mol_type = other DNA
agctggcgagttatacctggtaaacattctgtagatgagcaaccgattgttgatttctggttgaatcgtatggct

SEQ ID NO: 202241 - DNA, 75 bp, synthetic construct
  source 1..75: mol_type = other DNA
attgttgagcactttcttgcccgatggtttgtagccctgatttttgtcccttttctgttaattggcactttggca

SEQ ID NO: 202242 - DNA, 75 bp, synthetic construct
  source 1..75: mol_type = other DNA
gaaaggagaactaacgctggcgttttccgcgccagtgggcgatcgttcgctggcactacgggcggaatatcgcgt

SEQ ID NO: 202243 - DNA, 75 bp, synthetic construct
  source 1..75: mol_type = other DNA
ttcgtaccgccgataataagctttacaccgggatcaccacggatgtcgaacgccgctatcagcagcaccagagcg

SEQ ID NO: 202244 - DNA, 75 bp, synthetic construct
  source 1..75: mol_type = other DNA
gcaaaggggcgaaagcactgcgcgggaagggagaactaacgctggcgttttccgcaccagtgggcgatcgttcgc

SEQ ID NO: 202245 - DNA, 75 bp, synthetic construct
  source 1..75: mol_type = other DNA
ggttttgcgtttcttgccatgggcttcactggtaaacgtgcagccaggttcaaagaggcatacatcaatgccttt

SEQ ID NO: 202246 - DNA, 75 bp, synthetic construct
  source 1..75: mol_type = other DNA
agcgggttttagatagaattcgaaacctcgaatgttccgctgaatttactgaacacaattttgtgttaagtgaat

SEQ ID NO: 202247 - DNA, 75 bp, synthetic construct
  source 1..75: mol_type = other DNA
tctggctgcagcagctttatcctatgttggcaaaagccgaatctccgctggctgttagcttatatgactatatta

SEQ ID NO: 202248 - DNA, 75 bp, synthetic construct
  source 1..75: mol_type = other DNA
tggagtgtgaagatcaacctttaccgccatcaggcgatggttgcggggcagaactgcaaagctggtttgaacctc

SEQ ID NO: 202249 - DNA, 75 bp, synthetic construct
  source 1..75: mol_type = other DNA
ccgcaagcactggacttagtttcccgcgacggtaaacacgttgtctccacgctgtggaagccagaaattttcagc

SEQ ID NO: 202250 - DNA, 75 bp, synthetic construct
  source 1..75: mol_type = other DNA
gttttccgcccaggccatgctgattacacctacgaacaaaaatacggtctgcgcgattatcgcggcggtggacgt

SEQ ID NO: 202251 - DNA, 75 bp, synthetic construct
  source 1..75: mol_type = other DNA
tccgcgccagtgggcgatcgttcgctggcgttacgggcagaatatcgcgttaagcaactgaccaaacggcaaaaa

SEQ ID NO: 202252 - DNA, 75 bp, synthetic construct
  source 1..75: mol_type = other DNA
gcaaaggggcgaaagcactgcgcgggaaaggagaactaacgctggcgttttccgcgccagtgggcgatcgttcgc

SEQ ID NO: 202253 - DNA, 75 bp, synthetic construct
  source 1..75: mol_type = other DNA
aaaatatctcgccgagaaatttggtattgaaatccgcggctgcctgacccagatgggcgacattccgctggaaat

SEQ ID NO: 202254 - DNA, 75 bp, synthetic construct
  source 1..75: mol_type = other DNA
gtgcgatcaacaatggtcctttcactgacagagctgatttccaaaatcagcttaaaaaaagcctttcaaaagtaa

SEQ ID NO: 202255 - DNA, 75 bp, synthetic construct
  source 1..75: mol_type = other DNA
gttttggcaaagaaatcgccattaaacacattcggccagtaatgcctcttttaatgtgcagagcatctatggaag

SEQ ID NO: 202256 - DNA, 75 bp, synthetic construct
  source 1..75: mol_type = other DNA
atgacccgctcctggccgccgggaaataccctggtcgcgcgcctgatgaactgctgcggcggttatctgaaccat

SEQ ID NO: 202257 - DNA, 75 bp, synthetic construct
  source 1..75: mol_type = other DNA
gatgccgccgtgtttggcaaccagctcaccggttttaccattccgcaggcgctggatgcgatttacgaccatggt

SEQ ID NO: 202258 - DNA, 75 bp, synthetic construct
  source 1..75: mol_type = other DNA
tccgcccgcgtgtgcttgccgttcccggccttgatactcagccagtggcggcgcagctcggtgtgatggctgaga

SEQ ID NO: 202259 - DNA, 75 bp, synthetic construct
  source 1..75: mol_type = other DNA
gctttggtcagacgatcgcgatcaaacatattcgcccggtgatgccactgctgatgatgcgagcctcgatggaag

SEQ ID NO: 202260 - DNA, 75 bp, synthetic construct
  source 1..75: mol_type = other DNA
tgcagtttattcgtctttgtaaggaacatgctattccatgtgattctttccagctatcttctggttatacttcta

SEQ ID NO: 202261 - DNA, 75 bp, synthetic construct
  source 1..75: mol_type = other DNA
ggtgcgcgcctgtttacgcggtcgctctatccgtcgacgcattaatcatcccgatcgattgaattatccgatgaa

SEQ ID NO: 202262 - DNA, 75 bp, synthetic construct
  source 1..75: mol_type = other DNA
tccggcaccttataaagcgggtgccgggcgtggaaacccggaattcaatatagagcacaaccgcgctcatgcggt

SEQ ID NO: 202263 - DNA, 75 bp, synthetic construct
  source 1..75: mol_type = other DNA
agacgattacgcggtgaagtatgctgtagaaccgttactcgacggcgatggtccgctgggcgatctctccgtccg

SEQ ID NO: 202264 - DNA, 75 bp, synthetic construct
  source 1..75: mol_type = other DNA
ttgttatcattggcttaattgtcgtcgccgcatcgtttcgttttatgcaacagcgacgggaaaaagctgataatg

SEQ ID NO: 202265 - DNA, 75 bp, synthetic construct
  source 1..75: mol_type = other DNA
ggatggcgtggtttcatcctaagattgataggggttaacctgccagataaaaggactgtgtttacacaacgtctc

SEQ ID NO: 202266 - DNA, 75 bp, synthetic construct
  source 1..75: mol_type = other DNA
gcgagttgaccgcacgcgctattgctatgttacctattctgacgggcaatattggcatcaacggcgggaatagtg

SEQ ID NO: 202267 - DNA, 75 bp, synthetic construct
  source 1..75: mol_type = other DNA
tttgatcaacgaatttctgaccctgcgcaccaaccagcgtagcgaccagtggggcggcgattaccctaaccggat

SEQ ID NO: 202268 - DNA, 75 bp, synthetic construct
  source 1..75: mol_type = other DNA
taacgatccgcaggttgccgacgatattctctcgcgcggcgatgccgatatggtatcgatggcgcgaccgtttct

SEQ ID NO: 202269 - DNA, 75 bp, synthetic construct
  source 1..75: mol_type = other DNA
atgcacaccgggctggaggaatacccggacggcgctgaacggctggcagcgttttatgccgaacgcgcccgtcac

SEQ ID NO: 202270 - DNA, 75 bp, synthetic construct
  source 1..75: mol_type = other DNA
tcttcgaaggcgacggtaaaattggtcgttatgttggcggctatcatgacgcccgtggtcagcaagagcagtatg

SEQ ID NO: 202271 - DNA, 75 bp, synthetic construct
  source 1..75: mol_type = other DNA
ctgaaaggccacgtttcgctgccgctggtgaccaccaaccggattaacgatccgcaggttgccgacgacattctc

SEQ ID NO: 202272 - DNA, 75 bp, synthetic construct
  source 1..75: mol_type = other DNA
acagatccccggcaaagaggagttttacgaaacgctgcgctattaccgccggatgatcgaagtaacgggcgtgac

SEQ ID NO: 202273 - DNA, 75 bp, synthetic construct
  source 1..75: mol_type = other DNA
ggctgcgacgtggctatggagctggacgcacgccgagcgattgcccagggaacacggcttgcgctggagatttaa

SEQ ID NO: 202274 - DNA, 75 bp, synthetic construct
  source 1..75: mol_type = other DNA
cgcaaccattattaatactggcattggctggcatgaagcgcgtattccgaccatcgccacgcccgtgccgcgcgg

SEQ ID NO: 202275 - DNA, 75 bp, synthetic construct
  source 1..75: mol_type = other DNA
atcgcaccattaccgaagccgtacatcaggaaggcggcaaaatcgccctgcaaattttgcataccgggcgctaca

SEQ ID NO: 202276 - DNA, 75 bp, synthetic construct
  source 1..75: mol_type = other DNA
acgctgtttgatactcacggtgagatcggtgggcagttcaacattgccaaacagatccccggtaaagaggagttc

SEQ ID NO: 202277 - DNA, 75 bp, synthetic construct
  source 1..75: mol_type = other DNA
gcgcctgccatgaaaccaaaatgccgatccttcccaccgtgcagaaaaaaaatctggcggtggtcggtgcgggtc

SEQ ID NO: 202278 - DNA, 75 bp, synthetic construct
  source 1..75: mol_type = other DNA
ggctgcgatgtagctatggagctggacgcacgacgggcaattgcccagggaacacggctggcgctggagatttaa

SEQ ID NO: 202279 - DNA, 75 bp, synthetic construct
  source 1..75: mol_type = other DNA
gtagcaaactaagctataaattgcagcgcgaactggagcagctaccgcaattgctcgaagatctggaggcgaagc

SEQ ID NO: 202280 - DNA, 75 bp, synthetic construct
  source 1..75: mol_type = other DNA
ccggggcgcaccattaaccgctttggcgaagaagttgagatgatcaccaaaggccgtcacgatccttgtgtcggg

SEQ ID NO: 202281 - DNA, 75 bp, synthetic construct
  source 1..75: mol_type = other DNA
gctggcacagctggggttagatcctaacgttgcgctgtcatcgctttccggcggctggctgcgtaaagcggcgtt

SEQ ID NO: 202282 - DNA, 75 bp, synthetic construct
  source 1..75: mol_type = other DNA
acaacgtggcgacaaaattgcgctgattggcccgaatggctgcggtaaaaccacgctgttaaaactgatgctggg

SEQ ID NO: 202283 - DNA, 75 bp, synthetic construct
  source 1..75: mol_type = other DNA
tcaggattacagcgcaattaaagacgttttccgcccaggccatgctgattacacctacgaacaaaaatacggtct

SEQ ID NO: 202284 - DNA, 75 bp, synthetic construct
  source 1..75: mol_type = other DNA
gggacatcgcgctataccacccagcgtcgtgagccggatcaggtcaaaattctctccggtgtttttgaaggcgtt

SEQ ID NO: 202285 - DNA, 75 bp, synthetic construct
  source 1..75: mol_type = other DNA
tcaggattacagcgcaattaaagacgttttccgtccaggccatgccgattacacctacgaacaaaaatacggtct

SEQ ID NO: 202286 - DNA, 75 bp, synthetic construct
  source 1..75: mol_type = other DNA
gctcgcggtcagcaagaacagtatgtggcgcttaagcaaccagcggtgaagaaaaccgaagaagtgcctgtgcca

SEQ ID NO: 202287 - DNA, 75 bp, synthetic construct
  source 1..75: mol_type = other DNA
gctggcgcaactggggttagatcctaatgttgcgctgtcgtcgctttccggcggctggttgcgtaaagcggcatt

SEQ ID NO: 202288 - DNA, 75 bp, synthetic construct
  source 1..75: mol_type = other DNA
gaccaacgatcttgatgtcgaaacgctggaactgctggaagaactgatcgacagctaccagggcacggtattgct

SEQ ID NO: 202289 - DNA, 75 bp, synthetic construct
  source 1..75: mol_type = other DNA
gctggaaaaagaagaagccctgcgcgtggaagagctgcaaaacgccgagttcgaccgcaaactggcgcaggaaga

SEQ ID NO: 202290 - DNA, 75 bp, synthetic construct
  source 1..75: mol_type = other DNA
ccgatctggctgctgctgagcaggagctggaacaagcttttgagcgttgggagtatcttgaagcgttgaaaaatg

SEQ ID NO: 202291 - DNA, 75 bp, synthetic construct
  source 1..75: mol_type = other DNA
gcgcgaactggaacagctcccgcaattacttgaagagctggaagcaaagctggaagccttacaggcacaggtggc

SEQ ID NO: 202292 - DNA, 75 bp, synthetic construct
  source 1..75: mol_type = other DNA
tgcgcgaacaaggaattgcagccgttccacgcctcgcgatgtatgcccataaagaagattgcggtagcctgctgg

SEQ ID NO: 202293 - DNA, 75 bp, synthetic construct
  source 1..75: mol_type = other DNA
ttgacatcaccttacacaacgcggcggatatgccggctcttaaacactggatatatgcggatgatgggatacccg

SEQ ID NO: 202294 - DNA, 75 bp, synthetic construct
  source 1..75: mol_type = other DNA
tggcaacatgaaactggcgctcaacggcgcgttaaccgtgggtacgctggatggtgcgaacgttgaaattgccga

SEQ ID NO: 202295 - DNA, 75 bp, synthetic construct
  source 1..75: mol_type = other DNA
caggttggcgacaaactgaaggtggtgttcctgccggattattgtgtctcagcagcggaaaaactgatcccagcg

SEQ ID NO: 202296 - DNA, 75 bp, synthetic construct
  source 1..75: mol_type = other DNA
ggcaaaggcaagccgggacgcggaaatgctgcagtcagtggctatcattcagaagttttcgccgctgccggaaca

SEQ ID NO: 202297 - DNA, 75 bp, synthetic construct
  source 1..75: mol_type = other DNA
atgctcaacgctggctggccatccgggaccgacggtgggagaaaaacaggccgggatgacggacggggaggacgc

SEQ ID NO: 202298 - DNA, 75 bp, synthetic construct
  source 1..75: mol_type = other DNA
tatctcaccaaaacctggatttggattaccgggctgctggttgcgatgttaggcgggggcctcatgtggctggct

SEQ ID NO: 202299 - DNA, 75 bp, synthetic construct
  source 1..75: mol_type = other DNA
aattcgctgatgatgcgaaattccgccagcaatatcgcgagatcaagcaggcgaataaagcccgcctggcagagt

SEQ ID NO: 202300 - DNA, 75 bp, synthetic construct
  source 1..75: mol_type = other DNA
aaatctgtcgtcaagtttgcgctggtaactgttctgagaaagtcgaacatcataaatctggagtggcaacagatt

SEQ ID NO: 202301 - DNA, 75 bp, synthetic construct
  source 1..75: mol_type = other DNA
atggacgtaaatgaagtgatcgagaagttgcaacaagagattcgcagccgcagtcttaaacaattggaggaataa

SEQ ID NO: 202302 - DNA, 75 bp, synthetic construct
  source 1..75: mol_type = other DNA
aacgtctgcatgagtacaaacgccagcacctgaatctgctgcatattctggcgctgtataaagaaattcgcgaga

SEQ ID NO: 202303 - DNA, 75 bp, synthetic construct
  source 1..75: mol_type = other DNA
gctgcgcctgatgcagcaatacttccagtgtgcctgttcggtagcggatattttgcgtcgccatcatctggcggg

SEQ ID NO: 202304 - DNA, 75 bp, synthetic construct
  source 1..75: mol_type = other DNA
cttccggtactggcaatatgaagctggcgctcaatggcgcgctcaccgtcggtacgctggatggcgctaacgttg

SEQ ID NO: 202305 - DNA, 75 bp, synthetic construct
  source 1..75: mol_type = other DNA
atgtcgaaaacgttcagtattaaaacgaccaagagccaaaacgatcaatgcaccgacggatttaaagtcagttcc

SEQ ID NO: 202306 - DNA, 75 bp, synthetic construct
  source 1..75: mol_type = other DNA
gttacccggctggacatactggaagatatccgccgtaagttacagcaggcactggacgaaggcaggacggcggca

SEQ ID NO: 202307 - DNA, 75 bp, synthetic construct
  source 1..75: mol_type = other DNA
gttttatgctggctcatacccgggaagccttcctgcgcgggcataacaggttggccaccctgccggctctgggca

SEQ ID NO: 202308 - DNA, 75 bp, synthetic construct
  source 1..75: mol_type = other DNA
cagcttattgccgatccggaggccacagtccggcagctgtaccggcacatcattcttggccagaccttcggcacg

SEQ ID NO: 202309 - DNA, 75 bp, synthetic construct
  source 1..75: mol_type = other DNA
gtgacccgcctggatatcctggaagatattcgcggggcactgcagcaggctgtcgatgaaggaaaaaccgatcgc

SEQ ID NO: 202310 - DNA, 75 bp, synthetic construct
  source 1..75: mol_type = other DNA
cagaccacggaagcgaacagtaacaaggcctctgcacaggccgggctggaggtaacggctgatatccgcgatgcg

SEQ ID NO: 202311 - DNA, 75 bp, synthetic construct
  source 1..75: mol_type = other DNA
gcattctatccgcccaatggttggggttgtcgttgttcagtcgtggcgatgagcgagcgtgatattacccggagg

SEQ ID NO: 202312 - DNA, 75 bp, synthetic construct
  source 1..75: mol_type = other DNA
ggctttacgacctttaccattgctacaccgaccggagaagggacaacgtcagcacggacttttgcccgctcacga

SEQ ID NO: 202313 - DNA, 75 bp, synthetic construct
  source 1..75: mol_type = other DNA
atcgctgaaactgattgccataatcgaagacatcgcgtttcgctgtagtggcattcacaacctgatcgttaccgt

SEQ ID NO: 202314 - DNA, 75 bp, synthetic construct
  source 1..75: mol_type = other DNA
gtggttgattttggtaaatttaacttactggatattcgtcgccacacaatgtcgaaaacattcagtattaagacg

SEQ ID NO: 202315 - DNA, 75 bp, synthetic construct
  source 1..75: mol_type = other DNA
atgaataccactgaattagaaacgattatccgcaatatcctgcgcgaacaaatgatgcccactgcgtcacaaacg

SEQ ID NO: 202316 - DNA, 75 bp, synthetic construct
  source 1..75: mol_type = other DNA
ccggtgcgggtaacccgccgtgtatcgtcgatgaaacggcggatattgtgaaagccgccgaagacatcatcaacg

SEQ ID NO: 202317 - DNA, 75 bp, synthetic construct
  source 1..75: mol_type = other DNA
aattgctattgtcgacgccgatgatagctgggttacctgcgaacaactgatgccaatgttgcccattgtaaaagt

SEQ ID NO: 202318 - DNA, 75 bp, synthetic construct
  source 1..75: mol_type = other DNA
cattgtcagaactgaaacaggccgaagcagtgaaagctcttggattccttaaacagaaagccacagagcataagg

SEQ ID NO: 202319 - DNA, 75 bp, synthetic construct
  source 1..75: mol_type = other DNA
atgagtacagcacttgcaacactggccggaaagctggctgaacgcgtcggcatggattctgtcgacccgcaggaa

SEQ ID NO: 202320 - DNA, 75 bp, synthetic construct
  source 1..75: mol_type = other DNA
aatccgcataatcttggtggattgctacactttccgttagtcaaaacgctggaacaacttaccgatttgccgacc

SEQ ID NO: 202321 - DNA, 75 bp, synthetic construct
  source 1..75: mol_type = other DNA
cgttggtctggcagaagggtatctggcgttggtggaaacgtatctggcgcaggagccagcggcatttcatgttga

SEQ ID NO: 202322 - DNA, 75 bp, synthetic construct
  source 1..75: mol_type = other DNA
ccgttgcaagctcatgcgcagagggttgctatcgcttcaaccggaattattcgcgacggcagcttattggcgcta

SEQ ID NO: 202323 - DNA, 75 bp, synthetic construct
  source 1..75: mol_type = other DNA
tgcgttgatgaacgattccgacaccagaaagacctcagcgttgctgtttcttgatggcgataatttcaaatatat

SEQ ID NO: 202324 - DNA, 75 bp, synthetic construct
  source 1..75: mol_type = other DNA
ctgctggatgaaatggaagaatggcagcttcgcctacaggctaaaaatgctcagcttttgcgtacttccttacat

SEQ ID NO: 202325 - DNA, 75 bp, synthetic construct
  source 1..75: mol_type = other DNA
atcagccattttatctggttttcgctcgccgtactgaccggttgtattctgctggcatcaggcatcgcaattacc

SEQ ID NO: 202326 - DNA, 75 bp, synthetic construct
  source 1..75: mol_type = other DNA
atgacctgtgaacatgcctccgtcgaaaaattacaagagctggccgattacaatatgtatcaggccaaacaccag

SEQ ID NO: 202327 - DNA, 75 bp, synthetic construct
  source 1..75: mol_type = other DNA
acacaaacttttaatcaaccattcgatcttcataacggccatcaagttagcatgtccttaagtattggttacgcg

SEQ ID NO: 202328 - DNA, 75 bp, synthetic construct
  source 1..75: mol_type = other DNA
ttgatttactggcggcgcactaccgccatgatgcaggtttacttggggctgcgctgttggcccagggagaaaaat

SEQ ID NO: 202329 - DNA, 75 bp, synthetic construct
  source 1..75: mol_type = other DNA
aatgaatcatgtacatgccggatttaccgcaaagaccggaatcatccgatctgcgttaccgactggatggatgaa

SEQ ID NO: 202330 - DNA, 75 bp, synthetic construct
  source 1..75: mol_type = other DNA
aatgaatcatgtacatgccggatttaccgcaaagaccgcaatcatccgatctgcgttaccgagtggatggatgaa

SEQ ID NO: 202331 - DNA, 75 bp, synthetic construct
  source 1..75: mol_type = other DNA
ggcctgatgcgcgtgcgtggttttacccaggatgacgcgcatatcttctgtactgaagaacaaattcgcgatgaa

SEQ ID NO: 202332 - DNA, 75 bp, synthetic construct
  source 1..75: mol_type = other DNA
gcggttatgagcttggggttagcactgggctaggcgagaacactatccatccagccacgctggaaggcgctggtg

SEQ ID NO: 202333 - DNA, 75 bp, synthetic construct
  source 1..75: mol_type = other DNA
cggcggcagcgcagggcgagctggctggcgcggatgcgagaactattttcacacgcgccgggcagggcgatgagc

SEQ ID NO: 202334 - DNA, 75 bp, synthetic construct
  source 1..75: mol_type = other DNA
ttcactttccgttagttaaaacgctggaacaacttaccaatttgccgaccattgcgataaacgacgcgcaggctg

SEQ ID NO: 202335 - DNA, 75 bp, synthetic construct
  source 1..75: mol_type = other DNA
gttttgcgcaaaatggcatctttatcttcagattctgttcatgcaattcgacagcgcttgcagcttgccgtagaa

SEQ ID NO: 202336 - DNA, 75 bp, synthetic construct
  source 1..75: mol_type = other DNA
tacttgaagtgctttcaagctggcttgaagataacatcaatatggattctgaaattatctttgataatgacgaag

SEQ ID NO: 202337 - DNA, 75 bp, synthetic construct
  source 1..75: mol_type = other DNA
gtattgagcaaactggcgtcactgtcgtcagagacgattcaggcgacgcgtcagcgtttgcaggacgcggtagaa

SEQ ID NO: 202338 - DNA, 75 bp, synthetic construct
  source 1..75: mol_type = other DNA
aatacggatgccaccgctaccagtacagcctgaaaaaccggcgcaaccagcagcagacagcgccccccatatgca

SEQ ID NO: 202339 - DNA, 75 bp, synthetic construct
  source 1..75: mol_type = other DNA
atgacgacatcaaccagacggataagtttctatctgaagccagacgccgtcaagagtgaacaagaggcgtgcaat

SEQ ID NO: 202340 - DNA, 75 bp, synthetic construct
  source 1..75: mol_type = other DNA
cgccacgacgattatgattggcgagaaaatggcggatatgattcgtgggaaggaagcgttgccgaggagcacggc

SEQ ID NO: 202341 - DNA, 75 bp, synthetic construct
  source 1..75: mol_type = other DNA
aacggtattgctgtactgccggtgaccggcacgctggtgcaccggctggggggatgcggccatttccggaatgac

SEQ ID NO: 202342 - DNA, 75 bp, synthetic construct
  source 1..75: mol_type = other DNA
acagaacgccccgtgccacagccagtaccaaccgcacagataaccagtcagatagcagggaatatccgggcatta

SEQ ID NO: 202343 - DNA, 75 bp, synthetic construct
  source 1..75: mol_type = other DNA
tctcgaaagttggctaaagaattgtcagattgaactattcaaattttactcggtgaaagatctttatctgaacga

SEQ ID NO: 202344 - DNA, 75 bp, synthetic construct
  source 1..75: mol_type = other DNA
tgacgatgtgctgtttaaattttcgctcaacctgccagatgagcagatccccttggtcgtcgacaaactgcacgt

SEQ ID NO: 202345 - DNA, 75 bp, synthetic construct
  source 1..75: mol_type = other DNA
tgaataaaggctttctcaagcggatgcgcaccggctttccttatattcagttaaaacttggcgcatcgcttgatg

SEQ ID NO: 202346 - DNA, 75 bp, synthetic construct
  source 1..75: mol_type = other DNA
caggatcctaacccgcaggtcgcagggcgtggactttatcgtctgcaacaagcagggattgacgtcagccacggc

SEQ ID NO: 202347 - DNA, 75 bp, synthetic construct
  source 1..75: mol_type = other DNA
gtgctgttatgtgcaggtgcgatcgcctctccgcagatcctgcaacgttccggcgtgggtagcgctgaactgctg

SEQ ID NO: 202348 - DNA, 75 bp, synthetic construct
  source 1..75: mol_type = other DNA
aaacctggtgtcaatccgctgtttgaagcaatgattgaggcgggcgtgcaggccggttatccgcgcacggacgac

SEQ ID NO: 202349 - DNA, 75 bp, synthetic construct
  source 1..75: mol_type = other DNA
ctcaacctgccggatgaacaaatcccgttagtgatcgacaaactgcacgtagcgctcgatggcattatgaaaccc

SEQ ID NO: 202350 - DNA, 75 bp, synthetic construct
  source 1..75: mol_type = other DNA
tatgtgaggatcgccgcacgttcattatgaatggcgtgcagcttggttttatcaaggtgccgacagtggaaatag

SEQ ID NO: 202351 - DNA, 75 bp, synthetic construct
  source 1..75: mol_type = other DNA
gctcgcgtctggcaccgttttgccactcagcgtgatctggcacgtcagtggattttacaatggccggaacatacg

SEQ ID NO: 202352 - DNA, 75 bp, synthetic construct
  source 1..75: mol_type = other DNA
acctgtatttattggcacagttgccgcgtgagatggctttgactttctggctgcgtatcaatgagaaaaagcatc

SEQ ID NO: 202353 - DNA, 75 bp, synthetic construct
  source 1..75: mol_type = other DNA
cgcaacagaactggccctgcccgttgcccgcgtctggcaccgttttgcgggccagcgtaatctggctcgccagtg

SEQ ID NO: 202354 - DNA, 75 bp, synthetic construct
  source 1..75: mol_type = other DNA
gatcttttcaccgcgtggcaacaagctggagcccccgcaaaagacaactgggcatttctggcgttaagtctcttt

SEQ ID NO: 202355 - DNA, 75 bp, synthetic construct
  source 1..75: mol_type = other DNA
gttgtttactcaacgcctttcgtgtggccgcagagggggagttctgcaatgcgcaagatgagccaattgacctgc

SEQ ID NO: 202356 - DNA, 75 bp, synthetic construct
  source 1..75: mol_type = other DNA
actggcagaactgctggcgttaaaagaaccaccagcccgcccaggttatccaatcatcgaagacaaaaagctgcc

SEQ ID NO: 202357 - DNA, 75 bp, synthetic construct
  source 1..75: mol_type = other DNA
cggataacgcacaactggaactgaaacacaaaaaggggaaaactccgctaagccatcgccgctggccgggcgaac

SEQ ID NO: 202358 - DNA, 75 bp, synthetic construct
  source 1..75: mol_type = other DNA
gcagattttcattctctgtttgttaatcatccctttacccgcctggttacccagcgattaatatggggggtttat

SEQ ID NO: 202359 - DNA, 75 bp, synthetic construct
  source 1..75: mol_type = other DNA
atcaaggtgccgacagtggaaatagatccagctcttgaaacaattcgtatcgccctatcaccacaaaaaaccact

SEQ ID NO: 202360 - DNA, 75 bp, synthetic construct
  source 1..75: mol_type = other DNA
gcccgcgtctggcgacgtttcgcggcgcagcgtgatctggcccgccagtggattttacaatggccggaacatacg

SEQ ID NO: 202361 - DNA, 75 bp, synthetic construct
  source 1..75: mol_type = other DNA
agctgcattacttgccctgcgtttactgtacgaacagggacatggcgaattactgcaaaccgtggcaaaccgctg

SEQ ID NO: 202362 - DNA, 75 bp, synthetic construct
  source 1..75: mol_type = other DNA
gtaagcatctctctctggcagaggaaagcagctggcagcgttgcgccgacaaactcattgccgcactgccaggaa

SEQ ID NO: 202363 - DNA, 75 bp, synthetic construct
  source 1..75: mol_type = other DNA
caagaaatgccggtaatgagtaaagtcgagcaaatgcaggcaacgcccgcgcgtggcgagccggataaactggcg

SEQ ID NO: 202364 - DNA, 75 bp, synthetic construct
  source 1..75: mol_type = other DNA
tcacttcaaactcaattgtgaagtgggtaaagatgtctctttggattcgctgctcgaacaatacgacgcagtctt

SEQ ID NO: 202365 - DNA, 75 bp, synthetic construct
  source 1..75: mol_type = other DNA
cggaagagccgtttatcaataccgccggactaaatgtcgtggtactgggcggtggcgacaccgcaatggactgtg

SEQ ID NO: 202366 - DNA, 75 bp, synthetic construct
  source 1..75: mol_type = other DNA
gccgccgtggcggattatcgcgcagctaccgtggccccagagaaaatcaaaaagcaggccacgcagggtgatgaa

SEQ ID NO: 202367 - DNA, 75 bp, synthetic construct
  source 1..75: mol_type = other DNA
acgacctgaaacatctgaacattatgattaccgccggcccgacgcgtgaaccgctcgatcccgtgcgttatatct

SEQ ID NO: 202368 - DNA, 75 bp, synthetic construct
  source 1..75: mol_type = other DNA
gattaccgcgggtccgacacgtgaaccactcgatccggtgcgttacatctctaatcacagctccggcaagatggg

SEQ ID NO: 202369 - DNA, 75 bp, synthetic construct
  source 1..75: mol_type = other DNA
gcagctggtcactgacgccgcactctccggcatggcgaaatcccgccgcttgcgcaccgcacgtcaggagcatca

SEQ ID NO: 202370 - DNA, 75 bp, synthetic construct
  source 1..75: mol_type = other DNA
attagtcgctactgtcagtgtaatcctcgcaattacagctgaaagtgagattgtaaggtattacttgctattttc

SEQ ID NO: 202371 - DNA, 75 bp, synthetic construct
  source 1..75: mol_type = other DNA
ggtctcagagaaaacaggcgagatgcagaacgtcgccaccttcaataccggcaccacgaaggtggccaccgacgt

SEQ ID NO: 202372 - DNA, 75 bp, synthetic construct
  source 1..75: mol_type = other DNA
atgcgccctgcgccctgcgcccgtagctgccctaatggcgcaatcagccacgttgatgacagcattcaggtcaat

SEQ ID NO: 202373 - DNA, 75 bp, synthetic construct
  source 1..75: mol_type = other DNA
ttgtgaaatcgcctgtgtcatggctcacaatgatgagcaacatgtcttgagccaacaccattttcatccccgaat

SEQ ID NO: 202374 - DNA, 75 bp, synthetic construct
  source 1..75: mol_type = other DNA
tcgtttcctgcgtacgcgtcttggcgagccggatgcacaagggcgtcggcgtccggtgccggtggaaggcagtga

SEQ ID NO: 202375 - DNA, 75 bp, synthetic construct
  source 1..75: mol_type = other DNA
cgatttgcctggctacacctgcgcctgtagccgtgctccccgccatgaaccagcagatgtaccgtgccgctgcca

SEQ ID NO: 202376 - DNA, 75 bp, synthetic construct
  source 1..75: mol_type = other DNA
cctgcagtggtggaatcagcccaaaattggcgcggagtggctgtttggcggtaccggcgttggtgccagcaacca

SEQ ID NO: 202377 - DNA, 75 bp, synthetic construct
  source 1..75: mol_type = other DNA
aaaatagcggatatgattcgcgggcaagaagcgttgccgaggagcacggcaagatattttgtggcaaatgggatg

SEQ ID NO: 202378 - DNA, 75 bp, synthetic construct
  source 1..75: mol_type = other DNA
agctcgatgagttcgtgcgtaaccacgccgaaaccgcgtttcatccgtgcggtacctgcaaaatgggttatgacg

SEQ ID NO: 202379 - DNA, 75 bp, synthetic construct
  source 1..75: mol_type = other DNA
attctcgtcattggccggagacggtgcgcaccttgttgataccggaatataacggacatctcgatttggtcatgc

SEQ ID NO: 202380 - DNA, 75 bp, synthetic construct
  source 1..75: mol_type = other DNA
tggcccggtaagcgtgaccacctcaaaaccgggtgtcaatccgctgtttgaagcgatgattgaggcgggcgtgca

SEQ ID NO: 202381 - DNA, 75 bp, synthetic construct
  source 1..75: mol_type = other DNA
cgccgaaaccgccttccatccgtgcggtacctgcaaaatgggctacgacgagatgtccgtggttgacggcgaagg

SEQ ID NO: 202382 - DNA, 75 bp, synthetic construct
  source 1..75: mol_type = other DNA
aaaaagtaaaagccgttctggttaacatctttggcggtatcgttcgttgcgacctgattgctgacggtatcatcg

SEQ ID NO: 202383 - DNA, 75 bp, synthetic construct
  source 1..75: mol_type = other DNA
ggagataaagtcttaccgcttgagcgcaaagagctccttggccaattattactcgacgagatcatgacccgttat

SEQ ID NO: 202384 - DNA, 75 bp, synthetic construct
  source 1..75: mol_type = other DNA
ctaccgtggccccagaaaaaatcaaaaagcaggccacgcagggtgatgaattaacaataaaaatggttaaaaacc

SEQ ID NO: 202385 - DNA, 75 bp, synthetic construct
  source 1..75: mol_type = other DNA
ttatctcgactgcctgccctactaccgcaaggccgagactcgcgacgtgggcgagaacgactaccacggcggcga

SEQ ID NO: 202386 - DNA, 75 bp, synthetic construct
  source 1..75: mol_type = other DNA
gccgaaggcgaagaagctctcagcttcagcgaatttaaacaggcgctttccagttcggcaaaatctaacggctga

SEQ ID NO: 202387 - DNA, 75 bp, synthetic construct
  source 1..75: mol_type = other DNA
tggcgaccattttcctggagcgcgatctggcgctgatcgaaatcaacccgctggttattaccaagcagggcgatc

SEQ ID NO: 202388 - DNA, 75 bp, synthetic construct
  source 1..75: mol_type = other DNA
gcttaaagccagctggcactgcaggcaatgtcagcacgattattatggagaacgctattgtacacactgccatac

SEQ ID NO: 202389 - DNA, 75 bp, synthetic construct
  source 1..75: mol_type = other DNA
atgtacgcaaaatcttttctcgcattcgatggcaacggacgcctgaccggtgcccgtaccgcacagacagcgcct

SEQ ID NO: 202390 - DNA, 75 bp, synthetic construct
  source 1..75: mol_type = other DNA
ccaatgactagtctaaaaactcgtattaagactatcacttatttaagtgatattggttatctggagattcagggg

SEQ ID NO: 202391 - DNA, 75 bp, synthetic construct
  source 1..75: mol_type = other DNA
tatgctcactacacctgccacctttgcggcagtgcactcagataccatccgcagtacgacactgaacttccctgg

SEQ ID NO: 202392 - DNA, 75 bp, synthetic construct
  source 1..75: mol_type = other DNA
agaaatacagttgattaaacgtctgcagcaattcgtaccggatgccttacccgtggtgcgtaaagccagctggca

SEQ ID NO: 202393 - DNA, 75 bp, synthetic construct
  source 1..75: mol_type = other DNA
tacgaccgctacacctgccacctttgcggcagtgcactcaggtaccacccgcaatacgacactgaacgtccctgg

SEQ ID NO: 202394 - DNA, 75 bp, synthetic construct
  source 1..75: mol_type = other DNA
ttacctcagtgaaattccgggcgttgatgccattatgtttggtcatgctcacgctgttttcccgagtaaagattt

SEQ ID NO: 202395 - DNA, 75 bp, synthetic construct
  source 1..75: mol_type = other DNA
tacgctgattgtggtgaaagccagcggtaaagaggtgaaagagtggctggagtgctccgccggacagtttaacca

SEQ ID NO: 202396 - DNA, 75 bp, synthetic construct
  source 1..75: mol_type = other DNA
tccgcacctataactttgacgtcattgatggtgtgaattatcagattgatgttactcagcccgcccgctatgacg

SEQ ID NO: 202397 - DNA, 75 bp, synthetic construct
  source 1..75: mol_type = other DNA
gaatgcggcaacagtcgatctccgcataatggaaacctctgatttgcatagcaacatgatggatttcgattatta

SEQ ID NO: 202398 - DNA, 75 bp, synthetic construct
  source 1..75: mol_type = other DNA
cagattacatgtcggcgaaaggattaaaagcaggtgatgttcatccggtctataaggcgctgaatacgctggatt

SEQ ID NO: 202399 - DNA, 75 bp, synthetic construct
  source 1..75: mol_type = other DNA
tatatcggcgtcgtgccaccgcagattatgggatgggataaagccaatttatccggcaaagttaccgttaacgat

SEQ ID NO: 202400 - DNA, 75 bp, synthetic construct
  source 1..75: mol_type = other DNA
gctctacggtgcccctggcacaggacggatgaccggtgcacgttatctgcaccaatttggacgtaatgcacaagg

SEQ ID NO: 202401 - DNA, 75 bp, synthetic construct
  source 1..75: mol_type = other DNA
ttgccagtttatgcctcaacctttgaaggctgggactcccctgaacgtagtaccttcccactgcaactgtttggt

SEQ ID NO: 202402 - DNA, 75 bp, synthetic construct
  source 1..75: mol_type = other DNA
ggcattgccagggcgatgaaaatcggcaaggagaacatggttgggctggtttacgcgctggagaattatcaccag

SEQ ID NO: 202403 - DNA, 75 bp, synthetic construct
  source 1..75: mol_type = other DNA
acggcggataaccaactggtggtcacgcacgatcaccgtatcgaccgggtatccaccggacacggatttgtggag

SEQ ID NO: 202404 - DNA, 75 bp, synthetic construct
  source 1..75: mol_type = other DNA
gattaccttgatggtggtgaaattcagtttcatggttttgttactgatgaggctcctaaatggacatggcagatt

SEQ ID NO: 202405 - DNA, 75 bp, synthetic construct
  source 1..75: mol_type = other DNA
atgaatttagttcgttgttgttattctttttttctttttggatgtgttcttttatgttcaatgaaattatatgct

SEQ ID NO: 202406 - DNA, 75 bp, synthetic construct
  source 1..75: mol_type = other DNA
tctgacagcctgtttatcgctggcaattattgcaggccgacaggacattttttccggagcagaaagagaaagcct

SEQ ID NO: 202407 - DNA, 75 bp, synthetic construct
  source 1..75: mol_type = other DNA
ggcgtaccggccagtggccaggggaaactgatctcggttaagaccgacgtgcttgatctgatcatcaacacccgt

SEQ ID NO: 202408 - DNA, 75 bp, synthetic construct
  source 1..75: mol_type = other DNA
ttcttcattcagaagatgtcgccgaccacagtgaccgacccgatgcagcaaaagatcatgacctttatgccggtc

SEQ ID NO: 202409 - DNA, 75 bp, synthetic construct
  source 1..75: mol_type = other DNA
atgacgtataccgacgcggcaggcaacacgtttaccaaaacgtttgtcctgaaacgtggtgattacgctgtcaac

SEQ ID NO: 202410 - DNA, 75 bp, synthetic construct
  source 1..75: mol_type = other DNA
attttgccgtactgatcgccaatattgtcacactgtttctggctgcaccagtgcttgtaataacacttatcaacc

SEQ ID NO: 202411 - DNA, 75 bp, synthetic construct
  source 1..75: mol_type = other DNA
gatagggagaagtgaatggataaatcagtatcggcgacgtttacagcagttgtctgaaacagatattgccgtctg

SEQ ID NO: 202412 - DNA, 75 bp, synthetic construct
  source 1..75: mol_type = other DNA
tatcgtcagcaacctggtaaccattattcagcaacagctgatttaccgtggtctggaaaaacgtggcctgcatag

SEQ ID NO: 202413 - DNA, 75 bp, synthetic construct
  source 1..75: mol_type = other DNA
gtctggatggtgcgctgaccaataatgagcagactgcgtccggtggtgtggtggtggccaccatcaacaaaaagc

SEQ ID NO: 202414 - DNA, 75 bp, synthetic construct
  source 1..75: mol_type = other DNA
tttaccgttcccggtgaccggattatcgccgtgaacagtctggatggtgccctgaccaataatgagcagactgct

SEQ ID NO: 202415 - DNA, 75 bp, synthetic construct
  source 1..75: mol_type = other DNA
tccggcggtgtggtggttgccaccgtcaacaaaaagccctttacgttcattctggaaacagaacgtggtctgaat

SEQ ID NO: 202416 - DNA, 75 bp, synthetic construct
  source 1..75: mol_type = other DNA
ccgtctgcgcgtggatgccctgaatcagaaaatgctcgaggaacaggcgcaggccagggcactggcggaggcgca

SEQ ID NO: 202417 - DNA, 75 bp, synthetic construct
  source 1..75: mol_type = other DNA
agcctatctcctaccgcccaagtgctgaagtgcgtgagtttttggaaagtaacgcagctaaaagctaccgctcga

SEQ ID NO: 202418 - DNA, 75 bp, synthetic construct
  source 1..75: mol_type = other DNA
cttccggtgatgggattagctttccccctggaacaatcgtaactttcgattcatcgctaaaggctgtttctggtg

SEQ ID NO: 202419 - DNA, 75 bp, synthetic construct
  source 1..75: mol_type = other DNA
aaatctatcggtagtaagcatatgcagtttatagaactactggagacggggacaccgaatgtagattttacgggc

SEQ ID NO: 202420 - DNA, 75 bp, synthetic construct
  source 1..75: mol_type = other DNA
gcccacggtgccggatcgtctgcgctggctattgcaaacctttaaatatcagaaaaatatccgtattcatgcctt

SEQ ID NO: 202421 - DNA, 75 bp, synthetic construct
  source 1..75: mol_type = other DNA
cagccgtttcctgcgctgcgtggagctggtgcgggagatgatggggggcagagataaccgcgatgaaacggctca

SEQ ID NO: 202422 - DNA, 75 bp, synthetic construct
  source 1..75: mol_type = other DNA
tttgtttttatggcagtaagctatgggaggctgccttgattgattttagcaaactgattagggagttgcgactca

SEQ ID NO: 202423 - DNA, 75 bp, synthetic construct
  source 1..75: mol_type = other DNA
tgaacgccatggtagagttagctaagaacagagtaccgctttaccacattatggatgttgcaaaacaaatggaga

SEQ ID NO: 202424 - DNA, 75 bp, synthetic construct
  source 1..75: mol_type = other DNA
catcgtattactaaagtaaacaatgagactgtttcttatttttgcgaaggttataaaatccttttttcaaccatg

SEQ ID NO: 202425 - DNA, 75 bp, synthetic construct
  source 1..75: mol_type = other DNA
agcaattcgtaccggatgccttacccgtagtacgtaaagccagctggcactgcaggcaatgtcaccacgattatt

SEQ ID NO: 202426 - DNA, 75 bp, synthetic construct
  source 1..75: mol_type = other DNA
ggctctggcaggtcgtggcccggaaggcaccatcaacttcaataccagctccgaccgcgtccgtctgtgctatcc

SEQ ID NO: 202427 - DNA, 75 bp, synthetic construct
  source 1..75: mol_type = other DNA
caatgtcaccacgattattatggggagccgtactgcacacactgccagaccgggcgtttcagtgaggaggaggta

SEQ ID NO: 202428 - DNA, 75 bp, synthetic construct
  source 1..75: mol_type = other DNA
caatgtcaccacgattattatggggagctgtactgcacacactgccagaccgggcgcttcagtgaggaggaggta

SEQ ID NO: 202429 - DNA, 75 bp, synthetic construct
  source 1..75: mol_type = other DNA
atgtacgcaaaatcctttgtcgctcttgatggcaacggacgtctgacgggcgcccgtactgtacaggccgcacct

SEQ ID NO: 202430 - DNA, 75 bp, synthetic construct
  source 1..75: mol_type = other DNA
atgtacgcaaaatcctttctcgctcttgattgcaacggacgtctgacgggcgcccgtactgcacaggccgcacct

SEQ ID NO: 202431 - DNA, 75 bp, synthetic construct
  source 1..75: mol_type = other DNA
atgtacgcaaaatcctttttcgctcttgatcgcaacggacgtctgacgggcgcccgtactgcacaggccgcacct

SEQ ID NO: 202432 - DNA, 75 bp, synthetic construct
  source 1..75: mol_type = other DNA
cgcttgattcatcgtctgcagcaattcgttccggatgccttacccgtggtccgtaaagccagctggcactgcagg

SEQ ID NO: 202433 - DNA, 75 bp, synthetic construct
  source 1..75: mol_type = other DNA
cttccgagctttccggtggtcagcaacaacgtgtggcaattgcccgtgcgctggcggtgaaaccgaaaatgatgt

SEQ ID NO: 202434 - DNA, 75 bp, synthetic construct
  source 1..75: mol_type = other DNA
cgaatctgtttaccgttcccggtgaccggattatcgccgtgaacagtctggatggtgccctgaccaataatgagc

SEQ ID NO: 202435 - DNA, 75 bp, synthetic construct
  source 1..75: mol_type = other DNA
caatgtcaccacgattattatggggagcagtactgcacacactgccagaccgggcgattcagtgaggaggtggta

SEQ ID NO: 202436 - DNA, 75 bp, synthetic construct
  source 1..75: mol_type = other DNA
cgcttgattgatcgtctgcagcaattcgttccggatgccttacccgtggtccgtaaagccagctggcactgcagc

SEQ ID NO: 202437 - DNA, 75 bp, synthetic construct
  source 1..75: mol_type = other DNA
cgcttgattcatcgtctgcagcaattcgttccggatgccttacccgtggtgcgtaaagccagctggcactgcagc

SEQ ID NO: 202438 - DNA, 75 bp, synthetic construct
  source 1..75: mol_type = other DNA
cgtgcttatcccgggtgtaagctgccggatttgcgcggtgtttttatccgtggctgggacaacggacgtgggctg

SEQ ID NO: 202439 - DNA, 75 bp, synthetic construct
  source 1..75: mol_type = other DNA
ctatcacgaacgtggcggatggctgaaagggcatcatagtggtatgccatactgggcaaaggggagtaccacaga

SEQ ID NO: 202440 - DNA, 75 bp, synthetic construct
  source 1..75: mol_type = other DNA
atgccttgttgatgctgattggcgtgatgggggctttttgtcgttccgctcaatgcgttgctacaggagcggggt

SEQ ID NO: 202441 - DNA, 75 bp, synthetic construct
  source 1..75: mol_type = other DNA
aagctgacggttctgttgattacagcaacatcactctcggcggtggtaatggcggaacgactcgcattagcaacg

SEQ ID NO: 202442 - DNA, 75 bp, synthetic construct
  source 1..75: mol_type = other DNA
aaagtaacggacgcgcaggtttcccagaatacccagagcattactaacctgaatactcaggtaacgaatctggat

SEQ ID NO: 202443 - DNA, 75 bp, synthetic construct
  source 1..75: mol_type = other DNA
tcgcactgggtgcatcttcaacagcaactggcgatcgttcgatggctcttggtcgttacgcaaagacgaacggtt

SEQ ID NO: 202444 - DNA, 75 bp, synthetic construct
  source 1..75: mol_type = other DNA
aaacaggtgatggtgaataccggagggaacaaagagcaggtccccgcaaaacgtcaaaaccgcggctcccgaaac

SEQ ID NO: 202445 - DNA, 75 bp, synthetic construct
  source 1..75: mol_type = other DNA
agcaggtccccgcaaacgtcaaaaccgcggctcccgaaactcaacagatgatgggggctgaaaaccagagagagg

SEQ ID NO: 202446 - DNA, 75 bp, synthetic construct
  source 1..75: mol_type = other DNA
tgttgttcatgagagcgggaaacttggttatataaacaaagtgttatgtaaaaaactcaagcaaaaaatagcaaa

SEQ ID NO: 202447 - DNA, 75 bp, synthetic construct
  source 1..75: mol_type = other DNA
ctggtcaccaaggaatggttggatcagctattacccgacgcctcaaacaacgtgatgatgttgagttggttttac

SEQ ID NO: 202448 - DNA, 75 bp, synthetic construct
  source 1..75: mol_type = other DNA
cggttcttggcagcgtatcctatgaggacggtaaagccgttcagtcggttacatatcgtgactcaggggtgatat

SEQ ID NO: 202449 - DNA, 75 bp, synthetic construct
  source 1..75: mol_type = other DNA
aaaaactggtttcatgggtatatacaccatttaaccgttcgccagcttatcttgccgccgtgctttcgggtacaa

SEQ ID NO: 202450 - DNA, 75 bp, synthetic construct
  source 1..75: mol_type = other DNA
aaggcgtcgttacttccccaaattacaggctgaaaagtggtattttcggcactgttggcgacgccttaacgggcc

SEQ ID NO: 202451 - DNA, 75 bp, synthetic construct
  source 1..75: mol_type = other DNA
agcagcgtagccattggtcaggacagccgcagcgaagttgagacgggtatcgccctgggtagcagttccgtttcc

SEQ ID NO: 202452 - DNA, 75 bp, synthetic construct
  source 1..75: mol_type = other DNA
aatggcattggcgatatcgtaaccaccggtagtactaagtacttcacgaccaacaccgatggcgcagacgccaac

SEQ ID NO: 202453 - DNA, 75 bp, synthetic construct
  source 1..75: mol_type = other DNA
atcaccaacgtcgcagcaggttcggctgataccgatgcggtcaacgtgggtcaattgaaagtaacggacgcgcag

SEQ ID NO: 202454 - DNA, 75 bp, synthetic construct
  source 1..75: mol_type = other DNA
gcgtcgctctgagtacaggctccgtggccaacgaagaaaacacgatctctgtgggttcttctaccaaccaacgcc

SEQ ID NO: 202455 - DNA, 75 bp, synthetic construct
  source 1..75: mol_type = other DNA
tatcggaagaaggtgttgtgattggttatgacaccacggacggcgaactgcttggtgcattgtcgatcggtgatg

SEQ ID NO: 202456 - DNA, 75 bp, synthetic construct
  source 1..75: mol_type = other DNA
tgaaggtagcaccgatgctatcaacggttctcagctgtttaacaccaatatgctgatccagcagaacagcgaagt

SEQ ID NO: 202457 - DNA, 75 bp, synthetic construct
  source 1..75: mol_type = other DNA
atagttttgctggaggcataaacagtcttgctttgggtagtcaatccaatgcaaacggtgataacgcagttgccc

SEQ ID NO: 202458 - DNA, 75 bp, synthetic construct
  source 1..75: mol_type = other DNA
tggcaatagggaactcggctgaatccgctggtgcttattctatggcattcggaggtgtcgctattgctcatggta

SEQ ID NO: 202459 - DNA, 75 bp, synthetic construct
  source 1..75: mol_type = other DNA
caccaacatcaccaacctgactgacgctgttgacagtctcggtgacgattccctgctgtggaacgctacggcggg

SEQ ID NO: 202460 - DNA, 75 bp, synthetic construct
  source 1..75: mol_type = other DNA
cagtaccgatgccatcaacggctcacagcttcatacgatcagtaattcagtcgcccagcgactcggaggaggcgc

SEQ ID NO: 202461 - DNA, 75 bp, synthetic construct
  source 1..75: mol_type = other DNA
gtagtagggccatagcaatcggtagtggagctaaatcgactgccgattattcccttacgctggggaatggatcta

SEQ ID NO: 202462 - DNA, 75 bp, synthetic construct
  source 1..75: mol_type = other DNA
tgctggcgtaaatgaagatggaagtataaatgcgccaagctacaggctgaaaagcggcatctacaataatgtggg

SEQ ID NO: 202463 - DNA, 75 bp, synthetic construct
  source 1..75: mol_type = other DNA
tatctggttttgagctacgtttgcctgccgaaaaaacaccagcaaagtgggaagctgacctaaacgtaacggtga

SEQ ID NO: 202464 - DNA, 75 bp, synthetic construct
  source 1..75: mol_type = other DNA
ggtagctgagcgtggtggtcccggattcacgccatttattaccttcagcagtaacgggcagtccttcgccgtaaa

SEQ ID NO: 202465 - DNA, 75 bp, synthetic construct
  source 1..75: mol_type = other DNA
ggccgggatgtcgctggtcagtggaaagagcgtgacggatgtgcaatcaggaatgctgccacagtggctgaaagc

SEQ ID NO: 202466 - DNA, 75 bp, synthetic construct
  source 1..75: mol_type = other DNA
gtcaatacacatagtctcccaaaggaggtggttagccgtctgtctgcactgttattgatgaataataaatttgga

SEQ ID NO: 202467 - DNA, 75 bp, synthetic construct
  source 1..75: mol_type = other DNA
gatcaaacctggagagtagataccgccaatgcgcgtattgagaacaaagaattagtgtttaatctgcgcgataaa

SEQ ID NO: 202468 - DNA, 75 bp, synthetic construct
  source 1..75: mol_type = other DNA
taatttcatcagttttatttccagtttggcatgtaaaggctgaaatacttgatggtggtgaaataatattcaatg

SEQ ID NO: 202469 - DNA, 75 bp, synthetic construct
  source 1..75: mol_type = other DNA
ataacgggcaactggtttttaatttgcgtgataaaggggctctgccgtttctggaggggtatctgcatgaggtgg

SEQ ID NO: 202470 - DNA, 75 bp, synthetic construct
  source 1..75: mol_type = other DNA
aatcagaattttggcaatggcatgaatgcggtggataacggacaggttatcaaccaggggatactgactgacggt

SEQ ID NO: 202471 - DNA, 75 bp, synthetic construct
  source 1..75: mol_type = other DNA
gaacgttgccacagtggcttaaaacccgcctttccacattacttctgatgaaccagggctttggcaatggcatga

SEQ ID NO: 202472 - DNA, 75 bp, synthetic construct
  source 1..75: mol_type = other DNA
cagataagttcgcgggaccagacctgggttgtggatactgctgatgcacgtatagagaacgggcaactggttttt

SEQ ID NO: 202473 - DNA, 75 bp, synthetic construct
  source 1..75: mol_type = other DNA
cactcagggggtactggctgacggtcgtgtgatgaatctggctgcggcatatgcctctgcggtgtcggattttga

SEQ ID NO: 202474 - DNA, 75 bp, synthetic construct
  source 1..75: mol_type = other DNA
tgaatgcggtggataacggacaggttatcagtcagggggtactggctgacggtcgggtgatgaatctggctgcgg

SEQ ID NO: 202475 - DNA, 75 bp, synthetic construct
  source 1..75: mol_type = other DNA
ttgctgatgaatcagaaatttggtggtggaatgagcgcagtggataacgggcaggttatcagtcaggggattctt

SEQ ID NO: 202476 - DNA, 75 bp, synthetic construct
  source 1..75: mol_type = other DNA
aatgcgtgatattcgtaacgaaacaggtaccgccagacctgatccggcagtaatgaaacgactggtacaacttgg

SEQ ID NO: 202477 - DNA, 75 bp, synthetic construct
  source 1..75: mol_type = other DNA
ttatgaaacgactgattcaactcggtttgccaattgcgctggcgctgttctttgaagtaacgctgtttgccgtcg

SEQ ID NO: 202478 - DNA, 75 bp, synthetic construct
  source 1..75: mol_type = other DNA
tgcgtgacccggaaacgggaaatgtgtcggggcagctttctttcaccctgaatcagggaatggcggttagtgccg

SEQ ID NO: 202479 - DNA, 75 bp, synthetic construct
  source 1..75: mol_type = other DNA
ctccgctgcatggcaatgttgagcagaccagcgttatgagtgttggagcgggctgctggagtattgagtttgtca

SEQ ID NO: 202480 - DNA, 75 bp, synthetic construct
  source 1..75: mol_type = other DNA
attgctaccgttctgccgtggattgcggagagcgtgagtcagtcgtctgcggtttatctggcgacggagtgtttg

SEQ ID NO: 202481 - DNA, 75 bp, synthetic construct
  source 1..75: mol_type = other DNA
ttaacgcgctgattgtgctgatccatgagtacaagaacgtccgctcaaagctggagatgctgactatctggctga

SEQ ID NO: 202482 - DNA, 75 bp, synthetic construct
  source 1..75: mol_type = other DNA
ttcaccccctttattaccttcagcagtaacggacagccttttactgtgacggaaggaaatggtacctcagcacag

SEQ ID NO: 202483 - DNA, 75 bp, synthetic construct
  source 1..75: mol_type = other DNA
gtgacccggaaacgggaaatgtgtcggggcagctttctttcaccctgaatcaggggatggcggtcagtgccggca

SEQ ID NO: 202484 - DNA, 75 bp, synthetic construct
  source 1..75: mol_type = other DNA
ggccctgttttattcggcagcgccacatgccgatattcttgatggtggcgaaatccagtttaatggctttgttac

SEQ ID NO: 202485 - DNA, 75 bp, synthetic construct
  source 1..75: mol_type = other DNA
tatgcttctgctgtgtcggattttgaactgcggttaccggcagagggtacaccggccagctggcaggtggggctg

SEQ ID NO: 202486 - DNA, 75 bp, synthetic construct
  source 1..75: mol_type = other DNA
ccgcctttccacattacttctgatgaaccagggttttggcaatggcatgagtgccacagacaatggtcaggttat

SEQ ID NO: 202487 - DNA, 75 bp, synthetic construct
  source 1..75: mol_type = other DNA
ggtcgggatgtcgctggccagtgggcagagcgtgacggatgtgcagtcaggaacgctgccacagggactgaaagc

SEQ ID NO: 202488 - DNA, 75 bp, synthetic construct
  source 1..75: mol_type = other DNA
cgaattcgtgcgggttgaagaggacgattacgacagccgtttcctgcgctgcgtggagctggtgcgggagatgat

SEQ ID NO: 202489 - DNA, 75 bp, synthetic construct
  source 1..75: mol_type = other DNA
cgaatttctggaattgaaagatgaatattcagaatctgatttcgaggaggtgctgatcaaccacctgatggattt

SEQ ID NO: 202490 - DNA, 75 bp, synthetic construct
  source 1..75: mol_type = other DNA
ccaggaaattggccgacgaattgtcgaatttgaacaaggtggcgaggccagggctgcgtatggtgcgcagctaat

SEQ ID NO: 202491 - DNA, 75 bp, synthetic construct
  source 1..75: mol_type = other DNA
aaaagggatccagccggatctgatctacacctcggaagaagccgatgcgccacagtatatggaacatctggggat

SEQ ID NO: 202492 - DNA, 75 bp, synthetic construct
  source 1..75: mol_type = other DNA
gaaagtcgtctgtatcagaaacataagctcgacgctgatgcccgacttcagtatgagcaagcgcgcgataaagct

SEQ ID NO: 202493 - DNA, 75 bp, synthetic construct
  source 1..75: mol_type = other DNA
aaagatgctgatgaagcaagagccagaggattagcctgtgaggctgcgtatgatgcggttaagtccgggagggat

SEQ ID NO: 202494 - DNA, 75 bp, synthetic construct
  source 1..75: mol_type = other DNA
tattcagaatctgatttcgaggaggtgctgatcaaccacctgatggatttcatgctggaacttggggatgatttt

SEQ ID NO: 202495 - DNA, 75 bp, synthetic construct
  source 1..75: mol_type = other DNA
ctgatacagccctgccagaacaaggcgtgtgaacagaaatggtacgttttctcaggtaagacaaagccggtttgt

SEQ ID NO: 202496 - DNA, 75 bp, synthetic construct
  source 1..75: mol_type = other DNA
ccatagtgaatctattgttcgcaatctggaaccagacgaactgtggtttgttagtaaaaaagaggggaaaactca

SEQ ID NO: 202497 - DNA, 75 bp, synthetic construct
  source 1..75: mol_type = other DNA
attggctttttttggtgccgtagtgaaaaccggggcgacacaagcaatccgtgattttggcggttttcagcagat

SEQ ID NO: 202498 - DNA, 75 bp, synthetic construct
  source 1..75: mol_type = other DNA
gtgcgtgggaatatggtcgtgattatgtcttttcgcacctcggtggtgatgagatcgcattgcagtattccgact

SEQ ID NO: 202499 - DNA, 75 bp, synthetic construct
  source 1..75: mol_type = other DNA
ctacctgatgagaaacgactcgcagatgaactcgttcgaacacaggcggtgctagaggaaggctatagacgccgt

SEQ ID NO: 202500 - DNA, 75 bp, synthetic construct
  source 1..75: mol_type = other DNA
gtgttacagacggcattggctttacgcttactgaaaaccagccatctttccaaagaggatccgaaccgcgtattg

SEQ ID NO: 202501 - DNA, 75 bp, synthetic construct
  source 1..75: mol_type = other DNA
tggaaatgctggcgcgagcaatcattcacgcaattaataatgcagaaatgcgtgaactggcgttacgtattacat

SEQ ID NO: 202502 - DNA, 75 bp, synthetic construct
  source 1..75: mol_type = other DNA
acgaaccgggtgctttatctttcaggtatgctggataaccggcacgatgccgatcctgaacaaaccgggaaagca

SEQ ID NO: 202503 - DNA, 75 bp, synthetic construct
  source 1..75: mol_type = other DNA
ggaaagaaaagaacgcatcatcggtcagctcattgaaaacctgcagcagtctggtttgaaaccattagcgactgc

SEQ ID NO: 202504 - DNA, 75 bp, synthetic construct
  source 1..75: mol_type = other DNA
gcactgaatcaggcaacgaaccgggtgctttatctttcaggtatgctggataaccggcacgatgccgatcctgaa

SEQ ID NO: 202505 - DNA, 75 bp, synthetic construct
  source 1..75: mol_type = other DNA
tctgcacaaaggcagcttccgctggccacgtgcaaatgacgctgcctggcacctcactcccgacgagtttaactg

SEQ ID NO: 202506 - DNA, 75 bp, synthetic construct
  source 1..75: mol_type = other DNA
tgcgcttgcttgccccagaacaatggggcatgccgctgcctttaacgcaaagttctaaaccggtcatcaatgccg

SEQ ID NO: 202507 - DNA, 75 bp, synthetic construct
  source 1..75: mol_type = other DNA
gtggtcttttctttacagcaaaatgcgcaaatcgagccactggcccgcagcattcataccctgcgtcgccagcgc

SEQ ID NO: 202508 - DNA, 75 bp, synthetic construct
  source 1..75: mol_type = other DNA
atgcggacgtggtgattatgatggtcaccggacagacgcaggaaaactttatggtcagcctgaataacctggtcg

SEQ ID NO: 202509 - DNA, 75 bp, synthetic construct
  source 1..75: mol_type = other DNA
ggtgatgctggtcggtgacaatctggatggaataaagggaatgattcatgacttcgatcccaacgctggcgctta

SEQ ID NO: 202510 - DNA, 75 bp, synthetic construct
  source 1..75: mol_type = other DNA
aaccggaatggaaacataacctgtttacccactatctggcggtactttatcgttttaaagatgagagtggtaaag

SEQ ID NO: 202511 - DNA, 75 bp, synthetic construct
  source 1..75: mol_type = other DNA
aattgtctgcgctgcagcggtttgattatataaagtttgtttcagacgcagaacaacaggagacaacgaagcatg

SEQ ID NO: 202512 - DNA, 75 bp, synthetic construct
  source 1..75: mol_type = other DNA
cgctcatttttccgggctgatgtacgccgtactcagcctgttttttggcgatccggatatgcatccggcggattt

SEQ ID NO: 202513 - DNA, 75 bp, synthetic construct
  source 1..75: mol_type = other DNA
caggagacaacgaagcatgatgtcgtgcacattaaccagcgatatctggaaacggcatccctgcttgtggcgatg

SEQ ID NO: 202514 - DNA, 75 bp, synthetic construct
  source 1..75: mol_type = other DNA
aaaaacaacctgagtggtacgtgaaagctatcagaaaaactatcgcggcattgccaggtggttacgctgaagctg

SEQ ID NO: 202515 - DNA, 75 bp, synthetic construct
  source 1..75: mol_type = other DNA
ccgacaccatcgacaacgagcatttctttgtgcgtaagaatggcttgctgtatgccacgccgctgatgctggtgc

SEQ ID NO: 202516 - DNA, 75 bp, synthetic construct
  source 1..75: mol_type = other DNA
ctcgctgggcgtggtgtttggcattctggtgatgacgtttattatcaacgcctgggtgaattatcggcatgataa

SEQ ID NO: 202517 - DNA, 75 bp, synthetic construct
  source 1..75: mol_type = other DNA
cgccgaagaactggcctcattcattgcctactggcaggcggaaggtaaagtttttcaccatgtgcagtggcagca

SEQ ID NO: 202518 - DNA, 75 bp, synthetic construct
  source 1..75: mol_type = other DNA
ttgaaaaacagcctgcgtggctggtggctgctatcagaagaactatcgctgatttacctggtggctatgaagaag

SEQ ID NO: 202519 - DNA, 75 bp, synthetic construct
  source 1..75: mol_type = other DNA
tggtggcactcacttcattgctgatgctgtggcgcagtctgcaaatggcgtctttgtgtctcttcctgacgtcga

SEQ ID NO: 202520 - DNA, 75 bp, synthetic construct
  source 1..75: mol_type = other DNA
tcgctgtccaacgttccggtcaaaaatgtgctggggatgtccaggcatgtgttctggtcgttgcaggctgctgac

SEQ ID NO: 202521 - DNA, 75 bp, synthetic construct
  source 1..75: mol_type = other DNA
gtttaccaccctgaaagcgatttcagaccagaccagcccgcaaaccattgtgatccgcgttgccgatgcgtcaaa

SEQ ID NO: 202522 - DNA, 75 bp, synthetic construct
  source 1..75: mol_type = other DNA
gcggataccgtggcagaggctcacttctcctatgttgataagccgctcaccccgtcgctggtgaaagatatcgtt

SEQ ID NO: 202523 - DNA, 75 bp, synthetic construct
  source 1..75: mol_type = other DNA
cagagcgtttctcgatgctcaaatatggcctggcggtgattctggtgtttatcggtatcaagatgctgattgtcg

SEQ ID NO: 202524 - DNA, 75 bp, synthetic construct
  source 1..75: mol_type = other DNA
aaaaacagcgggcatagcgatagcaacagcatctattcttttaacaaagcgttctaatgttgatacatatacaga

SEQ ID NO: 202525 - DNA, 75 bp, synthetic construct
  source 1..75: mol_type = other DNA
ttttactgctgacaggttgtgcttctgaacctgcaaatcagcgtaatcttcttactcagtttgtcggcaataatg

SEQ ID NO: 202526 - DNA, 75 bp, synthetic construct
  source 1..75: mol_type = other DNA
aatctgtatggctgaaaaatcccaacgggtaagaagtggcaagacttttgatgaagttattaaggacaaagagac

SEQ ID NO: 202527 - DNA, 75 bp, synthetic construct
  source 1..75: mol_type = other DNA
accgcaagcacgttaaaggctgcaagtgaagagattcagcaattagtagatgatttagcaaaaagtgctatttct

SEQ ID NO: 202528 - DNA, 75 bp, synthetic construct
  source 1..75: mol_type = other DNA
ctgcgtctgaatctgtcgctcgattcacagctttatccgcaaatttccggtcataagagccgttttgccattcgt

SEQ ID NO: 202529 - DNA, 75 bp, synthetic construct
  source 1..75: mol_type = other DNA
acctggattggcgtgcctggcgtggaccagagccgtattgaagcattaattcagcagttgaaagcggcggggagc

SEQ ID NO: 202530 - DNA, 75 bp, synthetic construct
  source 1..75: mol_type = other DNA
cgctttattcaaccgccttcgtgccgatggcgatcagattttcccgctgggatgggcaatggttttacagcgcgc

SEQ ID NO: 202531 - DNA, 75 bp, synthetic construct
  source 1..75: mol_type = other DNA
agatcggcagttattccagacagattcgttcagcaattgaagacggggtggtggaaccacacgagcaggcagcaa

SEQ ID NO: 202532 - DNA, 75 bp, synthetic construct
  source 1..75: mol_type = other DNA
ggatggcaaggagaatggaaagggcgaaatagaacgaaagcccgtgttttgtgccctgaacacaatcaaatcatg

SEQ ID NO: 202533 - DNA, 75 bp, synthetic construct
  source 1..75: mol_type = other DNA
tcaaatcatcacagacatcgccagcacgttaaaggctgcaagtgaagagattcagcaattagtagatgatttagc

SEQ ID NO: 202534 - DNA, 75 bp, synthetic construct
  source 1..75: mol_type = other DNA
cgagcaattaatagagtatctgctttgcttgaagtcgttgatttcgaatttgaaagagtgttatcagagcgtgag

SEQ ID NO: 202535 - DNA, 75 bp, synthetic construct
  source 1..75: mol_type = other DNA
cctttagtgattttaaaaatatgaaagtggaggtgcaaatacgaacgctttctcagcatatttgggctgcagcat

SEQ ID NO: 202536 - DNA, 75 bp, synthetic construct
  source 1..75: mol_type = other DNA
taccagcaggttatcagtaaataccctggtactgatggcgctaaacaggcgcaaaaacgtctgaacgcgatgtaa

SEQ ID NO: 202537 - DNA, 75 bp, synthetic construct
  source 1..75: mol_type = other DNA
gttaaactacaacaagggtaaaaaagatgatgcggcgtactattttgcttcggtagtgaaaaactatccgaagtc

SEQ ID NO: 202538 - DNA, 75 bp, synthetic construct
  source 1..75: mol_type = other DNA
gcaatggaagaaaaattcggtgtttccgctgctgctgtagctgtagctgctggcccggttgaagctgctgaagaa

SEQ ID NO: 202539 - DNA, 75 bp, synthetic construct
  source 1..75: mol_type = other DNA
ggcagcagctaaacttgcgaagatcccgaaaccaccaagccaggcagtatatgaagtgttcaaaaatgcgccatt

SEQ ID NO: 202540 - DNA, 75 bp, synthetic construct
  source 1..75: mol_type = other DNA
gctcaggcaccaatcagtagtgtcggctcaggctcggttgaagaccgcgtcactcaacttgagcgtatttctaat

SEQ ID NO: 202541 - DNA, 75 bp, synthetic construct
  source 1..75: mol_type = other DNA
taccagcaggttatcagtaaataccctgggactgatggcgcaaaacaggcgcaaaaacgtctgaacgcgatgtaa

SEQ ID NO: 202542 - DNA, 75 bp, synthetic construct
  source 1..75: mol_type = other DNA
acgcggttaactcgacggtgaccgatatcatcatcgcactggggcaaagactgaatattgaactggtggcggagg

SEQ ID NO: 202543 - DNA, 75 bp, synthetic construct
  source 1..75: mol_type = other DNA
atttaccgcagctataggttctgacgcggttaactcgacggtgaccgatcatcatcgcactggggcaaagactga

SEQ ID NO: 202544 - DNA, 75 bp, synthetic construct
  source 1..75: mol_type = other DNA
tgattttggcactggcaatagctcgttttcctggctggaaacactacgcccggatgtgctgaaaattgacaaatc

SEQ ID NO: 202545 - DNA, 75 bp, synthetic construct
  source 1..75: mol_type = other DNA
aaaatccagggcatcggcgctggctttatcccggcgaaccttgatctcaaactggtcgataaagttattggcatc

SEQ ID NO: 202546 - DNA, 75 bp, synthetic construct
  source 1..75: mol_type = other DNA
accaatgaagaagctatctctaccgcacgtcgtctgatggaagaagaaggcattcttgctgggatctcttctggc

SEQ ID NO: 202547 - DNA, 75 bp, synthetic construct
  source 1..75: mol_type = other DNA
gcgtcagccgctacattaaaggcaccaaaggcaagactgatcttatctctgtcgccgttgagccaaccgattctc

SEQ ID NO: 202548 - DNA, 75 bp, synthetic construct
  source 1..75: mol_type = other DNA
gctaccagatgaaggttaaagagttcgttggtgtaccggagttcaaagcagaaacggtcatactgaaccgccccg

SEQ ID NO: 202549 - DNA, 75 bp, synthetic construct
  source 1..75: mol_type = other DNA
ttccgatggaagcataataagctttttctgcttctgcccccagcctttccagcaatcgtcgattgttataccagt

SEQ ID NO: 202550 - DNA, 75 bp, synthetic construct
  source 1..75: mol_type = other DNA
gctggtacagtgcctgtctgagaaagacgctgcggcatttggcagccagttcaccggctttaccattccgcaggc

SEQ ID NO: 202551 - DNA, 75 bp, synthetic construct
  source 1..75: mol_type = other DNA
agctgctctgaaagaaggcgtgagcaaagatgacgctgaagcactgaaaaaagctctggaagaagctggcgctga

SEQ ID NO: 202552 - DNA, 75 bp, synthetic construct
  source 1..75: mol_type = other DNA
tggttattacaaacttttaaatatcagaaaaatattcgcattcatgctttcaacgaagagggcatggagccgtat

SEQ ID NO: 202553 - DNA, 75 bp, synthetic construct
  source 1..75: mol_type = other DNA
aaaattatccacctggaagttcattcttatctggctggtgtttgtgattatggcctccggttatttcatcggtca

SEQ ID NO: 202554 - DNA, 75 bp, synthetic construct
  source 1..75: mol_type = other DNA
ctgaatatccgggaaagtgacttctggcagccgggaacccgtgccgtgatgttcagccagcctgccagccagtta

SEQ ID NO: 202555 - DNA, 75 bp, synthetic construct
  source 1..75: mol_type = other DNA
ttgaagaggcgctgtatctgtctaacatcgcttcggaagtgcatcttattcaccgccgtgacggtttccgcgcgg

SEQ ID NO: 202556 - DNA, 75 bp, synthetic construct
  source 1..75: mol_type = other DNA
tgattattgccaccggggcttctgcacgctatctcggcctgccctctgaagaggcttttaaaggtcgtggtgtct

SEQ ID NO: 202557 - DNA, 75 bp, synthetic construct
  source 1..75: mol_type = other DNA
tggtgtcgacaaacacctcgaatatcaactcgtcgaattcgcacctgtctcaacgtcagaactcttacggacaaa

SEQ ID NO: 202558 - DNA, 75 bp, synthetic construct
  source 1..75: mol_type = other DNA
aatggacgttgtagaactgatctctgcaatggaagaaaaattcggtgtttctgctgctgctgctgtagctgtagc

SEQ ID NO: 202559 - DNA, 75 bp, synthetic construct
  source 1..75: mol_type = other DNA
ggctgctctgaaagaaggcgtgagcaaagacgacgcagaagcactgaaaaaaagctctggaagaagctggcgctg

SEQ ID NO: 202560 - DNA, 75 bp, synthetic construct
  source 1..75: mol_type = other DNA
aaaaaatcctcattaagcgtctgatggataaagtggagaacggcaacatcattctgcacaccaaccgtacgctgg

SEQ ID NO: 202561 - DNA, 75 bp, synthetic construct
  source 1..75: mol_type = other DNA
tttttatatttgttttcaacgaattgaaattgtgcagacactgtctgcacaattcacccccacaattcgccagac

SEQ ID NO: 202562 - DNA, 75 bp, synthetic construct
  source 1..75: mol_type = other DNA
attccgcagacaccgtctgcagaattcccatcggcaaagatttggcagacgctgtctgccaaatctttccccttg

SEQ ID NO: 202563 - DNA, 75 bp, synthetic construct
  source 1..75: mol_type = other DNA
ggacgctaccggatgaaaatccgcccatcggtctggttctctgtgcagagaaaggagtcggagaagcacattatg

SEQ ID NO: 202564 - DNA, 75 bp, synthetic construct
  source 1..75: mol_type = other DNA
ataatgtccactgcgagataacagaaagcctgtctttgttacaggtgattattgacagcggtgatattggttcac

SEQ ID NO: 202565 - DNA, 75 bp, synthetic construct
  source 1..75: mol_type = other DNA
tagttttagtcgtgggtgttgcagtattggtaagtggatttattaaggtactatatattggcttcttcctgctgt

SEQ ID NO: 202566 - DNA, 75 bp, synthetic construct
  source 1..75: mol_type = other DNA
tcgcgattaaacctgttgacatgcgccggggcatcgacacactgacgcagtatatacaggataaactccggtcga

SEQ ID NO: 202567 - DNA, 75 bp, synthetic construct
  source 1..75: mol_type = other DNA
tgtttatcgctttgttgccgacgtctttagcgtgggcagcaccagcgcaacggacgttttccgactggcaggtca

SEQ ID NO: 202568 - DNA, 75 bp, synthetic construct
  source 1..75: mol_type = other DNA
gtgataaccgcaattttcgcgtgcaattatatctttttactccggtgtcgctgtttttaccggttcgatatttag

SEQ ID NO: 202569 - DNA, 75 bp, synthetic construct
  source 1..75: mol_type = other DNA
ccttacgatggtgctggatttaattcgccagtcagcgccgttccgtaaacaaaccagcctgaatggcttttatca

SEQ ID NO: 202570 - DNA, 75 bp, synthetic construct
  source 1..75: mol_type = other DNA
tggtgcgttacgccgcagaacccacctgcgataactggcatgggccagacgcctggcccacgttgtggatcaccc

SEQ ID NO: 202571 - DNA, 75 bp, synthetic construct
  source 1..75: mol_type = other DNA
aaaagcggcgttgttgtttattgatgcccagcaaaagcgcgttggcagtgagaccgcgtggataaagaaagggga

SEQ ID NO: 202572 - DNA, 75 bp, synthetic construct
  source 1..75: mol_type = other DNA
aagcattaatgatgattagctgtgaagcaggcgcgtataacaccattgatcttgcgtggattgtgtcgcgtaaaa

SEQ ID NO: 202573 - DNA, 75 bp, synthetic construct
  source 1..75: mol_type = other DNA
gcatctaatccgaatatgctatttatatttaatggcaacactaaattttttaataatgctttagatgaactttat

SEQ ID NO: 202574 - DNA, 75 bp, synthetic construct
  source 1..75: mol_type = other DNA
cgactgaagcgcagattaaaaataaacgccgtatctcacctttctggctgctgcctttcatcgcgctaatgattg

SEQ ID NO: 202575 - DNA, 75 bp, synthetic construct
  source 1..75: mol_type = other DNA
gaattaaccacgggtagtaagttagtaaaagctaacggtttaatggaagcctctaccattgcggcgattttgctc

SEQ ID NO: 202576 - DNA, 75 bp, synthetic construct
  source 1..75: mol_type = other DNA
gtttgtcgggcaggtggcggatagcttcgccaaaggccgggtgatgatgtttgccaacggcctgaagctgctggg

SEQ ID NO: 202577 - DNA, 75 bp, synthetic construct
  source 1..75: mol_type = other DNA
tcgcacccagccattttcgccgtggtgtgctgataaaagatctcaatcagtactggtttagcgctcacccgattc

SEQ ID NO: 202578 - DNA, 75 bp, synthetic construct
  source 1..75: mol_type = other DNA
tgttctgtcagcctttgcttaatgcgcgcagccagcaatgtattggtgtagagattttgctgcgctggaataatc

SEQ ID NO: 202579 - DNA, 75 bp, synthetic construct
  source 1..75: mol_type = other DNA
gcgtagccagcaatgtattggcgtagagattttgctgcgctggaataacccacgtcagggctggatctcgccgga

SEQ ID NO: 202580 - DNA, 75 bp, synthetic construct
  source 1..75: mol_type = other DNA
ctattttacgatccggcgtatgtgcagcttacctatcctggcggtgatgtcccgcaagaacgcggcgtatgttcc

SEQ ID NO: 202581 - DNA, 75 bp, synthetic construct
  source 1..75: mol_type = other DNA
cggtgactatcaaccaggcgatatcgtctcctggcgattagacaacggactggcgcacattggcgtgatttcaga

SEQ ID NO: 202582 - DNA, 75 bp, synthetic construct
  source 1..75: mol_type = other DNA
tgtgttcaggagccagcgtaaccgctcgatgaacaagcaagcgcctgtacgacgcgaggaagtgagcaagcagat

SEQ ID NO: 202583 - DNA, 75 bp, synthetic construct
  source 1..75: mol_type = other DNA
tggcgtggtggtactgattttctccctgcaacacgagctgctgccagcctatgctttgttgatgctgattggcgt

SEQ ID NO: 202584 - DNA, 75 bp, synthetic construct
  source 1..75: mol_type = other DNA
atgaaagcttcactcgcgttggtcagtcttctgacgggatttaccagccactccttaaaatctcccgccgttcca

SEQ ID NO: 202585 - DNA, 75 bp, synthetic construct
  source 1..75: mol_type = other DNA
atgaaagcttcactggcgctggtcagcctgctaacggcatttaccagctactccttaaaatctcccgccattcca

SEQ ID NO: 202586 - DNA, 75 bp, synthetic construct
  source 1..75: mol_type = other DNA
tttatcactatgacgctgatctggttgctgctttccgtgacgtcagtgctaaccctgaaacagtacgcgcaaaaa

SEQ ID NO: 202587 - DNA, 75 bp, synthetic construct
  source 1..75: mol_type = other DNA
gatggtgcctttcctcgccgcttacatcggttattccattgcagaacgttctgcgctggctccatgcgctatcgg

SEQ ID NO: 202588 - DNA, 75 bp, synthetic construct
  source 1..75: mol_type = other DNA
aggaactggcgcaatataatttgtggctggattatctggacgcactggaactggtcgatacttccggtgcgccag

SEQ ID NO: 202589 - DNA, 75 bp, synthetic construct
  source 1..75: mol_type = other DNA
aattgattaatcaggtcaacgaatacatatacagtaagcaatggcctggtaaagcagcgattggtcgcctgaaag

SEQ ID NO: 202590 - DNA, 75 bp, synthetic construct
  source 1..75: mol_type = other DNA
atgaatgagttggtacagatcctgaaaaatacccgtcagcacttaatgacgggcgtttcacacatgattcctttc

SEQ ID NO: 202591 - DNA, 75 bp, synthetic construct
  source 1..75: mol_type = other DNA
cacactgattaccgcaggcatcatgatgtggggcttgggcgagcctgtaggggcgttgaccaagggggaaccgca

SEQ ID NO: 202592 - DNA, 75 bp, synthetic construct
  source 1..75: mol_type = other DNA
atgaatgagttggtgcagatcctgaaaaatacccgtcagcatttaatgacgggcgtttcacacatgattcccttc

SEQ ID NO: 202593 - DNA, 75 bp, synthetic construct
  source 1..75: mol_type = other DNA
cagcaggatgatacgcagcagggtgatgataaattgcaggcgcttgcgaatgctgttaacgatctggaagcgcga

SEQ ID NO: 202594 - DNA, 75 bp, synthetic construct
  source 1..75: mol_type = other DNA
cgtgtggccaaaattgaaaatcagctcaatgatgttcagggtgatgtggataccattgcggaagtggtcgatacc

SEQ ID NO: 202595 - DNA, 75 bp, synthetic construct
  source 1..75: mol_type = other DNA
catacctcaaggggctggcggtaacagatactcccgccagtgttggcaccacacggctgcgctttagtagtcggc

SEQ ID NO: 202596 - DNA, 75 bp, synthetic construct
  source 1..75: mol_type = other DNA
aagaaatcaatttaatctcacaggacactaaatgtctttactctggcgtgctgacgcagactctttcggaaaata

SEQ ID NO: 202597 - DNA, 75 bp, synthetic construct
  source 1..75: mol_type = other DNA
gtcggaggcgcggagccgagcggtaatccgcggggcgtcagtggttttcggtgcagggtattacggaagataatc

SEQ ID NO: 202598 - DNA, 75 bp, synthetic construct
  source 1..75: mol_type = other DNA
gctgtatttctccgtagagccggagctgaactggcgcggaggggatcgtacatatctgaaggggctggctgtcac

SEQ ID NO: 202599 - DNA, 75 bp, synthetic construct
  source 1..75: mol_type = other DNA
gatgaccaaagacgaagcaggagtctggtcgtggcgcacacctatcctgaaaggcaacctgtacgtagtattttt

SEQ ID NO: 202600 - DNA, 75 bp, synthetic construct
  source 1..75: mol_type = other DNA
acctggtgtggagcgaagatgcgccgagccgtgaatatcaggccattgaacaactggcagagcatgtgcctggcg

SEQ ID NO: 202601 - DNA, 75 bp, synthetic construct
  source 1..75: mol_type = other DNA
aaattcaaaacatgaaccgcaagatattggcgcatccgctgacgcgtctgcaccagcgcgttctgcccgacagga

SEQ ID NO: 202602 - DNA, 75 bp, synthetic construct
  source 1..75: mol_type = other DNA
taacgccttcgaagccagcctgcgtagcgatgaaggaaacaagatcgttgaattattcctcagcgatgaaggcga

SEQ ID NO: 202603 - DNA, 75 bp, synthetic construct
  source 1..75: mol_type = other DNA
tgccggtaggtacgctgttggtggaactgatttatgtggttgaagcccaggctccgaagcagttgcagctcaacc

SEQ ID NO: 202604 - DNA, 75 bp, synthetic construct
  source 1..75: mol_type = other DNA
ccgtcagcaggtaatggaaagcctggatcaggcaggctggcgtctggatgccctgcgtttgatcgttgtgacgca

SEQ ID NO: 202605 - DNA, 75 bp, synthetic construct
  source 1..75: mol_type = other DNA
gccgtgaccgcctgctggagatccactccaacggtggcgaaaaagcgcaggcattagctgaaagcattgaagagc

SEQ ID NO: 202606 - DNA, 75 bp, synthetic construct
  source 1..75: mol_type = other DNA
ctgcggtaccttattttcaatctatattccgaaagtgaaacctaatgacagctccattaaccctattgatcgttg

SEQ ID NO: 202607 - DNA, 75 bp, synthetic construct
  source 1..75: mol_type = other DNA
tactgactttgactatgtggtgattggtgatcgtgactcgatccgcctctatcaccctaatcccgagaaaattgg

SEQ ID NO: 202608 - DNA, 75 bp, synthetic construct
  source 1..75: mol_type = other DNA
gatagctggcgggctgagtttttattaccgatggcaggcgtgtttgtcgtgctgttagggattctgatgttgctg

SEQ ID NO: 202609 - DNA, 75 bp, synthetic construct
  source 1..75: mol_type = other DNA
atagcctgcgtgaagcattcgccgatcgccaggtggcggggttgctttttggtaaagtgcagcgcgcccgtgaac

SEQ ID NO: 202610 - DNA, 75 bp, synthetic construct
  source 1..75: mol_type = other DNA
atcaggcgaaaattattgcctccaatgacagcatcatcacggcggttaaagcgcgtaattacaaacggctggcga

SEQ ID NO: 202611 - DNA, 75 bp, synthetic construct
  source 1..75: mol_type = other DNA
gccgatttctttaccgaacagattgatgaaaaacgtcaggatgtggtggctaactttaacggtctgagcgttatt

SEQ ID NO: 202612 - DNA, 75 bp, synthetic construct
  source 1..75: mol_type = other DNA
agctcgcggactacatcaacacctgtatgttcgacccgactacacagttctactatgacgtgcgtattgaagata

SEQ ID NO: 202613 - DNA, 75 bp, synthetic construct
  source 1..75: mol_type = other DNA
aatttatacggtagacgtactcggcccgcatgaggatgggtggtgcaagcttccactgaaaggagtagtcggtga

SEQ ID NO: 202614 - DNA, 75 bp, synthetic construct
  source 1..75: mol_type = other DNA
gttgagttaacctttagcaacctttgcgagatagcgtcattaagccgttccttggtgaacgaaggccttaaaatt

SEQ ID NO: 202615 - DNA, 75 bp, synthetic construct
  source 1..75: mol_type = other DNA
gataaaaccattgctggcgagtaccctgactatcagcgcaaaatcagcgccacccgtgatggcctgaaagtcacc

SEQ ID NO: 202616 - DNA, 75 bp, synthetic construct
  source 1..75: mol_type = other DNA
cgcgggcgcgtatgggtggatcagttctggtttggtctgaaagggatggagcgttacggttatcgtgatgatgcc

SEQ ID NO: 202617 - DNA, 75 bp, synthetic construct
  source 1..75: mol_type = other DNA
gatgatgccctgaagctggcggatacgttcttccagcacgccaaaggattaaccgccgatggtccgattcaggag

SEQ ID NO: 202618 - DNA, 75 bp, synthetic construct
  source 1..75: mol_type = other DNA
cggctttctgatccgcattattgagtggtggcagaccggagaaacaccgggcacgtttcgtctggatatcggcgt

SEQ ID NO: 202619 - DNA, 75 bp, synthetic construct
  source 1..75: mol_type = other DNA
ggaatccggctacctgtccggtcagtttcctgccttatctcgcctgggcgttctctgtggatcgctgggacgagg

SEQ ID NO: 202620 - DNA, 75 bp, synthetic construct
  source 1..75: mol_type = other DNA
gcgctatcggtcgacaggtgggatgagaaatggccggaggcgacaaagcgcagcgtctgcgcgtcctcatttttc

SEQ ID NO: 202621 - DNA, 75 bp, synthetic construct
  source 1..75: mol_type = other DNA
caagttcagcctgaccagatgatcaacattagcgggagtctggataagaaaagcactccagccgtcgttcgggtc

SEQ ID NO: 202622 - DNA, 75 bp, synthetic construct
  source 1..75: mol_type = other DNA
taggtgcaatccggcgtgtggtggagccgctgggctatctcatcaacgtgacggagtggtgggaaaccagtgacc

SEQ ID NO: 202623 - DNA, 75 bp, synthetic construct
  source 1..75: mol_type = other DNA
cgacgccctgacggtttatccctacaccccggagtccattattgtcgaaggggattatttccctgccccggccat

SEQ ID NO: 202624 - DNA, 75 bp, synthetic construct
  source 1..75: mol_type = other DNA
ttttatctcaccgcctcacagcaacgctgggaagagtatctgaagaaaggattaactaacccggatgcaacgccg

SEQ ID NO: 202625 - DNA, 75 bp, synthetic construct
  source 1..75: mol_type = other DNA
atggtgtgtttctgtttatactggcgttcgccctggtgagctgtgtgcacttggatgggaggacatagatctgaa

SEQ ID NO: 202626 - DNA, 75 bp, synthetic construct
  source 1..75: mol_type = other DNA
gagcaaagagcatatcattgatgttcacctcagagagtatggcagaacagaaaaacaaaatgcacctttgttttt

SEQ ID NO: 202627 - DNA, 75 bp, synthetic construct
  source 1..75: mol_type = other DNA
tgaactacgcgcctctgtttgttacgcaataaaaactggtgttttcgactatgcaaaacagtttccctcctcacg

SEQ ID NO: 202628 - DNA, 75 bp, synthetic construct
  source 1..75: mol_type = other DNA
cacgaactccgcatgcggcggaagggttaaccagtcatctggagatttgtaccccacagcccggttttgacgagc

SEQ ID NO: 202629 - DNA, 75 bp, synthetic construct
  source 1..75: mol_type = other DNA
tttacgagaaattcgacatcatgcagctacccaactttatccagtggaaaaatttaggcgcgggtgaatatgtta

SEQ ID NO: 202630 - DNA, 75 bp, synthetic construct
  source 1..75: mol_type = other DNA
ggacgctcagcgcactgcgggaaacctacggttttatcccctcggatatctcaatcggcaccttcgatgaacatc

SEQ ID NO: 202631 - DNA, 75 bp, synthetic construct
  source 1..75: mol_type = other DNA
cattggtccggatgaagaagcgcagctcaagaaaattgctcaggcgctgcagttaccgctggagcagtacctgtg

SEQ ID NO: 202632 - DNA, 75 bp, synthetic construct
  source 1..75: mol_type = other DNA
gccaatgccgaagctcttcgtcagctggctgatgttgccggtactgatgatgcagttaatgtgctgtgcctgtgt

SEQ ID NO: 202633 - DNA, 75 bp, synthetic construct
  source 1..75: mol_type = other DNA
gcgtgccggaatatggcgcgacccgcgataaagcccataacaccgagagcggcgagatgctgtttacggtgaaaa

SEQ ID NO: 202634 - DNA, 75 bp, synthetic construct
  source 1..75: mol_type = other DNA
cacgcaaggccattaccgaagtgaagaagatggagaatcgcgatgcagtggaggcgaccgtctggggtgcgtatt

SEQ ID NO: 202635 - DNA, 75 bp, synthetic construct
  source 1..75: mol_type = other DNA
gcgcgaatgctcatgcattgcgtgaactggctgacgtggcaggtacagacgacgcggtgaatgtgctgtgcctgt

SEQ ID NO: 202636 - DNA, 75 bp, synthetic construct
  source 1..75: mol_type = other DNA
ctggacggcaaacgtctcaaaaacaggaaagatgaatggattttcgttcgaatatcaaaacatcgcatttaaagc

SEQ ID NO: 202637 - DNA, 75 bp, synthetic construct
  source 1..75: mol_type = other DNA
ccgaactcaggaagcctcactggaacatgaatgtgtggaaaacgtcagttccatcgaaatcatgaaggcaacgga

SEQ ID NO: 202638 - DNA, 75 bp, synthetic construct
  source 1..75: mol_type = other DNA
ggttactttgtgttaaccaaagcgatggtgaccatcaacccagaaataaacatgggtgtactggcggggatcatt

SEQ ID NO: 202639 - DNA, 75 bp, synthetic construct
  source 1..75: mol_type = other DNA
ttgtggcactggatcaggttcctgacgaagcattcgccagcaaagcggtgggtgacggtgtggcgcgtgaaaccg

SEQ ID NO: 202640 - DNA, 75 bp, synthetic construct
  source 1..75: mol_type = other DNA
atcaccattttagcaaccggcgggaccattgccggtggtggtgactccgcaaccaaatctaactacacagcgggt

SEQ ID NO: 202641 - DNA, 75 bp, synthetic construct
  source 1..75: mol_type = other DNA
agcctctgatggttaccagactgacctgccgctgtcagtgtttgatccgcagtattatcacccactaccagtgtc

SEQ ID NO: 202642 - DNA, 75 bp, synthetic construct
  source 1..75: mol_type = other DNA
cagttttcgctctgagcctttgtctgctgtcaccggctcaggccgaagaacagcgttacatcagtatccgcaaca

SEQ ID NO: 202643 - DNA, 75 bp, synthetic construct
  source 1..75: mol_type = other DNA
ggtttgcagcaatatcgacgatttcagtggcctgaacattcaagctcagggtcatgttgtggcgggtcaaacgcc

SEQ ID NO: 202644 - DNA, 75 bp, synthetic construct
  source 1..75: mol_type = other DNA
gcatcattcttgtcgattcgacgccgcaaattgcagcacaactgcctgaacgtatcgaaaaacgtctgcaacata

SEQ ID NO: 202645 - DNA, 75 bp, synthetic construct
  source 1..75: mol_type = other DNA
aaacaatctgcgcaatattttttatactcatgaccgccctctcctctggcgttttctcaatgttacgctaaccga

SEQ ID NO: 202646 - DNA, 75 bp, synthetic construct
  source 1..75: mol_type = other DNA
gggtgcggcactggcgatgtacttcgcagcaccgaaagagcgtcgtccgatggttggcgggatgctgctttccgt

SEQ ID NO: 202647 - DNA, 75 bp, synthetic construct
  source 1..75: mol_type = other DNA
ggacggttttccacggcgacatcaaccgcttctatgccggtgacggcactgcagggatgttcatgtccggcttct

SEQ ID NO: 202648 - DNA, 75 bp, synthetic construct
  source 1..75: mol_type = other DNA
atggatctggattacctgaacgctaacgcccgttcgatgattagcccggtggtttgcagcaatatcgacgatttc

SEQ ID NO: 202649 - DNA, 75 bp, synthetic construct
  source 1..75: mol_type = other DNA
atgcttatgcgtccggtgacagggagcagatgcgtaatcttattacagcattcccagaagagtttgaggaagtcc

SEQ ID NO: 202650 - DNA, 75 bp, synthetic construct
  source 1..75: mol_type = other DNA
acgaaggatgcgatgggaactatccagcgcgtactggagaaggtgaacgcactgccgcaggataaacgtctgtct

SEQ ID NO: 202651 - DNA, 75 bp, synthetic construct
  source 1..75: mol_type = other DNA
gtggcaaccgcactgcgcgtttttatgaaatgcaggatgccatcaaagctgccagcgaacagttgccgatggaaa

SEQ ID NO: 202652 - DNA, 75 bp, synthetic construct
  source 1..75: mol_type = other DNA
agtcactaccacggctgcagggctggcaatgggtgcgccagttatggcggcggtaaaaagctataccagcatgga

SEQ ID NO: 202653 - DNA, 75 bp, synthetic construct
  source 1..75: mol_type = other DNA
aaaggggcagacatcattgatgtcatgcaacgcctgggcggtgtggctgatcgtctggattatcgtaaagcggcg

SEQ ID NO: 202654 - DNA, 75 bp, synthetic construct
  source 1..75: mol_type = other DNA
gttgctgtgatgtttctgaatccacttgcagcactacgcggcgggctgactgccgcaggctcggtgctgcgagtg

SEQ ID NO: 202655 - DNA, 75 bp, synthetic construct
  source 1..75: mol_type = other DNA
aagaacgccagaaaaagctgcagcagcagacggcgcttgtgcgcgcagaactttatcgtgctggtatttcagcta

SEQ ID NO: 202656 - DNA, 75 bp, synthetic construct
  source 1..75: mol_type = other DNA
ctgacgggcacactgatgaaagtagcggctgtggtggctgcggttaccgtgggcctcggcaccctggcggtgatg

SEQ ID NO: 202657 - DNA, 75 bp, synthetic construct
  source 1..75: mol_type = other DNA
atgcaggtaaataaaaccgctgataatttcatttttattaaaaaacatatctaccgcatatttcagtggatgcat

SEQ ID NO: 202658 - DNA, 75 bp, synthetic construct
  source 1..75: mol_type = other DNA
catcgcttggtccgggcgcatttggcaggttcatgatagataatgagcaggagatgcgtcgtttaggtatccctc

SEQ ID NO: 202659 - DNA, 75 bp, synthetic construct
  source 1..75: mol_type = other DNA
gttgctgtgatgtttatgaatccactggcagcactacgcggtggactggctgccgcaggcgcggtgctgcgtgtg

SEQ ID NO: 202660 - DNA, 75 bp, synthetic construct
  source 1..75: mol_type = other DNA
ggattgaggcaccgacgcagatcatcatccagacgcagccaggacaaagtgctcaggatattgcgcgggaggtgg

SEQ ID NO: 202661 - DNA, 75 bp, synthetic construct
  source 1..75: mol_type = other DNA
gttatgcatccgctggactccctcaaatccggcgtatcctggttgctggaaaaactcggcattgtcagtaaagag

SEQ ID NO: 202662 - DNA, 75 bp, synthetic construct
  source 1..75: mol_type = other DNA
tcccgggggcgactgcatattttgatttttacaatcaacggttgaatttaaatgtgcctaatatagcactatatt

SEQ ID NO: 202663 - DNA, 75 bp, synthetic construct
  source 1..75: mol_type = other DNA
atgaaaaaggtttttgctgtttcagtggtgggcgcagcctgtgtatttgcagtaaatgcaggtgctgaggaaggt

SEQ ID NO: 202664 - DNA, 75 bp, synthetic construct
  source 1..75: mol_type = other DNA
acatggcattctccgatgggggatggtggtcgggaagacacacagaacaggctcagtgtgaataccctgatggtg

SEQ ID NO: 202665 - DNA, 75 bp, synthetic construct
  source 1..75: mol_type = other DNA
ctctggacctcagctatcgctatcttgatgcaggtgacagcagtgtgagttacaaggatgagtggggcgataaat

SEQ ID NO: 202666 - DNA, 75 bp, synthetic construct
  source 1..75: mol_type = other DNA
taaggatgagtggggtgataaatacaaatcagaagttgatgtgaaaagccatgatattatttttggcgtgactta

SEQ ID NO: 202667 - DNA, 75 bp, synthetic construct
  source 1..75: mol_type = other DNA
caattgccattgcgggggtactttcagccagcgctatggctgatgaagggaaaaatggtttttatctgagcggta

SEQ ID NO: 202668 - DNA, 75 bp, synthetic construct
  source 1..75: mol_type = other DNA
atttcgctgttgaaaaacaaagcgttgccggtaggtactctgttactggaactgatttacgtggttgaagctcag

SEQ ID NO: 202669 - DNA, 75 bp, synthetic construct
  source 1..75: mol_type = other DNA
ttcacgctatcctccagttgggtgaagcgcagattgagaagtctgcccgtacgttgattgatgcggcgcgtaacg

SEQ ID NO: 202670 - DNA, 75 bp, synthetic construct
  source 1..75: mol_type = other DNA
gcggtgaacccgaacattcgtgacgacgaactgaccgccattgagagcaaccgtcagcaggtgatggaaagcctg

SEQ ID NO: 202671 - DNA, 75 bp, synthetic construct
  source 1..75: mol_type = other DNA
acgatactgtatttggtgcaggccttgcggtgggctatgatttttatcaacattacaatgttcctgtgcgcacgg

SEQ ID NO: 202672 - DNA, 75 bp, synthetic construct
  source 1..75: mol_type = other DNA
caaaaactgccgcgagcaacatgaagcgctgaaagcacagctggaacaaggtcgtgaccgcctgctggaaatcca

SEQ ID NO: 202673 - DNA, 75 bp, synthetic construct
  source 1..75: mol_type = other DNA
ttcacgctatccttcagctgggtgaagcgcagattgagaagtctgcccgtgcactgattgacgcggcacgtaacg

SEQ ID NO: 202674 - DNA, 75 bp, synthetic construct
  source 1..75: mol_type = other DNA
tcatcttcaaagttaaaaaaaatcaaactgttattgactgcaataaaagatggtgttgtaggtaaaatgggaaaa

SEQ ID NO: 202675 - DNA, 75 bp, synthetic construct
  source 1..75: mol_type = other DNA
gctgaatatggtgcggatgcacttccgtttataccaaaatgtgtcgcgagaaaatattagtgatgcgatgactgg

SEQ ID NO: 202676 - DNA, 75 bp, synthetic construct
  source 1..75: mol_type = other DNA
ctgatagccatcatcgtgagggaatattgcagggtgcattgctggtggtcgattcctcactcactcctgttgatg

SEQ ID NO: 202677 - DNA, 75 bp, synthetic construct
  source 1..75: mol_type = other DNA
attatgttgaaagccgaatttctcttgatcagcagataattagacatccatcagcaacctacttcatgcgggcag

SEQ ID NO: 202678 - DNA, 75 bp, synthetic construct
  source 1..75: mol_type = other DNA
ttatgccatccgactcggtggcgatgaattctgcatcattcttgtcgattcgacgccgcaaattgcagcacaact

SEQ ID NO: 202679 - DNA, 75 bp, synthetic construct
  source 1..75: mol_type = other DNA
ttaaacaatcgattcgtaaaagtgattatgccatccgactcggtggcgatgaattctgcatcattcttgtcgatt

SEQ ID NO: 202680 - DNA, 75 bp, synthetic construct
  source 1..75: mol_type = other DNA
tctgcgaggcttttgagtctgccaataatacccatggcttaaacctgactgcccataaatacccgggcttacgcg

SEQ ID NO: 202681 - DNA, 75 bp, synthetic construct
  source 1..75: mol_type = other DNA
acccaacgccaacatgtgcgtgatgcagcaagccgctggctcaagctcagcaataccgccgaactcaggcgtgat

SEQ ID NO: 202682 - DNA, 75 bp, synthetic construct
  source 1..75: mol_type = other DNA
ccgtgctgcgccgcccgatctacttcgggcagaaagacctttccagcacaggtgaaggtttcgagaccgatctgg

SEQ ID NO: 202683 - DNA, 75 bp, synthetic construct
  source 1..75: mol_type = other DNA
ctgatattgtcatgatgcacaatattggaaatgaagcaaaacgagtattgggtaaaaatgtgataatgcatagtg

SEQ ID NO: 202684 - DNA, 75 bp, synthetic construct
  source 1..75: mol_type = other DNA
cctacaccccagatgaagataagtcagagcttgttgaagctggagttgtatttttacgtgatgaaaacggtaatg

SEQ ID NO: 202685 - DNA, 75 bp, synthetic construct
  source 1..75: mol_type = other DNA
atgaacgagaaaaaatatcaatccctgcgtaaaaagtcaataagtaagggggggatggcttgtatcgtcatgctg

SEQ ID NO: 202686 - DNA, 75 bp, synthetic construct
  source 1..75: mol_type = other DNA
attctatggtcgcggctctgcgaattcccgctatacactggatacatgggagtccccgtctggagataatggttg

SEQ ID NO: 202687 - DNA, 75 bp, synthetic construct
  source 1..75: mol_type = other DNA
ccggtcagccgccacatgacagggctgaatatcattcaggagattccgggggatattttcgcggcggcagcaact

SEQ ID NO: 202688 - DNA, 75 bp, synthetic construct
  source 1..75: mol_type = other DNA
atttctttgccggtatccgcgatatcgttggcggacgctccggtgcctacgaaaaagaactgcgtaaagcgcggg

SEQ ID NO: 202689 - DNA, 75 bp, synthetic construct
  source 1..75: mol_type = other DNA
gagcacggttttatgattcatcattgagtaaacaagaaaacgatgaaatattacttaaaaattgtagcggtaagc

SEQ ID NO: 202690 - DNA, 75 bp, synthetic construct
  source 1..75: mol_type = other DNA
caggatgaactggcgctacattcacagcgtaaagcggcagccgcaattgagtccggtgcttttacagccgaaatc

SEQ ID NO: 202691 - DNA, 75 bp, synthetic construct
  source 1..75: mol_type = other DNA
ataaaggccaactggagcaagaaattctcgataacgcctggctaactgccccggcagacctgaacattctgttca

SEQ ID NO: 202692 - DNA, 75 bp, synthetic construct
  source 1..75: mol_type = other DNA
atgctaaaacagcaggatatgagcgaaaccgccagagtggtgtttaatgaattaagcgtcaccgaaccagcgacc

SEQ ID NO: 202693 - DNA, 75 bp, synthetic construct
  source 1..75: mol_type = other DNA
cgaattgggtcagttcgaagataaagataatatcttcaaaattattatttataacaccataggtgaaagtgatac

SEQ ID NO: 202694 - DNA, 75 bp, synthetic construct
  source 1..75: mol_type = other DNA
ggacagagaaagcgcggatctgggaagtgacggacagaacggtcaggacctggattggggaggcggttgccgccg

SEQ ID NO: 202695 - DNA, 75 bp, synthetic construct
  source 1..75: mol_type = other DNA
ggatgtggctgcacggcaccgggtgcagttttcgatgcctgagtccgatgcggtcacaatgctgaaaaacagaca

SEQ ID NO: 202696 - DNA, 75 bp, synthetic construct
  source 1..75: mol_type = other DNA
tgtggctgcccggcaccgggtgcagttttcgatgcctgagtccgatgcggtcacaatgctgaaaaacagacacgc

SEQ ID NO: 202697 - DNA, 75 bp, synthetic construct
  source 1..75: mol_type = other DNA
caacggtggcgccatcgccgtcggccacccgatcggcgcctccggctgccgggtactggtgacgctgctgcacga

SEQ ID NO: 202698 - DNA, 75 bp, synthetic construct
  source 1..75: mol_type = other DNA
gctcaacgtctggatctgggcactgctctgggatcgctttcgttcagtcttacatttgtggtgatcctgctgatt

SEQ ID NO: 202699 - DNA, 75 bp, synthetic construct
  source 1..75: mol_type = other DNA
atcggcattttgccaatcatctttgctctctggctgcgtaaaaacatcccggaagcggaagactggaaagagaaa

SEQ ID NO: 202700 - DNA, 75 bp, synthetic construct
  source 1..75: mol_type = other DNA
aatttactgcatcactttcttattgccatgcctgctctccaggatccgattttccgtcgttccgtggtctacatt

SEQ ID NO: 202701 - DNA, 75 bp, synthetic construct
  source 1..75: mol_type = other DNA
cgacgatcagtatcgccagctcgctgctgtagcccacagtctggagatgggcgtgctgaccgaagtcagtaatga

SEQ ID NO: 202702 - DNA, 75 bp, synthetic construct
  source 1..75: mol_type = other DNA
agtcaatgatatccatggtcataatattggcgttgtcggccagggaagtcagttatttattcgcaccaatgaagt

SEQ ID NO: 202703 - DNA, 75 bp, synthetic construct
  source 1..75: mol_type = other DNA
cgaccagggggaagtgaaagcgggggaatttgctgagcctatctgcgagctggaactggaactgcttagcggcga

SEQ ID NO: 202704 - DNA, 75 bp, synthetic construct
  source 1..75: mol_type = other DNA
tgaataacggagccatacaggcgtccagtgagcagggctacggaaaagcttttgcggacgtggttagcggattgc

SEQ ID NO: 202705 - DNA, 75 bp, synthetic construct
  source 1..75: mol_type = other DNA
ttatggtgtaacaggaacaccttctttcttcgtcaggggaaaatatttgatgaataacggagccatacagccgtc

SEQ ID NO: 202706 - DNA, 75 bp, synthetic construct
  source 1..75: mol_type = other DNA
cgtcaaaaggcgtgatccgtgatgatttcgatccggcacgcattgcaaccgtttacagaaattatgcttcggcaa

SEQ ID NO: 202707 - DNA, 75 bp, synthetic construct
  source 1..75: mol_type = other DNA
cgttggcggacgctccggtgcctacgaaaaagagctacgtaaagcgcgggagatcgcctttgaggagctcggctc

SEQ ID NO: 202708 - DNA, 75 bp, synthetic construct
  source 1..75: mol_type = other DNA
atttctttgccggtatccgcgatatcgttggcggacgttccggtgcgtatgaaaaagaactgcgtaaagcacggg

SEQ ID NO: 202709 - DNA, 75 bp, synthetic construct
  source 1..75: mol_type = other DNA
cgccgattgccgaccgctggcgcgatgcggcaagactgattggtgttgatattctcactatgcctggtgtggcgg

SEQ ID NO: 202710 - DNA, 75 bp, synthetic construct
  source 1..75: mol_type = other DNA
gcgagcactcacttacgtgacctgctgacccaatgcgaagcgaccatcgcttctgcggtgtctgccgtaacggcg

SEQ ID NO: 202711 - DNA, 75 bp, synthetic construct
  source 1..75: mol_type = other DNA
ccagttgccgcgcctgacgcgtgatatcgactctatactgctgctggcgggttactacgatcctcttgttgcgca

SEQ ID NO: 202712 - DNA, 75 bp, synthetic construct
  source 1..75: mol_type = other DNA
agattgcctttgaggaacttggtgagcaggcgcgggcgttgggggccgatgccgtagtcggtattgatatcgact

SEQ ID NO: 202713 - DNA, 75 bp, synthetic construct
  source 1..75: mol_type = other DNA
gctggataattttattaatcgcccagtgaaacttatcattggtgataaagaaatatttggcatttcacgcggaat

SEQ ID NO: 202714 - DNA, 75 bp, synthetic construct
  source 1..75: mol_type = other DNA
atcgtaatacgttggcggccatgctaatacgtgaattacgcgcggcgctggaactcttcgagcaagaaggattgg

SEQ ID NO: 202715 - DNA, 75 bp, synthetic construct
  source 1..75: mol_type = other DNA
cgcatgttcaacctgaaaacgccgggtcgtgaagataaagaagacgagatcgttactgaagaggctaacagcaat

SEQ ID NO: 202716 - DNA, 75 bp, synthetic construct
  source 1..75: mol_type = other DNA
aattaatcgcgctgttagcgaacggcgaatttcactctggtgagcagctaggtgaaacgttaggaatgagccggg

SEQ ID NO: 202717 - DNA, 75 bp, synthetic construct
  source 1..75: mol_type = other DNA
caagaaggattggcaccttatctgtcgcgctgggaaaagctggataattttattaatcgcccagtgaaacttatc

SEQ ID NO: 202718 - DNA, 75 bp, synthetic construct
  source 1..75: mol_type = other DNA
ggatgggcggtgaaatatccctgcgtagtgcagaaaaaaaagaaaggggagcattagcccccctgaaaattattt

SEQ ID NO: 202719 - DNA, 75 bp, synthetic construct
  source 1..75: mol_type = other DNA
ctggagcaggacttcagcgccagcggcccgaaccagaagtgggcgggtgacatcacgtacttgcgtaccgatgag

SEQ ID NO: 202720 - DNA, 75 bp, synthetic construct
  source 1..75: mol_type = other DNA
aaccagaagtgggcgggtgacatcacgtacttgcgtaccgatgagggctggttgtatctcgcagtagtcatcgac

SEQ ID NO: 202721 - DNA, 75 bp, synthetic construct
  source 1..75: mol_type = other DNA
cgcggctttttttcattagatctttatagatttcgtcatcgtctattcaacgggcaaatgagtcatgaggtgcgg

SEQ ID NO: 202722 - DNA, 75 bp, synthetic construct
  source 1..75: mol_type = other DNA
ttgtggcactggatcaggttcctgacgaagcattcgccagcaaagcggtgggtgacggtgtggcggtgaaaccga

SEQ ID NO: 202723 - DNA, 75 bp, synthetic construct
  source 1..75: mol_type = other DNA
gggcaaccgattctggaaatggatctggattacctgaacgctaacgcccgttcgatgattagcccggtggtttgc

SEQ ID NO: 202724 - DNA, 75 bp, synthetic construct
  source 1..75: mol_type = other DNA
ggtatcattaccggtctggttggtggcgcagcctataaccgttggtccgatattaaactgccggacttcctgagc

SEQ ID NO: 202725 - DNA, 75 bp, synthetic construct
  source 1..75: mol_type = other DNA
tccgccattcctatgcgatgcacatgctgtatgccggtataccactgaaggttctgcagagcctgatggggcata

SEQ ID NO: 202726 - DNA, 75 bp, synthetic construct
  source 1..75: mol_type = other DNA
agtgcgtcatttagccagccgcagcgccaatgctgccaacgatattcgcaagctgattgatgccagtgctgataa

SEQ ID NO: 202727 - DNA, 75 bp, synthetic construct
  source 1..75: mol_type = other DNA
tgatattgcagacagtactcagcgcattggcactattacttcgctgattaacgatattgcttttcagaccaatat

SEQ ID NO: 202728 - DNA, 75 bp, synthetic construct
  source 1..75: mol_type = other DNA
ctgatgtgccgttggctaattaacgatgtctcaagccaggtgtccagtgtcagaaacggcagtgagacgctggcg

SEQ ID NO: 202729 - DNA, 75 bp, synthetic construct
  source 1..75: mol_type = other DNA
gaaggtctttgcgctggatgtcgcggcgcgtcatcgtgtgcagttcgccatgccggaagccgatgcggtagcgct

SEQ ID NO: 202730 - DNA, 75 bp, synthetic construct
  source 1..75: mol_type = other DNA
ccgtagccgacgactatatgtcccgtatgggttttaatgatacacatcttcgttgctatgttcttcataatgatg

SEQ ID NO: 202731 - DNA, 75 bp, synthetic construct
  source 1..75: mol_type = other DNA
tgaaaattccgctggaaagacgaaacaagcgcaccggcagaatggagaaggcacgtatctgggagatcacagacc

SEQ ID NO: 202732 - DNA, 75 bp, synthetic construct
  source 1..75: mol_type = other DNA
cgagcatccgggcatcgccaaagtgtcgtttaccggcggcgtcgccagcggcaaaaaggtgatggctaacgcggc

SEQ ID NO: 202733 - DNA, 75 bp, synthetic construct
  source 1..75: mol_type = other DNA
cgttttcgatccgcaaactaacttcggcccgctggtcagcttcccgcatcgcgataacgtgctgcgctatatcgc

SEQ ID NO: 202734 - DNA, 75 bp, synthetic construct
  source 1..75: mol_type = other DNA
cgcgcgcatcgcgtcattcatcagctggaagccggcatttgctggatcaacacctggggagaatccccggcggag

SEQ ID NO: 202735 - DNA, 75 bp, synthetic construct
  source 1..75: mol_type = other DNA
ccagcaaacggtagcgaccatgagccagatggcggcgtcggtgaaacagaactcagcgacggcttcggctgccga

SEQ ID NO: 202736 - DNA, 75 bp, synthetic construct
  source 1..75: mol_type = other DNA
acaatgcctgatgcgatgctggcgcatcttatcaggcctacggggtgtagggcacgcgacatccggcaatcggtg

SEQ ID NO: 202737 - DNA, 75 bp, synthetic construct
  source 1..75: mol_type = other DNA
gcggtggaagcggcgcgtgccggcgaacagggcaaaggttttgcagtggtggcaggggaagtgcgtcatttagcc

SEQ ID NO: 202738 - DNA, 75 bp, synthetic construct
  source 1..75: mol_type = other DNA
gatggtcgccgggcgcggcgtggcgcaactgatcacctccgggcagatcgtcacgtttaactcgccggatctctc

SEQ ID NO: 202739 - DNA, 75 bp, synthetic construct
  source 1..75: mol_type = other DNA
ccgtaggggcagtgatggctatcgccggagcgactaccgctgcgatgacggtcgcgggatttagcctgccgattg

SEQ ID NO: 202740 - DNA, 75 bp, synthetic construct
  source 1..75: mol_type = other DNA
ggcgggcgctttaacctgctgctctcagtcgtgggggcgctgattattcaggggatgaacaccggaattttactt

SEQ ID NO: 202741 - DNA, 75 bp, synthetic construct
  source 1..75: mol_type = other DNA
cggggcgacaactgccgcaatgacggttgcgggatttagcgtaccgattgtgctgctcagtgcattgggtacagg

SEQ ID NO: 202742 - DNA, 75 bp, synthetic construct
  source 1..75: mol_type = other DNA
ccgtaggcgcggtgatggctattgccggagccacaacggccgcgatgacggtagcggggtatagcgtgccgattg

SEQ ID NO: 202743 - DNA, 75 bp, synthetic construct
  source 1..75: mol_type = other DNA
ggtgatcggcggtggatcgctgatgggcgggcgttttaacctgctgctttcggtagtgggggcgctgatcattca

SEQ ID NO: 202744 - DNA, 75 bp, synthetic construct
  source 1..75: mol_type = other DNA
atgatcgaaaccctgctggatttttcgggacttgaagaaataagccgtaatttgcagcttctgagtggtgcagaa

SEQ ID NO: 202745 - DNA, 75 bp, synthetic construct
  source 1..75: mol_type = other DNA
tttctctggttcatgaaatggtgaaacgtaatgcccgcaaaggactggctacgctttgtatcggcgggggccagg

SEQ ID NO: 202746 - DNA, 75 bp, synthetic construct
  source 1..75: mol_type = other DNA
cgcgcctttgccagcgttggtgttgatcctgcgctgatgggcattgctcctgtgtatgcgactcgccgttgcctg

SEQ ID NO: 202747 - DNA, 75 bp, synthetic construct
  source 1..75: mol_type = other DNA
cgtggcggcggatattcgcggtgccgatgccaataacgccgggttatggctggagctggacgccattcttgcggt

SEQ ID NO: 202748 - DNA, 75 bp, synthetic construct
  source 1..75: mol_type = other DNA
tgatgggcgggcgctttaacctgctgctttcggtggtgggggcgctgattattcagggaatgaacaccggaattt

SEQ ID NO: 202749 - DNA, 75 bp, synthetic construct
  source 1..75: mol_type = other DNA
atggctggagctggacgccattcttgcagtggtgattggcggcggatcgctgatgggcgggcgctttaacctgct

SEQ ID NO: 202750 - DNA, 75 bp, synthetic construct
  source 1..75: mol_type = other DNA
aaaggcggttcagatctcgcgaaacacatcgcagcggccgacccgcatacccagtacgcgacgaaggccagccca

SEQ ID NO: 202751 - DNA, 75 bp, synthetic construct
  source 1..75: mol_type = other DNA
ctgtaccgggcgggaatttctgcgaaagatgatgcgggagcaactgcccgtttagcccgtgaaacatcacgttat

SEQ ID NO: 202752 - DNA, 75 bp, synthetic construct
  source 1..75: mol_type = other DNA
acgaagcgatggtgagtcgtgcagccactgtgccgcccgttcagcggattgaggcaccgatgcagatcatcattc

SEQ ID NO: 202753 - DNA, 75 bp, synthetic construct
  source 1..75: mol_type = other DNA
agcaacctgcgacggtgaatgcagacgggaaagtgatgatgccatcgggtggttttccatcatggggatatggct

SEQ ID NO: 202754 - DNA, 75 bp, synthetic construct
  source 1..75: mol_type = other DNA
ccggctcatcaccgcttgaagtcgccgctgcaaaagcctctgcggaaattgaaaaaacgccggtcagtattcgtg

SEQ ID NO: 202755 - DNA, 75 bp, synthetic construct
  source 1..75: mol_type = other DNA
cggctttctgatccgcattattgagtggtggcagaccggagaggcaccgggcacgtttcgtctggatatcggcgt

SEQ ID NO: 202756 - DNA, 75 bp, synthetic construct
  source 1..75: mol_type = other DNA
atgagtaattcactgttaccaccatcagccagcaatttcatgcgttgtgccgaagctgtcggaacgcgcattaca

SEQ ID NO: 202757 - DNA, 75 bp, synthetic construct
  source 1..75: mol_type = other DNA
actcagttctttatcgttatgggtctggtggatgctatcccgatgatcgctgtaggtctgggtctgtacgtgatg

SEQ ID NO: 202758 - DNA, 75 bp, synthetic construct
  source 1..75: mol_type = other DNA
acaaacttctcagaagtctattcagcacatcatcttaaaccggtaagaaaaactcatttaaagacagtcaattac

SEQ ID NO: 202759 - DNA, 75 bp, synthetic construct
  source 1..75: mol_type = other DNA
tgaggtctctgaccccgttctgggtgggcctgacggaatctctaaccgtcagggtaaacaactggccagccgcac

SEQ ID NO: 202760 - DNA, 75 bp, synthetic construct
  source 1..75: mol_type = other DNA
agcaacctgcgacggtgaatgcagacggcaaagtgatgataccatcgggtggttttccgtcatggggatatggct

SEQ ID NO: 202761 - DNA, 75 bp, synthetic construct
  source 1..75: mol_type = other DNA
agcaacctgcgacggtgaatgcagacggaaaagtgatgatcccatcgggtggttttccgtcatggggatatggct

SEQ ID NO: 202762 - DNA, 75 bp, synthetic construct
  source 1..75: mol_type = other DNA
ggttgaaggtggtgcgcgcatgaacgtctcaaaccctgatgacagctgggaagaccagaaacgtgacctgctggc

SEQ ID NO: 202763 - DNA, 75 bp, synthetic construct
  source 1..75: mol_type = other DNA
acggtctggaaatcaccgacggcacaggacagctctatctcacgggcctgctaactcctaactttgccgctcgcg

SEQ ID NO: 202764 - DNA, 75 bp, synthetic construct
  source 1..75: mol_type = other DNA
ccggagtgtgtcgcccaggccgtaaaaacccgtttcgagctgtggcgcggtcagtggtttctcgatctgacggaa

SEQ ID NO: 202765 - DNA, 75 bp, synthetic construct
  source 1..75: mol_type = other DNA
taaatacatgccggaactggagtcgtactttcactaccgctatctcgatgtcagcacgctgaaagagctggcgcg

SEQ ID NO: 202766 - DNA, 75 bp, synthetic construct
  source 1..75: mol_type = other DNA
atggatttcagtcttgatttttctggcctggcggatattgcacgggatttggagacgctcagcagggcagaaaac

SEQ ID NO: 202767 - DNA, 75 bp, synthetic construct
  source 1..75: mol_type = other DNA
tgccacgattggtattttcgccccgctgctgctggcgctggctcgatttggtcagggtctgggcttaggtggtga

SEQ ID NO: 202768 - DNA, 75 bp, synthetic construct
  source 1..75: mol_type = other DNA
acgacaaatacacctatccggcaatgatgaacggttacatccagtatgatctcgctgaaggtatcacctggatga

SEQ ID NO: 202769 - DNA, 75 bp, synthetic construct
  source 1..75: mol_type = other DNA
cacttgcgagagtacggcaaaagagagaagcacaaatgcacgtttgtttttctcccatccgtaacttccagaacg

SEQ ID NO: 202770 - DNA, 75 bp, synthetic construct
  source 1..75: mol_type = other DNA
accacgggggcacgctgcgcctgtggtttatctataacggtgtcagggtaagggaaagtcttggtgtacctgata

SEQ ID NO: 202771 - DNA, 75 bp, synthetic construct
  source 1..75: mol_type = other DNA
gagaaatttagcaaaagaccgtttcacggtaccaaaaacacaggcgggaaccaatcggggcattcatcttattaa

SEQ ID NO: 202772 - DNA, 75 bp, synthetic construct
  source 1..75: mol_type = other DNA
aaggcgagcacaatgggcgatcgcgaagcagaactggcgacgctcgagttcttaaaagagtgggtgcctgcgggg

SEQ ID NO: 202773 - DNA, 75 bp, synthetic construct
  source 1..75: mol_type = other DNA
tgtttaaatacatgccggagctggaagcctacttccactaccgttatctcgatgtcagcaccctgaaagagctgg

SEQ ID NO: 202774 - DNA, 75 bp, synthetic construct
  source 1..75: mol_type = other DNA
aaaaaacatgtggtcactttctgtctacacaggaattcgaccgggcgagctgtgcgctttggggtgggaggatat

SEQ ID NO: 202775 - DNA, 75 bp, synthetic construct
  source 1..75: mol_type = other DNA
aaaaagcggacggcgcttatctgtacgatgttgatggcaaagcctatatcgattatgtcggttcctgggggccga

SEQ ID NO: 202776 - DNA, 75 bp, synthetic construct
  source 1..75: mol_type = other DNA
cctgttccgtggccctcagccacaccaccaactggctggctgaaatgtaacggtgcagcattttcttctgaaatg

SEQ ID NO: 202777 - DNA, 75 bp, synthetic construct
  source 1..75: mol_type = other DNA
atgggctgatgcggttatggttctggtttattgtggtctggcagtttttttaggtgtttgcggtatacgggcact

SEQ ID NO: 202778 - DNA, 75 bp, synthetic construct
  source 1..75: mol_type = other DNA
tgctggtagttgcggcgctggtcgttctgctgtttgggactaagaagttacgtacgctgggcggagaccttggag

SEQ ID NO: 202779 - DNA, 75 bp, synthetic construct
  source 1..75: mol_type = other DNA
gcccgcaaaggactggcaacgctttgtatcggcgggggccagggcgtggcattgaccattgaacgtgacgaatag

SEQ ID NO: 202780 - DNA, 75 bp, synthetic construct
  source 1..75: mol_type = other DNA
cctgttccgtggccctcagccacaccgccaacaggttggctgaaatgtaacggtgcagcattttcttctgaaatg

SEQ ID NO: 202781 - DNA, 75 bp, synthetic construct
  source 1..75: mol_type = other DNA
cctgttccgtggccctcagccacacctccaacaggatggctgaaatgtaacggtgcagcattttcttctgaaatg

SEQ ID NO: 202782 - DNA, 75 bp, synthetic construct
  source 1..75: mol_type = other DNA
gaagcggcagaagaagccggaattccgctggtcgttaaccacgttggcggcatgttcggtattttctttaccgac

SEQ ID NO: 202783 - DNA, 75 bp, synthetic construct
  source 1..75: mol_type = other DNA
tgcgcatggtgaactccggcaccgaggcgaccatgagcgccatccgcctggcccgtggttttaccggtcgcgaca

SEQ ID NO: 202784 - DNA, 75 bp, synthetic construct
  source 1..75: mol_type = other DNA
gcgcgtggttttaccggtcgcgacaaaatcattaaattcgaaggttgttaccacggccacgctgactgcctgctg

SEQ ID NO: 202785 - DNA, 75 bp, synthetic construct
  source 1..75: mol_type = other DNA
accgttgatttcgcaaaaaacatgcacgatggcgcttcggtttcactacgcggtaatttgatttctcacaaagga

SEQ ID NO: 202786 - DNA, 75 bp, synthetic construct
  source 1..75: mol_type = other DNA
ggagacgctcagcagggcagaaaacaataaggtactgcgcgatgccacccgtgccggtgctgaagttatgcggga

SEQ ID NO: 202787 - DNA, 75 bp, synthetic construct
  source 1..75: mol_type = other DNA
ttcggtggtcgtcgtgatgtaatggatgacgctggccccgaccggtccggtctatcaggcgggtacgctttccgg

SEQ ID NO: 202788 - DNA, 75 bp, synthetic construct
  source 1..75: mol_type = other DNA
actcattggcggcgataccacgcgtgggccattatcaatgacgttgggtatccacggctttgttccgatgggacg

SEQ ID NO: 202789 - DNA, 75 bp, synthetic construct
  source 1..75: mol_type = other DNA
cggcaatcgatctttctgatggtttgatttccgatctcgggcatatcgtgaaagccagtgactgcggcgcgcgta

SEQ ID NO: 202790 - DNA, 75 bp, synthetic construct
  source 1..75: mol_type = other DNA
acatccggaacagtatgtctgggttttaaaattgttaaaaacacgcaaatcaaacgaagcggacccgtacccttg

SEQ ID NO: 202791 - DNA, 75 bp, synthetic construct
  source 1..75: mol_type = other DNA
ttgcccgttattttgaccgagtaagaagctcccgtcttgatgtcgaactgggcatcggcgacgattgcgcacttc

SEQ ID NO: 202792 - DNA, 75 bp, synthetic construct
  source 1..75: mol_type = other DNA
cggcaatcgatctttctgatggtctgatttctgacttaggccatattgttaatgccagtggctgcggagcatgta

SEQ ID NO: 202793 - DNA, 75 bp, synthetic construct
  source 1..75: mol_type = other DNA
ggcacctgggcgtaccgtttacttgtatcgggcaaatgaccgccgatatcgaagggctttgttttgtgcgtgacg

SEQ ID NO: 202794 - DNA, 75 bp, synthetic construct
  source 1..75: mol_type = other DNA
tactggaaatcatagatgatcatgatcgtgcagaaaaaaagcaacgcaacaaaatcggtttcatttatttatgtc

SEQ ID NO: 202795 - DNA, 75 bp, synthetic construct
  source 1..75: mol_type = other DNA
aacgaagaagacctgggtacgccatgggaagggaaaaaatcatcaggaaacagactgaatatttctattgcagaa

SEQ ID NO: 202796 - DNA, 75 bp, synthetic construct
  source 1..75: mol_type = other DNA
ttgaccaccctccgctggatacgctgattcttgccatgcctgtgtcatggaaagggacattacagcagtatgcag

SEQ ID NO: 202797 - DNA, 75 bp, synthetic construct
  source 1..75: mol_type = other DNA
ctatcggcccggactggagttccctgccctaaggaagctctccaacagatcattgataaaagtatgactgataag

SEQ ID NO: 202798 - DNA, 75 bp, synthetic construct
  source 1..75: mol_type = other DNA
ctctgcgcgcgttttgtgatgcagccggaacgcttcgatgtggtggtggcgtccaatttgtttggcgatatcctt

SEQ ID NO: 202799 - DNA, 75 bp, synthetic construct
  source 1..75: mol_type = other DNA
tcgacgtaaagttgttaatcgcttgctctccggttcaaaactcacaggtaaagatgaagagtacatattcagtga

SEQ ID NO: 202800 - DNA, 75 bp, synthetic construct
  source 1..75: mol_type = other DNA
ccggtcatcgtactcagcaataacgatggctgtgtgatcgcgcgcagcccggaggcaaaagcccttgcatcagaa

SEQ ID NO: 202801 - DNA, 75 bp, synthetic construct
  source 1..75: mol_type = other DNA
tgcgccggaacgctattaccacacgcgggtaaagcgcggcccttccggcctgcatgatacctggctgattctggg

SEQ ID NO: 202802 - DNA, 75 bp, synthetic construct
  source 1..75: mol_type = other DNA
caggccgctgcgtcttcaggatggtcacaccgaaatttacagcgtcgataacattcacggctcggtgaagaacgg

SEQ ID NO: 202803 - DNA, 75 bp, synthetic construct
  source 1..75: mol_type = other DNA
gaagtggtgctcagtacaccgtggccgcctgatctgccagtcaccgatgatgccattcgccttcactgcgtaccg

SEQ ID NO: 202804 - DNA, 75 bp, synthetic construct
  source 1..75: mol_type = other DNA
gctacataaacttgcgttaagcaaagcctatgccttgctcagtatgagctatgtgctggtatggattgcatcaat

SEQ ID NO: 202805 - DNA, 75 bp, synthetic construct
  source 1..75: mol_type = other DNA
aaccaatcttcagacagcctgcttgccaatgtgtttcgtatcgcgctggcatcgctggaagcagaaccgatggca

SEQ ID NO: 202806 - DNA, 75 bp, synthetic construct
  source 1..75: mol_type = other DNA
tgcaaattaccggagaaggcgatggactacctgaagcgaaacggactgataagcgtggaggatgttttacggtga

SEQ ID NO: 202807 - DNA, 75 bp, synthetic construct
  source 1..75: mol_type = other DNA
atacggcggcgcggcggcgtggtaagcccatagaggtctgggtaacggatgaggaaaaagctgccattacagagc

SEQ ID NO: 202808 - DNA, 75 bp, synthetic construct
  source 1..75: mol_type = other DNA
atggaaagagtctttcgcagccttaaaagtgaatggcttctgaaaggtggttatggtgattttagccatgcggta

SEQ ID NO: 202809 - DNA, 75 bp, synthetic construct
  source 1..75: mol_type = other DNA
tttccgcccggaccttcgcaacgaaccggtcatcgtactcagcaataaccacccatacacttttacttccactct

SEQ ID NO: 202810 - DNA, 75 bp, synthetic construct
  source 1..75: mol_type = other DNA
tcgcagtccgggtagtgttgaacgatcgatgcatcaatggaatctgctgttggcgcagaagagaagcgcaagtta

SEQ ID NO: 202811 - DNA, 75 bp, synthetic construct
  source 1..75: mol_type = other DNA
gtatcgatctacccgcattgcgttggtttacgcagttggcgttgccagtgcccaatgtttataaccatgtcattg

SEQ ID NO: 202812 - DNA, 75 bp, synthetic construct
  source 1..75: mol_type = other DNA
tgcggctggcataagcagtgagcagattcgtaccttggtggttggcggggaggatttcaagcgggatctggcgcg

SEQ ID NO: 202813 - DNA, 75 bp, synthetic construct
  source 1..75: mol_type = other DNA
gattcttgccatgcctgtgtcatggaaagggacattacagcagtatgcagggcgtcttcacagagagcataccgg

SEQ ID NO: 202814 - DNA, 75 bp, synthetic construct
  source 1..75: mol_type = other DNA
atgggctgaagacatgatctttgcggcggaagaagcattacgcgataccaaaatgcaaatcaagtcgttgaagcg

SEQ ID NO: 202815 - DNA, 75 bp, synthetic construct
  source 1..75: mol_type = other DNA
cggagaccagtgaaatgaagacgctctgtcaattaatgaagccttctgagcgattttcaagccttcaaaaagcag

SEQ ID NO: 202816 - DNA, 75 bp, synthetic construct
  source 1..75: mol_type = other DNA
gctttgtgcgccaacggcttttggtaagacagttaccgcagcggcagtgattgccagacgggaatacactgatac

SEQ ID NO: 202817 - DNA, 75 bp, synthetic construct
  source 1..75: mol_type = other DNA
ctaacgaatggcagttgggaatatgcggtaagccccggataaaatgtggggactgcgctcaccgtcagttgattc

SEQ ID NO: 202818 - DNA, 75 bp, synthetic construct
  source 1..75: mol_type = other DNA
caggatactatgccaaaaggaggatttggtaatcttatcgcgttacctctgcaaaaaagaccgcgtgcatcgggg

SEQ ID NO: 202819 - DNA, 75 bp, synthetic construct
  source 1..75: mol_type = other DNA
cgggtgtttctcctgaaaccatgcgtgccattattatgactgaatccggtgggaatccctacgctatagcaaatg

SEQ ID NO: 202820 - DNA, 75 bp, synthetic construct
  source 1..75: mol_type = other DNA
cacaggttgtcggtgcgcttgaagaagaacgcagattcttcgccgcagaacgtgagggcgaggtataccgcgcaa

SEQ ID NO: 202821 - DNA, 75 bp, synthetic construct
  source 1..75: mol_type = other DNA
ggtgactttagtctctatcgcgttcgcgatctggagaaacaccaaccaagctatgttgcgaagtcatacatcttg

SEQ ID NO: 202822 - DNA, 75 bp, synthetic construct
  source 1..75: mol_type = other DNA
gcaatacaccgcttagttcaagatgatcgtaaaaaagccaacaaagccgcttatgaaagcaggattgttgcgcag

SEQ ID NO: 202823 - DNA, 75 bp, synthetic construct
  source 1..75: mol_type = other DNA
ggttacaccaaggcgctggaacagtctactttaatcgaacacgacaaaatccaagggacaacgcgttacttccat

SEQ ID NO: 202824 - DNA, 75 bp, synthetic construct
  source 1..75: mol_type = other DNA
ttgatcgagcacgacaaaatcaaagggacaactcgttacttccatgtatctgtcccgctaagtaatacagatgat

SEQ ID NO: 202825 - DNA, 75 bp, synthetic construct
  source 1..75: mol_type = other DNA
atgctgcaaggttcggggcgctttgtcatcagtgtaggggacctgaatttctgccgtggtgcctcagtggatcgg

SEQ ID NO: 202826 - DNA, 75 bp, synthetic construct
  source 1..75: mol_type = other DNA
ttgtcgaataaaacactcctatttgtccatgatatcgctgccccttggtggagattgcgatgcaatatcacgtcc

SEQ ID NO: 202827 - DNA, 75 bp, synthetic construct
  source 1..75: mol_type = other DNA
gcgtctgagctggacggagtgatggtgatgaccagtgagcccgatgggcagggacagcggtttattccctctatg

SEQ ID NO: 202828 - DNA, 75 bp, synthetic construct
  source 1..75: mol_type = other DNA
tatgccgatgaactggaatcatggagtgaagccgggctaaacgccctagctgaatgggaaaaatcagaccatcaa

SEQ ID NO: 202829 - DNA, 75 bp, synthetic construct
  source 1..75: mol_type = other DNA
gaactttatcaacgaagaagacctgggtacgccatgggaagggaaaaaatcatcaggaaacagactgaatcttgc

SEQ ID NO: 202830 - DNA, 75 bp, synthetic construct
  source 1..75: mol_type = other DNA
cggaaagtgaatacactgatactggtacaccggactgaattgctgaagcagtggcaggagcgtctcgcggtgttt

SEQ ID NO: 202831 - DNA, 75 bp, synthetic construct
  source 1..75: mol_type = other DNA
ttctgtattatccaccgacgagaaggttgcattatttcgtcggttgtttcgtgggcgtgatgatgtatgggcact

SEQ ID NO: 202832 - DNA, 75 bp, synthetic construct
  source 1..75: mol_type = other DNA
caacaagatcgttacctccaacaaggtgcttcatcagctgcttttgctttggggagccaggctatcagagctgcg

SEQ ID NO: 202833 - DNA, 75 bp, synthetic construct
  source 1..75: mol_type = other DNA
ggggggccagactttctgagctacgtctcgcgacagccagtgagttcaacatggaagatctggtctggacaaccc

SEQ ID NO: 202834 - DNA, 75 bp, synthetic construct
  source 1..75: mol_type = other DNA
gatcagtggtgggataagtatgttagcggcctgaaacccaatactcagacgctttatagatctgttgtgtacaac

SEQ ID NO: 202835 - DNA, 75 bp, synthetic construct
  source 1..75: mol_type = other DNA
tgtcccgatgaacaggacacatggagtgaggcaggactaaacgccctggctgaatgggaaaaatcaggccatcaa

SEQ ID NO: 202836 - DNA, 75 bp, synthetic construct
  source 1..75: mol_type = other DNA
ttagactgggaagtgcaatttcttgatgatggcgggatttggatggatgacggcgatgctgagttttatttcgag

SEQ ID NO: 202837 - DNA, 75 bp, synthetic construct
  source 1..75: mol_type = other DNA
cggtgtataacaaacatgattggcttgatgagcagaaagaagcatatcaattatatgcagacaaaattttatggt

SEQ ID NO: 202838 - DNA, 75 bp, synthetic construct
  source 1..75: mol_type = other DNA
cacccgcagtcagtgattcactctatggtgcgttatcaggatggtagtgttctggcgcaactgggagaacctgac

SEQ ID NO: 202839 - DNA, 75 bp, synthetic construct
  source 1..75: mol_type = other DNA
taagattggctcgtttgcttttagtttcctgccagtcatgttctgtatcgccatcccgctgggcctggcacgcga

SEQ ID NO: 202840 - DNA, 75 bp, synthetic construct
  source 1..75: mol_type = other DNA
catcgtcagaactgacacacgacgaagcagtgaaagctcttggattcctgaaacaaaaagccactgaacagaagg

SEQ ID NO: 202841 - DNA, 75 bp, synthetic construct
  source 1..75: mol_type = other DNA
aaggcgtgttgatactggaatttatcggaatgatgctactggcggtggcgctgctgtcggtaagcgactccctgt

SEQ ID NO: 202842 - DNA, 75 bp, synthetic construct
  source 1..75: mol_type = other DNA
ttcacctttcagtgaaacgactgatggcggtagtagcgatggcagcagcaacaaccttaacggttatattgtcgg

SEQ ID NO: 202843 - DNA, 75 bp, synthetic construct
  source 1..75: mol_type = other DNA
ggtgatacgccagttccgccagatgacggcggtgatacgccagttccgccagatgatggcggcgatacgcctgtt

SEQ ID NO: 202844 - DNA, 75 bp, synthetic construct
  source 1..75: mol_type = other DNA
aggcgataaaaacgcacagctggttaacaacggtgttatcaatctcggcaccgaaggcaccaccgataccggatt

SEQ ID NO: 202845 - DNA, 75 bp, synthetic construct
  source 1..75: mol_type = other DNA
caatcgggcaattggcgtagtacaacttaatcaacataacctgcaggttgttatcgggccacaagttcagtcagt

SEQ ID NO: 202846 - DNA, 75 bp, synthetic construct
  source 1..75: mol_type = other DNA
ttgtgaatgtgcaggcgctgaaggacaatcgggcaattggcgtagttcaattgaatcaacataacctgcaggttg

SEQ ID NO: 202847 - DNA, 75 bp, synthetic construct
  source 1..75: mol_type = other DNA
ttagtctggccgattttcgccatgggtattagcggcttaggccatatgatcaacagcgcgggtgatttcggaccg

SEQ ID NO: 202848 - DNA, 75 bp, synthetic construct
  source 1..75: mol_type = other DNA
atgcacgccaccattcatcatctgatttatcttttatcgtcgccagttccgcaacaatatctggagatcttcgct

SEQ ID NO: 202849 - DNA, 75 bp, synthetic construct
  source 1..75: mol_type = other DNA
tcgcaaaacggttagctgaatttggcgggctgcaacataaagcataccgcctgggcggcgatgaattcgcgatgg

SEQ ID NO: 202850 - DNA, 75 bp, synthetic construct
  source 1..75: mol_type = other DNA
ccgaaaaattacaagagctggccgatcgtaatatgtatcaggccaagcaccagcgcgccgaaacgcgggtgaaat

SEQ ID NO: 202851 - DNA, 75 bp, synthetic construct
  source 1..75: mol_type = other DNA
caacacgttgatgaacaattccgatgcccgaaaaacgtcggcgttactatttcttgatggcgataatttcaaata

SEQ ID NO: 202852 - DNA, 75 bp, synthetic construct
  source 1..75: mol_type = other DNA
gagttccagcgttgcctgtcgcgtttacaagaaatgcaaagcgaagagtatttgaagcgcgagcatttggcgggg

SEQ ID NO: 202853 - DNA, 75 bp, synthetic construct
  source 1..75: mol_type = other DNA
accacgctgtgcgttgatgcccgcagccagcatgactatattgcgctctcacgtctgtttcacacggtgatgttg

SEQ ID NO: 202854 - DNA, 75 bp, synthetic construct
  source 1..75: mol_type = other DNA
cgcaaatggataaactatggttggcgctggcgggggcgaaacgagaaaattcaccgacgttagaaatcaaccatc

SEQ ID NO: 202855 - DNA, 75 bp, synthetic construct
  source 1..75: mol_type = other DNA
atgtggggcggggtaggacgcgggaaaacctggctgatggaccttttctatcaaagcctgccgggagagcggaaa

SEQ ID NO: 202856 - DNA, 75 bp, synthetic construct
  source 1..75: mol_type = other DNA
ctgcatccgtttaaggtcgatgcagaaaactggctctattgtatagataaggtcgtaaaccccggaaagaactct

SEQ ID NO: 202857 - DNA, 75 bp, synthetic construct
  source 1..75: mol_type = other DNA
cttttcccacacaaagttggtgctgaaaattggctttattgcatggataagttattgcatccgggaaaaacatcg

SEQ ID NO: 202858 - DNA, 75 bp, synthetic construct
  source 1..75: mol_type = other DNA
acgccgtcgcggatggtatgaggatgatgtgttgtcctggcagaaagaacgcgaagaggaagcacgcggaacggc

SEQ ID NO: 202859 - DNA, 75 bp, synthetic construct
  source 1..75: mol_type = other DNA
tttttggcctgaaacatcagatgtcgttcgataacggcatgaactggaataacgccttgcgttacgacgttcaca

SEQ ID NO: 202860 - DNA, 75 bp, synthetic construct
  source 1..75: mol_type = other DNA
ggccttatcgatgattatcaacaatcagtgatgcttcagcttattgcagaagagtaccaggaatccagaaaatca

SEQ ID NO: 202861 - DNA, 75 bp, synthetic construct
  source 1..75: mol_type = other DNA
acaagttaacgttcccggccgaaagtatacagtcacagaaaatcatttctcatcagtcacacaaagtgacgacga

SEQ ID NO: 202862 - DNA, 75 bp, synthetic construct
  source 1..75: mol_type = other DNA
tatcagctataaaaacgtgctgaaagtgcagccattcggcaatgtggtggtgtatgccgacatgaccggtaaaga

SEQ ID NO: 202863 - DNA, 75 bp, synthetic construct
  source 1..75: mol_type = other DNA
cgttagcactgttaaccacatttacactggcgagtgaaactgctctggcgtatgagcaggataaaacctacaaaa

SEQ ID NO: 202864 - DNA, 75 bp, synthetic construct
  source 1..75: mol_type = other DNA
gacaaagtgcgttttgtacagaccaatatggggcggttgattctggcagcacaaatggatcgcactggtgccgac

SEQ ID NO: 202865 - DNA, 75 bp, synthetic construct
  source 1..75: mol_type = other DNA
gcgtcgtattggctggtatgaagatgaggtgctggcctggctgaaagaacgcgaggaagaagctcgcggaacggc

SEQ ID NO: 202866 - DNA, 75 bp, synthetic construct
  source 1..75: mol_type = other DNA
ttatcaggcctacatatccgcgcctattatccggcaaccaccgtttacctcgtcaccacctcacccgccggtggc

SEQ ID NO: 202867 - DNA, 75 bp, synthetic construct
  source 1..75: mol_type = other DNA
ctaccagaaaagtaccggcgagcgcctgtttaaaccgtgggcgctgtttaagcgtcaggatctgaaaattgccgt

SEQ ID NO: 202868 - DNA, 75 bp, synthetic construct
  source 1..75: mol_type = other DNA
cttgtattgcaatggcgttaagcagtcagacatgggcagcggatacgttgataactgactcatcggatgtaagcc

SEQ ID NO: 202869 - DNA, 75 bp, synthetic construct
  source 1..75: mol_type = other DNA
tgaatggtgtcgggatcaacaccggtttcgccgccggtacggcagacaccacggtcagtttcgacaacgtggtgg

SEQ ID NO: 202870 - DNA, 75 bp, synthetic construct
  source 1..75: mol_type = other DNA
ttcacctttcagtgaaacgactgatagcggtagtagcgatggcagcagtaacaacctcaacggctatatcgtcgg

SEQ ID NO: 202871 - DNA, 75 bp, synthetic construct
  source 1..75: mol_type = other DNA
aacggaacgcttaatgacgtcgtaaaaattgagaaaaacagcaacgcggtaattaataacaccggttccctgtca

SEQ ID NO: 202872 - DNA, 75 bp, synthetic construct
  source 1..75: mol_type = other DNA
tgcttataatggggcattaaccaaagccacggctaccaaccacgaaacaggcgtaattaccgtctacaacgcggg

SEQ ID NO: 202873 - DNA, 75 bp, synthetic construct
  source 1..75: mol_type = other DNA
ggtatcaacagcctggcgagcgtcggcgtgaagtacagtagcaaagaaagttcgctgaatctggatgcgtatcac

SEQ ID NO: 202874 - DNA, 75 bp, synthetic construct
  source 1..75: mol_type = other DNA
aagcaccagatgttcttcgacaacgggatgaactggaacaacgccctgcgctatgacgtgcataacctcgacagc

SEQ ID NO: 202875 - DNA, 75 bp, synthetic construct
  source 1..75: mol_type = other DNA
atgatcaccaaagaaggcgatagctttaaaacctggatgtcaccacagtttaaaagcttccttgtcagcgaaaaa

SEQ ID NO: 202876 - DNA, 75 bp, synthetic construct
  source 1..75: mol_type = other DNA
attatgggacggggatgagtgccggctcattaaataataaccgtctctttccctccaactcaggtaccgcgctga

SEQ ID NO: 202877 - DNA, 75 bp, synthetic construct
  source 1..75: mol_type = other DNA
gaggaatatttttacgatccgtctgtggggatcaatatctatggcgatggtaatcaaattacgcttgatggttcg

SEQ ID NO: 202878 - DNA, 75 bp, synthetic construct
  source 1..75: mol_type = other DNA
gcggtatgcagtccgggggagctgaatcttcgctggatagtggtctttgtgacccgtgacggtcagccgttctct

SEQ ID NO: 202879 - DNA, 75 bp, synthetic construct
  source 1..75: mol_type = other DNA
gggtaccttctggcgtgccagcatcccgggcattgacgccaaacgcagtgccgaacttaaagaaaagattcagac

SEQ ID NO: 202880 - DNA, 75 bp, synthetic construct
  source 1..75: mol_type = other DNA
cgctgatgcgctttaacgactcacaaagtctgacgccgtggccagtaaatgaagcattggccgatattgtcacca

SEQ ID NO: 202881 - DNA, 75 bp, synthetic construct
  source 1..75: mol_type = other DNA
aaaagcctgaaaaatagggttttttctcaaatcgtaggtgctcttgaagaagaacagcgcttctttgaagctgag

SEQ ID NO: 202882 - DNA, 75 bp, synthetic construct
  source 1..75: mol_type = other DNA
atgtctgatgaaaaaggaataataagtaggattacagatgcagtttctggtgccggaggtgctctgatgagtgct

SEQ ID NO: 202883 - DNA, 75 bp, synthetic construct
  source 1..75: mol_type = other DNA
attgatttcaggcacaaaatctggaccatccccgcaacccgcgaggccattgataaagtacggttttcggggcgt

SEQ ID NO: 202884 - DNA, 75 bp, synthetic construct
  source 1..75: mol_type = other DNA
ttacaccctcgatgagggagatgatccgtttgatgaaacggtctggcagaaagcgaatcctggcctgggcatctg

SEQ ID NO: 202885 - DNA, 75 bp, synthetic construct
  source 1..75: mol_type = other DNA
ccacgccgactatttctacggcaccattccctgcacccgcaaaatgaccgacgcagaaatcaacggtgaatatga

SEQ ID NO: 202886 - DNA, 75 bp, synthetic construct
  source 1..75: mol_type = other DNA
gacacgccaactcaccggctgctctatcaggcattcccctccattggcggcattgtgcatacgcactcgcgccac

SEQ ID NO: 202887 - DNA, 75 bp, synthetic construct
  source 1..75: mol_type = other DNA
aaaaaacatggcgtgatgatgccggaagaggggcttaacacactaaaaaaatttgatgcaatttacttcggtgcg

SEQ ID NO: 202888 - DNA, 75 bp, synthetic construct
  source 1..75: mol_type = other DNA
caaacacatgaatgtgtgggtcactgccgaatcggcctggatggacatgattaagtgggagaagtgcgaatatat

SEQ ID NO: 202889 - DNA, 75 bp, synthetic construct
  source 1..75: mol_type = other DNA
aattctggttacccgaagggcggctggaaaaatgttccgctcaaatggcgcagatgtatcgcaaatgggccgagc

SEQ ID NO: 202890 - DNA, 75 bp, synthetic construct
  source 1..75: mol_type = other DNA
aacggccacgcgcatgcagactttaaattctggttacccgaagggcggctggaaaaatgttccgctcaaatggcg

SEQ ID NO: 202891 - DNA, 75 bp, synthetic construct
  source 1..75: mol_type = other DNA
accacggcagggtttaacaaggaagggatttgttacgagcagcgtgattatgccatcaaggtattgcgtggctat

SEQ ID NO: 202892 - DNA, 75 bp, synthetic construct
  source 1..75: mol_type = other DNA
ggcacaggaaacccgtcagttgcttgaggagacccgtaagcaggtgcataccctgcagatgcagggagcactgcc

SEQ ID NO: 202893 - DNA, 75 bp, synthetic construct
  source 1..75: mol_type = other DNA
atgagaaaaatggatatcttttgtctcaatcagataacgcatataattcgcaattgttatgcattgaaaatgcta

SEQ ID NO: 202894 - DNA, 75 bp, synthetic construct
  source 1..75: mol_type = other DNA
atgattagttacgaaattattatttctacaacggaatacagaaacgatgtatcagttcgcacggatacatctgtc

SEQ ID NO: 202895 - DNA, 75 bp, synthetic construct
  source 1..75: mol_type = other DNA
tgcgaaggacaaagatcagctgaacatgaacgacaacacggagctggcgcgcgcgacaagtgcgaacttccctac

SEQ ID NO: 202896 - DNA, 75 bp, synthetic construct
  source 1..75: mol_type = other DNA
acgaaaacagtttcgacgttggtctggcggtagcgaacggactgaacgccgacgaagacgacggtcagtgggtct

SEQ ID NO: 202897 - DNA, 75 bp, synthetic construct
  source 1..75: mol_type = other DNA
gatgaacagataaaccaggcctttattgcccgtcttgataatctctatcaactcaccctggcggaaacgcgagac

SEQ ID NO: 202898 - DNA, 75 bp, synthetic construct
  source 1..75: mol_type = other DNA
ctgccggtgaaaattatcgtctttaataacagcgtgctgggctttgtggcgatggagatgaaggccggaggctac

SEQ ID NO: 202899 - DNA, 75 bp, synthetic construct
  source 1..75: mol_type = other DNA
atggttccgaactccaaagccgagaagttcgaaaagatggctgaaggcactgccaaagacaaagatcagctaaac

SEQ ID NO: 202900 - DNA, 75 bp, synthetic construct
  source 1..75: mol_type = other DNA
gagaagccattagctgaaatcattgctgcgttacaggcaatagatgacaggcgcgagaagacatcaccgacagat

SEQ ID NO: 202901 - DNA, 75 bp, synthetic construct
  source 1..75: mol_type = other DNA
aaatacagcagtcgttgtccaaattaagcctgttaaaaattcacccacgcgatgaacagataaaccaggccttta

SEQ ID NO: 202902 - DNA, 75 bp, synthetic construct
  source 1..75: mol_type = other DNA
atgattagttacgaaatcatcatctccactacggaatacagaaacgatgtatcagttcgcacggatgtatctgtc

SEQ ID NO: 202903 - DNA, 75 bp, synthetic construct
  source 1..75: mol_type = other DNA
aaacagcggaacgtaaagcagcggagatgtgtgaaatcatcgcaatgaaaggcagcccggttaaatacatcacaa

SEQ ID NO: 202904 - DNA, 75 bp, synthetic construct
  source 1..75: mol_type = other DNA
tcctgatcaactagctgattttcgggctaaagttgaaccgacattagactctctggaatgggagcgtctacaatg

SEQ ID NO: 202905 - DNA, 75 bp, synthetic construct
  source 1..75: mol_type = other DNA
atgcatttaaacccggatgaagtcattgcccagggcgcggctattcaggcagcacttaaagcgcggcacagcgaa

SEQ ID NO: 202906 - DNA, 75 bp, synthetic construct
  source 1..75: mol_type = other DNA
gcgaaatggacaaagtgaactgatccccaatgcgttaggcaagtttttaacacccagcgtagtttgtgttgacga

SEQ ID NO: 202907 - DNA, 75 bp, synthetic construct
  source 1..75: mol_type = other DNA
ccgttgtcgtctttgcgtcgcacggcatcactgacgggaaatgtcctgaaaactgtagctggtgcgccggttgca

SEQ ID NO: 202908 - DNA, 75 bp, synthetic construct
  source 1..75: mol_type = other DNA
gcgaaaggcggcgaagcgatggtgagtcgtgcagccactgtgccgcccgttcaacggattgaggcaccgatgcag

SEQ ID NO: 202909 - DNA, 75 bp, synthetic construct
  source 1..75: mol_type = other DNA
gcagacggcgcttgtgcgtgcagaactttatcgtgctggtatttcagctaatgatggtgccagtgcgacggcccg

SEQ ID NO: 202910 - DNA, 75 bp, synthetic construct
  source 1..75: mol_type = other DNA
cgccatgtcgaaaggggcagatatcattgatgtcatgcaacgcctgggtggtgtggctgaccgtctggattatcg

SEQ ID NO: 202911 - DNA, 75 bp, synthetic construct
  source 1..75: mol_type = other DNA
atgacatcgggtggttttccgtcatggggatatggctttgcggggttgtatgacagcggcgggtatatcccgcgc

SEQ ID NO: 202912 - DNA, 75 bp, synthetic construct
  source 1..75: mol_type = other DNA
gaaatactggcaacccatcaccgcgtttctcggtggtgtggtggagggattcaaagcagcggcaggtcccgtcag

SEQ ID NO: 202913 - DNA, 75 bp, synthetic construct
  source 1..75: mol_type = other DNA
gctgcaaaggcgaaactgccggaaagagtgacgcgtcagcaacctgtgacggtgaatgcagacggtaaagtgatg

SEQ ID NO: 202914 - DNA, 75 bp, synthetic construct
  source 1..75: mol_type = other DNA
tgcgcgttgccctgtatgccgtctctggtctgttaggtgctctgctcagtctgataggtcttgtggttactgcac

SEQ ID NO: 202915 - DNA, 75 bp, synthetic construct
  source 1..75: mol_type = other DNA
aaactcggcattgtcagtaaagaggccgcaaaggcaaaactacccgccgtgaaaaatcgtggcacaagaccaccg

SEQ ID NO: 202916 - DNA, 75 bp, synthetic construct
  source 1..75: mol_type = other DNA
cgctccactggcactgctgcgacgcgggtttgcttcatcgggcaacgcagcaggtttacttactgcgccgttgtc

SEQ ID NO: 202917 - DNA, 75 bp, synthetic construct
  source 1..75: mol_type = other DNA
gggcttgcttcatcgggcaatgctgcgggtttacttactgcgccgttgtcatctttgcgccgtacggcatcactg

SEQ ID NO: 202918 - DNA, 75 bp, synthetic construct
  source 1..75: mol_type = other DNA
atgctcaacgaacgataccaggactatgacgccacggcatccggtgtgaagcgaggcgaggaactggcagaagcc

SEQ ID NO: 202919 - DNA, 75 bp, synthetic construct
  source 1..75: mol_type = other DNA
agccgcaggcgcggtgctgcgagtgcttgcatccggtccactggcgatgctgcgcgttgccctgtatgccgtatc

SEQ ID NO: 202920 - DNA, 75 bp, synthetic construct
  source 1..75: mol_type = other DNA
ggggatatggctttgcgggtatgtatgacagcggcggctatatcccgcgtgggcagtttggcatcgtcggtgaaa

SEQ ID NO: 202921 - DNA, 75 bp, synthetic construct
  source 1..75: mol_type = other DNA
ggcaaatgtgaccagccggagaaatacagctgcactagctgccgttgttgccggaatgatgggcgttgctgccgc

SEQ ID NO: 202922 - DNA, 75 bp, synthetic construct
  source 1..75: mol_type = other DNA
gttacggcagcagtaactcgaaccagcaacgcgttgtcctggttggctggcgctccactggcactgctgcgacgc

SEQ ID NO: 202923 - DNA, 75 bp, synthetic construct
  source 1..75: mol_type = other DNA
gcacagcacatcctcaacttctataaattcgtgcctcatgttaaaggagcactggcaggccagccgattgagctg

SEQ ID NO: 202924 - DNA, 75 bp, synthetic construct
  source 1..75: mol_type = other DNA
tgagccgcatgcttgtaaacggcggcgaacaacaggacagcctctctgaccatctggaaagttacggcgtccgtt

SEQ ID NO: 202925 - DNA, 75 bp, synthetic construct
  source 1..75: mol_type = other DNA
ggatttgctacgagcagcgtgattacgccatcaaggtattgcgaggctataacagcgacgtggagggcgcggtaa

SEQ ID NO: 202926 - DNA, 75 bp, synthetic construct
  source 1..75: mol_type = other DNA
cgcggctgaagcgactgggggaagctcagcgcaggatcaatgcagtgcgtgccagttatgcccgttcgctggagg

SEQ ID NO: 202927 - DNA, 75 bp, synthetic construct
  source 1..75: mol_type = other DNA
gggcagttcggcattgtcggtgaaaacgggcctgaaattgtcaacggtccggcaaacgtgaccagccggagaaat

SEQ ID NO: 202928 - DNA, 75 bp, synthetic construct
  source 1..75: mol_type = other DNA
ggatattgcgcgggaggtggcccgccagcttgatgaacgtgagcgcagactgaaggcaaaagccaggagtaacta

SEQ ID NO: 202929 - DNA, 75 bp, synthetic construct
  source 1..75: mol_type = other DNA
ccggaatgatgggcgttgctgccgcgcctgcagagcttccaccgttgcatcctttggcgcttcccgcgaaaggtg

SEQ ID NO: 202930 - DNA, 75 bp, synthetic construct
  source 1..75: mol_type = other DNA
ctgacaggcacactgatgaaagtagccgctattgtggctgcggttaccgtaggcctcggcaccttggctgtggcg

SEQ ID NO: 202931 - DNA, 75 bp, synthetic construct
  source 1..75: mol_type = other DNA
tctgccgaactgcagagtgcagcggcaatggggcgacgattcggggaggctctggcggaagggctgaatatggtc

SEQ ID NO: 202932 - DNA, 75 bp, synthetic construct
  source 1..75: mol_type = other DNA
cgaacactgctctggcttatacgaccgggggggaggccgctcgaatattagcgaaggtggtaccagctgacgtta

SEQ ID NO: 202933 - DNA, 75 bp, synthetic construct
  source 1..75: mol_type = other DNA
aatattcaatcaaaagtgtggcaccggtaaaaccaactatcaccggtcttaaatcatccctgaacggattagtct

SEQ ID NO: 202934 - DNA, 75 bp, synthetic construct
  source 1..75: mol_type = other DNA
gtcacgctgctggataacgatgaaccaattccgcagggtacggccgaagtgatgtggtcggaggataaagtgaat

SEQ ID NO: 202935 - DNA, 75 bp, synthetic construct
  source 1..75: mol_type = other DNA
ccctgcccctcgccaaggtgagccacgttggcgtaattggcgatcgcgccagtggcccgttctcggtctatatgc

SEQ ID NO: 202936 - DNA, 75 bp, synthetic construct
  source 1..75: mol_type = other DNA
ctgggcaggtggttatacagatcgtgcgaacgacaagcgtattgccgtggtgcatgccaacgggctgatggagtt

SEQ ID NO: 202937 - DNA, 75 bp, synthetic construct
  source 1..75: mol_type = other DNA
aaagaagtaggtaagtggctttaccgcgccaaactgaccaacaaatacacaggtaaggtctcatataccgataat

SEQ ID NO: 202938 - DNA, 75 bp, synthetic construct
  source 1..75: mol_type = other DNA
catgagcgcagacggcccatttaatctgtataacgcggtagtgaccgcagccgataaagcctccgccaaccgtgg

SEQ ID NO: 202939 - DNA, 75 bp, synthetic construct
  source 1..75: mol_type = other DNA
acggtaccgacacgatggaagaaacggcttacttccttgacctgacggtgaaatgtgacaaaccggtggtgatgg

SEQ ID NO: 202940 - DNA, 75 bp, synthetic construct
  source 1..75: mol_type = other DNA
acggtaccgacacgatggaagaaaccgcttacttcctcgacctgacggtgaaatgggacaaaccggtggtgatgg

SEQ ID NO: 202941 - DNA, 75 bp, synthetic construct
  source 1..75: mol_type = other DNA
tgcgctgggtatttttgaatttgtacgcgattattccaatacggaagatacgatcagcttgttgcttaccgttgg

SEQ ID NO: 202942 - DNA, 75 bp, synthetic construct
  source 1..75: mol_type = other DNA
gtgatggtttaatttattgtaataccagtggtcgtgctagtggcgaacctatgacaattgagcataagatggttg

SEQ ID NO: 202943 - DNA, 75 bp, synthetic construct
  source 1..75: mol_type = other DNA
gcccgacgaggcgctggcacatgttggcgcggtgattgacgccgggttcgacgcggttgaaatcccgctgaattc

SEQ ID NO: 202944 - DNA, 75 bp, synthetic construct
  source 1..75: mol_type = other DNA
tcaaatgttttttaagaaatttgttcatcaggaggaatatgaaacttataacttaagatatgcacattttccgac

SEQ ID NO: 202945 - DNA, 75 bp, synthetic construct
  source 1..75: mol_type = other DNA
gataaccagttgcgcggtcgttctggtcgtcagggggatgctggttcttcccgtttctacctgtcgatggaagat

SEQ ID NO: 202946 - DNA, 75 bp, synthetic construct
  source 1..75: mol_type = other DNA
cagaacgtcacgaatcccgtcgtatcgataaccagttgcgtggtcgttctggtcgccagggggatgccggttctt

SEQ ID NO: 202947 - DNA, 75 bp, synthetic construct
  source 1..75: mol_type = other DNA
aaatgtataagcgagtaaacaaaattattccgcatctgattcgtcaggaaaaagaagactctgaaaccttccagg

SEQ ID NO: 202948 - DNA, 75 bp, synthetic construct
  source 1..75: mol_type = other DNA
ctggttacgaagtggcaattgatgattttggtattggctactctaacttgcataaccttaaatcattgaatgtcg

SEQ ID NO: 202949 - DNA, 75 bp, synthetic construct
  source 1..75: mol_type = other DNA
tgctggaaaacttgatcccggaagccttcgccgtggtgcgtgaagccagtaagcgtgtttttggcatgcgccact

SEQ ID NO: 202950 - DNA, 75 bp, synthetic construct
  source 1..75: mol_type = other DNA
ttgactacctgcgcgacaacatggcattcagtcctgaagaacgtgtacagcgtaaactgcactatgcgctggtgg

SEQ ID NO: 202951 - DNA, 75 bp, synthetic construct
  source 1..75: mol_type = other DNA
ccctctccatttccaggccacgctacaacaggatggaactataccaatagaagctggtgagtttaaagccaccag

SEQ ID NO: 202952 - DNA, 75 bp, synthetic construct
  source 1..75: mol_type = other DNA
gatttcgatctgctcaatgtcaagttgactaatcccacttgttttaccgctatgcttagggaaggtgcgaacaag

SEQ ID NO: 202953 - DNA, 75 bp, synthetic construct
  source 1..75: mol_type = other DNA
caattagaacaaggcgatcaaatagttattccaaataagactgatcttattcaagtggggggtgaagtgttgatg

SEQ ID NO: 202954 - DNA, 75 bp, synthetic construct
  source 1..75: mol_type = other DNA
cgggcatgccagcaccggcaaagcgtgaagcttacgcagctgacatcacttacggtacgaacaacgaatacggct

SEQ ID NO: 202955 - DNA, 75 bp, synthetic construct
  source 1..75: mol_type = other DNA
agggatggttctttgcgaaggcgatgccgccgcaggtgtttatgcaatggatggagcaattacccgcgcgggagt

SEQ ID NO: 202956 - DNA, 75 bp, synthetic construct
  source 1..75: mol_type = other DNA
cgccgatgaaccgatgatctaccaggcgtttcaacctctgccgcgatttggcgatagctacacactcatcggtag

SEQ ID NO: 202957 - DNA, 75 bp, synthetic construct
  source 1..75: mol_type = other DNA
aaaaggagttggtgtattaattgaagggttagccaccaacaaaagtgtaaaaatgatactggaacccaatgtttc

SEQ ID NO: 202958 - DNA, 75 bp, synthetic construct
  source 1..75: mol_type = other DNA
acgggattaatcggcttctcatcaggttttcataccatgatgaacgccgacacgttagtgctgctcggcacgcaa

SEQ ID NO: 202959 - DNA, 75 bp, synthetic construct
  source 1..75: mol_type = other DNA
tatcaacccagccagcatcggcgcgcatagcaaggtagatatggcgctggtcggcgatatcaaatcaaccctgcg

SEQ ID NO: 202960 - DNA, 75 bp, synthetic construct
  source 1..75: mol_type = other DNA
gcgttgcggtattgattgaaggattagcaaacagaaaaagtgccctaatgatactgaaaccgaatgattcaactt

SEQ ID NO: 202961 - DNA, 75 bp, synthetic construct
  source 1..75: mol_type = other DNA
tgatgcgctttctcgccatgttgaaccggaacaggcgctgcgctgggcgctctctggcggtgaagattacgagtt

SEQ ID NO: 202962 - DNA, 75 bp, synthetic construct
  source 1..75: mol_type = other DNA
gtacaccgggcgatagcgccgccgggctggcgatttgcaaaaccgtttgcaggttgccgatgttaaagatgcgga

SEQ ID NO: 202963 - DNA, 75 bp, synthetic construct
  source 1..75: mol_type = other DNA
caggtggtcgccatgtgcggcgatggcggttttagcatgttgatgggcgatttcctctcggtagtgcagatgaaa

SEQ ID NO: 202964 - DNA, 75 bp, synthetic construct
  source 1..75: mol_type = other DNA
ttccaccgcagatcaaactcgaacaggccaaaggttttagcctgtatatgctgcgcgcaatcatcagcggacgcg

SEQ ID NO: 202965 - DNA, 75 bp, synthetic construct
  source 1..75: mol_type = other DNA
atgaaacaaacggttgcagcttatatcgccaaaacactcgaatcggcaggcgtgaaacgcatctggggagtcacg

SEQ ID NO: 202966 - DNA, 75 bp, synthetic construct
  source 1..75: mol_type = other DNA
tcggtgatatcaaatcgactctgcgtgcattgctgcctttagtggaagaaaaaaccgatcgcaaatttctggata

SEQ ID NO: 202967 - DNA, 75 bp, synthetic construct
  source 1..75: mol_type = other DNA
aaacccagcgataaagcgatccacccgcaatatctggcccaacaaatcagtcatttggccgatgatgacgccatc

SEQ ID NO: 202968 - DNA, 75 bp, synthetic construct
  source 1..75: mol_type = other DNA
cggtatgggcggcgcgttatctgaaaatgaacggcaagcgtcgcctgttaggttcgtttaaccacggttcgatgg

SEQ ID NO: 202969 - DNA, 75 bp, synthetic construct
  source 1..75: mol_type = other DNA
ttattgcaaaactttggtctgcatattcaacaaaaacaactattagcgactctggtttatatattggagatacca

SEQ ID NO: 202970 - DNA, 75 bp, synthetic construct
  source 1..75: mol_type = other DNA
gccttaatgatactgaaacctaatgatccaagttctgtttataaagataatacgggtcagactcaggataacgat

SEQ ID NO: 202971 - DNA, 75 bp, synthetic construct
  source 1..75: mol_type = other DNA
caaatgatgcaacgtctatttataaagattatgaaacagaagatgacactaccggaggaatttacccggataaag

SEQ ID NO: 202972 - DNA, 75 bp, synthetic construct
  source 1..75: mol_type = other DNA
aaacatttggtcagcatatacatatactaatatcaactcatcaggcatatatattggcgattctacggaccaaac

SEQ ID NO: 202973 - DNA, 75 bp, synthetic construct
  source 1..75: mol_type = other DNA
acggtaccgacacgatggaagaaactgcttacttcctggacctgacggtgaaatgtgacaaaccggtggtgatgg

SEQ ID NO: 202974 - DNA, 75 bp, synthetic construct
  source 1..75: mol_type = other DNA
acggtaccgacacgatggaagaaacagcttacttcctagacctgacggtgaaatgcgacaaaccggtggtgatgg

SEQ ID NO: 202975 - DNA, 75 bp, synthetic construct
  source 1..75: mol_type = other DNA
ttccggtaaaagttatggtggacataaactctttaatacatctgttccaggtctgtattatacattagcaatatc

SEQ ID NO: 202976 - DNA, 75 bp, synthetic construct
  source 1..75: mol_type = other DNA
ggaccaacaggtgtgtcattatactggtctcagttaaatagcgcttcaggtggaggttacctttactgcaacaga

SEQ ID NO: 202977 - DNA, 75 bp, synthetic construct
  source 1..75: mol_type = other DNA
tatcaatgaacacagctattttcttaaaatcgactttgacctgacagatatcatattaacaaaccctacctgttt

SEQ ID NO: 202978 - DNA, 75 bp, synthetic construct
  source 1..75: mol_type = other DNA
cattgaaggattagcaaccagtaaaaatccgctaatgacattaaaacctaacgatgcaacctccatttataaaga

SEQ ID NO: 202979 - DNA, 75 bp, synthetic construct
  source 1..75: mol_type = other DNA
gtaaagattatggcggacataaactatttaatacatctgttcctggtctgtattacaccatgttaatatcaaggg

SEQ ID NO: 202980 - DNA, 75 bp, synthetic construct
  source 1..75: mol_type = other DNA
agcaaatcctgggccaataaccattgaaaatgccatggtttattcaggtaaagattatggtggacataaactctt

SEQ ID NO: 202981 - DNA, 75 bp, synthetic construct
  source 1..75: mol_type = other DNA
tattggggcatatcatcaaggccgtgaactgacccggcatgccgttccgctgatgctgcatgtgttcattcgctc

SEQ ID NO: 202982 - DNA, 75 bp, synthetic construct
  source 1..75: mol_type = other DNA
tgcaggaagagaagaagaaaaaaggcgctaaaggggtaaccgcccgttggcaacgtcgaatgaaactcacgccat

SEQ ID NO: 202983 - DNA, 75 bp, synthetic construct
  source 1..75: mol_type = other DNA
ccgccgatggcgcactcatcaccggactgacctttcttgcccccaaagatgccacacgggttcagggtttttttc

SEQ ID NO: 202984 - DNA, 75 bp, synthetic construct
  source 1..75: mol_type = other DNA
tccacgatgtgcacgtccgcatcccgtcagcactgacggaagaagccctggagcagatcggtcagttgtacgcca

SEQ ID NO: 202985 - DNA, 75 bp, synthetic construct
  source 1..75: mol_type = other DNA
aacgataccctgttcccgattgcccaacgccagttgaacggcgcgactatcgccgaaccggcaccctaccgtgat

SEQ ID NO: 202986 - DNA, 75 bp, synthetic construct
  source 1..75: mol_type = other DNA
gcagagcacaccccgctgtatcgccagtcagaaatatacggccggcaaggtgtggagctgagccgttcactgctg

SEQ ID NO: 202987 - DNA, 75 bp, synthetic construct
  source 1..75: mol_type = other DNA
taccgccgaacagctggagttgatgcgtagcgccttccgggttatccggacggtacgggaaaaacatgcctgtac

SEQ ID NO: 202988 - DNA, 75 bp, synthetic construct
  source 1..75: mol_type = other DNA
ggtcagtctgggtcgtaaaaacttcctgttcttcggctctgatcatggtggtgagcggggagcgctactgtacag

SEQ ID NO: 202989 - DNA, 75 bp, synthetic construct
  source 1..75: mol_type = other DNA
gtatgcgcgaactggaaccgcgtctgttttcgttcaacaacccggcgggcgcctgcccgacctgtgacggcctcg

SEQ ID NO: 202990 - DNA, 75 bp, synthetic construct
  source 1..75: mol_type = other DNA
caattgagcagaaatcgacgtctcataacccgcgctctacggtggggacaatcaccgaaatccacgactatttgc

SEQ ID NO: 202991 - DNA, 75 bp, synthetic construct
  source 1..75: mol_type = other DNA
cttccagatgctgaaatcgctggcggaacactacaagtttgacgtggaagcgccgtggggcagcctgggcgcaaa

SEQ ID NO: 202992 - DNA, 75 bp, synthetic construct
  source 1..75: mol_type = other DNA
tctgacgtacatccgtctcgggcagtcagcaaccacgctttccggtggtgaggcccagcgtgtgaagctggcgcg

SEQ ID NO: 202993 - DNA, 75 bp, synthetic construct
  source 1..75: mol_type = other DNA
cggcctgcaccagcgcgataacgaacgtttgctgggtacgcttatccatctgcgcgatcttggtaataccgtgat

SEQ ID NO: 202994 - DNA, 75 bp, synthetic construct
  source 1..75: mol_type = other DNA
cgcgcgcgtattgatggcgaagtctgcgatctttccgatccgccgaaactggaactgcaaaagaaacacaccatt

SEQ ID NO: 202995 - DNA, 75 bp, synthetic construct
  source 1..75: mol_type = other DNA
aacttcggcagtcgttccgaaaaagtcccccgccgtatcgcacaaatggaagccgatctgaaccggcttcagaaa

SEQ ID NO: 202996 - DNA, 75 bp, synthetic construct
  source 1..75: mol_type = other DNA
ctactgtacagcctgatcgggacgtgcaaactgaacggagtggagccagaaagctacctccgctatgtccttgac

SEQ ID NO: 202997 - DNA, 75 bp, synthetic construct
  source 1..75: mol_type = other DNA
gtgaagcgcgtagtgatgtgttctggtaaggtttattacgacctgctggaacaacgtcgtaagaacaatcaacac

SEQ ID NO: 202998 - DNA, 75 bp, synthetic construct
  source 1..75: mol_type = other DNA
gattccgtttggggcttctctgcgttatgcaggccgcccggcctccgcctctccggcggtaggatatatgtccgt

SEQ ID NO: 202999 - DNA, 75 bp, synthetic construct
  source 1..75: mol_type = other DNA
ggatgtacgttttgtgtcgaccaatggcaatctggaagtgatcctcgaaggggaagatgtcagcggtgaaattcg

SEQ ID NO: 203000 - DNA, 75 bp, synthetic construct
  source 1..75: mol_type = other DNA
ggcgtccaactatacctacgttgaagcgtgcgaaggtcaggacatgatgtcatggttaaatgcccacagccgttg

SEQ ID NO: 203001 - DNA, 75 bp, synthetic construct
  source 1..75: mol_type = other DNA
ggcagggaaaacgtacgggcccgtccacaggccgggtggttgaatccatgctgaaggcaaaaccccatccggaac

SEQ ID NO: 203002 - DNA, 75 bp, synthetic construct
  source 1..75: mol_type = other DNA
cgcaccgtggtcgtctgaacgtgctggtgaacgtgctgggtaaaaaaccgcaagacttgttcgacgagtttgccg

SEQ ID NO: 203003 - DNA, 75 bp, synthetic construct
  source 1..75: mol_type = other DNA
gatccggaagccgttgcctttgtgacccgtctggcgctcgatttccgtaacacctttaaacgtgatgtcttcatc

SEQ ID NO: 203004 - DNA, 75 bp, synthetic construct
  source 1..75: mol_type = other DNA
tcttgcggggttcagtggtgtactgcaggcggatgctgtcacgaacggtgcaatagtgctccacacccaacgcct

SEQ ID NO: 203005 - DNA, 75 bp, synthetic construct
  source 1..75: mol_type = other DNA
tgaatacggttatgccaccgcagaaccgcggacgttgaccatctgggaagcacagttcggtgactttgccaacgg

SEQ ID NO: 203006 - DNA, 75 bp, synthetic construct
  source 1..75: mol_type = other DNA
cattgaaatgcagtctcgtgttgccaagatttatggcgaccgtcaggcaatggcggctggtgaaaaactgttcga

SEQ ID NO: 203007 - DNA, 75 bp, synthetic construct
  source 1..75: mol_type = other DNA
cccgtctggcgctcgatttccgtaacacctttaaacgtgatgtcttcatcgacctggtgtgctaccgccgtcacg

SEQ ID NO: 203008 - DNA, 75 bp, synthetic construct
  source 1..75: mol_type = other DNA
ccgggattagcacattatgctgaaatcattgatgtgttgagtaaaaaactcccggcaccgctcattggcgagctg

SEQ ID NO: 203009 - DNA, 75 bp, synthetic construct
  source 1..75: mol_type = other DNA
ccttatttgccgcgcgcagaacagcgtgaactggggcaatacatccgcttacccatgctgcgcagtgtgttggcg

SEQ ID NO: 203010 - DNA, 75 bp, synthetic construct
  source 1..75: mol_type = other DNA
gccttatgaagcagttaatcctatcgcgttaagcgaagaagaaagtagcgtggcgcacagttgcccaatcaatta

SEQ ID NO: 203011 - DNA, 75 bp, synthetic construct
  source 1..75: mol_type = other DNA
gcacgttcgcaccccgtcagccctgacggaggaagcgctgaaacggatcggcgaactgtacgccatcgaggcaga

SEQ ID NO: 203012 - DNA, 75 bp, synthetic construct
  source 1..75: mol_type = other DNA
aagccctggtggcatggtgcatggttacgggttggcggcttcgcagttgcagcgtctgcgtgataaaaacattcc

SEQ ID NO: 203013 - DNA, 75 bp, synthetic construct
  source 1..75: mol_type = other DNA
attcttagcctgatggaaggccgggaagtggtcaatgtacgctatatgcagcgtaaacgactcattgaccgattc

SEQ ID NO: 203014 - DNA, 75 bp, synthetic construct
  source 1..75: mol_type = other DNA
gattaccaatagaagataaaaaaattgttctttcgacaggaatggcgacgcttgatgaaataagaatatgtttag

SEQ ID NO: 203015 - DNA, 75 bp, synthetic construct
  source 1..75: mol_type = other DNA
cgagcggggtatcgccggaccggggctgctggcccgcgtgctgacctcgaagtatgcagagcacaccccgctgta

SEQ ID NO: 203016 - DNA, 75 bp, synthetic construct
  source 1..75: mol_type = other DNA
gatatgatcgcagattccactggcgcaagcgcgaaaaatccgtggggcggctccgtcaaaataacagtatcaacg

SEQ ID NO: 203017 - DNA, 75 bp, synthetic construct
  source 1..75: mol_type = other DNA
cagcgccttccgggttatccggacagtccgtgaaaagcatgcctcccgtcggtgcgatcgcatcgttcaggcccc

SEQ ID NO: 203018 - DNA, 75 bp, synthetic construct
  source 1..75: mol_type = other DNA
tccgttgcgtcagacccgcacccgtaagccgttccctgaatcactaccccgtgacgaaaagcgactgttgcctgc

SEQ ID NO: 203019 - DNA, 75 bp, synthetic construct
  source 1..75: mol_type = other DNA
agattggttgtaatcataatggtgattataatcttgcaaagaaaatggttgaagaggcaaaaatcgcaggggttg

SEQ ID NO: 203020 - DNA, 75 bp, synthetic construct
  source 1..75: mol_type = other DNA
gggcggttgtgggcgtatgttcgtgacgaccgtaacgccgggtcaacgctggcgccggcggtgtggttcgcttac

SEQ ID NO: 203021 - DNA, 75 bp, synthetic construct
  source 1..75: mol_type = other DNA
tgtacgtgctcgatgagccgtctatcggcctgcaccagcgcgataacgagcgcctgctgggtacgcttatccatc

SEQ ID NO: 203022 - DNA, 75 bp, synthetic construct
  source 1..75: mol_type = other DNA
gttttcgtttaacaacccggcaggggcctgcccgacctgtgacggccttggcgtacagcaatatttcgatcctga

SEQ ID NO: 203023 - DNA, 75 bp, synthetic construct
  source 1..75: mol_type = other DNA
atcagtaatcgtccgtgcgccagctgcgaagggacgcgtctgcgtcgggaagcgcgccacgtttatgtcgagaat

SEQ ID NO: 203024 - DNA, 75 bp, synthetic construct
  source 1..75: mol_type = other DNA
aagcccagcgcgtgaagctggcgcgtgagctgtcaaaacgcggcaccgggcagacactgtatattctcgacgagc

SEQ ID NO: 203025 - DNA, 75 bp, synthetic construct
  source 1..75: mol_type = other DNA
aattggtcgtactccgcgttccaacccggcgacctataccggcgtgtttacgcctgtgcgcgaactgtttgcggg

SEQ ID NO: 203026 - DNA, 75 bp, synthetic construct
  source 1..75: mol_type = other DNA
tttccagatgctgaaatcactggcagatcactataagttcgacgtcgaagcgccgtggggcagcctgagcgcaaa

SEQ ID NO: 203027 - DNA, 75 bp, synthetic construct
  source 1..75: mol_type = other DNA
tggtgacccatctcgacgtctcgcgtgaacaactgacggaagtcgccgcccactggcgcgcattcctggcgcgtt

SEQ ID NO: 203028 - DNA, 75 bp, synthetic construct
  source 1..75: mol_type = other DNA
tggtgacgcatcttgacgtctcgcgcgaacagctggcggaagtcgccgcccactggcgcgcattcctggcgcgtt

SEQ ID NO: 203029 - DNA, 75 bp, synthetic construct
  source 1..75: mol_type = other DNA
atccagaaagctacctccgccatgtccttgacatcatagcagactggccggtgacccgggtgagtgagctgctgc

SEQ ID NO: 203030 - DNA, 75 bp, synthetic construct
  source 1..75: mol_type = other DNA
tgtttacctgcatcacaggggtttcaggttccggtaaatcgacgctgattaacgacacactgttcccgattgccc

SEQ ID NO: 203031 - DNA, 75 bp, synthetic construct
  source 1..75: mol_type = other DNA
cagacgctgtatattctcgatgagccgaccaccggtctgcactttgccgatattcagcaactgctcgacgtactg

SEQ ID NO: 203032 - DNA, 75 bp, synthetic construct
  source 1..75: mol_type = other DNA
tggtgacgcatcttgacgtctcgcgtgaacaactggcggaagtcgccgcccactggcgcgctttcctgacgcgtt

SEQ ID NO: 203033 - DNA, 75 bp, synthetic construct
  source 1..75: mol_type = other DNA
atcgctgagctggaaaggctgctctctgagcaggctgaagccctccgtcagaaagaccagcaactgagtctggtt

SEQ ID NO: 203034 - DNA, 75 bp, synthetic construct
  source 1..75: mol_type = other DNA
acaaatcgcgaaataaacaggcgtacccctattttattgatatacaggcagagatgcttgcacaccttaacaccc

SEQ ID NO: 203035 - DNA, 75 bp, synthetic construct
  source 1..75: mol_type = other DNA
gttagcaatatcaaacattttagctgaaatatcactatctgatttcgacaatgaaatcaataaaatgcatgacat

SEQ ID NO: 203036 - DNA, 75 bp, synthetic construct
  source 1..75: mol_type = other DNA
acctacgttcgtgacgaccgtaacgccgggtcaacgctggcgccggcggtgtggttcgcttacagcccggacaga

SEQ ID NO: 203037 - DNA, 75 bp, synthetic construct
  source 1..75: mol_type = other DNA
agaaaacgaagaccggcggttatggacctacgttcgtgacgaccgtaacgccgggtcaacgctggcgccggcggt

SEQ ID NO: 203038 - DNA, 75 bp, synthetic construct
  source 1..75: mol_type = other DNA
aataacacagcggaaagagcgcttcgtgcagtctgtctcggaaagaaaaattacgtgttcttcggtagcgatcac

SEQ ID NO: 203039 - DNA, 75 bp, synthetic construct
  source 1..75: mol_type = other DNA
atgccaaactgcgatcgattcagatgccattttgcacgggagcgcgaaatagaccatctgcaggcgcagctggat

SEQ ID NO: 203040 - DNA, 75 bp, synthetic construct
  source 1..75: mol_type = other DNA
aacgcgaaatagaccatctgcaggcacagctggataagctgcgccggatgaacgtcggcagcggctccgaaaaag

SEQ ID NO: 203041 - DNA, 75 bp, synthetic construct
  source 1..75: mol_type = other DNA
aacgcgaaatagaccatctgcaggcacagctggataagctgcgccggatgaacttcggcagccgctctgaaaaag

SEQ ID NO: 203042 - DNA, 75 bp, synthetic construct
  source 1..75: mol_type = other DNA
ggtggatgcatgctgccggctgctgtctccgctggaagaggcgcttcatggctatgtgctgactgacggtaagct

SEQ ID NO: 203043 - DNA, 75 bp, synthetic construct
  source 1..75: mol_type = other DNA
gcgctgaaacggatcggcgaactgtacgccatcgaggcagagataaggggaatgacggcggaacagcgccttgcc

SEQ ID NO: 203044 - DNA, 75 bp, synthetic construct
  source 1..75: mol_type = other DNA
atgagcgacatctcttctgacgacatcttcctgctgaaacagcgcctggccgaacaggaagcgctgatctacgcc

SEQ ID NO: 203045 - DNA, 75 bp, synthetic construct
  source 1..75: mol_type = other DNA
gttggcatcggcctgggctccatccgttgctgccgtgcgttattgaaagccgacggcacgccagctgcgccgttg

SEQ ID NO: 203046 - DNA, 75 bp, synthetic construct
  source 1..75: mol_type = other DNA
gcttcagcggtgtcctgcaggcggatgcgtacgccgggttcaacgagctgtatcgcaatggtgggataacggaag

SEQ ID NO: 203047 - DNA, 75 bp, synthetic construct
  source 1..75: mol_type = other DNA
gattcaggggtgtcctgcaagcggatgcgtacgccgggttcaacgagctgtatcgcaatggtgggataacggaag

SEQ ID NO: 203048 - DNA, 75 bp, synthetic construct
  source 1..75: mol_type = other DNA
gattcagtggtgtcctgcatgcggatgcgtacgccgggttcaacgagctgtatcgcaatggtgggataacggaag

SEQ ID NO: 203049 - DNA, 75 bp, synthetic construct
  source 1..75: mol_type = other DNA
ctatgtccttgacgtcatagccgactggccgataaaccgggtcggcgaactgctcccctggcgcgtagcactgcc

SEQ ID NO: 203050 - DNA, 75 bp, synthetic construct
  source 1..75: mol_type = other DNA
ggttcaggggtgtcctgcaggcggatgcgtacgccgggttcaacgagctgtatcgcaatggtgggataacggaag

SEQ ID NO: 203051 - DNA, 75 bp, synthetic construct
  source 1..75: mol_type = other DNA
gcttcaggggtgtcctgcacgcggatgcgtacgccgggttcaacgagctgtatcgcaatggtgggataacggaag

SEQ ID NO: 203052 - DNA, 75 bp, synthetic construct
  source 1..75: mol_type = other DNA
gtgttgcattacaccaaactggaccaccaggcaccggaagagatgcgcagcttcctgctggatgccgggccgaat

SEQ ID NO: 203053 - DNA, 75 bp, synthetic construct
  source 1..75: mol_type = other DNA
ttgttgttttccctgacaacgatcctgtttcgcgacttctcggccctgtggattggccgcacgctggactgggtt

SEQ ID NO: 203054 - DNA, 75 bp, synthetic construct
  source 1..75: mol_type = other DNA
ccgttccctgaatcactaccccgtgtacagcctgatcgggacgtgcaaactgaacggagtggagccagaaagcta

SEQ ID NO: 203055 - DNA, 75 bp, synthetic construct
  source 1..75: mol_type = other DNA
gattcagaggtgtcctgcaggcggatgcgtacgccgggttcaacgagctgtatcgcaatggtgggataacggaag

SEQ ID NO: 203056 - DNA, 75 bp, synthetic construct
  source 1..75: mol_type = other DNA
ctcaaagtatgcagagcacataccgctgtatcgccagtcggagatctatgcccgccagggtgtagtgttgagtcg

SEQ ID NO: 203057 - DNA, 75 bp, synthetic construct
  source 1..75: mol_type = other DNA
tgccggttgattactggcacaacgtcgaaccgctgccgacctccttctggactgaagatgtagaagtgatcgcgc

SEQ ID NO: 203058 - DNA, 75 bp, synthetic construct
  source 1..75: mol_type = other DNA
ggggctgctggctcttcagaaaaaatacggcccggaacggctggaaaaggcctgttacgttgccctgcactataa

SEQ ID NO: 203059 - DNA, 75 bp, synthetic construct
  source 1..75: mol_type = other DNA
ccgcccgcgcaaacctaaagataaaccaaaagcagaaaacggcgtcctcatcgtcgaacgatggcttcttgcccg

SEQ ID NO: 203060 - DNA, 75 bp, synthetic construct
  source 1..75: mol_type = other DNA
gcttcagcggtgtgctgcaagcggatgcatacgccgggttcaacgagctgtatcgcaatggtgggataacggaag

SEQ ID NO: 203061 - DNA, 75 bp, synthetic construct
  source 1..75: mol_type = other DNA
ctggaaagctggttgcgtgaaaagatgaagaccctgttcttcggctctggccatggtggtgagcggggagcgcta

SEQ ID NO: 203062 - DNA, 75 bp, synthetic construct
  source 1..75: mol_type = other DNA
gaaatccctggaaagctggttgcatgaaaagatgaagaccctgttcttcggctctggccatggtggtgagcgggg

SEQ ID NO: 203063 - DNA, 75 bp, synthetic construct
  source 1..75: mol_type = other DNA
gccgatgataccccggtccaggtactgctgccgggtaataagaagacgaagaccgggcggttgtgggcgtatgtt

SEQ ID NO: 203064 - DNA, 75 bp, synthetic construct
  source 1..75: mol_type = other DNA
tatgtggatagggaaagagaaggaaaaaaaacttagcaatagtgaaatagagaggaaatttaaatttaaaattgc

SEQ ID NO: 203065 - DNA, 75 bp, synthetic construct
  source 1..75: mol_type = other DNA
tagtgttaactttgagcgccttttggccgagatcaaagaacgcgacgaccgcgatcgtaaccgagcggcactcag

SEQ ID NO: 203066 - DNA, 75 bp, synthetic construct
  source 1..75: mol_type = other DNA
ccattgatggcccaagcggtgcagggaaaggcaccttgtgtaaggctatggcggaagcattgcaatggcatctgc

SEQ ID NO: 203067 - DNA, 75 bp, synthetic construct
  source 1..75: mol_type = other DNA
tttactggatacgctcagcgcgctgctgacccaggaaggcacgccgtctgaaaatgattatcgcattgattatgc

SEQ ID NO: 203068 - DNA, 75 bp, synthetic construct
  source 1..75: mol_type = other DNA
atgtatacatcagcagcaaaagtgcgacgacagaagaagccctgaagcgaatcagtgaactgtacgccatcgagg

SEQ ID NO: 203069 - DNA, 75 bp, synthetic construct
  source 1..75: mol_type = other DNA
tcgaagtatgcagagcacaccccgctgtatcgccagtcagaaatatacggccggcaaggtgtggagctgaggcgt

SEQ ID NO: 203070 - DNA, 75 bp, synthetic construct
  source 1..75: mol_type = other DNA
ctgcggatggtcagtttgggaagaaaaaactggctgttcttcggctcagaccacggaggtgagcgtgtagcgctg

SEQ ID NO: 203071 - DNA, 75 bp, synthetic construct
  source 1..75: mol_type = other DNA
ctccagcctgtttttactcagtaccctggggatggggctgctgatttccacgattacccgcaaccagttcaatgc

SEQ ID NO: 203072 - DNA, 75 bp, synthetic construct
  source 1..75: mol_type = other DNA
gctggcacttcagaaaaaatacggcccggaacggctggaaaaggcctgttacgttgccctgcactataacgcccc

SEQ ID NO: 203073 - DNA, 75 bp, synthetic construct
  source 1..75: mol_type = other DNA
tgtccgccatccaacgacagtaacgggagaagcgctccgtcgtatcggggcactgtacgctatcgagtctgagat

SEQ ID NO: 203074 - DNA, 75 bp, synthetic construct
  source 1..75: mol_type = other DNA
aacgcgaaatagaccatctgcaggcacagctggataagctgcgccggatgaacatcggcagcagctcggaaaaag

SEQ ID NO: 203075 - DNA, 75 bp, synthetic construct
  source 1..75: mol_type = other DNA
atttcgcggaacagatggagcgtgccaacgccaccgcgccaattcaggtgattaccgacggcagcgagccaaata

SEQ ID NO: 203076 - DNA, 75 bp, synthetic construct
  source 1..75: mol_type = other DNA
gctggatttcacccacaccatgacaggctcaccttatatcgacgccactatcagcgataatcgccaggaattaat

SEQ ID NO: 203077 - DNA, 75 bp, synthetic construct
  source 1..75: mol_type = other DNA
tgctggcgatgcgtcattacaaacgtgctgaaaccgttgacggtaaagttgatacccgtgcgctggaagaggtcg

SEQ ID NO: 203078 - DNA, 75 bp, synthetic construct
  source 1..75: mol_type = other DNA
caacgtggaaaccaagccgggccagggcttcccgactgactgggaaaaccaggaaaaatacaaaggtggctggat

SEQ ID NO: 203079 - DNA, 75 bp, synthetic construct
  source 1..75: mol_type = other DNA
tggtgctgaatctggataagtgcatcggttgccacacctgttcagtgacctgtaaaaacgtctggaccagccgtg

SEQ ID NO: 203080 - DNA, 75 bp, synthetic construct
  source 1..75: mol_type = other DNA
tgctgaaaccgttgacggtaaggttgatacccgtgcgctggaagaggttggcctgaccgaagctcaggctcagga

SEQ ID NO: 203081 - DNA, 75 bp, synthetic construct
  source 1..75: mol_type = other DNA
attttgccagacgtagaaagcctgcgtatcccggttcagtacctggcgaatctgctgaccgccggtgatacccaa

SEQ ID NO: 203082 - DNA, 75 bp, synthetic construct
  source 1..75: mol_type = other DNA
tgctgggtaaaatcttcgccaacccgcatttgccggggatcgacgattattacgagccgttcgattttgattatc

SEQ ID NO: 203083 - DNA, 75 bp, synthetic construct
  source 1..75: mol_type = other DNA
cagtcacgtcatcgtcgtccgttaccagcacatcttccccgtgaaatacaccgcctggagcctgaagaaagttgt

SEQ ID NO: 203084 - DNA, 75 bp, synthetic construct
  source 1..75: mol_type = other DNA
tggaacgtatgatacagttcttgtccttgaggataagaaaacagggaagctgggttttccggtaagggctaagaa

SEQ ID NO: 203085 - DNA, 75 bp, synthetic construct
  source 1..75: mol_type = other DNA
gaagattgagcccgctgcgccagcagggcagtttcaacgcctggactctccctgcccttcctgtggtaaacatat

SEQ ID NO: 203086 - DNA, 75 bp, synthetic construct
  source 1..75: mol_type = other DNA
ttgggaagaaatgacctgcttattcgcaccttccctaacaataacgatgtgaaaagcgtgaaagatctcgacggg

SEQ ID NO: 203087 - DNA, 75 bp, synthetic construct
  source 1..75: mol_type = other DNA
cgaactggaagccaggggaatttgccccgctgacagaccgtaaattacttgataaggcgtgggcaaacggaactg

SEQ ID NO: 203088 - DNA, 75 bp, synthetic construct
  source 1..75: mol_type = other DNA
aagcataccaggaagtatcggttgccattcagtgtggtgatgagtcgttctatgctcgtgccagaaaaacaactg

SEQ ID NO: 203089 - DNA, 75 bp, synthetic construct
  source 1..75: mol_type = other DNA
tgtacaggatgtgaatttaaaatctggaatgagttttctggcaagaaaatcacccaggcacaggccgaaaaactg

SEQ ID NO: 203090 - DNA, 75 bp, synthetic construct
  source 1..75: mol_type = other DNA
ccaggctggcgaagatgacgatgtgctgtcgattccggcttctttacaggggcgtgtatcaggaaacagcggcgt

SEQ ID NO: 203091 - DNA, 75 bp, synthetic construct
  source 1..75: mol_type = other DNA
ttgtttatggaaaaatgtgtggagtatggaaaaacattagccgtcgcaggtgaaaccagtacgggtaaaacaaca

SEQ ID NO: 203092 - DNA, 75 bp, synthetic construct
  source 1..75: mol_type = other DNA
gatggtctgcgtctcatgaagaacggttacggtgagcaggtgagtaaatggtttaatcggacgttgttgcctaaa

SEQ ID NO: 203093 - DNA, 75 bp, synthetic construct
  source 1..75: mol_type = other DNA
tcagcgaagcgccgcaggttatcgatgccctgaaatcagtctttcctcagtcgctggatattgattctgcacgta

SEQ ID NO: 203094 - DNA, 75 bp, synthetic construct
  source 1..75: mol_type = other DNA
acaatcccggcaaaaactaaaggctataaaggtgttttgtctgtcggacgggtccagacacccgtgcttggcctg

SEQ ID NO: 203095 - DNA, 75 bp, synthetic construct
  source 1..75: mol_type = other DNA
atctataacaccattaaccaccgctcaggcgattacgccaactgcggcgccagacaaagacacggcaaaaaaaac

SEQ ID NO: 203096 - DNA, 75 bp, synthetic construct
  source 1..75: mol_type = other DNA
cgcggaagccacagacgaggatgaatcagataatgatgattctgcttttgaactgctctgtaagattcgtacagg

SEQ ID NO: 203097 - DNA, 75 bp, synthetic construct
  source 1..75: mol_type = other DNA
aaaatttttatggtaaagcattatccgataagcaagtggaaacacttgttacaaaaggtattaccggagaattaa

SEQ ID NO: 203098 - DNA, 75 bp, synthetic construct
  source 1..75: mol_type = other DNA
cgaactggaaaccaggagaatttgccccgctgacagaccgtaaattacttgataaggcgtgggcaaacggaactg

SEQ ID NO: 203099 - DNA, 75 bp, synthetic construct
  source 1..75: mol_type = other DNA
tatcaggccaaaaggttatttctgtacaggatgtgaatttaaaatctggaagaacttctctggcaaggctctgtc

SEQ ID NO: 203100 - DNA, 75 bp, synthetic construct
  source 1..75: mol_type = other DNA
cgcggaaaccacagacgaaggtgaatcagaagataatgatgattccgcttttgaactgctctgtaaaattcgcac

SEQ ID NO: 203101 - DNA, 75 bp, synthetic construct
  source 1..75: mol_type = other DNA
gcttatacgatcccggcacgggctaaaggctataaagggacactttcggtcgggcgtgttcagacgcctattctt

SEQ ID NO: 203102 - DNA, 75 bp, synthetic construct
  source 1..75: mol_type = other DNA
ctgaaaaaaggtattacaggcgagttaaaaggatttatcagttccaggacgaacaaagagttttcggctaaggtt

SEQ ID NO: 203103 - DNA, 75 bp, synthetic construct
  source 1..75: mol_type = other DNA
ggcacttggtggcaattttactcgccatgatggctggtttgaaagtgataacgcaattgtgactaactgttttgg

SEQ ID NO: 203104 - DNA, 75 bp, synthetic construct
  source 1..75: mol_type = other DNA
atgagactttttattgcagaaaaacccgcagtagcgaatgatattgttaaggcacttggtggcaattttactcgc

SEQ ID NO: 203105 - DNA, 75 bp, synthetic construct
  source 1..75: mol_type = other DNA
caggatatatctcatggaaaaaccacgtgaaacagaaagtcaaaaataattaccttcctgagatcgaggattatc

SEQ ID NO: 203106 - DNA, 75 bp, synthetic construct
  source 1..75: mol_type = other DNA
gacagctactggttgatgaagtcctggaatatgcaggcaacacaaaacccgtaaagcgcgttctgattaacgaca

SEQ ID NO: 203107 - DNA, 75 bp, synthetic construct
  source 1..75: mol_type = other DNA
ccgcagtagcgaatgatattgttaaagcgcttggtggcaattttactcgccatgatggctggtttgaaagtgata

SEQ ID NO: 203108 - DNA, 75 bp, synthetic construct
  source 1..75: mol_type = other DNA
aaagcaaggcttttgacagcgcgaaggtgacggcacatactgcgataatcccgaccgctaatgtgcctgatataa

SEQ ID NO: 203109 - DNA, 75 bp, synthetic construct
  source 1..75: mol_type = other DNA
tttggcacagtcaacgtactccagtttgacggcgaaggaggggcgaacctggctcgcaacgcgaaaaatttacgt

SEQ ID NO: 203110 - DNA, 75 bp, synthetic construct
  source 1..75: mol_type = other DNA
cagtataagctcttcacaacctatattcctggtcagggtaacgtaatggcaacgcgtgactaccaggctgaatta

SEQ ID NO: 203111 - DNA, 75 bp, synthetic construct
  source 1..75: mol_type = other DNA
gcggtgttagcgagcgtctggtctggcaatggctcgatgagggagtccttctcaaagctccgaccaaagactttt

SEQ ID NO: 203112 - DNA, 75 bp, synthetic construct
  source 1..75: mol_type = other DNA
cacgcgggtggcccgtggcgaccagttctgcgaaggctgggtctttggtgcccgtgatgtcattgcggtgtatga

SEQ ID NO: 203113 - DNA, 75 bp, synthetic construct
  source 1..75: mol_type = other DNA
gttgctatgacatgttctatcagaaaggaaaaacgccttttctggcatggtgtgagcagcaaggctcaaaacgta

SEQ ID NO: 203114 - DNA, 75 bp, synthetic construct
  source 1..75: mol_type = other DNA
aaccagtataaaatatttaccacctatgtaccggggcaatcttccaccacagcgacccatgactacctggcggaa

SEQ ID NO: 203115 - DNA, 75 bp, synthetic construct
  source 1..75: mol_type = other DNA
ctggcaaaccggattttgccagagtcaacacgatcgaaatcgtaacgaacgagatgaatgtcgcctgcaaaccga

SEQ ID NO: 203116 - DNA, 75 bp, synthetic construct
  source 1..75: mol_type = other DNA
tcatggcgatcaagaaaaggcaaaagaactgaccaatgaagcttccgctttgctgtcagatgacagtaccgaatg

SEQ ID NO: 203117 - DNA, 75 bp, synthetic construct
  source 1..75: mol_type = other DNA
gaagacgccttctttgcagataagcaaatcatcctagcctgccacggagaagagttctttaaagacatacagaat

SEQ ID NO: 203118 - DNA, 75 bp, synthetic construct
  source 1..75: mol_type = other DNA
tcagtaaaagacttcgctgccgcccgtggcgttagcgagcgtctggtctggcaatggattgatgagggcgtcctt

SEQ ID NO: 203119 - DNA, 75 bp, synthetic construct
  source 1..75: mol_type = other DNA
ctttactgacggcttctctgctccccttctcttcagctaacgccgtggcgttacaggcaaaacagtacggcgatt

SEQ ID NO: 203120 - DNA, 75 bp, synthetic construct
  source 1..75: mol_type = other DNA
tacgaatatgccaaacacggtgcctgctttggttttgatccggacgcatacttcggtacgatggtacgcctgaat

SEQ ID NO: 203121 - DNA, 75 bp, synthetic construct
  source 1..75: mol_type = other DNA
ttctgcgaaggctgggtctttggtgcccgtgatgtcattgcggtgtatgacgtctccccggaagaaaaaagccgc

SEQ ID NO: 203122 - DNA, 75 bp, synthetic construct
  source 1..75: mol_type = other DNA
gggggtgattaccgtggacgatttaccggcgggctgggggctgttgtatgtgattaacgggcggggcaggaaagt

SEQ ID NO: 203123 - DNA, 75 bp, synthetic construct
  source 1..75: mol_type = other DNA
atatgggcgtgctggagaaaagacacattgactctctgactgaagaagaagagaactggcgtcgtcagctcgtca

SEQ ID NO: 203124 - DNA, 75 bp, synthetic construct
  source 1..75: mol_type = other DNA
gtactgcacgacacgccaaacattctttacttcatcaaaaccgctggtaacggtcagtttaaagcggtaggcgac

SEQ ID NO: 203125 - DNA, 75 bp, synthetic construct
  source 1..75: mol_type = other DNA
atcattattatgttaccgccttggctgctatcactggggcgagactcaatgaaatagcccaactacaggtcaaag

SEQ ID NO: 203126 - DNA, 75 bp, synthetic construct
  source 1..75: mol_type = other DNA
aaaagatgctgactgtgtttttggattcagaaagcacgttcataacagtaaatcaactaagagatgcggggtttg

SEQ ID NO: 203127 - DNA, 75 bp, synthetic construct
  source 1..75: mol_type = other DNA
gtaacggtgccggtatcagcgtctttgccagcgttaatgcggcaaaaggcagcgagaaaggtaacggtactgagt

SEQ ID NO: 203128 - DNA, 75 bp, synthetic construct
  source 1..75: mol_type = other DNA
atattcaggacttttttaactggatgtgggcggtggatcccctgctggcttcccgcctgaacaactggcacgact

SEQ ID NO: 203129 - DNA, 75 bp, synthetic construct
  source 1..75: mol_type = other DNA
ttaaaacagcagaagactttatcgctgaataccagcgccttcttgtgctgtaccgggctgcatttcagaaggcaa

SEQ ID NO: 203130 - DNA, 75 bp, synthetic construct
  source 1..75: mol_type = other DNA
ttctgcgaaggctgggcctttggtgcccgtgacgtgattacggtgtatgacgtctccccggaagagaaaggtcgt

SEQ ID NO: 203131 - DNA, 75 bp, synthetic construct
  source 1..75: mol_type = other DNA
acgccagcccacgaacgtttccacctggcattatgttcgccgggagacgtctctcagctctggatgctggttctg

SEQ ID NO: 203132 - DNA, 75 bp, synthetic construct
  source 1..75: mol_type = other DNA
ctgttttcttatccgtcgctggcatccgttgtcgggaataccctgccctggcagacctacagggattttgctgag

SEQ ID NO: 203133 - DNA, 75 bp, synthetic construct
  source 1..75: mol_type = other DNA
tttaaggtggtgttcagtgaccgttttcacgcatggacgtcctgcggtgaacatcctgatgccctgggcttccgt

SEQ ID NO: 203134 - DNA, 75 bp, synthetic construct
  source 1..75: mol_type = other DNA
cttatgttcgtgacgaccgtaacgccgggtcaacgctggcgccggcggtgtggttcgcttacagcccggacagaa

SEQ ID NO: 203135 - DNA, 75 bp, synthetic construct
  source 1..75: mol_type = other DNA
tccctggaaagctggctgcgtgaaaagatgaaaaccctgtcgcgcactcagaactggcgaaagcgttcgcatacg

SEQ ID NO: 203136 - DNA, 75 bp, synthetic construct
  source 1..75: mol_type = other DNA
agttcaatcgttccagtttacataagatcattgatactcaacgtatcgacatgatcattgttgatgaaggcattc

SEQ ID NO: 203137 - DNA, 75 bp, synthetic construct
  source 1..75: mol_type = other DNA
aaaagcatgcctgtactcagtgcgatgccatcgtgcaggcccccgcgccttcacggcccatcgagcggggtatcg

SEQ ID NO: 203138 - DNA, 75 bp, synthetic construct
  source 1..75: mol_type = other DNA
ggtccaggtactgctgccgggtaataagaagacgaagaccgggcggttgtgggcgtatgttcgtgatgaccgcaa

SEQ ID NO: 203139 - DNA, 75 bp, synthetic construct
  source 1..75: mol_type = other DNA
atgccctgcgagcggtcagtctgggtcgtaaaaacttcctgttcttcggctctgaccatggtggtgagcggggag

SEQ ID NO: 203140 - DNA, 75 bp, synthetic construct
  source 1..75: mol_type = other DNA
aagctacctacgcaatgtacttgacgtcatagcagactggccgttgaaccgggtcagcgaactgctcccgtggcg

SEQ ID NO: 203141 - DNA, 75 bp, synthetic construct
  source 1..75: mol_type = other DNA
ctgttagtttagttaactatgaagattggactgcagaggccggtaagcacacaatgcttctcaatgtaggtactt

SEQ ID NO: 203142 - DNA, 75 bp, synthetic construct
  source 1..75: mol_type = other DNA
aagcaggagcagattacttttttatccagaacagtaaacaaaactgtggatgactattgcatgagtaataattcg

SEQ ID NO: 203143 - DNA, 75 bp, synthetic construct
  source 1..75: mol_type = other DNA
ggtcgtaaaaacttcctgttcttcggctctgaccatggtggtgagcggggagcgctactgtacagcctgatcggg

SEQ ID NO: 203144 - DNA, 75 bp, synthetic construct
  source 1..75: mol_type = other DNA
aagctacctacgcaatgtacttgacgtcatagcggactggccgttgaaccgggtcagcgaactgctcccatggcg

SEQ ID NO: 203145 - DNA, 75 bp, synthetic construct
  source 1..75: mol_type = other DNA
aagctacctacgcaatgtacttgacgtcatagctgactggccgttgaaccgggtcagcgaactgctcccttggcg

SEQ ID NO: 203146 - DNA, 75 bp, synthetic construct
  source 1..75: mol_type = other DNA
cacggcccatcgagcggggtatcgccggaccggggctgctggcccgcgtgctgatctcaaagtatgcagagcaca

SEQ ID NO: 203147 - DNA, 75 bp, synthetic construct
  source 1..75: mol_type = other DNA
cgctcaggtggccctgaacgcggcttttctgccgtcgattatgctttccggctttatatttcagatagacagtat

SEQ ID NO: 203148 - DNA, 75 bp, synthetic construct
  source 1..75: mol_type = other DNA
cgattccgggaccaccacttttgagattgctcgtctgatgcgcaagcacactgacgtaattgcgatgaccaacgg

SEQ ID NO: 203149 - DNA, 75 bp, synthetic construct
  source 1..75: mol_type = other DNA
aacatcgctgaaaatgcgttgcggatggtcagtctgggccgcaaaaactacctgttcttcggttcggatcatgga

SEQ ID NO: 203150 - DNA, 75 bp, synthetic construct
  source 1..75: mol_type = other DNA
agttgtacgccatagaggcggatataaggggaatgccggcagagcagcggcttgctgaacgtcagcgaaaaacga

SEQ ID NO: 203151 - DNA, 75 bp, synthetic construct
  source 1..75: mol_type = other DNA
attccaaccaattttggcggcattcgcgcactgatgtctaatgggcttgcctctcgtacgcagggggcatttggc

SEQ ID NO: 203152 - DNA, 75 bp, synthetic construct
  source 1..75: mol_type = other DNA
tcaatgcgctgaaacgtctccttgccgaacaggaggcgctgaaccgtgccctgctggaaaagctgaacgagcgtg

SEQ ID NO: 203153 - DNA, 75 bp, synthetic construct
  source 1..75: mol_type = other DNA
cgccaaaatgcaggcggggaaaattcgcggtctggtggttattcccgtggatttcgccgaacagatggagcgcgc

SEQ ID NO: 203154 - DNA, 75 bp, synthetic construct
  source 1..75: mol_type = other DNA
gtcgcgtgcgggcgctgtgcgtcaaagagacacggcagatcgttcgcgatccgagtagctggctgattgcggtag

SEQ ID NO: 203155 - DNA, 75 bp, synthetic construct
  source 1..75: mol_type = other DNA
gctgttgccaggcaataagaaaacgaagaccgggcggttatggacctacgttcgtgacgaccgtaacgccgggtc

SEQ ID NO: 203156 - DNA, 75 bp, synthetic construct
  source 1..75: mol_type = other DNA
ggggaatgacggcggagcagcgccttgccgaacgtcagttgaaaacgaaaccgctgctgaaatccctggaaagct

SEQ ID NO: 203157 - DNA, 75 bp, synthetic construct
  source 1..75: mol_type = other DNA
cgtgaaaagatgaagaccctgtcgcgacactcagagttggcgaaggcgttcgcgtacgcacttaaccagtggccg

SEQ ID NO: 203158 - DNA, 75 bp, synthetic construct
  source 1..75: mol_type = other DNA
tatggtgtatctactgtgacgatccgcaacgatctggcgtttctggaaaagcaggggatcgctgtgcgtgcctat

SEQ ID NO: 203159 - DNA, 75 bp, synthetic construct
  source 1..75: mol_type = other DNA
aatatagcccaacagatgggcgctttctggccagcgatggcactgggggattatttactgaattattgcttttag

SEQ ID NO: 203160 - DNA, 75 bp, synthetic construct
  source 1..75: mol_type = other DNA
ggtatcaatgattgtaagacctgaaaattgtatgtatgactactcaaagggaaacttcattataaaagatagtta

SEQ ID NO: 203161 - DNA, 75 bp, synthetic construct
  source 1..75: mol_type = other DNA
gatatgacagcattatggtctgaaaagcagactgccatagaaaatggcgacctgacggttgaacagtttattaat

SEQ ID NO: 203162 - DNA, 75 bp, synthetic construct
  source 1..75: mol_type = other DNA
tccagcggcggcagtggaggattgttttctgagttattgcttttggggtttaatagtggtcctcaagctcttagc

SEQ ID NO: 203163 - DNA, 75 bp, synthetic construct
  source 1..75: mol_type = other DNA
tttctgagttattgattttgggatttaataatggtcctcgagcccttggtgagagaatgctaagtatgctttcgg

SEQ ID NO: 203164 - DNA, 75 bp, synthetic construct
  source 1..75: mol_type = other DNA
atgccattaacctcaggtattaattcatcttcgttcagccttggaatggaggttcttcgtgctcaagttgcagcc

SEQ ID NO: 203165 - DNA, 75 bp, synthetic construct
  source 1..75: mol_type = other DNA
ccggatatgcgcttattgatgccctgccaggtatagcggttaatcctgatatgacagcattatggtctgaaaaac

SEQ ID NO: 203166 - DNA, 75 bp, synthetic construct
  source 1..75: mol_type = other DNA
catttaacctggtcaggctccagcaatacatgaacaaaaagttcaaaatgacagcgcaaaaaacgctggatgtta

SEQ ID NO: 203167 - DNA, 75 bp, synthetic construct
  source 1..75: mol_type = other DNA
agggcgtgtccagactcccgttcttggcctgattgtgaatcgtactcgtgccaaccagaatcataaatccagttt

SEQ ID NO: 203168 - DNA, 75 bp, synthetic construct
  source 1..75: mol_type = other DNA
aggagaaacactgacgacaaaagaagttgtcgttaatgagaagaaaacaactccgccgccattatttaccgaagc

SEQ ID NO: 203169 - DNA, 75 bp, synthetic construct
  source 1..75: mol_type = other DNA
tcatattatcgaatcacagccaccggaaaactataatcccgaatacaaagcatggaaagttgaaacactcccttt

SEQ ID NO: 203170 - DNA, 75 bp, synthetic construct
  source 1..75: mol_type = other DNA
tcagaagataatgatgattccgcttttgaactgctctgtaaaattcgcacaggagaaacactgacgacaaaagaa

SEQ ID NO: 203171 - DNA, 75 bp, synthetic construct
  source 1..75: mol_type = other DNA
gatattggatcacgttcatttaatcttgggctggaggtttttcgtgcccgaattgcagccaatgggcgcggagat

SEQ ID NO: 203172 - DNA, 75 bp, synthetic construct
  source 1..75: mol_type = other DNA
cggcggcaaatgcaggcccgacgggtgttacagcagatgagtgatgaacggttgagggacagtgggttaggctgg

SEQ ID NO: 203173 - DNA, 75 bp, synthetic construct
  source 1..75: mol_type = other DNA
cggcggcaaatgcaggcccgacgggtgttacagcagatgagtgatgaacggttgagggatactgggttatgctgg

SEQ ID NO: 203174 - DNA, 75 bp, synthetic construct
  source 1..75: mol_type = other DNA
cggcggcaaatgcaggcccgacgggtgttacagcagatgagtgatgaacggttgagggatattgggttacgctgg

SEQ ID NO: 203175 - DNA, 75 bp, synthetic construct
  source 1..75: mol_type = other DNA
tcttacagtccaacaaatactttaataaaaaagttgatgagcagtgtggcaaaggggtggatccaattacacgct

SEQ ID NO: 203176 - DNA, 75 bp, synthetic construct
  source 1..75: mol_type = other DNA
ttaacacccaggctaagatgataaaacaagtctcgcaagaaatctttgagcagaatttttgcggcttaaaagtca

SEQ ID NO: 203177 - DNA, 75 bp, synthetic construct
  source 1..75: mol_type = other DNA
cggcggcaaatgcaggcccgacgggtgttacagcagatgagtgatgaacggttgagggagaatgggttaagctgg

SEQ ID NO: 203178 - DNA, 75 bp, synthetic construct
  source 1..75: mol_type = other DNA
ggcttgtctgttgcatctgttcccgcaaccacatcagcttttcctgccgggactcagtcatccatttgtcgctgt

SEQ ID NO: 203179 - DNA, 75 bp, synthetic construct
  source 1..75: mol_type = other DNA
ttacttgattgggtaatgcagcaacgtctggatagtgaattgcctgcgcattacactgtgccgacgggaagccgg

SEQ ID NO: 203180 - DNA, 75 bp, synthetic construct
  source 1..75: mol_type = other DNA
ctgcccgctgtatggcgcgttgtcgctgaacgatcagcgaaaagcgatccttccggcaccagaagggatgcgcaa

SEQ ID NO: 203181 - DNA, 75 bp, synthetic construct
  source 1..75: mol_type = other DNA
atggaatttcacgaaaacaaagccaaagcgccgtttatcggcttcgtgcaactctggcaggcggtgcgaagctgg

SEQ ID NO: 203182 - DNA, 75 bp, synthetic construct
  source 1..75: mol_type = other DNA
catggaacatcattttcagcattccggggatgaataagtggctgcatcgtaatggtgtcacctacaaaaaaccgt

SEQ ID NO: 203183 - DNA, 75 bp, synthetic construct
  source 1..75: mol_type = other DNA
gcggttgatgatgagagtttgttggcgacgctggaaacgtggctactgccgcatatgagcggcgtgcattcacta

SEQ ID NO: 203184 - DNA, 75 bp, synthetic construct
  source 1..75: mol_type = other DNA
ggaggatttgcagagcctggtgggggccacggtggttcgtcgccgggtgtatgcgcgttttctggatgcggtgaa

SEQ ID NO: 203185 - DNA, 75 bp, synthetic construct
  source 1..75: mol_type = other DNA
acctatcgcggcgatgagtgcggttatcacggtccggcggtcgcggatgaatatgaccagacaacgtccgatatc

SEQ ID NO: 203186 - DNA, 75 bp, synthetic construct
  source 1..75: mol_type = other DNA
ttcccgtcccaccctgacggtttctaacctggacggtatggtcaccgggatggcggaagagctgcagagtctggt

SEQ ID NO: 203187 - DNA, 75 bp, synthetic construct
  source 1..75: mol_type = other DNA
tggcaggggcgacagtatcaggcctatcccattcaggggacgggatttgaactgaacggcaagggcagtgctgcc

SEQ ID NO: 203188 - DNA, 75 bp, synthetic construct
  source 1..75: mol_type = other DNA
ttcccggcctaccctgacggtttctaacctgcacggtatggtcaccgggatggcggaagagctgcagagtctggt

SEQ ID NO: 203189 - DNA, 75 bp, synthetic construct
  source 1..75: mol_type = other DNA
cgttccgccagtacggcgacaactggcggcaccaaaacgcccgttgggaccaacgccaattgagttgctgaaaca

SEQ ID NO: 203190 - DNA, 75 bp, synthetic construct
  source 1..75: mol_type = other DNA
ggcctcgtttgtgctggccacaccgaccgagacggacggggcgctgtttcccggtcgtatcatgctggcgaacac

SEQ ID NO: 203191 - DNA, 75 bp, synthetic construct
  source 1..75: mol_type = other DNA
gatgaacgggaagggcagcagtgccagaccgtcgctgacggtgtcgaatctgtttggtctggtcaccgggatggc

SEQ ID NO: 203192 - DNA, 75 bp, synthetic construct
  source 1..75: mol_type = other DNA
ggtggtccgccgccgggtgtatgcccgttttctggatgcggtgaattttgtggagggcaatcctgaggcagaccc

SEQ ID NO: 203193 - DNA, 75 bp, synthetic construct
  source 1..75: mol_type = other DNA
atcgacctgacggtacagggcggtgagcggtattttttctgtaatgagctgaatgaaaaaggggaggcggtcacc

SEQ ID NO: 203194 - DNA, 75 bp, synthetic construct
  source 1..75: mol_type = other DNA
tggcaggggcggcagtatcaggcataccccattcaggggacgggatttgaactgaacggcaagggcagttctgcc

SEQ ID NO: 203195 - DNA, 75 bp, synthetic construct
  source 1..75: mol_type = other DNA
tgggggccacggtggtccgccgccgggtgtatgcccgttttctggatgcggtgaattttgtagcgggcaatccgg

SEQ ID NO: 203196 - DNA, 75 bp, synthetic construct
  source 1..75: mol_type = other DNA
agctgactgccatgacggcctcgtttgtgctggccacaccgaccgagacggacggggcgctgtttcccggtcgta

SEQ ID NO: 203197 - DNA, 75 bp, synthetic construct
  source 1..75: mol_type = other DNA
tggcaggggcggaagtatgaggcgtacccgattgagggcagcggctttgagatgaacgggaagggcagcagtgcc

SEQ ID NO: 203198 - DNA, 75 bp, synthetic construct
  source 1..75: mol_type = other DNA
taacgtgggtattatgggaacatccttgagcggactggatgcggcaatggcagtggctattcagcatggttcgtt

SEQ ID NO: 203199 - DNA, 75 bp, synthetic construct
  source 1..75: mol_type = other DNA
tacgtatctcgaatggctacaaaagcaagaagccagccatctccagcgttatggcgttaaaaaagaaaccttgca

SEQ ID NO: 203200 - DNA, 75 bp, synthetic construct
  source 1..75: mol_type = other DNA
caggggcggcaatatcaggcatacccgattgacggcagtggctttgagatgaacgggaagggcagcagtgcccgc

SEQ ID NO: 203201 - DNA, 75 bp, synthetic construct
  source 1..75: mol_type = other DNA
tttaccctggctgatgcacaaccggcctttcgtccagggacttacggcttgtgcagaaattggcgaggctatggc

SEQ ID NO: 203202 - DNA, 75 bp, synthetic construct
  source 1..75: mol_type = other DNA
atctgcaggtcacagactccggtgtcattcttgccacaaatcaggagctactcacagagacgtttgatttagcgc

SEQ ID NO: 203203 - DNA, 75 bp, synthetic construct
  source 1..75: mol_type = other DNA
aaaagctaaatattacgttgatgtcgcgcacgggtattttacccgaagccgatttctattgccctattccctacg

SEQ ID NO: 203204 - DNA, 75 bp, synthetic construct
  source 1..75: mol_type = other DNA
tggcaggggcgtgaatatcaggcgtacccgattgaggggagtagctttgagatgaacggaaagggcagcagtgcc

SEQ ID NO: 203205 - DNA, 75 bp, synthetic construct
  source 1..75: mol_type = other DNA
ggcagagatgcagggggagattgtggcactggtccacagtcatcccggtggtctgccctggctgagcgaggccga

SEQ ID NO: 203206 - DNA, 75 bp, synthetic construct
  source 1..75: mol_type = other DNA
gatgaacggaaagggcagcagtgcccgcccgtcgctgacagtgtccaatcttttcggccttgtcaccgggatggc

SEQ ID NO: 203207 - DNA, 75 bp, synthetic construct
  source 1..75: mol_type = other DNA
acactgacggtttctaacctgcacggcatggtcaccgggatggcggaagacctgcagagtctggtcggcggaacg

SEQ ID NO: 203208 - DNA, 75 bp, synthetic construct
  source 1..75: mol_type = other DNA
aatgtcgcgcacgggtattttacccgaagccgatttctattgccctattccctacgagcccttacacatcgtcac

SEQ ID NO: 203209 - DNA, 75 bp, synthetic construct
  source 1..75: mol_type = other DNA
tggcaggggcggcaatatcaggcatacccgattgacggcagtggctttgagatgaacggaaagggctgcagtgcc

SEQ ID NO: 203210 - DNA, 75 bp, synthetic construct
  source 1..75: mol_type = other DNA
agtgcagcgaactgagcgcggccagtgcctcttttgtactgtccacaccgacggaaacggacggcgctgtttttc

SEQ ID NO: 203211 - DNA, 75 bp, synthetic construct
  source 1..75: mol_type = other DNA
cggaaggacagatgcagtaaatgcatgcgcgggtgtgagatgcgcggcatggaggaaaattttggcggtttcctt

SEQ ID NO: 203212 - DNA, 75 bp, synthetic construct
  source 1..75: mol_type = other DNA
gtggctaattttggcggtttcctttccattaataaactttcgcagtaatggattatgcccaccgtcaggtgggtt

SEQ ID NO: 203213 - DNA, 75 bp, synthetic construct
  source 1..75: mol_type = other DNA
atgaaaaaaattgctattgtgggtgccgggcctacggggatctacaccttattctcgcttctacagcaacaaacg

SEQ ID NO: 203214 - DNA, 75 bp, synthetic construct
  source 1..75: mol_type = other DNA
gaatgcgggtataacggtcctgcggtggcggatgagttcgacaaccccaccacggatatccgtaaggacagatgc

SEQ ID NO: 203215 - DNA, 75 bp, synthetic construct
  source 1..75: mol_type = other DNA
atgcaggatattcacgaagaaagtctgaacgagtcggttaagtcagagcagtcaccgcgggtggtgctctgggaa

SEQ ID NO: 203216 - DNA, 75 bp, synthetic construct
  source 1..75: mol_type = other DNA
gcattgtgaacattatcgtgccattattgatgccgcagatggattaccgatggtggtatataacatccctgcact

SEQ ID NO: 203217 - DNA, 75 bp, synthetic construct
  source 1..75: mol_type = other DNA
aacgggtacattacccaccatcaagctggccattaaattggttttattaacgatggtgcgtaaaagtgaactgct

SEQ ID NO: 203218 - DNA, 75 bp, synthetic construct
  source 1..75: mol_type = other DNA
acgattggtcgctatggtgacggtatttctctggcgcaggcgcgcgaaaaattagtggaagctaaaaaacgcgta

SEQ ID NO: 203219 - DNA, 75 bp, synthetic construct
  source 1..75: mol_type = other DNA
ggtaaaaaataaaaacagttataagttaagtaaatttacatgggaaacgtatggtgatatcgtagtatcacctga

SEQ ID NO: 203220 - DNA, 75 bp, synthetic construct
  source 1..75: mol_type = other DNA
tccaaatatgtgtcagttgaaggtggaatcgggtcaatgttggtttggggaggaagtatcctgattatgtctgta

SEQ ID NO: 203221 - DNA, 75 bp, synthetic construct
  source 1..75: mol_type = other DNA
ggtgcagatggcgggataggtagtacatataacattatgggatggagatataaaagaatagctggtgcactgcag

SEQ ID NO: 203222 - DNA, 75 bp, synthetic construct
  source 1..75: mol_type = other DNA
acctcaagccgcaggacaaactgtataaggtttcggatcgtgacgggctgtatgttgcggtgcttacttccggtt

SEQ ID NO: 203223 - DNA, 75 bp, synthetic construct
  source 1..75: mol_type = other DNA
tgtattgcaagtctatcgctgggctattgagcgcggtcagaaggtggagaatccagctgatctggtacggcctgc

SEQ ID NO: 203224 - DNA, 75 bp, synthetic construct
  source 1..75: mol_type = other DNA
taacgatggtacgtaaaagtgagcttactaacgcaacctggaacgagatcaattttagtgaggcattatgggtaa

SEQ ID NO: 203225 - DNA, 75 bp, synthetic construct
  source 1..75: mol_type = other DNA
agcagtgggcagatatggttgatgcctggattagcggggagcacaccgatctggtgccattctccccgtcgaagt

SEQ ID NO: 203226 - DNA, 75 bp, synthetic construct
  source 1..75: mol_type = other DNA
acaaaatgatggctgagataaccaccggcatggtgcgtgacctgtgcgatcgcattgttgaacgtggaggccggg

SEQ ID NO: 203227 - DNA, 75 bp, synthetic construct
  source 1..75: mol_type = other DNA
caacagcagtacaggccagggagattatcagcagcgtataccgtcacgccaatgaccgtggtcatggtttgttta

SEQ ID NO: 203228 - DNA, 75 bp, synthetic construct
  source 1..75: mol_type = other DNA
ccagacattcaaaatgactttaaatctacagtagagaaaaacaaaaaggatatcgatttattaaaagacattata

SEQ ID NO: 203229 - DNA, 75 bp, synthetic construct
  source 1..75: mol_type = other DNA
acaactatgccagacagggccgttcagaaatgtagatttaaacgatttcaaaagcctgcttaaacatatgggagc

SEQ ID NO: 203230 - DNA, 75 bp, synthetic construct
  source 1..75: mol_type = other DNA
agcggtgaaatagttgtcggggctgagggggagaaactgactaatcactacacgttttataccgtattcaataca

SEQ ID NO: 203231 - DNA, 75 bp, synthetic construct
  source 1..75: mol_type = other DNA
tacattgttattgatgagttccatgcttttattggctcagagcgtggtatacagctgctttctctgcttaacaga

SEQ ID NO: 203232 - DNA, 75 bp, synthetic construct
  source 1..75: mol_type = other DNA
tatctggggcgacaccgttgtcgaatgtgtgcttaacaaactctgtccgtctcatacctacgtaatttttaaata

SEQ ID NO: 203233 - DNA, 75 bp, synthetic construct
  source 1..75: mol_type = other DNA
aaggcgctgaaagaaggcgatatccagaccgcgcagaaactgcaaactgagtgcaacaaagtcattgatttactg

SEQ ID NO: 203234 - DNA, 75 bp, synthetic construct
  source 1..75: mol_type = other DNA
ggcatccgctaaacgttatggctttgatgccgtctctgccgttacgccgttctactatcctttcagctttgaaga

SEQ ID NO: 203235 - DNA, 75 bp, synthetic construct
  source 1..75: mol_type = other DNA
caacacattattttcggcggtcgacgctggaaggtaaccgatatcgatagtgataaaaaagttatttatgtcgag

SEQ ID NO: 203236 - DNA, 75 bp, synthetic construct
  source 1..75: mol_type = other DNA
aaatcatataatagcgggaagaatattggaagtcatccagatatgaatgacagagaaattatggagtctagagca

SEQ ID NO: 203237 - DNA, 75 bp, synthetic construct
  source 1..75: mol_type = other DNA
gacggtgtagctcagatgtcattacctatatatgcatactcaacatgtcgtttttggccaaaagaaagtgtagct

SEQ ID NO: 203238 - DNA, 75 bp, synthetic construct
  source 1..75: mol_type = other DNA
atgtcagcaagcacgcgtttatcgcgttcctgggtgctctgctgtttttcgtagccgccgaacctgctctggcgt

SEQ ID NO: 203239 - DNA, 75 bp, synthetic construct
  source 1..75: mol_type = other DNA
caaaacacgttgtctgcaatcacaggacagggtgcagaactggcagcaatgctgaccagctctaaaacaggggga

SEQ ID NO: 203240 - DNA, 75 bp, synthetic construct
  source 1..75: mol_type = other DNA
atggcagctgaacctgctctggcgtcaaacacatcaggcggtggcctgccgttcgatgactggatgaccaacatc

SEQ ID NO: 203241 - DNA, 75 bp, synthetic construct
  source 1..75: mol_type = other DNA
ttttgtggcgggcaatccggaagcggacccggagcaggagctgagagaccgctggcctgaagacttaacatatcc

SEQ ID NO: 203242 - DNA, 75 bp, synthetic construct
  source 1..75: mol_type = other DNA
gattaccggggagatgaatgcgggtataacggtcctgcggtggcggatgagttcgataaacccaccacggatatc

SEQ ID NO: 203243 - DNA, 75 bp, synthetic construct
  source 1..75: mol_type = other DNA
acccgattgacggcagcggttttgagatgaacgggaagggcagcagtgccagaccgtcgctgacggtgtccaatc

SEQ ID NO: 203244 - DNA, 75 bp, synthetic construct
  source 1..75: mol_type = other DNA
acccgattgagggcagtggctttgagatgaacgggaagggcagcagtgcccgcccgtcgctgacggtgtcgaatc

SEQ ID NO: 203245 - DNA, 75 bp, synthetic construct
  source 1..75: mol_type = other DNA
agcctggtgggggccacggtggtccgccgccgggtgtatgcccgttttctggatgcggtgaattttgtggcgggc

SEQ ID NO: 203246 - DNA, 75 bp, synthetic construct
  source 1..75: mol_type = other DNA
aagggcagcagtgcctgcccgtcgctgacggtgtcgaatctgtttggtctggtcaccggtatggcggaggacctg

SEQ ID NO: 203247 - DNA, 75 bp, synthetic construct
  source 1..75: mol_type = other DNA
aagggcagcagtgcctgaccgtcgctgacggtgtcgaatctgttgggtctggtcaccgggatggcggaggacctg

SEQ ID NO: 203248 - DNA, 75 bp, synthetic construct
  source 1..75: mol_type = other DNA
atcccattcaggggacgggatttgaactgaacggcaagggcagtgctgcccgtccgacactgacggtttctaacc

SEQ ID NO: 203249 - DNA, 75 bp, synthetic construct
  source 1..75: mol_type = other DNA
cgcgggtggtgctctgggaaattgacctgacggtgcagggtggtgagcggtattttttctgcaatgagctgaatg

SEQ ID NO: 203250 - DNA, 75 bp, synthetic construct
  source 1..75: mol_type = other DNA
aagggcagcagtgcctggccgtcgctgacggtgtcgaatctgttcggtctggtcaccggaatggcggaggacctg

SEQ ID NO: 203251 - DNA, 75 bp, synthetic construct
  source 1..75: mol_type = other DNA
aagggcagcagtgcctggccgtcgctgacggtgtcgaatctgttaggtctggtcaccggcatggcggaggacctg

SEQ ID NO: 203252 - DNA, 75 bp, synthetic construct
  source 1..75: mol_type = other DNA
acgggataacacttcaggtgttcgcttcagtatgccgttgcccgatatcaatgggtttatgtcgtctgctaaaaa

SEQ ID NO: 203253 - DNA, 75 bp, synthetic construct
  source 1..75: mol_type = other DNA
gacaatatcgcgcagggggccgccattggcctgcagcggaccactccgcttgcagctctggccgggcagcgaatg

SEQ ID NO: 203254 - DNA, 75 bp, synthetic construct
  source 1..75: mol_type = other DNA
tcgcttcacgaccacgccgatgagctttaccgcagctgcctcgcgcgcttcggggatgacggtgaaaacctctga

SEQ ID NO: 203255 - DNA, 75 bp, synthetic construct
  source 1..75: mol_type = other DNA
ctgaagaccttcgccggcggttcggaatacattctgccatcacgttatgactcagacttgccgatgagcagcgca

SEQ ID NO: 203256 - DNA, 75 bp, synthetic construct
  source 1..75: mol_type = other DNA
ctggattaacggggagcatacggatctgattccgttctccccgtcgaagtttgagaagtggatggcgggtaataa

SEQ ID NO: 203257 - DNA, 75 bp, synthetic construct
  source 1..75: mol_type = other DNA
gattgtcgaacgcggtggccgtgcaacagcagtacaggccagggagatcatcagcagcgtataccgtcacgccaa

SEQ ID NO: 203258 - DNA, 75 bp, synthetic construct
  source 1..75: mol_type = other DNA
cctcgagatgcgttcaaaggggattgagcgccagatgaccgaaggggagttaaaacggcttgtggaaaggcagct

SEQ ID NO: 203259 - DNA, 75 bp, synthetic construct
  source 1..75: mol_type = other DNA
accgatgtggccggacttcgaagagggctggaaggtctcgcgcgtgctggatgccatcgcactctcacaccagca

SEQ ID NO: 203260 - DNA, 75 bp, synthetic construct
  source 1..75: mol_type = other DNA
cgcgcgcaggcgtttggcttcaatcgctcaaccggagactggcgggtgctcgtggccgacccggccattgatgtg

SEQ ID NO: 203261 - DNA, 75 bp, synthetic construct
  source 1..75: mol_type = other DNA
ctcaacgaactggacgcagatgaacaggccgatatttgtgaatcgcttcacgaccacgccgatgagctttaccgc

SEQ ID NO: 203262 - DNA, 75 bp, synthetic construct
  source 1..75: mol_type = other DNA
gaaggggtgttgacgcgcatgatccaacgcgacccggaactaagcggcgtcggtctggtgatccttgatgagttt

SEQ ID NO: 203263 - DNA, 75 bp, synthetic construct
  source 1..75: mol_type = other DNA
gacgacgatacgcttccggttcccgtctctatacaagggcgcgtaacaggcaacagcggcgttgatattttcgcc

SEQ ID NO: 203264 - DNA, 75 bp, synthetic construct
  source 1..75: mol_type = other DNA
cgccacatcaacaccgttaaccgccgctcaggcgatgacgctggctgcggctgacaaaaatacgacaaaagacga

SEQ ID NO: 203265 - DNA, 75 bp, synthetic construct
  source 1..75: mol_type = other DNA
tcctgcgcaactcaccacagcgcagcctgacgacgcccctggcgccccagctcagccattaacaccgctgattgc

SEQ ID NO: 203266 - DNA, 75 bp, synthetic construct
  source 1..75: mol_type = other DNA
cggatatccgtaaggacagatgcagcaagtgcatgcgcgggtgtgaactgcgcaggaatgtcggcaattttggcg

SEQ ID NO: 203267 - DNA, 75 bp, synthetic construct
  source 1..75: mol_type = other DNA
ataacggtccggcagtggcggatgagttcgacaaccccaccacggatatccggaaggacagatgcagtaaatgca

SEQ ID NO: 203268 - DNA, 75 bp, synthetic construct
  source 1..75: mol_type = other DNA
caactattttggtcagtggccggtggattataagagctgggcatggagcgaagtgatcttacccagcaatagtgg

SEQ ID NO: 203269 - DNA, 75 bp, synthetic construct
  source 1..75: mol_type = other DNA
ggaagacctgcagagtctggtgggggccacggtggtccgccgtcgggtgtatgcgcgttttctggatgcggtgaa

SEQ ID NO: 203270 - DNA, 75 bp, synthetic construct
  source 1..75: mol_type = other DNA
gaagaaaaagcacaagcaagaagcgaaagcagcgaaagcgagagccaaactgggcgaggtggtgactgacagtaa

SEQ ID NO: 203271 - DNA, 75 bp, synthetic construct
  source 1..75: mol_type = other DNA
aaccaacgctcttcacaaaactgacttctgcgcaactcacaacagcacagcctgatgatgcccccggcacaccag

SEQ ID NO: 203272 - DNA, 75 bp, synthetic construct
  source 1..75: mol_type = other DNA
ctgccggtactgcgtacgcagctggccgaaagtggcattcagttagggcaaagcaacatcagtggcgaaagcttt

SEQ ID NO: 203273 - DNA, 75 bp, synthetic construct
  source 1..75: mol_type = other DNA
gcccggcggtaaagccagcgatgctgcacaagattttctcgcattgttgagtggagcaatagcaggtgaaacaac

SEQ ID NO: 203274 - DNA, 75 bp, synthetic construct
  source 1..75: mol_type = other DNA
tggcagaggcgacagtatcaggcgtatcccattcaggggacgggatttgaactgaacggcaaaggcagtgctgcc

SEQ ID NO: 203275 - DNA, 75 bp, synthetic construct
  source 1..75: mol_type = other DNA
tttcagagagcgtttagtaaagctgataggtaatcgcagtgtcagaactgctgcgagtgattggggaatcccccc

SEQ ID NO: 203276 - DNA, 75 bp, synthetic construct
  source 1..75: mol_type = other DNA
gaacgaaaaaggtgaaccagtcacctggcaggggcggcagtatcaggcctatcccattcaggggagtggatttga

SEQ ID NO: 203277 - DNA, 75 bp, synthetic construct
  source 1..75: mol_type = other DNA
gtttttccggggcgcatcatgctggctaatacctgcacctggacctatcgcggtgatgagtgcggttataacggt

SEQ ID NO: 203278 - DNA, 75 bp, synthetic construct
  source 1..75: mol_type = other DNA
gtaaaaatattccccttgatggttgggttattggggctctacttggtgacggttcgttgataaaaggcatcaaat

SEQ ID NO: 203279 - DNA, 75 bp, synthetic construct
  source 1..75: mol_type = other DNA
tacagaagacgttaaccgccccgatacaagtattgttgacgaaatactaagacgagccgctccagaagatagaga

SEQ ID NO: 203280 - DNA, 75 bp, synthetic construct
  source 1..75: mol_type = other DNA
tttccttttctcagaatagaaaagaaagcattcaggacagaatcaagcaactggttggcactaggagtctgcgta

SEQ ID NO: 203281 - DNA, 75 bp, synthetic construct
  source 1..75: mol_type = other DNA
gctggggctgtctcttttacaactctccccgcccccgagacgctacgccatctcgtttgccgtctttttctttga

SEQ ID NO: 203282 - DNA, 75 bp, synthetic construct
  source 1..75: mol_type = other DNA
cggacacggtgcattttccgtgggatatgctcaggttcacccgggcggcgtaccggcattgtccggtaccggtgc

SEQ ID NO: 203283 - DNA, 75 bp, synthetic construct
  source 1..75: mol_type = other DNA
actgaacggcaagggcagtgctgcccgtccgacactgacggtttctaacctgcacggcatggtcacggggatggc

SEQ ID NO: 203284 - DNA, 75 bp, synthetic construct
  source 1..75: mol_type = other DNA
ccggcagaaacggtgattattgattttgcttatgaaggctccggcagtggtgactggcgcactgacggtttcatc

SEQ ID NO: 203285 - DNA, 75 bp, synthetic construct
  source 1..75: mol_type = other DNA
gttcgctcttcctgcgcaggctgaaaccggacacggtgcgctttctgtggggtacacacaggtacacccggacgg

SEQ ID NO: 203286 - DNA, 75 bp, synthetic construct
  source 1..75: mol_type = other DNA
aagcgttcagctatgtactgaatcagtgggacgccctctgttattacagtgatgacggtctggcggaggtggaca

SEQ ID NO: 203287 - DNA, 75 bp, synthetic construct
  source 1..75: mol_type = other DNA
gtggccagcgctgacgtactatgcagatgatggctgggctgaggcggacaataacatcgctgaaaatgcgttgcg

SEQ ID NO: 203288 - DNA, 75 bp, synthetic construct
  source 1..75: mol_type = other DNA
gcgttggcacctgcagtgtggttcgcttacagcccggacagaaaaggcatccatccgcagactcatcttgcttgc

SEQ ID NO: 203289 - DNA, 75 bp, synthetic construct
  source 1..75: mol_type = other DNA
ggctgggtggaaatcgacaacaacatcgctgaaaatgccctgcgggcggtcagtctgggtcgtaaaaacttcctg

SEQ ID NO: 203290 - DNA, 75 bp, synthetic construct
  source 1..75: mol_type = other DNA
gccctggagcagatcggtcagttgtacgccatagaggcggatataaggggaatgccggcagaacagcggcttgct

SEQ ID NO: 203291 - DNA, 75 bp, synthetic construct
  source 1..75: mol_type = other DNA
gtggccggcactgacgtactatgcagatgatggctgggctgaggcggacaataacatcgctgaaaatgcgttgcg

SEQ ID NO: 203292 - DNA, 75 bp, synthetic construct
  source 1..75: mol_type = other DNA
gctgatgcgcagcgccttccgggttatccgtacggtgcgcgaaaagcatgcctgtcgtcggtgcgatcgcatcgt

SEQ ID NO: 203293 - DNA, 75 bp, synthetic construct
  source 1..75: mol_type = other DNA
ctggttgcgtgaaaagatgaagaccctgtcacgacactcagagttggcgaaggcgttcgcgtacgcacttaacca

SEQ ID NO: 203294 - DNA, 75 bp, synthetic construct
  source 1..75: mol_type = other DNA
gccatcgaggatgaaatacggggattaccggagtcagagcgtcttgccgtcaggcagcagcgaagcaaagtgtta

SEQ ID NO: 203295 - DNA, 75 bp, synthetic construct
  source 1..75: mol_type = other DNA
tgacctcgaagtatgcagagcacaccccgctgtatcgccagtcagaaatatacggccggcaaggtgtggagctga

SEQ ID NO: 203296 - DNA, 75 bp, synthetic construct
  source 1..75: mol_type = other DNA
gctgcgtcagacccgcacccgcaaaccgttccccgaatcactcccccgcgatgaaaaacggctgctgccggcagc

SEQ ID NO: 203297 - DNA, 75 bp, synthetic construct
  source 1..75: mol_type = other DNA
gcacgtccgcatcccgtcagcactgacggaagaagccctggagcagatcggtcagttgtacgccatagaggcgga

SEQ ID NO: 203298 - DNA, 75 bp, synthetic construct
  source 1..75: mol_type = other DNA
cagttgtacgccatagaggcggatataaggggaatgccggcagagcagcggcttgctgaacgtcagcgaaaaacg

SEQ ID NO: 203299 - DNA, 75 bp, synthetic construct
  source 1..75: mol_type = other DNA
cgccagtgcacgcattatgggcgtaggcctcaacacgattttacgacacttaaaaaactcaggccgcagtcggta

SEQ ID NO: 203300 - DNA, 75 bp, synthetic construct
  source 1..75: mol_type = other DNA
cgtgctgacctcgaagtatgcagagcacaccccgctgtatcgccagtcagaaatatacggccggcaaggtgtgga

SEQ ID NO: 203301 - DNA, 75 bp, synthetic construct
  source 1..75: mol_type = other DNA
ccttgctgggtgaaaacaccgaagaagggcgggagaaattccgcgaagagctgaacgaaacgcatcagttattta

SEQ ID NO: 203302 - DNA, 75 bp, synthetic construct
  source 1..75: mol_type = other DNA
aagccctggtggcatggtgcatggttacgggctggcggcttcgcagctgcagcgtctgcgtgataaaaacattcc

SEQ ID NO: 203303 - DNA, 75 bp, synthetic construct
  source 1..75: mol_type = other DNA
aagcggcactgatcgccttgtcggtgatcatcgcaacgatctctgtcacctccggtgtcgataagggcattcgtg

SEQ ID NO: 203304 - DNA, 75 bp, synthetic construct
  source 1..75: mol_type = other DNA
gtcccggtgctgttgccaggtaataagaaaacgaagaccgggcggttgtggacgtacgttcgtgacgaccgtaac

SEQ ID NO: 203305 - DNA, 75 bp, synthetic construct
  source 1..75: mol_type = other DNA
tcagcgttggcacctgcagtgtggttcgcttacagcccggacagaaaaggcatccatctgtcacgaacggtgcaa

SEQ ID NO: 203306 - DNA, 75 bp, synthetic construct
  source 1..75: mol_type = other DNA
ttcggctctgatcatggtggtgagcggggagcgctactgtacagcctgatcgggacgtgcaaactgaatgacgtg

SEQ ID NO: 203307 - DNA, 75 bp, synthetic construct
  source 1..75: mol_type = other DNA
tcggcagtcgttccgaaaaagtctcccgccgtatcgcacaaatggaagccgatctgaaccggcttcagaaagaga

SEQ ID NO: 203308 - DNA, 75 bp, synthetic construct
  source 1..75: mol_type = other DNA
aggccgatgcttacggtggttactgtcacgaacggtgcaatagtgatccacacccaacgcctgaaatcagatcca

SEQ ID NO: 203309 - DNA, 75 bp, synthetic construct
  source 1..75: mol_type = other DNA
gattccggggcgctggtgctggggaatttcacctcgcagcttaaagatatcaacagcgacgcgccgggctggctg

SEQ ID NO: 203310 - DNA, 75 bp, synthetic construct
  source 1..75: mol_type = other DNA
acgaaggataaatgcagtaagtgcctgagcggctgtaagtttcgcaataacgtcggcaactttggcggttacctt

SEQ ID NO: 203311 - DNA, 75 bp, synthetic construct
  source 1..75: mol_type = other DNA
cttttctggcaggaatggcccttcctgcgcaggctgaagtcggacacggggcgttttccgtgggatatgctcagg

SEQ ID NO: 203312 - DNA, 75 bp, synthetic construct
  source 1..75: mol_type = other DNA
ttcacgacccaccctgacggtttctaacctggacggtatggtcaccggaatggcggaagatctgcagagtctggt

SEQ ID NO: 203313 - DNA, 75 bp, synthetic construct
  source 1..75: mol_type = other DNA
ttcacgacccactctgacggtttctaacctggacggtatggtcaccggaatggcggaagatttgcagagtctggt

SEQ ID NO: 203314 - DNA, 75 bp, synthetic construct
  source 1..75: mol_type = other DNA
ttcacgacccacactgacggtttctaacctggacggtatggtcaccggaatggcggaagatatgcagagtctggt

SEQ ID NO: 203315 - DNA, 75 bp, synthetic construct
  source 1..75: mol_type = other DNA
ttcacgaccgacgctgacggtttctaacctggacggtatggtcaccggaatggcggaagatctgcagagtctggt

SEQ ID NO: 203316 - DNA, 75 bp, synthetic construct
  source 1..75: mol_type = other DNA
ttcacgacccacgctgacggtttctaacctggacggtatggtcaccggaatggcggaagatgtgcagagtctggt

SEQ ID NO: 203317 - DNA, 75 bp, synthetic construct
  source 1..75: mol_type = other DNA
acgttacttattgactgtgggggatttgactcagatcttacccgtactgcgattgcctttgcagactgcgttatt

SEQ ID NO: 203318 - DNA, 75 bp, synthetic construct
  source 1..75: mol_type = other DNA
atgcccgttttctggatgcggtgaattttgtggcaggcaatccggaggcggacccggagcaggagctgacggacc

SEQ ID NO: 203319 - DNA, 75 bp, synthetic construct
  source 1..75: mol_type = other DNA
taccgtggagatgaatgcgggtataacggtcctgcggtggcggatgagttcgacaaccccaccacggatatccgt

SEQ ID NO: 203320 - DNA, 75 bp, synthetic construct
  source 1..75: mol_type = other DNA
acagttcgcttatcgcgccgctacttgccggggcgtttgccgatcgcattgctcgccgccgtgggcaagatggac

SEQ ID NO: 203321 - DNA, 75 bp, synthetic construct
  source 1..75: mol_type = other DNA
atcaggcacttgtattatccctccagtgcagagaaaatcggccagttttctctgcctgcagtccgcatgccgtat

SEQ ID NO: 203322 - DNA, 75 bp, synthetic construct
  source 1..75: mol_type = other DNA
tggcggcgcgtaacgtcgcgcaacggctggcggagctgcttaacgaaaagccaggcgataccgttggctaccgga

SEQ ID NO: 203323 - DNA, 75 bp, synthetic construct
  source 1..75: mol_type = other DNA
atgcaggatatttcacaggaaacacatcatgagacgacacgccttactcagtcagcccaggtggtgctctgggaa

SEQ ID NO: 203324 - DNA, 75 bp, synthetic construct
  source 1..75: mol_type = other DNA
catgctggcgaacacctgtatgtggacctaccgctctgatgaatgcgggtataacggtcctgcggtggcggatga

SEQ ID NO: 203325 - DNA, 75 bp, synthetic construct
  source 1..75: mol_type = other DNA
acccgattgacggcagcggttttgagatgaacgggaagggcagcagtgcccgcccgtcgctgacggtgtccaatc

SEQ ID NO: 203326 - DNA, 75 bp, synthetic construct
  source 1..75: mol_type = other DNA
gctgacagccatgacggcctcgtttgtgctggcgacaccgaccgagacggaaggggcgctgtttcccggtcgtat

SEQ ID NO: 203327 - DNA, 75 bp, synthetic construct
  source 1..75: mol_type = other DNA
gctgacagccatgacggcctcgtttgtgctggctacaccgaccgagacggaaggggcgctgtttcccggtcgaat

SEQ ID NO: 203328 - DNA, 75 bp, synthetic construct
  source 1..75: mol_type = other DNA
gctgacagccatgacggcctcgtttgtgctggcaacaccgaccgagacggatggggcgctgtttcccggtcgcat

SEQ ID NO: 203329 - DNA, 75 bp, synthetic construct
  source 1..75: mol_type = other DNA
attaatttggctatttttcgcgatataatgggattcgatgaacgctactatatgtattgtgaagacatagatctt

SEQ ID NO: 203330 - DNA, 75 bp, synthetic construct
  source 1..75: mol_type = other DNA
tgacgttttaattaagcatgaagtattggttagtttttataagtacattatttctaaaaatataaaggcaagtac

SEQ ID NO: 203331 - DNA, 75 bp, synthetic construct
  source 1..75: mol_type = other DNA
ataatcatgaacaacatgtcaaaaatctactaagttttgctgattataacccctgctcagatgtaaaaatcttgg

SEQ ID NO: 203332 - DNA, 75 bp, synthetic construct
  source 1..75: mol_type = other DNA
catgcttgctaatacctgcacctggacctatcgcggtgatgagtgcggttatcacggtccggctgtcgcggatga

SEQ ID NO: 203333 - DNA, 75 bp, synthetic construct
  source 1..75: mol_type = other DNA
atttagaactgagtctaagatagttatatgtatgtattcaaaagctaaatcatacatatactcattcttgattgt

SEQ ID NO: 203334 - DNA, 75 bp, synthetic construct
  source 1..75: mol_type = other DNA
taaagcaatacatttagcaatgcatgagaatcgtaagattttatctaaggctttccgctggcatgtaagtaatgc

SEQ ID NO: 203335 - DNA, 75 bp, synthetic construct
  source 1..75: mol_type = other DNA
aaataccttccattatgaaagcctgcgcggtcgttatgtcagtctgatggccggccctgtctggcagttcagtga

SEQ ID NO: 203336 - DNA, 75 bp, synthetic construct
  source 1..75: mol_type = other DNA
tgaaataccgttatgagtttacggacacactggggctggtgacgtcattcagctatgcaggagacaagaatcgcc

SEQ ID NO: 203337 - DNA, 75 bp, synthetic construct
  source 1..75: mol_type = other DNA
tttgcccaacttctcggcacgcttcgcgtgggtgatatgtacacatcaagcgatatttttgattctgttcgcttc

SEQ ID NO: 203338 - DNA, 75 bp, synthetic construct
  source 1..75: mol_type = other DNA
tcggtagccgttattaccggatgcgtgactacagcaaccttgaccacgcggacattctggcccgtgttaagggga

SEQ ID NO: 203339 - DNA, 75 bp, synthetic construct
  source 1..75: mol_type = other DNA
taccccattcaggggacgggatttgaactgaacggcaagggcagtgctgcccgtccgacactgacggtttctaac

SEQ ID NO: 203340 - DNA, 75 bp, synthetic construct
  source 1..75: mol_type = other DNA
gttcatccacaaccggggggcttaacgtcttttcagtcactgtgtaccagtcttgccgcgcgcgtcggcagcggt

SEQ ID NO: 203341 - DNA, 75 bp, synthetic construct
  source 1..75: mol_type = other DNA
ttcacgacctactctgacggtttctaacctggacggtatggtcaccggaatggcggaagatctgcagagtctggt

SEQ ID NO: 203342 - DNA, 75 bp, synthetic construct
  source 1..75: mol_type = other DNA
ttcacgaccaacactgacggtttctaacctggacggtatggtcaccggaatggcggaagatctgcagagtctggt

SEQ ID NO: 203343 - DNA, 75 bp, synthetic construct
  source 1..75: mol_type = other DNA
gggatataccttaagccaggcgattactaacggttttcagcgcagtatgttttccaatgaggcgggaatgggttc

SEQ ID NO: 203344 - DNA, 75 bp, synthetic construct
  source 1..75: mol_type = other DNA
caccagtctggttatttgcgcaatgcacattgggcagcttcctcacatcattttatccatttttgagagtgcctt

SEQ ID NO: 203345 - DNA, 75 bp, synthetic construct
  source 1..75: mol_type = other DNA
ttaccgccggtggacctggagccgtcttctggatgtgggttgccgcgtttatcggcatggcgacctcgtttgccg

SEQ ID NO: 203346 - DNA, 75 bp, synthetic construct
  source 1..75: mol_type = other DNA
actgagtgcggtcagtgcctcctttgtgttgtccacaccgacggaaacggatggtgccgtttttccgggacgtat

SEQ ID NO: 203347 - DNA, 75 bp, synthetic construct
  source 1..75: mol_type = other DNA
ttttgtccgaaatttcactgcggagattgatggcagatacatcgatctgataggcgtaaaagccgctcaacttgc

SEQ ID NO: 203348 - DNA, 75 bp, synthetic construct
  source 1..75: mol_type = other DNA
tatgaaccttggccatggtattgagattgcgtaccaggacacccggaactggaaaaaactggtagcagagcgctg

SEQ ID NO: 203349 - DNA, 75 bp, synthetic construct
  source 1..75: mol_type = other DNA
acaaattgctgctgatggttgacgccctaggcaatcctcttgcaaccgatctcacctctaaaatgtttgcccact

SEQ ID NO: 203350 - DNA, 75 bp, synthetic construct
  source 1..75: mol_type = other DNA
atggcagtacgaaaactcaccacagggaaatggctttgcgaatgttaccccgccggacgtaatgggcgtcgtgtg

SEQ ID NO: 203351 - DNA, 75 bp, synthetic construct
  source 1..75: mol_type = other DNA
gcgtacagcatatgatccaactagcgcgtaaagcgggcgttccggtgctgattgatccaaaaggtactgattttg

SEQ ID NO: 203352 - DNA, 75 bp, synthetic construct
  source 1..75: mol_type = other DNA
ttaccggtgcgggcgacacggtgattggtgtgctggcggcaacattggcagcgggtaattctctggaagaagcct

SEQ ID NO: 203353 - DNA, 75 bp, synthetic construct
  source 1..75: mol_type = other DNA
tacggtcccaccagccgtatctcgccggaagcgccggtgcccgtggttaaagtcaataccatcgaagaacgtccg

SEQ ID NO: 203354 - DNA, 75 bp, synthetic construct
  source 1..75: mol_type = other DNA
cttgctgctgatgaaatcaaacgcctgcttgacgcatgtgctgaatctcaaagtcccagtctgctaatgattgcc

SEQ ID NO: 203355 - DNA, 75 bp, synthetic construct
  source 1..75: mol_type = other DNA
acttggcgatcccatcgcttctgaattgacagcaggtgatttcacaaagtaccgggaagccagattaaaaggtga

SEQ ID NO: 203356 - DNA, 75 bp, synthetic construct
  source 1..75: mol_type = other DNA
aaacgggcgagatggcaaacgcgtacgcaaacaatttgcgacgaaaggcgaagccattgcgtttgagaatttcac

SEQ ID NO: 203357 - DNA, 75 bp, synthetic construct
  source 1..75: mol_type = other DNA
acgttttgcgtcatacttttggtgcgcattttatgatgaacggcgggaatatactggtactgcagaaaattctcg

SEQ ID NO: 203358 - DNA, 75 bp, synthetic construct
  source 1..75: mol_type = other DNA
gatcccaaaatggttgtatgacgaattatctgaaaggcagggaaagatgtttaagccttgctatcaggagtttaa

SEQ ID NO: 203359 - DNA, 75 bp, synthetic construct
  source 1..75: mol_type = other DNA
ctaggccactggtcagcaccaaatcctctcgccgggctgccaacatttaaaatcgctgagggggaactggcgttc

SEQ ID NO: 203360 - DNA, 75 bp, synthetic construct
  source 1..75: mol_type = other DNA
gaagaactgaagctggctgtagccgcggcgcgtaaacgcggtgaaaaagtggtgatgaccaacggcgtcttcgat

SEQ ID NO: 203361 - DNA, 63 bp, synthetic construct
  source 1..63: mol_type = other DNA
atgtttattgattcagaaaaacgactgaaacaactttcagatgaggcaaagaaaaacaccgag

SEQ ID NO: 203362 - DNA, 75 bp, synthetic construct
  source 1..75: mol_type = other DNA
gaagaaatccgccaggaccgtgagaacggttattgcagccacggtattgaccggaattgttgcccgctgggctgc

SEQ ID NO: 203363 - DNA, 75 bp, synthetic construct
  source 1..75: mol_type = other DNA
agaatggttcgatttcaaaatataccgcaagcgtaaaccaacgcgctacgagcgccacgctatccgggacttttt

SEQ ID NO: 203364 - DNA, 75 bp, synthetic construct
  source 1..75: mol_type = other DNA
cgtcagcggcaggcgttgctggcagaaggtgtgatggtgtcgggaagcgggcaaatcgacttgcagcgttatcgc

SEQ ID NO: 203365 - DNA, 75 bp, synthetic construct
  source 1..75: mol_type = other DNA
aacgcgtctggcaaatcgtagccgctattcccgaaggctacgtcaccacttacggcgacgtcgcaaaactggcag

SEQ ID NO: 203366 - DNA, 75 bp, synthetic construct
  source 1..75: mol_type = other DNA
gcgtaatgaaaggggcggcgcgtcagcgcggcccctttcagcgccaccggcgcgcggtcttttcccggcgcgggc

SEQ ID NO: 203367 - DNA, 75 bp, synthetic construct
  source 1..75: mol_type = other DNA
atgaactctcaagggaaggagtaaaaccaggtagcattatcaggctgaagaaagaaggccagacaatggtcaaag

SEQ ID NO: 203368 - DNA, 75 bp, synthetic construct
  source 1..75: mol_type = other DNA
atccgcgtcgctaccgtgtttcgcaacgcgccggaaccgtttttgcgcatgatcgtggtgcacgagctggcgcac

SEQ ID NO: 203369 - DNA, 75 bp, synthetic construct
  source 1..75: mol_type = other DNA
atccgcgtcgctactgtgtttcgcaacgcgccggaaccgtttttacgtatgatcgtggtgcacgaactggcgcac

SEQ ID NO: 203370 - DNA, 75 bp, synthetic construct
  source 1..75: mol_type = other DNA
cgctcacttggattatgaaaacattgagaaactaatagttttatccgtcggtggctcccctacagtaaaaaaaat

SEQ ID NO: 203371 - DNA, 75 bp, synthetic construct
  source 1..75: mol_type = other DNA
agaggaagagagcgtagaagaacagcaaccgcctgcaccttcttcgcctgtatctaagccggtatttaagccggt

SEQ ID NO: 203372 - DNA, 75 bp, synthetic construct
  source 1..75: mol_type = other DNA
atggccagaattatgcttggtccggcagtgcaaacagccctatgtcagcaatgcagttagcatggctgacatatt

SEQ ID NO: 203373 - DNA, 75 bp, synthetic construct
  source 1..75: mol_type = other DNA
gatatgcgtttttcacgctctcctttcactgctgagaacggcaacaacgtgccacaggaacgcgctgtaatcgat

SEQ ID NO: 203374 - DNA, 75 bp, synthetic construct
  source 1..75: mol_type = other DNA
aattcccacatgctatgcagaggtggggatttgaatctttagagaagattgtaagatatatagaacgtaatcaca

SEQ ID NO: 203375 - DNA, 75 bp, synthetic construct
  source 1..75: mol_type = other DNA
gactagctgcatgggctgacgatgaggcgttatccgtgacacaaaccaggacagaacgccccgtgtcacagccag

SEQ ID NO: 203376 - DNA, 75 bp, synthetic construct
  source 1..75: mol_type = other DNA
aatatggatcagcaaaacaccaaagttaaagtgccgttcagcgtgaagtgggggcagatcaaacagctgctcggg

SEQ ID NO: 203377 - DNA, 75 bp, synthetic construct
  source 1..75: mol_type = other DNA
aagggtactttgttaatattcgtcttcttgacgatggatttgatgattccgtgttccgtgagtgggtggttacac

SEQ ID NO: 203378 - DNA, 75 bp, synthetic construct
  source 1..75: mol_type = other DNA
atgcgccgtgacggtatcgggattaacggcgtggatatgcgcgatatatgccgctacccccccccctcaacagta

SEQ ID NO: 203379 - DNA, 75 bp, synthetic construct
  source 1..75: mol_type = other DNA
caagaacgaaggcgaagcatgcgcctggctggacagccttacaccagaagcccgcaaaagcggccaacgtgtggc

SEQ ID NO: 203380 - DNA, 75 bp, synthetic construct
  source 1..75: mol_type = other DNA
gactggctgcatgggctgacgatgaggcgttatcagtgacacaaaccaggacagaatgccccgcgtcacagccag

SEQ ID NO: 203381 - DNA, 75 bp, synthetic construct
  source 1..75: mol_type = other DNA
aggagatcctcgctgcgctgggtacgggtgatgcactggcgtcgaagtatcgccgccagctgtatgcattgttgt

SEQ ID NO: 203382 - DNA, 75 bp, synthetic construct
  source 1..75: mol_type = other DNA
acagaatgccccgcgtcacagccagtatcaaccgcacagataaccagtcagatggccggaaatatccgggcatta

SEQ ID NO: 203383 - DNA, 75 bp, synthetic construct
  source 1..75: mol_type = other DNA
aaaatgaatccagcagaggcttaccgactggctgcatgggctgacgatgaggcgttatcggtgacacaaaccagg

SEQ ID NO: 203384 - DNA, 75 bp, synthetic construct
  source 1..75: mol_type = other DNA
cccaattctggaaagcctcgcggcgcagtacaacgggcaatttattctggcgaagctggactgcgacgcggagca

SEQ ID NO: 203385 - DNA, 75 bp, synthetic construct
  source 1..75: mol_type = other DNA
ggatgtcgattctgaaagcgggctttgtggcttccgtaccggcggtttgcggttttatcggcggcgtgttggggg

SEQ ID NO: 203386 - DNA, 75 bp, synthetic construct
  source 1..75: mol_type = other DNA
aacaggtgaactacgatacctttatttcgtacccacagcttgatacctgggcggcccacagcgattttcagtccc

SEQ ID NO: 203387 - DNA, 75 bp, synthetic construct
  source 1..75: mol_type = other DNA
gcgcaccgccgccgcattgtggaagagccggaatacaaccgcgtctctacctacagttcgtcaaatgatgcctat

SEQ ID NO: 203388 - DNA, 75 bp, synthetic construct
  source 1..75: mol_type = other DNA
gcgctcatcactgctggatgagtggtacaaggattcatccgaccttgtggtgatgataggacgcgacctgttcaa

SEQ ID NO: 203389 - DNA, 75 bp, synthetic construct
  source 1..75: mol_type = other DNA
cgttcgtaaggggcgcaaccaggtccccggcgaggaggaagaagctgcgctctggaaccgctggcaggagatcaa

SEQ ID NO: 203390 - DNA, 75 bp, synthetic construct
  source 1..75: mol_type = other DNA
tgatcaaataacacctgaagctgggcagattgcaccggctctcgcgcactttgggcagccgacaacaacgtcacc

SEQ ID NO: 203391 - DNA, 75 bp, synthetic construct
  source 1..75: mol_type = other DNA
caaaagaatacgaggttagagaatttatgtcaactgacactagcgaacgtttgaagcttatccgtgagtctgaac

SEQ ID NO: 203392 - DNA, 75 bp, synthetic construct
  source 1..75: mol_type = other DNA
tggtattcgtatgggtgggttaatcgctttaaatacaggttttgaataccaggatagggtctgtggcatgattgt

SEQ ID NO: 203393 - DNA, 75 bp, synthetic construct
  source 1..75: mol_type = other DNA
tactggtcgctactgccgctattgccagacctgccgttcccatgcaggcgctggatgaggcccggttactgccag

SEQ ID NO: 203394 - DNA, 75 bp, synthetic construct
  source 1..75: mol_type = other DNA
aagggtactttgttaatatccgtcttcttgacgatggctttgatgaatccgtgttccgtgagtgggtggttacac

SEQ ID NO: 203395 - DNA, 75 bp, synthetic construct
  source 1..75: mol_type = other DNA
gcgcgcagattgcccgccgtatcgcccttgatcgcatcatgattggtttcaacggcacgtcccgcgccgtgaagt

SEQ ID NO: 203396 - DNA, 75 bp, synthetic construct
  source 1..75: mol_type = other DNA
ttcgcgttacggaacaggctgcgttggctgcctggccgcaaaccggctgtggcgacaaaaataaaattgatggcc

SEQ ID NO: 203397 - DNA, 75 bp, synthetic construct
  source 1..75: mol_type = other DNA
ttatccctggtggggggcatatattcacaatcacacatagtcagacaacaaacaatgtcattcaattctggcttc

SEQ ID NO: 203398 - DNA, 75 bp, synthetic construct
  source 1..75: mol_type = other DNA
ggagccgatcgtcaacccggtggtacgcgcccccacgcaaccggcctacataatctacacctccggctctaccgg

SEQ ID NO: 203399 - DNA, 75 bp, synthetic construct
  source 1..75: mol_type = other DNA
tggttggcgagtctgtcacgcccgcagaaaacttctttgaggcgggcgcaacgtcgctgaatctggtgcaactgc

SEQ ID NO: 203400 - DNA, 75 bp, synthetic construct
  source 1..75: mol_type = other DNA
gctttgagcaggataacttcctcgcccggcgtaatctgctcaaaccggtctggggcatctcccagacgccgcagg

SEQ ID NO: 203401 - DNA, 75 bp, synthetic construct
  source 1..75: mol_type = other DNA
tttcagggggcagaggaaaaccagcttctgcaaccgcattcatgtccggtaattgccgcagggcagggaaaagag

SEQ ID NO: 203402 - DNA, 75 bp, synthetic construct
  source 1..75: mol_type = other DNA
atgctaacgacccggcaacgacctgtacctgtgcgctatacggttttcagtttcagggcgcagaagaaaatcagt

SEQ ID NO: 203403 - DNA, 75 bp, synthetic construct
  source 1..75: mol_type = other DNA
aacttgatgatattcctccggctcctgcattgccgctacgttgcatgcctcaggacgtcgaaacaccgcgcttcg

SEQ ID NO: 203404 - DNA, 75 bp, synthetic construct
  source 1..75: mol_type = other DNA
gttataaccacgactcaaacgggcgttcagacccgacttcccgcagctggaaccgcctttatacccgcctgatgg

SEQ ID NO: 203405 - DNA, 75 bp, synthetic construct
  source 1..75: mol_type = other DNA
aacaccgacgataacccggatatcaccaaatacatggggtactaccagcttaaaattggctatcaccttggtgat

SEQ ID NO: 203406 - DNA, 75 bp, synthetic construct
  source 1..75: mol_type = other DNA
ctcaggtttacagcggctatggcgaatcgctcatcgactataacttcaaccagacccgtgtcggtgtgggagtta

SEQ ID NO: 203407 - DNA, 75 bp, synthetic construct
  source 1..75: mol_type = other DNA
tctgaccgggcaacttcatcaggcaggttatgaagcgcaattaagcgacctgtttaatcatccccggctggcgga

SEQ ID NO: 203408 - DNA, 75 bp, synthetic construct
  source 1..75: mol_type = other DNA
tgccggaagatcccgggctccttgcgacattacaacagcttgccgttcccggcgcgctgctctacgtgatggagt

SEQ ID NO: 203409 - DNA, 75 bp, synthetic construct
  source 1..75: mol_type = other DNA
ttgccaacagtttgcacagcgcttacagcgcccggtgcgcctgcttgaggtgggaacccgcactggccgcgccgc

SEQ ID NO: 203410 - DNA, 75 bp, synthetic construct
  source 1..75: mol_type = other DNA
gatgcatttgcctatggaaggtgcgaacaagttcctgatatgagatcatcatattcatccggagcgcatcccaga

SEQ ID NO: 203411 - DNA, 75 bp, synthetic construct
  source 1..75: mol_type = other DNA
gtaaccgcgaaaggtgaagtgacgctgcgtaataacagtctgtttatcaaaccactcgacagcaccctgaaaaat

SEQ ID NO: 203412 - DNA, 75 bp, synthetic construct
  source 1..75: mol_type = other DNA
catttccggcgatacgttaacgctgaccaatggactgattgatactggtttctcgcgactcactgccgatggtga

SEQ ID NO: 203413 - DNA, 75 bp, synthetic construct
  source 1..75: mol_type = other DNA
agctttgaattaaccgggcaagctggcacgaataaccatttcaatagccgctggttgctcggtcaaaagctgacg

SEQ ID NO: 203414 - DNA, 75 bp, synthetic construct
  source 1..75: mol_type = other DNA
actataagctggctgaacaatgacaaaggtttccagctggatgggcgtaatattgacgttaaagccaaagccgtc

SEQ ID NO: 203415 - DNA, 75 bp, synthetic construct
  source 1..75: mol_type = other DNA
ttatggcggcaatccgcatctttttccatacaaacacaacgaaggtcagtttgaggtgttggtgccgctgcgtaa

SEQ ID NO: 203416 - DNA, 75 bp, synthetic construct
  source 1..75: mol_type = other DNA
acaggctgatgatatcgacctgaaaccgtggctgggtaaatggatgcaggacaacattgcgctggaaacggcgca

SEQ ID NO: 203417 - DNA, 75 bp, synthetic construct
  source 1..75: mol_type = other DNA
cttcctcattgagtcaaaagcggtttgtgcgcagaggtaagtctatgtctgactctgagaaacagatggcctctg

SEQ ID NO: 203418 - DNA, 75 bp, synthetic construct
  source 1..75: mol_type = other DNA
ccagcgaaacgctgtttgtcgccggtaaaataccacgactttcgcgctttgcgtttagtgatgatcctaaatggg

SEQ ID NO: 203419 - DNA, 75 bp, synthetic construct
  source 1..75: mol_type = other DNA
gtcatcaaaacgctttttaatgaattaagtgtgattttaccgcaaagtaaaaatggccacgcatcttcagtgtgg

SEQ ID NO: 203420 - DNA, 75 bp, synthetic construct
  source 1..75: mol_type = other DNA
gccgaacgcacaaatacgttgcgccgagtgttggttctgggggcaaaaattcgggcgcatcgacagtgatatcac

SEQ ID NO: 203421 - DNA, 75 bp, synthetic construct
  source 1..75: mol_type = other DNA
agcggtatgggaaacattcagtttgctggccagccactggaagcatggtccgcggcgaagctcgcgctgcatcgt

SEQ ID NO: 203422 - DNA, 75 bp, synthetic construct
  source 1..75: mol_type = other DNA
tggcgattgtgatgagcagtcacgaccttaatcacacattgcgtcacgcgcatcgtgcgtggctgctaaaaggcg

SEQ ID NO: 203423 - DNA, 75 bp, synthetic construct
  source 1..75: mol_type = other DNA
ttagtcaaggatattccccctatgtccctgaggaggggtattattacggaccaaatgagatagttaagaaattcc

SEQ ID NO: 203424 - DNA, 75 bp, synthetic construct
  source 1..75: mol_type = other DNA
tgtacagatgccggaacggcagaagaacccgctgaaaacttcgggcaagtagcgatttttgctctgccagtggtt

SEQ ID NO: 203425 - DNA, 75 bp, synthetic construct
  source 1..75: mol_type = other DNA
tttcctgctggctataatagcttatttattccacctaaaaacccacctgccagtaatcttaaccctgagccgcta

SEQ ID NO: 203426 - DNA, 75 bp, synthetic construct
  source 1..75: mol_type = other DNA
gatgatgccgttcagcttctcgattaccgaaggtattgcgctgggctttatctcctactgcgtgatgaaaatcgg

SEQ ID NO: 203427 - DNA, 75 bp, synthetic construct
  source 1..75: mol_type = other DNA
tattgctgataaattgcgcggacgggagtttaaaacctttgatgagtttcgcgaggcgctgtggctggaggtgag

SEQ ID NO: 203428 - DNA, 75 bp, synthetic construct
  source 1..75: mol_type = other DNA
aaatatggggaaaatggtcgctcagtggcatactcagtgcaacctgcggctcttacatcggtgcgttggcatctg

SEQ ID NO: 203429 - DNA, 75 bp, synthetic construct
  source 1..75: mol_type = other DNA
tgagtgccaccgtataggcgacgacgaagagagccagtatcagcaaatcctcactcacctgacgaaagtaacccc

SEQ ID NO: 203430 - DNA, 75 bp, synthetic construct
  source 1..75: mol_type = other DNA
tgaatgccaccgtattggtgacgatgaagagagccagtatcagcaaatcctcactcacctgacaaaagtgaatcc

SEQ ID NO: 203431 - DNA, 75 bp, synthetic construct
  source 1..75: mol_type = other DNA
cgcatgcagagtgggggcatcacattgatgccataatccggcaggaaaaaacgtcgtatccgggatcagattctg

SEQ ID NO: 203432 - DNA, 75 bp, synthetic construct
  source 1..75: mol_type = other DNA
cctaaagaaatagttaaaaaattccagatacatcatcgtgttgcaattgaatatggcggcagcgtatacgatatt

SEQ ID NO: 203433 - DNA, 75 bp, synthetic construct
  source 1..75: mol_type = other DNA
aatactgacgataacccggatatcaccaaatatatgggttactaccagcttaaaatcggctatcacctcggtgat

SEQ ID NO: 203434 - DNA, 75 bp, synthetic construct
  source 1..75: mol_type = other DNA
gctacaaccacgactcaaacgggcgttcagacccgacttcccgcagctggaaccgcctttatacccgcctgatgg

SEQ ID NO: 203435 - DNA, 75 bp, synthetic construct
  source 1..75: mol_type = other DNA
gggcctgaatgcgttcttcgcttttgtcgttgtgcaggcgatgggcttgccgtggcaagtcgggatgggcgcaat

SEQ ID NO: 203436 - DNA, 75 bp, synthetic construct
  source 1..75: mol_type = other DNA
gctgaagtcgccatcaaggagagtgagcgttttaacggcattcccgcgctttcggtgcctgttgccgagccgatt

SEQ ID NO: 203437 - DNA, 75 bp, synthetic construct
  source 1..75: mol_type = other DNA
gtggtgttgctggcgattccccccaatgaagcgggtactacgcatatgcaactgctgacagcgctgaccacgcgc

SEQ ID NO: 203438 - DNA, 75 bp, synthetic construct
  source 1..75: mol_type = other DNA
acaaagagtgttattacgggcgaaggcatactggaacgtatactccacgcgatcgcgaacatgggcaacatttga

SEQ ID NO: 203439 - DNA, 75 bp, synthetic construct
  source 1..75: mol_type = other DNA
atcaccaggcatgtgcgcctttatacccagatttacagcggttatggcgaatcgctcatagactataactttaac

SEQ ID NO: 203440 - DNA, 75 bp, synthetic construct
  source 1..75: mol_type = other DNA
cgcagagttaggcttaagttacccaatcaccaaacatgtgcgtctttatactcaggtctacagcggttacggcga

SEQ ID NO: 203441 - DNA, 75 bp, synthetic construct
  source 1..75: mol_type = other DNA
tgggtgccattctcggttttatgtgttcctttgaccttggagggccagtgaacaaagccgcttatgcattctgcc

SEQ ID NO: 203442 - DNA, 75 bp, synthetic construct
  source 1..75: mol_type = other DNA
ttatcgaaacacaagtccgaaactggcctgttgtcggtgtgaccatatcgtgcaggcgccggctcatgtcaacga

SEQ ID NO: 203443 - DNA, 75 bp, synthetic construct
  source 1..75: mol_type = other DNA
ggttatcttcctgtcgccgctggcggggatggtgcctggctacgctgcagctggtgcgttgatctacgttggtgt

SEQ ID NO: 203444 - DNA, 75 bp, synthetic construct
  source 1..75: mol_type = other DNA
tgagtcctcttccggcgtttccgttggcggtcgtaccggtctgacggcagtggttgtcggtctgctgttcctgct

SEQ ID NO: 203445 - DNA, 75 bp, synthetic construct
  source 1..75: mol_type = other DNA
gtttcggtcagcccggcgcataacaaggccaacattaatcggacgcatgccgaatcgctggaggacctttataaa

SEQ ID NO: 203446 - DNA, 75 bp, synthetic construct
  source 1..75: mol_type = other DNA
cccgtaaaccgttaacggcctcacttccccgtgaaacccgggtcatccggccggaagaggaatgctgtccggcct

SEQ ID NO: 203447 - DNA, 75 bp, synthetic construct
  source 1..75: mol_type = other DNA
caggttgaagtgaaacttcgtgagtatggtcgaactgaaatgcatccatgcacttttgttttcaatccgcaaatc

SEQ ID NO: 203448 - DNA, 75 bp, synthetic construct
  source 1..75: mol_type = other DNA
caagaacgaaggcaaagcatgcgcctggctggacagccttacaccagaagcccgcaaaagtggtcaacgtgtggc

SEQ ID NO: 203449 - DNA, 75 bp, synthetic construct
  source 1..75: mol_type = other DNA
agccaaagtgtcgctgatcaccagtgacggcattaagttcccgcaggacggtacgctggaattctctgacgttac

SEQ ID NO: 203450 - DNA, 75 bp, synthetic construct
  source 1..75: mol_type = other DNA
ttaatggggtttattatggggagagctctttcggaaaaaacactagcgtaaataataactcatcttgttcattaa

SEQ ID NO: 203451 - DNA, 75 bp, synthetic construct
  source 1..75: mol_type = other DNA
gcatactggcgcaagcaactttacaaggtaacacagcgtaaggtattgccgaggttaatgaatgagctggaccag

SEQ ID NO: 203452 - DNA, 75 bp, synthetic construct
  source 1..75: mol_type = other DNA
gtactcagtacatcagtaagcaagagtacgatcaggcgctggctgatgcgcaacaggcaaatgcggctgttactg

SEQ ID NO: 203453 - DNA, 75 bp, synthetic construct
  source 1..75: mol_type = other DNA
atcacacgctgctgccgggtatgttcgtgcgcgcacgtctggaagaagggctgaatccaaacgccattttagtac

SEQ ID NO: 203454 - DNA, 75 bp, synthetic construct
  source 1..75: mol_type = other DNA
gtactcagtacatcagtaagcaagagtacgatcaggctctggctgatgcgcaacaggcgaatgctgcggtaactg

SEQ ID NO: 203455 - DNA, 75 bp, synthetic construct
  source 1..75: mol_type = other DNA
ttcagtgatgtagccgagtggctggagtcattaggccgtaacgctgtgaatgttgtattcaatggaggggattgt

SEQ ID NO: 203456 - DNA, 75 bp, synthetic construct
  source 1..75: mol_type = other DNA
ccaatggatcgtggtcacagactctatcgaccattaattaagcggttgagtaaggaatatggcttaggtgagcgc

SEQ ID NO: 203457 - DNA, 75 bp, synthetic construct
  source 1..75: mol_type = other DNA
tatgaaactgtttaagaagtttcgtgggtatttattggtgaagacgcaggttaatggggtttattatggggatag

SEQ ID NO: 203458 - DNA, 75 bp, synthetic construct
  source 1..75: mol_type = other DNA
attttccccctggtatgaagcacgttgctgggttcgtgcgtactggcgcaagcaactttacaaggtaacacagcg

SEQ ID NO: 203459 - DNA, 75 bp, synthetic construct
  source 1..75: mol_type = other DNA
tatgaaactgtttaagaagtttcgggggtatttattgatgaagacccaggttaatgcggtttattattgcacact

SEQ ID NO: 203460 - DNA, 75 bp, synthetic construct
  source 1..75: mol_type = other DNA
gatttttaacaagataaaactggataaagattttcggaatttttcgcatcaagtaggaaatacaaaagcaaataa

SEQ ID NO: 203461 - DNA, 75 bp, synthetic construct
  source 1..75: mol_type = other DNA
gttggcgcggatgacaaagtggaaactcgtccgatcgtcgcaagccaggccattggcgataagtggctggtgact

SEQ ID NO: 203462 - DNA, 75 bp, synthetic construct
  source 1..75: mol_type = other DNA
gaaattgatttacttaatctaatctcagttttatggcgggccaaaaaaacggtcatggcggtcgtttttgcgttt

SEQ ID NO: 203463 - DNA, 75 bp, synthetic construct
  source 1..75: mol_type = other DNA
gaaattgatttacttaatctaatctcagttttatggcggggtaatgactccaacttactgatagtgttttatgtt

SEQ ID NO: 203464 - DNA, 75 bp, synthetic construct
  source 1..75: mol_type = other DNA
tgtttgcactttccactccgatggaaatacgcaatggtaatgactccaacttattgatagtgttttatgttcaga

SEQ ID NO: 203465 - DNA, 75 bp, synthetic construct
  source 1..75: mol_type = other DNA
tgattttgcgctggagggtagctgatttgggtaatgactccaacttattgatagtgttttatgttcagataatgc

SEQ ID NO: 203466 - DNA, 75 bp, synthetic construct
  source 1..75: mol_type = other DNA
actgaccaacgccagaaaatcatataactgcgtcggtaatgactccaacttattgatagtgttttatgttcagat

SEQ ID NO: 203467 - DNA, 75 bp, synthetic construct
  source 1..75: mol_type = other DNA
aaatcttgttaaccaaagatattctggaacgaggtaatgactctaacttattgatagtgttttatgttcagataa

SEQ ID NO: 203468 - DNA, 75 bp, synthetic construct
  source 1..75: mol_type = other DNA
gccgtgggatttcggtttgattgtgctgcgcaatcccccttcgggcattacgccgttgccgttatttgagggaga

SEQ ID NO: 203469 - DNA, 75 bp, synthetic construct
  source 1..75: mol_type = other DNA
gctggcagttaattggggtgcaaagttcagctcctgcagcgaaagatcgctggcgcgctgataaccgggccattt

SEQ ID NO: 203470 - DNA, 75 bp, synthetic construct
  source 1..75: mol_type = other DNA
tttgtatcaggagcctggtaatgactccaacttattgatagtgttttatgttcagataatgcccgatgactttgt

SEQ ID NO: 203471 - DNA, 75 bp, synthetic construct
  source 1..75: mol_type = other DNA
attaaagtggaatatgtcggtatttgtggttcagatgtacatggttttggtaatgactccaacttattgatagtg

SEQ ID NO: 203472 - DNA, 75 bp, synthetic construct
  source 1..75: mol_type = other DNA
accctgccgaaaattgctccggcgagcatggaagtcaatgcgggtaatgactccaacttattgatagtgttttat

SEQ ID NO: 203473 - DNA, 75 bp, synthetic construct
  source 1..75: mol_type = other DNA
aaagctgcgggtcgtaaagtgactcaggcgggataccctgaagatcatctcgatacgttgtacagtcatcaaaat

SEQ ID NO: 203474 - DNA, 75 bp, synthetic construct
  source 1..75: mol_type = other DNA
aacagttcccattctggtcagagtcaacgttaaaacgcgcgtttgcaagtctgaaaacgctggggcttttgcgtt

SEQ ID NO: 203475 - DNA, 75 bp, synthetic construct
  source 1..75: mol_type = other DNA
ttctttgcctctgcgttcactaaagtgtttaccctgctggcgctgttttccatcttgattcatgcctggatcggc

SEQ ID NO: 203476 - DNA, 75 bp, synthetic construct
  source 1..75: mol_type = other DNA
gacgaatcattgccgaggcatcaagatattcaattttgttttgatgcatataagaataaggttaatttcattttt

SEQ ID NO: 203477 - DNA, 75 bp, synthetic construct
  source 1..75: mol_type = other DNA
ttcgccaggcgcaggatggtcacttaccgactctggatttaacggcctctaccggaatttctgacacctcctaca

SEQ ID NO: 203478 - DNA, 75 bp, synthetic construct
  source 1..75: mol_type = other DNA
atccatcatcccataacgaacgaataaaagtaatcatttcatattttgactcctgccattctttaattgataaaa

SEQ ID NO: 203479 - DNA, 75 bp, synthetic construct
  source 1..75: mol_type = other DNA
aactccgtgaaaaatgggatgaactggtgattcgactgtggcgtggtcccgcgcagcgttgcgtgaatcacattt

SEQ ID NO: 203480 - DNA, 75 bp, synthetic construct
  source 1..75: mol_type = other DNA
cgaaacgtatgagccgccaactggagatgcgtgatggtcgtctgacggcggaactgagcctgatgggggcggagt

SEQ ID NO: 203481 - DNA, 75 bp, synthetic construct
  source 1..75: mol_type = other DNA
cccatctgaactttctggcggcgaacgccagcgtgtggcgattgcccgtgcgctggtcaataacccgcgtctggt

SEQ ID NO: 203482 - DNA, 75 bp, synthetic construct
  source 1..75: mol_type = other DNA
caacagagactactacagagaataaaaacacttcttgtccggaagcttcgcaaccggacctgcagacggctgatc

SEQ ID NO: 203483 - DNA, 75 bp, synthetic construct
  source 1..75: mol_type = other DNA
atgtgaaacgctccaccgggtcaaaacgaaccgctgtcatcaggtcaaattggcacgatgatcttacagagaata

SEQ ID NO: 203484 - DNA, 75 bp, synthetic construct
  source 1..75: mol_type = other DNA
atgaataagatcctgttgcaatgcgataacctgtgcaaacgctatcaggaaggcagtgtgcaaaccgatgtactg

SEQ ID NO: 203485 - DNA, 75 bp, synthetic construct
  source 1..75: mol_type = other DNA
ggctggagcaccgggcgaatcaccgcccgtcagaactttctggcggtgagcgtcagcgtgtggcgattgcccggg

SEQ ID NO: 203486 - DNA, 75 bp, synthetic construct
  source 1..75: mol_type = other DNA
tcgaaatggcgtgcgttaacgctgcaggaaaaagctgcagggattcaggacgtcacatatcagaccgatcagcaa

SEQ ID NO: 203487 - DNA, 75 bp, synthetic construct
  source 1..75: mol_type = other DNA
aggcttacaaccaaacgccgaaagaatttcccggttggttgcgagatctccaccggcaatatgactttgatacca

SEQ ID NO: 203488 - DNA, 75 bp, synthetic construct
  source 1..75: mol_type = other DNA
agcggtggtgacaattaacagtacggcggggatctctgcgctgattcataacaaaccactcaaagtgatgggcaa

SEQ ID NO: 203489 - DNA, 75 bp, synthetic construct
  source 1..75: mol_type = other DNA
gggtatttattgatgaagacgcaggttaattgggtttattatggggggaacacaacaaactgccaacataatata

SEQ ID NO: 203490 - DNA, 75 bp, synthetic construct
  source 1..75: mol_type = other DNA
gcaaagtcgaaagggatccgctttctggcatttgaggaaggatatttacgcccgcaatttataaccgttgaagaa

SEQ ID NO: 203491 - DNA, 75 bp, synthetic construct
  source 1..75: mol_type = other DNA
ttaatggggtttattatggtgatagatgttttgaacatgatattaaggtggataaggattcttggagtcttacac

SEQ ID NO: 203492 - DNA, 75 bp, synthetic construct
  source 1..75: mol_type = other DNA
gtggtattacctgatgggctggcattaccgtcatgagttccctcgctaccgccaccacaaatcgttttccccctg

SEQ ID NO: 203493 - DNA, 75 bp, synthetic construct
  source 1..75: mol_type = other DNA
gtgcaattgctggttccgggtatcccggaagcaccagatcagcgggcagcccagaaagcattaatcaggttttgt

SEQ ID NO: 203494 - DNA, 75 bp, synthetic construct
  source 1..75: mol_type = other DNA
gcctgatagcccggcccccgtcgttcagcaaacatccgcacgcactaccaccagtaacggtcataaccctttccg

SEQ ID NO: 203495 - DNA, 75 bp, synthetic construct
  source 1..75: mol_type = other DNA
gcttctcgctgccgatttatcagggcggaatggttaactctcaggtgaaacaggcacagtacaactttgttggtg

SEQ ID NO: 203496 - DNA, 75 bp, synthetic construct
  source 1..75: mol_type = other DNA
ttttactgccgccatcgacaatacctggcttactaccaaacgccgaaagagtttcccggttggctgcgagatctc

SEQ ID NO: 203497 - DNA, 75 bp, synthetic construct
  source 1..75: mol_type = other DNA
acatcgcttttaatttattatcatgctttttacagcatgatgtttgtctttgtttttcatgcagttaaaaataaa

SEQ ID NO: 203498 - DNA, 75 bp, synthetic construct
  source 1..75: mol_type = other DNA
gcagtggatgaggaccgcaaggtactgcttggttttacgttaagcaaccttgccaccgacattttcaccctgaac

SEQ ID NO: 203499 - DNA, 75 bp, synthetic construct
  source 1..75: mol_type = other DNA
tgcccgtgaagtgatggcaaagggaccgtttgacagcctgaaaaagagcctgaaaggctttctggattatgctga

SEQ ID NO: 203500 - DNA, 75 bp, synthetic construct
  source 1..75: mol_type = other DNA
tggaaatgcagcccgtcgtgccggtcaggaaacagaacttgtcggctcccgtatgcagcgaacgcttgccggtgt

SEQ ID NO: 203501 - DNA, 75 bp, synthetic construct
  source 1..75: mol_type = other DNA
aagcaacctttacgggatgctggcgggaggggctgcggtctacggttttaataaagcctttatccgcccggccgc

SEQ ID NO: 203502 - DNA, 75 bp, synthetic construct
  source 1..75: mol_type = other DNA
cagccctgaatcagggctttgagtatgccagagacgcagcgacgggtttttaccgggccattcagaaagtcaggg

SEQ ID NO: 203503 - DNA, 75 bp, synthetic construct
  source 1..75: mol_type = other DNA
taaacagggcttcttcggtcgtatgatgagccgtgccggtggtctgctttcggctgccggaaaccgcatggggct

SEQ ID NO: 203504 - DNA, 75 bp, synthetic construct
  source 1..75: mol_type = other DNA
taaacagggcttcttcggtcgtatgatgagccgtgccggtggtctgctaacggctgccggaaaccgcatggggct

SEQ ID NO: 203505 - DNA, 75 bp, synthetic construct
  source 1..75: mol_type = other DNA
catgtccggtgggcgaaccgtgcatcaccgacgtgtgtgcagccgtggcgcagttgcgtgaatcaggctgtgacg

SEQ ID NO: 203506 - DNA, 75 bp, synthetic construct
  source 1..75: mol_type = other DNA
ttaaccggatggtttgtcgcgaacggtttagtcagattggtcgggcactgcgaactaaaaaatccgacgatcgtg

SEQ ID NO: 203507 - DNA, 75 bp, synthetic construct
  source 1..75: mol_type = other DNA
tacgggcatgaccttgctgcgcgcgagagcatgttgctggcttcatgtatggccggaatggcgttttccagcgcg

SEQ ID NO: 203508 - DNA, 75 bp, synthetic construct
  source 1..75: mol_type = other DNA
ggccgcgcaggaagatatttgtctgcgcagcaacccgcgtaccgccagcctggaacagattgtcggcctgtacgc

SEQ ID NO: 203509 - DNA, 75 bp, synthetic construct
  source 1..75: mol_type = other DNA
atgcaaagtgaattgcaaacggcgctttttcaggcattcgataccctgaatctgcagcgggtgaaaacatttagc

SEQ ID NO: 203510 - DNA, 75 bp, synthetic construct
  source 1..75: mol_type = other DNA
gtgccgtcgcatgtcacggcgatgaccggtatcgacgcgttaacccatgctattgaagcgtacagcgcgctgaac

SEQ ID NO: 203511 - DNA, 75 bp, synthetic construct
  source 1..75: mol_type = other DNA
cgccgctttattaccatgcttcaggatcagggcggctatcacggctggtcactgtcagatgcacagggggcgtcc

SEQ ID NO: 203512 - DNA, 75 bp, synthetic construct
  source 1..75: mol_type = other DNA
ctgttatggcagggggttttttactttttacgatttcaccatgtcggtaacgccggaactgacgctggcgaatat

SEQ ID NO: 203513 - DNA, 75 bp, synthetic construct
  source 1..75: mol_type = other DNA
gatcgccggagagctgcggacatctgtatgttttgccattcgtacaggaaattttgattatgctgcgcagttccc

SEQ ID NO: 203514 - DNA, 75 bp, synthetic construct
  source 1..75: mol_type = other DNA
aagaggtaaacaggatgactaaaaatactcgtttttcccccgaagtccgtcagcgggcgattcgtatggttctgg

SEQ ID NO: 203515 - DNA, 75 bp, synthetic construct
  source 1..75: mol_type = other DNA
ctttactgcctccgtggtgtatatctaaacaagtgtgtcagaaactgctgggatgaccgttggtatgtctggtat

SEQ ID NO: 203516 - DNA, 75 bp, synthetic construct
  source 1..75: mol_type = other DNA
cagcgggtcagtcagacggtatacaggctggtgcctttttatttcccggatgcgggtcatgaagttcacagggga

SEQ ID NO: 203517 - DNA, 75 bp, synthetic construct
  source 1..75: mol_type = other DNA
tcggagcaggcgcttccgctacgctgtttggttcaagtggttctggtaactttatgacccgcatgacggcgctgc

SEQ ID NO: 203518 - DNA, 75 bp, synthetic construct
  source 1..75: mol_type = other DNA
cgccacccgtgcgctgaaggcggtccgcgccatagggattggggcactgcgaccgggagctgcattgttagggta

SEQ ID NO: 203519 - DNA, 75 bp, synthetic construct
  source 1..75: mol_type = other DNA
cgtcccctgtgccaccgtcgccctcttctggtgggtcagggttctgggggcgcatgatggggcgcgccggtgggt

SEQ ID NO: 203520 - DNA, 75 bp, synthetic construct
  source 1..75: mol_type = other DNA
ctgggaccggacagcattcggctgttatttcaggtgatggccgaacaggcaaaaggtgcccagaaaaacgccatg

SEQ ID NO: 203521 - DNA, 75 bp, synthetic construct
  source 1..75: mol_type = other DNA
gaacggctccagcgtggtgaacgctccggtggattaggtggctcaaatctcaccacccctgagtggatcaacagt

SEQ ID NO: 203522 - DNA, 75 bp, synthetic construct
  source 1..75: mol_type = other DNA
ttacctggggggctggttgacgcaggcctggcagaaactgcgtggcggcagtgatgaaaacgccgggcaggccac

SEQ ID NO: 203523 - DNA, 75 bp, synthetic construct
  source 1..75: mol_type = other DNA
gcccctgaaggctggcgggcgcgcagtattgatgtggatgataccgcacagcatggcctggatgtgaacgtctgg

SEQ ID NO: 203524 - DNA, 75 bp, synthetic construct
  source 1..75: mol_type = other DNA
tctgtcatgcagaacgtgtgggacacgcgcggctggcgctttcggtgcgcataaccctgcctgatggtttcggta

SEQ ID NO: 203525 - DNA, 75 bp, synthetic construct
  source 1..75: mol_type = other DNA
taaaaaaaacagcgttatccggagatgaagaaagcattgagggtaatgactccaacttattgatagtgttttatg

SEQ ID NO: 203526 - DNA, 75 bp, synthetic construct
  source 1..75: mol_type = other DNA
gtgaccgaggaattactgcagtctttaaaaaaaacagcgttatccggagatgaagaaagcattgagggtgatgct

SEQ ID NO: 203527 - DNA, 75 bp, synthetic construct
  source 1..75: mol_type = other DNA
caaagtggtgtggccacgtccgtggtatgtcatgccatgcgcgcgggacatgatcgcctttcgctttccgtgaaa

SEQ ID NO: 203528 - DNA, 75 bp, synthetic construct
  source 1..75: mol_type = other DNA
gaacggcgcagatcttctgacggataacagcctgctgacagcggtcattatttcactgtttacggacaggcgggc

SEQ ID NO: 203529 - DNA, 75 bp, synthetic construct
  source 1..75: mol_type = other DNA
cattggctcccgtctgtggcttctcagccgggaaaaaacgctggtctccgtgataagccgtgcccgtgcctacgc

SEQ ID NO: 203530 - DNA, 75 bp, synthetic construct
  source 1..75: mol_type = other DNA
gctacgtaatagcatcgctatttttgcgctaaccacgctgggtaatgactccaacttattgatagtgttttatgt

SEQ ID NO: 203531 - DNA, 75 bp, synthetic construct
  source 1..75: mol_type = other DNA
aagacttgcaggtactggtagaaggtagtgactccaacttactgatagtgttttatgttcagataatgcccgatg

SEQ ID NO: 203532 - DNA, 75 bp, synthetic construct
  source 1..75: mol_type = other DNA
gaagttaaccctactggaccctgaaatgtggttcttacggggaaatgaaaacaaggatgtaactatattcttgat

SEQ ID NO: 203533 - DNA, 75 bp, synthetic construct
  source 1..75: mol_type = other DNA
ggtgcagctttgccgatgacgttaatggttttttcgatagtaaagaaacgaatgccaaagccgtaggtggtaatg

SEQ ID NO: 203534 - DNA, 75 bp, synthetic construct
  source 1..75: mol_type = other DNA
ggtgccggatcgggcgcaggcgctgatcgaccaaaccagccagttactgccgcgcatcaagatcaccgaactgct

SEQ ID NO: 203535 - DNA, 75 bp, synthetic construct
  source 1..75: mol_type = other DNA
aaatgcctaactcgaagctggatctggcgcattcaccgttttatatcccgatacagccgcaggagtggcccgcat

SEQ ID NO: 203536 - DNA, 75 bp, synthetic construct
  source 1..75: mol_type = other DNA
gaactgaatattccggtggaatggggcggcgactggaagactctgaaagacggaccgcattttcagttaccacac

SEQ ID NO: 203537 - DNA, 75 bp, synthetic construct
  source 1..75: mol_type = other DNA
taagaatgcaacaaggtataagacatcatatttgctctatccttgaaggcggacatattgcgttttctgtccgcg

SEQ ID NO: 203538 - DNA, 75 bp, synthetic construct
  source 1..75: mol_type = other DNA
gaaccggctctgaaaccaccaacgtaacggtgattatcgatgcggtgagcgggcgcaagcaggtgttagcccatg

SEQ ID NO: 203539 - DNA, 75 bp, synthetic construct
  source 1..75: mol_type = other DNA
gcaagcgcaaacgcgtgggctgaaacatctgttcgtgatggcagacagctttttgcatcaggcagggatgaccgc

SEQ ID NO: 203540 - DNA, 75 bp, synthetic construct
  source 1..75: mol_type = other DNA
aaaaggcgcttcatctctggcttcctgagcgccatgaacctatccccggctacgtgctggcttggcaaggaaatc

SEQ ID NO: 203541 - DNA, 75 bp, synthetic construct
  source 1..75: mol_type = other DNA
tgagacgcgtaccgtacagcaagatacgcaaccggcgaaaagcgtcaaaacggagctgaaacaggcgctgttaag

SEQ ID NO: 203542 - DNA, 75 bp, synthetic construct
  source 1..75: mol_type = other DNA
aaatatcctcttgataaaatcctatggaagcttaaaccagatgtttatcccatagtaggactacgtgcggctttg

SEQ ID NO: 203543 - DNA, 75 bp, synthetic construct
  source 1..75: mol_type = other DNA
ctgtcaggaagtaacgcgctgttgctgggtgccattctcggttttatgtgttcctttgaccttggagggccagtg

SEQ ID NO: 203544 - DNA, 75 bp, synthetic construct
  source 1..75: mol_type = other DNA
tcctagaaaaccagtttttgtatgctctgatgcacatgattttaatcagattggtagtaaatatacttgggtaaa

SEQ ID NO: 203545 - DNA, 75 bp, synthetic construct
  source 1..75: mol_type = other DNA
cgccgcccacgatatcgtattagcgcaggctgaggtttcgcaggtcagcgctgcgcgcgagaatctggcgttgcg

SEQ ID NO: 203546 - DNA, 75 bp, synthetic construct
  source 1..75: mol_type = other DNA
gagacgcttagtgactggctggcgtgctctgaggtgttgtcacaggcggtgggacaactgctcgagcattttccg

SEQ ID NO: 203547 - DNA, 75 bp, synthetic construct
  source 1..75: mol_type = other DNA
aacggacagattgccaaattcgtaaccgtgcaaggccattctatggctgtttacgatgcttatggcactcagcag

SEQ ID NO: 203548 - DNA, 75 bp, synthetic construct
  source 1..75: mol_type = other DNA
cgtacaacgtctgatgcaacagggctatggctttgcgggcgaaggcgactggaaaactgccgccctgcttcgcat

SEQ ID NO: 203549 - DNA, 75 bp, synthetic construct
  source 1..75: mol_type = other DNA
gattatgaaacagagacgccgatgactttgctggtgccagaagtggcggctgaagtgataaaagatctggtgaat

SEQ ID NO: 203550 - DNA, 75 bp, synthetic construct
  source 1..75: mol_type = other DNA
accagcaggatgcgtgtaagcgaatttgcttgtcacgaacggtgcaatagtgatccacacccaacgcctgaaatc

SEQ ID NO: 203551 - DNA, 75 bp, synthetic construct
  source 1..75: mol_type = other DNA
gttctggccggggctggcgctgtttatcagcgtgatggcctttaacctggtgggtgacgcactgcgcgatcatct

SEQ ID NO: 203552 - DNA, 75 bp, synthetic construct
  source 1..75: mol_type = other DNA
cctgtcgcactgggcgtggtacgcgcgcatggtgcgcagtctggtgatttcactgcgccagcgcgagtttgtgct

SEQ ID NO: 203553 - DNA, 75 bp, synthetic construct
  source 1..75: mol_type = other DNA
gggcgcgttgatcaggccaccatgcgcgtcgcggatatgtttatgaccttcccgacctcgattctgtcgttcttt

SEQ ID NO: 203554 - DNA, 75 bp, synthetic construct
  source 1..75: mol_type = other DNA
gtcgcgcctgctttcgccggatgcgcagcactggctgggcaccgatcatttagggcgcgatattttctcgcggct

SEQ ID NO: 203555 - DNA, 75 bp, synthetic construct
  source 1..75: mol_type = other DNA
gcgtcgcggatatgtttatgaccttcccgacgtcgattctgtcgttctttatggtcggcgtgcttggcaccgggt

SEQ ID NO: 203556 - DNA, 75 bp, synthetic construct
  source 1..75: mol_type = other DNA
cctgtcgcactgggcgtggtatgcacgcatggtgcgcagcctggtgatttcactgcgccagcgcgagtttgtgct

SEQ ID NO: 203557 - DNA, 75 bp, synthetic construct
  source 1..75: mol_type = other DNA
gggcggttggcgatctggtgcaggtggtgaactccatcagcgatggcgatgttaacgcgctggtcgatgagtacg

SEQ ID NO: 203558 - DNA, 75 bp, synthetic construct
  source 1..75: mol_type = other DNA
gcagaggttccgtcggagcagctggacggcaaaagtgagcgcattcagcactatttcaatgcggtttactgctgg

SEQ ID NO: 203559 - DNA, 75 bp, synthetic construct
  source 1..75: mol_type = other DNA
gaggtcaacaacctgaacaaacgtatgggtgacctgcgggacatcaacggcgaggccggtgcatgggcccgtatc

SEQ ID NO: 203560 - DNA, 75 bp, synthetic construct
  source 1..75: mol_type = other DNA
gcagatgctgggatatgcctcgctggcagaggttccggcagaacagctggatgggaaaagtgagcgcattcagca

SEQ ID NO: 203561 - DNA, 75 bp, synthetic construct
  source 1..75: mol_type = other DNA
acggcaaaagtgagcggatacagcactaccacaacgccgttttttgctgggcgcgcgccgtgctcaatgagcgtt

SEQ ID NO: 203562 - DNA, 75 bp, synthetic construct
  source 1..75: mol_type = other DNA
gcacgcgccatgctcaacgaacgataccaggactatgacaccacggcatccggtgtgaagcggggcgaggaactg

SEQ ID NO: 203563 - DNA, 75 bp, synthetic construct
  source 1..75: mol_type = other DNA
cgaacaactggtgctggagcgagatgctttagacattgaatggcgcaacctgattcttgaagagaatgcgctcgg

SEQ ID NO: 203564 - DNA, 75 bp, synthetic construct
  source 1..75: mol_type = other DNA
gtctgaaacagcttcctggtctggccgtacagcgtctaatgcagcagggttacggctttgcgggcgaaggcgact

SEQ ID NO: 203565 - DNA, 75 bp, synthetic construct
  source 1..75: mol_type = other DNA
gcgttcaccaccacctttgaagatttgcacggtctgaaacagcttcctggtctggccgtacagcgtctgatgcag

SEQ ID NO: 203566 - DNA, 75 bp, synthetic construct
  source 1..75: mol_type = other DNA
atgctggaagtctgtccgtcgatcgccgtagaagagaaaccgatcctcgacgttcaacacctcggtattggcggt

SEQ ID NO: 203567 - DNA, 75 bp, synthetic construct
  source 1..75: mol_type = other DNA
agtacaccatggtttacagccacattgaccgaattattgttggcggcattatgccggtaactaaaacggtttccg

SEQ ID NO: 203568 - DNA, 75 bp, synthetic construct
  source 1..75: mol_type = other DNA
ggcgcgactcggtggggatgaatttggtctgctgctaccagactgtaatgttgaaagcgcgcgttttatcgctac

SEQ ID NO: 203569 - DNA, 75 bp, synthetic construct
  source 1..75: mol_type = other DNA
ctcccgctttccgttgccggtttgagtagcgccacgctggtgaatgaactaattgagcagctggaaaatagccct

SEQ ID NO: 203570 - DNA, 75 bp, synthetic construct
  source 1..75: mol_type = other DNA
ccgcacatagcgaacgggcggcgatgtcgcttgatgaacagtggcggatgattaaagagaatcagttgatgatga

SEQ ID NO: 203571 - DNA, 75 bp, synthetic construct
  source 1..75: mol_type = other DNA
gcaggagcttctggtgcctaccgagatcctgatgacgccggtttacgccagcgtggcctatcgccgggcggcgtc

SEQ ID NO: 203572 - DNA, 75 bp, synthetic construct
  source 1..75: mol_type = other DNA
ggcccgcgattgaagcaggtgccgaggcaattttgcaaaccgccagcggttgcggcgcgtttgtcaaagagtatg

SEQ ID NO: 203573 - DNA, 75 bp, synthetic construct
  source 1..75: mol_type = other DNA
atgaacatttatttcagaatagttatatcactggcaattatcgcatgtatttacggattaatcgttccggccctc

SEQ ID NO: 203574 - DNA, 75 bp, synthetic construct
  source 1..75: mol_type = other DNA
gctggggcgcgtttggtgatgtgatacgtcagagcgaaacaggccaggttaaccagctactggatattctcagac

SEQ ID NO: 203575 - DNA, 75 bp, synthetic construct
  source 1..75: mol_type = other DNA
ggcgctgagggaagagctggagacaatgctgtgacttcaccatttattcaacaaattgctgataaccgggtatgt

SEQ ID NO: 203576 - DNA, 75 bp, synthetic construct
  source 1..75: mol_type = other DNA
gtgacttcaccatttattcaacaaattgctgataaccgggtgtgtcaggtactcacctgtcttcctgaaaaattt

SEQ ID NO: 203577 - DNA, 75 bp, synthetic construct
  source 1..75: mol_type = other DNA
ataaagcattaacgcaaatggcacaggagaatggcggtagcgcaacagtacgtctgaacacactggactggcttg

SEQ ID NO: 203578 - DNA, 75 bp, synthetic construct
  source 1..75: mol_type = other DNA
cggttcgtatgccccgtctctgctctgcagagcgcctctctgaaagtatggttgatgaaatatttcagaaggggg

SEQ ID NO: 203579 - DNA, 75 bp, synthetic construct
  source 1..75: mol_type = other DNA
attctcatggtggagtgccgggcgatatgcgtccttttcccctgccggacgctgctatgtggcgcttgaagagct

SEQ ID NO: 203580 - DNA, 75 bp, synthetic construct
  source 1..75: mol_type = other DNA
taccaacactaattgccgccattctttccaccaaaggtggcgtggcgaaaactaccgatacggctaacctcggcg

SEQ ID NO: 203581 - DNA, 75 bp, synthetic construct
  source 1..75: mol_type = other DNA
cgatactgcggcggtagaaacactggggcctgttctggaaagccacgaacgtttcccggaacgtgccaacatcgg

SEQ ID NO: 203582 - DNA, 75 bp, synthetic construct
  source 1..75: mol_type = other DNA
tagtgaagtggcgcagtgcggcaacggcgcacgctgctttgcccgctttgtacgcctgaaagggctgaccaataa

SEQ ID NO: 203583 - DNA, 75 bp, synthetic construct
  source 1..75: mol_type = other DNA
caggctgcggcaaaggcaggtactgcgttcagtgacggtgatgtttcctggaatgtgggtgtcaactgggagttc

SEQ ID NO: 203584 - DNA, 75 bp, synthetic construct
  source 1..75: mol_type = other DNA
taggccgcgatattttctcgcggctgatggcggcgactcgcgtgtcgctcggctcagtaatggcctgcctgctgc

SEQ ID NO: 203585 - DNA, 75 bp, synthetic construct
  source 1..75: mol_type = other DNA
aactttattctgagtgggttatacgcaatagcctatactggatgactccacttactcgatggaaactccttgagg

SEQ ID NO: 203586 - DNA, 75 bp, synthetic construct
  source 1..75: mol_type = other DNA
aaatatgagtccattcatcatagatatttctacaggggaacatgatgattatatcatacaaacattagatgtagg

SEQ ID NO: 203587 - DNA, 75 bp, synthetic construct
  source 1..75: mol_type = other DNA
gtcagtgatggtacacgggatacggatgcagccactgtcgggcaactgaaccggaaggcggatgaggtgtacagt

SEQ ID NO: 203588 - DNA, 75 bp, synthetic construct
  source 1..75: mol_type = other DNA
gcgctgggggcagaagcccgggccactgaaattaatgcaaccgcggttggtgctcatgcgaatgcatccggacgt

SEQ ID NO: 203589 - DNA, 75 bp, synthetic construct
  source 1..75: mol_type = other DNA
gacagcagcgcagagcagatcgcaatgctgaatcagaagctggcagattttgccccattgatgccccatagccac

SEQ ID NO: 203590 - DNA, 75 bp, synthetic construct
  source 1..75: mol_type = other DNA
tgccggtgctccggcgtttgcgcaggatgacagttcctgggcgtctccgggcacagcctctgcatcagagaccag

SEQ ID NO: 203591 - DNA, 75 bp, synthetic construct
  source 1..75: mol_type = other DNA
ttaaggcacgtgaccataccgatacggtcgctgcagagaacagggagaatatcatccggaatacggtggccataa

SEQ ID NO: 203592 - DNA, 75 bp, synthetic construct
  source 1..75: mol_type = other DNA
gctttcccagagagacgtgctggagacgcatgaagagcgcctgaacagccagcaacagcagataaataccggaag

SEQ ID NO: 203593 - DNA, 75 bp, synthetic construct
  source 1..75: mol_type = other DNA
gcggagcggatcctgtttgcttttaatgatgacagagtcattgtctatggctgtaagcgtcaacggagcaccgta

SEQ ID NO: 203594 - DNA, 75 bp, synthetic construct
  source 1..75: mol_type = other DNA
caacacgcaggggaatggttgttaccggattactccagggattagtttgctacctgctgatctcctggctcgctg

SEQ ID NO: 203595 - DNA, 75 bp, synthetic construct
  source 1..75: mol_type = other DNA
tcttaattctccggtgctggacagtatgcgcattagcgtgaacagtcatatggcgcgttatcagagcggcaaaaa

SEQ ID NO: 203596 - DNA, 75 bp, synthetic construct
  source 1..75: mol_type = other DNA
aaaagatggcataatgaacaaagccaatcctgctgtctctgattcatttaataaaataataaatattattgatga

SEQ ID NO: 203597 - DNA, 75 bp, synthetic construct
  source 1..75: mol_type = other DNA
ctccagcgcacatcaaaaacaggaaattggacaagccttcccggcagcacacattttttgaatgcagctgccctc

SEQ ID NO: 203598 - DNA, 75 bp, synthetic construct
  source 1..75: mol_type = other DNA
atcgctataacgtgatgacctgtattgaaaaagacgcctgcgtactggtcgagcaagatctgaatagtgatggtc

SEQ ID NO: 203599 - DNA, 75 bp, synthetic construct
  source 1..75: mol_type = other DNA
aggaggcgtcattcagcctttcccgcaatgcgacactgacgggggatattgatgctgataatgccaccatggtgc

SEQ ID NO: 203600 - DNA, 75 bp, synthetic construct
  source 1..75: mol_type = other DNA
atgaacagaatatattctctcagaatgaatgacagaaaagaactggttgcggtagcggaaacggcgggcggcagg

SEQ ID NO: 203601 - DNA, 75 bp, synthetic construct
  source 1..75: mol_type = other DNA
agggaatcagacctgggtgggcgggggaatcatcgtgaacgacgggcaccgtgttgactggatggtgaacggact

SEQ ID NO: 203602 - DNA, 75 bp, synthetic construct
  source 1..75: mol_type = other DNA
gagaggatccttttcgcttttaatgatgaaagatatgttgtttatggctttgatcctgacaagaaagaatggcaa

SEQ ID NO: 203603 - DNA, 75 bp, synthetic construct
  source 1..75: mol_type = other DNA
gtattgccgaagttctggccaatgaaggttatcagatcagtggttccgatttagcgccaaatccggtcacgcagc

SEQ ID NO: 203604 - DNA, 75 bp, synthetic construct
  source 1..75: mol_type = other DNA
accgccagtcagaaatataccgtcgccaggacgtggagctgagccgtgccacgctgggtcgctggaccggtgccg

SEQ ID NO: 203605 - DNA, 75 bp, synthetic construct
  source 1..75: mol_type = other DNA
cgtcgcttaatcaggcattagattatcaacctgacgaactgtttctgtacccactgtataacatgcctcgccagc

SEQ ID NO: 203606 - DNA, 75 bp, synthetic construct
  source 1..75: mol_type = other DNA
aatgaaattgttaccgtttataatccaggccccagatatgtgacactctataaccttcatgttgatggtaaagtt

SEQ ID NO: 203607 - DNA, 75 bp, synthetic construct
  source 1..75: mol_type = other DNA
tcaaggttgcagtctcccctgatgatgctcgtcagttgacgggaacggttgaatctttgccctcatattctgaaa

SEQ ID NO: 203608 - DNA, 75 bp, synthetic construct
  source 1..75: mol_type = other DNA
cgtgctggataaatggcaccagagcaagacgctcgagcaaaccagagcccgcgacattcgtaagtggctcctgga

SEQ ID NO: 203609 - DNA, 75 bp, synthetic construct
  source 1..75: mol_type = other DNA
aaaatgaaccagtggcacaggtttcacagtggaagcgttataattcccggacacctgttaatctggcgacgcgta

SEQ ID NO: 203610 - DNA, 75 bp, synthetic construct
  source 1..75: mol_type = other DNA
atggtgggttaccgccaaacgaatcagaaaaccgatactggaaaaactctaacgcggtggccagtttttgttgac

SEQ ID NO: 203611 - DNA, 75 bp, synthetic construct
  source 1..75: mol_type = other DNA
agatgcgctggctgccgatcgccagttgttttcatctccagcggatatcacgtttgtcattgtcggtaatgtctc

SEQ ID NO: 203612 - DNA, 75 bp, synthetic construct
  source 1..75: mol_type = other DNA
ctatccggcgttctcagaaataaaacagcaatggattaaattcagtgtggagcttattgattgggcaaaagagcg

SEQ ID NO: 203613 - DNA, 75 bp, synthetic construct
  source 1..75: mol_type = other DNA
atgctttggagcataatgaagaaaaagcacaagagcttttagaactgtataagcattttgattgtgatattaacg

SEQ ID NO: 203614 - DNA, 75 bp, synthetic construct
  source 1..75: mol_type = other DNA
acaacgagcagttcaaaaaatgggacctcggcgatatcctcggcgcgaaaggtaaactgttcaaaaccaaaaccg

SEQ ID NO: 203615 - DNA, 75 bp, synthetic construct
  source 1..75: mol_type = other DNA
caggtgggagagggggcgctgctggactttctgcttgaacataaccgcccgctgccgctaattggcgcttctggc

SEQ ID NO: 203616 - DNA, 75 bp, synthetic construct
  source 1..75: mol_type = other DNA
cataaaatactaccaccgaaaaatattagggataattttaataagaggtttgttgaatatgctaattcttaccct

SEQ ID NO: 203617 - DNA, 75 bp, synthetic construct
  source 1..75: mol_type = other DNA
aaagtttattgatctacgtttcaacacgcttggtggtgcgggtatacctagtaacattggtatcaatgtagctaa

SEQ ID NO: 203618 - DNA, 75 bp, synthetic construct
  source 1..75: mol_type = other DNA
ggagccaaccgcgcgattactcagttcttctttgatgtcgaaagctacctgcgttttcgtgaccgctgtgtctcg

SEQ ID NO: 203619 - DNA, 75 bp, synthetic construct
  source 1..75: mol_type = other DNA
tggtgacccaccttgacgtctcgcgtgcacaactggcggaagtcgccgcccactggcgcgcattcctggcgcgtt

SEQ ID NO: 203620 - DNA, 75 bp, synthetic construct
  source 1..75: mol_type = other DNA
ccgcagcacgtgatctgccacctgaccgatgagaacgcgtctataagcatgcgtatcaaagttcagcgcggtcgt

SEQ ID NO: 203621 - DNA, 75 bp, synthetic construct
  source 1..75: mol_type = other DNA
tatgtactcattgagcctaacaccaaagtattcccaggtgatgaggtgtttgtcagaaccattgaagggcacaac

SEQ ID NO: 203622 - DNA, 75 bp, synthetic construct
  source 1..75: mol_type = other DNA
cctatggcgcaaactccggcgagcgcgaccgtacgcacagcattattaaaggcattaaagatcgcactggcctgg

SEQ ID NO: 203623 - DNA, 75 bp, synthetic construct
  source 1..75: mol_type = other DNA
atatggtgaagattttaagccgtgaaggagtgaaagatttccacttctatacgcttaaccgtgctgaaatgagtt

SEQ ID NO: 203624 - DNA, 75 bp, synthetic construct
  source 1..75: mol_type = other DNA
aggaactggcggaagcaagcgtgatttatggcgtgacgcccgctgggccatcagccgggtgcaggatgcgccgca

SEQ ID NO: 203625 - DNA, 75 bp, synthetic construct
  source 1..75: mol_type = other DNA
acggcatccggtgtgaagcggggcgaggaactggcggaagcaagcgtgatttatggcgtgacgcccgctgggcca

SEQ ID NO: 203626 - DNA, 75 bp, synthetic construct
  source 1..75: mol_type = other DNA
gcggaagccagcggtgatttatggcgtgacgcccgctgggccatcagccgggtacaggatgcgccgcactgcaca

SEQ ID NO: 203627 - DNA, 75 bp, synthetic construct
  source 1..75: mol_type = other DNA
tcgtcgtgcggcaaccattctggctgaacaactggaagctttcgttgacttacgtgatgtacgtcagcctgaagt

SEQ ID NO: 203628 - DNA, 75 bp, synthetic construct
  source 1..75: mol_type = other DNA
ctttcgctatgtggtgctgccgctggcaatcccgggtattgccgctggctctatctttaccttctcactcacact

SEQ ID NO: 203629 - DNA, 75 bp, synthetic construct
  source 1..75: mol_type = other DNA
accctggtgccgattgttctcatcgcactgtacctggcgttcgtgaaacgtctgggagcattcgatgcactctga

SEQ ID NO: 203630 - DNA, 75 bp, synthetic construct
  source 1..75: mol_type = other DNA
gcgcattttttggcgtcggcgcgatcgtgttatcaaaaattatcaaacccggcaaagtcaccgccgccgtggcgg

SEQ ID NO: 203631 - DNA, 75 bp, synthetic construct
  source 1..75: mol_type = other DNA
atgttgatgttattcctcaccgttgccatggtgcacattgtggcgcttatgagccccggtcccgatttctttttt

SEQ ID NO: 203632 - DNA, 75 bp, synthetic construct
  source 1..75: mol_type = other DNA
ggcctggctgcatacgctgattatggtgggcggtggcctgtatctttgctggatgggttaccagatgctacgcgg

SEQ ID NO: 203633 - DNA, 75 bp, synthetic construct
  source 1..75: mol_type = other DNA
aggcttactgaccaatctcgccaatccgaaagcgattatctactttggttcggtattctcgctgtttgtcggtga

SEQ ID NO: 203634 - DNA, 75 bp, synthetic construct
  source 1..75: mol_type = other DNA
ggaatcatcgtgaacgacgggcaccgtgttgactggatggtgaacggacttgctggagacgcacttcataaaatt

SEQ ID NO: 203635 - DNA, 75 bp, synthetic construct
  source 1..75: mol_type = other DNA
tactgtcagtgacggcgggcgtttacatgtgaaggggggactggagacagatggtggtgtgacactggacagagg

SEQ ID NO: 203636 - DNA, 75 bp, synthetic construct
  source 1..75: mol_type = other DNA
tcaccggggtgaccatgacatataccgacagcaacgccggcagcgacaccttcagtggtaaaacgaagtcagtgg

SEQ ID NO: 203637 - DNA, 75 bp, synthetic construct
  source 1..75: mol_type = other DNA
catgatgtttatttccggtttttcggaaacggcgatgacctttattatgatgttagttgggctagggatggtgct

SEQ ID NO: 203638 - DNA, 75 bp, synthetic construct
  source 1..75: mol_type = other DNA
ctgcggcggcatgaaaacaacgtcgcttatttttgcttttatttgttgcgcgggattatttgccctttcagcacc

SEQ ID NO: 203639 - DNA, 75 bp, synthetic construct
  source 1..75: mol_type = other DNA
gcgctttttttggcgtcggggcgattgtgttatcgaaaattatcaaacccggcaaagtcaccgccgccgtggcgg

SEQ ID NO: 203640 - DNA, 75 bp, synthetic construct
  source 1..75: mol_type = other DNA
aaatgcgccgtggttatcaacgtctggcgaagtggattgatggttttgccggggcgttatttgccggatttggca

SEQ ID NO: 203641 - DNA, 75 bp, synthetic construct
  source 1..75: mol_type = other DNA
ctgctgtatggtcgctataagcgccagcaagtggcggacagtccggtgctggcgaaaccactgggtaagttgcac

SEQ ID NO: 203642 - DNA, 75 bp, synthetic construct
  source 1..75: mol_type = other DNA
ctcgtttgcagcgatgtcttcgttgctgctgtatggtcgctataagcgccagcaagtggcggacagtccggtgct

SEQ ID NO: 203643 - DNA, 75 bp, synthetic construct
  source 1..75: mol_type = other DNA
gtttgttttgcaatcagaatggggaatttcgactacgctgcgcagttccctgagtctccaaatctgaaacacttc

SEQ ID NO: 203644 - DNA, 75 bp, synthetic construct
  source 1..75: mol_type = other DNA
attcattctgcactaaatccaacccattattatcaacctgtgaacgatgaaacaacagtgatggaaatcataaaa

SEQ ID NO: 203645 - DNA, 75 bp, synthetic construct
  source 1..75: mol_type = other DNA
cccccggaatgattgtcctcaaagaagaatgccattttagttcggcagaacaacacttctgcgtattgcccggtg

SEQ ID NO: 203646 - DNA, 75 bp, synthetic construct
  source 1..75: mol_type = other DNA
agaacagagttaactcttttgcattttctgttaatcctggtgaattttcctgcggtgagcagcatctgagatgtc

SEQ ID NO: 203647 - DNA, 75 bp, synthetic construct
  source 1..75: mol_type = other DNA
cggttaacgggtcacggcttcaggcataccatgagtactattttgcatgaacatggctttgaaagcgcctggatt

SEQ ID NO: 203648 - DNA, 75 bp, synthetic construct
  source 1..75: mol_type = other DNA
tcctgaaaaagctgcaagaaataactgggaattacagcctcgttttccctgggcgaaacgatgtcaggaaaccaa

SEQ ID NO: 203649 - DNA, 75 bp, synthetic construct
  source 1..75: mol_type = other DNA
caaagtataattttgcacccgatttagctatcgcactcaacaaacctaaaacccaacacttcccgttcctgactg

SEQ ID NO: 203650 - DNA, 75 bp, synthetic construct
  source 1..75: mol_type = other DNA
ttaaacagctggcgcgtcgcagtacggtgacaccgggtggtgcggcctgtgcatataacgacatcattccggcgg

SEQ ID NO: 203651 - DNA, 75 bp, synthetic construct
  source 1..75: mol_type = other DNA
ttacggatattacaggtagtgcagaaacctaccctgtacttattgatacggtggaagttaaagcaaacaaagctg

SEQ ID NO: 203652 - DNA, 75 bp, synthetic construct
  source 1..75: mol_type = other DNA
gtgccctgatttcgacagctggttatggtgcggagtttatccagcctgttgtgagtgacagggatatctcatcac

SEQ ID NO: 203653 - DNA, 75 bp, synthetic construct
  source 1..75: mol_type = other DNA
catccactcagtcgtgaagattttaccccgggaatgattgtcctcaaagaggaatgcaattttagtacggcagaa

SEQ ID NO: 203654 - DNA, 75 bp, synthetic construct
  source 1..75: mol_type = other DNA
aaatcagcaacaactatatatgcgcgtaacaacaaaagatttgcttgctaccaaaagaaagttaaacatagcatt

SEQ ID NO: 203655 - DNA, 75 bp, synthetic construct
  source 1..75: mol_type = other DNA
gatcgttgatggccagctttacgactcaggcactcttatgcttgataaagtcactttcctaccaggtaaatcact

SEQ ID NO: 203656 - DNA, 75 bp, synthetic construct
  source 1..75: mol_type = other DNA
aaaactccattagagggacttataaccatgcgcaatatttaaaacaacgagaatctatgatgcaagcatactcag

SEQ ID NO: 203657 - DNA, 75 bp, synthetic construct
  source 1..75: mol_type = other DNA
ggttcttataagtcgttccttgcgtgttcgtgggcgtgtcatgttgctactggtatcccgtggggaggtcgcagg

SEQ ID NO: 203658 - DNA, 75 bp, synthetic construct
  source 1..75: mol_type = other DNA
ggcgataatcctgacctgtacgaagatgaaagatgcggaggagccgaaacaggccgcattcgatctgcgtccgat

SEQ ID NO: 203659 - DNA, 75 bp, synthetic construct
  source 1..75: mol_type = other DNA
tgctgaccattgccaccaaactggcgatcgcaggtgtccaggaagcacggttactttcagagaatttcgaactgc

SEQ ID NO: 203660 - DNA, 75 bp, synthetic construct
  source 1..75: mol_type = other DNA
gcgaaggcagcatgggcgtaaaacgccgcgttaaggcgtgggagataacccacgacaaggtggttacagatttgt

SEQ ID NO: 203661 - DNA, 75 bp, synthetic construct
  source 1..75: mol_type = other DNA
atcactgttaaattacgcgagtacggaagaacaattttgcacgagtgcacttttgttttctgtccgcaaatcgtt

SEQ ID NO: 203662 - DNA, 75 bp, synthetic construct
  source 1..75: mol_type = other DNA
atcccgctgttacgtgatgacatgaaaaagctggggtatgaaatgaaaaacttccggcgctggctgtacaagctg

SEQ ID NO: 203663 - DNA, 75 bp, synthetic construct
  source 1..75: mol_type = other DNA
accaacaaattgtcgggcgcggtctgcgtctggctccaggcaagactgattgcttaattcttgattatgcgggta

SEQ ID NO: 203664 - DNA, 75 bp, synthetic construct
  source 1..75: mol_type = other DNA
cagccaaatcatggagtttgctgcaacgcgcaaaggggtgatgattttcgccgcgacggtcgaacacgcaaaaga

SEQ ID NO: 203665 - DNA, 75 bp, synthetic construct
  source 1..75: mol_type = other DNA
ggcattgacccggtagaggaacgcaaagctttaagactcgcccaaaagttatcaacagaaaattctttcgaagca

SEQ ID NO: 203666 - DNA, 75 bp, synthetic construct
  source 1..75: mol_type = other DNA
gaagcacttccggcgctggctgtacaagctggaaaaagacggcgtgatcactatcgacggcaatgacgtgcatcc

SEQ ID NO: 203667 - DNA, 75 bp, synthetic construct
  source 1..75: mol_type = other DNA
acgacatgttaaaagcggcgctacgactgaaagacgcgctggtattacgctgtagcggcatgtctttgcagcatg

SEQ ID NO: 203668 - DNA, 75 bp, synthetic construct
  source 1..75: mol_type = other DNA
tacgcgcacaccgggcatccctctgcgctggatcaccgccgccgatatcctcgcccagcaagccttattgcgaca

SEQ ID NO: 203669 - DNA, 75 bp, synthetic construct
  source 1..75: mol_type = other DNA
atttactggctggtggtctggcgttttattcaagggatcgcgggggcgggtggttcggtgctctctcgttctatt

SEQ ID NO: 203670 - DNA, 75 bp, synthetic construct
  source 1..75: mol_type = other DNA
gctggcgtactgctcggtcagttctatggcgtcattaacccctatatcggctttatggccgggatgaaagccttt

SEQ ID NO: 203671 - DNA, 75 bp, synthetic construct
  source 1..75: mol_type = other DNA
tgtgtgcagaggaaggtgtaactcaggcagagttgatagaaaggcttatcgaaaaagaggcctgtcacaggaata

SEQ ID NO: 203672 - DNA, 75 bp, synthetic construct
  source 1..75: mol_type = other DNA
gttggtagaactactcaccacatcactgattgcgttggatgacaagtacagcgatgtgagtcggcaaactgccag

SEQ ID NO: 203673 - DNA, 75 bp, synthetic construct
  source 1..75: mol_type = other DNA
aacgctttgtaaaaacacgctcgtggtcgccatttccagttcaggatccacgcgcgatctgctgcatgtcgtaaa

SEQ ID NO: 203674 - DNA, 75 bp, synthetic construct
  source 1..75: mol_type = other DNA
tcactgattggtcttggcgtcggacaactgttatttggccctctgagcgacaaaatagggcgtaaacgtccgtta

SEQ ID NO: 203675 - DNA, 75 bp, synthetic construct
  source 1..75: mol_type = other DNA
ggagcaaagtggtgttgaactcaatatgccgccgatgaacggtgccgagtggctggccttgttccagaaaggcgc

SEQ ID NO: 203676 - DNA, 75 bp, synthetic construct
  source 1..75: mol_type = other DNA
gatttttccaccaaagaaggggcaaaagcctaccaggttgcggtgaatctcaacggtaactggcaaccggcgaaa

SEQ ID NO: 203677 - DNA, 75 bp, synthetic construct
  source 1..75: mol_type = other DNA
cacttaccttcaccgttagccaaacccgctggcgaatcgctgccggttaacattaaggtcgatggcaacctcaat

SEQ ID NO: 203678 - DNA, 75 bp, synthetic construct
  source 1..75: mol_type = other DNA
cttcctcatctggcgcaaaacgagcatacagaaagggtaaacctttgagtgaagcagagcgacagagagcagctt

SEQ ID NO: 203679 - DNA, 75 bp, synthetic construct
  source 1..75: mol_type = other DNA
ggaacaaagtggtgttgaactcaatatgccgccaatggatggcgctgagtggctggcgctgttccagaaaggcgc

SEQ ID NO: 203680 - DNA, 75 bp, synthetic construct
  source 1..75: mol_type = other DNA
acgcatacgctgtcggtggataatctgaccgcgcatattacgcgtgaaaatccgggatggcagttctctattccc

SEQ ID NO: 203681 - DNA, 75 bp, synthetic construct
  source 1..75: mol_type = other DNA
ctcgatctccggcaaggagagctggtagagcgcagcggtgatgagattgacaatgtcgtcaatgaatccgtgcaa

SEQ ID NO: 203682 - DNA, 75 bp, synthetic construct
  source 1..75: mol_type = other DNA
atttatgcgcagccggcaccggaagtggtgcgttacgaccgttacctgctggtcagcacggcaccacaggccgcg

SEQ ID NO: 203683 - DNA, 75 bp, synthetic construct
  source 1..75: mol_type = other DNA
gcgcctgatgaatatgccagaacgccggaggtggtgcgttatgaccgttatctgctggtcagcacggatccgatg

SEQ ID NO: 203684 - DNA, 75 bp, synthetic construct
  source 1..75: mol_type = other DNA
caactggcgcagggaatacaatcatgagagaacacattcatcattaaatgacatgactccggctgaatttatccg

SEQ ID NO: 203685 - DNA, 75 bp, synthetic construct
  source 1..75: mol_type = other DNA
gcagtatgaggcggtttacggaggctataaaggcaaggcggcgcagaatattcactttgtgccgttgatgacgga

SEQ ID NO: 203686 - DNA, 75 bp, synthetic construct
  source 1..75: mol_type = other DNA
aatggctttgctggctggaatggtcaggcccgcatcgagcaaccgcaggaggggtacgccatcatcatggaaacg

SEQ ID NO: 203687 - DNA, 75 bp, synthetic construct
  source 1..75: mol_type = other DNA
tcgagcagccgcaggagggttatgccatcatcatggaaacgacgccacctgcaccatgttatttcatctttgttt

SEQ ID NO: 203688 - DNA, 75 bp, synthetic construct
  source 1..75: mol_type = other DNA
ccagtcgtgggaggcagcaatgcgacgcgccgggattcgctatcgcagagcataccagtcccgacacacgtatgc

SEQ ID NO: 203689 - DNA, 75 bp, synthetic construct
  source 1..75: mol_type = other DNA
cggtaacccgtattgaagggcatttacgcatcgattgcgaaatcgaaaatggcgtcgtttcgaaagcatgggctt

SEQ ID NO: 203690 - DNA, 75 bp, synthetic construct
  source 1..75: mol_type = other DNA
cgcgatgcatggatgattgtgcaacgtatttgtggcgtatgtacgaccacgcacgcgctgtcttccgttcgtgcg

SEQ ID NO: 203691 - DNA, 75 bp, synthetic construct
  source 1..75: mol_type = other DNA
aagaaaactcaccggatttattgtctggaaggtctcaacctgcgcagaaagcgtccccgcagacatgtcagtgcg

SEQ ID NO: 203692 - DNA, 75 bp, synthetic construct
  source 1..75: mol_type = other DNA
agcgaatttatctcgaaaacgctggatcgctgggcatatgaaaacagggtaacgatggacttctcccgccccggg

SEQ ID NO: 203693 - DNA, 75 bp, synthetic construct
  source 1..75: mol_type = other DNA
gaattggtctgcgccgtggctgccgtctgatgatgcagagtcgcacggtgtacaactaccgtagctgccgcgatg

SEQ ID NO: 203694 - DNA, 75 bp, synthetic construct
  source 1..75: mol_type = other DNA
gcgcaccgctcaacggcgtgatcctgacgctgaacgtggcggatctgactgcgcagtcccccgcggaacggctgg

SEQ ID NO: 203695 - DNA, 75 bp, synthetic construct
  source 1..75: mol_type = other DNA
ctggatgcgttctggacgaagcaactgccccgctggcggacaccgccagcaacccgtggcgctacaaaccgaccg

SEQ ID NO: 203696 - DNA, 75 bp, synthetic construct
  source 1..75: mol_type = other DNA
tattcacagcatcaacagtgccggggaagacggcagtcccgggctggcgtatgaccttcaggtgcttcgcacact

SEQ ID NO: 203697 - DNA, 75 bp, synthetic construct
  source 1..75: mol_type = other DNA
ctgcctgtgcggctttgcgtgcgcggctggctgaactgcgtgagacgctgggtattcgtttcccggtttatctgg

SEQ ID NO: 203698 - DNA, 75 bp, synthetic construct
  source 1..75: mol_type = other DNA
gtggagtacagctttgacgggcgtcgggtggtgctggaaatcaccgccgggcgagactttgacccggtgaatcgc

SEQ ID NO: 203699 - DNA, 75 bp, synthetic construct
  source 1..75: mol_type = other DNA
cgtttgataccctgcatccgcttgcatccgtggggagtagggtagtcactatcgttctgttactaatgttcctcg

SEQ ID NO: 203700 - DNA, 75 bp, synthetic construct
  source 1..75: mol_type = other DNA
atgctgctattggcggtatgagcagtcgtgatggtcaggacttctccaagattcagggacgtttctcaacgcgct

SEQ ID NO: 203701 - DNA, 75 bp, synthetic construct
  source 1..75: mol_type = other DNA
gaaccgcgaagtcagccacaatggcgtaacacgcaatgcactctctttctttgaagagaaaattgatgatgcact

SEQ ID NO: 203702 - DNA, 75 bp, synthetic construct
  source 1..75: mol_type = other DNA
aggagcaggagggccgacttgctggcgataatgtgccacctgtatggcttggggagcagcaactggcagaactga

SEQ ID NO: 203703 - DNA, 75 bp, synthetic construct
  source 1..75: mol_type = other DNA
gcgaggtccccactcgcaaccagacaagacgtagcccaaccggcggcgaggtcagcacagagccggtggtggtga

SEQ ID NO: 203704 - DNA, 75 bp, synthetic construct
  source 1..75: mol_type = other DNA
caccaatgacgttaataaaatatacagtataagtaatgaactgcggagagtattatctgcaattactgcattgaa

SEQ ID NO: 203705 - DNA, 75 bp, synthetic construct
  source 1..75: mol_type = other DNA
cagaggcgatgcgtgaagtggataactggatcagcatgagtattgatactcacaagccagtttatctgcgagaca

SEQ ID NO: 203706 - DNA, 75 bp, synthetic construct
  source 1..75: mol_type = other DNA
agcagtgcttattgataccgccgggcgctatgcccgacacgatgacggcggcgaaatcagcgcgacccagcgtaa

SEQ ID NO: 203707 - DNA, 75 bp, synthetic construct
  source 1..75: mol_type = other DNA
ttgataccctgaaaagtcaggctgaaatgacaagatttggtactcaatatcaaattgacgtcaaacttcgtgagt

SEQ ID NO: 203708 - DNA, 75 bp, synthetic construct
  source 1..75: mol_type = other DNA
gatgctcaatgagtattacacccagctcaccattgccgacagtgcgctggctgcgagcactctgccggggcgcat

SEQ ID NO: 203709 - DNA, 75 bp, synthetic construct
  source 1..75: mol_type = other DNA
cgccgcagttaaattcgctgctgacaatgctcaatgagtattacacccagctcaccatcgccgacagtgcattgg

SEQ ID NO: 203710 - DNA, 75 bp, synthetic construct
  source 1..75: mol_type = other DNA
gagctgcaaaacagcgttctgctgccgatgcaaaaagccagaaaacgcgctgaggtcagccagtcgattccggaa

SEQ ID NO: 203711 - DNA, 75 bp, synthetic construct
  source 1..75: mol_type = other DNA
attcgtctgcccgaagagggccgtacctggagcgatattgatttagtcgtccagactgaaaagttcctcaaagat

SEQ ID NO: 203712 - DNA, 75 bp, synthetic construct
  source 1..75: mol_type = other DNA
tcgatggcaacctgcttaaaacgctgttcctgatccgctatgtggaaacgctgaaaagcaccctggataacctgg

SEQ ID NO: 203713 - DNA, 75 bp, synthetic construct
  source 1..75: mol_type = other DNA
cgcctgggtgatgggccgggaaaacgcacaaaaaaaaacgactgatattgtgatgagtcagctaccggggcagga

SEQ ID NO: 203714 - DNA, 75 bp, synthetic construct
  source 1..75: mol_type = other DNA
ccggactcgccgccgctggcctggcgttatggtctttacagcgtcccgcctgtgatggagagcgtggcctccctg

SEQ ID NO: 203715 - DNA, 75 bp, synthetic construct
  source 1..75: mol_type = other DNA
ttttcctcgattcaaaatttgacgccactcagcttaacaacaccctacgcggcgtattttttaccagcgccgcac

SEQ ID NO: 203716 - DNA, 75 bp, synthetic construct
  source 1..75: mol_type = other DNA
tttcccgacgcgcactggcgattgtcggcgtggtgatgctggcgctgctggtctggtttatcggaccgctggtgg

SEQ ID NO: 203717 - DNA, 75 bp, synthetic construct
  source 1..75: mol_type = other DNA
gacggcaaagctgttgcaggatatccacccggaagagcggctggaaaaatcgctggtggatgaccgtttcgccgc

SEQ ID NO: 203718 - DNA, 75 bp, synthetic construct
  source 1..75: mol_type = other DNA
gggccgcgtaatggctcaatggcggaaatcaccgccagcccgcgcatccgccaggacacctcgacgttactgact

SEQ ID NO: 203719 - DNA, 75 bp, synthetic construct
  source 1..75: mol_type = other DNA
caggccacgggggccacggttctggttgtgcatcattccggcaaggatgagacgaaaggggcgcggggttccagt

SEQ ID NO: 203720 - DNA, 75 bp, synthetic construct
  source 1..75: mol_type = other DNA
cgttgctttggtgggaatgatgaaaatgattcccgtgatatgggcgcatttatccaggggtgtgacgcgataaag

SEQ ID NO: 203721 - DNA, 75 bp, synthetic construct
  source 1..75: mol_type = other DNA
ctactttctgaaaatttcgaattgctggaggaatggagcgaccagcttccacggcttagggaggcatgggaacgc

SEQ ID NO: 203722 - DNA, 75 bp, synthetic construct
  source 1..75: mol_type = other DNA
ccttcagcgcattaaaccaggacaaagggcagatttttgagcagggcgtgacggatgtatttaaaaaattatcct

SEQ ID NO: 203723 - DNA, 75 bp, synthetic construct
  source 1..75: mol_type = other DNA
cccacccgttgaactggagcgcatcgaggaggcaggcaacaagacggaaaaccataccgcgctatgggggtgcat

SEQ ID NO: 203724 - DNA, 75 bp, synthetic construct
  source 1..75: mol_type = other DNA
tctggatacgctggcgcgttgctttggtgggaatgatgaaaatgattcccgtgatatgggggcgtttatccgtgg

SEQ ID NO: 203725 - DNA, 75 bp, synthetic construct
  source 1..75: mol_type = other DNA
gggcgttatcagttaagcgaactggataacctccagattgttgatgatgggcgatacagggcgacggtgatacgc

SEQ ID NO: 203726 - DNA, 75 bp, synthetic construct
  source 1..75: mol_type = other DNA
aacaaagggggcgcgaggttccagcgcattccgcgctgcactggatgcagagtaccgaatcggccgggaaaattc

SEQ ID NO: 203727 - DNA, 75 bp, synthetic construct
  source 1..75: mol_type = other DNA
cgatggcggcggcattcaccctggtgccgattgttctcatcgcactctatctggcgtttgtgaaacgtctgggag

SEQ ID NO: 203728 - DNA, 75 bp, synthetic construct
  source 1..75: mol_type = other DNA
gacgctgacggggagttaatcacgtcgctggtggtggtggataagccgcgccctcccgttgaactggagcgcatc

SEQ ID NO: 203729 - DNA, 75 bp, synthetic construct
  source 1..75: mol_type = other DNA
atctgccggatacgacacgcaattagattacgtggtaaaggggattattccggcatcgtcgctatgcagcatata

SEQ ID NO: 203730 - DNA, 75 bp, synthetic construct
  source 1..75: mol_type = other DNA
atgaacaaccaaaatgattatattgaggccgctcagcaaattatagcatccttaggcctgcccagagcgcagcag

SEQ ID NO: 203731 - DNA, 75 bp, synthetic construct
  source 1..75: mol_type = other DNA
gttatctcctgcaccaaaatgaaggacgcggaggaactgaaagaggctgcatatgatttacgcgtggtggagctt

SEQ ID NO: 203732 - DNA, 75 bp, synthetic construct
  source 1..75: mol_type = other DNA
atcgaagatcaacgcaaaaaagctgaagctgagcaaagacgtcgtgaactcgaacagcagacacgcgaagaggaa

SEQ ID NO: 203733 - DNA, 75 bp, synthetic construct
  source 1..75: mol_type = other DNA
gaaatcttattgctcactgcaaggctgggcttggctggaaagttatcttttagtacccaaggcacagatctggcg

SEQ ID NO: 203734 - DNA, 75 bp, synthetic construct
  source 1..75: mol_type = other DNA
gggaaaagcaggaagaaaaaggccaccagcgcaaaacaaagctaccgatgagcgttggttctgccggatacgata

SEQ ID NO: 203735 - DNA, 75 bp, synthetic construct
  source 1..75: mol_type = other DNA
cttccggcgctggctgtacaagctggaaaaagacagggttatccgtatcgatggggatgatgtaacgccgctata

SEQ ID NO: 203736 - DNA, 75 bp, synthetic construct
  source 1..75: mol_type = other DNA
attccggcaaggatgaaacaaagggggcgcgtggttccagtgcatttcgtgcatcactggacgctgaataccgga

SEQ ID NO: 203737 - DNA, 75 bp, synthetic construct
  source 1..75: mol_type = other DNA
ccggcatggcacgatagccttgcaacctatttagccgagcgtgaaacgctggttacccgctatgctaaggagcgc

SEQ ID NO: 203738 - DNA, 75 bp, synthetic construct
  source 1..75: mol_type = other DNA
gatgtggtgctacatttcacggaaaaaaactggctgctactggtggagtctgtcaccagtcatgggccagtcgat

SEQ ID NO: 203739 - DNA, 75 bp, synthetic construct
  source 1..75: mol_type = other DNA
ggtatgggtggctgatgcaccttctcatcttattcacttcaacggagtgcgatttcttggcccctactctactga

SEQ ID NO: 203740 - DNA, 75 bp, synthetic construct
  source 1..75: mol_type = other DNA
agtgcagccacagccggttgcaaaacgtaccgtaacgattaacccaaccgatgccatggcaaagtcagtaacaac

SEQ ID NO: 203741 - DNA, 75 bp, synthetic construct
  source 1..75: mol_type = other DNA
cacccatgaaattcttatagaaacaaaccagcggacaaggcctgacgtacaaagtaatctccaggagctgctaaa

SEQ ID NO: 203742 - DNA, 75 bp, synthetic construct
  source 1..75: mol_type = other DNA
ggttaccttgatggtaacgttcccaaaggcatttgcctttacacgcctgatgaaactcaacgccactacctgaac

SEQ ID NO: 203743 - DNA, 75 bp, synthetic construct
  source 1..75: mol_type = other DNA
ttgccgcgccggtatggattgctgaacatcgacaaagcagtatgaataacctgaaagccgcctggcctgccgcct

SEQ ID NO: 203744 - DNA, 75 bp, synthetic construct
  source 1..75: mol_type = other DNA
tatctggttctgatgccaaacaacccgcgcgcgggtggcatttctcgccgtatcgaaggcgacgaccgtaccgaa

SEQ ID NO: 203745 - DNA, 75 bp, synthetic construct
  source 1..75: mol_type = other DNA
atatcaaacagcgtttgcacgacggcgaaatagtgtcgtttggtctcgacccctattgcatgatgctggagcgcg

SEQ ID NO: 203746 - DNA, 75 bp, synthetic construct
  source 1..75: mol_type = other DNA
gcctgctgacgtcacgtactcgcctgtatattaagggcaatggcattgttgatttgccgaagttgcaagaaatgg

SEQ ID NO: 203747 - DNA, 75 bp, synthetic construct
  source 1..75: mol_type = other DNA
ctatttcgcataacaaactgcacggcctgtcagtgcaggttgaaaccaatcacgtcaaattaccggcggtggtgg

SEQ ID NO: 203748 - DNA, 75 bp, synthetic construct
  source 1..75: mol_type = other DNA
gtaactgaacagccgcaggtgattaccgagtctgatgttgccgtagcccaggaagttgcagaacacgcagaaccg

SEQ ID NO: 203749 - DNA, 75 bp, synthetic construct
  source 1..75: mol_type = other DNA
cgctgcagtaactgaacagccgcaggtgattgccgaagctgatgttgccgtagcgcaggaagttgcagagcacgc

SEQ ID NO: 203750 - DNA, 75 bp, synthetic construct
  source 1..75: mol_type = other DNA
ccttcgaaggtaaaggtgccgcaggtggtcatacggcaacgcatcatgcctccgccgctcctgcgcgtccgcaac

SEQ ID NO: 203751 - DNA, 75 bp, synthetic construct
  source 1..75: mol_type = other DNA
ctccggaactggcctctggcaaagtctggatccgctatccggttgtacgtccgcaagatgtacaggttgaagagc

SEQ ID NO: 203752 - DNA, 75 bp, synthetic construct
  source 1..75: mol_type = other DNA
gtttgcggagcgtaaacgtccggaacaacctgcactggcgacttttgccatgccggatgtgccaccagctccagc

SEQ ID NO: 203753 - DNA, 75 bp, synthetic construct
  source 1..75: mol_type = other DNA
cagccacaggtgattgccgaggctgatgttgctgtagcacaggacgttgcagaacatgcggagccagtggttgaa

SEQ ID NO: 203754 - DNA, 75 bp, synthetic construct
  source 1..75: mol_type = other DNA
caatcaggtggtgcatttcgatttccgtaagctggatgtcttcagctttggcgagaatcaaaattgcctggtagg

SEQ ID NO: 203755 - DNA, 75 bp, synthetic construct
  source 1..75: mol_type = other DNA
agccgattcttgaaaaagtatcgcgtggatatttagttgatggtcgggtgtttgaatatagccgcaacgctttta

SEQ ID NO: 203756 - DNA, 75 bp, synthetic construct
  source 1..75: mol_type = other DNA
aaaatgcatcaggatgccgcgccgccggatagcgtagaagtcttctgttatagccagcatctgcgcggattaatc

SEQ ID NO: 203757 - DNA, 75 bp, synthetic construct
  source 1..75: mol_type = other DNA
ttactgaatatctgacggcaattgaagatttcacccgtctggatttagtgcgtcgctgcttctatttaaaagtgt

SEQ ID NO: 203758 - DNA, 75 bp, synthetic construct
  source 1..75: mol_type = other DNA
atggtctaaaaatcgtcattatgttgggaatgctggtgattattctgtgcggtatccgttttgccgccgatatca

SEQ ID NO: 203759 - DNA, 75 bp, synthetic construct
  source 1..75: mol_type = other DNA
acataaagtagttgaagagattatcgattctcccctttcggaagttgctgctttaattaaaatattacaatcttg

SEQ ID NO: 203760 - DNA, 75 bp, synthetic construct
  source 1..75: mol_type = other DNA
atatagagaagagtatttatctatatgggaagcagatcttgcacgctgggaaaaaataaaagcgcaagaatgtga

SEQ ID NO: 203761 - DNA, 75 bp, synthetic construct
  source 1..75: mol_type = other DNA
ttaagccaactggtgaaagagtggagttgggacgaatctcgcctgacgatgctggataaccgcgctaactggaag

SEQ ID NO: 203762 - DNA, 75 bp, synthetic construct
  source 1..75: mol_type = other DNA
tctacagtctgctgccgacattgttgcactatcaccatccgctaatgccgggttaccttgatggtaatgttccca

SEQ ID NO: 203763 - DNA, 75 bp, synthetic construct
  source 1..75: mol_type = other DNA
gctggaagcctattcctgggaatacccgaacccacgactgctggcgaaagatatcaaacagcgtttgcacgacgg

SEQ ID NO: 203764 - DNA, 75 bp, synthetic construct
  source 1..75: mol_type = other DNA
cacgtcaaattaccggcagtagtggatggctttgccagcgaagggatcatccagttcttcttcgaagaaacgcac

SEQ ID NO: 203765 - DNA, 75 bp, synthetic construct
  source 1..75: mol_type = other DNA
taaccgtgcgccgacaattgagtcgatcatcagccatcaaccgctggaatataaccgttacctgaacaaattggt

SEQ ID NO: 203766 - DNA, 75 bp, synthetic construct
  source 1..75: mol_type = other DNA
attgatcaggtgcgtgaagcgcacaacgaactgctcgatgcgatgatgcagagttaccgtaatctgatccgcttt

SEQ ID NO: 203767 - DNA, 75 bp, synthetic construct
  source 1..75: mol_type = other DNA
atccctgcagatttatatattgtttatgaaacacagcaggtgacgcccgcgatggttaagctgttggctgcattg

SEQ ID NO: 203768 - DNA, 75 bp, synthetic construct
  source 1..75: mol_type = other DNA
ctgccttgccgactggcaatcgccatttatgccgcgccgccggataaccggatcagagatctggataatatccct

SEQ ID NO: 203769 - DNA, 75 bp, synthetic construct
  source 1..75: mol_type = other DNA
tattgtggatggtaacactatctggcttattggtggagaacggaaaccaggtctcagaacaacagcagtatggtc

SEQ ID NO: 203770 - DNA, 75 bp, synthetic construct
  source 1..75: mol_type = other DNA
ttttactccaaggatgtagatgtccatttacttaatggactatgtaaaggattaattgctgatcggaacttaact

SEQ ID NO: 203771 - DNA, 75 bp, synthetic construct
  source 1..75: mol_type = other DNA
gtcaaaggtaaatacatcaccatcgaaaataacgatgcgctggctcagcttgctggtcatacgcgcaacgtagcc

SEQ ID NO: 203772 - DNA, 75 bp, synthetic construct
  source 1..75: mol_type = other DNA
ctggataaagcctattcaaaagagatatatcagctaataaaaaatgactggaaaaaagttggttctttgccggaa

SEQ ID NO: 203773 - DNA, 75 bp, synthetic construct
  source 1..75: mol_type = other DNA
cggatgcgtgccgacagttgcctcgctgggtttatgtgaaaggtgtttttaatcaggggctggataaccgccgtg

SEQ ID NO: 203774 - DNA, 75 bp, synthetic construct
  source 1..75: mol_type = other DNA
tgaaactgattgccgattacgaaggctgtcgcctgcagccgtatcagtgcagcgcgggtgtctggaccgacggca

SEQ ID NO: 203775 - DNA, 75 bp, synthetic construct
  source 1..75: mol_type = other DNA
gcagctgaagggctgatctccaacgtgctacgagtggagcgggcgatggaaaggtgtgtgaagcaacagccgccg

SEQ ID NO: 203776 - DNA, 75 bp, synthetic construct
  source 1..75: mol_type = other DNA
aaattactcaatcagcggcgctgggcagatgcgtgccgacagttgccgcgctggatttatgtgaaaggtgttttt

SEQ ID NO: 203777 - DNA, 75 bp, synthetic construct
  source 1..75: mol_type = other DNA
gccttgtcggggctgtgctggctattgctgccacgctgccgggttttcagcaacttcacacctccgtggaggggc

SEQ ID NO: 203778 - DNA, 75 bp, synthetic construct
  source 1..75: mol_type = other DNA
cggatgcatgccgacagttgccgcgctgggtttatgtaaaaggtgtgtttaatcaggggctgggtaaccgccgtg

SEQ ID NO: 203779 - DNA, 75 bp, synthetic construct
  source 1..75: mol_type = other DNA
aaaagcagtctcatatagagatgatgaaggggctaagttaaaaatcatttcagaagaaatgctttttcacgctct

SEQ ID NO: 203780 - DNA, 75 bp, synthetic construct
  source 1..75: mol_type = other DNA
attgttcagattgataaagaagagcgcggtaacaaaggcgcagcactgaccacctttatcagcctggcaggtagc

SEQ ID NO: 203781 - DNA, 75 bp, synthetic construct
  source 1..75: mol_type = other DNA
ttaaaggaagcgctggcaagccttgaactgcctgaaggcatggggcttatcgtgcgtactgccggcgtcggcaaa

SEQ ID NO: 203782 - DNA, 75 bp, synthetic construct
  source 1..75: mol_type = other DNA
cgaaagtactcgaactggcgcgccagcatatcgccgcactgggtcgcccggatttcagcagcaaaatcaaactgt

SEQ ID NO: 203783 - DNA, 75 bp, synthetic construct
  source 1..75: mol_type = other DNA
aatcagaaagtgcgttacgagcaaagcgtagccgaagaagcggtagtcgcaccggtagttgaagaaactgtcgct

SEQ ID NO: 203784 - DNA, 75 bp, synthetic construct
  source 1..75: mol_type = other DNA
gcgtcaggaccgtgcacgtattcaaatcagccatatttctcgctttggtctgctggaaatgtcccgtcagcggct

SEQ ID NO: 203785 - DNA, 75 bp, synthetic construct
  source 1..75: mol_type = other DNA
actgcaccagaacagcaagaagagaacaatgccgataaccgtgacaacggtggtatgccgcgtcgttctcgccgc

SEQ ID NO: 203786 - DNA, 75 bp, synthetic construct
  source 1..75: mol_type = other DNA
cgttatggtgtggctacccgaccttcatccatccacggtcgtggcccttaaccgtcgttcattacaggaagtttt

SEQ ID NO: 203787 - DNA, 75 bp, synthetic construct
  source 1..75: mol_type = other DNA
ttaccggaaccggaattaacaacgcccggtcaatgtatctgctgccggcaaaacgtcaggcaccgtttcagactg

SEQ ID NO: 203788 - DNA, 75 bp, synthetic construct
  source 1..75: mol_type = other DNA
cggaaggcccgccctttcatctctgtgccttctgccacgcctggcactgcctgaacggctacgctgccgcacagg

SEQ ID NO: 203789 - DNA, 75 bp, synthetic construct
  source 1..75: mol_type = other DNA
tgattttattatctctccgcagcatgtctccgggcgtgtaaaggggttggagagcctgactatcagcgaactttc

SEQ ID NO: 203790 - DNA, 75 bp, synthetic construct
  source 1..75: mol_type = other DNA
cgtgacgggacaaaccattaacccagcatcgagccggttgcaattaaattacggtgtaagtcgaagacgtggcta

SEQ ID NO: 203791 - DNA, 75 bp, synthetic construct
  source 1..75: mol_type = other DNA
atgcaacacagcattaaagacttatggttgtatccctttccggagatcgatgtggttcatactcaggaaccactg

SEQ ID NO: 203792 - DNA, 75 bp, synthetic construct
  source 1..75: mol_type = other DNA
gattttatttttgcatatggatgctgggcattaataattctcccattactctggctatatctaagaaccagggcg

SEQ ID NO: 203793 - DNA, 75 bp, synthetic construct
  source 1..75: mol_type = other DNA
cggccatgatgcgattgtgcgtcgcaggattgagcagcccgatgcgccaaaggataaccaaattcgtgtggtggc

SEQ ID NO: 203794 - DNA, 75 bp, synthetic construct
  source 1..75: mol_type = other DNA
gacggcgagccgggaagatcttcagcgagatgaaacctgggttgcggtgcaggaggcgttaaaagagtcgctgat

SEQ ID NO: 203795 - DNA, 75 bp, synthetic construct
  source 1..75: mol_type = other DNA
gcagcagccagcagctcggcacctcgggtggtatcgttaactcaagcttcgataataacaatctggtcatccctg

SEQ ID NO: 203796 - DNA, 75 bp, synthetic construct
  source 1..75: mol_type = other DNA
gcagactttcatatggaacaggaaccacgctgaccggctgcggtgtatcagcgaaggcatatgccgaaacagcta

SEQ ID NO: 203797 - DNA, 75 bp, synthetic construct
  source 1..75: mol_type = other DNA
agcgatcgttacggtaagaccggccttgcgatcccggcaaacggcgatggtgttcagggttacacgttgtctatt

SEQ ID NO: 203798 - DNA, 75 bp, synthetic construct
  source 1..75: mol_type = other DNA
gattactgtcagcagaaaatgcattactcaggaagaaatggatgaattatatgcattgtctgagagactgaaaga

SEQ ID NO: 203799 - DNA, 75 bp, synthetic construct
  source 1..75: mol_type = other DNA
atcgcagtcaggccgtcagattaccgaaagcggtcgctctgccagaggacgttaagaaagtagaaattattgcga

SEQ ID NO: 203800 - DNA, 75 bp, synthetic construct
  source 1..75: mol_type = other DNA
ggcaggagagtcctgggacagctggttcgatggcgacagtgtcagcgcagatttcatgaatgacagagaacaacc

SEQ ID NO: 203801 - DNA, 75 bp, synthetic construct
  source 1..75: mol_type = other DNA
ggataaacgtattagcaccgcagcgttaatgctggcgcggcaattcacctcgcaaatccaaaagaccaaaacgtc

SEQ ID NO: 203802 - DNA, 75 bp, synthetic construct
  source 1..75: mol_type = other DNA
taaataaacttcaaccaccgtggcgtgaagttgcccccgaaggcgtaaccatgcaccgcgcgctggtacagcgta

SEQ ID NO: 203803 - DNA, 75 bp, synthetic construct
  source 1..75: mol_type = other DNA
aacaaattcttgaacaggatgacgcggataaacgtattagcaccgcagcgttaatgctggcacggcaatttacct

SEQ ID NO: 203804 - DNA, 75 bp, synthetic construct
  source 1..75: mol_type = other DNA
gcagcagccagcagctcggcacttcgggtggtatcgttaactcaagcttcgataataacaatctggccatccctg

SEQ ID NO: 203805 - DNA, 75 bp, synthetic construct
  source 1..75: mol_type = other DNA
gaaaacctacggcatcacccgagaacagcaagatgcactggcgcaccgttcgcatcagcgtgctgctcaggcgtg

SEQ ID NO: 203806 - DNA, 75 bp, synthetic construct
  source 1..75: mol_type = other DNA
gcgctggaacgtgccggtttgacgatgagcgatctgacattgatcgatatgcacgaagcctttgcagctcagaca

SEQ ID NO: 203807 - DNA, 75 bp, synthetic construct
  source 1..75: mol_type = other DNA
cgtagcgagatccccgccgaagtgattgaacaactggtatttggtcaggttgtgcaaatgccggaagcccccaac

SEQ ID NO: 203808 - DNA, 75 bp, synthetic construct
  source 1..75: mol_type = other DNA
gaaaacctacggcatcacccgagaacagcaagatgcattagcgcaccgttcgcatcagcgtgccgctcaggcgtg

SEQ ID NO: 203809 - DNA, 75 bp, synthetic construct
  source 1..75: mol_type = other DNA
ttggcgtcagtaaaaaactggcgcgcgtgctggttgatgtcaacaaagcccgcacaatgagccagcgcctgaaac

SEQ ID NO: 203810 - DNA, 75 bp, synthetic construct
  source 1..75: mol_type = other DNA
cggaatgaatgtgcataccgatgcttacagcgtcagccgcgcttgcgctaccagtttccaggcggttgcaaacgt

SEQ ID NO: 203811 - DNA, 75 bp, synthetic construct
  source 1..75: mol_type = other DNA
attagggctggtaccgctgggatatctgcgcagctacgcatttaccgctatcgatgtctggcaggacatgttgct

SEQ ID NO: 203812 - DNA, 75 bp, synthetic construct
  source 1..75: mol_type = other DNA
gatggtggtaggcgaactgctggcacgcagcgagatccccgctgaagtgattgaacagctggtctttggtcaggt

SEQ ID NO: 203813 - DNA, 75 bp, synthetic construct
  source 1..75: mol_type = other DNA
agtgcgtagcggcagatgcgggaggggtaaaaaaagaggattttatcgcagttttcaaggatcgaaacttctggg

SEQ ID NO: 203814 - DNA, 75 bp, synthetic construct
  source 1..75: mol_type = other DNA
ataaacaaccgcttgtcgaagacaacaatattcgcggtaattcctcgcttgctgattacgcaaagttgcgtccgg

SEQ ID NO: 203815 - DNA, 75 bp, synthetic construct
  source 1..75: mol_type = other DNA
tcttctctcgcctgcgtttgcacgacttaatgcccgtaccacctgcggtagcagaatattctaccggcttttggg

SEQ ID NO: 203816 - DNA, 75 bp, synthetic construct
  source 1..75: mol_type = other DNA
gcgctggagagagcaggcctgacgatggccgatctgacattgattgatatgcatgaagcatttgccgcccagacg

SEQ ID NO: 203817 - DNA, 75 bp, synthetic construct
  source 1..75: mol_type = other DNA
atgatgattggcgaaggggcagaaaattttgcgtttgctcatggcatggagcgcgtctcaccggagattttctcc

SEQ ID NO: 203818 - DNA, 75 bp, synthetic construct
  source 1..75: mol_type = other DNA
ggcagccacgtccacaggcggaatgaccaataaattacccggacgagttggcgatagtcccttagtgggtgccgg

SEQ ID NO: 203819 - DNA, 75 bp, synthetic construct
  source 1..75: mol_type = other DNA
accaataaattacccggacgagttggcgatagtcccttagtgggggccggatgctacgccaataacgccagtgtg

SEQ ID NO: 203820 - DNA, 75 bp, synthetic construct
  source 1..75: mol_type = other DNA
ccatcggcattgtacctctgcaggaagttttgccgctcctgaccgagtacattgacgaaaagaatatttctcatc

SEQ ID NO: 203821 - DNA, 75 bp, synthetic construct
  source 1..75: mol_type = other DNA
tagtcatctgcgtaatccggttcttgccgcccggctggtgatggagcaaagcccgcatgtgatgatgattggcga

SEQ ID NO: 203822 - DNA, 75 bp, synthetic construct
  source 1..75: mol_type = other DNA
aaaattttgcgtttgctcatggcatggagcgcgtctcgccggagattttctccacgcctttgcgttatgaacaac

SEQ ID NO: 203823 - DNA, 75 bp, synthetic construct
  source 1..75: mol_type = other DNA
gcggccagtccgttgtaacagctgggaggcgatcatctgggattacttttactatgccgatgaagtaccaccagt

SEQ ID NO: 203824 - DNA, 75 bp, synthetic construct
  source 1..75: mol_type = other DNA
tctcgcattatttattgctgttattcttaacccgctggtgcaacacatggtccgctggcgagtgccgcgtgtact

SEQ ID NO: 203825 - DNA, 75 bp, synthetic construct
  source 1..75: mol_type = other DNA
atatttttattgctgctgacggtgctgtttatgctgctcgaagtgccacaattgcccggaaaatttcagcaaatg

SEQ ID NO: 203826 - DNA, 75 bp, synthetic construct
  source 1..75: mol_type = other DNA
agtcctacaggctcgcatgcacctcactcggggcggaaaaggttgaggtcttgcgtgccgctttcaggtcgcgat

SEQ ID NO: 203827 - DNA, 75 bp, synthetic construct
  source 1..75: mol_type = other DNA
tgcgacccttgatgagatgaaggctaatgactttatccttaccccagggcgctatgtcggggccgctgatgtgga

SEQ ID NO: 203828 - DNA, 75 bp, synthetic construct
  source 1..75: mol_type = other DNA
ctggcaaaggcttcgaagaaacactttgggataccgccaaccagctgcgtggcagcgtggaatcctccgaataca

SEQ ID NO: 203829 - DNA, 75 bp, synthetic construct
  source 1..75: mol_type = other DNA
cgttattttgttgatgagcacggccgccattcgcggtatgaccgtccgaaatacgatcttcctggaaccgttgcg

SEQ ID NO: 203830 - DNA, 75 bp, synthetic construct
  source 1..75: mol_type = other DNA
atcgccgatattttttggctgagccacattgatgtcaccaacagcggcatcattgccggtgtggggctggttttc

SEQ ID NO: 203831 - DNA, 75 bp, synthetic construct
  source 1..75: mol_type = other DNA
tttatctctcgcggtaattttgtcatactccccgattatggaataactctgaggttcacagatggttcgtcaata

SEQ ID NO: 203832 - DNA, 75 bp, synthetic construct
  source 1..75: mol_type = other DNA
tgatgccagcatcattaagtgatgataaaattatcaaacatatggcgcgcaggaccctcaaactgtttgtaaaaa

SEQ ID NO: 203833 - DNA, 75 bp, synthetic construct
  source 1..75: mol_type = other DNA
ttgcggatacggtcgggtggtttactctattttatccttgggcgatccctctgcatggcgatatggcgacactgt

SEQ ID NO: 203834 - DNA, 75 bp, synthetic construct
  source 1..75: mol_type = other DNA
tcggcatggcgcagatgctgatgcaactgatcattgcggtcggcatagtgatttataatttttttatcgtcaggc

SEQ ID NO: 203835 - DNA, 75 bp, synthetic construct
  source 1..75: mol_type = other DNA
cccagccgctattgcgctcactgggggccacgaagagcatcatcggctacgcaacggagttctattattattcgc

SEQ ID NO: 203836 - DNA, 75 bp, synthetic construct
  source 1..75: mol_type = other DNA
ccagaagcaggcgaagacacaattctcacattattaaatgacaaccagctggcccatgtttcgcgtcgcaaagtg

SEQ ID NO: 203837 - DNA, 75 bp, synthetic construct
  source 1..75: mol_type = other DNA
attttgcagaaaccgccagtattttcattgggtaaccccattcatgattcagaacaaaaaatcattgatgccggg

SEQ ID NO: 203838 - DNA, 75 bp, synthetic construct
  source 1..75: mol_type = other DNA
ctgcaaaaacagctcgatgttcctgtcttgctctctaacgtattgattgcacggctagctgcggaattactggtg

SEQ ID NO: 203839 - DNA, 75 bp, synthetic construct
  source 1..75: mol_type = other DNA
aatattgaatttcaggtagtaataaatttaagccctatttatttagataattttcgccatgatggagaaattaat

SEQ ID NO: 203840 - DNA, 75 bp, synthetic construct
  source 1..75: mol_type = other DNA
gcaggggttgatgaacctcttacaatgaaaatacgcggagataccggtagcgggatagttacgataaatgcaaca

SEQ ID NO: 203841 - DNA, 75 bp, synthetic construct
  source 1..75: mol_type = other DNA
ccatcggcattgtacctatgcaggaagttttaccgctcctgactgagtacattgacgaaaataacatttcccatc

SEQ ID NO: 203842 - DNA, 75 bp, synthetic construct
  source 1..75: mol_type = other DNA
caaaaggtgtatgactcggtggtgtcgtttgccttcaacgtggggacaggcaatgcctgcagttccacgctggtg

SEQ ID NO: 203843 - DNA, 75 bp, synthetic construct
  source 1..75: mol_type = other DNA
ggatttacccggcgatggcggcgaaccctgcactggcaggcatgattaccacgatggttacgcagggctatgact

SEQ ID NO: 203844 - DNA, 75 bp, synthetic construct
  source 1..75: mol_type = other DNA
tgcttctcctttaccggttttgacggcatcagcaacctgtcggaagaaaccaaagatgcagagcgcgtgatcccg

SEQ ID NO: 203845 - DNA, 75 bp, synthetic construct
  source 1..75: mol_type = other DNA
gaattaaaacaaataaaagcccaaggttacaaagcaccaaaggacatcacggattcattcggaaataacaaaaca

SEQ ID NO: 203846 - DNA, 75 bp, synthetic construct
  source 1..75: mol_type = other DNA
ataatatttctgctcgaggtgtcctttctgattctatcactgaatatctaaaaaacaaatttcaactcgaagcaa

SEQ ID NO: 203847 - DNA, 75 bp, synthetic construct
  source 1..75: mol_type = other DNA
ggtgaagagctggatgcagatacctggcgggccacgctgcatattgaggtgtttttaccggcacaggtaccggat

SEQ ID NO: 203848 - DNA, 75 bp, synthetic construct
  source 1..75: mol_type = other DNA
tccaccccgcttgttgccgggcaaccgaaacaggatgtcaccgacgtgctgtataccgcttttattctgcgataa

SEQ ID NO: 203849 - DNA, 75 bp, synthetic construct
  source 1..75: mol_type = other DNA
aaagcaagcgatcgctttggatcccgattctggtattcattaccctcgcggcctgtgccagcgcaggttacagct

SEQ ID NO: 203850 - DNA, 75 bp, synthetic construct
  source 1..75: mol_type = other DNA
ggttggcgcgattgccctgctggcaatcaactttgacctggtaatggcaacggcgctgattaactttggtgcgct

SEQ ID NO: 203851 - DNA, 75 bp, synthetic construct
  source 1..75: mol_type = other DNA
acttcccggatatctctcgttttaaagatccggatgcgtcacagcctgaaatcatgctgtacgttgcgggtaaag

SEQ ID NO: 203852 - DNA, 75 bp, synthetic construct
  source 1..75: mol_type = other DNA
tgacgacaaagcgcagcaacgcgtcgtgccctccccggtcttctatgcgctggatacctttacggtcaatctggg

SEQ ID NO: 203853 - DNA, 75 bp, synthetic construct
  source 1..75: mol_type = other DNA
atgaaagatgtacttaagaacctccctccccttgtcgatactgtaactgttaaggttgctaacgttactaagtac

SEQ ID NO: 203854 - DNA, 75 bp, synthetic construct
  source 1..75: mol_type = other DNA
agccaatagagatcttatccatgtttttgtaactcacggcgagagtcataagctagcctctgttaaaccaattat

SEQ ID NO: 203855 - DNA, 75 bp, synthetic construct
  source 1..75: mol_type = other DNA
gctgtcgaggtatttaataaacataatataacgtttaagtttattaaaaaaaattcagatctatcctttatcaag

SEQ ID NO: 203856 - DNA, 75 bp, synthetic construct
  source 1..75: mol_type = other DNA
cgaagacattgctgagatgcctgagctggcttcaaccgtgacctccatgccggcttataccagtaaggctttagt

SEQ ID NO: 203857 - DNA, 75 bp, synthetic construct
  source 1..75: mol_type = other DNA
gctcagctattttcacaacggcgctgaaaattgccagagaatataaatcaacatggtcgaaaaactccacccgca

SEQ ID NO: 203858 - DNA, 75 bp, synthetic construct
  source 1..75: mol_type = other DNA
cagcacaacatggctgaccatttaccactaccgaaaatcaggccgctgggtattcgaatgggatgatctgttcgc

SEQ ID NO: 203859 - DNA, 75 bp, synthetic construct
  source 1..75: mol_type = other DNA
agccaatagagatcttattcatatttttgtgactcatggggagagtcataagttagcctcggttaaaccaattat

SEQ ID NO: 203860 - DNA, 75 bp, synthetic construct
  source 1..75: mol_type = other DNA
atgcgtggctcgccagtgaaaggcctctcagacaataaaccttattcatttcacccgtcaggccgcgtcttctcc

SEQ ID NO: 203861 - DNA, 75 bp, synthetic construct
  source 1..75: mol_type = other DNA
agggactgtcgcttattgaaatagcgatggtaattattttgtctgtggtatttatttctggcgggagttatatta

SEQ ID NO: 203862 - DNA, 75 bp, synthetic construct
  source 1..75: mol_type = other DNA
acaacaacttattgaaaaaaggatagaaacagaaaaaaaatatcagcatattcagtgggatgcaatgcaccccgg

SEQ ID NO: 203863 - DNA, 75 bp, synthetic construct
  source 1..75: mol_type = other DNA
tcgtaaagcgattgaagacgctttagacgctcgcccggagctggggcaggataacatacctgtgctgttttttgt

SEQ ID NO: 203864 - DNA, 75 bp, synthetic construct
  source 1..75: mol_type = other DNA
gcgctaaaaaccgcactctcaattcccctcactcctgaagaacaggagcttgaagctcaaatggttgtctcatga

SEQ ID NO: 203865 - DNA, 75 bp, synthetic construct
  source 1..75: mol_type = other DNA
gatcccaaagaggataactttgaggaatgcacccacattgctacccaatattggcaggctatttttagtgtaatg

SEQ ID NO: 203866 - DNA, 75 bp, synthetic construct
  source 1..75: mol_type = other DNA
agcccaaaggaacttattcagatcgcggaatattttcgtacgccgctggcgacagccgtaaccggcggtaaccgt

SEQ ID NO: 203867 - DNA, 75 bp, synthetic construct
  source 1..75: mol_type = other DNA
cagatatcggtgatcatcatcggcctgattttcggtctggcgatgttctatgaagtggcctttatcatgctggca

SEQ ID NO: 203868 - DNA, 75 bp, synthetic construct
  source 1..75: mol_type = other DNA
tcccggcgatcattatgatctccaccaccatcgccaatatctggctggtaaaagatacccctgcgtgggaagtgg

SEQ ID NO: 203869 - DNA, 75 bp, synthetic construct
  source 1..75: mol_type = other DNA
cgcctggcgaccggtcagggggttgtttcagcaatgactgccgccgggattattagcgcagcaatccttgatcca

SEQ ID NO: 203870 - DNA, 75 bp, synthetic construct
  source 1..75: mol_type = other DNA
gtcaaacttcgaaagaccgccaagatgaagggctgttaaaagattccacgaaaataactgtaggctttcgaaaag

SEQ ID NO: 203871 - DNA, 75 bp, synthetic construct
  source 1..75: mol_type = other DNA
aaaggaaagagcgacggctgctctgaatgctcagcagttgaggtgatcgacgaaattgctaggtcaggaggactt

SEQ ID NO: 203872 - DNA, 75 bp, synthetic construct
  source 1..75: mol_type = other DNA
cgtaatcatttcggcattggccgtgaaaatacttactttcctgaacaatcaggatattggctcgctggtggcgct

SEQ ID NO: 203873 - DNA, 75 bp, synthetic construct
  source 1..75: mol_type = other DNA
tcgccatggcaaacaagctggcacgaacagtatgggcgataacggcccatgaccgtaagtatgtcaggaaccacg

SEQ ID NO: 203874 - DNA, 75 bp, synthetic construct
  source 1..75: mol_type = other DNA
acattatttatccacggagcaagagcggtggcattagtagctaaagagcctggcccgtggataaccgaactgaaa

SEQ ID NO: 203875 - DNA, 75 bp, synthetic construct
  source 1..75: mol_type = other DNA
caaaccagaattgtggcgcaagggggtcttcaagaaccttccatacgcgatgagatatgccgagtgatggaaggt

SEQ ID NO: 203876 - DNA, 75 bp, synthetic construct
  source 1..75: mol_type = other DNA
tatgaataatctgccctctttcggcgtttcgattctggtgccgctgatcccggcgatcattatgatctctaccac

SEQ ID NO: 203877 - DNA, 75 bp, synthetic construct
  source 1..75: mol_type = other DNA
tccgcgccccgacgatgggcgaaatgtataacgattctaagcacttctcgattggtcgcttctataccaactatt

SEQ ID NO: 203878 - DNA, 75 bp, synthetic construct
  source 1..75: mol_type = other DNA
tctggatggtattgtggcctggtccagccgcgatcgtggtgatttacgccagagcaatggtgaaaccgcgccgaa

SEQ ID NO: 203879 - DNA, 75 bp, synthetic construct
  source 1..75: mol_type = other DNA
cttcggcattactgtatggcagtggcgcgctgggaggggttatctcctacgatacggtcgatgcaaaagatttat

SEQ ID NO: 203880 - DNA, 75 bp, synthetic construct
  source 1..75: mol_type = other DNA
cggatggttacgcagggctatgagtatcgtcgtgatgacgatatggcattgtggagttctgcagatctgacttat

SEQ ID NO: 203881 - DNA, 75 bp, synthetic construct
  source 1..75: mol_type = other DNA
aatatatctctactattaacccggataccgtcaccagtaccctgaatattccaatcgcccacagtggcttctctg

SEQ ID NO: 203882 - DNA, 75 bp, synthetic construct
  source 1..75: mol_type = other DNA
tgccgatgcaaaagtttactggtcggaagtccgtattaatgcgcagaacacggggagttccggcgagtatcgtga

SEQ ID NO: 203883 - DNA, 75 bp, synthetic construct
  source 1..75: mol_type = other DNA
gagcttgatcagtggatggaaagccggatttatccggtgatgattgcgatcccggcactggctggactgattacc

SEQ ID NO: 203884 - DNA, 75 bp, synthetic construct
  source 1..75: mol_type = other DNA
cgcgatcccggcactggcaggactgattaccacgatggttacgcagggctatgagtatcgtcgtgatgacgatat

SEQ ID NO: 203885 - DNA, 75 bp, synthetic construct
  source 1..75: mol_type = other DNA
atgtcacgtccgcaatttacctcgttgcgtttgagtttgttggccttggctgtttctgccaccttgccaacgttt

SEQ ID NO: 203886 - DNA, 75 bp, synthetic construct
  source 1..75: mol_type = other DNA
gaaccaaaaaatccgcagaccgttgaagcttctgacagcagtaatccgatggttgatcgttcaacgattcaacgt

SEQ ID NO: 203887 - DNA, 75 bp, synthetic construct
  source 1..75: mol_type = other DNA
gcttttgctactgaaaccatgaccgttacggcaacggggaatgcccgtagttccttcgaagcgcctatgatggtc

SEQ ID NO: 203888 - DNA, 75 bp, synthetic construct
  source 1..75: mol_type = other DNA
cggcgtactgaacggcgtggacgagaaaatatggagtccagagacggacttacttttagcctcgcgttacacccg

SEQ ID NO: 203889 - DNA, 75 bp, synthetic construct
  source 1..75: mol_type = other DNA
cttgctgatacggtttctgactgttctcttgagaaccttgcagatggcgtcgccagtgggtttgtctttgaagat

SEQ ID NO: 203890 - DNA, 75 bp, synthetic construct
  source 1..75: mol_type = other DNA
cgggcaaatctctttcctgaaagccggattgtattacgctgaccacattaccgcggttagtccgacctacgctcg

SEQ ID NO: 203891 - DNA, 75 bp, synthetic construct
  source 1..75: mol_type = other DNA
ttgatctccatctccagcccaaaagagctgattcagattgcggagtacttccggactccactggcgactgcggtt

SEQ ID NO: 203892 - DNA, 75 bp, synthetic construct
  source 1..75: mol_type = other DNA
aggtgttaattcgccagcgttgtaatgcgttgattgttcattcgaaagcgttaagcgacgacgaactggcgcagt

SEQ ID NO: 203893 - DNA, 75 bp, synthetic construct
  source 1..75: mol_type = other DNA
aatccccatcggaaaaacaaattattatagggctggcgattctctcgctctgcgttttctgctggcttgcggtaa

SEQ ID NO: 203894 - DNA, 75 bp, synthetic construct
  source 1..75: mol_type = other DNA
tcagaattgggcgggctatacgattctctcttgatgatattgttgagtgggaaaatgcacatcgtcaaaacaaac

SEQ ID NO: 203895 - DNA, 75 bp, synthetic construct
  source 1..75: mol_type = other DNA
atgaatttgtcaagaaagctatgacaaacgaagattatctaatgaatacaaaaaaatggtataatgccagaagaa

SEQ ID NO: 203896 - DNA, 75 bp, synthetic construct
  source 1..75: mol_type = other DNA
gtttccagacattatcaagaacttattgataacaatcaggatttaaaaacaatttttcttggactaacaaaagaa

SEQ ID NO: 203897 - DNA, 75 bp, synthetic construct
  source 1..75: mol_type = other DNA
ggggttggcatttacctgattgatgcaccgcatctctacgatcgtcccggaagcccgtatcacgataccaactta

SEQ ID NO: 203898 - DNA, 75 bp, synthetic construct
  source 1..75: mol_type = other DNA
gcgttgacgctcgcgtactgttgcctgcatttcccgatattcgccgtggcgtgaccgatgcaaaggtggtatctc

SEQ ID NO: 203899 - DNA, 75 bp, synthetic construct
  source 1..75: mol_type = other DNA
ggaacgtctggctgcattcatctacaacctatcccgtcgttttgcccaacgcggcttctcccctcgtgaattccg

SEQ ID NO: 203900 - DNA, 75 bp, synthetic construct
  source 1..75: mol_type = other DNA
gatatccagaacgacaactcggtttcctcccagcggatcgccgacgcccgcatttcctatgccggacgcggcgcg

SEQ ID NO: 203901 - DNA, 75 bp, synthetic construct
  source 1..75: mol_type = other DNA
cgtcgatacacacagtgaagttctgatattcgaagtgattccggctgacgattttcttcagcaacagctacaaat

SEQ ID NO: 203902 - DNA, 75 bp, synthetic construct
  source 1..75: mol_type = other DNA
gcatggtcggggcggcgctggccatcgccgccacgctgcccggttttcagtcgctccatacctccgttgaggggc

SEQ ID NO: 203903 - DNA, 75 bp, synthetic construct
  source 1..75: mol_type = other DNA
ggtgtatgtcaacggcacaaaaaacaaagggctggagaaccgccgcgcgcgggaacgggcttactgcgtaaaggg

SEQ ID NO: 203904 - DNA, 75 bp, synthetic construct
  source 1..75: mol_type = other DNA
tattgctgccacgctgccggggtttcagcagcttcacacctccgaggagggactgaaactgatcgccgattatga

SEQ ID NO: 203905 - DNA, 75 bp, synthetic construct
  source 1..75: mol_type = other DNA
ctggatgttgcggagaaggataaccgtgcgctgaaaagagagcgtcgggaactaaaagagcgtttaacagagctg

SEQ ID NO: 203906 - DNA, 75 bp, synthetic construct
  source 1..75: mol_type = other DNA
atagacgaatgtctggcagataaaattatggcgtaccttgaaacggattttccacgcttacatcgccggattatg

SEQ ID NO: 203907 - DNA, 75 bp, synthetic construct
  source 1..75: mol_type = other DNA
ggacgtcattctggtgcccagccgttttgaaccgtgcggcttaacgcaactttatggattgaagtacggtacgct

SEQ ID NO: 203908 - DNA, 75 bp, synthetic construct
  source 1..75: mol_type = other DNA
tgaattactgaatgcaaagattggatttgcaacttcaggaaacagccaacagcaacaaagtaacaatcatcaaaa

SEQ ID NO: 203909 - DNA, 75 bp, synthetic construct
  source 1..75: mol_type = other DNA
ccgcgactttgacggcagcgccacttcccagcagcagaacagcctgcgtggggagatcaccgtttccgtccatgc

SEQ ID NO: 203910 - DNA, 75 bp, synthetic construct
  source 1..75: mol_type = other DNA
atggcacattcgattactgtaagactaaacaaacctgcaagagagtttcatgccggggaaaatatcggattcaac

SEQ ID NO: 203911 - DNA, 75 bp, synthetic construct
  source 1..75: mol_type = other DNA
tttacaacttcaggaaatggcccgcagcagcaaagtagtaaccagcagaacactcctgtatacgacgattccatc

SEQ ID NO: 203912 - DNA, 75 bp, synthetic construct
  source 1..75: mol_type = other DNA
tacggtatggaaggtttgttgcaacagcgtcaccgtgaagggcgtctttccggcgtactgaacggcgtggacgag

SEQ ID NO: 203913 - DNA, 75 bp, synthetic construct
  source 1..75: mol_type = other DNA
actttgccctgctgatggccgcacaggatgcagaacgtatggaagggaccgcagggggaaacagcgtgtccaccc

SEQ ID NO: 203914 - DNA, 75 bp, synthetic construct
  source 1..75: mol_type = other DNA
atggcaacgcaggtccgttccctctactttgccctgctgatggccgcacaggatgcagaacgtatggaagggacc

SEQ ID NO: 203915 - DNA, 75 bp, synthetic construct
  source 1..75: mol_type = other DNA
tgacatccaggatgaagaaatacgaaacacattaaaaacgatgtttgaggaagaatttgaaaaaacagttaaggg

SEQ ID NO: 203916 - DNA, 75 bp, synthetic construct
  source 1..75: mol_type = other DNA
ctgcagcgccacgatggtctgatgggtgagtcctgggtggacggtaaccagatcaccatccagatggaaagcaaa

SEQ ID NO: 203917 - DNA, 75 bp, synthetic construct
  source 1..75: mol_type = other DNA
tcatcttcaacaaccaccgctggcgctgccccatgaggatgcccgccacgctgaagtgtgacgaccccagcgaag

SEQ ID NO: 203918 - DNA, 75 bp, synthetic construct
  source 1..75: mol_type = other DNA
aagtacgcaacgacgtttccttatatcaactatcttgatgagattggtgcctactacacagagcgaatcaccgca

SEQ ID NO: 203919 - DNA, 75 bp, synthetic construct
  source 1..75: mol_type = other DNA
aggttatctatcgcgcgtcacagggcgcacacgtcggcgtggtgaccgttcatccgaagtcagagaaatatgtct

SEQ ID NO: 203920 - DNA, 75 bp, synthetic construct
  source 1..75: mol_type = other DNA
cgtgcagcgacgtttaacctttacacaccatcgggcttatccggggttagtcaacgtcccgcgccactgggtgcg

SEQ ID NO: 203921 - DNA, 75 bp, synthetic construct
  source 1..75: mol_type = other DNA
agaaagtgccggagctgtttattgtcgagttgccgaaagatgaagctggctggaaagcggcaggggaagtgccgt

SEQ ID NO: 203922 - DNA, 75 bp, synthetic construct
  source 1..75: mol_type = other DNA
gcactgaaaattgcccgggagtttaaatcgacctggtcaaaaacagcaacgcgcaccgaggatgatgtgatacgc

SEQ ID NO: 203923 - DNA, 75 bp, synthetic construct
  source 1..75: mol_type = other DNA
acgagcggatgaagccgaccatcctgatcagcaaccagaccaaagaagagttggcagcgttcgtgagtgagcgtg

SEQ ID NO: 203924 - DNA, 75 bp, synthetic construct
  source 1..75: mol_type = other DNA
tgcgtccttctggcgcgtcgtttaccggcgagaccattgagcgtgtgaatatccataccggcgaggtcgaggtta

SEQ ID NO: 203925 - DNA, 75 bp, synthetic construct
  source 1..75: mol_type = other DNA
tcattattcaagtcattagttcttttttttatttattcagtaagagctcttgggaaggtgcgaataagcggggaa

SEQ ID NO: 203926 - DNA, 75 bp, synthetic construct
  source 1..75: mol_type = other DNA
attctccttttgttgttcaatctgtgaatgatgcgataatttatgatctaagcacgaatgaacaacttgaagatc

SEQ ID NO: 203927 - DNA, 75 bp, synthetic construct
  source 1..75: mol_type = other DNA
ccatcgataatatgattcgtaatgtgcgcaatgctttttcagggctatatggttctgataatcaaaagcaggaaa

SEQ ID NO: 203928 - DNA, 75 bp, synthetic construct
  source 1..75: mol_type = other DNA
acaagccgaacaggccattttgcatgaaaacgccgaaagccagaatgagccagtaagcgccctggaaaaacctga

SEQ ID NO: 203929 - DNA, 75 bp, synthetic construct
  source 1..75: mol_type = other DNA
accgcccacggcgcggggatcgcgttgtttatgacggacaacaatggacggtcacacggcatgaacgctttaacg

SEQ ID NO: 203930 - DNA, 75 bp, synthetic construct
  source 1..75: mol_type = other DNA
tctctggttgttttttcacagcagtacgttccggcacgccatgatgaagttgtgtttgacggtcgcttactggtg

SEQ ID NO: 203931 - DNA, 75 bp, synthetic construct
  source 1..75: mol_type = other DNA
acgccgaagcggcctacgccattcagcgcatcaacgtgcagtacgacgtggcgcgcggccgtcgtgtggtcgggc

SEQ ID NO: 203932 - DNA, 75 bp, synthetic construct
  source 1..75: mol_type = other DNA
gcgcgctgctttctttgctgttactggggatcaccttcacattaccagactggttagggacactattgattcttt

SEQ ID NO: 203933 - DNA, 75 bp, synthetic construct
  source 1..75: mol_type = other DNA
ccctctacgctcatttctcgctacggtacgctgcccatcgtcggctggagtatgttgattggtggtcttatcctg

SEQ ID NO: 203934 - DNA, 75 bp, synthetic construct
  source 1..75: mol_type = other DNA
cgtatagaaggacagacaacagccacgaatactgcaacactgatgcagaacacggggacaaaatttgccggcagg

SEQ ID NO: 203935 - DNA, 75 bp, synthetic construct
  source 1..75: mol_type = other DNA
gaattggtaaaaaaacaacctgcttattgcattggaaataaactagctgcataccgaatttcaaataattctctt

SEQ ID NO: 203936 - DNA, 75 bp, synthetic construct
  source 1..75: mol_type = other DNA
gcacgctgccagtggttggctggagtatgctcattggtggtctgatcctgctgcccttttatgccggacaaggaa

SEQ ID NO: 203937 - DNA, 75 bp, synthetic construct
  source 1..75: mol_type = other DNA
ccctcaacgctcattgcccgttacggcacgctgccagtggttggctggagtatgctcattggtggtctgatcctg

SEQ ID NO: 203938 - DNA, 75 bp, synthetic construct
  source 1..75: mol_type = other DNA
tggtggcgatgtctctgtggcataaccatccgcagaagacaaagctgccgtccatgaatgaagccattacgcaga

SEQ ID NO: 203939 - DNA, 75 bp, synthetic construct
  source 1..75: mol_type = other DNA
gatatcgcacagaaatctggctacagcagacgcaatatccagcttctgttccgaaatttcatgcatgtgcctttg

SEQ ID NO: 203940 - DNA, 75 bp, synthetic construct
  source 1..75: mol_type = other DNA
aacaaggtattcaggggcaggggagtttccaggcccagtggcaggagtcacataaacgcctttcatttaaccaaa

SEQ ID NO: 203941 - DNA, 75 bp, synthetic construct
  source 1..75: mol_type = other DNA
cattacacccggttcaatttcaaagaaaaacccactcaatcccttccccgctggtgaaatccagctacgtaattt

SEQ ID NO: 203942 - DNA, 75 bp, synthetic construct
  source 1..75: mol_type = other DNA
acatcagcctgactaccagaccagactggccgacatcgaacgacggttacagcaactcgaggcaatacaagcaca

SEQ ID NO: 203943 - DNA, 75 bp, synthetic construct
  source 1..75: mol_type = other DNA
ctggtttgaacagcatctggcggcagacttcgagcagtcatgggatgatcctgtttgggtctgcggcagcaatgg

SEQ ID NO: 203944 - DNA, 75 bp, synthetic construct
  source 1..75: mol_type = other DNA
gtgtagaaaacagagtaggccaggggcgacccgttccaatcttattgggtgaaatgaaaatagggtcaaatgttg

SEQ ID NO: 203945 - DNA, 75 bp, synthetic construct
  source 1..75: mol_type = other DNA
ttggcttttggttggccttacggtggcgagcgtcgcttattctatttatatgtatcgcaacatgaagccgcaaac

SEQ ID NO: 203946 - DNA, 75 bp, synthetic construct
  source 1..75: mol_type = other DNA
tcgctggcattaaagcgcacactggctttgctggctacaccgatacccttcactaacacacttatgaataaattt

SEQ ID NO: 203947 - DNA, 75 bp, synthetic construct
  source 1..75: mol_type = other DNA
ggagaatacattcgcaaacgaaggctttgtcgtgccgccattcttgtccggctctccgcgaaatctatgcttgat

SEQ ID NO: 203948 - DNA, 75 bp, synthetic construct
  source 1..75: mol_type = other DNA
ccgcgttttttggcggatgatccccaggcagttgctgatttgtcgaattttgaaaatggacaagaattacctcca

SEQ ID NO: 203949 - DNA, 75 bp, synthetic construct
  source 1..75: mol_type = other DNA
ccaccggggccttttaccatcaacgatatctatgccgcaggtaatagtggtgacttgcaggtaacgatcaaagag

SEQ ID NO: 203950 - DNA, 75 bp, synthetic construct
  source 1..75: mol_type = other DNA
gcgtgcgcgtggctatattccaccagagttgtgggattcaggtattaatgccggattactcaattataacttcag

SEQ ID NO: 203951 - DNA, 75 bp, synthetic construct
  source 1..75: mol_type = other DNA
ttcgctgatacaacatacagtcgaatgaatggctacaacatcgaaacacaggatggagttattcaggttaagccg

SEQ ID NO: 203952 - DNA, 75 bp, synthetic construct
  source 1..75: mol_type = other DNA
tgggcgctctgtccgtggatatgacgcaggctaatgccacacttcccgatgacagtcagcatgacggacaatcag

SEQ ID NO: 203953 - DNA, 75 bp, synthetic construct
  source 1..75: mol_type = other DNA
gtgcaaaccggctatgccgggggaggcgatggtaatagcggaagtacaggctacgccacgctgaattatcgcggt

SEQ ID NO: 203954 - DNA, 75 bp, synthetic construct
  source 1..75: mol_type = other DNA
ctgcacggcctctttgcccgccagcgttatgctacgctttccggcaccaacacgccgcgtgattttgtcgaattt

SEQ ID NO: 203955 - DNA, 75 bp, synthetic construct
  source 1..75: mol_type = other DNA
cagcagggcgggtttagcgcgcagccgtgggactgggcattttatgccgaacaggtacggcaaccaatacattta

SEQ ID NO: 203956 - DNA, 75 bp, synthetic construct
  source 1..75: mol_type = other DNA
agccattatgcatatttaaacctacagagtgggttaaatattggtgcgtggcgtttacgcgacaataccacctgg

SEQ ID NO: 203957 - DNA, 75 bp, synthetic construct
  source 1..75: mol_type = other DNA
cgtatgacagtcgggaattatgtaaaacaggcgcaactattgttttgtatgaaactatcaagcttaaaatagaac

SEQ ID NO: 203958 - DNA, 75 bp, synthetic construct
  source 1..75: mol_type = other DNA
ggcaggcagaacaggcgggatccggcgacaacctgctggtgagcgtggaggatctcgtcagaaccggcgcgtttc

SEQ ID NO: 203959 - DNA, 75 bp, synthetic construct
  source 1..75: mol_type = other DNA
ggacaggtcaaggccgtactcctaaagcgatcgctgctgctatcgaagctggtaaaacgctggaagactttgcga

SEQ ID NO: 203960 - DNA, 75 bp, synthetic construct
  source 1..75: mol_type = other DNA
catgtcgtactggctgtgcaggccttcgtcgaggccaaaactcagcaagcggaatttactcatttaatctggcag

SEQ ID NO: 203961 - DNA, 75 bp, synthetic construct
  source 1..75: mol_type = other DNA
gggtttgcaaaaatcctgacgaagaggacattgtcgaatccattcttggcgaaattatccctggcgcgctgaggt

SEQ ID NO: 203962 - DNA, 75 bp, synthetic construct
  source 1..75: mol_type = other DNA
atgatgcaaaaagggtgcgaataccgggagcaggaagaagcccgtcgcctgcagcaccggattcctggcctcagt

SEQ ID NO: 203963 - DNA, 75 bp, synthetic construct
  source 1..75: mol_type = other DNA
atgagtgaagctcttaaggcactgaacaatattcgtacacttcgcgcacaggctcgtgaaacagatctggcaact

SEQ ID NO: 203964 - DNA, 75 bp, synthetic construct
  source 1..75: mol_type = other DNA
ggaagaaagtgccgtccgtaaagaacaagaagaacgtcaggctaagctggaagcgttccgccagaaactgttaga

SEQ ID NO: 203965 - DNA, 75 bp, synthetic construct
  source 1..75: mol_type = other DNA
tgatagacgccgtatagagtacgacatttttcttctcgtagaagagctccacgtactggacatcattcgtaaggg

SEQ ID NO: 203966 - DNA, 75 bp, synthetic construct
  source 1..75: mol_type = other DNA
gaatgagagaagaatcactcgctggggaagaggaagcccactccaggatcctgaaaatacaggagcccttacgct

SEQ ID NO: 203967 - DNA, 75 bp, synthetic construct
  source 1..75: mol_type = other DNA
aggtcattcttaatgcggttgacaagctcacccgtccatttcgatctgcgcaggccagttcaagagaactggctg

SEQ ID NO: 203968 - DNA, 75 bp, synthetic construct
  source 1..75: mol_type = other DNA
gacgcggaggaggaaaattgagtttgaaatttttcttgccgttgaggaactgcacgtgctgggtcagatagccga

SEQ ID NO: 203969 - DNA, 75 bp, synthetic construct
  source 1..75: mol_type = other DNA
cacccgtgatgaaaagcgtctgacgggctttggtagacaaaatcctctccagaatccggagaataccggcgctct

SEQ ID NO: 203970 - DNA, 75 bp, synthetic construct
  source 1..75: mol_type = other DNA
gtttcttcagcacaataccgagaaatgaaagatgcgggtgtcagactcgttgtaccatcaactttacataaaaaa

SEQ ID NO: 203971 - DNA, 75 bp, synthetic construct
  source 1..75: mol_type = other DNA
aggcttttattgaagagcaaaaaaaatggtttgaacagtacctgtctgctgattttgctcaaacatggaatgatc

SEQ ID NO: 203972 - DNA, 75 bp, synthetic construct
  source 1..75: mol_type = other DNA
gcatctggctcttaaggagcgccgaaaggctgcttctcttattgtgcacagaaaacccccagctaggctgggggt

SEQ ID NO: 203973 - DNA, 75 bp, synthetic construct
  source 1..75: mol_type = other DNA
acgcaggcgctcaaacttgttacaagttctctctgctcaagagattctgtctggagagataaaagtggaaggtga

SEQ ID NO: 203974 - DNA, 75 bp, synthetic construct
  source 1..75: mol_type = other DNA
agataactctgacatcagcagacgtctacgtgataaagggttgccggattattttcttggcattcgctacattgg

SEQ ID NO: 203975 - DNA, 75 bp, synthetic construct
  source 1..75: mol_type = other DNA
cgggacaaaacatccaaagcccttagcaagcgaggtgtgctgcccgttcaagaaataccagggccgaaaaacagc

SEQ ID NO: 203976 - DNA, 75 bp, synthetic construct
  source 1..75: mol_type = other DNA
atggcaaacgctaccaagttatgaaccgccccgggtttcctggagagtgttttatctgtgaactcaggctgccag

SEQ ID NO: 203977 - DNA, 75 bp, synthetic construct
  source 1..75: mol_type = other DNA
aacatttcacgctgacaggccggatggatgagctacccaatctgatcgccaaaaaacaggcgttacagaaagcat

SEQ ID NO: 203978 - DNA, 75 bp, synthetic construct
  source 1..75: mol_type = other DNA
gatgctgagcaaaatcggcagaccgctgacgctgccatgaatctgcgtcttgcgtcacaaactggagatccactg

SEQ ID NO: 203979 - DNA, 75 bp, synthetic construct
  source 1..75: mol_type = other DNA
gccattcctgaatgctttgatgaacaaatttttagggaatgttgagcctgactgttcagtttttagtaaatacca

SEQ ID NO: 203980 - DNA, 75 bp, synthetic construct
  source 1..75: mol_type = other DNA
cactgggtagagccgctagctgttccactggtagagagcattttcaccacagtaaaacaacttacgacctcaatg

SEQ ID NO: 203981 - DNA, 75 bp, synthetic construct
  source 1..75: mol_type = other DNA
accaggtgatcctaacatagccaactacaaggggcgttgcgttaagattcaaaaattagtaaatcatcacgcttt

SEQ ID NO: 203982 - DNA, 75 bp, synthetic construct
  source 1..75: mol_type = other DNA
atgaaaaaaaatatagagaattttgacacttttatcgtagaacagaaagcttggttcgaagagaatctggcagca

SEQ ID NO: 203983 - DNA, 75 bp, synthetic construct
  source 1..75: mol_type = other DNA
cagttgttcatgaaagcgatgctggtactcgtctatcgagggagaaatcgcagtatttcctctgcggttgctgtc

SEQ ID NO: 203984 - DNA, 75 bp, synthetic construct
  source 1..75: mol_type = other DNA
ggattctgccagattacaaacttcttctcctgccgtaacatcaacggtcccgtctcagccaaatgaaaatggtga

SEQ ID NO: 203985 - DNA, 75 bp, synthetic construct
  source 1..75: mol_type = other DNA
cgtttatgcaagtatgcaaatgctaaacagtgatcttttcttagaacaagtcgttagtgctgcagaatacaaagt

SEQ ID NO: 203986 - DNA, 75 bp, synthetic construct
  source 1..75: mol_type = other DNA
gttgtcgatatttctgctttccctggaatgtcaggctctccggcattctatgtcacgcacagtggttatcttaca

SEQ ID NO: 203987 - DNA, 75 bp, synthetic construct
  source 1..75: mol_type = other DNA
caccgcggcgcaaggctatccagttccgctcctatatggccgccggcggataggcggagcgattatttctgccgg

SEQ ID NO: 203988 - DNA, 75 bp, synthetic construct
  source 1..75: mol_type = other DNA
tctctggattttagctcatatattattgaggctataagagagaagcttgaacgtgacggtgcaataggtcaataa

SEQ ID NO: 203989 - DNA, 75 bp, synthetic construct
  source 1..75: mol_type = other DNA
aggctaagaacctcaaggccataccgctgtcttattttgatgctcatgcagaactcaaagcgacaagtaaaacat

SEQ ID NO: 203990 - DNA, 75 bp, synthetic construct
  source 1..75: mol_type = other DNA
tccatgtcgcccgtcgggagctacaactcgacgacgacacctaccgtgcctttctgatgcagaacacgggcaaaa

SEQ ID NO: 203991 - DNA, 75 bp, synthetic construct
  source 1..75: mol_type = other DNA
cacgctggcctggtgtcacggggaatcgttgcaggttgtgctcgaaacgctcaaacagtggcatatgcgctgcat

SEQ ID NO: 203992 - DNA, 75 bp, synthetic construct
  source 1..75: mol_type = other DNA
tcaagcagtggcatatccgctgtattcgtgaagccttttcccgtcacgggcttccgttgccagtcagtccgtccg

SEQ ID NO: 203993 - DNA, 75 bp, synthetic construct
  source 1..75: mol_type = other DNA
gccatgaaagaacgcggctttaagaagctgaataaacatccacgtcgccgctttaaggggcatgtcacgccccgc

SEQ ID NO: 203994 - DNA, 75 bp, synthetic construct
  source 1..75: mol_type = other DNA
tcgtgaagccttttcccgtcacgggcttccattgccggtcagtccgtccgggcgtgaactgcgcggctatgatgc

SEQ ID NO: 203995 - DNA, 75 bp, synthetic construct
  source 1..75: mol_type = other DNA
ctcggttttcctcattatgccgcatggaaaatcgccgatcagatggcaaaaacacctgaagcagcacttaacttt

SEQ ID NO: 203996 - DNA, 75 bp, synthetic construct
  source 1..75: mol_type = other DNA
gagcagttgaaaaggcttaaacaatatcactgtgacgaggcgcaagggtatttcatcgggaagcctgtcgcgctt

SEQ ID NO: 203997 - DNA, 75 bp, synthetic construct
  source 1..75: mol_type = other DNA
acgctaccggaggatattttgaagggggaactgagagaactaaatttcaatttaaacaatgaattaacttcttag

SEQ ID NO: 203998 - DNA, 75 bp, synthetic construct
  source 1..75: mol_type = other DNA
atggaagtagggcgtgtaaacaaaacgctatatctcctcaattatattgatgatgaagattatcgtcggcggatc

SEQ ID NO: 203999 - DNA, 75 bp, synthetic construct
  source 1..75: mol_type = other DNA
tgtgcaaatacggtaaccccaacgtgctgaccatcgacatcggtacttcgcagctggcgcaggcgaccagtgcgc

SEQ ID NO: 204000 - DNA, 75 bp, synthetic construct
  source 1..75: mol_type = other DNA
ctctggatatgttctatgaagagctggaacgcgtgcagaaaactcacggtccgagcgccttgctgaccgccagcg

SEQ ID NO: 204001 - DNA, 75 bp, synthetic construct
  source 1..75: mol_type = other DNA
catcacgtcggcgttttctggcacagcttggcggcttaactgtcgccgggatgctgggaccgtcactgttaacgc

SEQ ID NO: 204002 - DNA, 75 bp, synthetic construct
  source 1..75: mol_type = other DNA
acggtgaattattcgcgcgggtagatgctgtctggcaacgccgtgaatccctggggcttgatagtgaatccatcc

SEQ ID NO: 204003 - DNA, 75 bp, synthetic construct
  source 1..75: mol_type = other DNA
aactgtttattgcgggctggacgcgagcggaaaaaaatgatggcaatgatacccgcgctatcattcaacgtctgg

SEQ ID NO: 204004 - DNA, 75 bp, synthetic construct
  source 1..75: mol_type = other DNA
aagtactgaatacagaagctgcgaccctgaccagccagtttaaccagcggttactggcagcaaataaatccggcg

SEQ ID NO: 204005 - DNA, 75 bp, synthetic construct
  source 1..75: mol_type = other DNA
gtgttgatgttcctcgtcatcgtgctgacggtggtgcagttccgctatgttgaaagcaaggtacgttaccaatga

SEQ ID NO: 204006 - DNA, 75 bp, synthetic construct
  source 1..75: mol_type = other DNA
aatgccagcctgttcaacaaagggtatgagatgagcgaactgcttagcgccgcacttctcgatatgcgctggcat

SEQ ID NO: 204007 - DNA, 75 bp, synthetic construct
  source 1..75: mol_type = other DNA
gaattaaacacggtgttgaatgaaggtgtattctggaccgcgaatcagctcttcggtattaagtttgtcgaacgt

SEQ ID NO: 204008 - DNA, 75 bp, synthetic construct
  source 1..75: mol_type = other DNA
ttggattgacggggagcatacggatctgattccgttctccccgtcgaagtttgagaagtggatggaagacagtaa

SEQ ID NO: 204009 - DNA, 75 bp, synthetic construct
  source 1..75: mol_type = other DNA
aacattgtcgagagaggggcaccggcgacagctgtacacgccagagagattgtattgcaagtctatcgctgggct

SEQ ID NO: 204010 - DNA, 75 bp, synthetic construct
  source 1..75: mol_type = other DNA
atggtatttttgagaggaaacccaaccagaccatgctgactgataccaagctgcgcaacctcaagccaaaggaca

SEQ ID NO: 204011 - DNA, 75 bp, synthetic construct
  source 1..75: mol_type = other DNA
ctggtttatatcaggcccttcaaaatggacatgctcaagctattaagagttatggtaacttagttctggatacta

SEQ ID NO: 204012 - DNA, 75 bp, synthetic construct
  source 1..75: mol_type = other DNA
atgggagcaggactaagagagataataaaaaaggtatataacgatactcgatttacagatcttacaaaatctcag

SEQ ID NO: 204013 - DNA, 75 bp, synthetic construct
  source 1..75: mol_type = other DNA
ctggtttgggtattcactgatatatactgcatggactttaatgtatgagattatattttactttattttttcatt

SEQ ID NO: 204014 - DNA, 75 bp, synthetic construct
  source 1..75: mol_type = other DNA
cgtggtttctacccgatggttgcagcacaacgcatcggcgaagagtatgagctgaagattgataaagcgccgcag

SEQ ID NO: 204015 - DNA, 75 bp, synthetic construct
  source 1..75: mol_type = other DNA
ttcaataaccaatggtgggatcttagcgttcaggcaacgatcgccgggaagctttgggatcatctggaagagcga

SEQ ID NO: 204016 - DNA, 75 bp, synthetic construct
  source 1..75: mol_type = other DNA
cgtggtttctacccgatggttgccgctcagcgccttggtgaagagtatcaactgaagattgataaagcgtcgcag

SEQ ID NO: 204017 - DNA, 75 bp, synthetic construct
  source 1..75: mol_type = other DNA
tggcgcggcgtgaagactggcgtggtctgttagcttttagcccggaaaaaccagggactaccgaagcgcaatgta

SEQ ID NO: 204018 - DNA, 75 bp, synthetic construct
  source 1..75: mol_type = other DNA
ccgtgtgcgaatggcacttggcaccggcgatcgtcgcggcctgaatacctggctggcgcgtttgccgatggaagc

SEQ ID NO: 204019 - DNA, 75 bp, synthetic construct
  source 1..75: mol_type = other DNA
atcaaaatggagatattaatacgattcagtctttttttgactcactaataatgttagatatatcaaaggatttta

SEQ ID NO: 204020 - DNA, 75 bp, synthetic construct
  source 1..75: mol_type = other DNA
aataaatcaccggatgaagaagtcaaactacgacgtcatcatttagccagatgtatgaagaatttggtgatgctg

SEQ ID NO: 204021 - DNA, 75 bp, synthetic construct
  source 1..75: mol_type = other DNA
taaaaaattgtttggatgttctcccagagaatatcggcaccgtgatttttgggatctaacaaatattttaccccc

SEQ ID NO: 204022 - DNA, 75 bp, synthetic construct
  source 1..75: mol_type = other DNA
ggcgcatacatccgcaaacgaagactttgtcgggcagccattcttgtcagacttactgccaaatcaatgcttgat

SEQ ID NO: 204023 - DNA, 75 bp, synthetic construct
  source 1..75: mol_type = other DNA
ttttcttatgtctggttgtgctgtgcataatgatgagacaagtatcggtaaatttggtcttgcatataaaagtaa

SEQ ID NO: 204024 - DNA, 75 bp, synthetic construct
  source 1..75: mol_type = other DNA
ggttttattacaatgaaaacttcgtcgaaatcgatagcaataacattgtttgcgaaatttttatccccgttcgtc

SEQ ID NO: 204025 - DNA, 75 bp, synthetic construct
  source 1..75: mol_type = other DNA
cccaaaaaaccctgtcctgctggccactggcgttcagtgccggtcttctcggtatcggacagaacggtctgctgg

SEQ ID NO: 204026 - DNA, 75 bp, synthetic construct
  source 1..75: mol_type = other DNA
tgagctggtggattttaaaatgaactctctcgatattcaattacaggctgtttttgaaaaagtgacaggtattta

SEQ ID NO: 204027 - DNA, 75 bp, synthetic construct
  source 1..75: mol_type = other DNA
gcgatcagtcatagacatgatcatgttgtcaaattatacggaaagttatttaaaaaacttgataccagtccatat

SEQ ID NO: 204028 - DNA, 75 bp, synthetic construct
  source 1..75: mol_type = other DNA
agctcctggagtggattgagtgtaatctcgatcaccctatctcaatcgaagatatcgcacagaaatctggctaca

SEQ ID NO: 204029 - DNA, 75 bp, synthetic construct
  source 1..75: mol_type = other DNA
tatgaaagggttgggcctggcaatttccatgtcggggatggtggcttgtggcatgttgttctgccttgcttccgg

SEQ ID NO: 204030 - DNA, 75 bp, synthetic construct
  source 1..75: mol_type = other DNA
ggcttctggctggaaaaaatcgccggatattgaggattatcaggaacgcccggcgaatggctgggatattcgtgc

SEQ ID NO: 204031 - DNA, 75 bp, synthetic construct
  source 1..75: mol_type = other DNA
tggccttcaccagcatgttcagcctcagcaccctgttaaatccggcatacgccgaagagcaggaaaaggcgctga

SEQ ID NO: 204032 - DNA, 75 bp, synthetic construct
  source 1..75: mol_type = other DNA
tgccacagcctctcacccgcgtatagttttccatccacggctggaaaatgtcgagattggttccattctgaatgc

SEQ ID NO: 204033 - DNA, 75 bp, synthetic construct
  source 1..75: mol_type = other DNA
atggttctggaaagtcagggcgaatatgactcacaatgggcggtaatttgttccattgctccaaagactggctgt

SEQ ID NO: 204034 - DNA, 75 bp, synthetic construct
  source 1..75: mol_type = other DNA
gatgaaggcattcctgcggatagtctggaaggactgcgaaaggctggggttgaagtgattctggtcggggaatga

SEQ ID NO: 204035 - DNA, 75 bp, synthetic construct
  source 1..75: mol_type = other DNA
tacaccaacgttcatgagttaattccgtggcgcacgctgtcgggacgccagcagctctatcaggatcatccgtgg

SEQ ID NO: 204036 - DNA, 75 bp, synthetic construct
  source 1..75: mol_type = other DNA
aagcgcttaacttcctgacgccacaccagaaatggggtattcactccacctacagcgaaaaccagttaatgctga

SEQ ID NO: 204037 - DNA, 75 bp, synthetic construct
  source 1..75: mol_type = other DNA
atggttctggaaagtcagggcgaatatgactcacaatgggcggcaatttgttccattgctccaaagattggctgt

SEQ ID NO: 204038 - DNA, 75 bp, synthetic construct
  source 1..75: mol_type = other DNA
atggggcgcgtatttcagaccggcgtcgagcgtgtgctctttctgtttctgaatgattttattgaacaatttcca

SEQ ID NO: 204039 - DNA, 75 bp, synthetic construct
  source 1..75: mol_type = other DNA
tatttaataaccttgataacttatcatatattcagaggacttcttttcggggtaacgacacactatacaatgaaa

SEQ ID NO: 204040 - DNA, 75 bp, synthetic construct
  source 1..75: mol_type = other DNA
aagttactcacgaagacctggtgaaaaacaggcctcgctcccctgtcagaccacctatacccgcaaccgccaaaa

SEQ ID NO: 204041 - DNA, 75 bp, synthetic construct
  source 1..75: mol_type = other DNA
gttccattgccccaaagattggctgtacaccagagactctgcgtgtgtgggttcgtcagcatgagcgggttaccg

SEQ ID NO: 204042 - DNA, 72 bp, synthetic construct
  source 1..72: mol_type = other DNA
atgactaaaaatactcgtttttcccccgaagtccgtcagcgggcgattcgtatggttctggaaagtcaggat

SEQ ID NO: 204043 - DNA, 75 bp, synthetic construct
  source 1..75: mol_type = other DNA
tacgggcggttcactgcgtgtctggggacgccagcatgagcgggataccgggagcggtgatggtgggctcaccag

SEQ ID NO: 204044 - DNA, 75 bp, synthetic construct
  source 1..75: mol_type = other DNA
caccggaaaccaacggccatgtagcggtaaaagcctggcaggcgctgggcgagatcaccgggcgtgaacatactc

SEQ ID NO: 204045 - DNA, 75 bp, synthetic construct
  source 1..75: mol_type = other DNA
catgctgccgggtaaatcgaccccgcaggaaattattgaatccgttgagtatggtatctatgcgccgaacttcgg

SEQ ID NO: 204046 - DNA, 75 bp, synthetic construct
  source 1..75: mol_type = other DNA
agtaacgaagccggtgaaaggcgcgacgttgattggttccggtatcgaaaccatgcagcagatttcgatggttgg

SEQ ID NO: 204047 - DNA, 75 bp, synthetic construct
  source 1..75: mol_type = other DNA
ggggcggtgatgaagggctcaccaccgttgaacgtcagcgtctgaaagagctggaacgtgaaaatcgtgaactgc

SEQ ID NO: 204048 - DNA, 75 bp, synthetic construct
  source 1..75: mol_type = other DNA
cagactggggagaaatgttcggagagcatgtgctggcaacagcgatcctggaccggctgctacatcactcaacca

SEQ ID NO: 204049 - DNA, 75 bp, synthetic construct
  source 1..75: mol_type = other DNA
tacgccagagactctgcgcgtctgggttcgccagcatgagcgggataccgggggcggtgatggtgggctcaccac

SEQ ID NO: 204050 - DNA, 75 bp, synthetic construct
  source 1..75: mol_type = other DNA
ggagcggtgatggtgggctcaccaccgctgaacgtcagcgtctgaaagagctggaacgtgaaaatcgtgaactgc

SEQ ID NO: 204051 - DNA, 75 bp, synthetic construct
  source 1..75: mol_type = other DNA
gcaactctatcaggatcatccgtggatgcgtgcttttggtgaaagtctggtggcttatcgcccgcctatcgacac

SEQ ID NO: 204052 - DNA, 75 bp, synthetic construct
  source 1..75: mol_type = other DNA
cgactggcgcaaaggcgaatgcgatctgattccaggtaaaaccgcgcccaatattgtggcggtggaacgcgacta

SEQ ID NO: 204053 - DNA, 75 bp, synthetic construct
  source 1..75: mol_type = other DNA
ggtaaaagcctggcaggcgctgggcgagatcaccgggcgtgaacatactcatctggcgctacacaaagaggatga

SEQ ID NO: 204054 - DNA, 75 bp, synthetic construct
  source 1..75: mol_type = other DNA
tacttcctcaactactgccgccgctacagtgatatgccgatgctggtaatgctggaggcgcgtgaagatggcagc

SEQ ID NO: 204055 - DNA, 75 bp, synthetic construct
  source 1..75: mol_type = other DNA
tgtttgtctggcgttctaacctgcttggctcctccggcaaaggccacgagtatatgcagaaatatctgctgggga

SEQ ID NO: 204056 - DNA, 75 bp, synthetic construct
  source 1..75: mol_type = other DNA
cgcatgggttggctaccttccgcgccgcaactggggcgtaacccgctcgggctgaaagccgaagccgataaggcc

SEQ ID NO: 204057 - DNA, 75 bp, synthetic construct
  source 1..75: mol_type = other DNA
atgtctgataatcgttcccggcatgatcgcctggcggttcgcttatcactcattatcagccgactgatgaccgga

SEQ ID NO: 204058 - DNA, 75 bp, synthetic construct
  source 1..75: mol_type = other DNA
ccgcgtatttcaaagcctgattgacgccagaaagaaacctgcttttatctctgctgatttccgtgacaggctggc

SEQ ID NO: 204059 - DNA, 75 bp, synthetic construct
  source 1..75: mol_type = other DNA
ctgtatgaccggtgatccgcaacagcgtcatgatgctgtgtaccggtttgaagcctgtatctggaaaatgaacgg

SEQ ID NO: 204060 - DNA, 75 bp, synthetic construct
  source 1..75: mol_type = other DNA
gaacacatcgatgccggtatcactctcgctaatgccattaactttctagtggaaaagtacgaactggttcgtatc

SEQ ID NO: 204061 - DNA, 75 bp, synthetic construct
  source 1..75: mol_type = other DNA
gtggagcttgagtatatacgcagctgcgtctccacggcattggctgatattcattatcgccagcgtggcatccta

SEQ ID NO: 204062 - DNA, 75 bp, synthetic construct
  source 1..75: mol_type = other DNA
gtgctgaagcaggaattagaggtaaaaacgccctaccgggccatgaatcacccggtcattggagtagtaaccaaa

SEQ ID NO: 204063 - DNA, 75 bp, synthetic construct
  source 1..75: mol_type = other DNA
accgcgctcggtttaccgatagcgtttgtgctggtggcgttgagcctggtgtattggtatgacagtcaacattaa

SEQ ID NO: 204064 - DNA, 75 bp, synthetic construct
  source 1..75: mol_type = other DNA
tgattttactggctgtgccgtttacctttagcgccccgcgctcaccggggatgggcagccgtcttgctgtgggcg

SEQ ID NO: 204065 - DNA, 75 bp, synthetic construct
  source 1..75: mol_type = other DNA
ccgttaccgcgctcggtttaccggtagcgtttgtgttggtagcgttgattctggtgtattggtatgacaggcaac

SEQ ID NO: 204066 - DNA, 75 bp, synthetic construct
  source 1..75: mol_type = other DNA
tactttttctgtccgtcagcttaatcattacatccattatttgcaggaaaccgggcaacccagcagcgaataccg

SEQ ID NO: 204067 - DNA, 75 bp, synthetic construct
  source 1..75: mol_type = other DNA
ggcagttatcgaaaaacagtgagcttaccgccattcgcagcacggggttttctatcttccgtattgcactggtgg

SEQ ID NO: 204068 - DNA, 75 bp, synthetic construct
  source 1..75: mol_type = other DNA
ccgttgctgcactcggtttacctatggcatttgtgctggcggcgttgagcctggtgtattggtatgacagacaac

SEQ ID NO: 204069 - DNA, 75 bp, synthetic construct
  source 1..75: mol_type = other DNA
gatcgcagagggtttagctggcaagaacaaacgccatatctcacgattattgatatcatgagagcccgtcgcgat

SEQ ID NO: 204070 - DNA, 75 bp, synthetic construct
  source 1..75: mol_type = other DNA
ctgcagtaacgatatccttcgccaggcttccgcttattttgcgaaggcggagttcgaccgcctctggaaaaaata

SEQ ID NO: 204071 - DNA, 75 bp, synthetic construct
  source 1..75: mol_type = other DNA
gtgtcgttaagggtatgggcagtggcaggggggatgatgctgatgtgtggatgggcaaaatatgctatttccgat

SEQ ID NO: 204072 - DNA, 75 bp, synthetic construct
  source 1..75: mol_type = other DNA
atgggcaaaatatgctatttccgatgacttaataaaggagaatattattcattttcaagtatatgtaaatgaacc

SEQ ID NO: 204073 - DNA, 75 bp, synthetic construct
  source 1..75: mol_type = other DNA
tcaaacatatggcgcgcaggaccctcaaactgtttgtaaaaaatgaaacgccgccaaaagttactcacgaagacc

SEQ ID NO: 204074 - DNA, 75 bp, synthetic construct
  source 1..75: mol_type = other DNA
ctaatccggagtcgatctccggcaaaatccagacggtacgcagagaggcgaaatgtctgcactgtgcgaaatgtt

SEQ ID NO: 204075 - DNA, 75 bp, synthetic construct
  source 1..75: mol_type = other DNA
gaaactgccggagacgcgccagccagcaagctgttaccgctggcgaaattgtgcgatgaagtgttgttcgattta

SEQ ID NO: 204076 - DNA, 75 bp, synthetic construct
  source 1..75: mol_type = other DNA
gaagcgggttaccgacgaacgggacatattaaaaaagccgtggcgtacttcgcaaagctgtccgactgaggtacg

SEQ ID NO: 204077 - DNA, 75 bp, synthetic construct
  source 1..75: mol_type = other DNA
gattgccgatgcccggaccggactgcaggccttaacccactcgctcagggagtatcgcagcggctggggagagga

SEQ ID NO: 204078 - DNA, 75 bp, synthetic construct
  source 1..75: mol_type = other DNA
attgcggggtgatctcgaccagttgatagagtccgatccgaaactgcgggcgttacgtccccatctcaaaatcga

SEQ ID NO: 204079 - DNA, 75 bp, synthetic construct
  source 1..75: mol_type = other DNA
gatggcctcgatatattcctggtgatcaggaaacggtcgatagtcatttagaacaattattacgcgacggctata

SEQ ID NO: 204080 - DNA, 75 bp, synthetic construct
  source 1..75: mol_type = other DNA
gcataccgcagaggaatggtcgcggttatacgcggcgggaatggttcagatgatggtggtattttcaatgagaat

SEQ ID NO: 204081 - DNA, 75 bp, synthetic construct
  source 1..75: mol_type = other DNA
agattgccagccatccggaagtcatcttctgtacctttggcgacgccatgcgcgtgccggggaaacaggggtcgc

SEQ ID NO: 204082 - DNA, 75 bp, synthetic construct
  source 1..75: mol_type = other DNA
gtgaactattctgcctgtaaatggtatgaagcgacctccgcacattttatcggtggcagaagtggaggttctatt

SEQ ID NO: 204083 - DNA, 75 bp, synthetic construct
  source 1..75: mol_type = other DNA
gcaataaagtgaactactccgcctgtaagtggtatcaatcatctgtagcaatgaatcacttcattggcgggaaaa

SEQ ID NO: 204084 - DNA, 75 bp, synthetic construct
  source 1..75: mol_type = other DNA
gcttatgaacttcatcggtgtccggaggcgaatcgcgcaataatccaggttgccagtcagtttaacctcctggaa

SEQ ID NO: 204085 - DNA, 75 bp, synthetic construct
  source 1..75: mol_type = other DNA
ctgcgtataccggatgaaccgccccgccgctggtttgaccgtggtgttctgcgggaggtggtccgggaagcccgg

SEQ ID NO: 204086 - DNA, 75 bp, synthetic construct
  source 1..75: mol_type = other DNA
gggtggcagaagatgcgcggcgtatcagggcggcgctgaccacaaccggtcagacgttgctgacccgccagacgc

SEQ ID NO: 204087 - DNA, 75 bp, synthetic construct
  source 1..75: mol_type = other DNA
ccgggtacgtcatgacaggtacaagaatgtacggcatcggagatggtgttgatgaagagcacgtcgatgcttact

SEQ ID NO: 204088 - DNA, 75 bp, synthetic construct
  source 1..75: mol_type = other DNA
cgacagggaatatcttacagatcgaaattccttattcattactatcctcgttaatcactacccgtgaaggtgaat

SEQ ID NO: 204089 - DNA, 75 bp, synthetic construct
  source 1..75: mol_type = other DNA
atgaactcgttgccagccaccccgatctttataacgcctacgaccaattattcctctactaccagcgctgcggta

SEQ ID NO: 204090 - DNA, 75 bp, synthetic construct
  source 1..75: mol_type = other DNA
cgtgctggtgggaaaagctcccgaattatggcgtcggttcctttcgatgggaatccctgcttctttagccttgaa

SEQ ID NO: 204091 - DNA, 75 bp, synthetic construct
  source 1..75: mol_type = other DNA
cgcagagggggcagactcaaacctgtcaactcaacgctctggcggacatggacagagccattggcattgggggga

SEQ ID NO: 204092 - DNA, 75 bp, synthetic construct
  source 1..75: mol_type = other DNA
aagcaaccctgctggctgcggtgctaaattatcacgacacaggtaatcccagagtctatctgactctggttggtg

SEQ ID NO: 204093 - DNA, 75 bp, synthetic construct
  source 1..75: mol_type = other DNA
agaaaacgacaaattggcctatgcacatctggcgtttttcaccaatacagctccggtggattgccgccagatccg

SEQ ID NO: 204094 - DNA, 75 bp, synthetic construct
  source 1..75: mol_type = other DNA
cattaccgcgctggagctgctgccggtggcgcattttgccagcgaaccacggcttcagcggctggggctgtcgaa

SEQ ID NO: 204095 - DNA, 75 bp, synthetic construct
  source 1..75: mol_type = other DNA
cttcgagttaaaagttaccgaaacagaatcggacaacgcctcaatccactccactgtacagtacgatctgattgg

SEQ ID NO: 204096 - DNA, 75 bp, synthetic construct
  source 1..75: mol_type = other DNA
ttgttcatgacattaacgtactgacagttgtggccagcgaaagttacaaggacttcgtgaccgccttgcagaagg

SEQ ID NO: 204097 - DNA, 75 bp, synthetic construct
  source 1..75: mol_type = other DNA
cccgaacgtgttcgttatctgcacgctcaagcatagtgataacaccatttcacgtcgtcaggaggtcgggcgcgg

SEQ ID NO: 204098 - DNA, 75 bp, synthetic construct
  source 1..75: mol_type = other DNA
gctctctgttttgcaggagctgcaacgggggctgaacgcgccctttacgctgcggcaaatcgatgaggccgagtt

SEQ ID NO: 204099 - DNA, 75 bp, synthetic construct
  source 1..75: mol_type = other DNA
gtgccgtcgcctcagccggtgcctatgtattgtggtatacccttttaccctccctcggctctattaccgccagta

SEQ ID NO: 204100 - DNA, 75 bp, synthetic construct
  source 1..75: mol_type = other DNA
gcgcaagttcgtcgaagagttggataccagcaaggatgtggtggtatatgccaagttgccacgtggttttctgat

SEQ ID NO: 204101 - DNA, 75 bp, synthetic construct
  source 1..75: mol_type = other DNA
ctgatggcagccctgtgccttgcggacaatatcaccctgagcttcaggattgaaaccgacagctacacgggtgaa

SEQ ID NO: 204102 - DNA, 75 bp, synthetic construct
  source 1..75: mol_type = other DNA
ccatttcatggagaaattcttcgtaaactggatcaaaggaatgaagttcagagggttaaactctctattgacgtt

SEQ ID NO: 204103 - DNA, 75 bp, synthetic construct
  source 1..75: mol_type = other DNA
ctattggggctacaacccggtagcgatgtttgcactgcatccggcctatgcctgttcgccggagagtgcgcttga

SEQ ID NO: 204104 - DNA, 75 bp, synthetic construct
  source 1..75: mol_type = other DNA
aacaaccactcgcgcaacattctcacggttgaagaccccatcgaatacatgattgaagggatcggtcagacacag

SEQ ID NO: 204105 - DNA, 75 bp, synthetic construct
  source 1..75: mol_type = other DNA
ggctcgtcttgatatcgccgaaaaacgtattccacaggatggaagaattagtttgcgtatcgggcgacgtaacat

SEQ ID NO: 204106 - DNA, 75 bp, synthetic construct
  source 1..75: mol_type = other DNA
gcaggtcttacgtacccgccagtcgcccgatggctgcgagggaggcagttactactacctcgtggatatggagga

SEQ ID NO: 204107 - DNA, 75 bp, synthetic construct
  source 1..75: mol_type = other DNA
tcattgatgagacagaagagaaacgcattattttgctggcgaatcttttacgcaaagatccgtttttaattcctc

SEQ ID NO: 204108 - DNA, 75 bp, synthetic construct
  source 1..75: mol_type = other DNA
tccccgtgcgcaactcgcctcggcgcttaatttgccagaaacgtgggtagcagagcgcctgccccgcctgaaaca

SEQ ID NO: 204109 - DNA, 75 bp, synthetic construct
  source 1..75: mol_type = other DNA
ttgatatgagtctgcactttattacgctactgcgtgaacagctcgatattccccttttcgacagcgatctgatcg

SEQ ID NO: 204110 - DNA, 75 bp, synthetic construct
  source 1..75: mol_type = other DNA
tatcagcatccggcggaaactattgtcggactaacggggtatgaagggtttatggcgttgcttcgccaggggtga

SEQ ID NO: 204111 - DNA, 75 bp, synthetic construct
  source 1..75: mol_type = other DNA
cggtcaataattgcatcaccgtaaaaaacattattactgccgccggtatcgaacaaataaaacattttctggcga

SEQ ID NO: 204112 - DNA, 75 bp, synthetic construct
  source 1..75: mol_type = other DNA
tcagcatttatccacggcctgcgacaaccaacaccgctggccactcatgcagggtgattatctctccagcctgat

SEQ ID NO: 204113 - DNA, 75 bp, synthetic construct
  source 1..75: mol_type = other DNA
gtctgaaagagctggaacgtgaaaatcgtgaactgcgccgcagcaacaatatccttcgccaggcttccgcttatt

SEQ ID NO: 204114 - DNA, 75 bp, synthetic construct
  source 1..75: mol_type = other DNA
gttccatagctccaaagattggctgtacgccagagactctgcgtgtctgggttcgccagcatgagcgggataccg

SEQ ID NO: 204115 - DNA, 75 bp, synthetic construct
  source 1..75: mol_type = other DNA
ccatgacgcggatgatgagatgctgatggacaaggttcgtcaggctaccgccgtgctgctggcctacatccaggg

SEQ ID NO: 204116 - DNA, 75 bp, synthetic construct
  source 1..75: mol_type = other DNA
gttccattgctccaaagagtggctgtacgcccgagactctgcgtgtctgggttcgccagaatgagcgggataccg

SEQ ID NO: 204117 - DNA, 75 bp, synthetic construct
  source 1..75: mol_type = other DNA
gttccattgctccaaagagtggctgtacgccagagactctgcgtgtctgggttcgccagcatgagcgggataccg

SEQ ID NO: 204118 - DNA, 75 bp, synthetic construct
  source 1..75: mol_type = other DNA
gttccattgctccaaagaatggctgtacgccggagactctgcgtgtctgggttcgccaggatgagcgggataccg

SEQ ID NO: 204119 - DNA, 75 bp, synthetic construct
  source 1..75: mol_type = other DNA
tacgccagagactctgcgtgtctgggtttgccagcatgagcgggataccggggcggtgatggtgggctcaccagc

SEQ ID NO: 204120 - DNA, 75 bp, synthetic construct
  source 1..75: mol_type = other DNA
accgggcactttttatccgccaagtattaatgcaggtagagaagttgcgtctgtatggtgtactggataacgaca

SEQ ID NO: 204121 - DNA, 75 bp, synthetic construct
  source 1..75: mol_type = other DNA
gttattaatgctataaatatgggagaggccagagagctattcctggggctggtagattattttaagcaggaaaaa

SEQ ID NO: 204122 - DNA, 75 bp, synthetic construct
  source 1..75: mol_type = other DNA
cacaacggtaacgggctggtgtggctgcgttccggcgtgtccgtgcatgaggcagaccatgatgtagggataagc

SEQ ID NO: 204123 - DNA, 75 bp, synthetic construct
  source 1..75: mol_type = other DNA
gaagaacttatggcagagctggtcaggactgcgaatagtggtggaacagtccttgatccttttatggggtcaggg

SEQ ID NO: 204124 - DNA, 75 bp, synthetic construct
  source 1..75: mol_type = other DNA
gacaatccgcaatattcgcctgcaaatggaacaagatccccaacatcgtggctcatttgagttctccgggcgggt

SEQ ID NO: 204125 - DNA, 75 bp, synthetic construct
  source 1..75: mol_type = other DNA
tactgactggcgacaactgcctgctttaaccgatgcgtttcaggccagcggttttacatggcgtggaatcattgc

SEQ ID NO: 204126 - DNA, 75 bp, synthetic construct
  source 1..75: mol_type = other DNA
gaccggctgctacatcactcaaccacgctgaatatcaaaggagagagttaccggttcaatattccagacagactc

SEQ ID NO: 204127 - DNA, 75 bp, synthetic construct
  source 1..75: mol_type = other DNA
tacgccggagactctgcgtgtctgggttcgccagcatgagcgggataccggaggcggtgatggagggctcaccac

SEQ ID NO: 204128 - DNA, 75 bp, synthetic construct
  source 1..75: mol_type = other DNA
tatggttctggaaagtcaggccgaatatgactcacaatgggcggcaagttgtttcattgctccaaagattggctg

SEQ ID NO: 204129 - DNA, 75 bp, synthetic construct
  source 1..75: mol_type = other DNA
ggcagggattcgctcaccctgtagccagccagcacgatatttcagcgaaccgtaaacaggttatttccggtgact

SEQ ID NO: 204130 - DNA, 75 bp, synthetic construct
  source 1..75: mol_type = other DNA
ttactttaccgcgtttggactgcgtgatgtggatactgagccttactgcgccctgcgtcttgcccgactaatcgg

SEQ ID NO: 204131 - DNA, 75 bp, synthetic construct
  source 1..75: mol_type = other DNA
atgaactccttgccagctatcctgatctccataacgcctatgagcagttatttgcctactatcatcgtcgtaaca

SEQ ID NO: 204132 - DNA, 75 bp, synthetic construct
  source 1..75: mol_type = other DNA
aggatgaagttggttggctatttcgtgacatcgtttattgtcggcgttcttggcgctgggcttgttggttcgtac

SEQ ID NO: 204133 - DNA, 75 bp, synthetic construct
  source 1..75: mol_type = other DNA
attgctggaaaatatcatatcaatacttactctttctatgggagagcgaaattgggagatattcctgaagcgcat

SEQ ID NO: 204134 - DNA, 75 bp, synthetic construct
  source 1..75: mol_type = other DNA
atcgaaatcccgttagtcaggcatttgcattacgttctattataaaaatagctcaggaggtaaaaaaggatggta

SEQ ID NO: 204135 - DNA, 75 bp, synthetic construct
  source 1..75: mol_type = other DNA
cttcaacagatctaattcgttttgctggacgagcaatgcgatttgaaaacgccaatggcgacgatatattacttt

SEQ ID NO: 204136 - DNA, 75 bp, synthetic construct
  source 1..75: mol_type = other DNA
cagcgttatcagcgggaacaacgtgcagcttgcgggtggcaatattaccaacagcggcggcagcatcaacgcaca

SEQ ID NO: 204137 - DNA, 75 bp, synthetic construct
  source 1..75: mol_type = other DNA
ctgctggcgttggttctggaaccggtgttgagtcgggctgcggcaaaattgtcgaaacgttattcaggtaatcaa

SEQ ID NO: 204138 - DNA, 75 bp, synthetic construct
  source 1..75: mol_type = other DNA
gacagggtggaagtcgataatcgagggagaattcccgcacctccggatgcccaagaaaaacttattcagttaggt

SEQ ID NO: 204139 - DNA, 75 bp, synthetic construct
  source 1..75: mol_type = other DNA
atcaaatcatgatggagacacaaagcaaagccacgcaggccagcacaacggcaagcgcggttgccgctcagggaa

SEQ ID NO: 204140 - DNA, 75 bp, synthetic construct
  source 1..75: mol_type = other DNA
aatggtcgcaaatagttagcccaatggaccagctaaaaggcgaagttgaccctatccagcaggcgcaaaatgaat

SEQ ID NO: 204141 - DNA, 75 bp, synthetic construct
  source 1..75: mol_type = other DNA
tatcaatgaactaaaagtcgaggtaatgggtctggtggaacaactggacgatcttttcggtgtatcagatggcgt

SEQ ID NO: 204142 - DNA, 75 bp, synthetic construct
  source 1..75: mol_type = other DNA
gtgcctcagtagaggccttgacaagcacatctcttttacctttacgagacttgatcgttaaagcacgagaacaga

SEQ ID NO: 204143 - DNA, 75 bp, synthetic construct
  source 1..75: mol_type = other DNA
atcaaagcactgaccagggtcatccatctgctacttgctgcggaagcagtgcgccaatttatggatatggcggaa

SEQ ID NO: 204144 - DNA, 75 bp, synthetic construct
  source 1..75: mol_type = other DNA
aacagaatgccgccaatgacggagcgattaccggattcgacaagccagtagacaaaccgaaaaaacagaaaaaag

SEQ ID NO: 204145 - DNA, 75 bp, synthetic construct
  source 1..75: mol_type = other DNA
gttccattctacattgcagggcatcgcagtcatagctcccatcggagccatagttctcaccgatcatcatcaggc

SEQ ID NO: 204146 - DNA, 75 bp, synthetic construct
  source 1..75: mol_type = other DNA
tggtagagcaggtgacaagagacctggattccattctggaaaaaggaatgcgcgaagcggttcgtcctctgtgct

SEQ ID NO: 204147 - DNA, 75 bp, synthetic construct
  source 1..75: mol_type = other DNA
aagcgcaggccatgcgcgccgctcaggcaaagtgggacaaactgcaacggggcgtcgcggagttctccatcagcc

SEQ ID NO: 204148 - DNA, 75 bp, synthetic construct
  source 1..75: mol_type = other DNA
accaaattcagtaattggtttgattctccgtttaaacagtggggaggttcttcttattccactgctgattacaaa

SEQ ID NO: 204149 - DNA, 75 bp, synthetic construct
  source 1..75: mol_type = other DNA
catcccgtgtgagttgatcgactacaatggcgacgcgttgcgtgaactggtgctgcgctatgcgcaagagtgggc

SEQ ID NO: 204150 - DNA, 75 bp, synthetic construct
  source 1..75: mol_type = other DNA
gcgatgcgcgtctgattcgttctgtaaaccgtgaaatcagcgtctacggtgactacgatgaattcctgaaacttg

SEQ ID NO: 204151 - DNA, 75 bp, synthetic construct
  source 1..75: mol_type = other DNA
gggccgaaatccttagcgactgagctgcgtctggacaaatatccgctcaacgtgctgattgttgacgatattaaa

SEQ ID NO: 204152 - DNA, 75 bp, synthetic construct
  source 1..75: mol_type = other DNA
catcgggaatgttcgttgggtggttgattcagattttgatgttgtattgggacccatacactataaaaaagcact

SEQ ID NO: 204153 - DNA, 75 bp, synthetic construct
  source 1..75: mol_type = other DNA
ataatgttcttaacaacctgcttttgtctttaggaggggtcccccctcatacaattagtgtgacaggcttggcat

SEQ ID NO: 204154 - DNA, 75 bp, synthetic construct
  source 1..75: mol_type = other DNA
tcaggagatgaaaacagacgagataataatgttcttaacaatgttcttttgtctttaggcggaatcagtcctcag

SEQ ID NO: 204155 - DNA, 75 bp, synthetic construct
  source 1..75: mol_type = other DNA
atgttgctggctgtggcgctggaaccgctgttaagtcgggctgctaataaactggcacagcgttataaaaggtga

SEQ ID NO: 204156 - DNA, 75 bp, synthetic construct
  source 1..75: mol_type = other DNA
atgaataatctggactgcaatgcatcgaatcattcaccggtatggggcgtgaccgaatttcttttctggaaatta

SEQ ID NO: 204157 - DNA, 75 bp, synthetic construct
  source 1..75: mol_type = other DNA
cggcggtaatccctgataccaacgagccggactgggaaaaccttgaaggtgtgaaaatctcgttgtacccgctca

SEQ ID NO: 204158 - DNA, 75 bp, synthetic construct
  source 1..75: mol_type = other DNA
acaaacaggtggtgctgtgttcagtgctctggcaggaggaagtctcttttcaactaacactgaaagtgccgttgt

SEQ ID NO: 204159 - DNA, 75 bp, synthetic construct
  source 1..75: mol_type = other DNA
atatcgtgcatccttctgacggctaacgctatcgccggtatggcaaaaatcaacgttaaaataaatgacgcgggc

SEQ ID NO: 204160 - DNA, 75 bp, synthetic construct
  source 1..75: mol_type = other DNA
ctgaggccaataagatggtgatctgtgacaggcggcgcaatgcgatgtaccctgcatggtactggctgatcgtgc

SEQ ID NO: 204161 - DNA, 75 bp, synthetic construct
  source 1..75: mol_type = other DNA
gcgcccaaaagtcattatcgcggatgaagctctcgcctcgctggatatgtcgatgcgttcgcagttgattaatct

SEQ ID NO: 204162 - DNA, 75 bp, synthetic construct
  source 1..75: mol_type = other DNA
tctgcgttttcgcctcaaagccgcagttatgttatttgctattctggcagcggcaattcttgtcggacagggagt

SEQ ID NO: 204163 - DNA, 75 bp, synthetic construct
  source 1..75: mol_type = other DNA
gacttcccttgtgattaaccgccagttgtggctgtaccacgacagcggtagcgcagggctgactcacctgtacag

SEQ ID NO: 204164 - DNA, 75 bp, synthetic construct
  source 1..75: mol_type = other DNA
acacacctgtacaggatgcgcgatgcgcagttgtggagccacatcgaatttcaccccgaatgcaacgcgatttac

SEQ ID NO: 204165 - DNA, 75 bp, synthetic construct
  source 1..75: mol_type = other DNA
tggagtatgtggatgtcagtgttgcatccgcagccggaacgctggagacggcgctgggtctgtatactgacacac

SEQ ID NO: 204166 - DNA, 75 bp, synthetic construct
  source 1..75: mol_type = other DNA
tcatcgttatgtgtcattgatgtcagaagcaccgttcgttaccggacttccggaactgcaaccggtaaaaggatt

SEQ ID NO: 204167 - DNA, 75 bp, synthetic construct
  source 1..75: mol_type = other DNA
gatgcgtgaggcgcagttgtggaatcacattgagtttcatcctgaatgcaacgcgatttacgcggcactggactg

SEQ ID NO: 204168 - DNA, 75 bp, synthetic construct
  source 1..75: mol_type = other DNA
gcaggaacaggatgggaaaatggcttggggtgtccagtttacgctgcgtgaaaaacacagcgttccggaaaagcg

SEQ ID NO: 204169 - DNA, 75 bp, synthetic construct
  source 1..75: mol_type = other DNA
gaagagttcaactcaatacgtgataacaccccaacaatcatacaggaaatggcccgacagatggggttatctatg

SEQ ID NO: 204170 - DNA, 75 bp, synthetic construct
  source 1..75: mol_type = other DNA
ggcaacggaacgggttttcaacagactgaaagaaatatcaaaagaaacaggccaaagcctcaaggatactggtgc

SEQ ID NO: 204171 - DNA, 75 bp, synthetic construct
  source 1..75: mol_type = other DNA
cctgaatgagcttaaagtcgaggttatgggacttgttgagcaattggatgatcttttcggtgtatccgatacggt

SEQ ID NO: 204172 - DNA, 75 bp, synthetic construct
  source 1..75: mol_type = other DNA
ggcccgccatatgggattatcaatgggccagttccgcgccgaaatgctggacggcaagatcacggctgaaaggat

SEQ ID NO: 204173 - DNA, 75 bp, synthetic construct
  source 1..75: mol_type = other DNA
cagggttattcctggtcgtgatattggtggcggtggcggttttagtatgcctgtcagtatcagtattcaaaccac

SEQ ID NO: 204174 - DNA, 75 bp, synthetic construct
  source 1..75: mol_type = other DNA
cccgatgaatcagcttaaaggcgaggttgaccctattcagcaggtacaaaatgaatgggccgtccgtaagcaaat

SEQ ID NO: 204175 - DNA, 75 bp, synthetic construct
  source 1..75: mol_type = other DNA
tcaaactgcttacaggtgaagcggaggccacggaacgcgttttcaatagactgaaagaaatatcaaaagaaacag

SEQ ID NO: 204176 - DNA, 75 bp, synthetic construct
  source 1..75: mol_type = other DNA
taaacgcaaggaagagctaaacagcaacaacgagaaaaaatttggccccaccgtcggcaaagtcatgacgtttgc

SEQ ID NO: 204177 - DNA, 75 bp, synthetic construct
  source 1..75: mol_type = other DNA
gtggagtgcgaaagcccggtggtgatttgcaatgagcagcaccgctttattgtcgcggaacagctgcgtcaacta

SEQ ID NO: 204178 - DNA, 75 bp, synthetic construct
  source 1..75: mol_type = other DNA
tgcctgttaacatcaccgtacagaccacaaacggatttagcgacgaagacagtcgcagacttgaacagacgatgg

SEQ ID NO: 204179 - DNA, 75 bp, synthetic construct
  source 1..75: mol_type = other DNA
ctaaaaaacacatccgctacggaaggccaggtcctcaacctggttagcacgctgcaaaaactcggcaacctgggc

SEQ ID NO: 204180 - DNA, 75 bp, synthetic construct
  source 1..75: mol_type = other DNA
tcggcttggtgatgaaggcataaaagtgtccgaccagtacaacaaggacgccgccgctatgcgcaacgcattaga

SEQ ID NO: 204181 - DNA, 75 bp, synthetic construct
  source 1..75: mol_type = other DNA
tgctgaaagccttcgggcgacacattgcccggagttttcaccgggggcgtggtgtacacatccccgccatgaaaa

SEQ ID NO: 204182 - DNA, 75 bp, synthetic construct
  source 1..75: mol_type = other DNA
cctcagcggctgtaaagccccgccgtcatccccgtttcagacgcgaagacatccccgcgccggaaattgaccccg

SEQ ID NO: 204183 - DNA, 75 bp, synthetic construct
  source 1..75: mol_type = other DNA
atgacagtaagtattgtttcaccttccgcagcgactgtaaagccccgccgtcatccccgtttcagacgcgaagac

SEQ ID NO: 204184 - DNA, 75 bp, synthetic construct
  source 1..75: mol_type = other DNA
tatttgggcggcggcgcggcaatgagtaatgacggcgtatttaccggtcctcaatataatattggtggtaagaat

SEQ ID NO: 204185 - DNA, 75 bp, synthetic construct
  source 1..75: mol_type = other DNA
aaaaatggtactgtgtttattcctgattttcaaaggaaatatgtttggagtagagggcaggcatcaagattaatt

SEQ ID NO: 204186 - DNA, 75 bp, synthetic construct
  source 1..75: mol_type = other DNA
aatcacaatctgtaactgcacgtattgcccatgaaattattgaaggcatggaaaaagtgaaagaagaaggcgaaa

SEQ ID NO: 204187 - DNA, 75 bp, synthetic construct
  source 1..75: mol_type = other DNA
gtaccgctggttttttagttactgccgcaaaaggcgagatcaaacgccgccagcgccgcaaggccaaagaatcag

SEQ ID NO: 204188 - DNA, 75 bp, synthetic construct
  source 1..75: mol_type = other DNA
gcactgggcaatttatcgtttcggcacttgaaggcgagatcaaacgccgccagcgccgcaaggccaaagagcagg

SEQ ID NO: 204189 - DNA, 75 bp, synthetic construct
  source 1..75: mol_type = other DNA
tggggacagaagcgatgaaagtcgcgctggcgctggctgccccgctgctgctggtggcgctggtcactggcctta

SEQ ID NO: 204190 - DNA, 75 bp, synthetic construct
  source 1..75: mol_type = other DNA
ggaaattgaccccgtgctgaaagccttcgggcgacacatagcccggagttttcaccggggacgtggtgtacacat

SEQ ID NO: 204191 - DNA, 75 bp, synthetic construct
  source 1..75: mol_type = other DNA
atccccgcgccggaaattgaccccgtgctgaaagccttcgggcgacacatagcccggagttttcgccgggggcgt

SEQ ID NO: 204192 - DNA, 75 bp, synthetic construct
  source 1..75: mol_type = other DNA
gctttagctgccgactatcagccatcgcttaaagaaaccacgcaattttttcaaaccatccagaataaactgcat

SEQ ID NO: 204193 - DNA, 75 bp, synthetic construct
  source 1..75: mol_type = other DNA
gtaggtgatgcccttaacgcgattaactcatcattcagcacctcaatcagtgatgccctgctgtgggattctaca

SEQ ID NO: 204194 - DNA, 75 bp, synthetic construct
  source 1..75: mol_type = other DNA
tggtatcgcttctgcaatggcaatgaccggtctgccgcaggcttacactccaggtgccagcatggcctctattgg

SEQ ID NO: 204195 - DNA, 75 bp, synthetic construct
  source 1..75: mol_type = other DNA
cagcaccgcagtaggttatcactcaactgctgacggaaggtggtcaacagccctcggtgctaagacccattcgct

SEQ ID NO: 204196 - DNA, 75 bp, synthetic construct
  source 1..75: mol_type = other DNA
gtacaggctcaggcaggaagggacaacggtcagggcgtcaattatggccagggaacaggaacaggctgggttgct

SEQ ID NO: 204197 - DNA, 75 bp, synthetic construct
  source 1..75: mol_type = other DNA
tcggcagtagctcattacaacgcaagatcgttaatgtaaaaaatggcgcgatcaaggctgacagccacgacgcca

SEQ ID NO: 204198 - DNA, 75 bp, synthetic construct
  source 1..75: mol_type = other DNA
tacaacaacgtcggtgaagccctggatgcgctcgataataacgctctgctgtgggatgaagacgcaggtgcctac

SEQ ID NO: 204199 - DNA, 75 bp, synthetic construct
  source 1..75: mol_type = other DNA
attgacggtatattgcttgtcaaactgtttaattttacgaacaaatataatcttgaaagatatagtttcgattac

SEQ ID NO: 204200 - DNA, 75 bp, synthetic construct
  source 1..75: mol_type = other DNA
cgcagtgaactatgcgcagttgaagcaaagtgtgcaggaaacgaagcaatacaccgatcagcgcatggttgagat

SEQ ID NO: 204201 - DNA, 75 bp, synthetic construct
  source 1..75: mol_type = other DNA
gtagcactaagtacttcaagaccaacaccgatggcgcagatgccaacgcgcagggtaaagacagtgttgcgattg

SEQ ID NO: 204202 - DNA, 75 bp, synthetic construct
  source 1..75: mol_type = other DNA
cagtaccgatgctgttaacggttcccagttaaacgcaaccaatattctggttacgcaaaatagccaaatgattaa

SEQ ID NO: 204203 - DNA, 75 bp, synthetic construct
  source 1..75: mol_type = other DNA
tcaacgtagccgatggttccgaagcccatgacgccgttacggttcgccagttgcaaaatgccattggtgcagtcg

SEQ ID NO: 204204 - DNA, 75 bp, synthetic construct
  source 1..75: mol_type = other DNA
aaaacagccagtgtaatcactaacgtcgctaacggtgcaatctctgccaccagcagcgatgccattaacggttca

SEQ ID NO: 204205 - DNA, 75 bp, synthetic construct
  source 1..75: mol_type = other DNA
gcggcagttacagcaacgtcggtgacgcgctggaagcgatcgataccacgctggatgacgctctgttgtgggatg

SEQ ID NO: 204206 - DNA, 75 bp, synthetic construct
  source 1..75: mol_type = other DNA
ttgtcttaacggcgattgccaatgatcgcttgcatgatgaagtatatgcaaaacaggtacgggcgctgggacatg

SEQ ID NO: 204207 - DNA, 75 bp, synthetic construct
  source 1..75: mol_type = other DNA
gccgtccgctgagcgaatatcagcgtaatgttccgcctcatgtacgcgccgctcgccttgccgatgaagaaaacc

SEQ ID NO: 204208 - DNA, 75 bp, synthetic construct
  source 1..75: mol_type = other DNA
aagtacgtatggaccaccaacggcccggagccgctggactaccaacgttcaccactggattacgaacactatctg

SEQ ID NO: 204209 - DNA, 75 bp, synthetic construct
  source 1..75: mol_type = other DNA
gtgcagacgcgtctgggccgtgaagacagcgagtatctcgcccgctcggtgccgttctacgccgccaatcaaccg

SEQ ID NO: 204210 - DNA, 75 bp, synthetic construct
  source 1..75: mol_type = other DNA
ttgcctgcccggtttgcaacggaaaactttggtataaccaagaaaaacaagaacttatttgcaaactggacaacc

SEQ ID NO: 204211 - DNA, 75 bp, synthetic construct
  source 1..75: mol_type = other DNA
cctgcagcgagaatgggagatagttgtgcccatggtgggactataataactggatctccgattgtattattaggg

SEQ ID NO: 204212 - DNA, 75 bp, synthetic construct
  source 1..75: mol_type = other DNA
tgttgtactcgctgccgtcaaagagatggtttatcagaagaaatatctggatatctctttccaggctgccgctga

SEQ ID NO: 204213 - DNA, 75 bp, synthetic construct
  source 1..75: mol_type = other DNA
atatcaccttccaggcagcggctgaatccaacagcggcaaccacaaaggtctgattcgtacctactctcactgca

SEQ ID NO: 204214 - DNA, 75 bp, synthetic construct
  source 1..75: mol_type = other DNA
cactgtccaagaaggaaatagtggtgatattaatcaagttgactttgaactagtcgctgccatgttagttgagta

SEQ ID NO: 204215 - DNA, 75 bp, synthetic construct
  source 1..75: mol_type = other DNA
gccttcgccgtccgctgagcgaatatcagcgtaatgttccgcctcatgtacgcgccgctcgccttgccgatgaag

SEQ ID NO: 204216 - DNA, 75 bp, synthetic construct
  source 1..75: mol_type = other DNA
ccagcagtttcagcaggagctgtacctgcgtatcttccgcaacgagccatatcaggagtacgtccgccaaaccat

SEQ ID NO: 204217 - DNA, 75 bp, synthetic construct
  source 1..75: mol_type = other DNA
tatgcctttgtgtacgacaaagcaacagatgaccgatacccattaaatgggtttgctattgatggtgtaaagtct

SEQ ID NO: 204218 - DNA, 75 bp, synthetic construct
  source 1..75: mol_type = other DNA
atcagcgagatgcgcgtggtgcagggaatggacgccgggctttatcaaaaactgaaaccgctggtctgtgcgctg

SEQ ID NO: 204219 - DNA, 75 bp, synthetic construct
  source 1..75: mol_type = other DNA
gacgaggatcgcagcgtgcagacgcggctggggcgtgaagacagcgagtatctcgcccgctcggtgccgttctat

SEQ ID NO: 204220 - DNA, 75 bp, synthetic construct
  source 1..75: mol_type = other DNA
cggattcatcgagcctcatgcaaatcaatcaacccgttaatcagcccaaaaaatcacgccggctttaccactggc

SEQ ID NO: 204221 - DNA, 75 bp, synthetic construct
  source 1..75: mol_type = other DNA
atgattacctcaccaccaaaacgcggaatggcactggtcgtggtgctgatattgctggcggtcataatgctggta

SEQ ID NO: 204222 - DNA, 75 bp, synthetic construct
  source 1..75: mol_type = other DNA
tgtgtggggagcactttaacccgccatgaaactatcaatgaagatgaactacgtcagcgtttgtcgcgaatgggt

SEQ ID NO: 204223 - DNA, 75 bp, synthetic construct
  source 1..75: mol_type = other DNA
gtttgtttatcacatgccgtttaaccgggcattggggatggaactggagcgttacgaaaaagaatttgcgcaact

SEQ ID NO: 204224 - DNA, 75 bp, synthetic construct
  source 1..75: mol_type = other DNA
tactgctaccagtagtctgttgcgtgcaggcaataaagtcgccgtcgcccgcgttgaattacacaatgaagaaca

SEQ ID NO: 204225 - DNA, 75 bp, synthetic construct
  source 1..75: mol_type = other DNA
tttcaccttccgcagcggctgtaaagccccgccgtcatccccgtttcagacgcgaagacatccccgcgccggaaa

SEQ ID NO: 204226 - DNA, 75 bp, synthetic construct
  source 1..75: mol_type = other DNA
aagtcatcctattatcaactctaatagcttaaagaacaaagaaataaaagagctaactgagtggttatataaaaa

SEQ ID NO: 204227 - DNA, 75 bp, synthetic construct
  source 1..75: mol_type = other DNA
atgttccgctagatgatttggaacttgacacagaaaacccaagacttcctgaaggcgtgtctcgtgaccaattgg

SEQ ID NO: 204228 - DNA, 75 bp, synthetic construct
  source 1..75: mol_type = other DNA
atccatagagcatcttgcaaaacgattaatcccttgaaacgtaagatcgataaaacaggattcacaactggagat

SEQ ID NO: 204229 - DNA, 75 bp, synthetic construct
  source 1..75: mol_type = other DNA
ttacagtatggctttataaaaaggatgattccgggaaaacaaaggttggagagtcccgaaatttacgcctattat

SEQ ID NO: 204230 - DNA, 75 bp, synthetic construct
  source 1..75: mol_type = other DNA
agcagaaaagatcatatcaagagaaatctagatgctttagccgtttataaagtaatggagagcaataacttttat

SEQ ID NO: 204231 - DNA, 75 bp, synthetic construct
  source 1..75: mol_type = other DNA
aacggtgcaaactggtttgaccgtaccgtgagtgctgatgccgcaggcatcattctgacttcccttgtgattaac

SEQ ID NO: 204232 - DNA, 75 bp, synthetic construct
  source 1..75: mol_type = other DNA
ccgttggggtttccgctaagacgcgtgagaaaatcatgcgcatctatgagaactccaatatgaacaaaaaaaaga

SEQ ID NO: 204233 - DNA, 75 bp, synthetic construct
  source 1..75: mol_type = other DNA
tgaaaaaaaatatatttccctaatcggacttgataagttgtcattcaatattgatgtttttagacaagcattaga

SEQ ID NO: 204234 - DNA, 75 bp, synthetic construct
  source 1..75: mol_type = other DNA
ttaaaaaaaagtgataccatagacgaatacattaaaataagaaaaacaagaggcattgaagatcaaacaacaact

SEQ ID NO: 204235 - DNA, 75 bp, synthetic construct
  source 1..75: mol_type = other DNA
tattgctatgcatttgatgctgaccgtactttgggtatattgcttaatcgaatttttaacgtttgttttcaaaca

SEQ ID NO: 204236 - DNA, 75 bp, synthetic construct
  source 1..75: mol_type = other DNA
tattgctatgcatttactactgacggtattctgggtatattgcttaatcgaatttttaacgtttgttttcaaaca

SEQ ID NO: 204237 - DNA, 75 bp, synthetic construct
  source 1..75: mol_type = other DNA
gccaagtggcattgtctgataaggccaatgaaaaacttggaaaatttcaaataaaactcaaagagaaaaaaatca

SEQ ID NO: 204238 - DNA, 75 bp, synthetic construct
  source 1..75: mol_type = other DNA
tcatcatccctctggtttttattcaggaaaagttatgagcataacgcaaaagggtataaattcggttgttggtac

SEQ ID NO: 204239 - DNA, 75 bp, synthetic construct
  source 1..75: mol_type = other DNA
attttacaacattatataaatacgcattatttgtcagaggagcaaactcagaagataaaagatattgtggatttt

SEQ ID NO: 204240 - DNA, 75 bp, synthetic construct
  source 1..75: mol_type = other DNA
acaacatcgaaaattcgattatatcgggtcatgaatcatttgatataatacgaagcaatcaacatgagtgggggg

SEQ ID NO: 204241 - DNA, 75 bp, synthetic construct
  source 1..75: mol_type = other DNA
taatcaaggaggatttgttatatcaataataaataatgctacgagtgaagcggcaaatattaatgtgctccgaaa

SEQ ID NO: 204242 - DNA, 75 bp, synthetic construct
  source 1..75: mol_type = other DNA
gaataattcgattgttgtgagcgaaaatatgctcactcaaaaaaacttcctggaacacaatacatttttcagtgt

SEQ ID NO: 204243 - DNA, 75 bp, synthetic construct
  source 1..75: mol_type = other DNA
atgtggcaaaagtaattaaattacctttgctagatataggcataaatatttggtcattatatgattcttcattaa

SEQ ID NO: 204244 - DNA, 75 bp, synthetic construct
  source 1..75: mol_type = other DNA
tctcgcgttaattgtcgaaggaatttcttatattgttggtctagttagtatgacactttttaacttccatccggc

SEQ ID NO: 204245 - DNA, 75 bp, synthetic construct
  source 1..75: mol_type = other DNA
caggaaaacagtgaaaaactggctgccgatatgattatcagtcagaaacgcatgggcggcctgcaggccgtgcgt

SEQ ID NO: 204246 - DNA, 75 bp, synthetic construct
  source 1..75: mol_type = other DNA
caggaaaacagtgaaaaactggcagccgatatgatgatcagtcagaaacgcatgggcggcctgcaggccgtgcgt

SEQ ID NO: 204247 - DNA, 75 bp, synthetic construct
  source 1..75: mol_type = other DNA
caggaaaacagtgaaaaactggcagccgatatgatcatcagtcagaaacgcatggggggcctgcaggccgtgcgt

SEQ ID NO: 204248 - DNA, 75 bp, synthetic construct
  source 1..75: mol_type = other DNA
caggaaaacagtgaaaaactggcggccgatatgataatcagtcagaaacgcatgggcggcctgcaggccgtgcgt

SEQ ID NO: 204249 - DNA, 75 bp, synthetic construct
  source 1..75: mol_type = other DNA
caggaaaacagtgaaaaactggccgccgatatgatgatcagtcagaaacgcatgggaggcctgcaggccgtgcgt

SEQ ID NO: 204250 - DNA, 75 bp, synthetic construct
  source 1..75: mol_type = other DNA
caggaaaacagtgaaaaactggccgccgatatgataatcagtcagaaacgcatggggggcctgcaggccgtgcgt

SEQ ID NO: 204251 - DNA, 75 bp, synthetic construct
  source 1..75: mol_type = other DNA
tacgtgaggcggcacaaaactatcaatcgacgctggcgtggtatgaggccatcacggataacccaaatgctgagc

SEQ ID NO: 204252 - DNA, 75 bp, synthetic construct
  source 1..75: mol_type = other DNA
ttcttatagtaacgatgagctaggtctggttaatagaaaggattatttcaactgttcttcagttattccaaaggg

SEQ ID NO: 204253 - DNA, 75 bp, synthetic construct
  source 1..75: mol_type = other DNA
gtttcgtgttgtaaataatggaattgaagccagtaaaaagcacgactatgacaatcatgaaactgaaataataaa

SEQ ID NO: 204254 - DNA, 75 bp, synthetic construct
  source 1..75: mol_type = other DNA
ttaacgcttacttgcagcagctggcgcgtctgaacggtgtggccgttgaagaactgtccagcaagttcactgtag

SEQ ID NO: 204255 - DNA, 75 bp, synthetic construct
  source 1..75: mol_type = other DNA
tccccagcggactaactaagcaattgcaatccagaaaagccaagctgtatgaagatattcagcagcctgcgcaac

SEQ ID NO: 204256 - DNA, 75 bp, synthetic construct
  source 1..75: mol_type = other DNA
tatgcacttaaattccagaaagcacaggacgcattaaagtacgccgctttgctgcatagcaggacagcgcagcta

SEQ ID NO: 204257 - DNA, 75 bp, synthetic construct
  source 1..75: mol_type = other DNA
cgaataacaccggggcgcatacgcacagtctgagtggctctacggggtctgccggtgttcatactcatggtaatg

SEQ ID NO: 204258 - DNA, 75 bp, synthetic construct
  source 1..75: mol_type = other DNA
tccgtacccgtagctgggaagataacggtatcacccgttacgtcactgaaattcttgttaagaccacgggcacca

SEQ ID NO: 204259 - DNA, 75 bp, synthetic construct
  source 1..75: mol_type = other DNA
acatttgaggggaagatggccgcgcaggcacaagcgtttgaagagaaactggcttccctgtcggcggtattacag

SEQ ID NO: 204260 - DNA, 75 bp, synthetic construct
  source 1..75: mol_type = other DNA
caccaatcccgtggccatcagataccgttccgtctggttatgccctgatgcaggggcagacttttgacaaatctg

SEQ ID NO: 204261 - DNA, 75 bp, synthetic construct
  source 1..75: mol_type = other DNA
aaagtgagccgtgttcctgacggcgttgccggatacagcgtatgggggctgaagctgccgacgctgcgccagcgc

SEQ ID NO: 204262 - DNA, 75 bp, synthetic construct
  source 1..75: mol_type = other DNA
ttttatcttgcacagcttgctgccctgggcagaccagacgccaccatcacgcgatacgacaaaagcacgttcacc

SEQ ID NO: 204263 - DNA, 75 bp, synthetic construct
  source 1..75: mol_type = other DNA
tccgcctgttatcggcactgttgccgcccggtccggcgtggtcagccagcgatccggcgattgccggtgcggcac

SEQ ID NO: 204264 - DNA, 75 bp, synthetic construct
  source 1..75: mol_type = other DNA
ctggtggaccctcttgaagccgacagaatcatccctctggacgaagacgagcgcctcagcatcgatgatgtctaa

SEQ ID NO: 204265 - DNA, 75 bp, synthetic construct
  source 1..75: mol_type = other DNA
attaagcatcagctgctgtctatcgcgctcaacggtatgaccaagttccgcacccgcatcctgccgcagctgctg

SEQ ID NO: 204266 - DNA, 75 bp, synthetic construct
  source 1..75: mol_type = other DNA
aatggcgacgcgttgcgtgaactggtgctgcgctatgcgcaagagtgggcactgccagaagcatttattcaatgg

SEQ ID NO: 204267 - DNA, 75 bp, synthetic construct
  source 1..75: mol_type = other DNA
gatccggcgattgccggtgcggcaccttcattaacccgtgttcatcagcgtgcggatgccctgatgcgggagctg

SEQ ID NO: 204268 - DNA, 75 bp, synthetic construct
  source 1..75: mol_type = other DNA
gtgatgtaatactcttttctaaaccggttccgactgctgtgtttgtcaccataatattgctttgtgcttatttta

SEQ ID NO: 204269 - DNA, 75 bp, synthetic construct
  source 1..75: mol_type = other DNA
catcgtaaaccttcttatttgcgctgccgtcttatgggctcgtgggaacgtagcgcgtctcgttgatacgctgag

SEQ ID NO: 204270 - DNA, 75 bp, synthetic construct
  source 1..75: mol_type = other DNA
atggtaacaagtgatccgtcagcgatggtgaatgcaggtatttgtgcagtcattgtccttgtcctgatgttctac

SEQ ID NO: 204271 - DNA, 75 bp, synthetic construct
  source 1..75: mol_type = other DNA
aatgctatgacagttgcttcagtggttaagccatatgactttagtaatcttggtgccataaatagtatagataag

SEQ ID NO: 204272 - DNA, 75 bp, synthetic construct
  source 1..75: mol_type = other DNA
tcgcatgataacaccagaacttcagtcggtgcccgtctggcaatgtatgaagttggtttaaaaacatattctcca

SEQ ID NO: 204273 - DNA, 75 bp, synthetic construct
  source 1..75: mol_type = other DNA
gtctggcaatgtatgaagttggcttaaaaacatattctccaataggacaatcactggaaaaacgtgcggaaaaaa

SEQ ID NO: 204274 - DNA, 75 bp, synthetic construct
  source 1..75: mol_type = other DNA
gattaccggcaaatggcgaaaggctggacgcaggggacgtattcttcccttgccctgaaagcggttcagttatcg

SEQ ID NO: 204275 - DNA, 75 bp, synthetic construct
  source 1..75: mol_type = other DNA
atgaactggaatctttcgccagtgcagtcaccggacgtttccgtaacccgtacatcaagcatcaactgctgtcta

SEQ ID NO: 204276 - DNA, 75 bp, synthetic construct
  source 1..75: mol_type = other DNA
acgatggtttcctcgacaccgctgaacacttttacctgtttgtgattcaggggccgaaatccttagcgactgaac

SEQ ID NO: 204277 - DNA, 75 bp, synthetic construct
  source 1..75: mol_type = other DNA
agcgatgggggggctgggctgcgagcgaaggttgcagtgtctactatccacctgtttccgctggatttaagaatc

SEQ ID NO: 204278 - DNA, 75 bp, synthetic construct
  source 1..75: mol_type = other DNA
atttgtgcacgttactgtggtgaatcgatattccgtgccattgtgtatggcaatgcgtttgatgtggatttatgg

SEQ ID NO: 204279 - DNA, 75 bp, synthetic construct
  source 1..75: mol_type = other DNA
atgacctttacggaaaaattgtagtggcaatactcgacggctctgctgaagctaccgttaaaaagctggtatggg

SEQ ID NO: 204280 - DNA, 75 bp, synthetic construct
  source 1..75: mol_type = other DNA
cctgcgggatgttacttatggtcataagtggactgtcacaggcaactgaaataagtctggagggcctccaccgga

SEQ ID NO: 204281 - DNA, 75 bp, synthetic construct
  source 1..75: mol_type = other DNA
gcaaaatcagatactttagggaggctgggcttttatcagttcgattgggtgtcaggttttacgactaatgaagac

SEQ ID NO: 204282 - DNA, 75 bp, synthetic construct
  source 1..75: mol_type = other DNA
gcgccgatgccgcaggcatcattgtgacttcccttgtgattaaccgtcagttgtggctgtaccacgacagcggtg

SEQ ID NO: 204283 - DNA, 75 bp, synthetic construct
  source 1..75: mol_type = other DNA
atgcaatatgcgaaacctgtcactctgaacgttgaagagtgcgaccgcctttcctttctgccttacctgtttggc

SEQ ID NO: 204284 - DNA, 75 bp, synthetic construct
  source 1..75: mol_type = other DNA
gctggtgaagggggcattgttatcggtaattatgttcatatagctgtttattcatctttaattggtgctggaaaa

SEQ ID NO: 204285 - DNA, 75 bp, synthetic construct
  source 1..75: mol_type = other DNA
gattgtgaaccttattaatgatcgtaccgatgatatttgtatggaagaccatggtacacaaaatggacgatgggg

SEQ ID NO: 204286 - DNA, 75 bp, synthetic construct
  source 1..75: mol_type = other DNA
aggaccgccggacaggctgactgtttcagccagaagcgcagattttcgggatgaatttaacgttaaacgtgaggt

SEQ ID NO: 204287 - DNA, 75 bp, synthetic construct
  source 1..75: mol_type = other DNA
taccgtcagcccggattacggttttacgaccagtctggagcttgaagtgaggattgatgatttcgaaatggaatg

SEQ ID NO: 204288 - DNA, 75 bp, synthetic construct
  source 1..75: mol_type = other DNA
caaaggctggttgcagaaaatccgtgaagatgcaccggatcacgttatgggcagcaccaccacgggcggtgaaac

SEQ ID NO: 204289 - DNA, 75 bp, synthetic construct
  source 1..75: mol_type = other DNA
gtgccacaacgaaaaaaaaggataagagcagcagcagggaaggtgactacattgaaggcgctgaaggtaacgttt

SEQ ID NO: 204290 - DNA, 75 bp, synthetic construct
  source 1..75: mol_type = other DNA
caaaagccgagcacaccattgataacagcggctttaccacgcagcttgagcttgaagcaaaaattccagaatgga

SEQ ID NO: 204291 - DNA, 75 bp, synthetic construct
  source 1..75: mol_type = other DNA
acagccaccggttcagcatcgcggacagggaggcgtataccggtgtgacggcctactggctggatacacggcagg

SEQ ID NO: 204292 - DNA, 75 bp, synthetic construct
  source 1..75: mol_type = other DNA
gatgccggaatatgaaggcggattctggcacttcatccgcctgccggacggtggcggctacatgatgccggatgg

SEQ ID NO: 204293 - DNA, 75 bp, synthetic construct
  source 1..75: mol_type = other DNA
gaaaactggtttgaccgtaccgtgagtgctgatgccgcaggcatcatccttacctcccttgtgattaaccgccag

SEQ ID NO: 204294 - DNA, 75 bp, synthetic construct
  source 1..75: mol_type = other DNA
gatgcgcgatgcgcagttgtggagctacatcgaatttcaccctgaatgcaacgcgatttacgcggcgctggactg

SEQ ID NO: 204295 - DNA, 75 bp, synthetic construct
  source 1..75: mol_type = other DNA
gatgccggaatatcagggaggcttctggcatttcatccgcctgccggacggtggcggttacatgatgccggatgg

SEQ ID NO: 204296 - DNA, 75 bp, synthetic construct
  source 1..75: mol_type = other DNA
gaaaactggtttgaccgcacggtcagtgccgatgccgcaggcatcattttgacttcccttgtgattaaccgccag

SEQ ID NO: 204297 - DNA, 75 bp, synthetic construct
  source 1..75: mol_type = other DNA
tgatgccggaatatgaaggcggattctggcacttcatccgcctgccggacggtggcggttacatgatgccggatg

SEQ ID NO: 204298 - DNA, 75 bp, synthetic construct
  source 1..75: mol_type = other DNA
atgcagtatgcgaaacctgtcactctgaacgttgaagagtgcgaccgtctctcctttctgccgtatctgtttggc

SEQ ID NO: 204299 - DNA, 75 bp, synthetic construct
  source 1..75: mol_type = other DNA
atgcagtatgcgaaatctgtcactctgaacgttgaagagtgcgaccgtctgtcttttctgccttacctgtttggc

SEQ ID NO: 204300 - DNA, 75 bp, synthetic construct
  source 1..75: mol_type = other DNA
atgcagggctgacacacctgtacaggatgcgcgatgcacagttgtggagccacatcgaatttcaccctgaatgca

SEQ ID NO: 204301 - DNA, 75 bp, synthetic construct
  source 1..75: mol_type = other DNA
accaatatctgaaagaagcaagaaattattggagcttgaatctgtatttaaaccaagcgctattggagataatct

SEQ ID NO: 204302 - DNA, 75 bp, synthetic construct
  source 1..75: mol_type = other DNA
tatggcgttatgctggctggggtcgcggtgatggggcgggtcatttggtggatggcacgcaattacccgcagcgt

SEQ ID NO: 204303 - DNA, 75 bp, synthetic construct
  source 1..75: mol_type = other DNA
atgcagtatgcgaaacctgtcaccctgaacgttgaagagtgcgaccgcctttcttttctgccttacctgtttggc

SEQ ID NO: 204304 - DNA, 75 bp, synthetic construct
  source 1..75: mol_type = other DNA
tatccgccatcgctcatcggtacggtctgaaaccacaaatcagcgaaatgctgatggatatcgaaatcgaccacg

SEQ ID NO: 204305 - DNA, 75 bp, synthetic construct
  source 1..75: mol_type = other DNA
cgagcacaccatcgataacagcggctttaccacgcagcttgagcttgaggcaaaaatctcggaatggatagcaga

SEQ ID NO: 204306 - DNA, 75 bp, synthetic construct
  source 1..75: mol_type = other DNA
ggattattgcaaaagccgagcacaccattgataacagcggctttaccacgcagcttgagcttgaagcaaaaatcc

SEQ ID NO: 204307 - DNA, 75 bp, synthetic construct
  source 1..75: mol_type = other DNA
attgataacagtggctttaccacgcagcttgagcttgaagccaaaatcccggaatggatagcagaaacagagtaa

SEQ ID NO: 204308 - DNA, 75 bp, synthetic construct
  source 1..75: mol_type = other DNA
tattggaaacggcaaaggaggatgtaagcggaactaaacctaggaacattaaaaaaattattgcttgtgcatttg

SEQ ID NO: 204309 - DNA, 75 bp, synthetic construct
  source 1..75: mol_type = other DNA
cgagcacaccattgataacagcggctttaccacacagcttgagcttgaggcaaaaatcccggaatggatagcaga

SEQ ID NO: 204310 - DNA, 75 bp, synthetic construct
  source 1..75: mol_type = other DNA
gcaggaacagcaacagaaagcgattagtgcgttcaataaggttcacgctgatgcatgggcttctggtgatccatc

SEQ ID NO: 204311 - DNA, 75 bp, synthetic construct
  source 1..75: mol_type = other DNA
ttgctatatagcataattatattttgtgttttcccttgtctcattatggttctgatttctccatttttcctaagt

SEQ ID NO: 204312 - DNA, 75 bp, synthetic construct
  source 1..75: mol_type = other DNA
tacgtgaggcagcacaaaactatcaatcgacgctggcgtggtatgaggccatcgcggataacccaaatgctgagc

SEQ ID NO: 204313 - DNA, 75 bp, synthetic construct
  source 1..75: mol_type = other DNA
caggaaaacagtgaaaaactggcggccgatatgatcatcagtcagaaacgcatgggaggcctgcaggccgtgcgt

SEQ ID NO: 204314 - DNA, 75 bp, synthetic construct
  source 1..75: mol_type = other DNA
acgggggtacgcgcctactggcttgatcttaattacgggaaaaagaaaaaagtcagcgtgaaacgccgtaaaccg

SEQ ID NO: 204315 - DNA, 75 bp, synthetic construct
  source 1..75: mol_type = other DNA
ccatcgctcatcggtacggtctgaaaccgcaaatcagcgaaatgctgatggatatcgaaatcgaccacgccgacc

SEQ ID NO: 204316 - DNA, 75 bp, synthetic construct
  source 1..75: mol_type = other DNA
gagcacaacatcgacgacagcggcttcaccacgcggcttgaactggaattaaaaattcctgaatggatagcacaa

SEQ ID NO: 204317 - DNA, 75 bp, synthetic construct
  source 1..75: mol_type = other DNA
tctgaaaccgcaaatcagcgaaatgctgatggatatcgaaatcgaccacgccgaccagaccgagaaagtgacatg

SEQ ID NO: 204318 - DNA, 75 bp, synthetic construct
  source 1..75: mol_type = other DNA
acgccgtggtgatggatgccgtcaatgagcttatcgatgtggtctaccaggaagatgacgatctggtggtgattt

SEQ ID NO: 204319 - DNA, 75 bp, synthetic construct
  source 1..75: mol_type = other DNA
agaccagatccagcagtccgccgcattcctgacgctgattaacgttacgccagtgactgagcagtccggtcagct

SEQ ID NO: 204320 - DNA, 75 bp, synthetic construct
  source 1..75: mol_type = other DNA
gcgcctttcttcccggcaaatgcgctgctgatcacccgtctggataacttgtctatctactggcaggaagacacc

SEQ ID NO: 204321 - DNA, 75 bp, synthetic construct
  source 1..75: mol_type = other DNA
cacaccgggtgcggtgaaagtcgggaaagggggcgaatatgccaacctggacgccgtagtgatggatgccgtcaa

SEQ ID NO: 204322 - DNA, 75 bp, synthetic construct
  source 1..75: mol_type = other DNA
gcgtctgaacggtgtggcagttgaagagctgtccagcaagttcaccatggagccgtctgtgcagcagacgctgga

SEQ ID NO: 204323 - DNA, 75 bp, synthetic construct
  source 1..75: mol_type = other DNA
tgaatccgttaacgaagcctatgtggttgaagactaccgctgcgctgcactggtggaaaacatccagattggcga

SEQ ID NO: 204324 - DNA, 75 bp, synthetic construct
  source 1..75: mol_type = other DNA
atgaccgacaccaccatgcaattgctcagtcagagcacagacccccgtgaaaaatgccggatttttgatattctc

SEQ ID NO: 204325 - DNA, 75 bp, synthetic construct
  source 1..75: mol_type = other DNA
cattgataacagtggctttaccacacagcttgagcttgaggcaaaaatcccggaatggatagcggaaacagagtg

SEQ ID NO: 204326 - DNA, 75 bp, synthetic construct
  source 1..75: mol_type = other DNA
aaagcggtaatctgttattcatcatgccaggtggtggcgtgaacgcacagggccagccgttgccctcgttcgcca

SEQ ID NO: 204327 - DNA, 75 bp, synthetic construct
  source 1..75: mol_type = other DNA
aaatgcgaacagaccaactttgatacggtgctgacctacgcaaaactggacctgtgggcgaagttccaggacttc

SEQ ID NO: 204328 - DNA, 75 bp, synthetic construct
  source 1..75: mol_type = other DNA
gcagcaccaccacgggcggtaaaaccacaccgggcgcagtgaaagtcggcaaaggtggcgaatatgccaacctgg

SEQ ID NO: 204329 - DNA, 75 bp, synthetic construct
  source 1..75: mol_type = other DNA
attgattcggcggatggtttgccgatggtggtgtacaacattccagccctgagcggggtaaaactgaccctggat

SEQ ID NO: 204330 - DNA, 75 bp, synthetic construct
  source 1..75: mol_type = other DNA
gttcaccgcctggtgcgtaaaagcccgtttgactccggcggtcgtcgccacacgtcgttcagctctgcgtttgtt

SEQ ID NO: 204331 - DNA, 75 bp, synthetic construct
  source 1..75: mol_type = other DNA
ctattgctcacagtaagttagaaactgatattgaaacaccgattgcatggaaacaatactcgtatcgaattcata

SEQ ID NO: 204332 - DNA, 75 bp, synthetic construct
  source 1..75: mol_type = other DNA
agtttacccttcttttgaagtttcaacatgccgaaacgaataccaatatggatcatctttccttttgggcgttcg

SEQ ID NO: 204333 - DNA, 75 bp, synthetic construct
  source 1..75: mol_type = other DNA
gatcgcggcgctgattgcctcactcaacgggcagagcgggttgttctggacagagacggtcactacggtgatccg

SEQ ID NO: 204334 - DNA, 75 bp, synthetic construct
  source 1..75: mol_type = other DNA
cgtttgactccggcggtcgtcgccacacgtcgtttagttccgcgtttgtttacccagaagtggatgacgatattg

SEQ ID NO: 204335 - DNA, 75 bp, synthetic construct
  source 1..75: mol_type = other DNA
atatcgaaatcaatccggcggatctgcgcatcgacgtttatcgcgcatccggcgcgggcggtcagcacgttaacc

SEQ ID NO: 204336 - DNA, 75 bp, synthetic construct
  source 1..75: mol_type = other DNA
ttttcttaatactgctgatgccagtctcttatcaacctatactaccagccatggcgatgctttattgaaaacaac

SEQ ID NO: 204337 - DNA, 75 bp, synthetic construct
  source 1..75: mol_type = other DNA
ccaggtaacgcttgggaacaactatgtttcggaagtgaaaaatgggcttacgcgggaaattccttttgccatccg

SEQ ID NO: 204338 - DNA, 75 bp, synthetic construct
  source 1..75: mol_type = other DNA
ccagcttcattatgccgtcgattattgaccgctcaccgctgatggtggcggtttcctctggcggtacttctccgg

SEQ ID NO: 204339 - DNA, 75 bp, synthetic construct
  source 1..75: mol_type = other DNA
tgattagccatcgcactaaccctgaatgctacccatcgtttgaagtatcgacatgcagggaagaatataattttg

SEQ ID NO: 204340 - DNA, 75 bp, synthetic construct
  source 1..75: mol_type = other DNA
aaggtattgtgttatgcaccaatacgatgcataaagtggcggatgccattgagtctcgttgctctctgcctttct

SEQ ID NO: 204341 - DNA, 75 bp, synthetic construct
  source 1..75: mol_type = other DNA
gggcctatgagtatagtgacgatagctggtatttacgattccgtttttactggaccccggaatttaaacctcaaa

SEQ ID NO: 204342 - DNA, 75 bp, synthetic construct
  source 1..75: mol_type = other DNA
acagcaaagctgcataccggtttctgggtaaaatcctcaacaacgtgaagaagtggcagatcccgcgattcatca

SEQ ID NO: 204343 - DNA, 75 bp, synthetic construct
  source 1..75: mol_type = other DNA
aactggtggtgcctaacggttcgattggttttcgctggggagaaaaaggcaaatggaatctggaatccattgccg

SEQ ID NO: 204344 - DNA, 75 bp, synthetic construct
  source 1..75: mol_type = other DNA
gcggtcgatccggcgtgggaatcacgcagcgactgggaaatctacaaaggtatcgctaaagccttttcgcaagtg

SEQ ID NO: 204345 - DNA, 75 bp, synthetic construct
  source 1..75: mol_type = other DNA
gatgggtaggaaatcacgcgctggcgtttattggcgacacactttcggcaaagggcgagaaagtgccggagctgt

SEQ ID NO: 204346 - DNA, 75 bp, synthetic construct
  source 1..75: mol_type = other DNA
ctcggatatgcatccgtttattcatccgctttctgcggcggtcgatccggcgtgggaatcacgcagcgactggga

SEQ ID NO: 204347 - DNA, 75 bp, synthetic construct
  source 1..75: mol_type = other DNA
aggcaaatggaacctggaatccattgccgccggtacggaaaccgaattgtcgttaaccctgctcggtcaacatga

SEQ ID NO: 204348 - DNA, 75 bp, synthetic construct
  source 1..75: mol_type = other DNA
agtcaaagcgtggcaagcgctgggcgagatcaccggacgcgaacatacccatctggcgctgcataaagaggacga

SEQ ID NO: 204349 - DNA, 75 bp, synthetic construct
  source 1..75: mol_type = other DNA
ctatatggagtagatactacgttttgtttccgacttaataaattgaaaataaatgataaaattaagattatagat

SEQ ID NO: 204350 - DNA, 75 bp, synthetic construct
  source 1..75: mol_type = other DNA
acaacttcgaagtccgtgggttcgctaccgtcaacaacgccgatatgccagttcgtctggttgttctgagaaacg

SEQ ID NO: 204351 - DNA, 75 bp, synthetic construct
  source 1..75: mol_type = other DNA
atgaaaggacataacttcttaccactggcgatctctctggtgtttctttctggctgccagcaactcaacgaaggc

SEQ ID NO: 204352 - DNA, 75 bp, synthetic construct
  source 1..75: mol_type = other DNA
gtttaccggcgagaccattgagcgtgtgaatatccataccggcgaggtcgaggttatctatcgcgcgtcacaggg

SEQ ID NO: 204353 - DNA, 75 bp, synthetic construct
  source 1..75: mol_type = other DNA
cctgacgccggccagcggattcacctccgacagcaaacgtcagttcgccagcatcggcgcagaattcaacgcctg

SEQ ID NO: 204354 - DNA, 75 bp, synthetic construct
  source 1..75: mol_type = other DNA
ctcccattatggtgtggctcctctggcaaacccggctttactgacaaagcacaacagcaatgatgatttcagcct

SEQ ID NO: 204355 - DNA, 75 bp, synthetic construct
  source 1..75: mol_type = other DNA
cgtgggtgtgggtggtaaccttcgtcgccattttaaccgccgcgaatctgaagagcgtcaacctggtcgctaact

SEQ ID NO: 204356 - DNA, 75 bp, synthetic construct
  source 1..75: mol_type = other DNA
tcggcggtaagctgttccagtcgattttcctttgcaccacgtttgtgaacacgttagcgtctggcctggcctcac

SEQ ID NO: 204357 - DNA, 75 bp, synthetic construct
  source 1..75: mol_type = other DNA
attcctgaaaaaaaaatatgtagctctgtaattaaaaatcataatcagattttcatatatgattatatatctttg

SEQ ID NO: 204358 - DNA, 75 bp, synthetic construct
  source 1..75: mol_type = other DNA
atgttagatctcaatatgttgctgttcagcaccagtgactttatctgcattggcattgtcgccctaccgctgacg

SEQ ID NO: 204359 - DNA, 75 bp, synthetic construct
  source 1..75: mol_type = other DNA
aaaaaccttttaatttgaagcaaaaaaaagaactgctaagaaatagttttagaaaaggctttgtggatagagtat

SEQ ID NO: 204360 - DNA, 75 bp, synthetic construct
  source 1..75: mol_type = other DNA
aggtctttctactcttatcatattaatggtgattttaaactattgctagacaggatttcttttttgactagtaac

SEQ ID NO: 204361 - DNA, 75 bp, synthetic construct
  source 1..75: mol_type = other DNA
caaaccgaagaagccgatagaacctgtttatgctaatcgcttctttgaagtattaagcgaaagcatcagccagag

SEQ ID NO: 204362 - DNA, 75 bp, synthetic construct
  source 1..75: mol_type = other DNA
ccagcagtctgctcaatgaaccgcaggtcgacacctctacgccgccgaaaaacacggcgcctgacgcaccgcgta

SEQ ID NO: 204363 - DNA, 75 bp, synthetic construct
  source 1..75: mol_type = other DNA
tccgtcgcggtattacccgactcgccacacgccagagagatggcgaccaaagcgcataacagcggtcatgaagta

SEQ ID NO: 204364 - DNA, 75 bp, synthetic construct
  source 1..75: mol_type = other DNA
cttatcacgtagcctgattaaattacaatataatgtacacattacggaatgtaatttatattgtgttttttttgt

SEQ ID NO: 204365 - DNA, 75 bp, synthetic construct
  source 1..75: mol_type = other DNA
cagtttgatgaaatcaatattgtgcgcggtcagctcgttcctggtgggcggctggggataaaaatcacagaactg

SEQ ID NO: 204366 - DNA, 75 bp, synthetic construct
  source 1..75: mol_type = other DNA
tattaagcgaaagcatcagccagagcacgctgatcgtttacttccagcatcagtggcaaggctggggtaaacagc

SEQ ID NO: 204367 - DNA, 75 bp, synthetic construct
  source 1..75: mol_type = other DNA
tgttcttcttgcgtttggtatgtcgatggatgcatttgctgcatcaatcggtaaaggtgccaccctccataaacc

SEQ ID NO: 204368 - DNA, 75 bp, synthetic construct
  source 1..75: mol_type = other DNA
tactgttgaacaacccacctgtacaactattgcactggactcagtaaatcccaatgtcagtgggactgaaattaa

SEQ ID NO: 204369 - DNA, 75 bp, synthetic construct
  source 1..75: mol_type = other DNA
aactgtacactttcttaacgccgccagtagcgatgatatgtctggctatacaacagaaaatggttctgttttatt

SEQ ID NO: 204370 - DNA, 75 bp, synthetic construct
  source 1..75: mol_type = other DNA
gtgaaagtgtattcaactgtaaataatagcgaagtacagttaaatgccgatggtagcaactcggttatttttaac

SEQ ID NO: 204371 - DNA, 75 bp, synthetic construct
  source 1..75: mol_type = other DNA
ggccaacaacgatcagaaagccattaccgaaacgaccgaacagttaatcaatgaaccgctcgatcatcgcggtga

SEQ ID NO: 204372 - DNA, 75 bp, synthetic construct
  source 1..75: mol_type = other DNA
gtgcaacgcgggtattccattctcggtggttccgggtattaccgcagcttctggttgctctgcctattcgggtat

SEQ ID NO: 204373 - DNA, 75 bp, synthetic construct
  source 1..75: mol_type = other DNA
ttctggcgcgcctgctgcgtgaaaaactcgaatcactgctgccgttgcatctgggccaggtagcgaaatatgccg

SEQ ID NO: 204374 - DNA, 75 bp, synthetic construct
  source 1..75: mol_type = other DNA
tgattcagttatgcagtgtgatactgctattttttaccacatcctggtatgcattggcgaatgaatgttatatag

SEQ ID NO: 204375 - DNA, 75 bp, synthetic construct
  source 1..75: mol_type = other DNA
ggtatgatggtgggtcgctttatcggttcaattattgggaaaaaagcggaaattcttggcgggctggtgcttatt

SEQ ID NO: 204376 - DNA, 75 bp, synthetic construct
  source 1..75: mol_type = other DNA
gctcaattattgggaaaaaagcggaaattctcggcgggctggtactgatcggtattggcgtccagatcctctgga

SEQ ID NO: 204377 - DNA, 75 bp, synthetic construct
  source 1..75: mol_type = other DNA
tgcttcatatatacagtgcagtgctattatttttggcatcgtcatggtatgtttttgctggcacgggttctgaat

SEQ ID NO: 204378 - DNA, 75 bp, synthetic construct
  source 1..75: mol_type = other DNA
acgactcctgaattcaaaccccaaactggggtttcagaaggatacgccaaaccaggtagaatcgcctcctggtat

SEQ ID NO: 204379 - DNA, 75 bp, synthetic construct
  source 1..75: mol_type = other DNA
gggaaatccctttttctatccgtgctgaatactgttatgccagtaaaattacggttaagttgaaagcggcaaata

SEQ ID NO: 204380 - DNA, 75 bp, synthetic construct
  source 1..75: mol_type = other DNA
gagtatgtgctcattgacaccgctggcgtacgtaaacgcggcaaaatcaccgatgctgtagagaaattctcggta

SEQ ID NO: 204381 - DNA, 75 bp, synthetic construct
  source 1..75: mol_type = other DNA
cggtcgtgcggaaattgaaggccgtgagtttatctgtattgataccggcgggattgatggcacagaagacggtgt

SEQ ID NO: 204382 - DNA, 75 bp, synthetic construct
  source 1..75: mol_type = other DNA
ggtattctcggcgtttaccttaagtgccgcatttgtgaccacagggttaggtaaacgtattgcctatttattgat

SEQ ID NO: 204383 - DNA, 75 bp, synthetic construct
  source 1..75: mol_type = other DNA
gaacaaaaccgatggactggacccggatcaagcaattgttgatttttattcacttggtttaggtgaaatttaccc

SEQ ID NO: 204384 - DNA, 75 bp, synthetic construct
  source 1..75: mol_type = other DNA
agtctgccgatcaaactggcgatagtgggtcgtccgaacgtgggtaagtctacactcactaaccgtattctcggt

SEQ ID NO: 204385 - DNA, 75 bp, synthetic construct
  source 1..75: mol_type = other DNA
actcactaaccgtattctcggtgaagatcgcgtcgtggtttatgacatgcccggcacgacgcgtgatagcatcta

SEQ ID NO: 204386 - DNA, 75 bp, synthetic construct
  source 1..75: mol_type = other DNA
ttgctgattggtaaaattggtaacactacgctgggactgggctacgttacggtattcctcgatctggtactcgca

SEQ ID NO: 204387 - DNA, 75 bp, synthetic construct
  source 1..75: mol_type = other DNA
ggttgatgaatccaccgtggcaatcgttgttatggcgaccatgctgctgctgggtatcgttacctgggaagacgt

SEQ ID NO: 204388 - DNA, 75 bp, synthetic construct
  source 1..75: mol_type = other DNA
atggaagctaattctgatattagcgatcccatgtattattggctttatgccagctccggcaggattaagcgaact

SEQ ID NO: 204389 - DNA, 75 bp, synthetic construct
  source 1..75: mol_type = other DNA
taacgatattaaatcctggtggttggtcggtgcggtactgacgatattaaccttcctggtgcatatcaccctcgg

SEQ ID NO: 204390 - DNA, 75 bp, synthetic construct
  source 1..75: mol_type = other DNA
tggcgaatgtctctggcgcgccgttgatgttaaccgcgctggcgctgctgttttctaactcctacggcggcatgg

SEQ ID NO: 204391 - DNA, 75 bp, synthetic construct
  source 1..75: mol_type = other DNA
ggttgatgaatccaccgtggcaatcgttgttatggcaactatgctgctgctgggggctttgttgaataaatcaga

SEQ ID NO: 204392 - DNA, 75 bp, synthetic construct
  source 1..75: mol_type = other DNA
gccgattgtggtgattcacggcaaccaggtgaaagacctgcctgattcgtacaaacgttacctgatgaactactt

SEQ ID NO: 204393 - DNA, 75 bp, synthetic construct
  source 1..75: mol_type = other DNA
ccggttcaggcggcgactgccgtagaacaagctgtgccacgttatctcaccgggcttggcaccattaccgccgct

SEQ ID NO: 204394 - DNA, 75 bp, synthetic construct
  source 1..75: mol_type = other DNA
cgaacaaaacgccgtggtgatccccaccgccgccctgcaaatgggcaacgaaggccattttgtctgggtactgaa

SEQ ID NO: 204395 - DNA, 75 bp, synthetic construct
  source 1..75: mol_type = other DNA
ctggtgacgccgggcattcaggacagtcagaaagtggtgatccgcgcaggtatttctgcgggcgaccgcgtagtg

SEQ ID NO: 204396 - DNA, 75 bp, synthetic construct
  source 1..75: mol_type = other DNA
gcttaaaacaggtggatatcggcaaccagatttccagcggtgataccaccggtatcgtcgtgctgacccagacgc

SEQ ID NO: 204397 - DNA, 75 bp, synthetic construct
  source 1..75: mol_type = other DNA
tggcgttacatttccaggaaggccagcaggtcaaagcaggcgatttactggcagaaattgaccccagccagttca

SEQ ID NO: 204398 - DNA, 75 bp, synthetic construct
  source 1..75: mol_type = other DNA
atgaaaggcagttataaatcccgttgggtaatcgtggtggttatcgccgccatcgccgcattctggttctggcaa

SEQ ID NO: 204399 - DNA, 75 bp, synthetic construct
  source 1..75: mol_type = other DNA
ctctcattcgagatcgcaagcgagtgtatttgaatatttcattcaaaaagcatctagttcgctcaaatagttcct

SEQ ID NO: 204400 - DNA, 75 bp, synthetic construct
  source 1..75: mol_type = other DNA
ctgagccaggaagtgaaagagcaggtgaaagagacgctggacttccgtctgggctttatcgattttgctcgtgtg

SEQ ID NO: 204401 - DNA, 75 bp, synthetic construct
  source 1..75: mol_type = other DNA
tgaagatcaccagccgccgctggtacgtggtcgtcgtgtgaagctgaaatatgcccacgctggtggttataaccc

SEQ ID NO: 204402 - DNA, 75 bp, synthetic construct
  source 1..75: mol_type = other DNA
ataaacctctggatgctattggtgccgtaatcgtctctgctttagccgttaaaatcctgacgttcctgaataatc

SEQ ID NO: 204403 - DNA, 75 bp, synthetic construct
  source 1..75: mol_type = other DNA
atggaactatggagacggcagcgggaagaatggcacaggcatattttgggtgagagaaaatgggatggatggagc

SEQ ID NO: 204404 - DNA, 75 bp, synthetic construct
  source 1..75: mol_type = other DNA
gccctacaaaattggttgaatatttagagtgtggtgtcgttccagttgtgctctccccacttataggtgattttt

SEQ ID NO: 204405 - DNA, 75 bp, synthetic construct
  source 1..75: mol_type = other DNA
ccgtggactggatacggtgcccaaagtcacccggatacctgagagtgagccggatatctatattttcagcgatgg

SEQ ID NO: 204406 - DNA, 75 bp, synthetic construct
  source 1..75: mol_type = other DNA
cagtagtctgtcgccaggctattgcgctgcgggtgacagctgcagcgcaccggccgccttccttttgtcccttgc

SEQ ID NO: 204407 - DNA, 75 bp, synthetic construct
  source 1..75: mol_type = other DNA
tgatgacgaccttcacctttggcaaataccgtggcaaagcggtttccgacgttgccgaacgcgatccgggctatc

SEQ ID NO: 204408 - DNA, 75 bp, synthetic construct
  source 1..75: mol_type = other DNA
gcacgggaacatatgggaagttacgggctggcgatggtacgacagagtgataactcgtttgtattgctggcgacg

SEQ ID NO: 204409 - DNA, 75 bp, synthetic construct
  source 1..75: mol_type = other DNA
attaactcccgcaccgggcgcacgcaaaatcattttcatattcatatttcttgtattcgtccagatgtacgcgaa

SEQ ID NO: 204410 - DNA, 75 bp, synthetic construct
  source 1..75: mol_type = other DNA
caacgaaatctactgacgctgaaccgtgcttcagccgaggaaattcaggatcatcagtgtgagattttgcgttaa

SEQ ID NO: 204411 - DNA, 75 bp, synthetic construct
  source 1..75: mol_type = other DNA
attatcgtcaggtcagtgcgcagctcccggacaaaaatgccacggaatatgcaaaaaaagaggatgaggttaaaa

SEQ ID NO: 204412 - DNA, 75 bp, synthetic construct
  source 1..75: mol_type = other DNA
ggtgttaactgtacaggctcctgcagctggaaaatctacgttaaaaacggtctggttacctgggaaaaccaacag

SEQ ID NO: 204413 - DNA, 75 bp, synthetic construct
  source 1..75: mol_type = other DNA
ggtgttaactgtacaggctcctgcagctggaaaatctacgttaaaaaaggtctggttacctgggaaacccaacag

SEQ ID NO: 204414 - DNA, 75 bp, synthetic construct
  source 1..75: mol_type = other DNA
tctgtttagatggttcgacatagaatttgttgtagaggacgaacatgcgtcatggtttgaagaagctcagatcaa

SEQ ID NO: 204415 - DNA, 75 bp, synthetic construct
  source 1..75: mol_type = other DNA
ctatccgatttggcagtgcctgcatggattctctgcgctgctttggttgagaaaggaggacgtttagctctaatt

SEQ ID NO: 204416 - DNA, 75 bp, synthetic construct
  source 1..75: mol_type = other DNA
aagcccacattacgccgccaatcagagctgcctaatggttttgtaatttctccttctgatgccaaaagttggacg

SEQ ID NO: 204417 - DNA, 75 bp, synthetic construct
  source 1..75: mol_type = other DNA
gagtgataactcatttgtattgctggcgacacaacgaaatctactgacgcttaaccgtgcttcagccgaggaaat

SEQ ID NO: 204418 - DNA, 75 bp, synthetic construct
  source 1..75: mol_type = other DNA
cgattgcggcggtggtgctggtgcgctttggcaggtttcgcggatcaaatggttttgcctttatgatcaccgcgc

SEQ ID NO: 204419 - DNA, 75 bp, synthetic construct
  source 1..75: mol_type = other DNA
atgaataatttaccggtcgttcgttcatcctggcggattgtgattttgctattgggcttcacctttctttatgcg

SEQ ID NO: 204420 - DNA, 75 bp, synthetic construct
  source 1..75: mol_type = other DNA
gtcgcgcttgctcatgccattggctggcctgcggaccgcgggatgctcaccatctggctggcgcatgtcactttc

SEQ ID NO: 204421 - DNA, 75 bp, synthetic construct
  source 1..75: mol_type = other DNA
cgcagatagcgcaactttatggtcaacgtacagaaggcgaacaggagcaagcgcaatggcgtaagcaaattgctt

SEQ ID NO: 204422 - DNA, 75 bp, synthetic construct
  source 1..75: mol_type = other DNA
gaaattctggcggcgctcgaaagtgttggcgagaccaaatgtatttgtcgtaatgaatatgcagtccatgagcaa

SEQ ID NO: 204423 - DNA, 75 bp, synthetic construct
  source 1..75: mol_type = other DNA
ggtgcggtcggaattgtcggatttatcgcctggtatctgatggcgcgcgcagaaaaacagcggatacgcgatatc

SEQ ID NO: 204424 - DNA, 75 bp, synthetic construct
  source 1..75: mol_type = other DNA
gacctgccgttgcttgatgatgaacatgcaggaaagttgcttcgcctgctgggtgtgttgcgtcgtctgcggggg

SEQ ID NO: 204425 - DNA, 75 bp, synthetic construct
  source 1..75: mol_type = other DNA
ggagcgtaatcgacgtcaccattttggtgaacccgaaccggtactcatgccggcggacagccccccagaaccggg

SEQ ID NO: 204426 - DNA, 75 bp, synthetic construct
  source 1..75: mol_type = other DNA
ttaacggtactgaaagtccattgttaaccgatccgtcgacacctaattttttctggttagcctggcaggcgcgtg

SEQ ID NO: 204427 - DNA, 75 bp, synthetic construct
  source 1..75: mol_type = other DNA
gcaaagtgttacgtgtcgtcggcatggcggcaacgatgcgcttaagcgatcgcggacctgatgatgccgtcaacc

SEQ ID NO: 204428 - DNA, 75 bp, synthetic construct
  source 1..75: mol_type = other DNA
atgagccgtaaaagttttaatgtgggggctgccatgctacagcccggacgacagtcgcaggcggctggcaatatc

SEQ ID NO: 204429 - DNA, 75 bp, synthetic construct
  source 1..75: mol_type = other DNA
catgaaggtttgccagtccattactcaacagtcagccgtatggaagatgcgctgaaatatctttatccgtggatc

SEQ ID NO: 204430 - DNA, 75 bp, synthetic construct
  source 1..75: mol_type = other DNA
tcgcgcaattgacctggcgcgtcgcaacggttcaaccattgccattgggcatcctcacccttcaacggtacgcgt

SEQ ID NO: 204431 - DNA, 75 bp, synthetic construct
  source 1..75: mol_type = other DNA
ccggggagctggcgacagaaaaagtgggcattaaagggtatctggccttttttctcaccataatctttttttccg

SEQ ID NO: 204432 - DNA, 75 bp, synthetic construct
  source 1..75: mol_type = other DNA
gcagccgaactggaaaagcagcaactgattaatcaggccaacgattatatgaacggtaagcaatggcctggtaaa

SEQ ID NO: 204433 - DNA, 75 bp, synthetic construct
  source 1..75: mol_type = other DNA
agcaggtgtatattgagttttccggattaccgccgaaaggaaaaatccgtatcgctggggaaaatggttttcctg

SEQ ID NO: 204434 - DNA, 75 bp, synthetic construct
  source 1..75: mol_type = other DNA
ccttgggaattaggattccagactatttaaagaaacgcattcagcaggaagcggataaaaacggcagatcaatga

SEQ ID NO: 204435 - DNA, 75 bp, synthetic construct
  source 1..75: mol_type = other DNA
agcaaaaaagagatgctgcacatgcgggaagtggtgacatcacttaaaaacccgaaactggtactcagccctgat

SEQ ID NO: 204436 - DNA, 75 bp, synthetic construct
  source 1..75: mol_type = other DNA
gtggcgcgtttttgacttttccgttctgaacggatcgtttgggcaactgcctggtgcgaatggcgctaccacctc

SEQ ID NO: 204437 - DNA, 75 bp, synthetic construct
  source 1..75: mol_type = other DNA
atgaggttcagggtatgaaggaaaaagataaggctgctgataaaaaagagaactttaaaaaagaattcagctttg

SEQ ID NO: 204438 - DNA, 75 bp, synthetic construct
  source 1..75: mol_type = other DNA
atgaataaggttactttagttactctactggtatcagcgtttatgctttctggttgtgatgataaacaagaaaaa

SEQ ID NO: 204439 - DNA, 75 bp, synthetic construct
  source 1..75: mol_type = other DNA
atgaaaaacattatccgtactcccgaaacgcatccgctgacctggcgtctgcgcgatgacaaacagcctgtgtgg

SEQ ID NO: 204440 - DNA, 75 bp, synthetic construct
  source 1..75: mol_type = other DNA
ggttgtccgtacaaaaaaatctacttcaactggaaaagcggcaagtcagaaaaatgtatcttctgttatccgcga

SEQ ID NO: 204441 - DNA, 75 bp, synthetic construct
  source 1..75: mol_type = other DNA
aaggcatggagtacgcatggtttaacaacgtcgaaaccaaaccgggcattggttatcctaaaaactgggaagatc

SEQ ID NO: 204442 - DNA, 75 bp, synthetic construct
  source 1..75: mol_type = other DNA
agaaacctgcgtgggtcgcatccggtatctgggcgtgctgctttacgacgccgaccgcatcgaggaagcggcgag

SEQ ID NO: 204443 - DNA, 75 bp, synthetic construct
  source 1..75: mol_type = other DNA
aggttttcgtcacagtagcgcaggagaaaagttttagtcgtgcaggagagcgtatcggcttgagccagtcggcag

SEQ ID NO: 204444 - DNA, 75 bp, synthetic construct
  source 1..75: mol_type = other DNA
tgatttccgacaagatttccgccgccatgctgtatgtgccgcagttgctgctgcacgtcagccgtccggttcgct

SEQ ID NO: 204445 - DNA, 75 bp, synthetic construct
  source 1..75: mol_type = other DNA
atgagtattcaggaagcatcagacttgatagcgagatatgagcataatgttcttgttgtgggaaattctgcctcc

SEQ ID NO: 204446 - DNA, 75 bp, synthetic construct
  source 1..75: mol_type = other DNA
cgtccgctaccgtaagtcagacgacctcggacaaacctggggcgagattgccaccctgcttgataaacccggtac

SEQ ID NO: 204447 - DNA, 75 bp, synthetic construct
  source 1..75: mol_type = other DNA
gcttcgaaaggtttagatccgtctgaaaacatattagtttatcctagtgaagaggaatctggctttttcgtcgtt

SEQ ID NO: 204448 - DNA, 75 bp, synthetic construct
  source 1..75: mol_type = other DNA
tgtcatcgttatcgccacgggtatcactacattgagtctgttgccacaactgggaaaaattgacagtttcgtcat

SEQ ID NO: 204449 - DNA, 75 bp, synthetic construct
  source 1..75: mol_type = other DNA
ccaacgtcacgataccccagcgggtagcgaatggttgaagagcgtgcgggcttatgagaaagaaattttgagtcg

SEQ ID NO: 204450 - DNA, 75 bp, synthetic construct
  source 1..75: mol_type = other DNA
acccatgacgccgatgaccctgcggggcatgtatttttatatggctgatgcggcgaccttcactgattgcgcgac

SEQ ID NO: 204451 - DNA, 75 bp, synthetic construct
  source 1..75: mol_type = other DNA
tatcgaagctgctcagcgacttcaaagccgcatggttgagtttttggctaaacgatatcccgcatcaaagctgac

SEQ ID NO: 204452 - DNA, 75 bp, synthetic construct
  source 1..75: mol_type = other DNA
agcgtacaccacatgaagtcactgaccactttataaaaatggttcacgctcgtatagcggaagtatcaggctggc

SEQ ID NO: 204453 - DNA, 75 bp, synthetic construct
  source 1..75: mol_type = other DNA
gctgtttctcgcgccggataacgtgctgtggctgctatggaccgcacaaatatccggtaatcaggacaccgccat

SEQ ID NO: 204454 - DNA, 75 bp, synthetic construct
  source 1..75: mol_type = other DNA
cggaaaacgtttcatggtagcgaataacgctgagctggaacggggctatttggctgcccgcggcaacagcgagaa

SEQ ID NO: 204455 - DNA, 75 bp, synthetic construct
  source 1..75: mol_type = other DNA
gctgattgcgaaggtatcgaaacctctttgttcctcgaaaaagacggaacctgggtaatgaatgagcgctatctg

SEQ ID NO: 204456 - DNA, 75 bp, synthetic construct
  source 1..75: mol_type = other DNA
tgcctttactctacttatgcagtatcggcattattttattctgatgatattgcaagatctagagatgagtttata

SEQ ID NO: 204457 - DNA, 75 bp, synthetic construct
  source 1..75: mol_type = other DNA
gaacgcggctgaaaaactgtctgaggtagattttaaagaggttaggcaggcattagccaaaatgcactatacggt

SEQ ID NO: 204458 - DNA, 75 bp, synthetic construct
  source 1..75: mol_type = other DNA
ccgatgctgttaacgtggcacagttgaagtcttccgaagctggcggtgtgcgttacgacaccaaagctgatggtt

SEQ ID NO: 204459 - DNA, 75 bp, synthetic construct
  source 1..75: mol_type = other DNA
tccgtatgaaaatgacggaagaaatcaggaatatagcagacaaaaagacttatgaagtgctatggattgttggca

SEQ ID NO: 204460 - DNA, 75 bp, synthetic construct
  source 1..75: mol_type = other DNA
gcggagcctggattcttgcgtaaggcattcgaagatcctaaccacgccgatgatatttataaagaaattgtagaa

SEQ ID NO: 204461 - DNA, 75 bp, synthetic construct
  source 1..75: mol_type = other DNA
tagtgttataacactttactttcatggacatataaataatgaaaacagatggaagttacgaaatagtgacacatt

SEQ ID NO: 204462 - DNA, 75 bp, synthetic construct
  source 1..75: mol_type = other DNA
aagcaggcggcgttcgctacgacaccaaagctgatggctctatcgactacagcaacatcactctcggtggtggta

SEQ ID NO: 204463 - DNA, 75 bp, synthetic construct
  source 1..75: mol_type = other DNA
gtattgctatcggttctaacgcacgcgcaaatcatgccgacagcattgcaatgggtaatggttctcagactaccc

SEQ ID NO: 204464 - DNA, 75 bp, synthetic construct
  source 1..75: mol_type = other DNA
accagtgaaacctacatcgaagaaaatggtgcaggtattaactatgtgcgtaccaatgataccggtttaaccttc

SEQ ID NO: 204465 - DNA, 75 bp, synthetic construct
  source 1..75: mol_type = other DNA
aacctacatcgaggaaaacggtgcgggtattaactatgtacgtaccaacgacaacggcttagcgttcaacgatgc

SEQ ID NO: 204466 - DNA, 75 bp, synthetic construct
  source 1..75: mol_type = other DNA
cgacaccaacgctgatggttctgttgactatagcaatatcaccctcggtgggggcaacggcggtacgactcgtat

SEQ ID NO: 204467 - DNA, 75 bp, synthetic construct
  source 1..75: mol_type = other DNA
cgcacgcgcaaaccatgcaaacagtattgcaatgggtaacggttctcagaccacccgtggtgcacagactggcta

SEQ ID NO: 204468 - DNA, 75 bp, synthetic construct
  source 1..75: mol_type = other DNA
cgagcattttggtaaaaccaacaacctttctgatttcggcccgaaacaggtagttgagttcggcggaggtactgg

SEQ ID NO: 204469 - DNA, 75 bp, synthetic construct
  source 1..75: mol_type = other DNA
aatttccagaaaaaactttggactaagaagaagtttgttgtttcaagtaattactatattactatggacaaaata

SEQ ID NO: 204470 - DNA, 75 bp, synthetic construct
  source 1..75: mol_type = other DNA
tggtgaaactggtgattcgcttcgcgccgatcggtatttttggcctggtgtcttccactctggccaccaccgggt

SEQ ID NO: 204471 - DNA, 75 bp, synthetic construct
  source 1..75: mol_type = other DNA
gatatgtcgaatgccgtcacctttatggtgaaactggtgattcgcttcgcgccgatcggtatttttggcctggtg

SEQ ID NO: 204472 - DNA, 75 bp, synthetic construct
  source 1..75: mol_type = other DNA
gaactgccaactggtcagcgctggaatccaagtcatatgtacaaattcaatggtcagcaaccgcgccgtccgtgg

SEQ ID NO: 204473 - DNA, 75 bp, synthetic construct
  source 1..75: mol_type = other DNA
caggcgagcgtacccttattctgtggcgcgattgcgacaagatcggttatgaagaattgaataaatatgctaacc

SEQ ID NO: 204474 - DNA, 75 bp, synthetic construct
  source 1..75: mol_type = other DNA
atggattgaattaggcatcttaaatgagaagccatctacctctgatgtggagttgctcaagtttgcaacagttaa

SEQ ID NO: 204475 - DNA, 75 bp, synthetic construct
  source 1..75: mol_type = other DNA
tgctggctggtggcttcgcggcgaacatgaccccagttgacacgggttttttaattaacagtcaatttcagtata

SEQ ID NO: 204476 - DNA, 75 bp, synthetic construct
  source 1..75: mol_type = other DNA
tgctggctggtggcttcgcggcgaacatgacccccgttgatacgggttttttaattaacagccaatttcagtata

SEQ ID NO: 204477 - DNA, 75 bp, synthetic construct
  source 1..75: mol_type = other DNA
ttaattaacagtatgtaccagacagttgagaaaaacggtaacggcctttgtctcagggttggatataccgcccgc

SEQ ID NO: 204478 - DNA, 75 bp, synthetic construct
  source 1..75: mol_type = other DNA
ctgatcccactggcctgtaatatgttcggtatttcgaacgatatcgccatgcaggtggttgccgtcggctttatt

SEQ ID NO: 204479 - DNA, 75 bp, synthetic construct
  source 1..75: mol_type = other DNA
gttggcgccctgaaagccgtagcacccatcctggtgctgatgttggtgatggcttccatcgctaaccaccaacac

SEQ ID NO: 204480 - DNA, 75 bp, synthetic construct
  source 1..75: mol_type = other DNA
attgaggtcatgcgcgggttgctgatgagtatggtttccaaccctatcgacgccctgctaaaaggtaattacatc

SEQ ID NO: 204481 - DNA, 75 bp, synthetic construct
  source 1..75: mol_type = other DNA
tcaggtttatctgactggacttccacagtcagggcaattacaggtttcatggggcaaagataaaaactcaaactg

SEQ ID NO: 204482 - DNA, 75 bp, synthetic construct
  source 1..75: mol_type = other DNA
gaaggggaaattaccgaacgtgataaagtgatattcgccgcctatcaaaccagcggtagcgccatcatcaccaac

SEQ ID NO: 204483 - DNA, 75 bp, synthetic construct
  source 1..75: mol_type = other DNA
tggaactggcaccttcagtaatcctttccctggggattatctctattaccgatggtcttggtgggctgcgtgctg

SEQ ID NO: 204484 - DNA, 75 bp, synthetic construct
  source 1..75: mol_type = other DNA
gggcaaatcaggggggcgcaaaaagccttaccatggcagacggcagccagtgctaactcatcattaggtaatggt

SEQ ID NO: 204485 - DNA, 75 bp, synthetic construct
  source 1..75: mol_type = other DNA
cagtagtgatgattattctggactttggatgactaatccaacggttccatctacgtttaccaatgttgtttcaaa

SEQ ID NO: 204486 - DNA, 75 bp, synthetic construct
  source 1..75: mol_type = other DNA
ctcttaattatcgtggagcttacggtaatacgaatgtcggttacagtcggagtggtgacagcagccagatttatt

SEQ ID NO: 204487 - DNA, 75 bp, synthetic construct
  source 1..75: mol_type = other DNA
ccgtttcaatgcactgctggcagggcgatgatgtttctggttttgaaaacccggaaggttcgctgactggtggga

SEQ ID NO: 204488 - DNA, 75 bp, synthetic construct
  source 1..75: mol_type = other DNA
cgatgatgtttccggttttgaaaacccggaaggttcgctgaccggtgggattcaagctactggtaattatccggg

SEQ ID NO: 204489 - DNA, 75 bp, synthetic construct
  source 1..75: mol_type = other DNA
atgaatgatgaagtgttcagccgcctgattgccccggtaacgcgcggcattcgcctgctgtttggccggggcgtt

SEQ ID NO: 204490 - DNA, 75 bp, synthetic construct
  source 1..75: mol_type = other DNA
ctcggcacaccgtcggtgatgaacatctggatcccggatggtatgaaagatatcaccgttgaccgtctcgctccg

SEQ ID NO: 204491 - DNA, 75 bp, synthetic construct
  source 1..75: mol_type = other DNA
tcagcgtcacgataccccagcgggtagcgaatggctggagagcgtgcgggcttatgagaaagaaattttgagtca

SEQ ID NO: 204492 - DNA, 75 bp, synthetic construct
  source 1..75: mol_type = other DNA
atgaggtgatcagcgagaagctggatccggcgcaccatatcgacgctgttgagagcaaattgtttggcattggcg

SEQ ID NO: 204493 - DNA, 75 bp, synthetic construct
  source 1..75: mol_type = other DNA
atgagtacgcaagaggccacctcgcaacaaccattgttgcaggcaattgacctgaaaaaacattacccggtgaag

SEQ ID NO: 204494 - DNA, 75 bp, synthetic construct
  source 1..75: mol_type = other DNA
gaaagagttcggcgagtccatgccgtttgacggcaagcgaatgatctatggtggattcgaatcaatcatcgacga

SEQ ID NO: 204495 - DNA, 75 bp, synthetic construct
  source 1..75: mol_type = other DNA
atgaagtatgttgatggttttgttgttgccgttcctgccgataaaaaggatgcctatcgggaaatggccgctaag

SEQ ID NO: 204496 - DNA, 75 bp, synthetic construct
  source 1..75: mol_type = other DNA
gaaagagttcggcgaatcaatgccgtttgatggcaaacggatgatttacggtgggtttgagtcaatcatcgacga

SEQ ID NO: 204497 - DNA, 75 bp, synthetic construct
  source 1..75: mol_type = other DNA
tgagtaaacagccgctggagaaaaatacgctgcgcccggagatgagcagcgacgaaattgagcgcattattcgta

SEQ ID NO: 204498 - DNA, 75 bp, synthetic construct
  source 1..75: mol_type = other DNA
tggcgatccccaacgacccgactaaccttggtcgcgcgcttttactgctgcaaaaagagaagctaattactctga

SEQ ID NO: 204499 - DNA, 75 bp, synthetic construct
  source 1..75: mol_type = other DNA
gaaaagggttattacctaccgcgctggatataaccgataatcctcgtcatttgcagattatggaactcgaggggg

SEQ ID NO: 204500 - DNA, 75 bp, synthetic construct
  source 1..75: mol_type = other DNA
agtcgggcaaattctcgaagagccgctgcttattaacaccagtttaagcaaagaacagcgtcgggaaaaagcgtt

SEQ ID NO: 204501 - DNA, 75 bp, synthetic construct
  source 1..75: mol_type = other DNA
tcagcgtatcgccatcgcccgtggtctgatgctcgacccggatgtggtgattgccgatgagccggtttccgcgct

SEQ ID NO: 204502 - DNA, 75 bp, synthetic construct
  source 1..75: mol_type = other DNA
atgagtacgcaagaggccacctcgcaacaaccgctgttgcaggctatcgacctgaaaaaacattatccggtgaag

SEQ ID NO: 204503 - DNA, 75 bp, synthetic construct
  source 1..75: mol_type = other DNA
agggggcgcagcttccgcgcgtactggatgatcccaaagttctccggtgcacgacagcgtatttattgaagataa

SEQ ID NO: 204504 - DNA, 75 bp, synthetic construct
  source 1..75: mol_type = other DNA
ggttataaactggtagcggtgggaaatacgtttgtcttccctatggcgggttattccaaaaaaatcaaaaccgtg

SEQ ID NO: 204505 - DNA, 75 bp, synthetic construct
  source 1..75: mol_type = other DNA
cgaatgtcttccagcatcgaccctttcttgaacaagataatcaggcgcatggttataaactggtagcggtgggaa

SEQ ID NO: 204506 - DNA, 75 bp, synthetic construct
  source 1..75: mol_type = other DNA
cgttacggcgaacgtctgaaaacgccgggactgaacctgttaagcgcgccgggtaacgatgccgtggcaaccagc

SEQ ID NO: 204507 - DNA, 75 bp, synthetic construct
  source 1..75: mol_type = other DNA
agatctatcgtcgcgctaacggcgatgtcggggtgcgtaatgagctgtggatcctgccaaccgtgggctgtgtta

SEQ ID NO: 204508 - DNA, 75 bp, synthetic construct
  source 1..75: mol_type = other DNA
acggtgaaaatcgccaccaacagtgaactggcggcgaagaaaaaacactggatcgactttgacgcgggtcagctg

SEQ ID NO: 204509 - DNA, 75 bp, synthetic construct
  source 1..75: mol_type = other DNA
gatatgcgactacttctctgtttctaataaagatgagttaattatcttactctacaataaaaagtttatttatta

SEQ ID NO: 204510 - DNA, 75 bp, synthetic construct
  source 1..75: mol_type = other DNA
caggattatccaaatccagcctgtatcagggacgaaactggaaaatttattttttgcaatacgctgtttcatgag

SEQ ID NO: 204511 - DNA, 75 bp, synthetic construct
  source 1..75: mol_type = other DNA
tggtgttgttcagtactggtcgcggtacgccgtatggtggttttgttccaacagtgaaaatcgccaccaacagcg

SEQ ID NO: 204512 - DNA, 75 bp, synthetic construct
  source 1..75: mol_type = other DNA
atcttaaagcaatggctgatttgctggcgcacggtcgcccggccagcgacattatgcatgcgcatttgctggtgg

SEQ ID NO: 204513 - DNA, 75 bp, synthetic construct
  source 1..75: mol_type = other DNA
ccatctaccgccatatcttaaagcaatggctgatttgctggcgcacggtcgcccggccagtgacattatgcaggc

SEQ ID NO: 204514 - DNA, 75 bp, synthetic construct
  source 1..75: mol_type = other DNA
atttccgccatctaccgccatatcttaaagcaatggctgatttgctggcgcacggtcgtccggccagcgacatta

SEQ ID NO: 204515 - DNA, 75 bp, synthetic construct
  source 1..75: mol_type = other DNA
tcttcagccacacctacggatgttcgcaactgggtgacgatcacatcaatacccgtactatgctgcaaaacatgg

SEQ ID NO: 204516 - DNA, 75 bp, synthetic construct
  source 1..75: mol_type = other DNA
atcgcgctgggcgtgatgtttcagggcggcttaccgcttcctctgaccattattatgacgcttgcgctggggggg

SEQ ID NO: 204517 - DNA, 75 bp, synthetic construct
  source 1..75: mol_type = other DNA
cagcaaccgttgcaggtttatgattttttgtgcgatgcgggagtcgaattcatccagtttattccggtggtcgag

SEQ ID NO: 204518 - DNA, 75 bp, synthetic construct
  source 1..75: mol_type = other DNA
caaccatgtcggctacaaccatcaccttagcgacatccgcaatctggcttgggaacggacggcattggttcggac

SEQ ID NO: 204519 - DNA, 75 bp, synthetic construct
  source 1..75: mol_type = other DNA
aaaaatttttgcgagaaaaaaagtaataaagaatcttgagagaaaccttgaagaatttgataatttaaaatgtca

SEQ ID NO: 204520 - DNA, 75 bp, synthetic construct
  source 1..75: mol_type = other DNA
ttccggatgttattttacatgagggtgcagcaattggagctctttctgtagtcaaagaggattgtgaagctttta

SEQ ID NO: 204521 - DNA, 75 bp, synthetic construct
  source 1..75: mol_type = other DNA
catcacgccgccggaaaaattgcggtttgctgaaatcgcgacttataacgatcaccgtatggcgatgtgtttttc

SEQ ID NO: 204522 - DNA, 75 bp, synthetic construct
  source 1..75: mol_type = other DNA
gtggagcgtccccagcagtacgggcagatcagcgttcccctgccgggtgcggaaaccttttttgcctgtctgggc

SEQ ID NO: 204523 - DNA, 75 bp, synthetic construct
  source 1..75: mol_type = other DNA
ccgcccatccgggctgacttccggcgacggtgggctttatcactacgaagggcaccgcattcgcctgacaaaaga

SEQ ID NO: 204524 - DNA, 75 bp, synthetic construct
  source 1..75: mol_type = other DNA
gccgttattgccgggatacggtattccggtcatgtgcatcatgataacggcgaaggcagtaagacaggagcgccg

SEQ ID NO: 204525 - DNA, 75 bp, synthetic construct
  source 1..75: mol_type = other DNA
aaaggcggtcaatcttatcagtcaccgggccactatttagtggaaggggatgcatcctcggcgtcttactttctc

SEQ ID NO: 204526 - DNA, 75 bp, synthetic construct
  source 1..75: mol_type = other DNA
ctgggggcaaactggctttatgggctttctatacatggtgcggctatttcgtctgggcaatggcacgttacgttt

SEQ ID NO: 204527 - DNA, 75 bp, synthetic construct
  source 1..75: mol_type = other DNA
cagtgcaactgcatccggcaaaagtactggaaggtgtcgatatcgctatcgaaaacgatgtaattgtcgatattg

SEQ ID NO: 204528 - DNA, 75 bp, synthetic construct
  source 1..75: mol_type = other DNA
cggggagctatttagtggaaggtgatgcctcctcggcctcttacttccttgccgcagcagcggttaaaggcggta

SEQ ID NO: 204529 - DNA, 75 bp, synthetic construct
  source 1..75: mol_type = other DNA
gcggcaacgttgatgttgatggctccgtttccagccagttcctcaccgcactgttaatgactgcgcctcttgcgc

SEQ ID NO: 204530 - DNA, 75 bp, synthetic construct
  source 1..75: mol_type = other DNA
cgctatatgcttaatgcgttaaaggcattaggggtaagctatacgctttcagccgatcgtacgcgttgcgaaatc

SEQ ID NO: 204531 - DNA, 75 bp, synthetic construct
  source 1..75: mol_type = other DNA
aaacacttctcgtccggaagcttcgcaaccggacccgcagacggttgaacaggattttttaacccgacaccctga

SEQ ID NO: 204532 - DNA, 75 bp, synthetic construct
  source 1..75: mol_type = other DNA
gaaagcgaaatattagcgctggtcgaggcattacagcaggaaggggcattagtaaactggaaaaataatcccgac

SEQ ID NO: 204533 - DNA, 75 bp, synthetic construct
  source 1..75: mol_type = other DNA
attcaacgcgccatttatggaccacctttagtgacgatcaaattgacctgaattaccgtagccctgaagtgttgc

SEQ ID NO: 204534 - DNA, 75 bp, synthetic construct
  source 1..75: mol_type = other DNA
ttaccttgagaaaggtgctgagtatgtccgcctggatgccgttggctttatgtggaaagagccgggaacaagctg

SEQ ID NO: 204535 - DNA, 75 bp, synthetic construct
  source 1..75: mol_type = other DNA
attaaatatccggaaacggcgctggtggtggttgattatctcgggctgataaaaacccgaaccacggggcgtcat

SEQ ID NO: 204536 - DNA, 75 bp, synthetic construct
  source 1..75: mol_type = other DNA
ttgaagacgaagactgggcgcgtttctcacaaggggtgggacggatgaccggtcgcaatatctggatggtggacc

SEQ ID NO: 204537 - DNA, 75 bp, synthetic construct
  source 1..75: mol_type = other DNA
attcttggctcgcgtaatgattacgcaggtgtcgaaaaactcggatataatcgtgcgattaaccgtaaaaaatat

SEQ ID NO: 204538 - DNA, 75 bp, synthetic construct
  source 1..75: mol_type = other DNA
acatccagattggtgaacgtatggtgtctgctgccggtggaatgccggtatcccgtcttaagtctgttgcccgtt

SEQ ID NO: 204539 - DNA, 75 bp, synthetic construct
  source 1..75: mol_type = other DNA
ggaatcgatactcatggcggcagggtacaaagtgggggtttacagttcgccgcatctggtgcgttataccgagcg

SEQ ID NO: 204540 - DNA, 75 bp, synthetic construct
  source 1..75: mol_type = other DNA
ctcacaaggagtggggcggatgaccgggcgcaatatctggatggtggaccaggcgaacctgaccattgatgagat

SEQ ID NO: 204541 - DNA, 75 bp, synthetic construct
  source 1..75: mol_type = other DNA
cacagattctttccaccccaatgcagcaaccccagccgcgcagatacagcaacaaacgaactgacagcagtaaga

SEQ ID NO: 204542 - DNA, 75 bp, synthetic construct
  source 1..75: mol_type = other DNA
cacaggttctttccaccccaatgcggtcatcccagccgcgcagatacagcaataagcgaaccgacagcagtaaga

SEQ ID NO: 204543 - DNA, 75 bp, synthetic construct
  source 1..75: mol_type = other DNA
aaatccagggcgttgatgaccggtattgatgaactggacgcaaaaacgggcggtatggagccaggcgacctggta

SEQ ID NO: 204544 - DNA, 75 bp, synthetic construct
  source 1..75: mol_type = other DNA
gcactatgttgcagcgttgcgtcgcaatgccgcactgcgtgatgcagaaaagacgctgaatgaggcgttgcagaa

SEQ ID NO: 204545 - DNA, 75 bp, synthetic construct
  source 1..75: mol_type = other DNA
caaccaaaaaaagtgaaatttcttcactttttcacgcttatttttcgcgttgatttggtgattatgatgataaaa

SEQ ID NO: 204546 - DNA, 75 bp, synthetic construct
  source 1..75: mol_type = other DNA
tttacgacgctgaaggttcagtagatgtctcttacgaaggcattttgccggatctgttccgtgaagggcagggcg

SEQ ID NO: 204547 - DNA, 75 bp, synthetic construct
  source 1..75: mol_type = other DNA
tgaactgtatccggtgacaggcgaacctgtgattgataaacccggtaaaggcgctttttatcaaaccgacttaca

SEQ ID NO: 204548 - DNA, 75 bp, synthetic construct
  source 1..75: mol_type = other DNA
ggcaggcatcacatacgcccagctggtggcatccagccaggctatcgatattaagcgtgcaaataacgccgtgga

SEQ ID NO: 204549 - DNA, 75 bp, synthetic construct
  source 1..75: mol_type = other DNA
atcaaattacatgatatgcatagaaagaaatggcgaaagaataaaacgttgggacagggaaatcatagcagtctc

SEQ ID NO: 204550 - DNA, 75 bp, synthetic construct
  source 1..75: mol_type = other DNA
taagcctgaacaatacattcattatcttattacaaatgtcccactggacggattgggtggagaatatttagaaat

SEQ ID NO: 204551 - DNA, 75 bp, synthetic construct
  source 1..75: mol_type = other DNA
gcccggcgacctggtgttcattgcggctcgtccgtcaatgggcaaaaccgaactggcgctggatatcatcgacaa

SEQ ID NO: 204552 - DNA, 75 bp, synthetic construct
  source 1..75: mol_type = other DNA
taacccggatacacaggcgagaggcatagcagaaatcaacatcacgaaacagcgtaatggcacactcgggaccat

SEQ ID NO: 204553 - DNA, 75 bp, synthetic construct
  source 1..75: mol_type = other DNA
gtacatattgatgatgtgcttccggaagtggttgagcgtgttgaatgccggaatcagggactggagaaatccagg

SEQ ID NO: 204554 - DNA, 75 bp, synthetic construct
  source 1..75: mol_type = other DNA
aagcaccgttcggtgtatattgcagagcagttggcagactacttccgttcacgcggtaaaaacgtccagtcacgc

SEQ ID NO: 204555 - DNA, 75 bp, synthetic construct
  source 1..75: mol_type = other DNA
gcttcttgccgaacccgcactgggatccgaaactgcgtccaatgacaggtcttgataagcctgtcgccgcgttcc

SEQ ID NO: 204556 - DNA, 75 bp, synthetic construct
  source 1..75: mol_type = other DNA
aaccctggccgatcgcgagatttctgccgccgtcagcattgatgttcgtaatatgccggagtcaccagaaatatt

SEQ ID NO: 204557 - DNA, 75 bp, synthetic construct
  source 1..75: mol_type = other DNA
acctgtctggcatgacattaaaaaatcgtgtgatcatggcgccgatgacgcgcacccgcaccatgaatgacgtac

SEQ ID NO: 204558 - DNA, 75 bp, synthetic construct
  source 1..75: mol_type = other DNA
cgaaaattaacgatggcgtacttcgacgctggaatgctctcggtaaagcggataaagaggcgctggccgactatg

SEQ ID NO: 204559 - DNA, 75 bp, synthetic construct
  source 1..75: mol_type = other DNA
aattccaaccagaatgggtgggctttagagataaggggcctaaagaattagcttatcttaccaaagcaacgcata

SEQ ID NO: 204560 - DNA, 75 bp, synthetic construct
  source 1..75: mol_type = other DNA
cgtcaaactgcgcgcaggcgtgctgaaccttggcgacaaggatctcagtcgtgacgactacagctataacgaaga

SEQ ID NO: 204561 - DNA, 75 bp, synthetic construct
  source 1..75: mol_type = other DNA
aaactttgttggttttgagacgggcgctaacggacggcgcataccggtatttagctactacaacgttaacaaagc

SEQ ID NO: 204562 - DNA, 75 bp, synthetic construct
  source 1..75: mol_type = other DNA
ccgtattttcgcgcagctctggcacgtcggccgtatgtctcacgtctctcttcagccaggccacatagcgccggt

SEQ ID NO: 204563 - DNA, 75 bp, synthetic construct
  source 1..75: mol_type = other DNA
ttttctgctggggggcatatcgcctcaacgggtggggaatcagatttgtgatttcaaacgtccttctgacagtaa

SEQ ID NO: 204564 - DNA, 75 bp, synthetic construct
  source 1..75: mol_type = other DNA
cagatatttatgctcctcagttaattatttttttaccagataaaccaaatggaacaggaatattgattattcccg

SEQ ID NO: 204565 - DNA, 75 bp, synthetic construct
  source 1..75: mol_type = other DNA
atttatttcagtcaggagggcatgggttcggtgttcaatgggctcgagaattgcctgttcatatatggcctgagt

SEQ ID NO: 204566 - DNA, 75 bp, synthetic construct
  source 1..75: mol_type = other DNA
aaggagattacgcgaccgggcgcgcaataatgctgcgggtttccatgcggacttcggcaatggtgacgtcaataa

SEQ ID NO: 204567 - DNA, 75 bp, synthetic construct
  source 1..75: mol_type = other DNA
cttcgcaagctgatttcatttggaagaacgcggaagacctgtgggggggggatttcaagcataccgacttcggca

SEQ ID NO: 204568 - DNA, 75 bp, synthetic construct
  source 1..75: mol_type = other DNA
gcactggagtctacacgggaagcatcgctcgatagccaaccagccacgattgagttcttagaagcagagttcagt

SEQ ID NO: 204569 - DNA, 75 bp, synthetic construct
  source 1..75: mol_type = other DNA
gtgatctcgcgcacattaatgaaggcataaaaaaaagccggcatcatgccggcccaaaaaaatataaacaagacg

SEQ ID NO: 204570 - DNA, 75 bp, synthetic construct
  source 1..75: mol_type = other DNA
cagcattgcgctggatcataccgactggctggggccagatcgcgaaagcattggccgcgagaaagcggggatctt

SEQ ID NO: 204571 - DNA, 75 bp, synthetic construct
  source 1..75: mol_type = other DNA
tcagtcaataaaattgccgaacaatgtggttatgccagtacatcttattttatttatgcgttccgcaaacatttc

SEQ ID NO: 204572 - DNA, 75 bp, synthetic construct
  source 1..75: mol_type = other DNA
tgcgttccgcaaacatttcggcaacagtccgaagagagtttctaaggagtaccgttgtcaaaggcacacgggtat

SEQ ID NO: 204573 - DNA, 75 bp, synthetic construct
  source 1..75: mol_type = other DNA
ggcaaaattcggcggattaccggtggttgcgctgagccaactttcccgcgctgtggagtccagacccaataaacg

SEQ ID NO: 204574 - DNA, 75 bp, synthetic construct
  source 1..75: mol_type = other DNA
atgcgcaacaacgaaacaccatctgattaaacatccggaaacggcgctggtggtggttgattatctcgggctgat

SEQ ID NO: 204575 - DNA, 75 bp, synthetic construct
  source 1..75: mol_type = other DNA
tttttctgtacgagcgtatagggatatctacacaggcatctgcagacaggcccgtgtttcaggcgtgattgaccc

SEQ ID NO: 204576 - DNA, 75 bp, synthetic construct
  source 1..75: mol_type = other DNA
acccggaaagccgtcgtatgctgcgcgttaccgttaaggatgcgattgccgctgaccagttgttcaccacgctga

SEQ ID NO: 204577 - DNA, 75 bp, synthetic construct
  source 1..75: mol_type = other DNA
agcccgttggcgatgtgctcccgcgctcgctgcaacttgtcggcggtgacaaccggctttcgcccgcccttcctc

SEQ ID NO: 204578 - DNA, 75 bp, synthetic construct
  source 1..75: mol_type = other DNA
atgattgttgcgctaaacacctggtgtgatcacgcgcacattaatgaaggaataaaaaaagccggcatcattccg

SEQ ID NO: 204579 - DNA, 75 bp, synthetic construct
  source 1..75: mol_type = other DNA
agtccaaagagagtttctaaggagtaccgttgtcaaaggcacacgggtatgaacacggataacaagatgagtgct

SEQ ID NO: 204580 - DNA, 75 bp, synthetic construct
  source 1..75: mol_type = other DNA
gacgacgaagcgatggatcagtaccagatctctatcgcgctggacggcgcaacgctgcacaccaacgccagcgca

SEQ ID NO: 204581 - DNA, 75 bp, synthetic construct
  source 1..75: mol_type = other DNA
acccggaaagccgtcgtatgctgcgcgttaccgttaaagatgcgattgctgccgaccagttgttcactacgctta

SEQ ID NO: 204582 - DNA, 75 bp, synthetic construct
  source 1..75: mol_type = other DNA
atgacggtggttggtacgaatggagcagcgacccgaaaaatccggtagcaacgggtgaacgcggcccggacagca

SEQ ID NO: 204583 - DNA, 75 bp, synthetic construct
  source 1..75: mol_type = other DNA
gaagatttccataatccggacggcaccatgcgtactgcggatgacgtcgcggcaatgtggaaagaatggaatatc

SEQ ID NO: 204584 - DNA, 75 bp, synthetic construct
  source 1..75: mol_type = other DNA
ctgcacaatttgcaacaagggaaagaagttacggcgaaacctgctggcgactggaaagtcattgaagcggcctgg

SEQ ID NO: 204585 - DNA, 75 bp, synthetic construct
  source 1..75: mol_type = other DNA
ctgctcaagtgctgcgcctgatgcgtaatcgctggggctatcccgatattctggaagatgttaacacgcgatacg

SEQ ID NO: 204586 - DNA, 75 bp, synthetic construct
  source 1..75: mol_type = other DNA
cggcgtttatgtagccgaccttgccaaccagtggagggatgaagccgatattacgctggaggaatacaacgccat

SEQ ID NO: 204587 - DNA, 75 bp, synthetic construct
  source 1..75: mol_type = other DNA
caaagactcttatttcaatttcgaaagtgaaatagaatcactatacgacagggcgtattattttggtttaataag

SEQ ID NO: 204588 - DNA, 75 bp, synthetic construct
  source 1..75: mol_type = other DNA
tttctggcaggcgctgcaccgccgcgatgttcaggttcccgatcttctgtctctgcgaggtaatgcccatgcgta

SEQ ID NO: 204589 - DNA, 75 bp, synthetic construct
  source 1..75: mol_type = other DNA
tgtggcctttttgcccgtcgcgcttttaacgttgaaggcattctctgcctgccgattcaggacagcgacaaaagc

SEQ ID NO: 204590 - DNA, 75 bp, synthetic construct
  source 1..75: mol_type = other DNA
agttcagcagcgaaagcggcttcatgctgttgagtcaaaggttagccaggtcgctgaaaccgtcgagcaaatcaa

SEQ ID NO: 204591 - DNA, 75 bp, synthetic construct
  source 1..75: mol_type = other DNA
ctcgacaaaatgagcaccgaacagcttaacgcgtggatcaagcaacataacctgaaagccgatgctccggtcgca

SEQ ID NO: 204592 - DNA, 75 bp, synthetic construct
  source 1..75: mol_type = other DNA
gtgtataaagccgcctattccggaacgctgaaaaccctgctcgacctgctgcctgaacgcgctttgcaaggcaaa

SEQ ID NO: 204593 - DNA, 75 bp, synthetic construct
  source 1..75: mol_type = other DNA
ccccagttcacgccaaatctgcaaactcgtcttgataccgcgctagaaactttctggcaggcgctgcacccgccg

SEQ ID NO: 204594 - DNA, 75 bp, synthetic construct
  source 1..75: mol_type = other DNA
aagttagtgcctactgatttagatgaaatccacaagttagagcgcttcggttggcctgctgcggagatcgccggg

SEQ ID NO: 204595 - DNA, 75 bp, synthetic construct
  source 1..75: mol_type = other DNA
accaggaaggtatcccgtcacagttcatctctgaatgcgccatcgactggagttttatcgccgcctacaaacagg

SEQ ID NO: 204596 - DNA, 75 bp, synthetic construct
  source 1..75: mol_type = other DNA
tttcatcgcctgggcggagtataccggcgagtgtgactatgacgcgtttgacgatgcgtaccgtggcgaggcgga

SEQ ID NO: 204597 - DNA, 75 bp, synthetic construct
  source 1..75: mol_type = other DNA
gatgctgtatctgtaggtgttggtgcaacgacaacaggacgacatgctgttacaagacagataactagtgttgca

SEQ ID NO: 204598 - DNA, 75 bp, synthetic construct
  source 1..75: mol_type = other DNA
gatcgatatgagttctatcgcaccgctggcaagccgtgaaatcagcgaagcgctgaaagcgaaaggcattgatat

SEQ ID NO: 204599 - DNA, 75 bp, synthetic construct
  source 1..75: mol_type = other DNA
gtcctcgctttccttctcgctccagttccttactggaatatgcgcgagaaaagctgaatagcctggatgtggagg

SEQ ID NO: 204600 - DNA, 75 bp, synthetic construct
  source 1..75: mol_type = other DNA
tctctgggtggaggataccggtgagacggattttgacaccttccgcgatgcctggtggggcgaggctgacagtga

SEQ ID NO: 204601 - DNA, 75 bp, synthetic construct
  source 1..75: mol_type = other DNA
gtgtcttaaaaagtaagatgagtgggttaggcatgccagtacagcagccggcaggttttggaacttactttgata

SEQ ID NO: 204602 - DNA, 75 bp, synthetic construct
  source 1..75: mol_type = other DNA
gcaggttttggaacttactttgataaacctgctgctcattacattctgaaaccgcaatttgcagctactcttaga

SEQ ID NO: 204603 - DNA, 75 bp, synthetic construct
  source 1..75: mol_type = other DNA
agcacattaacgcgctggctcataaacacttcaagaacaacgaagagattgtagcggagactggtcatgctctga

SEQ ID NO: 204604 - DNA, 75 bp, synthetic construct
  source 1..75: mol_type = other DNA
acagaaaaggcggatgcagcgcttgataaacgcataacaaacaacaccagtgcgataactaaaaatctgcaggtg

SEQ ID NO: 204605 - DNA, 75 bp, synthetic construct
  source 1..75: mol_type = other DNA
aattgataaataccggactgagagcaaactgacagataaatcccgggcatattatggatcccctgaatatgctgc

SEQ ID NO: 204606 - DNA, 75 bp, synthetic construct
  source 1..75: mol_type = other DNA
attgttattggtaaaaatgccaaatccggcggtggtcagggagtggttatcggtgagaatgcatctcagggagac

SEQ ID NO: 204607 - DNA, 75 bp, synthetic construct
  source 1..75: mol_type = other DNA
aaaggctcccgtcgcgagattaaaggtggaatggccgttctgaccagtattccggccagcaatggagcggagttg

SEQ ID NO: 204608 - DNA, 75 bp, synthetic construct
  source 1..75: mol_type = other DNA
atttccagacaggtgcagatctcagcaaaatcacacatcatgaagtgcactatcaggacggctttgttcagcagg

SEQ ID NO: 204609 - DNA, 75 bp, synthetic construct
  source 1..75: mol_type = other DNA
aagcgttctgaaaaagatcgagagttgcaacagtgggtggcgaaacagagcctggcggaattatgtcgtcgtacc

SEQ ID NO: 204610 - DNA, 75 bp, synthetic construct
  source 1..75: mol_type = other DNA
accagtcatcccggcaaagtacatggtatatggggcttggtacagatatcgacacgggtctaccaattaagcttt

SEQ ID NO: 204611 - DNA, 75 bp, synthetic construct
  source 1..75: mol_type = other DNA
ccacatactgaattgatgaatttactgcggaagaagatatcagaccgtcgttttctcaggctggttgaggtctta

SEQ ID NO: 204612 - DNA, 75 bp, synthetic construct
  source 1..75: mol_type = other DNA
tatcatggttaacgaaacttgagcgtataggcgagaaatcagcagccaacaaacatgagatgttcagtaatctgg

SEQ ID NO: 204613 - DNA, 75 bp, synthetic construct
  source 1..75: mol_type = other DNA
aaaagaagctgctttgcaacgggagaagcagaaaaacaaggaacttcagcaacgccttgctgatcagttcgcact

SEQ ID NO: 204614 - DNA, 75 bp, synthetic construct
  source 1..75: mol_type = other DNA
tatcagaaacgccaggccgctttaagctcaaaactggcaaaggacaacggtaagatcgacaagctgcgtgaccaa

SEQ ID NO: 204615 - DNA, 75 bp, synthetic construct
  source 1..75: mol_type = other DNA
gtcacaaaatcactgtgtgccgggcgagtgtctttcgattgtgactgcggtcgccatcaatactggtatcgctac

SEQ ID NO: 204616 - DNA, 75 bp, synthetic construct
  source 1..75: mol_type = other DNA
ggacgaatcactttctgcttcgtagcagaggcggtagttcgctttatctggcagacaagaaagctaaaactgtca

SEQ ID NO: 204617 - DNA, 75 bp, synthetic construct
  source 1..75: mol_type = other DNA
ggcgtactgaaaaagacagggaactgcaacagtgggtggcacagcagagtcttgctgagctatgccgtcgtaccg

SEQ ID NO: 204618 - DNA, 75 bp, synthetic construct
  source 1..75: mol_type = other DNA
gaagaagcaggcgttcattgatgcgcttgtcatggcaggaacgtcacctgagcaagctgaaaaaatgtttatgga

SEQ ID NO: 204619 - DNA, 75 bp, synthetic construct
  source 1..75: mol_type = other DNA
gtatacaatagttttactaactttgattttggctccgatcttgcggacaagtcacacaataataaacgaaccagt

SEQ ID NO: 204620 - DNA, 75 bp, synthetic construct
  source 1..75: mol_type = other DNA
cagtgccgatcgtctggtatttgccgcttccattctttgccgcacttttggcatcccaccgctgatcattggcat

SEQ ID NO: 204621 - DNA, 75 bp, synthetic construct
  source 1..75: mol_type = other DNA
gtagggggattattaataagcggatttatcgtatggctggcgatgttgtactggttatcgccaatactcgttgaa

SEQ ID NO: 204622 - DNA, 75 bp, synthetic construct
  source 1..75: mol_type = other DNA
ctgccagaaatcatcgtttcactcgcaacatcattacatgaacaacgagacttagctgtcggcactgcgctcggc

SEQ ID NO: 204623 - DNA, 75 bp, synthetic construct
  source 1..75: mol_type = other DNA
gttcgccaggctgaccggagttcaacctgcgcaggtcacacagtggatcaacaaaggattcatcgtggtgaatca

SEQ ID NO: 204624 - DNA, 75 bp, synthetic construct
  source 1..75: mol_type = other DNA
cgacccacgaagacctgaagaacgcgctgcgcccggatatgcagatcaccaagcactacaaagaacgcgtgaagg

SEQ ID NO: 204625 - DNA, 75 bp, synthetic construct
  source 1..75: mol_type = other DNA
tggtagagaatacgcctccacctgaaaacataccgaatataagaacggcggttttaatgcttgcaagattaggag

SEQ ID NO: 204626 - DNA, 75 bp, synthetic construct
  source 1..75: mol_type = other DNA
atcgaccctgataaaagaatgattctggtgaccggtcaccgacgcgaaagtttcggtcgcggctttgaggagatc

SEQ ID NO: 204627 - DNA, 75 bp, synthetic construct
  source 1..75: mol_type = other DNA
ccactcatcaggacatccagattgtttatccggtacatctcaacccgaatgtcagagaaccggttagtcgcattc

SEQ ID NO: 204628 - DNA, 75 bp, synthetic construct
  source 1..75: mol_type = other DNA
aggagtttcttaataacatgatgaatttgatcagtgatgctgttgagcatcatgagaatgagcagatagccagag

SEQ ID NO: 204629 - DNA, 75 bp, synthetic construct
  source 1..75: mol_type = other DNA
acacggcgataccaccacgacgctggccaccagtctggcggcgttttatcagcgcattcctgttggtcacgttga

SEQ ID NO: 204630 - DNA, 75 bp, synthetic construct
  source 1..75: mol_type = other DNA
cttattcgaagagaatcgatgtgaaagtactgactgtatttggtacgcgcccggaagccatcaagatggctccgt

SEQ ID NO: 204631 - DNA, 75 bp, synthetic construct
  source 1..75: mol_type = other DNA
cattcaggaggaagcgccttcgctggggaaaccagtgctggtgatgcgtgaaaccactgaacgtccggaagcagt

SEQ ID NO: 204632 - DNA, 75 bp, synthetic construct
  source 1..75: mol_type = other DNA
aaagaaatgctgaacaatgggcgctgaaaaaagataaaattggtgtactggggttttctgctggggggcatattg

SEQ ID NO: 204633 - DNA, 75 bp, synthetic construct
  source 1..75: mol_type = other DNA
cttatgctatctggtcaggagtcggtattgtcctgattagcttactgtcatggggatggatttgcccctatattt

SEQ ID NO: 204634 - DNA, 75 bp, synthetic construct
  source 1..75: mol_type = other DNA
cttatgctatctggtcaggagtcggtattgtcctgattagcttactatcatggggatttttcggccaacggttgg

SEQ ID NO: 204635 - DNA, 75 bp, synthetic construct
  source 1..75: mol_type = other DNA
gcaaactgattgccgacggcgaaaaagatattgcgtatgaactcggtctgcaaaagctgccgcctgtcagtgttg

SEQ ID NO: 204636 - DNA, 75 bp, synthetic construct
  source 1..75: mol_type = other DNA
aatcccgctttcgctctgctttctcgccggtctggcaatcattttcattatagctgtcatctggaaaatgctctg

SEQ ID NO: 204637 - DNA, 75 bp, synthetic construct
  source 1..75: mol_type = other DNA
acttcgatgtaaatggcaactctccggtaactccggatggctggataagctgtagtgagcgaatgccggatacca

SEQ ID NO: 204638 - DNA, 75 bp, synthetic construct
  source 1..75: mol_type = other DNA
gcgaatgaaatgggcgacttacatcccggggcatcctgacgctaatgatgggtgggtaatacctggtgcgtcgtg

SEQ ID NO: 204639 - DNA, 75 bp, synthetic construct
  source 1..75: mol_type = other DNA
gattgcctggccgattgtcgcccggtcgccgccgcgctggcggcagtcaacgatccggcggtgcgctatgtggtg

SEQ ID NO: 204640 - DNA, 75 bp, synthetic construct
  source 1..75: mol_type = other DNA
agcttttgcacttcgtcataatatggcgaagctggcagaacgtgcaggaatgaatgtccagactctgcgaaacaa

SEQ ID NO: 204641 - DNA, 75 bp, synthetic construct
  source 1..75: mol_type = other DNA
gcgccgcccctttcattacgcggatgttctgctgtgtgcttctgtcttttcatgcctgtcatttgtctgttactg

SEQ ID NO: 204642 - DNA, 75 bp, synthetic construct
  source 1..75: mol_type = other DNA
agcaggcgctgaacgtgtcgttcagcagtcaggtccgggatttatacgaccatcagagctggattaaggaccaga

SEQ ID NO: 204643 - DNA, 75 bp, synthetic construct
  source 1..75: mol_type = other DNA
caaaagctgccgcctgtcagtgttgagcaggcgctgaacgtgtcgttcagcagtcaggtccgggatttatacgac

SEQ ID NO: 204644 - DNA, 75 bp, synthetic construct
  source 1..75: mol_type = other DNA
cgcctggtacggtaacacggtgctgaaaaacagtggtgcactggatatggatgtcacgacggggtacggacccga

SEQ ID NO: 204645 - DNA, 75 bp, synthetic construct
  source 1..75: mol_type = other DNA
aagcaaaagacttagctaaggctgcaggtgtatctcgttcaacagtgattaaatattacggcattagccgtgaga

SEQ ID NO: 204646 - DNA, 75 bp, synthetic construct
  source 1..75: mol_type = other DNA
ttccgttgctaaactgccgtttgcttacgctaaagatggtatctcctacaccttctctatcgttccgaacgcact

SEQ ID NO: 204647 - DNA, 75 bp, synthetic construct
  source 1..75: mol_type = other DNA
gctaaacagtacatcactgcactgaacatcatccactacatgcacgacaagtacagctacgaagcctctctgatg

SEQ ID NO: 204648 - DNA, 75 bp, synthetic construct
  source 1..75: mol_type = other DNA
gaaaaatatcctaacctgacaatccgtgtctctggctacgccgtgcgcttcaacgcactgacccgtgaacagcaa

SEQ ID NO: 204649 - DNA, 75 bp, synthetic construct
  source 1..75: mol_type = other DNA
atctacgccatcggtgaatgcgcaagctggaacaaccgtgtatttggtctggtagcacctggctacaaaatggcg

SEQ ID NO: 204650 - DNA, 75 bp, synthetic construct
  source 1..75: mol_type = other DNA
cgcttatgaccgcgtacacctctcgtcttacttctctcaccacaccgccgaagagctgtcgctggtgcgcgaagg

SEQ ID NO: 204651 - DNA, 75 bp, synthetic construct
  source 1..75: mol_type = other DNA
accagccatctgtgaatgagattggcctgttctatgtgttgtttttcggggcgttggcgctacttgagcttggta

SEQ ID NO: 204652 - DNA, 75 bp, synthetic construct
  source 1..75: mol_type = other DNA
cgcgcattctctatggcacgcggatctcagttctgtttggcctgatgctgaccctctgctccagcgtgatgggcg

SEQ ID NO: 204653 - DNA, 75 bp, synthetic construct
  source 1..75: mol_type = other DNA
ttcacggcaaaactggctgggaacggatgccaacggcggcgatgtactggcgcgcattctgtacggcacgcggat

SEQ ID NO: 204654 - DNA, 75 bp, synthetic construct
  source 1..75: mol_type = other DNA
ccagtaacaagcgatggagtgaagaccatcgatcgcgcgttcaacgaaagcatgaaacaatccaggcacgtccct

SEQ ID NO: 204655 - DNA, 75 bp, synthetic construct
  source 1..75: mol_type = other DNA
ttgggatcaccgccttcttgtcggtggcgatattgttgtctttgctgatctttattggtgaagccgtccgcgacg

SEQ ID NO: 204656 - DNA, 75 bp, synthetic construct
  source 1..75: mol_type = other DNA
atatgttgccgaatgcaatggtcgctaccctcacctttttaccgtttattttatgtagttcgatcaccaccctga

SEQ ID NO: 204657 - DNA, 75 bp, synthetic construct
  source 1..75: mol_type = other DNA
cctaacttctggtggctgctggcgattaccgtcttgtttggctggatgagtctggtgggcgtagtgcgtgcggaa

SEQ ID NO: 204658 - DNA, 75 bp, synthetic construct
  source 1..75: mol_type = other DNA
aggtcggaaatttactgctgaccgacaatttactggctgaaacaaaccgacatttaaatcaacttaacgccttgc

SEQ ID NO: 204659 - DNA, 75 bp, synthetic construct
  source 1..75: mol_type = other DNA
gggctaatagctatgatttgtttgtattatttgtctctgtctctattatttttgacatccatgcgacttctgata

SEQ ID NO: 204660 - DNA, 75 bp, synthetic construct
  source 1..75: mol_type = other DNA
ccgtctgattaataaattattttcaggactatggcgcacaattatcggtatgttcagctcagcattcagatggat

SEQ ID NO: 204661 - DNA, 75 bp, synthetic construct
  source 1..75: mol_type = other DNA
tcttgctatgctggtggagcaaaatcgttttagtcgccagctttattatgcgctgcatgcgtttgaaattacgat

SEQ ID NO: 204662 - DNA, 75 bp, synthetic construct
  source 1..75: mol_type = other DNA
tagctgggacgagcaaggccatttgcaatttattaatacccaggcggcgcgtgtcctgcgtctggatgcgacggc

SEQ ID NO: 204663 - DNA, 75 bp, synthetic construct
  source 1..75: mol_type = other DNA
ccaggcggcgcgcagtagttttccagtgttactttgtggagaagagggcgtcggcaaggcattgctgagtcaggc

SEQ ID NO: 204664 - DNA, 75 bp, synthetic construct
  source 1..75: mol_type = other DNA
cctgaacaccgtgctctacaacgccggacaaatcccgagtggctggacctacagcagcgggaccatttacaacca

SEQ ID NO: 204665 - DNA, 75 bp, synthetic construct
  source 1..75: mol_type = other DNA
cggcgcataatgactgcccgcaaaccacgacaactgacaactcacgccgtcgcaagccacatcgtgggatcgaga

SEQ ID NO: 204666 - DNA, 75 bp, synthetic construct
  source 1..75: mol_type = other DNA
agaacaagaagggtttctcactactcgaactattacttgttttaggcatcattgctgcattagtggtagcggctt

SEQ ID NO: 204667 - DNA, 75 bp, synthetic construct
  source 1..75: mol_type = other DNA
cattaccgcctacatgggcaccatgtacggcatctttaaagaccaggctgatgccatgggaaaaagcaaatgggt

SEQ ID NO: 204668 - DNA, 75 bp, synthetic construct
  source 1..75: mol_type = other DNA
gggaaaacctcctatttcaccatcacggatacaggtattccgagctctgagtgtatttctatcgctcagacactg

SEQ ID NO: 204669 - DNA, 75 bp, synthetic construct
  source 1..75: mol_type = other DNA
tgacgatcggaggcacgaaaatcaccccggccagcgatattgccaccatcaacaccgcctgcggtaacgccaaca

SEQ ID NO: 204670 - DNA, 75 bp, synthetic construct
  source 1..75: mol_type = other DNA
aatgctggtggaacaaaatcgttttagtcgccagctgtattacgcgctgcatgcatttgaaattaccatcccgcc

SEQ ID NO: 204671 - DNA, 75 bp, synthetic construct
  source 1..75: mol_type = other DNA
aaaaaccactgcattttaatgccggatgccgacatggagatggcaacaaacgccattatgggcgcggcctacggc

SEQ ID NO: 204672 - DNA, 75 bp, synthetic construct
  source 1..75: mol_type = other DNA
acccggatgaaaaccgttacctcgcgttggccgaacggacagcagatcgtatcggagttcagtatgccaactctc

SEQ ID NO: 204673 - DNA, 75 bp, synthetic construct
  source 1..75: mol_type = other DNA
ccctgatgatggcagcatcactgcatgctgctcccgaggatgtgctggcacctgagtatgcccgggaagagggat

SEQ ID NO: 204674 - DNA, 75 bp, synthetic construct
  source 1..75: mol_type = other DNA
atggagacggtagcgaattttattcacggcgaatgtgtcaccggttcaggccagcgcattcaggctatcttcaac

SEQ ID NO: 204675 - DNA, 75 bp, synthetic construct
  source 1..75: mol_type = other DNA
aagaaattttcggaccggtgctttctgtggtgcgcgtagcagattacgccagcgcggtggatctgattaaccgac

SEQ ID NO: 204676 - DNA, 75 bp, synthetic construct
  source 1..75: mol_type = other DNA
gcggcaggagaacgctgcatggcgctttccgtggtggtggcggttggcgataaaacggctgatgaactctgcgcc

SEQ ID NO: 204677 - DNA, 75 bp, synthetic construct
  source 1..75: mol_type = other DNA
cagctattcgggaagaacctgaatggataaatggcgaatataaaaaacatgagaagaaagttaaaatgcttcagg

SEQ ID NO: 204678 - DNA, 75 bp, synthetic construct
  source 1..75: mol_type = other DNA
aacattttaaacaggcactttggaactgggcattctgtgcaacgccgctgttcgacaacaaggggcgattaacgg

SEQ ID NO: 204679 - DNA, 75 bp, synthetic construct
  source 1..75: mol_type = other DNA
gaaagtcagcatcagtttattgatgcggtgataacccttaaaccgataatagaaacgcagggaaccagctttatt

SEQ ID NO: 204680 - DNA, 75 bp, synthetic construct
  source 1..75: mol_type = other DNA
ataaaccgttaactaatgttgaaggacgagtagccaagctaagaggtgataacgactggcttgacgacataaaac

SEQ ID NO: 204681 - DNA, 75 bp, synthetic construct
  source 1..75: mol_type = other DNA
agattccttatatagttatcgatgagtttgaccaaattgactctgatgaagaacgacaaaagtttggatcactca

SEQ ID NO: 204682 - DNA, 75 bp, synthetic construct
  source 1..75: mol_type = other DNA
tcaccaaatacaagagaatggtcttggcgcgtagagaatggcttaagagatgaggatgcattgagaattaaagat

SEQ ID NO: 204683 - DNA, 75 bp, synthetic construct
  source 1..75: mol_type = other DNA
caaaaagctggtcaatgaagaggtggaaaacaatgccgcgactgataaagcgccatccactcatacttcaccggt

SEQ ID NO: 204684 - DNA, 75 bp, synthetic construct
  source 1..75: mol_type = other DNA
gaaaacaatgccgcgaccgataaagcgccatccactcatacttcaccggtaccgttggctccaataacagcaatc

SEQ ID NO: 204685 - DNA, 75 bp, synthetic construct
  source 1..75: mol_type = other DNA
ccactcatacttcaccggtcgtgcccgtcaccacgccgggaacaaaaccggatctgaacgcttccttcgtgtcgg

SEQ ID NO: 204686 - DNA, 75 bp, synthetic construct
  source 1..75: mol_type = other DNA
gcggtactgctgggcggcatggttggtgcggggattgtgctggggcgtaacgctctgcgtaattacaacgcgaag

SEQ ID NO: 204687 - DNA, 75 bp, synthetic construct
  source 1..75: mol_type = other DNA
aggagcagaaagatctgcgtatccgtcagattcaggaagcgttgcagtatgcgaatcaggcgcaggtgacaaagc

SEQ ID NO: 204688 - DNA, 75 bp, synthetic construct
  source 1..75: mol_type = other DNA
ctgggcaaaaccatgacccggaacagattgatttgattgatttactaatgcagttgtggcgtggcaagatgacaa

SEQ ID NO: 204689 - DNA, 75 bp, synthetic construct
  source 1..75: mol_type = other DNA
ccttactaatgtgctgtctaagattctcaaaacacaggtctctacgtccgttcgctggggagagcggtcaattgc

SEQ ID NO: 204690 - DNA, 75 bp, synthetic construct
  source 1..75: mol_type = other DNA
ctggtggaacaggtaagagtttttaccttactaatgtgctgtctaagattctcaaaacacaggtctctacgtccg

SEQ ID NO: 204691 - DNA, 75 bp, synthetic construct
  source 1..75: mol_type = other DNA
cttcgggtcgttgcctgcggcaacgctctctcgctggcgctcgagtcgaaccttggtcgaagcttctcatccttc

SEQ ID NO: 204692 - DNA, 75 bp, synthetic construct
  source 1..75: mol_type = other DNA
ctcgctggttctcgctgacgacgcgcaatgttaatgacggccagattcagggcgttatcaacaagctgtggggcg

SEQ ID NO: 204693 - DNA, 75 bp, synthetic construct
  source 1..75: mol_type = other DNA
gcaggccttcttcaccagcgtaaagcgaccacccactggcgctacactgaacaactccagcatcgttacccttct

SEQ ID NO: 204694 - DNA, 75 bp, synthetic construct
  source 1..75: mol_type = other DNA
tatgctcgggcgtatttgtccttgccgccactggccttcttcaccagcgaaaagcaaccacccactggcgctaca

SEQ ID NO: 204695 - DNA, 75 bp, synthetic construct
  source 1..75: mol_type = other DNA
tcttatgttggacaatcgcctgaagctgcgcagaaacagctggctcaatatatccagcaagttgacgaccaggta

SEQ ID NO: 204696 - DNA, 75 bp, synthetic construct
  source 1..75: mol_type = other DNA
gatcgcccggactgccccggctactccttcccgtgggtgggcggtgaagccacacatgtggttatcccaaatgag

SEQ ID NO: 204697 - DNA, 75 bp, synthetic construct
  source 1..75: mol_type = other DNA
aaccataaaaaagtacccgacgatgtggcgaccaaccccatcatcatcggccacgagttttgcggcgatattctg

SEQ ID NO: 204698 - DNA, 75 bp, synthetic construct
  source 1..75: mol_type = other DNA
ggcgggattcctcggtggcgtgtcggaggcctttgatgtcaaccccgtgcctgtcgttaacaccaacccagggtc

SEQ ID NO: 204699 - DNA, 75 bp, synthetic construct
  source 1..75: mol_type = other DNA
ttcagtctgttctgcacatccgttggttatcgaagcggcgctggcatttgatcgcaacagcacgcgtaaagtgct

SEQ ID NO: 204700 - DNA, 75 bp, synthetic construct
  source 1..75: mol_type = other DNA
tcggcggcgatcatctggggccaaactgctggcagcaagaaaatgcggatgcggcgatggaaaaatccgtcgagc

SEQ ID NO: 204701 - DNA, 75 bp, synthetic construct
  source 1..75: mol_type = other DNA
gaaggtagttataaccacacgatggggattcgcccgcaagggcgcacgctgatcctcggcggcaccggaccaatg

SEQ ID NO: 204702 - DNA, 75 bp, synthetic construct
  source 1..75: mol_type = other DNA
aaaactgaccattgaacctactgttaaaaatcagtcattacctttagcggtgtcttatgttggacaatcgcctga

SEQ ID NO: 204703 - DNA, 75 bp, synthetic construct
  source 1..75: mol_type = other DNA
atgttaattggtcgcttcagcacgacattttctgcattagcagaaacgctggataatcaggaagaacctgaaaaa

SEQ ID NO: 204704 - DNA, 75 bp, synthetic construct
  source 1..75: mol_type = other DNA
ctgtaccgaaagtctccgacattcaggcttcacttatcggacgttacagcactgcattctcagcattagcggaaa

SEQ ID NO: 204705 - DNA, 75 bp, synthetic construct
  source 1..75: mol_type = other DNA
gttcgggatgatgggggtgtcatagaagcgaagctggattcctatgcagtgggtgaagacggtaaggccggtgtc

SEQ ID NO: 204706 - DNA, 75 bp, synthetic construct
  source 1..75: mol_type = other DNA
tctggccgttgccaaagaaaagtggacttccacagctatcgttactcaacctgatgtggggcaaatcgctggtta

SEQ ID NO: 204707 - DNA, 75 bp, synthetic construct
  source 1..75: mol_type = other DNA
ctgggcaaaaccatgacccagaacagattgatttgattgatttactagtgcagttgtggcgtggcaagatgacaa

SEQ ID NO: 204708 - DNA, 75 bp, synthetic construct
  source 1..75: mol_type = other DNA
agcacactgaacgtggagccgttgaagggtgaaaaagtgaagctgaaagtgggcggtgcgctgcgcgaacaactg

SEQ ID NO: 204709 - DNA, 75 bp, synthetic construct
  source 1..75: mol_type = other DNA
accattacccttgatgccaaaggtaatgaacagcaggtcaatctcgacaaactcaccgtcgcggcgctggaaggg

SEQ ID NO: 204710 - DNA, 75 bp, synthetic construct
  source 1..75: mol_type = other DNA
tggtatttaaagcggcagatcgctgggtgcctgggctggacatcggtaaggtgactggcggctggcgcgacctta

SEQ ID NO: 204711 - DNA, 75 bp, synthetic construct
  source 1..75: mol_type = other DNA
tcctcccaggtggtggtcagcggctatgtattaccaggtctacaagtgaaatacggcgtggggatatttgactct

SEQ ID NO: 204712 - DNA, 75 bp, synthetic construct
  source 1..75: mol_type = other DNA
gagaagcagtatcaggcggatgatctgaaactgaaacttaccggcaaaatgaccgattacacgctctctatgcgc

SEQ ID NO: 204713 - DNA, 75 bp, synthetic construct
  source 1..75: mol_type = other DNA
tggtttgatcaaaacccgaggcagcctgtacggcggcacctggcagatggacgtaccagagttgaagctgaccgg

SEQ ID NO: 204714 - DNA, 75 bp, synthetic construct
  source 1..75: mol_type = other DNA
cgcgaaacgctgatcaaatatctcgaccgcttcatgatgttctacatccgtactgccgacaaactgacgcgtacc

SEQ ID NO: 204715 - DNA, 75 bp, synthetic construct
  source 1..75: mol_type = other DNA
tctctacaccaaaatcaccggctcccaacgtattgcgatgtttggtgcacagaaagacgatctgccggagatctg

SEQ ID NO: 204716 - DNA, 75 bp, synthetic construct
  source 1..75: mol_type = other DNA
gcaccgtggttagaaagtctggaaggcggcatcgactacctgaaatcagtaatcattgacgacaaactgggactg

SEQ ID NO: 204717 - DNA, 75 bp, synthetic construct
  source 1..75: mol_type = other DNA
tgtctgtcggcaatggagcatgactaaagacgggcctttgtacacgctaaacgcaacgtttgagcaagttgttgg

SEQ ID NO: 204718 - DNA, 75 bp, synthetic construct
  source 1..75: mol_type = other DNA
gataccagcgactacggtaacctgctgcaactggtgctgaacgcaatcgaactgccggaaaacccggattccctg

SEQ ID NO: 204719 - DNA, 75 bp, synthetic construct
  source 1..75: mol_type = other DNA
gggtagcacctggtgccgctacggtgttggcgatagcgtcggcctcggcgtggaactggaaaaccgctacaaagg

SEQ ID NO: 204720 - DNA, 75 bp, synthetic construct
  source 1..75: mol_type = other DNA
gttgctgggatcggtggcgtttctggtgggcaccaccagcggcctgcatctggtatttaaagcggcggatcgctg

SEQ ID NO: 204721 - DNA, 75 bp, synthetic construct
  source 1..75: mol_type = other DNA
ttctggtagcagcgttattctctgtagcaggctccgcgttagcagtacaaaaagatattactgtaacagctaacg

SEQ ID NO: 204722 - DNA, 75 bp, synthetic construct
  source 1..75: mol_type = other DNA
aatacgcagagcaaataaaagacaatgaaaaggcgaaaattactttatattttgtcactagacatctcaaatctg

SEQ ID NO: 204723 - DNA, 75 bp, synthetic construct
  source 1..75: mol_type = other DNA
ttgattttctggcgcacgacgatattgatttatatacagtacctgcaatccaggttccggtatggaaagaatgtt

SEQ ID NO: 204724 - DNA, 75 bp, synthetic construct
  source 1..75: mol_type = other DNA
cttatcacattatattaaaatataataaaacaaaacattgcgaattatttttttcagaccacatcaccggcgaac

SEQ ID NO: 204725 - DNA, 75 bp, synthetic construct
  source 1..75: mol_type = other DNA
cagtacaatgccattcaggaacgcctgatttcgcgttttagcgagctttacagtcgggaaccgttttatttttgc

SEQ ID NO: 204726 - DNA, 75 bp, synthetic construct
  source 1..75: mol_type = other DNA
cgcacgcgatccttcgttgtatggccgtatggattttgcctggtgtggtaatgcaccggttaagctgctggagta

SEQ ID NO: 204727 - DNA, 75 bp, synthetic construct
  source 1..75: mol_type = other DNA
ccttgtctgacgttcgttatgagcagctaggcgtggcggtaaaagcgggtaatctgcatctggcggtcggtcttg

SEQ ID NO: 204728 - DNA, 75 bp, synthetic construct
  source 1..75: mol_type = other DNA
cgcgcggcctgcgctggcaggaactttccgtggcgcaggttcgcgtggaaggcgacattaaatccaccgatcaga

SEQ ID NO: 204729 - DNA, 75 bp, synthetic construct
  source 1..75: mol_type = other DNA
ttgcctgggacgccactaaagaaggactgccgcaaggcagtatcacgctttctggtcgtaacgtgcaggtgacgc

SEQ ID NO: 204730 - DNA, 75 bp, synthetic construct
  source 1..75: mol_type = other DNA
ctggccggtcgatatcacactcaacggcacgctcaacatggagccgttgaaaggtgaaaaagtgaagctgaaagt

SEQ ID NO: 204731 - DNA, 75 bp, synthetic construct
  source 1..75: mol_type = other DNA
ccaaaggtaatgaacagcaggtcaatctcgacaaacttaccgtcgcggcgctggaagggaaaactgaactcaagg

SEQ ID NO: 204732 - DNA, 75 bp, synthetic construct
  source 1..75: mol_type = other DNA
tcctcccaggtggtggtcagcggctatgtattgccaggtctgcaagtgaaatacggcgtggggatatttgactct

SEQ ID NO: 204733 - DNA, 75 bp, synthetic construct
  source 1..75: mol_type = other DNA
gcaacggcgcggctctgttacagaaagggggacagattcgctgccgctttaaggcttcgggagcgctggcggcga

SEQ ID NO: 204734 - DNA, 75 bp, synthetic construct
  source 1..75: mol_type = other DNA
ctgttgtggtgaagccgacaggtggagaaggtgcagtaatcagcgccaccagagacccggagtattactttgttg

SEQ ID NO: 204735 - DNA, 75 bp, synthetic construct
  source 1..75: mol_type = other DNA
ctgcgaaccagtatgttatggcgttttactggccggtatcttcactgccacagggcgttgccctgaccggagacg

SEQ ID NO: 204736 - DNA, 75 bp, synthetic construct
  source 1..75: mol_type = other DNA
ggtgcacgccgggagaaccgctgaattcattaccggaaaacagcctgatatggtgaagcccaccgtaccttccgg

SEQ ID NO: 204737 - DNA, 75 bp, synthetic construct
  source 1..75: mol_type = other DNA
ggtatgtatggcagacgcacactggttgatgacagcggcaataaagctctgcgaattgagaaaaataacagctcg

SEQ ID NO: 204738 - DNA, 75 bp, synthetic construct
  source 1..75: mol_type = other DNA
tccctggatatgtggagatacgacgtatttctggaagcagaagaacgaatccacgtaccagacggtgtacggcag

SEQ ID NO: 204739 - DNA, 75 bp, synthetic construct
  source 1..75: mol_type = other DNA
taaagcaactggctcgtcgcagcacagtgacgccggatggcgctccctgtaaatataacgacattattccggcag

SEQ ID NO: 204740 - DNA, 75 bp, synthetic construct
  source 1..75: mol_type = other DNA
agccagcggcgtttgatgccatggtggcaaaataccgctccgatctggcgggcgtatcaggtcagtgcgttggtg

SEQ ID NO: 204741 - DNA, 75 bp, synthetic construct
  source 1..75: mol_type = other DNA
gttatacaaggatctactcacccgaacaaaagccgcactgaaaaccaaccctaaaaacattctgcttgcagtggt

SEQ ID NO: 204742 - DNA, 75 bp, synthetic construct
  source 1..75: mol_type = other DNA
gctgcatatcgccaaaaaactgctgccgtttataccggcgaatgcgggcattctgctggttccgtgctgccgtgg

SEQ ID NO: 204743 - DNA, 75 bp, synthetic construct
  source 1..75: mol_type = other DNA
tatttccgaccgtctggcaacggcgattcttgtgcatgccgggagaaccgctgaattcattaccggaaaacagcc

SEQ ID NO: 204744 - DNA, 75 bp, synthetic construct
  source 1..75: mol_type = other DNA
gatatggcggggcagtgtgtgggtggctcagctgacagtgttccctggatttgtggagacacaacatatttctgg

SEQ ID NO: 204745 - DNA, 75 bp, synthetic construct
  source 1..75: mol_type = other DNA
gaatggcatacgctggctttccgctttgccgggaataacagcctgcaggtgacgccggttattgatggtcaggat

SEQ ID NO: 204746 - DNA, 75 bp, synthetic construct
  source 1..75: mol_type = other DNA
caccgccatgctaagagtgaataacaacgaattgcccgaaggtgtggatgttgaaaactcagtcattcgcaccac

SEQ ID NO: 204747 - DNA, 75 bp, synthetic construct
  source 1..75: mol_type = other DNA
gcttcgctggcaataagccggattcgttgggatgacgacgaagagaatcagtattatttctcattctctctgcct

SEQ ID NO: 204748 - DNA, 75 bp, synthetic construct
  source 1..75: mol_type = other DNA
taataacgcgcctcgataagtcaacaatggtgttatcactcagtgttcctcaggcatggctcaaatatcaggcca

SEQ ID NO: 204749 - DNA, 75 bp, synthetic construct
  source 1..75: mol_type = other DNA
gtggtgccggaagtcagcggtcgcattgtagaactggcggtcaccgacaaccaggcagtcaaacagggcgatttg

SEQ ID NO: 204750 - DNA, 75 bp, synthetic construct
  source 1..75: mol_type = other DNA
acagataaagccagtattgatgttgcataccatcatacaggtaatcaacaaaaagaacttggcacgtttggcgca

SEQ ID NO: 204751 - DNA, 75 bp, synthetic construct
  source 1..75: mol_type = other DNA
ggaattcaggaaaatagtacattgcgtttaacatggggggataacatgtgcgaaatgactccgcccaataaaagt

SEQ ID NO: 204752 - DNA, 75 bp, synthetic construct
  source 1..75: mol_type = other DNA
acgccgtggaattcaacgtcgatatgattgacgttgaagaccgtgaaaacatcgatatctcgcgttttgagaaaa

SEQ ID NO: 204753 - DNA, 75 bp, synthetic construct
  source 1..75: mol_type = other DNA
ggtgacaccgggcggtgcagcatgcaaatataacgacatcattccggcggaccattgtctgcatgatgtgcagga

SEQ ID NO: 204754 - DNA, 75 bp, synthetic construct
  source 1..75: mol_type = other DNA
cgtggtgtggatgcagggggaatttgattttggcggtacgccggtaaatcatgccgcacagtttggtgcgctggt

SEQ ID NO: 204755 - DNA, 75 bp, synthetic construct
  source 1..75: mol_type = other DNA
tgccggttatcgcttctctgataaagattacgtctcaatgagcgaatatctctcctcacgcaatggtgatgaatc

SEQ ID NO: 204756 - DNA, 75 bp, synthetic construct
  source 1..75: mol_type = other DNA
taatacttcgcagatgatttcctggtacgattcatcagatcgcaacaatatctggaatatttctgcgtcggcaac

SEQ ID NO: 204757 - DNA, 75 bp, synthetic construct
  source 1..75: mol_type = other DNA
gggacagattatcccatgcaattaaaaatgccctgtctggcgttgtgtgttcgctactcttcgttttgccagtcc

SEQ ID NO: 204758 - DNA, 75 bp, synthetic construct
  source 1..75: mol_type = other DNA
gatttcagcggcacgccagcgaatcacacggctcagtttggcgcactggtggataaataccgtgcggaccttgca

SEQ ID NO: 204759 - DNA, 75 bp, synthetic construct
  source 1..75: mol_type = other DNA
aatgcccggcggcaggactggataacgacaagctgttactcactgacattaccagtaaccaggatacctacccgg

SEQ ID NO: 204760 - DNA, 75 bp, synthetic construct
  source 1..75: mol_type = other DNA
ggtggtgtggatgcagggagaaggtgatgcggcagtggggacgcatgcgcagcatccggggctgtttagtgcgat

SEQ ID NO: 204761 - DNA, 75 bp, synthetic construct
  source 1..75: mol_type = other DNA
cctgatgcaggccattgcggcggaaggtgatgtcaccacacctgtggtggtgaagccgtcggatggagaaggcac

SEQ ID NO: 204762 - DNA, 75 bp, synthetic construct
  source 1..75: mol_type = other DNA
ggtaccgtggatttgcggggacacaacgtatttctggaagcagcgtcatgcggaagggtatgcatcagtatacgg

SEQ ID NO: 204763 - DNA, 75 bp, synthetic construct
  source 1..75: mol_type = other DNA
tgccggaaacaacagtgttcaggtgacgccggtactggatgagaaacggggagaaccattcacgctggtgaaatc

SEQ ID NO: 204764 - DNA, 75 bp, synthetic construct
  source 1..75: mol_type = other DNA
aaatctaccgcttcggcggtgacgaatttgcggtgatttatacgggtggaacgctggaagagttgctatcgattc

SEQ ID NO: 204765 - DNA, 75 bp, synthetic construct
  source 1..75: mol_type = other DNA
tttgtgcctgtttgacgtcgataaattcaaaaacattaacgacaccttcggtcatttgctgggcgatgaagtgtt

SEQ ID NO: 204766 - DNA, 75 bp, synthetic construct
  source 1..75: mol_type = other DNA
gccaatagcacgcttgccgatggcagtaaacatcaagggcaatcgtaccgtttcctatattcaaaatcgttagtg

SEQ ID NO: 204767 - DNA, 75 bp, synthetic construct
  source 1..75: mol_type = other DNA
accattgtctgcatgatgtgcaggacatgagccgtcttaaccatccgaaagcggaactgtcaaaggggcagtacg

SEQ ID NO: 204768 - DNA, 75 bp, synthetic construct
  source 1..75: mol_type = other DNA
gaactggtagcaaatcagtatgtcattgcactttactggccggtttcctctctgccgcagggtgtcaccctgaca

SEQ ID NO: 204769 - DNA, 75 bp, synthetic construct
  source 1..75: mol_type = other DNA
atcggtgtagcgcattcaaatgaatgtaccaccgtcgaacgcttgaaaatgctggcggatgagcggctgtataag

SEQ ID NO: 204770 - DNA, 75 bp, synthetic construct
  source 1..75: mol_type = other DNA
gcacgccgggagaagcgctgaattcattaccggaaaacagcctgatatggtgaggcccaccgtaccttccggtga

SEQ ID NO: 204771 - DNA, 75 bp, synthetic construct
  source 1..75: mol_type = other DNA
aaatcgtggatgatgccggagccagcgggggtaaggcaatgaaactgaccaaggaaacaggaagagccccctggt

SEQ ID NO: 204772 - DNA, 75 bp, synthetic construct
  source 1..75: mol_type = other DNA
gcagacaccacgacgatgagtacgctatttgcttaccgggcatctgagtctgaaggacggttgacaccacagggt

SEQ ID NO: 204773 - DNA, 75 bp, synthetic construct
  source 1..75: mol_type = other DNA
gataaaggcgggcgctatgttttcctgatcaaagctgccaccagcgaagtgtggtggccggaagatgcagaccat

SEQ ID NO: 204774 - DNA, 75 bp, synthetic construct
  source 1..75: mol_type = other DNA
atattgtggctgtcgggtattacggtgcggcatcccgtacccagggcagttttgtctccacacagcgtgacagcc

SEQ ID NO: 204775 - DNA, 75 bp, synthetic construct
  source 1..75: mol_type = other DNA
gcttccgttgccggattcatttgaccgtccggacccacgcattaagcagctcgcacgccgcagtacggtcacgcc

SEQ ID NO: 204776 - DNA, 75 bp, synthetic construct
  source 1..75: mol_type = other DNA
aaaaacgctggcaccgataaatatgaggcggtatacggtggctacaaaggcaaggaaactcagaatattttcttt

SEQ ID NO: 204777 - DNA, 75 bp, synthetic construct
  source 1..75: mol_type = other DNA
tggatacgttcggggtctttgataacggatggcacacactggcttttgagtttgccggaacaacagcattcaggt

SEQ ID NO: 204778 - DNA, 75 bp, synthetic construct
  source 1..75: mol_type = other DNA
atggtgaatcagttcagaacggaccttgccggtcaggcatcacagtgcactggaggcagcgcatcagcggtaccg

SEQ ID NO: 204779 - DNA, 75 bp, synthetic construct
  source 1..75: mol_type = other DNA
ttcggggtctttgataacggatggcacacgctggcttttgagtttgccggaaacaacagcattcaggtgacacca

SEQ ID NO: 204780 - DNA, 75 bp, synthetic construct
  source 1..75: mol_type = other DNA
cggcaactgccggtaaatatcgtagcaatagctataatcaaaacagtccgaatgtctttcaaggagatttgattt

SEQ ID NO: 204781 - DNA, 75 bp, synthetic construct
  source 1..75: mol_type = other DNA
caaaacgcctggagtctggcagaggcagaaaaaacggtggatgtgtcgcgactacgccgtctggttacgcaataa

SEQ ID NO: 204782 - DNA, 75 bp, synthetic construct
  source 1..75: mol_type = other DNA
atattgccaaaaaactgcttccgtatatccctaataatgcggggatcctgctggtaccatgctgtcgtggtggtt

SEQ ID NO: 204783 - DNA, 75 bp, synthetic construct
  source 1..75: mol_type = other DNA
aatcacacttgcaggcactgcgtctggcgcaacaacgcggctggcaaaactacctgttgctggaagatgacgcgg

SEQ ID NO: 204784 - DNA, 75 bp, synthetic construct
  source 1..75: mol_type = other DNA
gcggatatccatctctacttgtctccatcctgttccttgggggagtgcaacttattgggattggcgttcttggtg

SEQ ID NO: 204785 - DNA, 75 bp, synthetic construct
  source 1..75: mol_type = other DNA
ttcatgaagggtgtacttagctgggtcggcgggcgcactaatgttgttgaatatgcccgagcagaacgagtagct

SEQ ID NO: 204786 - DNA, 75 bp, synthetic construct
  source 1..75: mol_type = other DNA
ccgagtggttctacaagctccacaataaaatcagcaacccgaagattgaagagaacgttggcgatttccgactca

SEQ ID NO: 204787 - DNA, 75 bp, synthetic construct
  source 1..75: mol_type = other DNA
cactattgcgatgcgtttatggatggcaaggcgggagaacgggcggcgatggtgattgtggaggcgttggggtaa

SEQ ID NO: 204788 - DNA, 75 bp, synthetic construct
  source 1..75: mol_type = other DNA
gtacagccacatcaatcgcatctttcaaagccgcagcttcggcccgcataacatcctcaacggcaccttttgcta

SEQ ID NO: 204789 - DNA, 75 bp, synthetic construct
  source 1..75: mol_type = other DNA
tcttcaatgaagaagacacaatacccatcttttataaaactgttcgcgaattcaacggactgaaagaacacgaag

SEQ ID NO: 204790 - DNA, 75 bp, synthetic construct
  source 1..75: mol_type = other DNA
aattggtggtacctctatctttcaccagaaactttggtaaagagcctgccctattcgcaggtctcgataatgcta

SEQ ID NO: 204791 - DNA, 75 bp, synthetic construct
  source 1..75: mol_type = other DNA
atcaatgcacttgctgtctctgacaaattggtggtacctctatctttcaccagaaactttggtaaagagcctgcc

SEQ ID NO: 204792 - DNA, 75 bp, synthetic construct
  source 1..75: mol_type = other DNA
gaggctatccttcccttctcgtttccatattattccttggtggaattcagctaatcggcattggtgttttagggg

SEQ ID NO: 204793 - DNA, 75 bp, synthetic construct
  source 1..75: mol_type = other DNA
ctgagtggttctataagctccacaacaaaataagcaatccaaagatcgaggaaaatgttggtgatttccggttaa

SEQ ID NO: 204794 - DNA, 75 bp, synthetic construct
  source 1..75: mol_type = other DNA
tgtggacttgcaggatccaattgaggttattccgcatcttatagcgaagtggcaagatggcgctgacatagtact

SEQ ID NO: 204795 - DNA, 75 bp, synthetic construct
  source 1..75: mol_type = other DNA
agttgtggaatcttgctcttgagggaattacgagcttctcgacttttccgctacgtatgtggacttacatcggcc

SEQ ID NO: 204796 - DNA, 75 bp, synthetic construct
  source 1..75: mol_type = other DNA
tgccaaacgttcagatcgctctactgatagcagacttaagcgcaagtctgctgaatggttctataagctgcacaa

SEQ ID NO: 204797 - DNA, 75 bp, synthetic construct
  source 1..75: mol_type = other DNA
ctgagtggttttataagctgcataacaaaataagcaatccgcagatcgaggagaacgtcggtgacttccgcctga

SEQ ID NO: 204798 - DNA, 75 bp, synthetic construct
  source 1..75: mol_type = other DNA
cggaatggttttacaagcttcacaataaaatcagctcaccaaagatagaagaaaatgttggcgatttcaggttaa

SEQ ID NO: 204799 - DNA, 75 bp, synthetic construct
  source 1..75: mol_type = other DNA
ggtatcgggtattacggttcgaaatggcgtgacagctcagccacctggacgtcacaggacagggcgagccatttc

SEQ ID NO: 204800 - DNA, 75 bp, synthetic construct
  source 1..75: mol_type = other DNA
gcacaccgttcacgctgacgcagtcaccggtcagtgcatttgcggcggataaactgcatgtgacagacattacca

SEQ ID NO: 204801 - DNA, 75 bp, synthetic construct
  source 1..75: mol_type = other DNA
tgttgacctgcaagacccgattgaggttattcctcatcttattgaaaagtggcaggcaggtgctgatatagtgct

SEQ ID NO: 204802 - DNA, 75 bp, synthetic construct
  source 1..75: mol_type = other DNA
gttatccctcatcttattgaaaagtggcaggcaggtgctgatatggtactggctaagcgctcagaccgttctaca

SEQ ID NO: 204803 - DNA, 75 bp, synthetic construct
  source 1..75: mol_type = other DNA
tcttcaatgaagaagaagcgataccaattttttataaaacggtacgtgaattcgaagagttgaagtcatatgaag

SEQ ID NO: 204804 - DNA, 75 bp, synthetic construct
  source 1..75: mol_type = other DNA
ttcatgaaaggcatactgagctgggttggtggtcagacagatgtcgttgaatatgtacgcacagagcgtgttgct

SEQ ID NO: 204805 - DNA, 75 bp, synthetic construct
  source 1..75: mol_type = other DNA
tttatgaaaggcatacttagctgggttggtggaaagactgacgtcgtcgagtatgctcgcgcagaacgcatagct

SEQ ID NO: 204806 - DNA, 75 bp, synthetic construct
  source 1..75: mol_type = other DNA
ctgagtggttctataagctacacaacaagattagcaacccaaaaatcgaagagaacgtgggtgattttcgcctga

SEQ ID NO: 204807 - DNA, 75 bp, synthetic construct
  source 1..75: mol_type = other DNA
aatccttttccttggcggaatacagttgattggaatcggtgtgttaggtgaatatatcggcagaatttatattga

SEQ ID NO: 204808 - DNA, 75 bp, synthetic construct
  source 1..75: mol_type = other DNA
gcccaccaacttaccggcagaagacccggatattgctgatgcaggttattacggcgcgcaatcccgtagtaatgg

SEQ ID NO: 204809 - DNA, 75 bp, synthetic construct
  source 1..75: mol_type = other DNA
ggactgaatgcgctgacgctgacggatgttacaaaaaatgcagcgtatggcgttgagatagaaagtctggtgctg

SEQ ID NO: 204810 - DNA, 75 bp, synthetic construct
  source 1..75: mol_type = other DNA
ccgaccgtctggcaacggcgattctggttcgtgccggaaaaacggctgaattcatgagtgggcgtagtgttgtgt

SEQ ID NO: 204811 - DNA, 75 bp, synthetic construct
  source 1..75: mol_type = other DNA
ggactgtcggtcaggggctgcatattgccaaaaaactgctgccttatatcccgcagaatgccgggattcttctgg

SEQ ID NO: 204812 - DNA, 75 bp, synthetic construct
  source 1..75: mol_type = other DNA
gctgtcgcagtccacagtagggacactgacagcagacaagttgcgggtgactgatatcaccagcggtgcgacgta

SEQ ID NO: 204813 - DNA, 75 bp, synthetic construct
  source 1..75: mol_type = other DNA
ggtgatgtggtggtcagtggtgcaactgagccggagtggtactacgtcatcgtactggccgggcagtccaatgcc

SEQ ID NO: 204814 - DNA, 75 bp, synthetic construct
  source 1..75: mol_type = other DNA
gtggtgccggaagtcagcggtcgcattgtagaactggcggtcaccgacaaccaagcggtgaaacagggcgatttg

SEQ ID NO: 204815 - DNA, 75 bp, synthetic construct
  source 1..75: mol_type = other DNA
catggcctacggtgaagggcttccgttaccggattcatttgaccgcccggacccacggattaagcaactggcacg

SEQ ID NO: 204816 - DNA, 75 bp, synthetic construct
  source 1..75: mol_type = other DNA
aaaggtggtcttgtcagctgccggtttaaggttgatggcacactgacggctaatcagtacgcactggcgctgtac

SEQ ID NO: 204817 - DNA, 75 bp, synthetic construct
  source 1..75: mol_type = other DNA
aagcagaagaacgaatcctcgtaccagacggtgtacggcagctacaaaaacaaaacggaaaagaatatccatttc

SEQ ID NO: 204818 - DNA, 75 bp, synthetic construct
  source 1..75: mol_type = other DNA
cagatacattacgccgcaccgagccattactgaaagaaggttttgtctcagcggaagacgttgaccgtgcaagaa

SEQ ID NO: 204819 - DNA, 75 bp, synthetic construct
  source 1..75: mol_type = other DNA
gggaaatcagtgacaacgctgctttattaccgtgcaacagagtcaggtggtttactgaatccgcagggatgggga

SEQ ID NO: 204820 - DNA, 75 bp, synthetic construct
  source 1..75: mol_type = other DNA
aaggaaacaggaagagccccctggtaccttgagcatgatgctggtaatggtgcggacctgctgggtaaaggtggt

SEQ ID NO: 204821 - DNA, 75 bp, synthetic construct
  source 1..75: mol_type = other DNA
cagtgatgcgggggctacgggaggtaaggctctgcaactgaacaaaccggaaaaccacatctggtttctggagca

SEQ ID NO: 204822 - DNA, 75 bp, synthetic construct
  source 1..75: mol_type = other DNA
gtcagtaaccgaaccctgatgagtctgctggcatccggcgaagacctggcatcacagggctggcgctattatcac

SEQ ID NO: 204823 - DNA, 75 bp, synthetic construct
  source 1..75: mol_type = other DNA
tctgctggttccctgctgccgtggtggttctgcattcacggcgggtgctgacggcacgtacagtgacagcatggg

SEQ ID NO: 204824 - DNA, 75 bp, synthetic construct
  source 1..75: mol_type = other DNA
ctcgcagtaaattccctgccctgctggtggttgcgctggcactggttgccgctgtttttgttatctggcgcgtcg

SEQ ID NO: 204825 - DNA, 75 bp, synthetic construct
  source 1..75: mol_type = other DNA
gctggtcgaaaaaccgttcactccgacaattgcgcaggcgaaagagctgtttgcactggcgaaaagcaaagggct

SEQ ID NO: 204826 - DNA, 75 bp, synthetic construct
  source 1..75: mol_type = other DNA
aggctgctggcggtggtatggatgcagggcgaggcagaccttgcttcaggcagtcagcagcataacggtttattc

SEQ ID NO: 204827 - DNA, 75 bp, synthetic construct
  source 1..75: mol_type = other DNA
aacctgaaagcacagggctggtcggccagtggcggtaaagcagaaatcatcagcgataccggagccacgggcggt

SEQ ID NO: 204828 - DNA, 75 bp, synthetic construct
  source 1..75: mol_type = other DNA
atggcgcgcttacggctaatcagtacgcactggcgctgtactggccggtttctgccctgccacaaggggttaccc

SEQ ID NO: 204829 - DNA, 75 bp, synthetic construct
  source 1..75: mol_type = other DNA
ctggacgacggcacaacgtgacagccatttcagctcatgggcgcgcaggggagtcattgccgaccgtctggcctc

SEQ ID NO: 204830 - DNA, 75 bp, synthetic construct
  source 1..75: mol_type = other DNA
tgccggagacatatgatcgccccgaaccgcgtattatgcagttagcccgtcgcagtactgtcacgccgggaggta

SEQ ID NO: 204831 - DNA, 75 bp, synthetic construct
  source 1..75: mol_type = other DNA
gtgagtttgatattgatgcgaagccgacggagcattccgcgctgtttctggcgatggtggaaaaattccgcacag

SEQ ID NO: 204832 - DNA, 75 bp, synthetic construct
  source 1..75: mol_type = other DNA
gctgtttgccgtggtgtggatgcagggggaatttgattttggcggcacgcccggaaatcacgcagcacagtttgg

SEQ ID NO: 204833 - DNA, 75 bp, synthetic construct
  source 1..75: mol_type = other DNA
tcatttctgaccgtctggcctccgctattctgctccatgcagggcgcacggctgaactgatgggcgggcaggccg

SEQ ID NO: 204834 - DNA, 75 bp, synthetic construct
  source 1..75: mol_type = other DNA
gatgccattattaccggcaacgatcctttagacagagaagtgattgatcaggccaaaaacttgaaggttatatcg

SEQ ID NO: 204835 - DNA, 75 bp, synthetic construct
  source 1..75: mol_type = other DNA
ttgaactgaaagaacgttcagaaaaaattaaaaatttaaaaaactattccattaccccacatgccgcttcattta

SEQ ID NO: 204836 - DNA, 75 bp, synthetic construct
  source 1..75: mol_type = other DNA
gctgggtggtggttccccgatggatgccgcgaagatcatgtgggtcatgtacgagcatccagaaactcacttcga

SEQ ID NO: 204837 - DNA, 75 bp, synthetic construct
  source 1..75: mol_type = other DNA
aacttcgatctgcgtgataagaatcaacgcccgggacgtaacccgaaaacgggcgaagatattcccattacagca

SEQ ID NO: 204838 - DNA, 75 bp, synthetic construct
  source 1..75: mol_type = other DNA
ccgtattgtcagcgatgagcagcgccgccagattctggacatctacgccacaggcgaaaccggagcactttcccg

SEQ ID NO: 204839 - DNA, 75 bp, synthetic construct
  source 1..75: mol_type = other DNA
cctggcgaacaagctagaactgccgatcaacggcggtggccgcgccgctatcgtgctgtcgggttcgccactgtt

SEQ ID NO: 204840 - DNA, 75 bp, synthetic construct
  source 1..75: mol_type = other DNA
agctgacccgaccctgagcatcgttcgtaaaggtgcagaactggcaaactccttcaaaccagacgtgattatcgc

SEQ ID NO: 204841 - DNA, 75 bp, synthetic construct
  source 1..75: mol_type = other DNA
cctgaaagccctgcaaaaacagctggatgagatgtatacctacatccgcaataatcagatgatgatcccaaacta

SEQ ID NO: 204842 - DNA, 75 bp, synthetic construct
  source 1..75: mol_type = other DNA
tatcagatccagaggcggggagtaaagttctggcactgctggaaagcattaaacgatatctctggcatggcaatg

SEQ ID NO: 204843 - DNA, 75 bp, synthetic construct
  source 1..75: mol_type = other DNA
aagcgaagatggttgcagttaccaccacttccggtaccggttctgaagtgactccgtttgcggttgttactgacg

SEQ ID NO: 204844 - DNA, 75 bp, synthetic construct
  source 1..75: mol_type = other DNA
ctctggctgctgctggtgctcgcatcccgctcgcaaaaatggccgttgccgagtccggtatgggcatcgtcgaag

SEQ ID NO: 204845 - DNA, 75 bp, synthetic construct
  source 1..75: mol_type = other DNA
ctgctggtgcgccgaaagatctgatcggctggatcgatcaaccttctgttgaactctccaacgcgttgatgcacc

SEQ ID NO: 204846 - DNA, 75 bp, synthetic construct
  source 1..75: mol_type = other DNA
ggggcagtttgtctttgtaggttcttacaatgcgggtaacgtgagcgtaacgcgtctggaagatggcctgccagt

SEQ ID NO: 204847 - DNA, 75 bp, synthetic construct
  source 1..75: mol_type = other DNA
gagtatgtcctggctgaaggatctttctcatacgggcaggcggttgctgtcataaccgcttaccgcaatgtgttt

SEQ ID NO: 204848 - DNA, 75 bp, synthetic construct
  source 1..75: mol_type = other DNA
taccgcaatgtgtttatccagaatgacccgggaatgcatttccgtcgggttatccgcaacgcggaaggtcagcga

SEQ ID NO: 204849 - DNA, 75 bp, synthetic construct
  source 1..75: mol_type = other DNA
tggttggaggaatactaaagatttcgccatggttgtttgtccaatatatcagcttccagttaaatcaagtcaaat

SEQ ID NO: 204850 - DNA, 75 bp, synthetic construct
  source 1..75: mol_type = other DNA
atgtaggactgactccctgttttattgcccgaaggccctttctcacgcgaacaggcggttggcgtcacaacagct

SEQ ID NO: 204851 - DNA, 75 bp, synthetic construct
  source 1..75: mol_type = other DNA
cattttccacatcctgatcattacgctgcaagcctttatcttcatggttctgacgatcgtctatctgtcgatggc

SEQ ID NO: 204852 - DNA, 75 bp, synthetic construct
  source 1..75: mol_type = other DNA
ctgccatatatcgcagaacactggatcggtttgccggcactgcgtgtagttccgtctgctgacgtgaacgtgacg

SEQ ID NO: 204853 - DNA, 75 bp, synthetic construct
  source 1..75: mol_type = other DNA
ttaatcccattgtctgatataatccagggacctgtagtttggtccgtatattacgcaactcccatatacagatta

SEQ ID NO: 204854 - DNA, 75 bp, synthetic construct
  source 1..75: mol_type = other DNA
agcaaagacgtgttcgtacacttctctgcaatccagactaatggttttaaaactcttgctgaaggtcagcgcgta

SEQ ID NO: 204855 - DNA, 75 bp, synthetic construct
  source 1..75: mol_type = other DNA
agcctgattactgtcttcagcgtttcggaagatggcagcgtgttgagtaaagaaggcttccagccaacggaaacc

SEQ ID NO: 204856 - DNA, 75 bp, synthetic construct
  source 1..75: mol_type = other DNA
ttaatgatgtcgcaataaataggaggcgttactggactaatgaaattgtcaaattaagtgggcattttgttaatg

SEQ ID NO: 204857 - DNA, 75 bp, synthetic construct
  source 1..75: mol_type = other DNA
acgggcggcattgtttaagcttgccagaaaaggggatgcctttgctctgcgcgaactactcagggtggataaaaa

SEQ ID NO: 204858 - DNA, 75 bp, synthetic construct
  source 1..75: mol_type = other DNA
atgattccgtattcgaaagtcgagtctctggcagcgtgccggatgactgcacaacaaatcgctgacgttctggat

SEQ ID NO: 204859 - DNA, 75 bp, synthetic construct
  source 1..75: mol_type = other DNA
aactaatccggagttatctgacggatgttgcgggaaagaaagctgatctgattatcagctcagcactgttacggc

SEQ ID NO: 204860 - DNA, 75 bp, synthetic construct
  source 1..75: mol_type = other DNA
gaaaatgatagtggggctgtaccgtcagaacagggggcaaattactcttgacggggttgcgatgcagcaactgga

SEQ ID NO: 204861 - DNA, 75 bp, synthetic construct
  source 1..75: mol_type = other DNA
ccacccgttttcagcaggcccgcctggccatgcagggagtgaatgacattgtccgccgtccggtggagcgggaaa

SEQ ID NO: 204862 - DNA, 75 bp, synthetic construct
  source 1..75: mol_type = other DNA
ccactgggacagatagcgtcactggccacccgttttcagcaggcccgtctggccatgcacggcgtgaatgaaatt

SEQ ID NO: 204863 - DNA, 75 bp, synthetic construct
  source 1..75: mol_type = other DNA
ctgtcagggactttatgaccagcgcaacgctgctggcctttgtggatctgcctttcattcttctttttattggtg

SEQ ID NO: 204864 - DNA, 75 bp, synthetic construct
  source 1..75: mol_type = other DNA
gttctgaaagggctgaatcactggagccgtggacgcacaatggtggtggtgacgcatcgtctgcaggtgctgaat

SEQ ID NO: 204865 - DNA, 75 bp, synthetic construct
  source 1..75: mol_type = other DNA
ttatcgggctcgtgggaggctggcttgcggttgtgcctcttacgctggtcccgctggtaattctggcaggaatat

SEQ ID NO: 204866 - DNA, 75 bp, synthetic construct
  source 1..75: mol_type = other DNA
agagctcagcagtttaaaagagttttagttttacaggatacaacagaacttaattattctggtcagaaagaaaaa

SEQ ID NO: 204867 - DNA, 75 bp, synthetic construct
  source 1..75: mol_type = other DNA
attatcaatggttcagaaaagaactcaaaactcagaaacaaagtcgtaaagaaataactaatgattcacttcaca

SEQ ID NO: 204868 - DNA, 75 bp, synthetic construct
  source 1..75: mol_type = other DNA
tctgtcgctctgtatccggcccggagagcgggtgggtattattggctcaataggttgtggtaaatgtaagcgtta

SEQ ID NO: 204869 - DNA, 75 bp, synthetic construct
  source 1..75: mol_type = other DNA
cattctggggacgtaccttattcacagtgatgacccacataaccgaatcaccatgggggcactgattgccgcagt

SEQ ID NO: 204870 - DNA, 75 bp, synthetic construct
  source 1..75: mol_type = other DNA
ctgaattaccagcagccttgaaaggtatgtctgtatgtatccggcccggagaaaaggtgggcattattggcacta

SEQ ID NO: 204871 - DNA, 75 bp, synthetic construct
  source 1..75: mol_type = other DNA
ggtgacgggtaagcgatggatgaaagaagcattaacagctttaaaagttccggctccgcgtaatatgtcggcaat

SEQ ID NO: 204872 - DNA, 75 bp, synthetic construct
  source 1..75: mol_type = other DNA
acgtttgacattaaacaagaagagaagttttattcaaaaaattaaagggagaatttcatcaccttgctttataca

SEQ ID NO: 204873 - DNA, 75 bp, synthetic construct
  source 1..75: mol_type = other DNA
tgaggggcatgatattccgtcgatggcgtgggaatttgctcagggcgttctgacctgtgaaaccgtttatgtggt

SEQ ID NO: 204874 - DNA, 75 bp, synthetic construct
  source 1..75: mol_type = other DNA
tggcttatatcgatatccggctggggcgttttatttgcagttccagcgcctggaatatcaccgaccatgtactgc

SEQ ID NO: 204875 - DNA, 75 bp, synthetic construct
  source 1..75: mol_type = other DNA
gtcggtaacagagcattcaagaacatagaaattggtaacgccagaggggacagcatggccccaacaatctcccca

SEQ ID NO: 204876 - DNA, 75 bp, synthetic construct
  source 1..75: mol_type = other DNA
tgatcctgaatatgcccgacgtcttgttggaaatcgggcattcaaaaatatagaaataggtaacgccagaggaga

SEQ ID NO: 204877 - DNA, 75 bp, synthetic construct
  source 1..75: mol_type = other DNA
aaaaggatggactcaggctcaactggcccgcaagttaggtgtgagtgcgcaatcagtgcagtactggacaacagg

SEQ ID NO: 204878 - DNA, 75 bp, synthetic construct
  source 1..75: mol_type = other DNA
gcgtcagcacattattacaggtttacgggcgtctgacctgcggcgttctggctgaaaaaatgaagatgccacctt

SEQ ID NO: 204879 - DNA, 75 bp, synthetic construct
  source 1..75: mol_type = other DNA
cgtcaatggtgtatttcctgcgtgatgcggttgatgccggagtgctcaccgaatgcaacggattttatgacgttc

SEQ ID NO: 204880 - DNA, 75 bp, synthetic construct
  source 1..75: mol_type = other DNA
attatcaaaaaaagcgtaccagttctcaattgataactgcatggctagaaatcaattaaatactctcaaacaatt

SEQ ID NO: 204881 - DNA, 75 bp, synthetic construct
  source 1..75: mol_type = other DNA
tgcggttgatgccggagtgctcaccgaatgcaacggattttatgacgttccgcgcccgcgtccgacgccgcctgt

SEQ ID NO: 204882 - DNA, 75 bp, synthetic construct
  source 1..75: mol_type = other DNA
cctcaatggtgtatttcctgcgtgacgcggttgatgccggagttctcactgaatgcaatggattttatgacgttc

SEQ ID NO: 204883 - DNA, 75 bp, synthetic construct
  source 1..75: mol_type = other DNA
aagacgaaacgcaacggagcaccccgctgttgatgatgctcaatggtgcgctttccgccgctctttgccctggct

SEQ ID NO: 204884 - DNA, 75 bp, synthetic construct
  source 1..75: mol_type = other DNA
ggacgaacttaatgtcagcctgcgcgagtttgccagagcaatggaaattgcgccctcaacggcaagccgattgct

SEQ ID NO: 204885 - DNA, 75 bp, synthetic construct
  source 1..75: mol_type = other DNA
ttcagcaccaacccgcagatggaaggcttcttctacatggcaagccagtacaaagagaagattgctaacggtact

SEQ ID NO: 204886 - DNA, 75 bp, synthetic construct
  source 1..75: mol_type = other DNA
agaactgaccgtattgatgctgcggttggtggcattgacacccgtgtcaccaaaaacactcagactatccagaat

SEQ ID NO: 204887 - DNA, 75 bp, synthetic construct
  source 1..75: mol_type = other DNA
ttaaggcattgtagtcgaatgattatggatttactccctttctacgtgtgtgacgatgcggataatattcaaaat

SEQ ID NO: 204888 - DNA, 75 bp, synthetic construct
  source 1..75: mol_type = other DNA
tgactgccagtaaaccgcgccatatcgtcaaaaatctgcgttggtggatactggtcctttttttgctcggtgtta

SEQ ID NO: 204889 - DNA, 75 bp, synthetic construct
  source 1..75: mol_type = other DNA
tactgctgttcctgacatttaacggtcatttatggttgatttcactgctggtcgatacctttcacaccctgccaa

SEQ ID NO: 204890 - DNA, 75 bp, synthetic construct
  source 1..75: mol_type = other DNA
gaatacaaccgcatcgttaccaatatagataggttgaataaagacacaacttttgctatcgatgctaacggtaac

SEQ ID NO: 204891 - DNA, 75 bp, synthetic construct
  source 1..75: mol_type = other DNA
taaaaacaggtgtttcaaatgctatttctatcgaaacagcgccagcgtatgtgtctgcggttcgttcagggggaa

SEQ ID NO: 204892 - DNA, 75 bp, synthetic construct
  source 1..75: mol_type = other DNA
gaagagatagatcttaaattgcttttcggcatgtttgagccacacgaaaagccgtggttcgtgcatgaagacaaa

SEQ ID NO: 204893 - DNA, 75 bp, synthetic construct
  source 1..75: mol_type = other DNA
gagcgttgttgcgggtgtgaaagcagatacaacaatttatcagaataaagatggcagctatacacttgaccagag

SEQ ID NO: 204894 - DNA, 75 bp, synthetic construct
  source 1..75: mol_type = other DNA
acagcgaccagcaggcactggcagtgggtgtgggttaccgcttcaacgagcagaccgcagcgaaagcaggcgtgg

SEQ ID NO: 204895 - DNA, 75 bp, synthetic construct
  source 1..75: mol_type = other DNA
gcagcgccagattaatgaaaaccacaaggaaatgaaacgagcagcagcacagtctgcggccctgacaggtctgtt

SEQ ID NO: 204896 - DNA, 75 bp, synthetic construct
  source 1..75: mol_type = other DNA
actcagtccatgctgcgaaatatttatgtcccggaaaggttatgccggaacattttgaacagttgatgctgctgt

SEQ ID NO: 204897 - DNA, 75 bp, synthetic construct
  source 1..75: mol_type = other DNA
ggtgccactggtggtaaggccctgcaactgaacaaaccggaaaaccacatctggtttctggagcatgatgcagtc

SEQ ID NO: 204898 - DNA, 75 bp, synthetic construct
  source 1..75: mol_type = other DNA
aaggcggacgtgtgagcgtacggtttaaggtgccgggcgcactggtgccgaatcagtttgccctgggtatttact

SEQ ID NO: 204899 - DNA, 75 bp, synthetic construct
  source 1..75: mol_type = other DNA
atgaacctaaagctcaaaaaactcgaacactggatagcaaggcacaagcagatgggacggagtataccgctcctg

SEQ ID NO: 204900 - DNA, 75 bp, synthetic construct
  source 1..75: mol_type = other DNA
cttaacgtgatgtaccacaagggtaatccggaccagaacacgaagctgggttcattcggtgcatttaataacgag

SEQ ID NO: 204901 - DNA, 75 bp, synthetic construct
  source 1..75: mol_type = other DNA
cctgatgcaggccattgcggcggaaggtgatgtcaccacaccagtggcggtgaccggtaatgagggtgaggcggt

SEQ ID NO: 204902 - DNA, 75 bp, synthetic construct
  source 1..75: mol_type = other DNA
ataacggatggcacacactggcttttgagtttgccggaaacaacagcattcaggtgacacctgtactggatgaga

SEQ ID NO: 204903 - DNA, 75 bp, synthetic construct
  source 1..75: mol_type = other DNA
taagcaactttccactgagattactgaatacctgcgaaagttatttatgggaaataatttctatataacgaacag

SEQ ID NO: 204904 - DNA, 75 bp, synthetic construct
  source 1..75: mol_type = other DNA
acgtcattggcctcaaactgggctttatgatctgcgcgggactgtgggcgctggcctgtctgatgcatgcggggg

SEQ ID NO: 204905 - DNA, 75 bp, synthetic construct
  source 1..75: mol_type = other DNA
atgtcccggaaaggttatgccggaacattttgaacagttgatgctgctgtctaaaataagagggaagaaaattaa

SEQ ID NO: 204906 - DNA, 75 bp, synthetic construct
  source 1..75: mol_type = other DNA
ttccggattcttacgatgcgccccacccacgcattaagcaactggcccgtcgcaacacagtgactcccggtggta

SEQ ID NO: 204907 - DNA, 75 bp, synthetic construct
  source 1..75: mol_type = other DNA
ggtttacgttaacgcgggaaacaatggcgtcgaagacccagaccaaggcggccagattgttaataccaccgtcgg

SEQ ID NO: 204908 - DNA, 75 bp, synthetic construct
  source 1..75: mol_type = other DNA
aagatgtcctctggccatctgccgtcaccgacgacaacattaaacgtaacgcgttcgccggtactgcaatcagca

SEQ ID NO: 204909 - DNA, 75 bp, synthetic construct
  source 1..75: mol_type = other DNA
agcttttttaatatcgtattttgttcctccagacgatgaacctgctttttcagctcacgaatatgttgctgctct

SEQ ID NO: 204910 - DNA, 75 bp, synthetic construct
  source 1..75: mol_type = other DNA
gctggcgctgccggaatactgaaccctgtgccggaaagcagcttaatgcgtggctcgccagtgaagggcttctca

SEQ ID NO: 204911 - DNA, 75 bp, synthetic construct
  source 1..75: mol_type = other DNA
gcaagcgagcaacaggcgatggaaaaactgtggctggatgttaaacgtgttgccggacagagcgtgattttcgaa

SEQ ID NO: 204912 - DNA, 75 bp, synthetic construct
  source 1..75: mol_type = other DNA
atgccgggttgtacatcacatttattgcccgaaggccctttctcacgcgaacaggctgttgccgtcaaaacagct

SEQ ID NO: 204913 - DNA, 75 bp, synthetic construct
  source 1..75: mol_type = other DNA
atggcgtttcgcttctcaaccgtctgcggatggaaggcaaaaacagtaaagccgatgtggtgctggggctggata

SEQ ID NO: 204914 - DNA, 75 bp, synthetic construct
  source 1..75: mol_type = other DNA
caaaggctggagcgaagcctacggcctgtttttaaaaggtgaaagcgatctggtactgagttacaccacctctcc

SEQ ID NO: 204915 - DNA, 75 bp, synthetic construct
  source 1..75: mol_type = other DNA
acccgggaatgcatttccgtcgggttatccgcaacgcggaaggtcagcgacgctggcgctgccggaactctgaag

SEQ ID NO: 204916 - DNA, 75 bp, synthetic construct
  source 1..75: mol_type = other DNA
atgtcggactgtcaccctgttttattgcccgaaggccctttctcacgcgaacaggcggttggcgtcacaacagct

SEQ ID NO: 204917 - DNA, 75 bp, synthetic construct
  source 1..75: mol_type = other DNA
atgttggactgacgccctgttttattgcccgaaggccctttctcacgcgaacaggcggttggcgtcacaacagct

SEQ ID NO: 204918 - DNA, 75 bp, synthetic construct
  source 1..75: mol_type = other DNA
caggaagaaacactggcgcaaaccgcacactggataactgaacgacgagccaaacatttcgccgggctggcactg

SEQ ID NO: 204919 - DNA, 75 bp, synthetic construct
  source 1..75: mol_type = other DNA
gaacgctatttccgcgaacgtggtcgcgtaatggcgccgagcaaccgcaaacaggcggagctgccagccagtgct

SEQ ID NO: 204920 - DNA, 75 bp, synthetic construct
  source 1..75: mol_type = other DNA
atgagtcaggtgatcctcgatttacaactggcatgtgaagataattccgggttaccggaagagagccagtttcag

SEQ ID NO: 204921 - DNA, 75 bp, synthetic construct
  source 1..75: mol_type = other DNA
aaggtcagttgcgctggcggtgctggaattttgagtctaacgccggaaaacagcttaatgtgtggctcgccagtg

SEQ ID NO: 204922 - DNA, 75 bp, synthetic construct
  source 1..75: mol_type = other DNA
gaccgcaacttcaagccgggcttccgtattgatcggcactgttgcaaagttagcgatgaggcagccttttgtctt

SEQ ID NO: 204923 - DNA, 75 bp, synthetic construct
  source 1..75: mol_type = other DNA
gcctgggtattatgggtaaaccaatgagtaaaaaccttctgaaagcaggttactcgctggtggtttctgaccgta

SEQ ID NO: 204924 - DNA, 75 bp, synthetic construct
  source 1..75: mol_type = other DNA
gatctggtttatcaggcaattcgcggtggactggcgggcagtaccgttcttgacgccaaagcgcctatggtcatg

SEQ ID NO: 204925 - DNA, 75 bp, synthetic construct
  source 1..75: mol_type = other DNA
cgctggcggtactggaattttgaatccgatgccggtaaacaacttaatgcgtggctcgccagtgagggaattctc

SEQ ID NO: 204926 - DNA, 75 bp, synthetic construct
  source 1..75: mol_type = other DNA
tatcaggcaattcgcggtggactggcgggcagtaccgtgctggatgccaaagcgccgatggtgatggaccgcaac

SEQ ID NO: 204927 - DNA, 75 bp, synthetic construct
  source 1..75: mol_type = other DNA
ggcgctgcgtgccgatgggctgggaacagcagaccacagcgctctggcgtgctactacgaaaaactggcgaaagt

SEQ ID NO: 204928 - DNA, 75 bp, synthetic construct
  source 1..75: mol_type = other DNA
acgatgcgatggcaatgggcgcggtagaagcactgaaagcacacaacaagtccagcattccggtgtttggcgtcg

SEQ ID NO: 204929 - DNA, 75 bp, synthetic construct
  source 1..75: mol_type = other DNA
gggggatctgattgccaaacactgggcggcgaatcagggttgggatcttaacaaagatggtcagattcagtttgt

SEQ ID NO: 204930 - DNA, 75 bp, synthetic construct
  source 1..75: mol_type = other DNA
cgctggcgctgccggaattctgaacccgatgccggaaaggtgcttaatacgcggctcgccagtgatggtcttctc

SEQ ID NO: 204931 - DNA, 75 bp, synthetic construct
  source 1..75: mol_type = other DNA
tgtcagtgatggtgggtggcgacaaggctattttcgacaaatactatgatttgatgaaagcgatggcgggttccg

SEQ ID NO: 204932 - DNA, 75 bp, synthetic construct
  source 1..75: mol_type = other DNA
atgaataagaaggtgttaaccctgtctgctgtgatggccagcatgttattcggtgccactgcacacgctgctgat

SEQ ID NO: 204933 - DNA, 75 bp, synthetic construct
  source 1..75: mol_type = other DNA
aggcgaaagcgacctttgatctggcgaaaaacctggccgatggcaaaggtgcggctgatggcaccaactggaaaa

SEQ ID NO: 204934 - DNA, 75 bp, synthetic construct
  source 1..75: mol_type = other DNA
tcctctggacagaacgcggcgcagcccgtcacgcaaaaatgctcgaaaccgatcgggcgtgggaagtgttcgaaa

SEQ ID NO: 204935 - DNA, 75 bp, synthetic construct
  source 1..75: mol_type = other DNA
aaaatttctcgccagcgcctattacagcgagcttagtcctagaactcaaaaagattatctgcaacatcaaaaaaa

SEQ ID NO: 204936 - DNA, 75 bp, synthetic construct
  source 1..75: mol_type = other DNA
tgcagcgagggtttccgatgtgttatcgctgaaatgggaacagattggaaacgacgggatattcatccagcaagg

SEQ ID NO: 204937 - DNA, 75 bp, synthetic construct
  source 1..75: mol_type = other DNA
gtatgtcccgcgtttacagttgggggtatgagcgagggtacgtgaagggtaacccatgtgcaggtgtaagtaaat

SEQ ID NO: 204938 - DNA, 75 bp, synthetic construct
  source 1..75: mol_type = other DNA
agatagcgacagctttgggtatgaagccttctgagatatggccggagcggtacgacgaagaatacgaaatctccc

SEQ ID NO: 204939 - DNA, 75 bp, synthetic construct
  source 1..75: mol_type = other DNA
gtttacagttgggggtatgagcgagggtacgtgaaggctaacccatgtgcaggtgtaagtaaattcaaggccaaa

SEQ ID NO: 204940 - DNA, 75 bp, synthetic construct
  source 1..75: mol_type = other DNA
aaaaccgaagggcaagtgctaatctatgacaggaaggttaaagtttcaccaacacttgatgtcccgttacctgaa

SEQ ID NO: 204941 - DNA, 75 bp, synthetic construct
  source 1..75: mol_type = other DNA
aggcagcagtcgcgacaaacaaattttcagcgggcataaaacagaaaatcaggtgttgatttacgatcgtaaaac

SEQ ID NO: 204942 - DNA, 75 bp, synthetic construct
  source 1..75: mol_type = other DNA
atgagtggatgccgaagggtgtgtttttccgcccttccggttactactggaagccaggaggtactaccgagaatc

SEQ ID NO: 204943 - DNA, 75 bp, synthetic construct
  source 1..75: mol_type = other DNA
gtatgatcgcaaacccgcagtaactccgactctggatattccggtgctggatgtcacagttctgagcagaaaccc

SEQ ID NO: 204944 - DNA, 75 bp, synthetic construct
  source 1..75: mol_type = other DNA
gacgaagtaaacaaaattatgcaggcagccaatatcagccagcctgacgccgataagttgcttgctgcatcacgt

SEQ ID NO: 204945 - DNA, 75 bp, synthetic construct
  source 1..75: mol_type = other DNA
gtgtgtttttccgcccttccggttactactggaagccaggaggtactaccgagaatctagccccagcaaacgctt

SEQ ID NO: 204946 - DNA, 75 bp, synthetic construct
  source 1..75: mol_type = other DNA
ttcagcgggcataaaacagaaaatcaggtgttgatttacgatcgtaaaacaaaaatcacaccaacactggatttg

SEQ ID NO: 204947 - DNA, 75 bp, synthetic construct
  source 1..75: mol_type = other DNA
acccgtcacgactacggccgcgaagctttcatcgacaaaatttgggaatggaaagcggaatccggcggcaccatt

SEQ ID NO: 204948 - DNA, 75 bp, synthetic construct
  source 1..75: mol_type = other DNA
tgaaggcataactgatgtcaacggtcaggcttcgctaaccctgagccagcccggcggcgcgggcgttaaaactca

SEQ ID NO: 204949 - DNA, 75 bp, synthetic construct
  source 1..75: mol_type = other DNA
ctgaccagaaagtgacgctgaacatcgcgcccgcacagggcgatttaatttcggtgagcgccagtggttataacg

SEQ ID NO: 204950 - DNA, 75 bp, synthetic construct
  source 1..75: mol_type = other DNA
gcggtttctcaaatcgtgaccaccgtgctggtattacaaacctgtcgcacaacacctgcggctgttgccagccag

SEQ ID NO: 204951 - DNA, 75 bp, synthetic construct
  source 1..75: mol_type = other DNA
aacgttatttttaccaccccaaccagcccggacgtttccggtgcgcaaatgtggggccatatggatgaaacgata

SEQ ID NO: 204952 - DNA, 75 bp, synthetic construct
  source 1..75: mol_type = other DNA
attcaccattaccaaaggtatgggatataaccgagcgggacaggtgagcgggtttgatgacccgagtagcggctc

SEQ ID NO: 204953 - DNA, 75 bp, synthetic construct
  source 1..75: mol_type = other DNA
gcaacggagaaaatggatgccagcaaggctggatgtgatgagagttatcaaccgctgatgactgacatgcagggg

SEQ ID NO: 204954 - DNA, 75 bp, synthetic construct
  source 1..75: mol_type = other DNA
cacgctaacccggtcaatcgccaaaatgtggcgtcaacatcgcagaaagtgtcggtcacgactgcgtcgggtacg

SEQ ID NO: 204955 - DNA, 75 bp, synthetic construct
  source 1..75: mol_type = other DNA
tttggggacatatggccgaaacggtgatggcctccgacggtacaatctataaacgaccactgttgttgaaagagc

SEQ ID NO: 204956 - DNA, 75 bp, synthetic construct
  source 1..75: mol_type = other DNA
cgcgcctgacgtcgaaccgaaaatcgtccttacgcccgaaaactatgatgatacggcacaggcgatgaaagcgaa

SEQ ID NO: 204957 - DNA, 75 bp, synthetic construct
  source 1..75: mol_type = other DNA
tggtggcaccggtggtgattaacagtgggctggcggatgaaacgacgttgaacgacaccgcgggattttatactg

SEQ ID NO: 204958 - DNA, 75 bp, synthetic construct
  source 1..75: mol_type = other DNA
agtatgaataacgtgccgagcagtgccgaattacaaacattacactccggctttagcacattgggatggccgtca

SEQ ID NO: 204959 - DNA, 75 bp, synthetic construct
  source 1..75: mol_type = other DNA
acgggttaaggtaacggtaaaagatgcgcagggtaatccgctcacggatatgccatttaaactcagtcgcggaga

SEQ ID NO: 204960 - DNA, 75 bp, synthetic construct
  source 1..75: mol_type = other DNA
aattacagatagattgtatctggagtctggttggtccggtttgacagaaagtgtcccgcaggccgaagggataac

SEQ ID NO: 204961 - DNA, 75 bp, synthetic construct
  source 1..75: mol_type = other DNA
tttgtatggcttaccgaccacagggctgcgtttctttacggtttatggtccatggggacgtccggatatggcatt

SEQ ID NO: 204962 - DNA, 75 bp, synthetic construct
  source 1..75: mol_type = other DNA
atgattattacgatgtcaacctcaaacaagcacgacttgatttactcaagcacgacaatttcagtttttataaaa

SEQ ID NO: 204963 - DNA, 75 bp, synthetic construct
  source 1..75: mol_type = other DNA
agcataacgttcaaagcacattgcacctgccggatagtctcacgcaccagggattagcgattatggaacatccag

SEQ ID NO: 204964 - DNA, 75 bp, synthetic construct
  source 1..75: mol_type = other DNA
gatcccattcagttaaccccaggcttgctgcggacacctcgattttgtgtggcgctcgataacgcaacgctctgg

SEQ ID NO: 204965 - DNA, 75 bp, synthetic construct
  source 1..75: mol_type = other DNA
aacgtgtgaagtttgatggggcgaccactaccggtccttcaaatctggttgatggtgataacacgattcatttta

SEQ ID NO: 204966 - DNA, 75 bp, synthetic construct
  source 1..75: mol_type = other DNA
tgggtttcaagccacagacgtcagtgaaggaaggggtgaaaaacttcgtcgagtggtataaggattactatcaga

SEQ ID NO: 204967 - DNA, 75 bp, synthetic construct
  source 1..75: mol_type = other DNA
gctaacctgatgggttatctgaacattctggaaggctgccgccataccaaagtgaaacacctggtgtacgcctcc

SEQ ID NO: 204968 - DNA, 75 bp, synthetic construct
  source 1..75: mol_type = other DNA
cccaggccggcgtgcgctactcgctcgaaaacccgtatgcctacgcagacgctaacctgatggggtatctgaaca

SEQ ID NO: 204969 - DNA, 75 bp, synthetic construct
  source 1..75: mol_type = other DNA
gaaggcaaaagcattgatgtttacaactacggaaagatgaagcgcgactttacctatattgatgacatcgccgaa

SEQ ID NO: 204970 - DNA, 75 bp, synthetic construct
  source 1..75: mol_type = other DNA
tttaagccgcaaacgtcagtgaaggaaggcgtgaagaacttcgtggagtggtacaaggattactatcagatctaa

SEQ ID NO: 204971 - DNA, 75 bp, synthetic construct
  source 1..75: mol_type = other DNA
accgttgagagcggttcaccggcgacaagttccgcgccgtatcgggtctataacattggcaacagctcgccggtg

SEQ ID NO: 204972 - DNA, 75 bp, synthetic construct
  source 1..75: mol_type = other DNA
agcaaatgccgccactaatgacgctgagcggtatcgcactgttagtggttggcgtgatcattgcggtcagagcaa

SEQ ID NO: 204973 - DNA, 75 bp, synthetic construct
  source 1..75: mol_type = other DNA
gcacggtatttaaacgcccgcgcttactgaatgagtggtcaactcagtcctctcttactgaagataatgaggtct

SEQ ID NO: 204974 - DNA, 75 bp, synthetic construct
  source 1..75: mol_type = other DNA
ctggtggatgaaacatcactgaatgataccgcgacagcatacacagccatgaccggcagcgacggcactaaaata

SEQ ID NO: 204975 - DNA, 75 bp, synthetic construct
  source 1..75: mol_type = other DNA
ttcaccacccccaccagcccggatgtggtggcggcgcagatgtgggggcatatggatgagactattacagtcgat

SEQ ID NO: 204976 - DNA, 75 bp, synthetic construct
  source 1..75: mol_type = other DNA
aaaccgaggggcaagtgctaatctatgacaggaaggttaaagtttcaccaacacttgatgtcccgttacctgaaa

SEQ ID NO: 204977 - DNA, 75 bp, synthetic construct
  source 1..75: mol_type = other DNA
tgcctggcatgcgccagtttggcgcgctggctacggtgatccctaactctattcaggagaccgccggttggccga

SEQ ID NO: 204978 - DNA, 75 bp, synthetic construct
  source 1..75: mol_type = other DNA
cgacaggcgatgacggtctcatttataaaaggccattgctgagagacgagattagcgcctctaatggtatcagca

SEQ ID NO: 204979 - DNA, 75 bp, synthetic construct
  source 1..75: mol_type = other DNA
tgaggcgaacgatgcggcgcaatttgtcaaagttgacgataccttgagtgcgctgaaagtgaaaaaaggtgaaga

SEQ ID NO: 204980 - DNA, 75 bp, synthetic construct
  source 1..75: mol_type = other DNA
ctgacgctaacgcaaccgggcggcgcgggcgtgaaaacacacattactgcgaaaatgcgcagcgacttcaccacg

SEQ ID NO: 204981 - DNA, 75 bp, synthetic construct
  source 1..75: mol_type = other DNA
tttaattgcactgcccattgcctggctggggcgcgtgcgtctgcgccagttgacacgtcgcgactggcttaccgc

SEQ ID NO: 204982 - DNA, 75 bp, synthetic construct
  source 1..75: mol_type = other DNA
atgggaagcgcatccggtgcagatagcaggtggcagtaatgtccatcaggttgacgcgcatacctatgaaggcat

SEQ ID NO: 204983 - DNA, 75 bp, synthetic construct
  source 1..75: mol_type = other DNA
ccagtcccgactcaccgaaagcaaaatactggggtcatatggccgacacgtttaccagcagtgcgggggtgacct

SEQ ID NO: 204984 - DNA, 75 bp, synthetic construct
  source 1..75: mol_type = other DNA
ggtgatgtttaccgttataaccagcccggatacgcctctggcaaactactgggggcatatgtctgaaaccttcac

SEQ ID NO: 204985 - DNA, 75 bp, synthetic construct
  source 1..75: mol_type = other DNA
tcgtttcgcttcgttcagtcagccgtggtatgacacagtcgataaacaagccagtattgcttatcagggaatggc

SEQ ID NO: 204986 - DNA, 75 bp, synthetic construct
  source 1..75: mol_type = other DNA
cctaccattaacgttatcggttcccctttcagtccggctcaaattaccatcgaaacagcattttttgaagcatca

SEQ ID NO: 204987 - DNA, 75 bp, synthetic construct
  source 1..75: mol_type = other DNA
ctaaagggagatcttaattatctgcgacttgagtgggggccagattttcaacagcatgaggcaggtttgatcggt

SEQ ID NO: 204988 - DNA, 75 bp, synthetic construct
  source 1..75: mol_type = other DNA
cgccaccgacagtatctttagtttgggcggatgccgcgacgccggacaccttactggacccacagccagtcgcag

SEQ ID NO: 204989 - DNA, 75 bp, synthetic construct
  source 1..75: mol_type = other DNA
tgaggtagcgtttaccgctaaaccgagtgaattcagcgcggatgttagcgtctctaaattgctcgtcaccaaccc

SEQ ID NO: 204990 - DNA, 75 bp, synthetic construct
  source 1..75: mol_type = other DNA
ctttctttgaatacggcagcaaaaaatgatgtcagcaaatcagactgcggcgaaccttatcaaccgttattaagc

SEQ ID NO: 204991 - DNA, 75 bp, synthetic construct
  source 1..75: mol_type = other DNA
tttttgacggcaaatggggtccgcaattacacatcatcactattctggtgatttgtatgctgattgcctccattc

SEQ ID NO: 204992 - DNA, 75 bp, synthetic construct
  source 1..75: mol_type = other DNA
tgccggtgcttgttgggctggtgattgtcatcgtggctacagagttgattgtacccggaacagccgccgcagtta

SEQ ID NO: 204993 - DNA, 75 bp, synthetic construct
  source 1..75: mol_type = other DNA
atggtcgtcaagctggcgtcaaaaccgctgcagtacataaactccccttacctgctgatgattgccgcctatttt

SEQ ID NO: 204994 - DNA, 75 bp, synthetic construct
  source 1..75: mol_type = other DNA
cacagaaacaatatccgtttaaccgctgccggtgaaaaactactgccttatgcagaaacgctcatgagcacctgg

SEQ ID NO: 204995 - DNA, 75 bp, synthetic construct
  source 1..75: mol_type = other DNA
gctactattgggtaattccagaatataacaaaattgcatccatacgattcccaagttctaatacggatacagatc

SEQ ID NO: 204996 - DNA, 75 bp, synthetic construct
  source 1..75: mol_type = other DNA
gcttggtgataactctggaaatattcaaggtatagatgctgaaagtaagattgacggcacttcagataatgttgt

SEQ ID NO: 204997 - DNA, 75 bp, synthetic construct
  source 1..75: mol_type = other DNA
gcgcagccagacccccagcagaccatgccgctgttatatctacttacctcgacgggctatccctatgaaagtgtt

SEQ ID NO: 204998 - DNA, 75 bp, synthetic construct
  source 1..75: mol_type = other DNA
tgccgcttatcaggcgtgtctggtgtctgcgcgcgcgacggtttccagcgtcacactgacctcaacagcgtttga

SEQ ID NO: 204999 - DNA, 75 bp, synthetic construct
  source 1..75: mol_type = other DNA
cgaaaacgtcgctgaccgctacgctctattcagatacaacgaaaaaagcgaccctcgataccatttttaccgttg

SEQ ID NO: 205000 - DNA, 75 bp, synthetic construct
  source 1..75: mol_type = other DNA
gaggcttctttacgtctgacgattaccgatagcaagaacaacgatcagccgctggcttactactacttttcgctg

SEQ ID NO: 205001 - DNA, 75 bp, synthetic construct
  source 1..75: mol_type = other DNA
ccggcgatgaaacgacagcacaggacaatactgagggctgggcacaggctgtggcggcgtccggccagacaccgg

SEQ ID NO: 205002 - DNA, 75 bp, synthetic construct
  source 1..75: mol_type = other DNA
ccgccgccagcaactggtattccgctttattttctggatatctgcgctctcaaccggttactggactacccggac

SEQ ID NO: 205003 - DNA, 75 bp, synthetic construct
  source 1..75: mol_type = other DNA
tccacgcgcgttggcgctgctcgaacaggccgttgaaatcgaacaactgtttcgtgaagacaacggcgcgattcg

SEQ ID NO: 205004 - DNA, 75 bp, synthetic construct
  source 1..75: mol_type = other DNA
attgcgcctgtaaactcctatattcccaatactgttaattacaatgtgattttcactacgctcaccagtccggat

SEQ ID NO: 205005 - DNA, 75 bp, synthetic construct
  source 1..75: mol_type = other DNA
catcatccgcactctctccggttgctctaatgctctgcctggcacagcctcactctaagccgtcaagcgttaccc

SEQ ID NO: 205006 - DNA, 75 bp, synthetic construct
  source 1..75: mol_type = other DNA
atgcccgacacgtttaccagtagggcgggggtgacctttaaacgaccgctactggcagcagaagcgaccttgggg

SEQ ID NO: 205007 - DNA, 75 bp, synthetic construct
  source 1..75: mol_type = other DNA
aaaagcgaccctcgataccatttttaccgttgtcaccagcccggacagcgataaggcgaaaatgtgggggcatat

SEQ ID NO: 205008 - DNA, 75 bp, synthetic construct
  source 1..75: mol_type = other DNA
ttactggacccacagccagtcgcagatcgctcgttttgcgcacagggacttgccgggcgttcgctggtcgcctgg

SEQ ID NO: 205009 - DNA, 75 bp, synthetic construct
  source 1..75: mol_type = other DNA
aagctgcgtacgatgcctctgcagatgatcttaccatcgtgcctttggagcctaccggggtaacgtcaatcttgt

SEQ ID NO: 205010 - DNA, 75 bp, synthetic construct
  source 1..75: mol_type = other DNA
ctgggatcggtgcgggaaaataacgaagactgggcgctgtacgatcaaaacaccagtatgcaggcggaatgcgga

SEQ ID NO: 205011 - DNA, 75 bp, synthetic construct
  source 1..75: mol_type = other DNA
gcaacaaaaaaagacagcctggatacgatctttactgtggtcaccagcccggatagtagcaaagcgaaaatgtgg

SEQ ID NO: 205012 - DNA, 75 bp, synthetic construct
  source 1..75: mol_type = other DNA
gtgatctttaccgtcaccaccagcccggatacgccgctggcgaccaattggggccatatggcggaaacctttacc

SEQ ID NO: 205013 - DNA, 75 bp, synthetic construct
  source 1..75: mol_type = other DNA
ctctctatgaatgaatctgaccttgatagtgaagctactaaagagacttctaaacaagataaagaaatctctgat

SEQ ID NO: 205014 - DNA, 75 bp, synthetic construct
  source 1..75: mol_type = other DNA
acagacccaaaaagaaaactcacactgattcaaagaaagaaaaagttaaagtcagacgtgtttatgctggaggga

SEQ ID NO: 205015 - DNA, 75 bp, synthetic construct
  source 1..75: mol_type = other DNA
taaacaagacaaagaaatctctgatgtgattgctagtagtgaccataaaaacacacagtgccccgccactgatga

SEQ ID NO: 205016 - DNA, 75 bp, synthetic construct
  source 1..75: mol_type = other DNA
aaatcgtcctcacgccagaaaactatgatgacacggcgcaggcgatgaaagcgaaggtgggcgaggatgcgacga

SEQ ID NO: 205017 - DNA, 75 bp, synthetic construct
  source 1..75: mol_type = other DNA
gtaacggcattggtacccgcgaatacaaatagtgtgttggcagcaagtggagcaaaactgatcggcacgacgggc

SEQ ID NO: 205018 - DNA, 75 bp, synthetic construct
  source 1..75: mol_type = other DNA
gtcaccaccaaagactgtcagggcaacgtcgcgggcaatatcccgtttattatcaaacgacaggatgcgaaaaac

SEQ ID NO: 205019 - DNA, 75 bp, synthetic construct
  source 1..75: mol_type = other DNA
gctggaagcggcagatccggtgacgctggataccacctataacgtggtaaaagcgaaaaaaagcgaagaatccgt

SEQ ID NO: 205020 - DNA, 75 bp, synthetic construct
  source 1..75: mol_type = other DNA
gattattactggacatcgctggcgggcactaccgggcagcaccatgcagcggatgtctctaaccgtgctgaagcg

SEQ ID NO: 205021 - DNA, 75 bp, synthetic construct
  source 1..75: mol_type = other DNA
tgcgtctggccatcaccgacacgaaaaacaacgatcaaccgctggcgtattactacttctcgctacatctggatg

SEQ ID NO: 205022 - DNA, 69 bp, synthetic construct
  source 1..69: mol_type = other DNA
atgcgtaaactttatgccgccattttgtccgcagccatttgtctggccgtatccggtgcgcctgcatgg

SEQ ID NO: 205023 - DNA, 75 bp, synthetic construct
  source 1..75: mol_type = other DNA
ccagcggcgtttgttaaaaatccctggaaatatcgctgtagcttgtcttgacggttcagacagttgcgatcaaac

SEQ ID NO: 205024 - DNA, 75 bp, synthetic construct
  source 1..75: mol_type = other DNA
gaaattagctggcaaagcccggtgttctttacccctgtcgataaacagggtggtttaaaagaagcggaactgaaa

SEQ ID NO: 205025 - DNA, 75 bp, synthetic construct
  source 1..75: mol_type = other DNA
gaatccgtgatcgccggacacggtgccggggcgcaaaccctttctgaacaacggctgtgtcgggtcctgaatatc

SEQ ID NO: 205026 - DNA, 75 bp, synthetic construct
  source 1..75: mol_type = other DNA
caggatatggaacaaacggcgttaatgggtctgcttaatgccattcgccgctacgggctgccggacgaaggcttt

SEQ ID NO: 205027 - DNA, 75 bp, synthetic construct
  source 1..75: mol_type = other DNA
ttgcgctggtattagggctaaccgaggcccgaatttgtcaactgaataaacagatcgcgcagaaaattcgtgatt

SEQ ID NO: 205028 - DNA, 75 bp, synthetic construct
  source 1..75: mol_type = other DNA
aatcctgatgacgcttcttcaaggtaacccggcggcgttagttatttttggttctcagttggctgataaaactca

SEQ ID NO: 205029 - DNA, 75 bp, synthetic construct
  source 1..75: mol_type = other DNA
gccgaacttcaccgagaagcttgagctgccgagcctgcaagatttcggcgcgctgctggaagagcagagcaaaga

SEQ ID NO: 205030 - DNA, 75 bp, synthetic construct
  source 1..75: mol_type = other DNA
ctgtgaactcctatattcccaatactgttaattacaatgtgattttcactacgctcaccagtccggatgcggttg

SEQ ID NO: 205031 - DNA, 75 bp, synthetic construct
  source 1..75: mol_type = other DNA
tggctaattacgcttccgcgacagacacgctggacgctatttttacggtgccaaccagcccaaatgtttcatcgg

SEQ ID NO: 205032 - DNA, 75 bp, synthetic construct
  source 1..75: mol_type = other DNA
caccggtgaaagcgcaaaaaaccgcaacgctcgcccggcggtgatggcgctctcccggtcgctgggcgattttgt

SEQ ID NO: 205033 - DNA, 75 bp, synthetic construct
  source 1..75: mol_type = other DNA
atgccgctcggcgaggcgctggagcagcataccggcgtaccggtttatattcagcatgatatcagcgcatggacg

SEQ ID NO: 205034 - DNA, 75 bp, synthetic construct
  source 1..75: mol_type = other DNA
acgcttccgcgacagacacgctggacgctatttttacggtaccaaccagcccaaatgtttcctcggcgcactttt

SEQ ID NO: 205035 - DNA, 75 bp, synthetic construct
  source 1..75: mol_type = other DNA
tttacataccggcaagaaagtcaccctgacgttacgccctgcgccggtcaacaccggggtcatctatcgtcgcac

SEQ ID NO: 205036 - DNA, 75 bp, synthetic construct
  source 1..75: mol_type = other DNA
aaagcaccggataataacgtgctggaatttgcgctggccagacgcgtgctgctcgtggagggggatgctgagttt

SEQ ID NO: 205037 - DNA, 75 bp, synthetic construct
  source 1..75: mol_type = other DNA
agccggagaatcatctcagccatgtcagtatgaagaggctggttaatcagcttgccacggaacggcagacgcagg

SEQ ID NO: 205038 - DNA, 75 bp, synthetic construct
  source 1..75: mol_type = other DNA
agccggcaccgggtcgaggcattgggtgtggaatcgctcctgtcccagtcagcagtaaggcagtttcaggaaggt

SEQ ID NO: 205039 - DNA, 75 bp, synthetic construct
  source 1..75: mol_type = other DNA
tattccgtggccgaaccggatcgccaacggctgttaccgctatcaggggcaggaatatcagttacccattaatga

SEQ ID NO: 205040 - DNA, 75 bp, synthetic construct
  source 1..75: mol_type = other DNA
aacgctatgctgacgtgatttgttcccgctcccgggtatttgctgatcgcgataacacccgatccacatttgaaa

SEQ ID NO: 205041 - DNA, 75 bp, synthetic construct
  source 1..75: mol_type = other DNA
tgacggggttcacatcatcgctatcggcggaacgagtttccgtcgttatcttgaactggcccgtcttctggaaaa

SEQ ID NO: 205042 - DNA, 75 bp, synthetic construct
  source 1..75: mol_type = other DNA
gccgcggcattcgcgtcgttgctgggttgtgacgtgcaggatgccgatgctgatttctttgcgcttggcggtcat

SEQ ID NO: 205043 - DNA, 75 bp, synthetic construct
  source 1..75: mol_type = other DNA
taactgaacctgacccgcgtgatgacctctccggcaaagacgtgatgcgcaagctggtgattctggcgcgtgaag

SEQ ID NO: 205044 - DNA, 75 bp, synthetic construct
  source 1..75: mol_type = other DNA
tcaaccataccgtgcgcgatctgatcgacagcggcgacactattttgtcgatcagcgggatcttctccggcacac

SEQ ID NO: 205045 - DNA, 75 bp, synthetic construct
  source 1..75: mol_type = other DNA
ttcaaaactaacagtgttccccaaggtgtccgcgatcgggcattcgaagaatgggagcagatcatcatagataat

SEQ ID NO: 205046 - DNA, 75 bp, synthetic construct
  source 1..75: mol_type = other DNA
aacagactccgtatatttccgcagtggatgctctgcgagcaaggcgctcttccggattgctaaaagccaacgtga

SEQ ID NO: 205047 - DNA, 75 bp, synthetic construct
  source 1..75: mol_type = other DNA
tgatttctttgcgcttggcggtcattcgctactggcaatgaaactggcagcgcagttaagtcgacagtttgctcg

SEQ ID NO: 205048 - DNA, 75 bp, synthetic construct
  source 1..75: mol_type = other DNA
gtcagggattagcagtagaacccatgagttgcccgccgaacgcctttaactctggcaccgatttactattactgg

SEQ ID NO: 205049 - DNA, 75 bp, synthetic construct
  source 1..75: mol_type = other DNA
ctgttcgcccgtgagcagagtacgctttcggcgcgtaccggctttgaatttgtgctggcaggcgtggtggacagc

SEQ ID NO: 205050 - DNA, 75 bp, synthetic construct
  source 1..75: mol_type = other DNA
tcaaccacaccgtgcgcgatctgatcgacagcggcgatactattttgtcgatcagcgggatcttctccggcacgc

SEQ ID NO: 205051 - DNA, 75 bp, synthetic construct
  source 1..75: mol_type = other DNA
gtactggcttccggcactggtgcgcgaattgtcaccagccacgacgatgtctgtttgattgagtttcaggtgcca

SEQ ID NO: 205052 - DNA, 75 bp, synthetic construct
  source 1..75: mol_type = other DNA
taaccgaacctgacccgcgtgacgatctctctggcaaagacgtgatgcgcaagctggtgattctggcgcgtgaag

SEQ ID NO: 205053 - DNA, 75 bp, synthetic construct
  source 1..75: mol_type = other DNA
taaccgagcctgacccgcgtgatgacctttccggcaaagacgtgatgcgcaaactggtgattctggcgcgtgaag

SEQ ID NO: 205054 - DNA, 75 bp, synthetic construct
  source 1..75: mol_type = other DNA
tccgtatttcgcgcggaaaaacgcattggcctggttctgttcggcaagggcaatatcggttcccgctggctggaa

SEQ ID NO: 205055 - DNA, 75 bp, synthetic construct
  source 1..75: mol_type = other DNA
ttggtttagcaaggataatctgccggaagagttaaactttaaacccgttgcggacgcgatcttcaacggtggtct

SEQ ID NO: 205056 - DNA, 75 bp, synthetic construct
  source 1..75: mol_type = other DNA
ggtttaggtggagttaagaagtttaggaagatgttagcggcattagaccgcaaagactggaaagaagcaattaga

SEQ ID NO: 205057 - DNA, 75 bp, synthetic construct
  source 1..75: mol_type = other DNA
tctcctggctgttcctgcaattcgacggtagcgtgccgtttaccgaactggtggatcaggcgtggcagcaaggct

SEQ ID NO: 205058 - DNA, 75 bp, synthetic construct
  source 1..75: mol_type = other DNA
atacaaaggtaaaataaatgattatgttttttatgtgaataatttatacttaaatgttttacccttttatggttt

SEQ ID NO: 205059 - DNA, 75 bp, synthetic construct
  source 1..75: mol_type = other DNA
agcttatcgcgaaaagaaaagggttgccagataatttcttgtcgcgtaatgatgccgataagttaaaatttctta

SEQ ID NO: 205060 - DNA, 75 bp, synthetic construct
  source 1..75: mol_type = other DNA
cgtctctatactttctctcaagttgaaaaaaaagaaaaggagagcgactgagaacactatatcgcttaacggtta

SEQ ID NO: 205061 - DNA, 75 bp, synthetic construct
  source 1..75: mol_type = other DNA
cgctgattgcaggaaatcagtggtctgatcctgaaactatcgaacgtaatattgatgggctgctcaattccgctg

SEQ ID NO: 205062 - DNA, 75 bp, synthetic construct
  source 1..75: mol_type = other DNA
ccggcaccaccacgctggagtctttgaagaacgaacagtgggtgttgccgcaaacgaatatgggatactacagcg

SEQ ID NO: 205063 - DNA, 75 bp, synthetic construct
  source 1..75: mol_type = other DNA
tcttaccggcaatccgcgacggtcgactggattttgcgattggtacgttaagtgcagaaatgaagcttcaggatt

SEQ ID NO: 205064 - DNA, 75 bp, synthetic construct
  source 1..75: mol_type = other DNA
catgcccagtggcgctgggatctggcgatcgcttcccacggcattcatatgcacgcaccggaagaaggtttacgg

SEQ ID NO: 205065 - DNA, 75 bp, synthetic construct
  source 1..75: mol_type = other DNA
agtcgattaacgacctgaaaatcaaggttgaagatcaactggttcacgctcacttcgaagcgaaagcggcactgg

SEQ ID NO: 205066 - DNA, 75 bp, synthetic construct
  source 1..75: mol_type = other DNA
tgttattggtgatgatagtttgctgtgcgtgggatcgttcaactggtttagcgcaacgcgagaagcgcgatatga

SEQ ID NO: 205067 - DNA, 75 bp, synthetic construct
  source 1..75: mol_type = other DNA
tcactactgggaaggtcgttggttgatggatatggccagtattgatgatctgcaggaagagaagaagaaaaaagg

SEQ ID NO: 205068 - DNA, 75 bp, synthetic construct
  source 1..75: mol_type = other DNA
taagttgttgcctaaaagagggcgtgaagagagcaatttaatgcccgcaatgggttatctccatattgatggtaa

SEQ ID NO: 205069 - DNA, 75 bp, synthetic construct
  source 1..75: mol_type = other DNA
cacctgcttgtttgcaagaaggatgtgccgctcttcaatcgcttcgcctcgcgagaggttcatgctgcagagtct

SEQ ID NO: 205070 - DNA, 75 bp, synthetic construct
  source 1..75: mol_type = other DNA
gaagaacgaacagtgggtgttgccacaaaccaatatggggtactacagcgagctgggtaatggtgccaacttact

SEQ ID NO: 205071 - DNA, 75 bp, synthetic construct
  source 1..75: mol_type = other DNA
agtatgacaaatacaagacaatccatacctcattctctatcaactttgatgacggcattgataagactgccgaaa

SEQ ID NO: 205072 - DNA, 75 bp, synthetic construct
  source 1..75: mol_type = other DNA
tgcggaaaaaattctgtctgccagtacgcaagaagagattaccgagaaatatacggcaatcgcagaccttggtaa

SEQ ID NO: 205073 - DNA, 75 bp, synthetic construct
  source 1..75: mol_type = other DNA
ctcctgcatggtcagttggcagcaaaatccgagcaattgaaaagactgaacgcaacatggcaaacgttaagccag

SEQ ID NO: 205074 - DNA, 75 bp, synthetic construct
  source 1..75: mol_type = other DNA
gttcctcaacggctggtttaaccgactggacaacctcgctgacgcctgtcgtgagatttccggtgtccgctattc

SEQ ID NO: 205075 - DNA, 75 bp, synthetic construct
  source 1..75: mol_type = other DNA
ttccttattcgtctttgatgctgccgttcagcacggtgttaaacgcgcgattcaaatcctccaggcggcagcagg

SEQ ID NO: 205076 - DNA, 75 bp, synthetic construct
  source 1..75: mol_type = other DNA
gtgcctcgcaggggaaatatctgaacggctggtttaaccgcctggatctgctcgccagcgtctgccgggaggttc

SEQ ID NO: 205077 - DNA, 75 bp, synthetic construct
  source 1..75: mol_type = other DNA
agccagcagcttgctgaccagtatcttgatttcgccagccacggtttccacgtcatcagtgccaacaaactggcg

SEQ ID NO: 205078 - DNA, 75 bp, synthetic construct
  source 1..75: mol_type = other DNA
cacgggcggctcagccctgcctgtcacccattgaaatctggcagcggctgctgactcatctgttgtcgcagcact

SEQ ID NO: 205079 - DNA, 75 bp, synthetic construct
  source 1..75: mol_type = other DNA
ctgtttgattgagtttcaggtgcccgccagtcaggatttcaaactggcgcataaagagatcgaccagatcctgaa

SEQ ID NO: 205080 - DNA, 75 bp, synthetic construct
  source 1..75: mol_type = other DNA
agggtgttccggttacagtagctaattctatgccgcaggctagtagcaaagcgcagacttttactcttgtggcaa

SEQ ID NO: 205081 - DNA, 75 bp, synthetic construct
  source 1..75: mol_type = other DNA
cgggtttattgatagcgataacagcatgctgaacgttgctgtttcccgtgcgaaggacagtttcctggtcttcgg

SEQ ID NO: 205082 - DNA, 75 bp, synthetic construct
  source 1..75: mol_type = other DNA
atggtttattgcggtgataacctgaagggtgaggttgaggctatttataatagtcttgagaggcgtcaggtttag

SEQ ID NO: 205083 - DNA, 75 bp, synthetic construct
  source 1..75: mol_type = other DNA
cttaaagaatcatggtggtataccgacacaaaagaacccggttactggttagtggggaacatttattcaacactg

SEQ ID NO: 205084 - DNA, 75 bp, synthetic construct
  source 1..75: mol_type = other DNA
tatcttgatttcgccagccacggtttccacgttatcagcgccaacaaactggcgggagccagcgacagcaataaa

SEQ ID NO: 205085 - DNA, 75 bp, synthetic construct
  source 1..75: mol_type = other DNA
cgtaacggttccgactattccgcgacacaaatcggtgcgctggcgggtgtttctcgcgtaaccatctggagcgac

SEQ ID NO: 205086 - DNA, 75 bp, synthetic construct
  source 1..75: mol_type = other DNA
tatttttgtcgggccgttgatcgtgccggaatacccggcgatgttgcagtcgatggggcgttatctggcgttagg

SEQ ID NO: 205087 - DNA, 75 bp, synthetic construct
  source 1..75: mol_type = other DNA
acgaacagtatgggcgataaccgcccatggtcgtaagtatgacaggaaccatgtcatacttacgaccatattaat

SEQ ID NO: 205088 - DNA, 75 bp, synthetic construct
  source 1..75: mol_type = other DNA
attttctgaaaataatgttttcacttataaaaaggaatttaataggaatttatcaaaaaaattgttggattttat

SEQ ID NO: 205089 - DNA, 75 bp, synthetic construct
  source 1..75: mol_type = other DNA
ttagcctgatgattgcgatagctgtgctttgctcatgggtcggcgcactttgctggaacgtcgccagccagcgat

SEQ ID NO: 205090 - DNA, 75 bp, synthetic construct
  source 1..75: mol_type = other DNA
agcaaatgccgccgctgatgacgctgagcggtatcgcgctgttagtggttggcgtggtcattgcggtcagagcaa

SEQ ID NO: 205091 - DNA, 75 bp, synthetic construct
  source 1..75: mol_type = other DNA
ggcatggtatgccctgcgcaacgcccgctggctgcgggagaatcccgacaaacatccgatgatgtgggcgacggc

SEQ ID NO: 205092 - DNA, 75 bp, synthetic construct
  source 1..75: mol_type = other DNA
ccgtggcaaattactcgtcaacaattgaccgtaagcgatggtcgctggagctggccgtatgcaggttttccttta

SEQ ID NO: 205093 - DNA, 75 bp, synthetic construct
  source 1..75: mol_type = other DNA
gaacatattgatgccgggatcaccctggccgatgccgttaattttctggtagaaaaatacgaacttgtccgtatc

SEQ ID NO: 205094 - DNA, 75 bp, synthetic construct
  source 1..75: mol_type = other DNA
ggcaggcccggtgaggaagttaaacagcggctacgtactggcactgtggtaaccacagatgacaggaactgggaa

SEQ ID NO: 205095 - DNA, 75 bp, synthetic construct
  source 1..75: mol_type = other DNA
gtgaggaaattttaatcaactgggacgtgcgggccgatgcctttaatccgggattgcctgaacacctgtttactc

SEQ ID NO: 205096 - DNA, 75 bp, synthetic construct
  source 1..75: mol_type = other DNA
cgctggcaggtagacgagcgcgacgtgtttatttccgtcacgccgctgcatcacgacatgtccgtttttgatctg

SEQ ID NO: 205097 - DNA, 75 bp, synthetic construct
  source 1..75: mol_type = other DNA
gttagcgccgttaatccgaaacaattcgccatgtccggggcatttagtggtgcactgccgttatggttaaacaat

SEQ ID NO: 205098 - DNA, 75 bp, synthetic construct
  source 1..75: mol_type = other DNA
gatatttccgggttattttcaattcttctgaacaaaccgactcttcctgaagaaataaacataaagttcaaggga

SEQ ID NO: 205099 - DNA, 75 bp, synthetic construct
  source 1..75: mol_type = other DNA
ggttttatgttaaacatggtcttaaatgccaccatatatataatggaatcgactttcctgacatcgaattatatc

SEQ ID NO: 205100 - DNA, 75 bp, synthetic construct
  source 1..75: mol_type = other DNA
caaacatattcaaaaagctaaaacaaaaaggtattctcgttgaacatcatggacacctgtatatcaactctaata

SEQ ID NO: 205101 - DNA, 75 bp, synthetic construct
  source 1..75: mol_type = other DNA
ttgaatatcgcatccggtaatatgtcaaacatattcaaaaagctaaaacaaaaaggtattctggttgaacatcat

SEQ ID NO: 205102 - DNA, 75 bp, synthetic construct
  source 1..75: mol_type = other DNA
caacgagcatgatgtgcggatttcaaccgtagagcacctcaatgctgctctcgcgggcttgggcatcgataacat

SEQ ID NO: 205103 - DNA, 75 bp, synthetic construct
  source 1..75: mol_type = other DNA
ctggcgaaacaggaagcctgggaatacgtgaccttccaggacgacgcagaactgccgttggctttcaaagcgcct

SEQ ID NO: 205104 - DNA, 75 bp, synthetic construct
  source 1..75: mol_type = other DNA
aaataacaaattgttgcaagctgtcctggcgaaacaggaagcctgggaatacgtgaccttccaggacgacgcaga

SEQ ID NO: 205105 - DNA, 75 bp, synthetic construct
  source 1..75: mol_type = other DNA
atgcagaaaagccctcttcatgaagaagtatgtgttcctgaagaaacaacagctggtttatggggccctctccct

SEQ ID NO: 205106 - DNA, 75 bp, synthetic construct
  source 1..75: mol_type = other DNA
tggcttgatcgtcaatgtcgatgatggcgagttgaagaacggttatgtctggtacagtcccaccggcaagcggtc

SEQ ID NO: 205107 - DNA, 75 bp, synthetic construct
  source 1..75: mol_type = other DNA
gtatccgcaaaggtatctacaaactcgaaactctcgaaggtagcaaaggtaaagttcagttgctgggttccggtt

SEQ ID NO: 205108 - DNA, 75 bp, synthetic construct
  source 1..75: mol_type = other DNA
tttggcgcaacgtcaggagtagattgccttgcaggaatgctgcatggctttcgaaccctgaacaccatgaattga

SEQ ID NO: 205109 - DNA, 75 bp, synthetic construct
  source 1..75: mol_type = other DNA
cggctccggtactggtgcgccgccggttaacgaaggttgaccgcgttcagtttgccaaggactcaaatatttctg

SEQ ID NO: 205110 - DNA, 75 bp, synthetic construct
  source 1..75: mol_type = other DNA
acggcaccgttattttagaaaacgaagctcgcgttgtagatatcgccgttaaaggcgggaaaattgctgctatcg

SEQ ID NO: 205111 - DNA, 75 bp, synthetic construct
  source 1..75: mol_type = other DNA
agtcaatatgctggaaaaaatcattcataaaaacagagacagcttatcggccagtgaacgtgaatcatttaattc

SEQ ID NO: 205112 - DNA, 75 bp, synthetic construct
  source 1..75: mol_type = other DNA
atggcgaaaacaaaacaggaatggctgtatccgttacggcgatgttcatcagtcaatacgctggaaaaaatcatt

SEQ ID NO: 205113 - DNA, 75 bp, synthetic construct
  source 1..75: mol_type = other DNA
ccagtgaacgtgaatcatttaattcagcagcagaccaccggttagcagaattaatcaccggaaagttatatgaca

SEQ ID NO: 205114 - DNA, 75 bp, synthetic construct
  source 1..75: mol_type = other DNA
agaaacaattggcagaatataaaaaagaaatagcaaaatcttcttttcgtaacgaacagattgaagcaaagccaa

SEQ ID NO: 205115 - DNA, 75 bp, synthetic construct
  source 1..75: mol_type = other DNA
cgattgaagccggacgatggacagaacgccttaagcaatgggcggaaacggtaaaacattacgaaaatcagataa

SEQ ID NO: 205116 - DNA, 75 bp, synthetic construct
  source 1..75: mol_type = other DNA
tgttttatggacgctacccttccctttctgattttgtacgcttgtttatctgtcctacttttttatgggatgcaa

SEQ ID NO: 205117 - DNA, 75 bp, synthetic construct
  source 1..75: mol_type = other DNA
gtctgccattgcgcgtcacggttatgaacccaaagtcagccgtgacccggacgtcgtgttgctggccgataaact

SEQ ID NO: 205118 - DNA, 75 bp, synthetic construct
  source 1..75: mol_type = other DNA
caagcggcgatggaccaggtgcgtgagcgcgaactgtttgatctcatcaaagcctgtactcaaccggtgctgggc

SEQ ID NO: 205119 - DNA, 75 bp, synthetic construct
  source 1..75: mol_type = other DNA
agcctgcacccaaccggtactgggcatttgcctcgggatgcaaatcctcggcagtcgcagcgcagaaagcaacgg

SEQ ID NO: 205120 - DNA, 75 bp, synthetic construct
  source 1..75: mol_type = other DNA
ctgagcttgagtcgtttaatgccgccgccgatcacaggcttgcggaactcacaatgaataaactctacgataaag

SEQ ID NO: 205121 - DNA, 75 bp, synthetic construct
  source 1..75: mol_type = other DNA
tgatccgcggaccaggcgcagggcgcgatgtcaccgccggggcgattcagtcggatatcaaccggctggcgcagt

SEQ ID NO: 205122 - DNA, 75 bp, synthetic construct
  source 1..75: mol_type = other DNA
ggctggacgccagccgcgcgttagccttcttcaacgatgaagcggtcgagcaggatgaagagtcgttgttcctgt

SEQ ID NO: 205123 - DNA, 75 bp, synthetic construct
  source 1..75: mol_type = other DNA
agaaatagcaaaatcttcttttcgtaacgaacagattgaagcaaagccaattgattacaaagcagcttttgaaaa

SEQ ID NO: 205124 - DNA, 75 bp, synthetic construct
  source 1..75: mol_type = other DNA
ccaccaccatcacacgccctgctctctttcgttcgtatctcaatgaacaacttactttgttgtatcaggattatg

SEQ ID NO: 205125 - DNA, 75 bp, synthetic construct
  source 1..75: mol_type = other DNA
cgatagatttgctgcgcgcggaaggcgatcgactgcattcgcgtaaactgcgaacctttaatgagccgccgttcc

SEQ ID NO: 205126 - DNA, 75 bp, synthetic construct
  source 1..75: mol_type = other DNA
ttgccgccctgccgcactgggtggtggagagttttgagcgccagggtctggtcgtaaccaaaaccctgggcgaag

SEQ ID NO: 205127 - DNA, 75 bp, synthetic construct
  source 1..75: mol_type = other DNA
ccgtttttatgaaggtgcgatttccgaacacttgcagattggcatccgggcaattgatttactgcgcgcggaagg

SEQ ID NO: 205128 - DNA, 75 bp, synthetic construct
  source 1..75: mol_type = other DNA
cgtgccatacgggacactactgtgtgtttcagataaaccgttgcatggtgagattaaacttcccggccaggctaa

SEQ ID NO: 205129 - DNA, 75 bp, synthetic construct
  source 1..75: mol_type = other DNA
caattgatttactgcgcgctgaaggcgatcgactgcattcccgtaaactacgaacctttaatgagccaccgttcc

SEQ ID NO: 205130 - DNA, 75 bp, synthetic construct
  source 1..75: mol_type = other DNA
caatgagctaatggacaaatatttcacgactcttcttaaagagatcagtaatcaaccattagaagactgggattt

SEQ ID NO: 205131 - DNA, 75 bp, synthetic construct
  source 1..75: mol_type = other DNA
taaggcaataagtatttataatactgtatatggtgataatgttgttataccctatcagcaagtcaccatgttact

SEQ ID NO: 205132 - DNA, 75 bp, synthetic construct
  source 1..75: mol_type = other DNA
tttcacagacactttttacctttgccatatccttccacattgtttctccggaaatcactaacggtttggcatttg

SEQ ID NO: 205133 - DNA, 75 bp, synthetic construct
  source 1..75: mol_type = other DNA
caccgcagggagaaatcctgttgcaactggcaaaccaggtgctgccgcaaattagccaggcactgcaagcctgca

SEQ ID NO: 205134 - DNA, 75 bp, synthetic construct
  source 1..75: mol_type = other DNA
ccggtctggcaactgatgggcggcctggttcgcgacaaaattaaagcctacagttgggtcggcggcgatcgtccg

SEQ ID NO: 205135 - DNA, 75 bp, synthetic construct
  source 1..75: mol_type = other DNA
aattagcggttatatcctgaattattacaatagcgtcaggcctcaccattacaacggtgggttgacgccggaaga

SEQ ID NO: 205136 - DNA, 75 bp, synthetic construct
  source 1..75: mol_type = other DNA
cgccataacgtgatggatttgctgggctgggcggcggtgtttgtacttatcagcctgctggttaatatccgtacg

SEQ ID NO: 205137 - DNA, 75 bp, synthetic construct
  source 1..75: mol_type = other DNA
ttcccaaacccagtcgtgaccttagctcgtgctcgtcagctaaatggcgattatgtccggatagctggaacattt

SEQ ID NO: 205138 - DNA, 75 bp, synthetic construct
  source 1..75: mol_type = other DNA
ggggtctctgctgctgatcccactggcctgtaatatgttcggtatttcgaacgatatcgccatgcaggtggttgc

SEQ ID NO: 205139 - DNA, 75 bp, synthetic construct
  source 1..75: mol_type = other DNA
tatggtgcggagatattacgtatatctgggcagaaaatcgctggtgctatctggcggtcgtcatggatctttttg

SEQ ID NO: 205140 - DNA, 75 bp, synthetic construct
  source 1..75: mol_type = other DNA
cgtcgggctatggcgtggtcttttgtgcaggaacaggtacagcctggtgttgataatgcctggcgtgaatcccgt

SEQ ID NO: 205141 - DNA, 75 bp, synthetic construct
  source 1..75: mol_type = other DNA
tatctcagaataataaatataatgaagagcgagaaagtcaaaagataatacctgagccatcagaagaggctgtga

SEQ ID NO: 205142 - DNA, 75 bp, synthetic construct
  source 1..75: mol_type = other DNA
agccggatatatctccgtcatgataccgccgttgtcatgggtgatgataaaaggccttggggccggattctccag

SEQ ID NO: 205143 - DNA, 75 bp, synthetic construct
  source 1..75: mol_type = other DNA
gatgctcatgctgaatggggggttaaacctaaaattcttggggttggtggtggagttggtgtcagaggcggattt

SEQ ID NO: 205144 - DNA, 75 bp, synthetic construct
  source 1..75: mol_type = other DNA
attactcctacggcaacatgcagacgaataacgtgaacggcttcagctggagcaccaacagtaccacgtcatttg

SEQ ID NO: 205145 - DNA, 75 bp, synthetic construct
  source 1..75: mol_type = other DNA
gcatcgaacagagcagaaagtgccctgcatgggttcagcagcagtattgccagtgcctggaacacgctcagtcag

SEQ ID NO: 205146 - DNA, 75 bp, synthetic construct
  source 1..75: mol_type = other DNA
gtaatatggttatggatgcaagcggagcgatgtcccgtttaccggttggtattaacgcaacgcgccagattgcag

SEQ ID NO: 205147 - DNA, 75 bp, synthetic construct
  source 1..75: mol_type = other DNA
cgcaacagtttgcacagtatgtgatgaaacgcgcaccgcaggatgcagaagctattctgacaaataccagttcgc

SEQ ID NO: 205148 - DNA, 75 bp, synthetic construct
  source 1..75: mol_type = other DNA
cgagagaactggcctcgagaagtacaaatgcgtcgcttggcctttacggtgatgcttatgctaaagggcatttag

SEQ ID NO: 205149 - DNA, 75 bp, synthetic construct
  source 1..75: mol_type = other DNA
acagcatccacggcgaggaaaatattgtaagagggcagtattctgaactgcaaaatcaccataaaacagaggcat

SEQ ID NO: 205150 - DNA, 75 bp, synthetic construct
  source 1..75: mol_type = other DNA
acctcggaatgccggaatcagaatccggtgccttaccgcttggcgataccccaactgggcgcacttacgatgtaa

SEQ ID NO: 205151 - DNA, 75 bp, synthetic construct
  source 1..75: mol_type = other DNA
gaatgccattgccgcctttatggggacccggacgtgggattccatcgaaaaaattgcgctcacattgtctgttct

SEQ ID NO: 205152 - DNA, 75 bp, synthetic construct
  source 1..75: mol_type = other DNA
atgaagaaaaatctgctcaggaaagaatgcctggggctgacagccctcaggaactgatgaaaagggcaagggagt

SEQ ID NO: 205153 - DNA, 75 bp, synthetic construct
  source 1..75: mol_type = other DNA
gacagggattgccataggggtatttccgctgattgtcctgctggccatgtttaataaactgacgctggtgatact

SEQ ID NO: 205154 - DNA, 75 bp, synthetic construct
  source 1..75: mol_type = other DNA
attgaacagagaacgaaagatagcaatatcagtaataatgtcagagaacaggttaataatatgatgacggagtat

SEQ ID NO: 205155 - DNA, 75 bp, synthetic construct
  source 1..75: mol_type = other DNA
gcaactgccacacagacccgtgacggtaatatggtgatggatgcgagcggggcgatgtcccggttaccggttggt

SEQ ID NO: 205156 - DNA, 75 bp, synthetic construct
  source 1..75: mol_type = other DNA
agaacgagaaagtcagaagataatacctgagccatcagaagagactgtaaaaaaaatgattgatgagaaaaagga

SEQ ID NO: 205157 - DNA, 75 bp, synthetic construct
  source 1..75: mol_type = other DNA
ggttgataatatggtcacagaatatcggggcaatatcggagatactcagaacagtattcgcggcgatgaaaattt

SEQ ID NO: 205158 - DNA, 75 bp, synthetic construct
  source 1..75: mol_type = other DNA
cccgtgacggtaatatggtgatggattccagtggggcgatgtcccgtctgccggttggtatcaacgcgacacggc

SEQ ID NO: 205159 - DNA, 75 bp, synthetic construct
  source 1..75: mol_type = other DNA
atacaaaaatgcctgtcaggagcatacgtgtttgccgaatctgctcgagcgtcagttcgctgtaccggagccaga

SEQ ID NO: 205160 - DNA, 75 bp, synthetic construct
  source 1..75: mol_type = other DNA
accttgccgggaattattgatacggaaaatggcattgtacatcgcatgccgttctacgaggatgtaaaagagatg

SEQ ID NO: 205161 - DNA, 75 bp, synthetic construct
  source 1..75: mol_type = other DNA
tggtgcaagagctggaaattaaagaagcgggaaaccgtgggcgtccggcggtggggctggtggtagaaacagaag

SEQ ID NO: 205162 - DNA, 75 bp, synthetic construct
  source 1..75: mol_type = other DNA
caaattctctggcgttacagaataaagcaaagtgtcagtcggcggggaaactgctgggataatagcccaatggaa

SEQ ID NO: 205163 - DNA, 75 bp, synthetic construct
  source 1..75: mol_type = other DNA
gtagtaaccagtattgcgctggatcataccgactggctggggccagatcgcgaaagtattggtcgcgagaaagca

SEQ ID NO: 205164 - DNA, 75 bp, synthetic construct
  source 1..75: mol_type = other DNA
tataacggtgggttgactccggaagagtccgagaacaggtaccacttttactgtaaaaccgtggccagtattact

SEQ ID NO: 205165 - DNA, 75 bp, synthetic construct
  source 1..75: mol_type = other DNA
gatgggcgcaggcgaccagcagcaggccagcaagggcgcggccatgatgggcgcaggcgaccagcagcaggccag

SEQ ID NO: 205166 - DNA, 75 bp, synthetic construct
  source 1..75: mol_type = other DNA
tatggtgatgctcatgccggattagatgcaaagcccagcctttttggtgtgcgtgttgatgttggcgctaaggtt

SEQ ID NO: 205167 - DNA, 75 bp, synthetic construct
  source 1..75: mol_type = other DNA
gacggcagcatggtgatggatgccagtggggcaatgtcccgtttgccggttggtattaatgcaacgcgtcagatt

SEQ ID NO: 205168 - DNA, 75 bp, synthetic construct
  source 1..75: mol_type = other DNA
acctacggcggaaattgaagctgctaagaacgatatggacccgaaatcgttcgctcaggagtacctggccagctt

SEQ ID NO: 205169 - DNA, 75 bp, synthetic construct
  source 1..75: mol_type = other DNA
atccgtcacttttatttcctgagaaaataaagtcaaatggtttgttatcaattgatatgatcattgttatgggga

SEQ ID NO: 205170 - DNA, 75 bp, synthetic construct
  source 1..75: mol_type = other DNA
ttgaagctaagccacaaccaattgataacgtcttgcctaatttggctattggtactatcggagcgattgtttctc

SEQ ID NO: 205171 - DNA, 75 bp, synthetic construct
  source 1..75: mol_type = other DNA
ctgggcaggaaatcgctggtgctatctggcggtcgtcatggatctttttgcccgcagggttatcggctggagcct

SEQ ID NO: 205172 - DNA, 75 bp, synthetic construct
  source 1..75: mol_type = other DNA
cgcatgccggattagatgcaaaacccagtctttttggtgttcgtgttgatgtcggagctaaagtgggtgggcgag

SEQ ID NO: 205173 - DNA, 75 bp, synthetic construct
  source 1..75: mol_type = other DNA
ggcatgcgatggtggccggctatgagatggttttcgctcagccggacagcgccacctacagcaagacaggcatgc

SEQ ID NO: 205174 - DNA, 75 bp, synthetic construct
  source 1..75: mol_type = other DNA
tgaaatactctgacctggctgccactgccgggtatatctcagccatgatacctccgttgtcatgggtgatgataa

SEQ ID NO: 205175 - DNA, 75 bp, synthetic construct
  source 1..75: mol_type = other DNA
tgaagtactccgacctggcgtccacagccggatatatctccgtcatgataccgccgttgtcatgggtgatgataa

SEQ ID NO: 205176 - DNA, 75 bp, synthetic construct
  source 1..75: mol_type = other DNA
tgccctgcatggtttcagcagcagtattgccagtgcctggaacacactcagccagtttggctctaaccggggaag

SEQ ID NO: 205177 - DNA, 75 bp, synthetic construct
  source 1..75: mol_type = other DNA
ggcagatgagtgaagacctgtcgcaacagtttgcacagtatgtgatgaaacgcgcaccgcaggatgccgaagcta

SEQ ID NO: 205178 - DNA, 75 bp, synthetic construct
  source 1..75: mol_type = other DNA
tctggtcggtcgggcaacggctatctggatgagtttcgataagcaagaaggcgaatggccgacaggtgtgcgctt

SEQ ID NO: 205179 - DNA, 75 bp, synthetic construct
  source 1..75: mol_type = other DNA
atggcgtatgaggtgcgtggtcagccgcgggacgtcatgttccatagcgaccagggaagtcaatatacaggactg

SEQ ID NO: 205180 - DNA, 75 bp, synthetic construct
  source 1..75: mol_type = other DNA
gagccagatagggtatggtgcggagatattacgtatatctgggcaggaaatcgctggtgctatctggcggtcgtc

SEQ ID NO: 205181 - DNA, 75 bp, synthetic construct
  source 1..75: mol_type = other DNA
ataagcagcgctctgcggatggcctgtgagacgcgtggtcaaccgcgtgatgtcatgttccatagcgaccaggga

SEQ ID NO: 205182 - DNA, 75 bp, synthetic construct
  source 1..75: mol_type = other DNA
taggcaaggacgaggcccggcaacaaattagcggttatatcctgaattattacaatagcgtcaggcctcaccatt

SEQ ID NO: 205183 - DNA, 75 bp, synthetic construct
  source 1..75: mol_type = other DNA
gattgcgcaggaccaggtggggatgtattaccagcagccagggcaacaactggcaacctggattgttccgccggg

SEQ ID NO: 205184 - DNA, 75 bp, synthetic construct
  source 1..75: mol_type = other DNA
cagactcatcgcaaatgaaactaatgccttaaaacttgctgaattgcaggacaagagattgcagaatcagcaagc

SEQ ID NO: 205185 - DNA, 75 bp, synthetic construct
  source 1..75: mol_type = other DNA
tatgcaacagaaatacgggaaggacatacaaccgtctcaacagcagctttctgatgatgacctgattaataaata

SEQ ID NO: 205186 - DNA, 75 bp, synthetic construct
  source 1..75: mol_type = other DNA
gaaaaggctctggacagacagatagccagagaaagcaatcagttaaagcttgaagagctaaaacagaaacaggca

SEQ ID NO: 205187 - DNA, 75 bp, synthetic construct
  source 1..75: mol_type = other DNA
tcagcaagctatggagcaggcaaagcgagataaggctgatgcgtacaactctggaatggataatctttccagaac

SEQ ID NO: 205188 - DNA, 75 bp, synthetic construct
  source 1..75: mol_type = other DNA
agcgcacagttcagttatcagatggcagaactgtaactgtcggcgggaagcttcatggcgctggggctaatgcgt

SEQ ID NO: 205189 - DNA, 75 bp, synthetic construct
  source 1..75: mol_type = other DNA
aggcggcatgaactccaacgctccaagagcaagtgatgcagacgccacgcttgcatacattcgacagaataacga

SEQ ID NO: 205190 - DNA, 75 bp, synthetic construct
  source 1..75: mol_type = other DNA
aacagcgtcacgactggtttgttgagcgtctaaattccattaatcaccactacagtttgttcagtgaagttcgcg

SEQ ID NO: 205191 - DNA, 75 bp, synthetic construct
  source 1..75: mol_type = other DNA
taaattcgctcacgaccgctacggcagccataagagcggtattgtggcgtttaaaaatgcctttcacgggcgcac

SEQ ID NO: 205192 - DNA, 75 bp, synthetic construct
  source 1..75: mol_type = other DNA
gcaatccgctggcctcggcggtggcaggtaaagtgctggatctcatcaacacgccagagatgcttaacggggtta

SEQ ID NO: 205193 - DNA, 75 bp, synthetic construct
  source 1..75: mol_type = other DNA
gcatgggattcattgatgaagaccagcgtaattctatcggcaccttagcggctggcgcacgccttgcgtcatcgt

SEQ ID NO: 205194 - DNA, 75 bp, synthetic construct
  source 1..75: mol_type = other DNA
ccatgcttttattagcgagaagccgaagatgcgctatccggtgacgctggtgacctgggcggtaatggtgcttaa

SEQ ID NO: 205195 - DNA, 75 bp, synthetic construct
  source 1..75: mol_type = other DNA
gatgttccagtggaattggcctggaaagcgcgctcgaattaaaacgccagggttttcatgtgctggcaggttgcc

SEQ ID NO: 205196 - DNA, 75 bp, synthetic construct
  source 1..75: mol_type = other DNA
atgagcagtaaggcttgtcatcgccgcatttgcccggtaacgtgcccggcattgctactgcaaaatcgcaccatc

SEQ ID NO: 205197 - DNA, 75 bp, synthetic construct
  source 1..75: mol_type = other DNA
atggttttattaaataacaaaagaaaaagcaagaaaggtttctcactactcgaactactacttgttttgggcatc

SEQ ID NO: 205198 - DNA, 75 bp, synthetic construct
  source 1..75: mol_type = other DNA
ctgatcaccgatgaaggatcggtcaatgagaaacaggaaacatttattgtaccgatgcgtaatgctggcgagctg

SEQ ID NO: 205199 - DNA, 75 bp, synthetic construct
  source 1..75: mol_type = other DNA
ctgcgacagctacaggtccgtcatcagcagcgggctcttctttcactatcacatacgataatgtgccagcagcgg

SEQ ID NO: 205200 - DNA, 75 bp, synthetic construct
  source 1..75: mol_type = other DNA
actgtggctgttcaggcaaaaatcttccctgacaatatgttaagtggttcaggaacggcagctaaacccatcaat

SEQ ID NO: 205201 - DNA, 75 bp, synthetic construct
  source 1..75: mol_type = other DNA
gctttcaaaggtaatgtgacgctggctgcggcagcaactggcccgtcatcagcggctggttcttctttcactatc

SEQ ID NO: 205202 - DNA, 75 bp, synthetic construct
  source 1..75: mol_type = other DNA
cggatggaacactcgatgtggcagctacggcagcggcctgtaataacgccacaagtaatacattagttttcacgt

SEQ ID NO: 205203 - DNA, 75 bp, synthetic construct
  source 1..75: mol_type = other DNA
tcaggacaagatggctggtcgtgagattgaccgaggcaggctggcagagacaatccgcagcaatcaggctggcga

SEQ ID NO: 205204 - DNA, 75 bp, synthetic construct
  source 1..75: mol_type = other DNA
gctggcgcacgccttgcgtcatcgtctccagaagcaatgcaatcatggctgcaaaacaacgccaaggaactgact

SEQ ID NO: 205205 - DNA, 75 bp, synthetic construct
  source 1..75: mol_type = other DNA
agcgatacgacattgcgtgatttgcgcattcgccaaaatgcccttgttaacagtcaggttcttaaattcctacct

SEQ ID NO: 205206 - DNA, 75 bp, synthetic construct
  source 1..75: mol_type = other DNA
taagccggatgaaaagaccgtttattagtgagcttgcagagctgggtttatcgggtgaaattctttcaattcgaa

SEQ ID NO: 205207 - DNA, 75 bp, synthetic construct
  source 1..75: mol_type = other DNA
tatcagtcagcaatgactgggcacaatatcgcagcacaacgcttggctctggatcagcaagagttcgggtttaag

SEQ ID NO: 205208 - DNA, 75 bp, synthetic construct
  source 1..75: mol_type = other DNA
gcaaaacaacgccggtgagttagctcgtgttggcgttaatcctcaggacgtcgctcagatgtaccaacagaaccc

SEQ ID NO: 205209 - DNA, 75 bp, synthetic construct
  source 1..75: mol_type = other DNA
gcgttatatggaaatcagtcgctcatcaacaaggattaatttagataatctcggtgtgttaaccatgcaggccaa

SEQ ID NO: 205210 - DNA, 75 bp, synthetic construct
  source 1..75: mol_type = other DNA
tcgacaaaaattaatttagataatctcggtgtattaaccatgcaggcaacgatcagcggtaatagtcgggttgat

SEQ ID NO: 205211 - DNA, 75 bp, synthetic construct
  source 1..75: mol_type = other DNA
gttagcgccgtcaatccgaaacaattcgccatgtccggggcatttagtggtgcattgccgttatggctaaacaac

SEQ ID NO: 205212 - DNA, 75 bp, synthetic construct
  source 1..75: mol_type = other DNA
catgctggtgagattggcccggttcgggtaaatggtcgctgggacggtattcgtctgcgcggtaacgcctggtgg

SEQ ID NO: 205213 - DNA, 75 bp, synthetic construct
  source 1..75: mol_type = other DNA
cgcggacctgttactttgcgtattgccgaagtcattaatttggtgacagcgaaaaatatcactgctgatttgcaa

SEQ ID NO: 205214 - DNA, 75 bp, synthetic construct
  source 1..75: mol_type = other DNA
gacgcacagcatccctccttcagcggcgcgctgtcactggacgccgggcaaacgctgttcactggcggcagtgtg

SEQ ID NO: 205215 - DNA, 75 bp, synthetic construct
  source 1..75: mol_type = other DNA
ttgccgatgtggcgcaggaaaaaggtgcattgctgcaacgtcgcggtgttgagtggaattattctgtcacagacc

SEQ ID NO: 205216 - DNA, 75 bp, synthetic construct
  source 1..75: mol_type = other DNA
tcaataaagcacttgagcgctttcattttcgcttaagcgcatcaggcactcatgctgagctcgcagcccgagaat

SEQ ID NO: 205217 - DNA, 75 bp, synthetic construct
  source 1..75: mol_type = other DNA
gcggttctgttaaccaggtagatatcagcaattcagtaattggatttgcccctatatttccagacacctgttatc

SEQ ID NO: 205218 - DNA, 75 bp, synthetic construct
  source 1..75: mol_type = other DNA
ctgatgaaacaattacgtatgccgcaacatgacccggcgctgttgcggctgaataatctctcatccagcgaactg

SEQ ID NO: 205219 - DNA, 75 bp, synthetic construct
  source 1..75: mol_type = other DNA
ggcgataatctccaggcatggttggagcagaacgcgcgtctgccggaaaatggctgtccgcaaggaaaaaggtgt

SEQ ID NO: 205220 - DNA, 75 bp, synthetic construct
  source 1..75: mol_type = other DNA
ccggatggacttcctgtaagtgggcatgctactgcgacgttaaacttgccgcaggaaccgtcactggtggatgca

SEQ ID NO: 205221 - DNA, 75 bp, synthetic construct
  source 1..75: mol_type = other DNA
tcgctatgtcaggggcattcagtggggcattgccgctatggcttaataatgaaaaatggattgtgaaagatggct

SEQ ID NO: 205222 - DNA, 75 bp, synthetic construct
  source 1..75: mol_type = other DNA
atgttgattcttctgaaaataataatgataaacaactaaatatggtttttaaatattatggattaatggggaaga

SEQ ID NO: 205223 - DNA, 75 bp, synthetic construct
  source 1..75: mol_type = other DNA
gattctagtggagttaaatcatcgttcgactttttaccaactggcatcggtgggattctatatccgcctgaatca

SEQ ID NO: 205224 - DNA, 75 bp, synthetic construct
  source 1..75: mol_type = other DNA
ggaaccgtggcggctcggttttttctggagaacggggagcaaaaacacgcaaaggattttgaggcggcaaaagag

SEQ ID NO: 205225 - DNA, 75 bp, synthetic construct
  source 1..75: mol_type = other DNA
gccaaagcactgggcggcggtttccccgttggcgctctgttggtaaccgaagaatgcgccagcgtgatgaccgtg

SEQ ID NO: 205226 - DNA, 75 bp, synthetic construct
  source 1..75: mol_type = other DNA
cagccagcctattcgcaggattttgcaccgctgccgccggatatccgtcatgcggcgtataacgatattaactct

SEQ ID NO: 205227 - DNA, 75 bp, synthetic construct
  source 1..75: mol_type = other DNA
ccagggcgaaggcggtgtggtgccagccagcaacgcgtttttacaaggtctgcgtgaattgtgtgaccgccacaa

SEQ ID NO: 205228 - DNA, 75 bp, synthetic construct
  source 1..75: mol_type = other DNA
gattaaaggcagtccggttttgattcaatggacgccagcagcgggcagtagcaaagctggggttatggagatgat

SEQ ID NO: 205229 - DNA, 75 bp, synthetic construct
  source 1..75: mol_type = other DNA
gatttggatgcgattaacgagctttccgaactcgtctgcgctgcagaatgcggtgaacgcattgaaccgtataaa

SEQ ID NO: 205230 - DNA, 75 bp, synthetic construct
  source 1..75: mol_type = other DNA
ctgatgaaacaattacgcatgccgcagcacgatccggcgctattgcgcctgaataatctctcatccagtgaactg

SEQ ID NO: 205231 - DNA, 75 bp, synthetic construct
  source 1..75: mol_type = other DNA
ggtcaggcgcgccgatacccctaaccaggggctttcatgtcaccaggaacagcgtcagccccctgcaaagcccat

SEQ ID NO: 205232 - DNA, 75 bp, synthetic construct
  source 1..75: mol_type = other DNA
tttttagcgaaagagaaatggacctctaccgcgactatcacgcgtccggatgcggcgcagattgcgacctaccac

SEQ ID NO: 205233 - DNA, 75 bp, synthetic construct
  source 1..75: mol_type = other DNA
cggttccagccttgcggatctgtctcaaatatcccggatcccggcaacggtaccgaatctgaaaggctatgctgg

SEQ ID NO: 205234 - DNA, 75 bp, synthetic construct
  source 1..75: mol_type = other DNA
attgccagtgcctggaactcgctcagtcagtttggttctaaccgggggagcagtgattctgtcaccggtggtgct

SEQ ID NO: 205235 - DNA, 75 bp, synthetic construct
  source 1..75: mol_type = other DNA
gaaaccagacctgtgcgcaatttctatgtaggcactaacgacccgcaggtgattttgtgcctgactcgccaggcg

SEQ ID NO: 205236 - DNA, 75 bp, synthetic construct
  source 1..75: mol_type = other DNA
atgagtcttttcaatgacgttcagaaattcattgaagcccatccggggtgtacttccggtgacattgcggatgct

SEQ ID NO: 205237 - DNA, 75 bp, synthetic construct
  source 1..75: mol_type = other DNA
atgagtctttttaatgacgttcagaaattcattgaagcccatccggggtgtacttccggcgacattgcggatgct

SEQ ID NO: 205238 - DNA, 75 bp, synthetic construct
  source 1..75: mol_type = other DNA
cagacaaagatatcgccggaggcggaacggcaaccagttcgtgaaaccagacctgtgcgcaatttctatgtcggc

SEQ ID NO: 205239 - DNA, 75 bp, synthetic construct
  source 1..75: mol_type = other DNA
gaagaactggagtccaggggcttataccgtcgtgctgcaaccgtgtggatggcggcattccgtgaaagccactcc

SEQ ID NO: 205240 - DNA, 75 bp, synthetic construct
  source 1..75: mol_type = other DNA
catttcccgcgcctgactgagagagcgcaggagccggaaccacaaccagttcgtgaaaccagacctgtgcgcaat

SEQ ID NO: 205241 - DNA, 75 bp, synthetic construct
  source 1..75: mol_type = other DNA
gattgcttatctcaactcggaagaacgcaatcatcataatttttcagaacttttgcttttttcttgcctgtctat

SEQ ID NO: 205242 - DNA, 75 bp, synthetic construct
  source 1..75: mol_type = other DNA
ccgttgagcgaggtgttgcatcaggttgggctgggtaaattggctacgcgcattaataaccacgatcgttgggga

SEQ ID NO: 205243 - DNA, 75 bp, synthetic construct
  source 1..75: mol_type = other DNA
tgctgatcacctttaccgttattctttggcaaagcgcgggtacgctctcattcactgttggtggaacagaatgga

SEQ ID NO: 205244 - DNA, 75 bp, synthetic construct
  source 1..75: mol_type = other DNA
atgagtctattaaatgacgttcagaaattcattgaagcccatccggggtgtacttccggagacattgcggatgct

SEQ ID NO: 205245 - DNA, 75 bp, synthetic construct
  source 1..75: mol_type = other DNA
tcaccgttattctgtggcaaagcgcggggacactctcattcacggttggtggaacggagtggaatatccagggtt

SEQ ID NO: 205246 - DNA, 75 bp, synthetic construct
  source 1..75: mol_type = other DNA
gatattctttccagcggcgaaaaacaacgtatcgccctggcacgattaattttacgacgtccgaaatggatattt

SEQ ID NO: 205247 - DNA, 75 bp, synthetic construct
  source 1..75: mol_type = other DNA
cttcaaatccagttacgacaacgtggactacagccagatcccggcaggattcagggggtgatcatgagtctgttg

SEQ ID NO: 205248 - DNA, 75 bp, synthetic construct
  source 1..75: mol_type = other DNA
aagtctggaacgattcatgacagaacgttttcgtttccgtggagtcatgaccacaaccagtattgatgactttgt

SEQ ID NO: 205249 - DNA, 75 bp, synthetic construct
  source 1..75: mol_type = other DNA
gctcgctacgctcggtcatcgacttgcggcgagcgggatcacctctcgcatgttgtcggtgatcccggtgttgtt

SEQ ID NO: 205250 - DNA, 75 bp, synthetic construct
  source 1..75: mol_type = other DNA
gggtgcaacgggtgaaccggtactactggacgaatttgtttttgccagtgtgccggatttaaacccggatacacc

SEQ ID NO: 205251 - DNA, 75 bp, synthetic construct
  source 1..75: mol_type = other DNA
ataccgttctgtacatgataatatggctcacaactgtggtcatgattcacacatggccatcgcgctcacagcggc

SEQ ID NO: 205252 - DNA, 75 bp, synthetic construct
  source 1..75: mol_type = other DNA
atgaaattacaacccatggggcgaaaaggtcgtgcacctgctcatgtccgcccgtggacacctgaagaagatgcg

SEQ ID NO: 205253 - DNA, 75 bp, synthetic construct
  source 1..75: mol_type = other DNA
tcgaagtcggtcacatcttccagctgggtaccaagtactccgaagcactgaaagcctccgtacagggtgaagatg

SEQ ID NO: 205254 - DNA, 75 bp, synthetic construct
  source 1..75: mol_type = other DNA
tcctgctgcgtcttcgattcattataaagggcgcaagcttcctcattttgatgcagtgatcccgcgtattggtac

SEQ ID NO: 205255 - DNA, 75 bp, synthetic construct
  source 1..75: mol_type = other DNA
aattcattgaagcccatccggggtgtacttccggtgatattgcggatgcgtttgctggttacccacgtccccgcg

SEQ ID NO: 205256 - DNA, 75 bp, synthetic construct
  source 1..75: mol_type = other DNA
gacgatattccgtttgccatctggtcagggcttcaccccgacaccccgcatcagtgcgtacgtgctcaatgtggt

SEQ ID NO: 205257 - DNA, 75 bp, synthetic construct
  source 1..75: mol_type = other DNA
ccactctcaaggagacacctgccgacgccgaggtgatcagccatcagctgatgctacgcgccgggatgatccgca

SEQ ID NO: 205258 - DNA, 75 bp, synthetic construct
  source 1..75: mol_type = other DNA
agatccagaccaagttccgtgatgaagtgcgcccgcgtttcggcgtcatgcgttcccgcgaattcctgatgaaag

SEQ ID NO: 205259 - DNA, 75 bp, synthetic construct
  source 1..75: mol_type = other DNA
aagcgcaaaatctgcatacgctgctacatgatgtttcctttgacctggttttatgcagtgaactggaacgggcac

SEQ ID NO: 205260 - DNA, 75 bp, synthetic construct
  source 1..75: mol_type = other DNA
ctatcagaatattttagtcgtcagccatcagggtgtactgagtctgttaatcgcccgtttaattggcatgcctgc

SEQ ID NO: 205261 - DNA, 75 bp, synthetic construct
  source 1..75: mol_type = other DNA
ctgcgtggttataacaccgacggcacaggccatattcgcgccataaaagagagcggttttgatatcaaaggaaaa

SEQ ID NO: 205262 - DNA, 75 bp, synthetic construct
  source 1..75: mol_type = other DNA
tgggcttgcgaccaattaattgatggtaagtaccgggaacagtttgtgaccgactggcttcaggggggagccgga

SEQ ID NO: 205263 - DNA, 75 bp, synthetic construct
  source 1..75: mol_type = other DNA
aaagcagatttccgggtaaaaatgagttatttcagtcattcattaacctagtaaaaaacaaccttcagcatatca

SEQ ID NO: 205264 - DNA, 75 bp, synthetic construct
  source 1..75: mol_type = other DNA
gctcgctcgctgggttaatgaactttatcccggcagacgacgtatatttaccagtaagaccagtccggttgcgcc

SEQ ID NO: 205265 - DNA, 75 bp, synthetic construct
  source 1..75: mol_type = other DNA
ccgccacagtttatcgcctgaaatgcaaaataaagccttagaaaaagcaggattaccatttacctatatggcctt

SEQ ID NO: 205266 - DNA, 75 bp, synthetic construct
  source 1..75: mol_type = other DNA
atcctgttagctttcgttctgacattaaatcatcaaattaaacgaattctattacacaacaaggagtgggacgat

SEQ ID NO: 205267 - DNA, 75 bp, synthetic construct
  source 1..75: mol_type = other DNA
tatatcatctcctgtgctgtatgctgctctttatttccgctatgtgcgctttggcgcaagaacatgagcctatcg

SEQ ID NO: 205268 - DNA, 75 bp, synthetic construct
  source 1..75: mol_type = other DNA
atggatgttactgctaaatacgaattgattgggctgatggcctatcctatccgccacagtttatcacctgaaatg

SEQ ID NO: 205269 - DNA, 75 bp, synthetic construct
  source 1..75: mol_type = other DNA
gggggcgattgaaggtttaaaagaaattaaactcttcaaccgcaaagatgagttttttgataaagccctcgcctt

SEQ ID NO: 205270 - DNA, 75 bp, synthetic construct
  source 1..75: mol_type = other DNA
ctgcgtggctataacaccgatggtacaggccatattcgcgccattaaagagagcggttttgatatcacaggcaaa

SEQ ID NO: 205271 - DNA, 75 bp, synthetic construct
  source 1..75: mol_type = other DNA
gaactaaatgcattgatggcattacagctaattccgatcgaactgcagagatggtaatgcattcctgcggtattg

SEQ ID NO: 205272 - DNA, 75 bp, synthetic construct
  source 1..75: mol_type = other DNA
tataaacgtctgccgaagtggaattatcaggggacagaactggcgctctggcatcgtgatcagcagatcaacgac

SEQ ID NO: 205273 - DNA, 75 bp, synthetic construct
  source 1..75: mol_type = other DNA
atcaaaggggaaggggaagcagagatgctcggcttttacgaagccatgcaaaatcacaccatcaagctgacgccg

SEQ ID NO: 205274 - DNA, 75 bp, synthetic construct
  source 1..75: mol_type = other DNA
gcgcgttttgcccgccgctggaaaaacaactggcaatgcgctggcggatgggcgtgcgtaacagtgcgcataccc

SEQ ID NO: 205275 - DNA, 75 bp, synthetic construct
  source 1..75: mol_type = other DNA
ttctcagccgtaatggcgatccgcaaaccttgcagcagctaagtgcactgggattcaatgacggcacgtattgcg

SEQ ID NO: 205276 - DNA, 75 bp, synthetic construct
  source 1..75: mol_type = other DNA
atgagtggcgcttttaacaacgatggtcggggcatatctcccttaattgcaacctcctgggagagatgcaataag

SEQ ID NO: 205277 - DNA, 75 bp, synthetic construct
  source 1..75: mol_type = other DNA
tgagtcgtctggaactggcacacggcggcacgctgtttctcgaaaagattgagtatctggcggtggagttacagt

SEQ ID NO: 205278 - DNA, 75 bp, synthetic construct
  source 1..75: mol_type = other DNA
tcctgagccgttgcggcgagccgcaaaccctggcccagctggctgccctgggatttcgcgacggcagctattgtg

SEQ ID NO: 205279 - DNA, 75 bp, synthetic construct
  source 1..75: mol_type = other DNA
ccttggtgctactgcgattggtacctgtgttaccgctcacccggattatcccgctttagccgtgaaatatctggc

SEQ ID NO: 205280 - DNA, 75 bp, synthetic construct
  source 1..75: mol_type = other DNA
taagctactcacacaggaagaatgggagaagacattcaatctggataatctgattgctccgaagttcgaacaata

SEQ ID NO: 205281 - DNA, 75 bp, synthetic construct
  source 1..75: mol_type = other DNA
gaatcctacggtgtggagctaccagacatgcaacgcagtactctggaacgtcgtatagccgaccccgatttacca

SEQ ID NO: 205282 - DNA, 75 bp, synthetic construct
  source 1..75: mol_type = other DNA
tcaggaagttgagcgtgattacaactgcaaagtgatctctatcatcaccctgaaagatctgattgcttacctgga

SEQ ID NO: 205283 - DNA, 75 bp, synthetic construct
  source 1..75: mol_type = other DNA
cgctggcggagcatcatgacctggacctgccgtactgctttaaccgcaaagaagcaaaagaccacggtgaaggcg

SEQ ID NO: 205284 - DNA, 75 bp, synthetic construct
  source 1..75: mol_type = other DNA
tgttcggggcgaatctgattgtgaaaagcaccgatttcctgtcccggaatccggaaatcatcaatctgtttcagg

SEQ ID NO: 205285 - DNA, 75 bp, synthetic construct
  source 1..75: mol_type = other DNA
tgtttacggcttacggcgcacgagtaaaaatcgtttatctggaagtgccatgggcgcaatggaaccagcaaaatg

SEQ ID NO: 205286 - DNA, 75 bp, synthetic construct
  source 1..75: mol_type = other DNA
cgagcaaatcgttgcactggtgcgtctgcatgggttaccgctatggttactggaacgtccggaaccggagcgttt

SEQ ID NO: 205287 - DNA, 75 bp, synthetic construct
  source 1..75: mol_type = other DNA
cgcggcgacgcggtagatattgctgttgatccgattgaaggcacgcgcatgacggcgatgggccaggctaacgcg

SEQ ID NO: 205288 - DNA, 75 bp, synthetic construct
  source 1..75: mol_type = other DNA
ggaccagatagaagagggcatcgaggcgctgaaagccggatgcgccgatctgctgttcgataacatcatggagct

SEQ ID NO: 205289 - DNA, 75 bp, synthetic construct
  source 1..75: mol_type = other DNA
gtgaacgaggtctatgtcatcgccggtggggaatggttacggaacaacctgaatgccatcgctgcctttatgagt

SEQ ID NO: 205290 - DNA, 75 bp, synthetic construct
  source 1..75: mol_type = other DNA
cactttcactgacgacacgtatcgggcatgcaatggtggtcagctacgagatgatattcacccaaccggacagcg

SEQ ID NO: 205291 - DNA, 75 bp, synthetic construct
  source 1..75: mol_type = other DNA
tggtggttagcgacctgtcgaatattgaggggcgaaaactggcctggcttgccggcgagcagtggaagctggacg

SEQ ID NO: 205292 - DNA, 75 bp, synthetic construct
  source 1..75: mol_type = other DNA
gcagcataaataaacagtattctgatctgcaaaaacatcataattcagagcaatcttcgcaaatgaatacgtata

SEQ ID NO: 205293 - DNA, 75 bp, synthetic construct
  source 1..75: mol_type = other DNA
cagaacagcatacgtggcgaggaaaatattgtaagaggacagtattctgaactacagaatcaccataaaacagag

SEQ ID NO: 205294 - DNA, 75 bp, synthetic construct
  source 1..75: mol_type = other DNA
tactgccgggtatctttcagccatgatccccccgttgtcatggatgatggtaaaaggccttggcgcaggtttttc

SEQ ID NO: 205295 - DNA, 75 bp, synthetic construct
  source 1..75: mol_type = other DNA
atgaagaaaaatcgggtcaggaaagaatgcctggtgctgacagtccacaggaactgatgaaaagagcaaaggagt

SEQ ID NO: 205296 - DNA, 75 bp, synthetic construct
  source 1..75: mol_type = other DNA
cgccgggaccgtttgagattagcgatcttaacccgacatcatctgcgggagatctggaagttaccatcaaagagt

SEQ ID NO: 205297 - DNA, 75 bp, synthetic construct
  source 1..75: mol_type = other DNA
gatggttttcgctcagccggacagcgccacctacagcaagacagggatgctgttcggggcgaatctgatagtgaa

SEQ ID NO: 205298 - DNA, 75 bp, synthetic construct
  source 1..75: mol_type = other DNA
ttagtattcgtggcataaaactggaatctgacgaaaatatgttgcccgatagtcaaagtggtttcgctcccacgg

SEQ ID NO: 205299 - DNA, 75 bp, synthetic construct
  source 1..75: mol_type = other DNA
ttttctttttgtcaggatgcactgttggtgattatgttcgcccattgttacccggtaatgtatatttacaagacg

SEQ ID NO: 205300 - DNA, 75 bp, synthetic construct
  source 1..75: mol_type = other DNA
aagactttaaagaggccagcgattactttaccagtcgcaaggtcagtgaatccggcagccatacggacaataatg

SEQ ID NO: 205301 - DNA, 75 bp, synthetic construct
  source 1..75: mol_type = other DNA
tgcaggtacagcaggatgcgctgctggttgtcgatcgtcagatgagctacatgcgtcagcagctttccgcccgca

SEQ ID NO: 205302 - DNA, 75 bp, synthetic construct
  source 1..75: mol_type = other DNA
ctcatgctgaatggggggttaaacctaaaattcttggtgttggtggtggcgcaggtgtcagaggtggtggtagga

SEQ ID NO: 205303 - DNA, 75 bp, synthetic construct
  source 1..75: mol_type = other DNA
acaccgccagcctggtgaatctggccaccacgtcatcgatggagaagcaacgtctggcgcatgtctctatcggtc

SEQ ID NO: 205304 - DNA, 75 bp, synthetic construct
  source 1..75: mol_type = other DNA
tatttacctgaaccacaaatacacgctggaagacctgatggcctccgctgacccctacacgctgattttttcccg

SEQ ID NO: 205305 - DNA, 75 bp, synthetic construct
  source 1..75: mol_type = other DNA
cgaacagagcagaaagcgccctgcatgggttcagcagcagtattgccagtgcctggaactcgctcagtcagtttg

SEQ ID NO: 205306 - DNA, 75 bp, synthetic construct
  source 1..75: mol_type = other DNA
agtgtatatttgcaagacggacagatttgttcaaaaccagacgatgggaatattatttcaaattatgttttatat

SEQ ID NO: 205307 - DNA, 75 bp, synthetic construct
  source 1..75: mol_type = other DNA
attactcctacggcaacatgcagacggaaaacgtgaacggattcagctggagcaccaacagcaccacgtcgtttg

SEQ ID NO: 205308 - DNA, 75 bp, synthetic construct
  source 1..75: mol_type = other DNA
acgctagaggagctgatggcctccgctgatccctacacgctgattttttcccgccccagcccgctgcggggcgtt

SEQ ID NO: 205309 - DNA, 75 bp, synthetic construct
  source 1..75: mol_type = other DNA
cagcagagcagaccttccggtgggcaaatgttgctgtcagacatgcaatcgaaattgaagccagcaatgcccaga

SEQ ID NO: 205310 - DNA, 75 bp, synthetic construct
  source 1..75: mol_type = other DNA
tgttatttcttattgtgtctcattttgggttaatgtcaagtagtgtgactcttttagagtctctttgtgttcttg

SEQ ID NO: 205311 - DNA, 75 bp, synthetic construct
  source 1..75: mol_type = other DNA
tgttgttccttattgtgtctcattttgggcttatgtcaagcgacgtggctcttttggagtctccatgtgctcttg

SEQ ID NO: 205312 - DNA, 75 bp, synthetic construct
  source 1..75: mol_type = other DNA
tcagacatgcaatcgaaattgaagctggtaatgctcaaacacagcaacgacaaccatcactgtcatacaatccat

SEQ ID NO: 205313 - DNA, 75 bp, synthetic construct
  source 1..75: mol_type = other DNA
tgtttctgattttccgaatatcgatcaagctcgtgaagtagcccgacagttggttcagaccatgatcgcaacaaa

SEQ ID NO: 205314 - DNA, 75 bp, synthetic construct
  source 1..75: mol_type = other DNA
gtaacccagaaggacaaacagaagtgggttttcccggcccgttcttctcgaagtaaagttggtcactattccgat

SEQ ID NO: 205315 - DNA, 75 bp, synthetic construct
  source 1..75: mol_type = other DNA
atgatgatacctgcatacattaaatacctttattctggcttgcttactgtcgtcatttccaggtatagtttttcc

SEQ ID NO: 205316 - DNA, 75 bp, synthetic construct
  source 1..75: mol_type = other DNA
acaggggaaaaagggctacgtcattacccacgaacatcaaaaccagaagacggctgttaaggcgagtctggtatt

SEQ ID NO: 205317 - DNA, 75 bp, synthetic construct
  source 1..75: mol_type = other DNA
atccattgggtgttattcctgatatgcgcgggcagacgattaaaggtaagcctaacagcggacgcgccgtattat

SEQ ID NO: 205318 - DNA, 75 bp, synthetic construct
  source 1..75: mol_type = other DNA
gctgggtgtgaatcttttcacccgtcacagaaacaatatccgtttaaccgctgccggtgaaaagctgttgcctta

SEQ ID NO: 205319 - DNA, 75 bp, synthetic construct
  source 1..75: mol_type = other DNA
agttgctgggatatttcactttagcgctttataccagtgccccttctaaactaaagggagatcttaactatctgc

SEQ ID NO: 205320 - DNA, 75 bp, synthetic construct
  source 1..75: mol_type = other DNA
ggttgcacctggctacccgtcagctgggcgcgtaaaaaaggcggcctgcataccgttgtcgatagcacaacactt

SEQ ID NO: 205321 - DNA, 75 bp, synthetic construct
  source 1..75: mol_type = other DNA
gacagctacaaagcgaaaggtgttcgaaacccactttccccaaaagacacattaggtaggtttctgactgcatta

SEQ ID NO: 205322 - DNA, 75 bp, synthetic construct
  source 1..75: mol_type = other DNA
gtgaacactcgccagctactgagcgttggtatcgatatcggcaccaccactactcaggtgatcttctctcgcctg

SEQ ID NO: 205323 - DNA, 75 bp, synthetic construct
  source 1..75: mol_type = other DNA
aggccctgacacaagaagaggctagaacgaccagctatgtcgatctcgaaaatcgagtgattcgcttttacgaca

SEQ ID NO: 205324 - DNA, 75 bp, synthetic construct
  source 1..75: mol_type = other DNA
aagccttacatagtttttgacgatcatcgagattcacctgttggcttcggtgtgaaggtcagtttgacgaaaaaa

SEQ ID NO: 205325 - DNA, 75 bp, synthetic construct
  source 1..75: mol_type = other DNA
gtcctttatgtatgttcttataaagacttcttgccaaaggaatatcttcaatcactggaatatcatagagttcag

SEQ ID NO: 205326 - DNA, 75 bp, synthetic construct
  source 1..75: mol_type = other DNA
gcagtagaactcagaagacaatatgcaatgaaaatatataaaacatacactaaattaaaaacaatgaacaaatta

SEQ ID NO: 205327 - DNA, 75 bp, synthetic construct
  source 1..75: mol_type = other DNA
cccaaaatgcggccacaatttcgatctgctttgcgatgctgatttctgggaattttctggagcaaaacaggcatg

SEQ ID NO: 205328 - DNA, 75 bp, synthetic construct
  source 1..75: mol_type = other DNA
gtgaaagaaggtaagaaaccgagttcggtcttaaaagtgaaagtagggaatgtttctgattttccgagtatcgat

SEQ ID NO: 205329 - DNA, 75 bp, synthetic construct
  source 1..75: mol_type = other DNA
ttattatcaacaagttaagtgtacatgttaagccagaactcaatagctctgggaaagttgttttcgaacctaacc

SEQ ID NO: 205330 - DNA, 75 bp, synthetic construct
  source 1..75: mol_type = other DNA
ttatgcggttccagacgaagatcgggtttacgaggctctacaacgcattgaattgcatatgttgatgactgcgcc

SEQ ID NO: 205331 - DNA, 75 bp, synthetic construct
  source 1..75: mol_type = other DNA
ttgaaaacaactctcaatcaggcttttattatcaacaagttaagtattaatgttaagcctgagctcagtagctct

SEQ ID NO: 205332 - DNA, 75 bp, synthetic construct
  source 1..75: mol_type = other DNA
ttagtgttaagcctgaactcagtagctctggaaaagtcgttttcgaagccaaccctgaccaaaaaccttacatag

SEQ ID NO: 205333 - DNA, 75 bp, synthetic construct
  source 1..75: mol_type = other DNA
attcaggactcgttctgagcttgaagatagctacaaagcgaaaggtgttcgaaacccactttctccgaaagacag

SEQ ID NO: 205334 - DNA, 75 bp, synthetic construct
  source 1..75: mol_type = other DNA
accaggaatgcgacttacccggtgctgattgacagcattgcggtggaagtgaacaacgcggatgccgcggcatga

SEQ ID NO: 205335 - DNA, 75 bp, synthetic construct
  source 1..75: mol_type = other DNA
aacaacattcagtacgcgtggatccgactgctggcaggcgatactggcaaagtgatgatcgttggcgatgacgac

SEQ ID NO: 205336 - DNA, 75 bp, synthetic construct
  source 1..75: mol_type = other DNA
gatgaggggctgcgtccgcatcatattcagagctacggcaacccagtggagcaaacctggcagaaggtgtatcag

SEQ ID NO: 205337 - DNA, 75 bp, synthetic construct
  source 1..75: mol_type = other DNA
cgctaacgccctgattgaaaacaacaacgggcgtctgggtaaaaaactgtggaccgatggcgcggacggtgagcc

SEQ ID NO: 205338 - DNA, 75 bp, synthetic construct
  source 1..75: mol_type = other DNA
taagtttaacagtgatacttacaaaccaacacctgatgagattcgacgtttcccaagccgtcctaagcacgaacg

SEQ ID NO: 205339 - DNA, 75 bp, synthetic construct
  source 1..75: mol_type = other DNA
gcgtggtcaatacgccaacgcggggtattggtgaccggacgctggacgtggtgcgtcagacatcgcgcgatcgcc

SEQ ID NO: 205340 - DNA, 75 bp, synthetic construct
  source 1..75: mol_type = other DNA
cttaacaagccgcatatcctgcaacactaccgcgaacgttttaccaatatcctagtggacgaattccaggatacc

SEQ ID NO: 205341 - DNA, 75 bp, synthetic construct
  source 1..75: mol_type = other DNA
aggattttcagatcctcgatagcgaagaccaattgcgcttgcttaaacgtctgatcaaggcaatgaatctcgacg

SEQ ID NO: 205342 - DNA, 75 bp, synthetic construct
  source 1..75: mol_type = other DNA
agtcgtccggtcagccatcagcgtatgggtacgccactggctgagaacgacagcggttacaaactcggccagcgt

SEQ ID NO: 205343 - DNA, 75 bp, synthetic construct
  source 1..75: mol_type = other DNA
catgtacgagcaggagaagggcgaaaaaggtcagacgcgtatcgaaaacttggaggaactggtgacggcaacgcg

SEQ ID NO: 205344 - DNA, 75 bp, synthetic construct
  source 1..75: mol_type = other DNA
ctcaacaaaccgcatatccttcaacattaccgcgaacgtttcaccaatattctggtggatgaattccaggacact

SEQ ID NO: 205345 - DNA, 75 bp, synthetic construct
  source 1..75: mol_type = other DNA
gtccgcatcatattcagagctacggtaatccggtggagcagacctggcagaaggtgtatcaggcgtatcaggaag

SEQ ID NO: 205346 - DNA, 75 bp, synthetic construct
  source 1..75: mol_type = other DNA
gctgctgcgcgctcacgaactgtggcttaacaagccgcatatcctgcaacactaccgcgaacgttttaccaatat

SEQ ID NO: 205347 - DNA, 75 bp, synthetic construct
  source 1..75: mol_type = other DNA
ggcgtagtaaagcagctcaagagcaaagagccgcagaacaggctgttcgtgatgctaccaagcaagaagccgttg

SEQ ID NO: 205348 - DNA, 75 bp, synthetic construct
  source 1..75: mol_type = other DNA
aggtctacaccacattcagtgagctaccactggaaatcgttgttgatgtcagaagctttaaaataactgttcttc

SEQ ID NO: 205349 - DNA, 75 bp, synthetic construct
  source 1..75: mol_type = other DNA
gttgcgtaatcctgattatagcatggttctgacaccttccctttattctgacaaaataagtaagttcagcgttta

SEQ ID NO: 205350 - DNA, 75 bp, synthetic construct
  source 1..75: mol_type = other DNA
taagcagaaggccagcagcaaaatcataccgtgatcccaataaggttgatcctacccacgtaatatggacacagg

SEQ ID NO: 205351 - DNA, 75 bp, synthetic construct
  source 1..75: mol_type = other DNA
aataaagaagattctattgatatcgatgatcagttagattttgaattggcaattctaatccaaacaaaaaaaagt

SEQ ID NO: 205352 - DNA, 75 bp, synthetic construct
  source 1..75: mol_type = other DNA
aggctcgctgtatatcgccaccacgcatacccaggcacgctacgcgttaccaaacgttatcaaaggctttattga

SEQ ID NO: 205353 - DNA, 75 bp, synthetic construct
  source 1..75: mol_type = other DNA
ttcccaagccgtccgtgtaaggttgatacattcgatgctaaactaaaaagtaaaccaccattttttatagatgat

SEQ ID NO: 205354 - DNA, 75 bp, synthetic construct
  source 1..75: mol_type = other DNA
gtacaggttgaagagcagcacgaacaggaagaagtacaagtgcagccgatggtgactgaggtccctgtcgccgcc

SEQ ID NO: 205355 - DNA, 75 bp, synthetic construct
  source 1..75: mol_type = other DNA
ttcacacgctattcagatgatattattatttcctctgaaaatgatgagggctttgagaatattcattctgtagta

SEQ ID NO: 205356 - DNA, 75 bp, synthetic construct
  source 1..75: mol_type = other DNA
taagtttaaccaagatgactacaagccaacgactgacgagatcacccgtttcccaagccgtcttaagcaggatca

SEQ ID NO: 205357 - DNA, 75 bp, synthetic construct
  source 1..75: mol_type = other DNA
ttacctaagcattcacagaaaattttcggtaatatcacaggtgacccctttgaaccatcatcacagttaaaaagt

SEQ ID NO: 205358 - DNA, 75 bp, synthetic construct
  source 1..75: mol_type = other DNA
atatcgtgatcccaataaggtcagtaaagtaaatgtttcagggaagaaatcccctgttctggttgttcctgaact

SEQ ID NO: 205359 - DNA, 75 bp, synthetic construct
  source 1..75: mol_type = other DNA
atcgcaaacagaattcgatatcggcgcatcagatagtgatgagttcactcgcttcccaagtaggttgagaaaaaa

SEQ ID NO: 205360 - DNA, 75 bp, synthetic construct
  source 1..75: mol_type = other DNA
tcggggatattattgggcggctgttcttcagactgattgaggggacatcaggccttatcacctggtggcaatcgc

SEQ ID NO: 205361 - DNA, 75 bp, synthetic construct
  source 1..75: mol_type = other DNA
gattcagtcctggccggcacgaccgcaaacgctatcaaaatggggctggctgttgaaggagctgcgctgtccgtg

SEQ ID NO: 205362 - DNA, 75 bp, synthetic construct
  source 1..75: mol_type = other DNA
tcggggacatcatcggacggctgttcttcaggcttattgagggaacatccagccttatcacctggtggcaatcac

SEQ ID NO: 205363 - DNA, 75 bp, synthetic construct
  source 1..75: mol_type = other DNA
agctgtaatttgttgtccctgtgtgtgctggcaccggtattctgtacacccaaaaagctggctgaagtttccagg

SEQ ID NO: 205364 - DNA, 75 bp, synthetic construct
  source 1..75: mol_type = other DNA
aatattacctggtctctgtcgtcacagactcatgccgataaatacgatctcatcaataaaacatcccgtgtttct

SEQ ID NO: 205365 - DNA, 75 bp, synthetic construct
  source 1..75: mol_type = other DNA
gtggccttcacggctaagatcgcctcggggctggataatctctactgggcgtcacagcgcaccggcgcgacggtt

SEQ ID NO: 205366 - DNA, 75 bp, synthetic construct
  source 1..75: mol_type = other DNA
aatatcaacctcaaaaactggacccttaaaggcgacatcgacaacctcactaagcagttcggtgagtttggcaag

SEQ ID NO: 205367 - DNA, 75 bp, synthetic construct
  source 1..75: mol_type = other DNA
tggcaactgggcgcaggccgctagtataggcaaacagctgctaaatcagggcagcgaaaatccgtcagcgatgcc

SEQ ID NO: 205368 - DNA, 75 bp, synthetic construct
  source 1..75: mol_type = other DNA
ctgatttgctgaatgccataaaagatggcaactgggcgcaggccgctagtataggcaaacagctgctaaatcagg

SEQ ID NO: 205369 - DNA, 75 bp, synthetic construct
  source 1..75: mol_type = other DNA
tgggcattgacgaaaataccctcatggcgatgcgccggggtgtgggcggtttctccgggcagtacagcgcaatgg

SEQ ID NO: 205370 - DNA, 75 bp, synthetic construct
  source 1..75: mol_type = other DNA
atgaacgctgagactattaaagatttcctcgtctcgctcggtttcgatatcgacgaagcaggcgcggaaaagttc

SEQ ID NO: 205371 - DNA, 75 bp, synthetic construct
  source 1..75: mol_type = other DNA
tgctcaacgccattaaagatggccgctgggctgatgccgccagcattggcaaacagatgctcaatcagggcagcg

SEQ ID NO: 205372 - DNA, 75 bp, synthetic construct
  source 1..75: mol_type = other DNA
tgggcattgacgaaaataccctgatggctatgcgccggggtgtgggtggtttctccgggcagtacagcgcaatgg

SEQ ID NO: 205373 - DNA, 75 bp, synthetic construct
  source 1..75: mol_type = other DNA
tgtttctcatgatgcttatcatgtactttattaattctctcaggcataaggaattaactgaaatactgacaaaaa

SEQ ID NO: 205374 - DNA, 75 bp, synthetic construct
  source 1..75: mol_type = other DNA
tatcttttcctgagaaatccgggagcaatccgcttaagccggaagaggactgctgtaatttgttgtccctgtgtg

SEQ ID NO: 205375 - DNA, 75 bp, synthetic construct
  source 1..75: mol_type = other DNA
caaaaagctggcagaagtctccagacagatcatcgtgaccagtgcgcaggaaattgcctggacgcccgggagtag

SEQ ID NO: 205376 - DNA, 75 bp, synthetic construct
  source 1..75: mol_type = other DNA
caatatggaaggcagcggtgagcatagccgtttgcaggtggcatttcagggccagggtattaaatggctggtggc

SEQ ID NO: 205377 - DNA, 75 bp, synthetic construct
  source 1..75: mol_type = other DNA
ctcgtatctgcgcctgattgccaaccgcaacgacgacgcggcctttgagcgcgtagtgaatacaccaacgcgggg

SEQ ID NO: 205378 - DNA, 75 bp, synthetic construct
  source 1..75: mol_type = other DNA
cgaaagcttatcccatttccgccgggaatatttgcagatgtttggagagtcacctaagagagatattaccaggtt

SEQ ID NO: 205379 - DNA, 75 bp, synthetic construct
  source 1..75: mol_type = other DNA
agcctatcccggtttattcgtaacaatcccggtgcagaaggctttctgaatcgcctgggcgtacagacccgtgat

SEQ ID NO: 205380 - DNA, 75 bp, synthetic construct
  source 1..75: mol_type = other DNA
gcaaaccatgtcagcattgatgagcagtattatccagcatgaaaatggaagaaatatctattctcgagagctgat

SEQ ID NO: 205381 - DNA, 75 bp, synthetic construct
  source 1..75: mol_type = other DNA
tctggatgtcgccgattggccttattactgcgctggcggcggggattgcccttctgtgggaggactatcagacct

SEQ ID NO: 205382 - DNA, 75 bp, synthetic construct
  source 1..75: mol_type = other DNA
agctgtaatttgttgtccctgtgtgtgttggcaccggtactctgtacacccagaaagctggcagaagtctccagg

SEQ ID NO: 205383 - DNA, 75 bp, synthetic construct
  source 1..75: mol_type = other DNA
ccggacgtggaataaacagcgtggagaaaattatctctacctgggcgcctgcgtctgataataacaacacaactg

SEQ ID NO: 205384 - DNA, 75 bp, synthetic construct
  source 1..75: mol_type = other DNA
tattctcgagagctgattaataaggctgccgtgacgggaattagtggcaaaatgacagaggttaaccagcaaaat

SEQ ID NO: 205385 - DNA, 75 bp, synthetic construct
  source 1..75: mol_type = other DNA
gaccggctggctggcctatccaccgctatcgggaatagagtacagtccgggagtcggtgtcgattactggatatg

SEQ ID NO: 205386 - DNA, 75 bp, synthetic construct
  source 1..75: mol_type = other DNA
ttttattcagcctgtcattgacagtgcggttattcagccgcttaagaatataacgacgagctggcccgacgttct

SEQ ID NO: 205387 - DNA, 75 bp, synthetic construct
  source 1..75: mol_type = other DNA
ttgctttaacctttctagcgttagtactcacaggctgcactgcggggaaaatcgatcccgcaaaagcgttaacac

SEQ ID NO: 205388 - DNA, 75 bp, synthetic construct
  source 1..75: mol_type = other DNA
tgaagtgacgcctggcctgaaaattcgtatcgatggtcacctgatttcggtgcgcgagtcagcggaacaaatttg

SEQ ID NO: 205389 - DNA, 75 bp, synthetic construct
  source 1..75: mol_type = other DNA
tggcgcgtgctggccacggttctcgccgtgaaattgaatctattattgaagccggtcgcgtcagtgttgatggca

SEQ ID NO: 205390 - DNA, 75 bp, synthetic construct
  source 1..75: mol_type = other DNA
ccagtatttacctgggcatcattgtgcgcgaacgtactgattatcgcctccttcccaattctgacggttaccgtc

SEQ ID NO: 205391 - DNA, 75 bp, synthetic construct
  source 1..75: mol_type = other DNA
ccgtgtctggatcatccggcagtacttgaacttctccagagatatccctcaccagaaaaactggcttcgctgagt

SEQ ID NO: 205392 - DNA, 75 bp, synthetic construct
  source 1..75: mol_type = other DNA
tggcgatttcgagttcaatggtggatttgaagcaatgcaagcgttgctatcacactcgcagcgtccacaggcggt

SEQ ID NO: 205393 - DNA, 75 bp, synthetic construct
  source 1..75: mol_type = other DNA
gatattcccgtggcgagcgataacccagcgcactatgcggatgccattcgttataatgctcgaacgcctctgcaa

SEQ ID NO: 205394 - DNA, 75 bp, synthetic construct
  source 1..75: mol_type = other DNA
cgtggagaagaattttcctgtacttgagaaaatgaccggagagcagtttgagaaaagtatttcccttattcagcc

SEQ ID NO: 205395 - DNA, 75 bp, synthetic construct
  source 1..75: mol_type = other DNA
gtgacgctgccatcattgccgaagctgcccgtaccctgcctcacgcgctacgcacgctgaaactggctgacgagc

SEQ ID NO: 205396 - DNA, 75 bp, synthetic construct
  source 1..75: mol_type = other DNA
ggtgagcatccctcgcgacggggtaataaagctctcaaacgggcgttgttcctgtggatcctatctccagggctt

SEQ ID NO: 205397 - DNA, 75 bp, synthetic construct
  source 1..75: mol_type = other DNA
cgtcaacgggcagtccgtatggttctggaaagtcagagcgaatatgactcacaatgggcgacaatttgttccatt

SEQ ID NO: 205398 - DNA, 75 bp, synthetic construct
  source 1..75: mol_type = other DNA
tcccggtaacgacctcttctgacgctggcgttgaattattacctgtggagatcacgccggatgagcagaaagaac

SEQ ID NO: 205399 - DNA, 75 bp, synthetic construct
  source 1..75: mol_type = other DNA
catggtcgtgtagtgaccgtgcgggttgaaggaatgactttcttacggccggttgcggtcggcgatgtggtgtgc

SEQ ID NO: 205400 - DNA, 75 bp, synthetic construct
  source 1..75: mol_type = other DNA
atgaaattacagcagcttcgctatattgttgaggtggtcaatcacaatctgaatgtctcatcaacagctgaagga

SEQ ID NO: 205401 - DNA, 75 bp, synthetic construct
  source 1..75: mol_type = other DNA
gcagagcagcagacagaggaaggccgccagtggttctcccgtgtcatgtctctcatcagcaaagccagagggaca

SEQ ID NO: 205402 - DNA, 75 bp, synthetic construct
  source 1..75: mol_type = other DNA
actgaccacagagctgacagcactgaaggaaaaactgcgcacgcaggacggcgatccgcagaaccgcttcaccgc

SEQ ID NO: 205403 - DNA, 75 bp, synthetic construct
  source 1..75: mol_type = other DNA
ggcacagcaggccgtgaatgcttatatcagagaacgagaccgtaatttgccgtgcgtttcatgcgggacattcga

SEQ ID NO: 205404 - DNA, 75 bp, synthetic construct
  source 1..75: mol_type = other DNA
tatgactcacaatggacagcaatttgttctattgcccctaagattggctgtacaccggagactctgcacgtctgg

SEQ ID NO: 205405 - DNA, 75 bp, synthetic construct
  source 1..75: mol_type = other DNA
tgaaacaacgcgaacaggacagtgatcgttacagtgggcgggaagacgatccgcaggttccccgccagttgcgac

SEQ ID NO: 205406 - DNA, 75 bp, synthetic construct
  source 1..75: mol_type = other DNA
aagagatggaggccttcctgcgctctgcactggcacgtgccgaagaaaagatcgaagaagatgagcgagaaatag

SEQ ID NO: 205407 - DNA, 75 bp, synthetic construct
  source 1..75: mol_type = other DNA
caaacgtcatcaaaggctttattgagcgttatccccgcgtttctttgcatatgcaccagggctcgccgacacaaa

SEQ ID NO: 205408 - DNA, 75 bp, synthetic construct
  source 1..75: mol_type = other DNA
aaagtcgatgccataaaatcggttgccggagagcacacctggccggataaaggctcgctgtatatcgccaccacg

SEQ ID NO: 205409 - DNA, 75 bp, synthetic construct
  source 1..75: mol_type = other DNA
gatgcggctgtcgcattgcgctctaatgaagaaattgaggtcatgtttaaagatataaaactgccggaaaaataa

SEQ ID NO: 205410 - DNA, 75 bp, synthetic construct
  source 1..75: mol_type = other DNA
ggatcgcctgcgcaaccatactgccgcgcaattgattaacggctttaattttttacgctggctggaaagcgaacc

SEQ ID NO: 205411 - DNA, 75 bp, synthetic construct
  source 1..75: mol_type = other DNA
atgctttctcctgaatcattgtgctatggagaaaaacatgaaaaaagaggggcgtttttagggctgttgttggtt

SEQ ID NO: 205412 - DNA, 75 bp, synthetic construct
  source 1..75: mol_type = other DNA
caatccagtctggtcacggctgcctgggctgtgcggaaaatggtttctgggatcgcggttcgttctacagccgcg

SEQ ID NO: 205413 - DNA, 75 bp, synthetic construct
  source 1..75: mol_type = other DNA
tattgctgacttacgtcaaaaggaggtctggcaagctataaaaaaaactttaaggatgagggaattagtactctt

SEQ ID NO: 205414 - DNA, 75 bp, synthetic construct
  source 1..75: mol_type = other DNA
atgaaattagaccagcaatatctaaaagatctacttatcgcattcgaaaaaactcgtggccctgacacgatgctt

SEQ ID NO: 205415 - DNA, 75 bp, synthetic construct
  source 1..75: mol_type = other DNA
ctttatcgcaattatcccagcacgcgcaaactggcaaaacgtctcggcgtttcacataccgcgattgccaataag

SEQ ID NO: 205416 - DNA, 75 bp, synthetic construct
  source 1..75: mol_type = other DNA
aaccacatggtcctgtattcagaacaccgcaattatccgtattggaggccagactacagccgggttacgtcattt

SEQ ID NO: 205417 - DNA, 75 bp, synthetic construct
  source 1..75: mol_type = other DNA
aaaactccgcgataccttacttcccaaactgatgagcggtgaagtacgggttcagtatgcagaagaagcaatcgc

SEQ ID NO: 205418 - DNA, 75 bp, synthetic construct
  source 1..75: mol_type = other DNA
tgatagcggcactggggcttgcttattatatgtgcctgttgccctctctccatcttatgccggatagcctgctac

SEQ ID NO: 205419 - DNA, 75 bp, synthetic construct
  source 1..75: mol_type = other DNA
aatgttatcgccgcgctcacttcgacgccggagagttcgtgcagagctgggatgatgacgctgcccgtaaaggtt

SEQ ID NO: 205420 - DNA, 75 bp, synthetic construct
  source 1..75: mol_type = other DNA
tcgtggctgcggctgttggcgtacatgcagtcgccagcgccgttgaccagcgcagacgtcataaccagcaacttg

SEQ ID NO: 205421 - DNA, 75 bp, synthetic construct
  source 1..75: mol_type = other DNA
cgtaacgttccgcctacagcgccaacagcatttattcctgaaagctggcgaaaactggtattaacgccttcaggc

SEQ ID NO: 205422 - DNA, 75 bp, synthetic construct
  source 1..75: mol_type = other DNA
caaagcgttaggggaaggtgttggatatagttggatcgaagtgatcttacccagcaatagtggacacgcggctaa

SEQ ID NO: 205423 - DNA, 75 bp, synthetic construct
  source 1..75: mol_type = other DNA
atgcctacattattcagaaaagaatatccgcgaaaaagtagagcgacagaatttttgtttctcattctgtttatc

SEQ ID NO: 205424 - DNA, 75 bp, synthetic construct
  source 1..75: mol_type = other DNA
gggacggcaagtatatgatggataacaactatcaatactccaaggagctgctgcactactgcctggagcgtgaaa

SEQ ID NO: 205425 - DNA, 75 bp, synthetic construct
  source 1..75: mol_type = other DNA
actcaggcggatctgactaatttgcgcgctgcgggttacgacaaaccattcaagaccgttgccgaaggcgtaacg

SEQ ID NO: 205426 - DNA, 75 bp, synthetic construct
  source 1..75: mol_type = other DNA
tttgacgcgatgcagcagttattatcgcatccgttacgtccccaggctgtgtttactggaaatgacgcgatggcg

SEQ ID NO: 205427 - DNA, 75 bp, synthetic construct
  source 1..75: mol_type = other DNA
aactatttcaactcatttggtgaatatgcagatgcttctgtcagagggcatgacggcaaagccaaaagccttcag

SEQ ID NO: 205428 - DNA, 75 bp, synthetic construct
  source 1..75: mol_type = other DNA
gtctgtcggcgcgcaatttaacttcaatgaaagtgttactatggacgtcacttatgaaagctcaggctctggcga

SEQ ID NO: 205429 - DNA, 75 bp, synthetic construct
  source 1..75: mol_type = other DNA
tcgaatacattccgttcccggataaactgaaaggccgctatcaggcgttcactcaggcagatctgacaaatctgc

SEQ ID NO: 205430 - DNA, 75 bp, synthetic construct
  source 1..75: mol_type = other DNA
agtaattgagccagttattgaattgtataacgacgtggtatgggcgtcgttcaacacactgcacaacaaaatcaa

SEQ ID NO: 205431 - DNA, 75 bp, synthetic construct
  source 1..75: mol_type = other DNA
atccgcgaagaagcagaacgatagaatttctgtttttcattgtgtttatcgtgttgctgatgccgatattcccgt

SEQ ID NO: 205432 - DNA, 75 bp, synthetic construct
  source 1..75: mol_type = other DNA
gcgacttcgtttatgtaggcgacgtggctgatgtcaacctgtggttcctggaaaatggcgtttccggcatcttca

SEQ ID NO: 205433 - DNA, 75 bp, synthetic construct
  source 1..75: mol_type = other DNA
gactttatcgaatcccgtgaatacgaaaaaccgctgaacgtctacggttactcaaaattcctgtttgatgaatac

SEQ ID NO: 205434 - DNA, 75 bp, synthetic construct
  source 1..75: mol_type = other DNA
tcgctttccatctcaacactcagcttaacaacggtgaatcgccgaagctgttcgaaggtagcgagaacttcaaac

SEQ ID NO: 205435 - DNA, 75 bp, synthetic construct
  source 1..75: mol_type = other DNA
tgttgaaggagctgcgctgtccgtggtggccttcacggctaagatcgcctccggtctggataatctttactgggc

SEQ ID NO: 205436 - DNA, 75 bp, synthetic construct
  source 1..75: mol_type = other DNA
cgggatacgcgcaatgagcaggttacgctgaaccagatagtcgatcgcagaacggcctcgatgcgtagtgtcgga

SEQ ID NO: 205437 - DNA, 75 bp, synthetic construct
  source 1..75: mol_type = other DNA
tgaaccgttcgggcatccagcctctgcacagcaaatgctcgtttgcgaattatcaggtgcggaacgacgggcaaa

SEQ ID NO: 205438 - DNA, 75 bp, synthetic construct
  source 1..75: mol_type = other DNA
ttcttgagcgtatccgtaagctggccccacagcatgtaatcgcgccgtaccggacagtggacgagtggcgcgagt

SEQ ID NO: 205439 - DNA, 75 bp, synthetic construct
  source 1..75: mol_type = other DNA
acctccgccgagaaatcgcaggcgcatcttgatgctggcgcgaagaaggtgttgatttccgcccctgccggtgaa

SEQ ID NO: 205440 - DNA, 75 bp, synthetic construct
  source 1..75: mol_type = other DNA
atgaaaaacattgcggcagttggggttcttgaacgtattcgcagacttgcaccacagggggcggttccaccgtac

SEQ ID NO: 205441 - DNA, 75 bp, synthetic construct
  source 1..75: mol_type = other DNA
catcaggcgcgggttgaaaaaatcctgaaccgtgcgggcatccagccgcttcacaggaagtgctcattcgggaac

SEQ ID NO: 205442 - DNA, 75 bp, synthetic construct
  source 1..75: mol_type = other DNA
agcgcgccagcgggttcccgacgttattattctcgatgttggtctgcctgatatcagcggctttgaattatgccg

SEQ ID NO: 205443 - DNA, 75 bp, synthetic construct
  source 1..75: mol_type = other DNA
agcgaggcttgccggtgctggataaagctcgccagcaggttcccgatgtcatgattctcgatgttggtttgcctg

SEQ ID NO: 205444 - DNA, 75 bp, synthetic construct
  source 1..75: mol_type = other DNA
caggtgcggcaaaagccattggtctggtgatccccgaacttagcggcaaacttaaaggccatgcgcaacgcgtgc

SEQ ID NO: 205445 - DNA, 75 bp, synthetic construct
  source 1..75: mol_type = other DNA
atgaaaaccatcgtttataacgtcaatgacgacactctggatggcaacgacaccattgtttccgtggcgtcatgc

SEQ ID NO: 205446 - DNA, 75 bp, synthetic construct
  source 1..75: mol_type = other DNA
ttcttgaacgtatccgaagactggctccgccacatgtaaccgccccattcagaacggtagcggagtggcacgagt

SEQ ID NO: 205447 - DNA, 75 bp, synthetic construct
  source 1..75: mol_type = other DNA
tcgtcaccgtgtccgatgtcatgagtgtgttgcatgacggctacgacaacggcaagtccggggaaaaatttttac

SEQ ID NO: 205448 - DNA, 75 bp, synthetic construct
  source 1..75: mol_type = other DNA
tccgatctcttcaacctaaactatctggggagaggaaaatggttcgatttgtttcgctgcttcaggagtaacact

SEQ ID NO: 205449 - DNA, 75 bp, synthetic construct
  source 1..75: mol_type = other DNA
tcagcttgagtggctggaacgtaaactggccgatgcgccagaacgccatacgttgctgctgctgcatcatcatcc

SEQ ID NO: 205450 - DNA, 75 bp, synthetic construct
  source 1..75: mol_type = other DNA
aaaaactcaggcgaaaaatttttgcaggggttgtgtgaagttgacctgcttatcctggatgaaatcggtatgcag

SEQ ID NO: 205451 - DNA, 75 bp, synthetic construct
  source 1..75: mol_type = other DNA
atggcgagcgtacagctgcaaaatgtaacgaaagcctggggcgaggtcgtggtatcgaaagatatcaatctcgat

SEQ ID NO: 205452 - DNA, 75 bp, synthetic construct
  source 1..75: mol_type = other DNA
gattatggatcgcatgaccatgaacggtggtcgatgggtgacgtttaactgggatagctggcgtccaaatgtcag

SEQ ID NO: 205453 - DNA, 75 bp, synthetic construct
  source 1..75: mol_type = other DNA
tcagcttgattggctggaacgtaaactggccgatgcgccagaacgtcatactttgctgctgctgcaccatcatcc

SEQ ID NO: 205454 - DNA, 75 bp, synthetic construct
  source 1..75: mol_type = other DNA
gatggtacgctgaccaccgaggtgcaccgcctggcggacacacgtttccaacctgataccgcttcagaaggctac

SEQ ID NO: 205455 - DNA, 75 bp, synthetic construct
  source 1..75: mol_type = other DNA
gtgaaaaatattgcgacaggtggtgttctggaacgcctccgcagactgaccccgccacatgtaaccgctccatac

SEQ ID NO: 205456 - DNA, 75 bp, synthetic construct
  source 1..75: mol_type = other DNA
tgcacaaatttcgcgtttagcggaaaacctggtaccgggaagaaccacttagcagcagctatcgggaatcgcctg

SEQ ID NO: 205457 - DNA, 75 bp, synthetic construct
  source 1..75: mol_type = other DNA
ggcaacttgctgaaggccagaaacgttgcgaggagatcaaccgcctgaatcgtcagttgcgggtggaaaaaatcc

SEQ ID NO: 205458 - DNA, 75 bp, synthetic construct
  source 1..75: mol_type = other DNA
taacggtaaaaacgtgctgcaacatatcgatcgacttaattctatcaccgcgctggaattacctgatggtattga

SEQ ID NO: 205459 - DNA, 75 bp, synthetic construct
  source 1..75: mol_type = other DNA
ttctggcaagagtcagcagatttgtgccgcaggatgcaatccctccgtaccgtacggtggcggagtggctggaat

SEQ ID NO: 205460 - DNA, 75 bp, synthetic construct
  source 1..75: mol_type = other DNA
tcgtcaccgtgtctgacgtcatgagcgtgttgcatgacagttacgacaacggcaaatccggggaaaaatttttac

SEQ ID NO: 205461 - DNA, 75 bp, synthetic construct
  source 1..75: mol_type = other DNA
tgtcttcgctactgcgaaacaagtaaaactgccaaataacatcaaatacgttaatactgcgtattaccgtgaagg

SEQ ID NO: 205462 - DNA, 75 bp, synthetic construct
  source 1..75: mol_type = other DNA
cagggaaaagtgccgtttatcccctgctgattgatgtaacaagcgatattatcggccagttaaaccggaggattg

SEQ ID NO: 205463 - DNA, 75 bp, synthetic construct
  source 1..75: mol_type = other DNA
ggcgggcaaaataaattaagcccagagagacgctttgatcaaagcgtttattatactgcatctcacctgtttgat

SEQ ID NO: 205464 - DNA, 75 bp, synthetic construct
  source 1..75: mol_type = other DNA
tgctcctaattcaactattggactccaccgtctggccatattatgcagaagaacgaactttacgtactgcaggat

SEQ ID NO: 205465 - DNA, 75 bp, synthetic construct
  source 1..75: mol_type = other DNA
gacgcatgagactgcaactgttccagttaacgcgctgggaacgaaattttgcgatgccagcgcgcaccgaacgtt

SEQ ID NO: 205466 - DNA, 75 bp, synthetic construct
  source 1..75: mol_type = other DNA
gcacattgtcgttgacattgatggtgttaaggaaggtgcgaataagcggggaaattcttctcggctgactcagtc

SEQ ID NO: 205467 - DNA, 75 bp, synthetic construct
  source 1..75: mol_type = other DNA
gcgggtccgcgcgccggcctcgtgcgcctggcgctcgcgggcgaggtccagggcggccgtcttcacgttctgcct

SEQ ID NO: 205468 - DNA, 75 bp, synthetic construct
  source 1..75: mol_type = other DNA
tactgtttctctggtgtgcgatggctcaggccctgccatcagcttcttttccaccaccggggatgactttgcccg

SEQ ID NO: 205469 - DNA, 75 bp, synthetic construct
  source 1..75: mol_type = other DNA
acagacgaaaacaaacagcctaatctgggcaaggacgtggcgagcgctacggacaaggagaaagctgagcttggt

SEQ ID NO: 205470 - DNA, 75 bp, synthetic construct
  source 1..75: mol_type = other DNA
agtgggctgatttctgttggggcagtgataaagatgtgcatacccacagactactggttataagcaaagataaac

SEQ ID NO: 205471 - DNA, 75 bp, synthetic construct
  source 1..75: mol_type = other DNA
cccactctattgttttcgatgaagcagaaaaccggatgcacaccattaaagcggtgatggtagcaactctcggcg

SEQ ID NO: 205472 - DNA, 75 bp, synthetic construct
  source 1..75: mol_type = other DNA
tgtgatgaatattaaaagcatcttggtattggtttgttgtgcaactattctatcattgattatgatcatttttat

SEQ ID NO: 205473 - DNA, 75 bp, synthetic construct
  source 1..75: mol_type = other DNA
acttacctgtaacagatgtgggtttgttcatcgttactcggcccgggcctttatgaactgggtaggcaagcaggg

SEQ ID NO: 205474 - DNA, 75 bp, synthetic construct
  source 1..75: mol_type = other DNA
aacaagattcatgcggaaaaaattctgaaccgttcgggtatccagccgttgcaccagaagtgttcgtttgcgaat

SEQ ID NO: 205475 - DNA, 75 bp, synthetic construct
  source 1..75: mol_type = other DNA
gctcgtaggattcaaagacggatatgtgtgggatgagcacaagtatatgtggtttacatatttcctctcaaggat

SEQ ID NO: 205476 - DNA, 75 bp, synthetic construct
  source 1..75: mol_type = other DNA
gcttttctgacaatgctatttcatactgcctccacagcatcgtattacagagcaatgcctgttccaaagtttctc

SEQ ID NO: 205477 - DNA, 75 bp, synthetic construct
  source 1..75: mol_type = other DNA
ggcagtggtaagacgcgcgtactggtgcatcgtatcgcctggttgatgagcgtggaaaactgctcgccatactcg

SEQ ID NO: 205478 - DNA, 75 bp, synthetic construct
  source 1..75: mol_type = other DNA
cggtgagcatagccgtttgcaggtggcatttcagggccagggtattaaatggctggtggcggcttacgcccggtt

SEQ ID NO: 205479 - DNA, 75 bp, synthetic construct
  source 1..75: mol_type = other DNA
gtgatgaagtcagtatgccgggttctcgcaaagaggtggtcaacgcgcgcgaggaaggcgttgagtttcagttca

SEQ ID NO: 205480 - DNA, 75 bp, synthetic construct
  source 1..75: mol_type = other DNA
ttcaactgaaacaacttattattgatgcttcgacggccctcgcaggtttgcgacaaaatgaggccacggaaggca

SEQ ID NO: 205481 - DNA, 75 bp, synthetic construct
  source 1..75: mol_type = other DNA
ctgccaatcgacgaaatttttgttctgaacaaagcgccggataccccgataaaccctgcagatttccttgccctc

SEQ ID NO: 205482 - DNA, 75 bp, synthetic construct
  source 1..75: mol_type = other DNA
tcggcgaacaagccagactccagttaatggccgtcaaagccgtggtggtgtgcagcagaaatctactggaggaaa

SEQ ID NO: 205483 - DNA, 75 bp, synthetic construct
  source 1..75: mol_type = other DNA
cggaagcttcgtttgtatcaaatggattaaaagaagaagcgctagatttgatcatgaaatcagaaatcttatcga

SEQ ID NO: 205484 - DNA, 75 bp, synthetic construct
  source 1..75: mol_type = other DNA
ttgtcacccatcgccagacgcaggacacctacgcccaacgccgtatcgcagacgagttgtacccgccgcgtattg

SEQ ID NO: 205485 - DNA, 75 bp, synthetic construct
  source 1..75: mol_type = other DNA
ctgtaccctgattgaacggggattcaccccttcacttatcgcggtcgatgaggtccaccagattgcctcctggcc

SEQ ID NO: 205486 - DNA, 75 bp, synthetic construct
  source 1..75: mol_type = other DNA
gacatcatgccgttaactgagctgttcgtcgcccgctttgccgacgagcagggcgtgccgcgtccgaaactggcc

SEQ ID NO: 205487 - DNA, 75 bp, synthetic construct
  source 1..75: mol_type = other DNA
tgattgagtttcatgaccgcttgatttctcgtgatggtggcgtagcgggtatgccagaacccggtcgcgctgacg

SEQ ID NO: 205488 - DNA, 75 bp, synthetic construct
  source 1..75: mol_type = other DNA
atgatcaagttatctgaaaaaggcgtatttctcgccagtaataacgaaataattgccgaagaacatttcagaggc

SEQ ID NO: 205489 - DNA, 75 bp, synthetic construct
  source 1..75: mol_type = other DNA
tcccgcgctattgccatgctttccgttctcaccggtaacgtcggcataaacggcggcaactcaggtgtacgcgaa

SEQ ID NO: 205490 - DNA, 75 bp, synthetic construct
  source 1..75: mol_type = other DNA
ggcattaccgccaagcaaactggagtttggctacacttttgtggcgctggatcctgatgggcatcgtattcgcct

SEQ ID NO: 205491 - DNA, 75 bp, synthetic construct
  source 1..75: mol_type = other DNA
atgaccattcagtttatctctgcggaggagataatttatttccacgataagttgcttagcgttacaccaggtgta

SEQ ID NO: 205492 - DNA, 75 bp, synthetic construct
  source 1..75: mol_type = other DNA
aggaaaaactcagacagaagaaactgatttctgaaagttttgaaaaagccgatgcgcctaaaaactggaattatt

SEQ ID NO: 205493 - DNA, 75 bp, synthetic construct
  source 1..75: mol_type = other DNA
atgatgaagaaattatttattgctacatgtttattgcttcctgggcttgtgtattcagcagcgactccgttacct

SEQ ID NO: 205494 - DNA, 75 bp, synthetic construct
  source 1..75: mol_type = other DNA
tctcacatcagttgtttttgatgaaggtgaggctgttatcagtgcaaaggctggttttcctgccggatgggaaat

SEQ ID NO: 205495 - DNA, 75 bp, synthetic construct
  source 1..75: mol_type = other DNA
aaaccgatgaagaagtccataactggctggcgctgcacggtcgcggccaggattactgccagcttaaccctcaac

SEQ ID NO: 205496 - DNA, 75 bp, synthetic construct
  source 1..75: mol_type = other DNA
attcattagcctctcacgatattacctttgttggtattgtacagaccgctaaagcgtccggtatggaacgtttcc

SEQ ID NO: 205497 - DNA, 75 bp, synthetic construct
  source 1..75: mol_type = other DNA
atgaaatcgacacgctgaaccagaacctgaccgatattctgcgtgagattgaaattgagtccgagcgcgtggcgc

SEQ ID NO: 205498 - DNA, 75 bp, synthetic construct
  source 1..75: mol_type = other DNA
gcgctattgccatgctttccgttctcaccggcaacgtcggcataaacggcggcaactcaggcgtacgcgaaggta

SEQ ID NO: 205499 - DNA, 75 bp, synthetic construct
  source 1..75: mol_type = other DNA
acgccaactgttaatgcgcccggcgatctccgcctctgaaagcatcacccgtaccgtccgtgaaattttagataa

SEQ ID NO: 205500 - DNA, 75 bp, synthetic construct
  source 1..75: mol_type = other DNA
tgaccaacgatttagcgcagtgcgtggagatctccaaccagtacggcccggagcacctgatcattcagacccgca

SEQ ID NO: 205501 - DNA, 75 bp, synthetic construct
  source 1..75: mol_type = other DNA
caggtaacgcctttgtcaccgaagcgaaacgtcaggtgagccagcgtctggacggtgcggcgatcgatatgcccg

SEQ ID NO: 205502 - DNA, 75 bp, synthetic construct
  source 1..75: mol_type = other DNA
tgttcagcggattatcagaccttgctgaaacgtaataatctgcgggggagcatgagtgcaaagggctgctgctat

SEQ ID NO: 205503 - DNA, 75 bp, synthetic construct
  source 1..75: mol_type = other DNA
tgtgctcaccgccgccgattgccgatgagatcctttacgcggcgcagctgtgcggcgtgcaggacgtgtttaacg

SEQ ID NO: 205504 - DNA, 75 bp, synthetic construct
  source 1..75: mol_type = other DNA
gcactgaacgccagccgcctgatcgtgactaaagatttagcgcagtgcgtagagatctccaaccagtacggcccg

SEQ ID NO: 205505 - DNA, 75 bp, synthetic construct
  source 1..75: mol_type = other DNA
ggtaattttactgacacccgatgctgagatggcgcgtcgcgttgccgaagcggtcgaacgccagctggcagaact

SEQ ID NO: 205506 - DNA, 75 bp, synthetic construct
  source 1..75: mol_type = other DNA
acgccagctgttaatgcgcccggcgatctccgcttctgaaagcattacccgcactgttaacgatattctcgataa

SEQ ID NO: 205507 - DNA, 75 bp, synthetic construct
  source 1..75: mol_type = other DNA
gccgcgtgccgaaaccgcccgccaggcactgaacgccagccgcctgatcgtgactaaagatttagcgcagtgcgt

SEQ ID NO: 205508 - DNA, 75 bp, synthetic construct
  source 1..75: mol_type = other DNA
gatatggcgcgtcgcgttgccgaggccgtcgaacgccaactggcagaactgccgcgtgccgaaaccgcccgccag

SEQ ID NO: 205509 - DNA, 75 bp, synthetic construct
  source 1..75: mol_type = other DNA
aaaacgtcaggtgagccagcgtctggacggtgcggcgatcgatatgcccgcaggcccgtcggaagtgctggtgat

SEQ ID NO: 205510 - DNA, 75 bp, synthetic construct
  source 1..75: mol_type = other DNA
caggtaacgcctttgtcaccgaggcaaaacgtcaggtgagccagcgtctggacggtgcggcgatcgatatgcccg

SEQ ID NO: 205511 - DNA, 75 bp, synthetic construct
  source 1..75: mol_type = other DNA
ttcttgagcgtatccgtaagctgaccccgcagcatgtaatcgcgccgtaccggacagtggacgagtggcgcgagt

SEQ ID NO: 205512 - DNA, 75 bp, synthetic construct
  source 1..75: mol_type = other DNA
catcagacgcgggttgaaaaaatcattaaccgctccggtatccagccgcttcaccggaagtgtacgttctgtaac

SEQ ID NO: 205513 - DNA, 75 bp, synthetic construct
  source 1..75: mol_type = other DNA
ggcaacttgctgaaggacgaaaacgcagcgaggagattaaccgcctgaatcatcaggtgtgggttgaaaaaatcc

SEQ ID NO: 205514 - DNA, 75 bp, synthetic construct
  source 1..75: mol_type = other DNA
gattatggaccgcatgaccatgaacggtggtcgatgggtgacgtttaactgggatagctggtgtccaaatgtcag

SEQ ID NO: 205515 - DNA, 75 bp, synthetic construct
  source 1..75: mol_type = other DNA
cgatgaattgatgaccggatgtacaaacttcgtgttcagcggtaaacctggtaccggtaaaaatcacctggcagc

SEQ ID NO: 205516 - DNA, 75 bp, synthetic construct
  source 1..75: mol_type = other DNA
tgcacaaatttcgtgttcagcggtaagccgggtaccggaaagaatcacctggcggcagccatcggcaaccatctt

SEQ ID NO: 205517 - DNA, 75 bp, synthetic construct
  source 1..75: mol_type = other DNA
cgtcagttgcgggtggaaaaaatcctgaatcgctccggcatccagccgttgcaccgcaaatgctcgtttgcgaat

SEQ ID NO: 205518 - DNA, 75 bp, synthetic construct
  source 1..75: mol_type = other DNA
taccaggtgcagaacgacggtcagcgatacgcgttgaaccaagcgaaatctatcgctgatgaactgatgaccggg

SEQ ID NO: 205519 - DNA, 75 bp, synthetic construct
  source 1..75: mol_type = other DNA
aacggcggacgatgggtgaattttaactgggaaagctggcgcccgaatgtcgtccagccaggaatcacgaagtaa

SEQ ID NO: 205520 - DNA, 75 bp, synthetic construct
  source 1..75: mol_type = other DNA
ttcttgaacgcatccgtaagctggccccgcagcatgtaaccgcgccgtaccggacagtggacgagtggagagagt

SEQ ID NO: 205521 - DNA, 75 bp, synthetic construct
  source 1..75: mol_type = other DNA
tcgtcaccgtgtccgatgtcatgagtgtgttgcatgacggctacgacaacggcaagtctggtgagaaatttttac

SEQ ID NO: 205522 - DNA, 75 bp, synthetic construct
  source 1..75: mol_type = other DNA
gcaccgcaaatgctcgtttgcgaattacctggtgcagaacgacggccagcgatacgcgttgagccaggcgaaatc

SEQ ID NO: 205523 - DNA, 75 bp, synthetic construct
  source 1..75: mol_type = other DNA
gtattgtcctttgccattgtcgcaggatgtgcagtctgaactgttcccggaggtgaggcacgcccgtggagagcg

SEQ ID NO: 205524 - DNA, 75 bp, synthetic construct
  source 1..75: mol_type = other DNA
cgaaattactgcgtttccttaatgatggtactttccgtcgagttggtgaagatcatgaagtgcatgtcgatgtaa

SEQ ID NO: 205525 - DNA, 75 bp, synthetic construct
  source 1..75: mol_type = other DNA
actcgatctactcgtgctaagaggcattgatttacgcggtattgagattgaccccattgggcgaatctacctcaa

SEQ ID NO: 205526 - DNA, 75 bp, synthetic construct
  source 1..75: mol_type = other DNA
gtgggatcacctttgggcgcagcgcaacatgttcaatgatcaggacggcgctcttattgccgcaaatatggcaaa

SEQ ID NO: 205527 - DNA, 75 bp, synthetic construct
  source 1..75: mol_type = other DNA
aatgggtgtgattagtgatgactttctatcacttctggccgattctggaagcattgataattacgccaaaagaag

SEQ ID NO: 205528 - DNA, 75 bp, synthetic construct
  source 1..75: mol_type = other DNA
ttttgatagataactactgccggagttataacaaagcaaacaaaaaggaaattttctccagctggtattacatac

SEQ ID NO: 205529 - DNA, 75 bp, synthetic construct
  source 1..75: mol_type = other DNA
atttaatagataactattgcaggggttataacaaggaaaacaaaaaaagaatttattcttgctggtattacatac

SEQ ID NO: 205530 - DNA, 75 bp, synthetic construct
  source 1..75: mol_type = other DNA
gtctggtgtttgacatcaatgacaactggtcgacctacgccagctatacctctattttccagccgcaaaatgatc

SEQ ID NO: 205531 - DNA, 75 bp, synthetic construct
  source 1..75: mol_type = other DNA
ggaagatgccgttgagagcgaactgtttggacatgccccggaagggaagaaagggttctttgagcaggcgaacgg

SEQ ID NO: 205532 - DNA, 75 bp, synthetic construct
  source 1..75: mol_type = other DNA
cgacgattcgtatggggcgtcagttgcaaaatgtggctgcgcaggatgtcagcgcctttagtcagattgtcgccg

SEQ ID NO: 205533 - DNA, 75 bp, synthetic construct
  source 1..75: mol_type = other DNA
gccgaccgataactacaacttccgcattatgtcggctgaaggtttacaaatcacttccgacatgctgggccgttc

SEQ ID NO: 205534 - DNA, 75 bp, synthetic construct
  source 1..75: mol_type = other DNA
aacctggcccgcccgcacatcgttaacggtgctgtagttggcagcgtgctcaatacggttatgccgttcgccccg

SEQ ID NO: 205535 - DNA, 75 bp, synthetic construct
  source 1..75: mol_type = other DNA
acgcaccacggttaaaatgttcaccagctatcggttgcctgtcatgccagagttgacagtcggcggtggtgttaa

SEQ ID NO: 205536 - DNA, 75 bp, synthetic construct
  source 1..75: mol_type = other DNA
gtattcagccggataaggcgcagttaaaccagcttacgctgtccattaaagccattatcgctgcgaatgcctttt

SEQ ID NO: 205537 - DNA, 75 bp, synthetic construct
  source 1..75: mol_type = other DNA
aggctggcaaatgcccacacaattaatggtgttccctttgacgggacgcaagatatcactatctcatcaggaaca

SEQ ID NO: 205538 - DNA, 75 bp, synthetic construct
  source 1..75: mol_type = other DNA
cccggaaaaataacctgaaagaaattgctgatgccggaacgaaagcacaacagcttgcccgtggttatcttggtc

SEQ ID NO: 205539 - DNA, 75 bp, synthetic construct
  source 1..75: mol_type = other DNA
atcaggtggagagggatgtatcagcggttactgaaggttgacccgctgaagtgcatcctgtgcggaggtcagatg

SEQ ID NO: 205540 - DNA, 75 bp, synthetic construct
  source 1..75: mol_type = other DNA
gcctgcacaaaattccaccgttgccaggcttttgcttgaatgttccgtcaagggatcacgggtaggagccacctt

SEQ ID NO: 205541 - DNA, 75 bp, synthetic construct
  source 1..75: mol_type = other DNA
gtaaccgccataagactggggtcggtgaccgcacatatgcccggaacatgggaaagctgggatctgaatctgggg

SEQ ID NO: 205542 - DNA, 75 bp, synthetic construct
  source 1..75: mol_type = other DNA
gggtgaagtggataacagtggcgattttgcttattttcgcccactacagatatacataaatggctcatggattac

SEQ ID NO: 205543 - DNA, 75 bp, synthetic construct
  source 1..75: mol_type = other DNA
aggctggcaaatgcccacacaattaatggtgttccctttgacggaacccaggatatcactatctcatcaggaaca

SEQ ID NO: 205544 - DNA, 75 bp, synthetic construct
  source 1..75: mol_type = other DNA
aacctcggtttacgggaaacggtaaataaggctgctgatgccctgccatcgggtggaaccgccgtggcggcaagc

SEQ ID NO: 205545 - DNA, 75 bp, synthetic construct
  source 1..75: mol_type = other DNA
ggatataaatatttcatcgggaataacgcagtctgtggctgattcacgttatgttcaaagcattcgaagaggttc

SEQ ID NO: 205546 - DNA, 75 bp, synthetic construct
  source 1..75: mol_type = other DNA
gcatatcgccaaaatgatcgctgaagggaaagtggcgtttggcctttccgttgagcacgtcgaacacgcgattcc

SEQ ID NO: 205547 - DNA, 75 bp, synthetic construct
  source 1..75: mol_type = other DNA
gccaaaatgatcgctgaaggaaaagtggcgtttggcctttccgttgagcacgtcgaacacgcgattccgatgctg

SEQ ID NO: 205548 - DNA, 75 bp, synthetic construct
  source 1..75: mol_type = other DNA
cacgaaaaaggatatctgtggccacggctttcgggcgatggcatgcagtgcgctgatggaatcgggtttatgggc

SEQ ID NO: 205549 - DNA, 75 bp, synthetic construct
  source 1..75: mol_type = other DNA
tattgcgattggcggttttagcattgcggtgctgctggtgattttacgcctgaccttcggaccacaatgggcggc

SEQ ID NO: 205550 - DNA, 75 bp, synthetic construct
  source 1..75: mol_type = other DNA
gagtgcagggccatcaaggcgaagtatcagcagaaacttaaagacctgcgaaacagcagaagtgaggccgcatga

SEQ ID NO: 205551 - DNA, 75 bp, synthetic construct
  source 1..75: mol_type = other DNA
aactcagatttgatgaacgcaatatccacaagcaatgcgtggtgtgtaaccagtacaaaagcggaaatctcgttc

SEQ ID NO: 205552 - DNA, 75 bp, synthetic construct
  source 1..75: mol_type = other DNA
atagcactcgaacgacgaagtaaagaacgcgaaaaagcggaaaaggcagaaaaggcagcagagaagaaacgacga

SEQ ID NO: 205553 - DNA, 75 bp, synthetic construct
  source 1..75: mol_type = other DNA
aaatcccccacctggtggaaaaagccgatgaaggttacgacgtggtagggactgtgcgccagaatcgccaggaca

SEQ ID NO: 205554 - DNA, 75 bp, synthetic construct
  source 1..75: mol_type = other DNA
gctggtttcgtaaatccgcctcgaagatgattaaccggttgatccagcgcaccaccggcaaagcgatgggcgact

SEQ ID NO: 205555 - DNA, 75 bp, synthetic construct
  source 1..75: mol_type = other DNA
gaatgatgaaaatcctccgggatgggaaaataaatatatatgaatatattaataaagaacagttagaaaaattaa

SEQ ID NO: 205556 - DNA, 75 bp, synthetic construct
  source 1..75: mol_type = other DNA
tattttggtgattctgaaaagataaagtatgcatgctccgtgataaatcatattgattttagccgcgatcaatct

SEQ ID NO: 205557 - DNA, 75 bp, synthetic construct
  source 1..75: mol_type = other DNA
atgattttgcccgaattgccggagggcagaatagcagaagcaatattctttttcccagagcatttttggagtttt

SEQ ID NO: 205558 - DNA, 75 bp, synthetic construct
  source 1..75: mol_type = other DNA
gtcgaagaatgcagggcgatcaaggcgaagtatcagcagaaacttaaagacctgcgaaacagcagaagtgaggcc

SEQ ID NO: 205559 - DNA, 75 bp, synthetic construct
  source 1..75: mol_type = other DNA
ggtgaaaaacaccaaccgaaagatagaagctcaattacgaaaggagcagcgtcagttggtggcgatgactaacca

SEQ ID NO: 205560 - DNA, 75 bp, synthetic construct
  source 1..75: mol_type = other DNA
aatgaaaaacagttagaaaaattaaatcctccggaaaatttacgaacagtaatagaaaaatgggggtggaaggat

SEQ ID NO: 205561 - DNA, 75 bp, synthetic construct
  source 1..75: mol_type = other DNA
actgcagcacaaagcgatggaacgtgcgacccgtctgctgatcgacatctgcggtggtgaggctggtccggtaat

SEQ ID NO: 205562 - DNA, 75 bp, synthetic construct
  source 1..75: mol_type = other DNA
tatcaccggtcgtgctcgtcgtcatggcctgcatactgatgcgtctcaccgttatgagcgtggcgttgatccggc

SEQ ID NO: 205563 - DNA, 75 bp, synthetic construct
  source 1..75: mol_type = other DNA
acgaggattaccaaacggtaatggcatacaaagtttctgaagtcatcgctgcaatccgcgtcgctggcattcgca

SEQ ID NO: 205564 - DNA, 75 bp, synthetic construct
  source 1..75: mol_type = other DNA
tccgaaagttcagcagatgatccacccgggtgcagaagcgttactgctgccaagtccgatctcggttgaaatgtc

SEQ ID NO: 205565 - DNA, 75 bp, synthetic construct
  source 1..75: mol_type = other DNA
aagtcgcgcgtgtttacggctacaacaacatcccggatgagccggtacaggcaagcctgattatgggtactcacc

SEQ ID NO: 205566 - DNA, 75 bp, synthetic construct
  source 1..75: mol_type = other DNA
gcgaatgggtgaacccggcgattgatagcgacgcgctggcaaatcaaatcactatggcgggcctggaagttgacg

SEQ ID NO: 205567 - DNA, 75 bp, synthetic construct
  source 1..75: mol_type = other DNA
gacttccgcttattttgcgaaggcggagttcgaccgcctctggaaaatattgcccagtcaacgtattaccactgt

SEQ ID NO: 205568 - DNA, 75 bp, synthetic construct
  source 1..75: mol_type = other DNA
ataaaaaaagtaatggcgaaataacacttgcgctctatcccagctcccaattgggatcaaaacaggatgtcaccg

SEQ ID NO: 205569 - DNA, 75 bp, synthetic construct
  source 1..75: mol_type = other DNA
aaggacggcagattgaagtagaagcaactggcccacaggaagttgaggctctggccgccgttatcgccctcttta

SEQ ID NO: 205570 - DNA, 75 bp, synthetic construct
  source 1..75: mol_type = other DNA
gcgctggaagccgcaaaatcaaaactcaacgagcagcgtgaatattacgagggagtaatcgcggatggaagtaag

SEQ ID NO: 205571 - DNA, 75 bp, synthetic construct
  source 1..75: mol_type = other DNA
gatccagcgccagattgccgaaaacatcgcctttgatgaacggttacaagccgcccgtaacttgattgatgagtg

SEQ ID NO: 205572 - DNA, 75 bp, synthetic construct
  source 1..75: mol_type = other DNA
tggcttttgccatcgctgcggcaatcgctgtaaacgtcgttttgttcggcggtttgttccttcgcgtcaatccat

SEQ ID NO: 205573 - DNA, 75 bp, synthetic construct
  source 1..75: mol_type = other DNA
tggagtggagcaagctcgcagaccgcgtggtgcctcaagcgcgcgagatttctcgcttcccggcgaaccgtcgcg

SEQ ID NO: 205574 - DNA, 75 bp, synthetic construct
  source 1..75: mol_type = other DNA
atgttgattacgccgccgccgaaaatgggaacgacgtctacagcacagccaccgcaaattcagccggtacagcag

SEQ ID NO: 205575 - DNA, 75 bp, synthetic construct
  source 1..75: mol_type = other DNA
ccgggcgtcgaagcattgttgctgccaagtccgatctcggttgaaatgtcggcaatgcgtctttctttgtggact

SEQ ID NO: 205576 - DNA, 75 bp, synthetic construct
  source 1..75: mol_type = other DNA
ttatgggcactcatcgcgaagctgacctttcgctcaagcgcgtgaaaaccctgcttaacgacaaaggttatcagg

SEQ ID NO: 205577 - DNA, 75 bp, synthetic construct
  source 1..75: mol_type = other DNA
aacgtcggtttacgggaaacggtgaataaggcggcgaatgctctgccatcggacggcaccgccgttgccgcgaat

SEQ ID NO: 205578 - DNA, 75 bp, synthetic construct
  source 1..75: mol_type = other DNA
agcgaaggtgataaccgttacctgcgcagggaacagaacggcgcggacatcccggataaaggggcttttatcgat

SEQ ID NO: 205579 - DNA, 75 bp, synthetic construct
  source 1..75: mol_type = other DNA
ggacggcaccgccgttgccgcgaacaggctggcaaatgcccacacaattaatggtgttccctttgacgggacgca

SEQ ID NO: 205580 - DNA, 75 bp, synthetic construct
  source 1..75: mol_type = other DNA
ttatgggcactcaccgtgaagctgacttgtcactcaagcgcgtgaaaacgctgctcaacgacaaaggctatcagg

SEQ ID NO: 205581 - DNA, 75 bp, synthetic construct
  source 1..75: mol_type = other DNA
gaggggtataagagcctcgccataagcctgatcctgcaagatacctgccgtacactcgaagaagaggagattgcc

SEQ ID NO: 205582 - DNA, 75 bp, synthetic construct
  source 1..75: mol_type = other DNA
aactgcgtggcgaaccatctgaagggatgctgtgctccttctctgagctgggtatttctgacgatcacaacggca

SEQ ID NO: 205583 - DNA, 75 bp, synthetic construct
  source 1..75: mol_type = other DNA
agcgaccattggtgcggtgctgccgggcgattttaaaattaaagcggcaaaattgcgtggtgagccatctgaagg

SEQ ID NO: 205584 - DNA, 75 bp, synthetic construct
  source 1..75: mol_type = other DNA
atgctgacactctggtcatcgccgaccacaacaaggcgctggcgatgggcggcatctttggtggcgaacactctg

SEQ ID NO: 205585 - DNA, 75 bp, synthetic construct
  source 1..75: mol_type = other DNA
tgggcattcgtcaggatctgatgttagctggtgttatttgcggtaaccgttacgaagagcactggaacctggcaa

SEQ ID NO: 205586 - DNA, 75 bp, synthetic construct
  source 1..75: mol_type = other DNA
cccgtcaatatagcctggacaatcttttacctgcggattattacccttgttttaccgttagcaattttactttcc

SEQ ID NO: 205587 - DNA, 75 bp, synthetic construct
  source 1..75: mol_type = other DNA
atcaatcaaaaattaatacaggagataaaagagcgcagtcaggctgaacaagtattacaaattacgcgtagtgaa

SEQ ID NO: 205588 - DNA, 75 bp, synthetic construct
  source 1..75: mol_type = other DNA
caactcaaaaccgcagcaatatttattctggataaccaaggtaaggccatcgcttctagcaactggcaggacccc

SEQ ID NO: 205589 - DNA, 75 bp, synthetic construct
  source 1..75: mol_type = other DNA
ggcgtggaagtggacaccaacgtggcggcgagtgatttctttggcagcaatttagacgtgctcaacaccctgaat

SEQ ID NO: 205590 - DNA, 75 bp, synthetic construct
  source 1..75: mol_type = other DNA
cggcgagcgatttcttcggcagtaatttagacgtgctcaacacgctcaattccctgtcgcaggagctgcaaaacc

SEQ ID NO: 205591 - DNA, 75 bp, synthetic construct
  source 1..75: mol_type = other DNA
accctgtcgcaggagttgcaagacccaaacgttgacccggccgatccgcaggtgcagagcgatattcagaacgcc

SEQ ID NO: 205592 - DNA, 75 bp, synthetic construct
  source 1..75: mol_type = other DNA
tcgttccgccaatgcggcataccgtgccggtatggcgatggcactccagctggcacaggtgcgttatgcctggtg

SEQ ID NO: 205593 - DNA, 75 bp, synthetic construct
  source 1..75: mol_type = other DNA
ttgaagtattcctcctctgccaaaggtgggctggcggttgccgcaatgggattggtgccttctatcaccctggaa

SEQ ID NO: 205594 - DNA, 75 bp, synthetic construct
  source 1..75: mol_type = other DNA
gcctgacaacgtttggtgatccgattattgaagacgtcttccgtgatctcaaaccagcccatacattttgctact

SEQ ID NO: 205595 - DNA, 75 bp, synthetic construct
  source 1..75: mol_type = other DNA
taccgacatgaattcactcgctaccgtcatcacaaatcattttctccttggtatgaggctcgttgctgggggcgt

SEQ ID NO: 205596 - DNA, 75 bp, synthetic construct
  source 1..75: mol_type = other DNA
cgcatggaagtggcccaggtcaatttgccggtgggcctgctgatttgggtaatgatcgtcccgatgctggtcaag

SEQ ID NO: 205597 - DNA, 75 bp, synthetic construct
  source 1..75: mol_type = other DNA
aaagaataccgctttcattcgttgatgacctcgctggacagcaggacattttgttccgcaaaagcggcataccgt

SEQ ID NO: 205598 - DNA, 75 bp, synthetic construct
  source 1..75: mol_type = other DNA
ttgcagccgtcggatgacccgatcgccgccacgcgcatcacccagttaaaccgccagcagtcggcgattgaacag

SEQ ID NO: 205599 - DNA, 75 bp, synthetic construct
  source 1..75: mol_type = other DNA
aattacgagagcaagcttttaggtgatggcaaattgagcgaatccatcaggtcaaaatgcgccgctccatcaggt

SEQ ID NO: 205600 - DNA, 75 bp, synthetic construct
  source 1..75: mol_type = other DNA
tacaacacaacggaacaatggctggaacagtttccattctggtcagagtcaacgttaaagcgcgcgtttgcaagt

SEQ ID NO: 205601 - DNA, 75 bp, synthetic construct
  source 1..75: mol_type = other DNA
ggttgagagataccagttccggcatggaatgtgatggtgttcgctggatttataacacaacggaacaatggctgg

SEQ ID NO: 205602 - DNA, 75 bp, synthetic construct
  source 1..75: mol_type = other DNA
aattacgagagcgagcttttagatggtggcaaagtgagcgaatccatcagatcaaaatgcgctgctccatcaggt

SEQ ID NO: 205603 - DNA, 75 bp, synthetic construct
  source 1..75: mol_type = other DNA
cagcctggggcgcagtcttccgaacaaaccactttaccctccgggttacaaattggttcgggggtgcgtccggtc

SEQ ID NO: 205604 - DNA, 75 bp, synthetic construct
  source 1..75: mol_type = other DNA
atgcggatgctggatggcagaagtcacagacaaatttgtgaaatgtttggtcgggtacagcgggatccattctgg

SEQ ID NO: 205605 - DNA, 75 bp, synthetic construct
  source 1..75: mol_type = other DNA
ctggtgggctggcttccggcgcacacgccacgtctggcgcaggttgatcccccgcacaaccgacaatggaaacgc

SEQ ID NO: 205606 - DNA, 75 bp, synthetic construct
  source 1..75: mol_type = other DNA
gacaggtggtgttcttgagcgtatccgtaagctggtcccgcagcatgtaatcgcgccgtaccggacagttgacga

SEQ ID NO: 205607 - DNA, 75 bp, synthetic construct
  source 1..75: mol_type = other DNA
cgccagtggggcagccaggaagatttggcgtgtgcgcagtggatctgggggcgaatcgtgagtctttacgagcag

SEQ ID NO: 205608 - DNA, 75 bp, synthetic construct
  source 1..75: mol_type = other DNA
agcatatgtccagctacggtccagaggccaaacaggattacgcggtacgccttgaagggccgattgttgaagata

SEQ ID NO: 205609 - DNA, 75 bp, synthetic construct
  source 1..75: mol_type = other DNA
ggtgatcgacgcgcgtatcgcctttattggcgggctgaattactccgccgagcatatgtccagctacggcccaga

SEQ ID NO: 205610 - DNA, 75 bp, synthetic construct
  source 1..75: mol_type = other DNA
cgcggttgtgttcagtgcaaaaaaacgccagtggggcaaccaggaagatttggcgtgtgcgcagtggatctgggg

SEQ ID NO: 205611 - DNA, 75 bp, synthetic construct
  source 1..75: mol_type = other DNA
gactgctgctctgatgcgtccgtttcgtgcactgccggactggcgcattgacgacctgatgatctcgttttccgt

SEQ ID NO: 205612 - DNA, 75 bp, synthetic construct
  source 1..75: mol_type = other DNA
atggaataccaactcactcttaactggcccgattttcttgaacgtcactgggtggtgttaaaacgcggctttaat

SEQ ID NO: 205613 - DNA, 75 bp, synthetic construct
  source 1..75: mol_type = other DNA
agaagaggcgaattgcgttaaaaatgacgcaaaccgaactggcaaccaaagccggtgttaaacagcaatctggaa

SEQ ID NO: 205614 - DNA, 75 bp, synthetic construct
  source 1..75: mol_type = other DNA
gtggatcacttttcatccgtcgttgacagtaaagaacgcgaaaaagcggaaaaagcagcagagaagaaacgacga

SEQ ID NO: 205615 - DNA, 75 bp, synthetic construct
  source 1..75: mol_type = other DNA
gcgctggaagatccgtcattcctcgcgatgctcgcggcgctggtcaatagcgggtattggttcttcgaagggtaa

SEQ ID NO: 205616 - DNA, 75 bp, synthetic construct
  source 1..75: mol_type = other DNA
gactgcggagaattttggcgatgcgctggaagatccgtcattcctcgcaatgctcgcggcgctggtaaatagcgg

SEQ ID NO: 205617 - DNA, 75 bp, synthetic construct
  source 1..75: mol_type = other DNA
atattgcatggatcaccggcaacgattttcgcgatctcgcccaacgcaataatattcaggcgccatacgcgctga

SEQ ID NO: 205618 - DNA, 75 bp, synthetic construct
  source 1..75: mol_type = other DNA
gcctgcacaaaattccaccgttgctgttgcgtcgcaaccgacaattacgtattctgaatcttcgggtgaacagag

SEQ ID NO: 205619 - DNA, 75 bp, synthetic construct
  source 1..75: mol_type = other DNA
gaataaaaaagaaaactcagaaaagcaattcttcgatggttatcaagcaaaatcaatggaaagtttcaaattcaa

SEQ ID NO: 205620 - DNA, 75 bp, synthetic construct
  source 1..75: mol_type = other DNA
gattgggtggtaacttcaagcattgccgtcgaacttattgatcatcttgatagtttgggtgaaaaaatcatctgg

SEQ ID NO: 205621 - DNA, 75 bp, synthetic construct
  source 1..75: mol_type = other DNA
acagccagtagctcagcagccggtacagatggaaaacggacgcatcgtctataaccgtcagtatgggaacattcc

SEQ ID NO: 205622 - DNA, 75 bp, synthetic construct
  source 1..75: mol_type = other DNA
aacggacgcatcgtctacaaccgtcagtatgggaacattccgaaaggcagttatagcggcagtacctataccgtg

SEQ ID NO: 205623 - DNA, 75 bp, synthetic construct
  source 1..75: mol_type = other DNA
gccgaaagagattgttggcctctgcggcggcgtctttaacgtctttggcaatgttgcctccattgtcactccact

SEQ ID NO: 205624 - DNA, 75 bp, synthetic construct
  source 1..75: mol_type = other DNA
atgattgttaccatgtcccgccgtattgctgctgaactatataaagaaatcatagccttaaaacctgaatggcac

SEQ ID NO: 205625 - DNA, 75 bp, synthetic construct
  source 1..75: mol_type = other DNA
gtcgttatatgacgtggaaaaccactaatggtaaaacacaagccaccagtacccaaccacagcttgaggttttat

SEQ ID NO: 205626 - DNA, 75 bp, synthetic construct
  source 1..75: mol_type = other DNA
gacagaaggaatcaatatcgaagtcagcaaagatggtaatacacaaggagagctggccagcctgatggactttaa

SEQ ID NO: 205627 - DNA, 75 bp, synthetic construct
  source 1..75: mol_type = other DNA
tcattgcgatctgaatcaggtgtttttgagactctcgatgcgtctgcagggcttgttgaaggtggagttactcca

SEQ ID NO: 205628 - DNA, 75 bp, synthetic construct
  source 1..75: mol_type = other DNA
gcggcacggtggattacagcggtctggatgccggtattaaggggaaaatcagcaatatactggatgtaggattga

SEQ ID NO: 205629 - DNA, 75 bp, synthetic construct
  source 1..75: mol_type = other DNA
aacttagccagtggcgctatcaggggatggtagggcgaggcgagcgcatcatcggtgtaataaaagatgggcaaa

SEQ ID NO: 205630 - DNA, 75 bp, synthetic construct
  source 1..75: mol_type = other DNA
gaaaaattcaccacacgaaagacgcggactattatatttcctgctgccgatcatttttttgtcgataagcatttt

SEQ ID NO: 205631 - DNA, 75 bp, synthetic construct
  source 1..75: mol_type = other DNA
tacacgtccggtactcaacctggaaaacaacatagccgaacgcttggcctcaccagagctgggctctgacctcaa

SEQ ID NO: 205632 - DNA, 75 bp, synthetic construct
  source 1..75: mol_type = other DNA
cacgacatcgctaccaattgttatcgttggcagcggtggaatagagaaggaaatacgattaagagctaatcagct

SEQ ID NO: 205633 - DNA, 75 bp, synthetic construct
  source 1..75: mol_type = other DNA
aaatatggttatccacccgatatgtccttgctcgccacagagaccattttgaagcaggctgaacttttagctgga

SEQ ID NO: 205634 - DNA, 75 bp, synthetic construct
  source 1..75: mol_type = other DNA
taacttcttcctcttcgtcggcgctttccgctactacaaagggctgcacattctgctggatgccgccgagcgtag

SEQ ID NO: 205635 - DNA, 75 bp, synthetic construct
  source 1..75: mol_type = other DNA
gaaaaatccccccgcgtcagcgccagtgcttcattaatcgcgcaccggtgttccacagtgtggccagcagcatct

SEQ ID NO: 205636 - DNA, 75 bp, synthetic construct
  source 1..75: mol_type = other DNA
tatggttctggaaagtcaggacgaatatgactcacaatgggcgccaatttgttccattgctccaaagattggctg

SEQ ID NO: 205637 - DNA, 75 bp, synthetic construct
  source 1..75: mol_type = other DNA
gcttttaaatgaggagggatttaaccccgatgtaatcgaggctgcattggcgcataaaagtggtgataaaataag

SEQ ID NO: 205638 - DNA, 75 bp, synthetic construct
  source 1..75: mol_type = other DNA
gtgcctcatacctatcaaatagctcataatgcacttttattccagatattgacaatggtcaggccaggtgaggcg

SEQ ID NO: 205639 - DNA, 75 bp, synthetic construct
  source 1..75: mol_type = other DNA
tcgtaaaattgagatgtcactaaaaaatctacaaacatttgaagctgttgctaatgcatggatcgcttttaaaaa

SEQ ID NO: 205640 - DNA, 75 bp, synthetic construct
  source 1..75: mol_type = other DNA
tgcgtttcagtggatcgttgggaggatctctggaagatccatcagcgcagcctccctaatcaaaaccatcatgta

SEQ ID NO: 205641 - DNA, 75 bp, synthetic construct
  source 1..75: mol_type = other DNA
atgttggattttgtttttttggtgtttttggggttgggcatatctacggtgctggtgcgtcggtcttcccgtaag

SEQ ID NO: 205642 - DNA, 75 bp, synthetic construct
  source 1..75: mol_type = other DNA
tgaatttctgagttggtgggatagtgtgcctcataagtatcaaatagctcacaatgcgcttttattccagatatt

SEQ ID NO: 205643 - DNA, 75 bp, synthetic construct
  source 1..75: mol_type = other DNA
gtatacactatgaagtaataggttgtaaacgccctttctcctggcgaaaagcaattgttcgcgcaataaaacaca

SEQ ID NO: 205644 - DNA, 75 bp, synthetic construct
  source 1..75: mol_type = other DNA
agcagcaattagatgaagaaaagcaacgctctcagatgctggagaagcagctttacgattctatgattggcggta

SEQ ID NO: 205645 - DNA, 75 bp, synthetic construct
  source 1..75: mol_type = other DNA
atggctaatgaaaaaaagacatcccgcaaaaagtttcgcgtggctgtctccggtgtgacggcagacgggcgcgaa

SEQ ID NO: 205646 - DNA, 75 bp, synthetic construct
  source 1..75: mol_type = other DNA
aatgaaattatgaattacgctgtaaattgtggtgcattgaaaataaatccattgcttaaaataaagacagcattc

SEQ ID NO: 205647 - DNA, 75 bp, synthetic construct
  source 1..75: mol_type = other DNA
gaaaatatcactattcattttgatatgactaaatgtcatttctttgatgcagaaacggaaatagcaattcgctaa

SEQ ID NO: 205648 - DNA, 75 bp, synthetic construct
  source 1..75: mol_type = other DNA
tactttttctggaatcaaacaaaattttgaccaaattgcttccgaccataaaaaacaactagagatactaactaa

SEQ ID NO: 205649 - DNA, 75 bp, synthetic construct
  source 1..75: mol_type = other DNA
gcaggtgcatccggtacagttggcgctgcagcggtttcatcaggtatggcagcgattggttccactgttggtggt

SEQ ID NO: 205650 - DNA, 75 bp, synthetic construct
  source 1..75: mol_type = other DNA
gttgttccactgtcgccagacgcctggcaaatgttgagtgcgccgttgcgccagccgggcattgtggctttgcgg

SEQ ID NO: 205651 - DNA, 75 bp, synthetic construct
  source 1..75: mol_type = other DNA
ctcatcagttactgatgcgctgtcaggcgttgcttattcaactgctccataatggctggcgctatcaggaacaga

SEQ ID NO: 205652 - DNA, 75 bp, synthetic construct
  source 1..75: mol_type = other DNA
ttaaaaaaaattttttgattggcgcaattaatgaagtgatttttattcttcccccatttgtttttttatttatca

SEQ ID NO: 205653 - DNA, 75 bp, synthetic construct
  source 1..75: mol_type = other DNA
aatggaaaaaaataattgaacagcgtcgcgagtttgaaatgagaattaaatattcacctaacggtgaaactatta

SEQ ID NO: 205654 - DNA, 75 bp, synthetic construct
  source 1..75: mol_type = other DNA
tattccccctgcttcagcaacaaggattgaaccgccccgggtttcctggagagtgttttatctgtgaactcaggc

SEQ ID NO: 205655 - DNA, 75 bp, synthetic construct
  source 1..75: mol_type = other DNA
ctggatacgcatagtttgcgcagagtaataaccgaaccgtggaatctggtttccatgaaaaatccctattggacg

SEQ ID NO: 205656 - DNA, 75 bp, synthetic construct
  source 1..75: mol_type = other DNA
aaacggccagaaccggctccattggggtcatgatggcgcacagcaactatggcgctgcgctcaaaactaacggcg

SEQ ID NO: 205657 - DNA, 75 bp, synthetic construct
  source 1..75: mol_type = other DNA
gcggcgaaggggaagataatgtgctgacgttatcccttccggcatctgcctgttctccttttgccgttgaacgca

SEQ ID NO: 205658 - DNA, 75 bp, synthetic construct
  source 1..75: mol_type = other DNA
cgtcatgggggatgggaagaacgggatcaccattgatacgcaatctatacccgcagatatcagtggtatcgaaga

SEQ ID NO: 205659 - DNA, 75 bp, synthetic construct
  source 1..75: mol_type = other DNA
atggcgaacctgttttacaggtgcgtaatctggtcacccgtttccctttgcgtagtgggttgttgaatcgcgtaa

SEQ ID NO: 205660 - DNA, 75 bp, synthetic construct
  source 1..75: mol_type = other DNA
tgaacatccgactcaacaggaacgccctgtcgagcagaaaacggtggttgatggcgaacctgttttacaggtgcg

SEQ ID NO: 205661 - DNA, 75 bp, synthetic construct
  source 1..75: mol_type = other DNA
aaaccattctttcgcgttatccgcatcaactctccggtgggatgcgtcagcgggtgatgattgccatggcgctgt

SEQ ID NO: 205662 - DNA, 75 bp, synthetic construct
  source 1..75: mol_type = other DNA
tttcaatccatgcttagcgtggctacagaatccgccactgttatggcaagcgatggcgttactggcgagatggtt

SEQ ID NO: 205663 - DNA, 75 bp, synthetic construct
  source 1..75: mol_type = other DNA
atgaaagagcattatatcttacagttcccatttacgtcggcagcaggaaatactatcgactcgctgcaattacgt

SEQ ID NO: 205664 - DNA, 75 bp, synthetic construct
  source 1..75: mol_type = other DNA
atggcgaacctgttttacgggtgcgtaatcttgtcacccgtttccctttgcgcagcggtttgttgaatcgcgtaa

SEQ ID NO: 205665 - DNA, 75 bp, synthetic construct
  source 1..75: mol_type = other DNA
ccgtaaaagcatggtaattatcaccacgctgatcatcctgttcgcgctgttcgcctttaacccgctgcttggttc

SEQ ID NO: 205666 - DNA, 75 bp, synthetic construct
  source 1..75: mol_type = other DNA
aggcaatccgattctggtttttgccttcctgttactggggttaagcctgatggggctgaccttcgggccgatggg

SEQ ID NO: 205667 - DNA, 75 bp, synthetic construct
  source 1..75: mol_type = other DNA
cagcgccagaacgacgaaggcgttcagtggttcgcgcgtgtcatgaacctcatcagcggcagccgtaaaacggac

SEQ ID NO: 205668 - DNA, 75 bp, synthetic construct
  source 1..75: mol_type = other DNA
gtcgtgaggtgattgagcttagtgagcagagttcccggcaaatgcagcatatacgcggtgcggatatggcgatga

SEQ ID NO: 205669 - DNA, 75 bp, synthetic construct
  source 1..75: mol_type = other DNA
tttaccgaacttcagccgagactaagaggggagggcaaatatatgaaggtaaaaacaggtgtaaaaccagaagat

SEQ ID NO: 205670 - DNA, 75 bp, synthetic construct
  source 1..75: mol_type = other DNA
ggcagttattggttttggcgtgatggtgccagtcgccggattactggctgatgcctttggtcgccgtaaaagcat

SEQ ID NO: 205671 - DNA, 75 bp, synthetic construct
  source 1..75: mol_type = other DNA
ggcctgttcagcgcctttctgctgctgtgggtggtctgggtattgaatgacgcctaccggggcgtggcgaccgcg

SEQ ID NO: 205672 - DNA, 75 bp, synthetic construct
  source 1..75: mol_type = other DNA
ggcgatctcttcacgcggcgagaaattgttattcaaaatttcgaccggcatggtgctgaccaagctgctggtggg

SEQ ID NO: 205673 - DNA, 75 bp, synthetic construct
  source 1..75: mol_type = other DNA
ggatttcgccttgccgctgggtagatgcgaccacatttaccctgagcgtgtgcagcacgttttcaatccagacga

SEQ ID NO: 205674 - DNA, 75 bp, synthetic construct
  source 1..75: mol_type = other DNA
gaggcgaaggagcaggcggaagcaagtctcgcgaaattcgctggcatcagcgacccgaccaaggccctcgaagcc

SEQ ID NO: 205675 - DNA, 75 bp, synthetic construct
  source 1..75: mol_type = other DNA
gtgatgacgttcaacagtgtccagggtgaagcaccgcttatctccgaagccatcgagtctgaaatcatcgaaatg

SEQ ID NO: 205676 - DNA, 75 bp, synthetic construct
  source 1..75: mol_type = other DNA
tatggagtcagaacttatcgaactcaccgaacaacgtcaggaagaaggcacccagtggtttaaccgcgttatggg

SEQ ID NO: 205677 - DNA, 75 bp, synthetic construct
  source 1..75: mol_type = other DNA
atgtcaacaacacataacgtcccccagggcgatctggttttacgaactttagccatgcctgccgataccaatgcc

SEQ ID NO: 205678 - DNA, 75 bp, synthetic construct
  source 1..75: mol_type = other DNA
tcattgagcggagtcaaaagagcactagcattgagtctacaagagttacccgatgatactgtaagagagatttat

SEQ ID NO: 205679 - DNA, 75 bp, synthetic construct
  source 1..75: mol_type = other DNA
tgctgaaaaagaacatgtatcaatggagtggctaatctatggttataataatgagtcaatcacaaaaaaagaact

SEQ ID NO: 205680 - DNA, 75 bp, synthetic construct
  source 1..75: mol_type = other DNA
ggcgtcccggtgccgggctacaccaccgtcttccccttctataaccgggtgcagtacgccctgcccggcgagcgg

SEQ ID NO: 205681 - DNA, 75 bp, synthetic construct
  source 1..75: mol_type = other DNA
gatcccggctgagttcgtgcgttcgtacttcgggcagaacttcaaaatcgaagacggcaaggtcgtggccttcga

SEQ ID NO: 205682 - DNA, 75 bp, synthetic construct
  source 1..75: mol_type = other DNA
accaaagttttccaacagcagctggacgaagcgaacagcaagacccagcagctggaaactcaactctacgacgag

SEQ ID NO: 205683 - DNA, 75 bp, synthetic construct
  source 1..75: mol_type = other DNA
atctcgcgaaattctcgggcatcaccgacccggccaaggcgctcgaagccctggagatgatgaccaaaatcgacc

SEQ ID NO: 205684 - DNA, 75 bp, synthetic construct
  source 1..75: mol_type = other DNA
atgggatcgctttctgcgatgaaaggctctgtgaccagcctgattaaccagcctgccatgctggcctcctcgctg

SEQ ID NO: 205685 - DNA, 75 bp, synthetic construct
  source 1..75: mol_type = other DNA
accctataaaaacagccccgagttacaggaattgatttgggagaagttggttgtatatgtcaatgattttaattt

SEQ ID NO: 205686 - DNA, 75 bp, synthetic construct
  source 1..75: mol_type = other DNA
tgaacagcgtttaaataaactaaatccaccggaaaatttacgtatagcaatagaaaaatttgggtggaataataa

SEQ ID NO: 205687 - DNA, 75 bp, synthetic construct
  source 1..75: mol_type = other DNA
caacaattaagccaggcattatggctgggcggcatcagccagccgttactccactacgaggcagcattcagccgc

SEQ ID NO: 205688 - DNA, 75 bp, synthetic construct
  source 1..75: mol_type = other DNA
tagaactgacgccacaagccctgacggcgttaagcaatgctggttttgttaagcgcagtcttaaggaactggaaa

SEQ ID NO: 205689 - DNA, 75 bp, synthetic construct
  source 1..75: mol_type = other DNA
gctgagtgtatttcgctcggttgggacagcagccgtcagacgctggatgcgcaggtcattagcggcgaaggggaa

SEQ ID NO: 205690 - DNA, 75 bp, synthetic construct
  source 1..75: mol_type = other DNA
ttaaataactcgcaggtgagttgtaaaggttcagttgattctacgattacggatttattagaaaaaccattgaat

SEQ ID NO: 205691 - DNA, 75 bp, synthetic construct
  source 1..75: mol_type = other DNA
agttaaataattcgcaggagttaaataattcgcaggagttaaataatccacaggagctaaataatcctcaggagt

SEQ ID NO: 205692 - DNA, 75 bp, synthetic construct
  source 1..75: mol_type = other DNA
gttaagttgctatttaatgaagtgcctgtcagcattttagtaaatgacatttttttgaaggtttttttcatgaaa

SEQ ID NO: 205693 - DNA, 75 bp, synthetic construct
  source 1..75: mol_type = other DNA
tataaaaatagccctgaattacaggggttgatttggaataagttggttgtatatgtcaatgattttaacttaagc

SEQ ID NO: 205694 - DNA, 75 bp, synthetic construct
  source 1..75: mol_type = other DNA
tcatgtatgtgatgaatcgatttcatacttactgggcgaaaatggtatacttgaagaaatagataagctctacga

SEQ ID NO: 205695 - DNA, 75 bp, synthetic construct
  source 1..75: mol_type = other DNA
gataatctgctgacgttatcactgccagcctcagccagcgcgccttatgccgttgaacgcatggcggcgcttttg

SEQ ID NO: 205696 - DNA, 75 bp, synthetic construct
  source 1..75: mol_type = other DNA
cacctgccggagccagaaccccgcctgccctcttccgcaggcgactggtcgtatgtattccaggatgtgacgtgg

SEQ ID NO: 205697 - DNA, 75 bp, synthetic construct
  source 1..75: mol_type = other DNA
ggccgcaaaacacggcgcaaaacgcgtaactggggtctggctcaaaattggcgcattttcttgtgtcgaaaccag

SEQ ID NO: 205698 - DNA, 75 bp, synthetic construct
  source 1..75: mol_type = other DNA
tcctgtttcgtatacagaacaacttagcaatgagatagacttcgattttgctaagttttgttatgagtccctaaa

SEQ ID NO: 205699 - DNA, 75 bp, synthetic construct
  source 1..75: mol_type = other DNA
ttactgtcagtaccctttttttaccgtcaataatccaggcaaaacctatttcgataaaagttgcctatgaaaata

SEQ ID NO: 205700 - DNA, 75 bp, synthetic construct
  source 1..75: mol_type = other DNA
gaacggatcgatcaccaggaataccgacaaattctggcagaaacagagcaggaagctcatctgaaaaaattacga

SEQ ID NO: 205701 - DNA, 75 bp, synthetic construct
  source 1..75: mol_type = other DNA
atgagggcatcgataaatcaacctttcataaactcttaaagaagtatgacattaaagtaaagataaccgcagaag

SEQ ID NO: 205702 - DNA, 75 bp, synthetic construct
  source 1..75: mol_type = other DNA
cagcagcaacgcgtcggctatttagttttcaggcgggggccctggcaggtggacaaattgtttcacaagctgcac

SEQ ID NO: 205703 - DNA, 75 bp, synthetic construct
  source 1..75: mol_type = other DNA
tgccgccaccactcaacctacgaaaaaagaagaggaatgggatccgacaatctggctggaagaactggctaccct

SEQ ID NO: 205704 - DNA, 75 bp, synthetic construct
  source 1..75: mol_type = other DNA
tcactacgaggccgctttcagtcgcgcgcagcaggcggcggaacgctgcaactggcgatgggtgagtgaatcact

SEQ ID NO: 205705 - DNA, 75 bp, synthetic construct
  source 1..75: mol_type = other DNA
tcggacaactaccgtgtacggtatgtccccatcttctctgttaacgatcattttcaacaaacctgatatgaacgt

SEQ ID NO: 205706 - DNA, 75 bp, synthetic construct
  source 1..75: mol_type = other DNA
gaaaacttcgagcgggtggagaagctgtcgccggaagcatttgatgagagcgtggatgctattcgactggcggcg

SEQ ID NO: 205707 - DNA, 75 bp, synthetic construct
  source 1..75: mol_type = other DNA
ggacggcggcttttcaccagtatccttttcagacagtagcacagccacgcccccggtatttgaaagcgtgtccga

SEQ ID NO: 205708 - DNA, 75 bp, synthetic construct
  source 1..75: mol_type = other DNA
aatcccttctcgggcaaaacagttcttctacctcctcgtctacggatcagggattgggcaaacttttagtgccgg

SEQ ID NO: 205709 - DNA, 75 bp, synthetic construct
  source 1..75: mol_type = other DNA
tagaaagtgcaggaaaatctaccctgtttaatatcctgacggaaagtgctgccagtgatgagcgtaatttcaggg

SEQ ID NO: 205710 - DNA, 75 bp, synthetic construct
  source 1..75: mol_type = other DNA
ctacagaagttaaataatttacagaagttaaataatctacagaagttaaataatctacagaagttaaataatccg

SEQ ID NO: 205711 - DNA, 75 bp, synthetic construct
  source 1..75: mol_type = other DNA
ggattgggcaaacttttagtgccgggcgcattaggcgggctggcagggttgctggtcgcaaataaatcagcacgt

SEQ ID NO: 205712 - DNA, 75 bp, synthetic construct
  source 1..75: mol_type = other DNA
ctgaaaatcccccaggacgttcgtgaaggcattgaacgcgatctcgaacaacaaaaacgcactttggcggaataa

SEQ ID NO: 205713 - DNA, 75 bp, synthetic construct
  source 1..75: mol_type = other DNA
cgggtgtagaagagcagggccgtgttcttatcgagcaggcaatcgaacagccattggatcctcagcgtctggccc

SEQ ID NO: 205714 - DNA, 75 bp, synthetic construct
  source 1..75: mol_type = other DNA
ctatatcgtacctgggtggactgattatccagttacagagttgagagttggtgatagtctgagactctatcatgt

SEQ ID NO: 205715 - DNA, 75 bp, synthetic construct
  source 1..75: mol_type = other DNA
aaataaagatatttatccggtaatagaaaataataatggagaaaacagacttaatgtaattatactcgaaacaac

SEQ ID NO: 205716 - DNA, 75 bp, synthetic construct
  source 1..75: mol_type = other DNA
tgcttgctgcttccacaatggtgttaacagccccggctaaagcagccgatccatgtcagcaggtactgtgtcttt

SEQ ID NO: 205717 - DNA, 75 bp, synthetic construct
  source 1..75: mol_type = other DNA
gaagagtatgtccgtaaaatctatataaatgatgcagattttgctgtttattctttttggtcatctgttgttagt

SEQ ID NO: 205718 - DNA, 75 bp, synthetic construct
  source 1..75: mol_type = other DNA
ttttagctgcaagttctgttgctatgacagccccggctaaagccgcagatccatgcgaacaggtattatgcctgt

SEQ ID NO: 205719 - DNA, 75 bp, synthetic construct
  source 1..75: mol_type = other DNA
atgaaaattaatgatttttacttgccattgttacccgtcataggcactggtcgcctctatattacgtcagaaggg

SEQ ID NO: 205720 - DNA, 75 bp, synthetic construct
  source 1..75: mol_type = other DNA
ttggagtttttggcaaaaatatttaccctgggttatgtggattttagcaaacgctccaacgaagcgggtagaaat

SEQ ID NO: 205721 - DNA, 75 bp, synthetic construct
  source 1..75: mol_type = other DNA
caggatttaaatgattctcaggatttaaatgattctcaggagttaaataactcgcaggacttaaataattcgcag

SEQ ID NO: 205722 - DNA, 75 bp, synthetic construct
  source 1..75: mol_type = other DNA
ggtcgaacagctgtatcttaatgagttaggatatgtttatggtgatgaagaaaaaacaaaagaaattgtaaataa

SEQ ID NO: 205723 - DNA, 75 bp, synthetic construct
  source 1..75: mol_type = other DNA
taaaaattagaacaagaatgatgaaaatcctccagaatggcaaaattaatatatatgaatatattaataaagaac

SEQ ID NO: 205724 - DNA, 75 bp, synthetic construct
  source 1..75: mol_type = other DNA
tcatacttactgggcgaaaatggtatacttgaagaaatagataagctctacgcattaaatgatcacggaattgat

SEQ ID NO: 205725 - DNA, 75 bp, synthetic construct
  source 1..75: mol_type = other DNA
aagtatgagggcgaacagctgtatcttaatgagttaggatatgtttttggtgatgaggaaaaaacaaaagaaatt

SEQ ID NO: 205726 - DNA, 75 bp, synthetic construct
  source 1..75: mol_type = other DNA
caattttaaacaaaaaagtgaagttttaaatacctggcgtgttggaatgaatgattttgcccgtattgccggggg

SEQ ID NO: 205727 - DNA, 75 bp, synthetic construct
  source 1..75: mol_type = other DNA
aaattgtaaataaatttccgggttatgtcgttaagatttttgaagaaaagatcgataatgaattaaaaattagaa

SEQ ID NO: 205728 - DNA, 75 bp, synthetic construct
  source 1..75: mol_type = other DNA
ataattttgctcgtaatgccgaggggcaggataacacaagaaatatcctcgatcctaagacatttttggagtttt

SEQ ID NO: 205729 - DNA, 75 bp, synthetic construct
  source 1..75: mol_type = other DNA
cgtcattctgacggcatctgagcagggcttttcgacagacagcgttcagcttacgcaactgcgtctgctggttgt

SEQ ID NO: 205730 - DNA, 75 bp, synthetic construct
  source 1..75: mol_type = other DNA
aacagccggaactggcaacggctggcccgcaggaacggtatcagcaacccgttgtttgttcccggtggtgtcagt

SEQ ID NO: 205731 - DNA, 75 bp, synthetic construct
  source 1..75: mol_type = other DNA
agcggtagccggcgcacagtcaggtaagacgactgttgaaaacaatatgctgaatgtgatagccactgaaacagc

SEQ ID NO: 205732 - DNA, 75 bp, synthetic construct
  source 1..75: mol_type = other DNA
tctccgccaaaccgggcgtaccgaacgtttacgggctggtgggcggtgatgccaacgccgtcgggccgaacaaac

SEQ ID NO: 205733 - DNA, 75 bp, synthetic construct
  source 1..75: mol_type = other DNA
gatccacacgatccctcggtgatcgaggaagccctgaaacaaggtattccacaaaacgtgattgacgctgcccag

SEQ ID NO: 205734 - DNA, 75 bp, synthetic construct
  source 1..75: mol_type = other DNA
tgcgtatacccttcaatagccaataaagtcaaaaacctattcatcattcatatcgcaaatataatttttggaaac

SEQ ID NO: 205735 - DNA, 75 bp, synthetic construct
  source 1..75: mol_type = other DNA
acggcccggacgaattctataaaggcacgatagcggaacagattgcccaggagatgcagaaaaacggtggcttga

SEQ ID NO: 205736 - DNA, 75 bp, synthetic construct
  source 1..75: mol_type = other DNA
aatcactcacttcgcatctggcttccggcacgcccggtacggtagcaggtttctcgctggcgttggataaatacg

SEQ ID NO: 205737 - DNA, 75 bp, synthetic construct
  source 1..75: mol_type = other DNA
gagcgaagtgctgccgaatcacgaaaacagcaaggctatcttctggaaagagggcgagccgctgaaaaagggcga

SEQ ID NO: 205738 - DNA, 75 bp, synthetic construct
  source 1..75: mol_type = other DNA
atgatgaaatatctgtacgtaaacaacctggcatatccttacgaacttaagtctctttatgttgaaaaaggtgag

SEQ ID NO: 205739 - DNA, 75 bp, synthetic construct
  source 1..75: mol_type = other DNA
gtggctggattatctggacgcactggaaatggtcgatacttccagtgcgccagatattgaatggcctacacctcc

SEQ ID NO: 205740 - DNA, 75 bp, synthetic construct
  source 1..75: mol_type = other DNA
tccaccaacacgtgaagaacaaattgcatcagccgaaactaaaaagcagcaattgattaatcaggccaacgatta

SEQ ID NO: 205741 - DNA, 75 bp, synthetic construct
  source 1..75: mol_type = other DNA
agaccgttcaccacgacctgtgggatatggatcttccggcacagccgacgctggcggacatcaccgttaatggtc

SEQ ID NO: 205742 - DNA, 75 bp, synthetic construct
  source 1..75: mol_type = other DNA
cccgcgaaacgtctggcgtgatccgtggttttgatgtcaacaccggggagctgctgtgggcttttgatccgggcg

SEQ ID NO: 205743 - DNA, 75 bp, synthetic construct
  source 1..75: mol_type = other DNA
tcttatggtttgcctggaacagtatgcgccgacaatcaacaccacagatgagcgcgttacagcagccccttagtg

SEQ ID NO: 205744 - DNA, 75 bp, synthetic construct
  source 1..75: mol_type = other DNA
gaaagacggtaaaacctggctggttaccggaagcccaggcgggagtcggattatcaccaccgtgctgcaaatggt

SEQ ID NO: 205745 - DNA, 75 bp, synthetic construct
  source 1..75: mol_type = other DNA
ctgttctgcgctggcaggtcaggcaggacgccgggttctgctgatcgataatggtaaaaaaccagggcgcaaaat

SEQ ID NO: 205746 - DNA, 75 bp, synthetic construct
  source 1..75: mol_type = other DNA
ctgacagcaggtgatttcacaaaatatcgggaagccagattaaagggggaggtccaaaatgaagacggttcgttc

SEQ ID NO: 205747 - DNA, 75 bp, synthetic construct
  source 1..75: mol_type = other DNA
ctcaggtgggggtggatatcctcaaggagggcgggaatgccgttgatgctgccgtggcggtgggctacgcgctgg

SEQ ID NO: 205748 - DNA, 75 bp, synthetic construct
  source 1..75: mol_type = other DNA
gctggaattaattgaacatattccccaggggcataaagtcgcattgctggacattccggctaatggtgaaattat

SEQ ID NO: 205749 - DNA, 75 bp, synthetic construct
  source 1..75: mol_type = other DNA
tgcaaaaaatactggggcatagcgatataaaaatgactatgcgttatgcgcattttgctccaggtcatttagagg

SEQ ID NO: 205750 - DNA, 75 bp, synthetic construct
  source 1..75: mol_type = other DNA
gttttacgtgatattttagggcactcagatattaaaatgacgatgatttatgcacacttctctccagaccacctg

SEQ ID NO: 205751 - DNA, 75 bp, synthetic construct
  source 1..75: mol_type = other DNA
gatggtaaaacctggctggtcaccggaagcccaggcggtagccggattatcaccactgtgctgcaaatggtggtg

SEQ ID NO: 205752 - DNA, 75 bp, synthetic construct
  source 1..75: mol_type = other DNA
ggtatcaggtttactccatgccaccgccatcttccggtgggattcatatcgtgcagatcctcaatatcctggaaa

SEQ ID NO: 205753 - DNA, 75 bp, synthetic construct
  source 1..75: mol_type = other DNA
gcgatgggcagtacacaaagcattatggttgggccggacggtgagttgtatggggcatccgacccgcgctcggtg

SEQ ID NO: 205754 - DNA, 75 bp, synthetic construct
  source 1..75: mol_type = other DNA
ggcagtacacaaagcattatggttgggcctgacggtgagctgtacggtgcatctgacccgcgctcggtagatgat

SEQ ID NO: 205755 - DNA, 75 bp, synthetic construct
  source 1..75: mol_type = other DNA
caaaacctacggcagtgaagtgctaccaaatcacgaaaacagcaaagctatcttctggaaagagggcgaaccgct

SEQ ID NO: 205756 - DNA, 75 bp, synthetic construct
  source 1..75: mol_type = other DNA
gctgccgtggcggtgggatatgcgctggcggtaacgcatccgcaggcggggaatctggggggcggcggttttatg

SEQ ID NO: 205757 - DNA, 75 bp, synthetic construct
  source 1..75: mol_type = other DNA
acaacgtattgccacttggtcagagtttcccccacaacatcagtgcgaacgtgcttaatgctcgctacggctctc

SEQ ID NO: 205758 - DNA, 75 bp, synthetic construct
  source 1..75: mol_type = other DNA
gaaaacacgaacgggagctattaaatcaaatatgcattgtttcaatgctggcccgtttacgtctgatgcaaaaag

SEQ ID NO: 205759 - DNA, 75 bp, synthetic construct
  source 1..75: mol_type = other DNA
gagctattaaataaagtatgcattctttcaatgctggcccgtttacgtccgatacaaaaaggatgctggcaatga

SEQ ID NO: 205760 - DNA, 75 bp, synthetic construct
  source 1..75: mol_type = other DNA
gcaggcgttaaggaactgtaaatacgccgagtggcacaaggagtatagggatttgcgtttaaagcccaatacaac

SEQ ID NO: 205761 - DNA, 75 bp, synthetic construct
  source 1..75: mol_type = other DNA
taaactgctcccgcaatcccctgaagaagacgaaaaagcgtcccgttcacgcccgatacgcaaacccttaccggc

SEQ ID NO: 205762 - DNA, 75 bp, synthetic construct
  source 1..75: mol_type = other DNA
gaacacgaagaaaggcggtaaatcctgctccggttatctgtgggcatacgtcagtggagaaaggacgggaccgtc

SEQ ID NO: 205763 - DNA, 75 bp, synthetic construct
  source 1..75: mol_type = other DNA
caaagtcgctttctgctgccggacgtgaactgtttgacatttcgcgccagggtaaagccagcgtcaatgacgcgg

SEQ ID NO: 205764 - DNA, 75 bp, synthetic construct
  source 1..75: mol_type = other DNA
atgctgctgaaagccattgaagagaaaaccttttacccgtttggcagcgatcgccaggtgagcagtgattttcag

SEQ ID NO: 205765 - DNA, 75 bp, synthetic construct
  source 1..75: mol_type = other DNA
tgggcgcggagatggaaaacatcgatctctttgaccgcatacaactggaaaacgttatcgctgtctgccgtcagg

SEQ ID NO: 205766 - DNA, 75 bp, synthetic construct
  source 1..75: mol_type = other DNA
atggcacccggccacggctgaatctttctctggacgggcgttccttgacctacaacgaactggcgtttgggccgc

SEQ ID NO: 205767 - DNA, 75 bp, synthetic construct
  source 1..75: mol_type = other DNA
cgggcgcggcagtcagcgctggtcgaaatggcgtccgacgctttgtttatgccagcaagaatcgttggtcatcga

SEQ ID NO: 205768 - DNA, 75 bp, synthetic construct
  source 1..75: mol_type = other DNA
tgacatttcgcgccagggtaaagccagcgtcaatgacgcggatcggctacgcaaatacctggcgcgttttggtct

SEQ ID NO: 205769 - DNA, 75 bp, synthetic construct
  source 1..75: mol_type = other DNA
tacctgtgcgctgtacggctttcagtttcagggggttaggaaaatcagctactgcaaccgcattcttgcccggta

SEQ ID NO: 205770 - DNA, 75 bp, synthetic construct
  source 1..75: mol_type = other DNA
ggcattttgattatgcgcgccttgattgggctttcgttaagtggcgtggcagctgttggcatgacttatcttagc

SEQ ID NO: 205771 - DNA, 75 bp, synthetic construct
  source 1..75: mol_type = other DNA
tgttggcctccatttgtacattactttcgacaatgatgaccagctggcacggcattttgattatgcgcgccttga

SEQ ID NO: 205772 - DNA, 75 bp, synthetic construct
  source 1..75: mol_type = other DNA
gaggaaatccaccccagtttcgtggccttttcgatggggttgtatatcagcggcaactcaattggcggcatgagc

SEQ ID NO: 205773 - DNA, 75 bp, synthetic construct
  source 1..75: mol_type = other DNA
cccgaaggtaaaggcgtggatatagacgaagctattttcagggaatatttccatgatacgccgcctgacggtaag

SEQ ID NO: 205774 - DNA, 75 bp, synthetic construct
  source 1..75: mol_type = other DNA
gcggctattggtcgtctgaaaggtgaggaactggcgcaatataatttgtggctggattacctggacgcactggaa

SEQ ID NO: 205775 - DNA, 75 bp, synthetic construct
  source 1..75: mol_type = other DNA
ggcattttgattatgcgcgccttgattggcctgtcgttaagtggtgtagctgctgttggtatgacctaccttagc

SEQ ID NO: 205776 - DNA, 75 bp, synthetic construct
  source 1..75: mol_type = other DNA
tgccttcgttaatttacctgtattgtttgcgatagctatacctttgggattattaaaagagaaagatgataaagc

SEQ ID NO: 205777 - DNA, 75 bp, synthetic construct
  source 1..75: mol_type = other DNA
taaaccatctggtgacatcagttttccgatttaccccaatcggcggttcggcagtaattggtggtgaagaatatt

SEQ ID NO: 205778 - DNA, 75 bp, synthetic construct
  source 1..75: mol_type = other DNA
atggcgtgacatttcacgcccgagtcaaaaaaggcgaatgattgcaacgataatacctcctaactctttggcagg

SEQ ID NO: 205779 - DNA, 75 bp, synthetic construct
  source 1..75: mol_type = other DNA
acatcaaagagatatattacggaaagtagcaaaactcatttatcaggatcctgaattacaggattcagaaattgg

SEQ ID NO: 205780 - DNA, 75 bp, synthetic construct
  source 1..75: mol_type = other DNA
agcagggcaaactgatgattcagtatggtctggttggtgccgcgctggcgatgtatcgcactgctcatgctcaaa

SEQ ID NO: 205781 - DNA, 75 bp, synthetic construct
  source 1..75: mol_type = other DNA
gagagctaaatacggtcgccgaactttccatcgtgaccaacgccccggaaaatatgcagcgtcgcggggcaatgt

SEQ ID NO: 205782 - DNA, 75 bp, synthetic construct
  source 1..75: mol_type = other DNA
cgatgccttcgcagaacgcaacggctgcggttttacctttggcgacggttgccatggctcggacagcaaattcaa

SEQ ID NO: 205783 - DNA, 75 bp, synthetic construct
  source 1..75: mol_type = other DNA
tggctgggagaaaaggaagatcggagacaactgtcagaagtgattgagcaatggtattccctgtacggtcagaca

SEQ ID NO: 205784 - DNA, 75 bp, synthetic construct
  source 1..75: mol_type = other DNA
gctttcctcactgctgaagaaattgagcggcttttgctggaatgcaaacgaagcaaagtaaaatacttggagcta

SEQ ID NO: 205785 - DNA, 75 bp, synthetic construct
  source 1..75: mol_type = other DNA
atggcagtacgaaaattcaccacaggaaaatggctatgcgaatgttaccccgcgggacgtagtggacgtcgtgtg

SEQ ID NO: 205786 - DNA, 75 bp, synthetic construct
  source 1..75: mol_type = other DNA
agtgaaagcgaaggtggcgcgggcggtttcgatggcgctgaagaactggatccgttgttcgatcaggcggtgcag

SEQ ID NO: 205787 - DNA, 75 bp, synthetic construct
  source 1..75: mol_type = other DNA
atggcagtacgaaaactcaccacaggaaaatggctttgcgaatgttaccccgccggacgtagtgggcgtcgtgtg

SEQ ID NO: 205788 - DNA, 75 bp, synthetic construct
  source 1..75: mol_type = other DNA
gctattttcaatttttatccgtaatggaaaaaacgtctatcgttctccctcgcggtcaactgacacacgttctgc

SEQ ID NO: 205789 - DNA, 75 bp, synthetic construct
  source 1..75: mol_type = other DNA
tggctcggcaagaaagaagaccgccgacgcttaagcgagattattcagctttggcacaatttgcacggtcaagcg

SEQ ID NO: 205790 - DNA, 75 bp, synthetic construct
  source 1..75: mol_type = other DNA
ggaaatggttgtgtgagtgctaccctagcggacgcgatggcaagcgcgtgcgcaagcaatttgcgacgaaaggcg

SEQ ID NO: 205791 - DNA, 75 bp, synthetic construct
  source 1..75: mol_type = other DNA
attttcgcgccgtattcaatgaactgagccgcctgggtgaatggaaaggcgaaaatcctctaaaaaatatgcgcc

SEQ ID NO: 205792 - DNA, 75 bp, synthetic construct
  source 1..75: mol_type = other DNA
cgtaaacaattcgccaccaaaggcgaagcactggcttttgagcgccacacgatggaagaaaccgaagcaaagccc

SEQ ID NO: 205793 - DNA, 75 bp, synthetic construct
  source 1..75: mol_type = other DNA
gaacactgaaagacgtggttgagctatggttcaagctacatggtaaatctctaaccgctgggcggcatgtctgtg

SEQ ID NO: 205794 - DNA, 75 bp, synthetic construct
  source 1..75: mol_type = other DNA
tgcttaagcacaggcgcacgctggcgagaagcaataaaccttacccgatcacaggtgactaaataccgaattacc

SEQ ID NO: 205795 - DNA, 75 bp, synthetic construct
  source 1..75: mol_type = other DNA
caacgctttgcgctggtgcgtaaatgaaatggaacgtcgttataagctgatgtccgccctaggtgtgcgtaatct

SEQ ID NO: 205796 - DNA, 75 bp, synthetic construct
  source 1..75: mol_type = other DNA
aacgacaaaccgtttatctgcgcgaagtattggataacgccaaattccgcgataatccgtcgccattaaccgtgg

SEQ ID NO: 205797 - DNA, 75 bp, synthetic construct
  source 1..75: mol_type = other DNA
cagttgcgccacagccgcaggataccctgcttcatccgctgttgatgcgtaatggcgacagccgtccgttgcata

SEQ ID NO: 205798 - DNA, 75 bp, synthetic construct
  source 1..75: mol_type = other DNA
caaccggtagcaccgcagcagcaatatcagcagccgcaacaaccggttgcaccgcagccgcagtatcagcagccg

SEQ ID NO: 205799 - DNA, 75 bp, synthetic construct
  source 1..75: mol_type = other DNA
gacgccgctgccttctctggatttgctgacaccgccgccgagcgaagtggagccggtagatacctttgcgcttga

SEQ ID NO: 205800 - DNA, 75 bp, synthetic construct
  source 1..75: mol_type = other DNA
tatcgcctttaccgtatccagtaagattgactcacgtaccattcttgatcaggctggcgcggaatcactgctggg

SEQ ID NO: 205801 - DNA, 75 bp, synthetic construct
  source 1..75: mol_type = other DNA
gagaagcaatcaatcttacccgctcacaggtcaccaagtatcgaatcacctttgtgagaacgaaggggaagaaaa

SEQ ID NO: 205802 - DNA, 75 bp, synthetic construct
  source 1..75: mol_type = other DNA
tctgggcaatccccttgcaactgatctcacctctaaaatgtttgcccactatcgagataaacgcctgacaggtga

SEQ ID NO: 205803 - DNA, 75 bp, synthetic construct
  source 1..75: mol_type = other DNA
gatgtcgggtggaaacatcctggccttacaaaaaattctcgggcatcacgatataaaaatgacgatgcgttacgc

SEQ ID NO: 205804 - DNA, 75 bp, synthetic construct
  source 1..75: mol_type = other DNA
cagtatcagcagccacaacagccagttgcgccacaaccgcaggataccctgcttcatccgctgttgatgcgtaat

SEQ ID NO: 205805 - DNA, 75 bp, synthetic construct
  source 1..75: mol_type = other DNA
tggctgggtgaatccgtggatcgtcgaactctgaaagacgtggttgagctatggttcaaactacatggtaaatct

SEQ ID NO: 205806 - DNA, 75 bp, synthetic construct
  source 1..75: mol_type = other DNA
aaaggagcaagcccggtcactattaacctggagcaaagctatcttagtagtgtttttagcgaactatcccgcctg

SEQ ID NO: 205807 - DNA, 75 bp, synthetic construct
  source 1..75: mol_type = other DNA
atggcgcgtttcttgcggcgggcgccgcacagcgcctgtacgccaaaggcaagcaggttcggatggtgttaatcg

SEQ ID NO: 205808 - DNA, 75 bp, synthetic construct
  source 1..75: mol_type = other DNA
tgcgcgttgaagcccgtcatcctgctggcgagtggctgccgctatcgcccgccgcgcctcttcctgcgccgcaaa

SEQ ID NO: 205809 - DNA, 75 bp, synthetic construct
  source 1..75: mol_type = other DNA
acaggatctcgacgcccgcgaaggtgagttattcctcaccaccgctcagtggcaacaacagtgccgccacgccgg

SEQ ID NO: 205810 - DNA, 75 bp, synthetic construct
  source 1..75: mol_type = other DNA
tgccttgttcgacatcaaccagccgctggatttcaccgcccacccggaggcgggttacgacctgatcgttgccgt

SEQ ID NO: 205811 - DNA, 75 bp, synthetic construct
  source 1..75: mol_type = other DNA
tcatgccactggtttgtcggcgcggcgcgctaatgcagcagtgcgcaagcggcgcgctaatgcagcagtgcgcaa

SEQ ID NO: 205812 - DNA, 75 bp, synthetic construct
  source 1..75: mol_type = other DNA
tggaaacctgcatcgcccggcacgacgccctcttctccgggcagtgttctccgctggaattgctgttcaacgagc

SEQ ID NO: 205813 - DNA, 75 bp, synthetic construct
  source 1..75: mol_type = other DNA
gatgttctcggaagtcacagaagtgcgtgacgcgatccatctgctgacgccgcgcgcagtgaacgaagaggtcgg

SEQ ID NO: 205814 - DNA, 75 bp, synthetic construct
  source 1..75: mol_type = other DNA
tactggtgcgctgcggcgcaacggtgatgttctcagaagtaacggaagtgcgtgacgcgattcatctgctgacgc

SEQ ID NO: 205815 - DNA, 75 bp, synthetic construct
  source 1..75: mol_type = other DNA
caagcgtctgctggaagagatggaatggtacgataactacctcaatatggggaaaaccgaccgcagcgccaaccc

SEQ ID NO: 205816 - DNA, 75 bp, synthetic construct
  source 1..75: mol_type = other DNA
acctggaacaggcggtgatgcgcgtttttaccgacaaaatgcccccgttacaacaggctctgtttaacatcagcg

SEQ ID NO: 205817 - DNA, 75 bp, synthetic construct
  source 1..75: mol_type = other DNA
gcggttggatttgtgaactctacccaaacggcgcaaaaggcaaacgaatcagaaagaaattcgctactaagggcg

SEQ ID NO: 205818 - DNA, 75 bp, synthetic construct
  source 1..75: mol_type = other DNA
tcagaactggttgtcggcatgcagtgcggtggcagcgatgcgttttctggcgtaacggcaaacccggcggttggg

SEQ ID NO: 205819 - DNA, 75 bp, synthetic construct
  source 1..75: mol_type = other DNA
aactgttgctgaaagccggcggacgtttgctgatcgttgaagcgacggagcgaaacagcgtattccagctggcga

SEQ ID NO: 205820 - DNA, 75 bp, synthetic construct
  source 1..75: mol_type = other DNA
cctgaaggccagtgcacacacgtgttgcgccatacattcgccagtcacttcatgatgaatggcggaaacatattg

SEQ ID NO: 205821 - DNA, 75 bp, synthetic construct
  source 1..75: mol_type = other DNA
agaaaaaccgaaccgtaccgatatctcaggagctatatgaagaactccccaaaaacagagggaaactattcacgc

SEQ ID NO: 205822 - DNA, 75 bp, synthetic construct
  source 1..75: mol_type = other DNA
gtattgagggatattttagggcacgctgatattaaaatgaccatgatttatgcccattttgcaccggatcatctg

SEQ ID NO: 205823 - DNA, 75 bp, synthetic construct
  source 1..75: mol_type = other DNA
catggatgaagtaaacaaaaagccatggcttggtgagaaggaagatcgtcggcgcttgtcagaagtaattgagca

SEQ ID NO: 205824 - DNA, 75 bp, synthetic construct
  source 1..75: mol_type = other DNA
caatggacgcaatggtaagcgcgtgcgtaagcaatttgctacgaaaggcgaagccattgcttttgaaagcttcac

SEQ ID NO: 205825 - DNA, 75 bp, synthetic construct
  source 1..75: mol_type = other DNA
gcttggcgatcccatcgcttctgaattgacagcaggtgatttcacaaaataccgggaagccagattaaaaggtga

SEQ ID NO: 205826 - DNA, 75 bp, synthetic construct
  source 1..75: mol_type = other DNA
gaggacaacccgatacccctttgccagggcgacggtgaggaaaccctgtttgtcttccacgcttcagacggcgat

SEQ ID NO: 205827 - DNA, 75 bp, synthetic construct
  source 1..75: mol_type = other DNA
cagcctgagcgatgaaacagcggtgatggcatggctgaaaaagcggattgcggttcagctaaggctgagcgatcc

SEQ ID NO: 205828 - DNA, 75 bp, synthetic construct
  source 1..75: mol_type = other DNA
gacggaaagagagtggttaatccgcgaaagtgaaagctggcgctgccgcattccgctcagcgagattcctgagcc

SEQ ID NO: 205829 - DNA, 75 bp, synthetic construct
  source 1..75: mol_type = other DNA
cagcggcgatgcctgatgagcacgaacttacccaactggcgctggctggaggcgcgtgcgctacaggggatcgcg

SEQ ID NO: 205830 - DNA, 75 bp, synthetic construct
  source 1..75: mol_type = other DNA
aagtcatgatggacgacctggcgcaggtctggcgcggtgaaacgctggcgccgctcgctattaccttccgtgatt

SEQ ID NO: 205831 - DNA, 75 bp, synthetic construct
  source 1..75: mol_type = other DNA
atctgttcggcgaaccctgctatgtattcacgcaaacgccgcaggtctggctggatcatcaggtcatggagagcg

SEQ ID NO: 205832 - DNA, 75 bp, synthetic construct
  source 1..75: mol_type = other DNA
gccagcaagaatcgttagtcatcgatcgactggaattgttgcacgacgcccgctcgcgctcgctgtttgaaacgc

SEQ ID NO: 205833 - DNA, 75 bp, synthetic construct
  source 1..75: mol_type = other DNA
tggtacgataactatctcaatatgggaaaaaccgaccgcagcgccaacccttcgccgggcaacaagaaaggcggt

SEQ ID NO: 205834 - DNA, 75 bp, synthetic construct
  source 1..75: mol_type = other DNA
cagtcagccgccagcgctgtcagcggcgttgatgcactcgttgcccaacgtgcagctgttgaagcggatatcgcc

SEQ ID NO: 205835 - DNA, 75 bp, synthetic construct
  source 1..75: mol_type = other DNA
tgaggactacgtttcgtatgcccaggaacgccagcaggagcgcaacgaagaggttgccagttttgttaaaaaagg

SEQ ID NO: 205836 - DNA, 75 bp, synthetic construct
  source 1..75: mol_type = other DNA
tctcaatatgggaaaaaccgaccgcagcgccaacccttcgccgggcaacgacaacggcgggctcgcaaacgtggt

SEQ ID NO: 205837 - DNA, 75 bp, synthetic construct
  source 1..75: mol_type = other DNA
tctcaatatgggaaaaaccgaccgcagcgccaacccttcgccgggcaacgataatggcgggctcgcaaacgtggt

SEQ ID NO: 205838 - DNA, 75 bp, synthetic construct
  source 1..75: mol_type = other DNA
tctcaatatgggaaaaaccgaccgcagcgccaacccttcgccgggcaacgaaaaaggcgggctcgcaaacgtggt

SEQ ID NO: 205839 - DNA, 75 bp, synthetic construct
  source 1..75: mol_type = other DNA
acggtgcgcgatttgcgtcagctggttgccgaaggcaaattccgcgaagatctgtacgcgcggatcaatctctgg

SEQ ID NO: 205840 - DNA, 75 bp, synthetic construct
  source 1..75: mol_type = other DNA
acattccggctaatggtgaaattattcgttatggtgaagtgattggttacgccgtgcgtgcaatcccacgcggaa

SEQ ID NO: 205841 - DNA, 75 bp, synthetic construct
  source 1..75: mol_type = other DNA
gaaggaaatcattgaagcgtgtatgcgattaaagccagatcacatctttcttgctgaacttaggggtaacgaagc

SEQ ID NO: 205842 - DNA, 75 bp, synthetic construct
  source 1..75: mol_type = other DNA
cgtggcagactcattgatcagcatacggtcgatatgattagtaatactatacttgatgctttgagccgctcataa

SEQ ID NO: 205843 - DNA, 75 bp, synthetic construct
  source 1..75: mol_type = other DNA
gtgataacagatgtctggaaatataggggcaaatccactgctaatgctgcacgcgctgttaaagcaacaagagaa

SEQ ID NO: 205844 - DNA, 75 bp, synthetic construct
  source 1..75: mol_type = other DNA
acttcaaattaatcaacgatcgttttggtcataatagtggtgatttgttcctcattcaggttggcgagcgcctta

SEQ ID NO: 205845 - DNA, 75 bp, synthetic construct
  source 1..75: mol_type = other DNA
tctcaatatgggaaaaaccgaccgcagcgccaacccttcgccgggcaacgagaaaggcggactcgcaaacgtggt

SEQ ID NO: 205846 - DNA, 75 bp, synthetic construct
  source 1..75: mol_type = other DNA
caggccggacagatagccccggctctctctcttgatggctctggagagtcggaggtcaatcaggcttcagccaaa

SEQ ID NO: 205847 - DNA, 75 bp, synthetic construct
  source 1..75: mol_type = other DNA
caacaagtaccacccaatatggcattaacatcagtatctctgatactgacaatgtttattatgtctccgataata

SEQ ID NO: 205848 - DNA, 75 bp, synthetic construct
  source 1..75: mol_type = other DNA
aagtgcaattgttgaagtgctgtcgcccggtcaacgcccgactaaacgcggattaatttacgccgcgacgccagc

SEQ ID NO: 205849 - DNA, 75 bp, synthetic construct
  source 1..75: mol_type = other DNA
atgctgattaacagaaaaaaactgccggcccttgccgttctcttcagtcttgtcattctgccatccgtctgtccg

SEQ ID NO: 205850 - DNA, 75 bp, synthetic construct
  source 1..75: mol_type = other DNA
cgggattaacgaaagttagacatagaaatgaagttggggtaactcttgcatccctttccctttcagcaaaaagag

SEQ ID NO: 205851 - DNA, 75 bp, synthetic construct
  source 1..75: mol_type = other DNA
aagtcaggcatagaaatgaggttggcgttactctggcatctctttctctttctgcgaaacgggttttatttctcg

SEQ ID NO: 205852 - DNA, 75 bp, synthetic construct
  source 1..75: mol_type = other DNA
gcaattgttgaagtgctgtcgcccggtcaactcccgactaaacgcgaattaatttacgccgcgacgccagccagc

SEQ ID NO: 205853 - DNA, 75 bp, synthetic construct
  source 1..75: mol_type = other DNA
tctcaatatgggaaaaaccgaccgcagcgccaacccttcgccgggcaacgagaagggcgggctcgcaaacgtggt

SEQ ID NO: 205854 - DNA, 75 bp, synthetic construct
  source 1..75: mol_type = other DNA
tctcaatatgggaaaaaccgaccgcagcgccaacccttcgccgggcaacgagaacggcggcctcgcaaacgtggt

SEQ ID NO: 205855 - DNA, 75 bp, synthetic construct
  source 1..75: mol_type = other DNA
gcaattgttgaagtgctgtcgcccggtcaacgcccgactaaacgcgcattaatttacgccgcgacgccagccagt

SEQ ID NO: 205856 - DNA, 75 bp, synthetic construct
  source 1..75: mol_type = other DNA
gcaattgttgaagtgctgtcgcccggtcaacgcccgactaaacgcgtattaatttacgccgcgacgccagccagc

SEQ ID NO: 205857 - DNA, 75 bp, synthetic construct
  source 1..75: mol_type = other DNA
gcaattgttgaagtgctgtcgcccggtcaactcccgactaaacgcgcattaatttacgccgcgacgccagccaga

SEQ ID NO: 205858 - DNA, 75 bp, synthetic construct
  source 1..75: mol_type = other DNA
tcgtgtcagtctgccgttatcggttttcgatcccctggactaccatccactgctgattaccgtttccggaaaaaa

SEQ ID NO: 205859 - DNA, 75 bp, synthetic construct
  source 1..75: mol_type = other DNA
aagtaacggccatcgtgtcagtctgccgttatcggttttcgatccccaggactaccatccactgctaattaccgt

SEQ ID NO: 205860 - DNA, 75 bp, synthetic construct
  source 1..75: mol_type = other DNA
atgtctggaaatataggggcaaatccagttatcatcattggttgtgcgtcagcttatgccgttgaattcaacaaa

SEQ ID NO: 205861 - DNA, 75 bp, synthetic construct
  source 1..75: mol_type = other DNA
gcgaggcggaaatctataacgaaaacgccagcaaagccggtggctgggaaggtactcgcgatttccgcattgtgg

SEQ ID NO: 205862 - DNA, 75 bp, synthetic construct
  source 1..75: mol_type = other DNA
cgctccggcaggtgatttctttatggctgtcgcagatgacacaccagtgacgttaatctctgccggtgtcggtca

SEQ ID NO: 205863 - DNA, 75 bp, synthetic construct
  source 1..75: mol_type = other DNA
cgtgaaactggtcgctccggcaggtgatttctttatggctgtcgcagatgacacgccggtgacgttaatctctgc

SEQ ID NO: 205864 - DNA, 75 bp, synthetic construct
  source 1..75: mol_type = other DNA
aactcgagcgcggtgatatgcttccccatgacatggtcgaatcctctgctactgcatggcgggatgaaatgagca

SEQ ID NO: 205865 - DNA, 75 bp, synthetic construct
  source 1..75: mol_type = other DNA
tcgcctgatgagcgacagcggcaaaaccttcgagggtaaagtggattcgattggctacggcgtgctaccggatga

SEQ ID NO: 205866 - DNA, 75 bp, synthetic construct
  source 1..75: mol_type = other DNA
tcatcgtaaagaaggtcttaataatgatgtcgtcagggttggtgcgctacctactgcggcactagggatattacc

SEQ ID NO: 205867 - DNA, 75 bp, synthetic construct
  source 1..75: mol_type = other DNA
atgagtttaagaatcgacgctgaactgaaggatgcttttatggccgctgcaaaaagcatggaccgtaatggctct

SEQ ID NO: 205868 - DNA, 75 bp, synthetic construct
  source 1..75: mol_type = other DNA
gaccgtaatggctctcagttaatccgggattttatgcgccagaccgtggaacggcagcataatacctggttccgt

SEQ ID NO: 205869 - DNA, 75 bp, synthetic construct
  source 1..75: mol_type = other DNA
gaattgacgcggaactgaaggatgcttttatggctgctgcaaaaagcatggaccgtaatggctctcagttaatcc

SEQ ID NO: 205870 - DNA, 75 bp, synthetic construct
  source 1..75: mol_type = other DNA
caaccgagcgaagccgatcgcgcaaaaggtcagtttgatagcgaaggtctgatggatttgagcaaactggaaggc

SEQ ID NO: 205871 - DNA, 75 bp, synthetic construct
  source 1..75: mol_type = other DNA
ttgccagccgtgtatatggcagaccctctcaaaccaggcggaaacgctgaactctacatcaacagaaaagcgtgg

SEQ ID NO: 205872 - DNA, 75 bp, synthetic construct
  source 1..75: mol_type = other DNA
acgagacaagacaagaactctccgttctcacaaaagcaaagcgtgattccgttaaattggcggcggcaccatcag

SEQ ID NO: 205873 - DNA, 75 bp, synthetic construct
  source 1..75: mol_type = other DNA
gcggtggctgaaatggcgaaagcaggaaagctgccagccttttacatgacagacccattaaagccgggaggtcat

SEQ ID NO: 205874 - DNA, 75 bp, synthetic construct
  source 1..75: mol_type = other DNA
ttctgattgtttgcgttgacccactcaaaatgaagcctcgtgcgcttcctaagtctattgtcgcggagtttaagc

SEQ ID NO: 205875 - DNA, 75 bp, synthetic construct
  source 1..75: mol_type = other DNA
aatactttgctgaatgaagcagaggttctggttgtttgcgttgacccactcaaaatgaagccttgtgcgcttccc

SEQ ID NO: 205876 - DNA, 75 bp, synthetic construct
  source 1..75: mol_type = other DNA
tcatcacttcagccaacaggcgctgatggctgaacgcgttgccttcgtggtgcgtaaaatgacggtggaatatta

SEQ ID NO: 205877 - DNA, 75 bp, synthetic construct
  source 1..75: mol_type = other DNA
gaaaagttactccacgcccgaaagcgccgaccagcgaatccgcgaaatattgccggtggctcatgatgttgcgga

SEQ ID NO: 205878 - DNA, 75 bp, synthetic construct
  source 1..75: mol_type = other DNA
tgcgaaggcacttgcagcactggcaaagaacccagacctgcgcgacggaaattgcgagcacttcgagcaggtttt

SEQ ID NO: 205879 - DNA, 75 bp, synthetic construct
  source 1..75: mol_type = other DNA
taaggggcggtccaggccaaaaaccaaaaaggatccattcttatcgcttgcgccggtaaaagaagtttctccaca

SEQ ID NO: 205880 - DNA, 75 bp, synthetic construct
  source 1..75: mol_type = other DNA
gcagatgctggcacaacagtatgccgatgacaaagagaaagtggcgctgttaaaagcgctttggcagtacgcgga

SEQ ID NO: 205881 - DNA, 75 bp, synthetic construct
  source 1..75: mol_type = other DNA
gcgcctggcgcaacagcatggctggcaaaactacctgctgctggaagatgacgcaattattctcaagcaggagaa

SEQ ID NO: 205882 - DNA, 75 bp, synthetic construct
  source 1..75: mol_type = other DNA
cgcttacagcagatccgtgatgaactgacattgctgcatattccgcctgaaaagatcacccgccttgccgcctgc

SEQ ID NO: 205883 - DNA, 75 bp, synthetic construct
  source 1..75: mol_type = other DNA
acgattacatttatgaaatcgtgaaacgtcacgccgataaaatggatgttccggtcagtcttcatctggatcacg

SEQ ID NO: 205884 - DNA, 75 bp, synthetic construct
  source 1..75: mol_type = other DNA
ttgactacgccattgaaaaaaattgtgattgtcggcggcggtgctggtgggctggaaatggcgacacagctggga

SEQ ID NO: 205885 - DNA, 75 bp, synthetic construct
  source 1..75: mol_type = other DNA
ttgactacgccattgaaaaaaattgtgattgtcggcggcggtgctggtgggctggaaatggcaacacagctgggg

SEQ ID NO: 205886 - DNA, 75 bp, synthetic construct
  source 1..75: mol_type = other DNA
agacctttgtcgaacgcaccggttgcgacatgctggcagtttctattggtaacgttcatggcctggacgatatac

SEQ ID NO: 205887 - DNA, 75 bp, synthetic construct
  source 1..75: mol_type = other DNA
agcgtatgtgaataatcacaacgaggcgaatctggcacgagtgatggcatcagcaaaaaacgccgtcgaggaaga

SEQ ID NO: 205888 - DNA, 75 bp, synthetic construct
  source 1..75: mol_type = other DNA
ccgctggttattcacggcggctccggtatcgccccggaaatattacgcagctttgttaattatcgcgtcgctaaa

SEQ ID NO: 205889 - DNA, 75 bp, synthetic construct
  source 1..75: mol_type = other DNA
cggggcgtccaacgatattaaagttgcgaccaacctggcacgtaacatggtgacccagtggggcttctctgagaa

SEQ ID NO: 205890 - DNA, 75 bp, synthetic construct
  source 1..75: mol_type = other DNA
cgcagaaagagtccaccgcgtatcacgaagcaggccatgcgattatcggtcgcctggtgccggaacacgatccgg

SEQ ID NO: 205891 - DNA, 75 bp, synthetic construct
  source 1..75: mol_type = other DNA
aggtatcatcgttatcgcggcgactaaccgtccggacgttctcgacccggcactgctgcgtcctggtcgtttcga

SEQ ID NO: 205892 - DNA, 75 bp, synthetic construct
  source 1..75: mol_type = other DNA
gacgaacaggcaatgctgctgaaagccattgaagaaaaaaccttttatccgtttggcagcgatcgccaggtgagc

SEQ ID NO: 205893 - DNA, 75 bp, synthetic construct
  source 1..75: mol_type = other DNA
ggaagtgaactgcgccactctgcgtggcgataccgccatgtccgcgctgtttggtcatgtgaaaggcgcgttcac

SEQ ID NO: 205894 - DNA, 75 bp, synthetic construct
  source 1..75: mol_type = other DNA
cgggtctacgccagcgccaggaagatattgaaccgaaccttgattatgaagtggagcgccacgccacactcactg

SEQ ID NO: 205895 - DNA, 75 bp, synthetic construct
  source 1..75: mol_type = other DNA
cgcagcttaaacagcaactacattcccaaacgccacgcgctgaaggggtggtaaaagccacagaaaaaggctttg

SEQ ID NO: 205896 - DNA, 75 bp, synthetic construct
  source 1..75: mol_type = other DNA
aatcagaaagttgttcgcgtgtcttatacatggaagttggcggatgttcctgcatgggtggacaaaaaagcgttc

SEQ ID NO: 205897 - DNA, 75 bp, synthetic construct
  source 1..75: mol_type = other DNA
atgagtcttgattgcgtacctctttcaacctactgccgggacgccggagaaacggttgaagccgttaacaaacgg

SEQ ID NO: 205898 - DNA, 75 bp, synthetic construct
  source 1..75: mol_type = other DNA
aacggttgatgccgttaacaaacggatacaaagaggaatatggaaagaaggggttcatgtattaaaagtcgacgg

SEQ ID NO: 205899 - DNA, 75 bp, synthetic construct
  source 1..75: mol_type = other DNA
gcggtaactttcgcgaactttctgccagcgtcacgcggatggccacctttgccactagcggacgcatcactctgg

SEQ ID NO: 205900 - DNA, 75 bp, synthetic construct
  source 1..75: mol_type = other DNA
gtgatttaatttgcaatgcagatagttccgtttcacaaaaaacggatgatgaatatcttcaggaagcaaggcgta

SEQ ID NO: 205901 - DNA, 75 bp, synthetic construct
  source 1..75: mol_type = other DNA
ggaaggctccaaagaacgatggattgatttaactgaggtttcaaaatgggcgagaaaaaacaaatatccttatca

SEQ ID NO: 205902 - DNA, 75 bp, synthetic construct
  source 1..75: mol_type = other DNA
tgccgtggtgggtaaccctggcacgccataatctggaaaaagaagcgccagacggtgtcgctaccgaaatgctcg

SEQ ID NO: 205903 - DNA, 75 bp, synthetic construct
  source 1..75: mol_type = other DNA
atgcgtgttcgtttggttgataacggcgctatcgcctttattccggcacctttcttacacgctgtgcgcgatgaa

SEQ ID NO: 205904 - DNA, 75 bp, synthetic construct
  source 1..75: mol_type = other DNA
caaaaatgaccgtctggccatcgttcctgatcatccactcttaaaagacgccattccttgccgcgcagcccgtgg

SEQ ID NO: 205905 - DNA, 75 bp, synthetic construct
  source 1..75: mol_type = other DNA
ttacaaagtgactgacgttattgacgtcaccattgccgaagtccgcatggaaacccgcagcattattgcgcgccc

SEQ ID NO: 205906 - DNA, 75 bp, synthetic construct
  source 1..75: mol_type = other DNA
cgcagcttaaacagcaactgcactcccagacgccccgcgctgaaggggtggtaaaagccactgaaaaaggctttg

SEQ ID NO: 205907 - DNA, 75 bp, synthetic construct
  source 1..75: mol_type = other DNA
aagatcgcccggattaccgttttattctcggtgaaaaaggtgaagtgttggatatcgtcgctgaaccgcgtcgta

SEQ ID NO: 205908 - DNA, 75 bp, synthetic construct
  source 1..75: mol_type = other DNA
caggctttggtatcgcccgactgtccaaagaaaagcagcaacagctcatgatggaaaccataaatgaaagcaaat

SEQ ID NO: 205909 - DNA, 75 bp, synthetic construct
  source 1..75: mol_type = other DNA
attttcttccggtggttctgtttttcgttatcgttattttcattatcacttttataatagccaccgccacgacca

SEQ ID NO: 205910 - DNA, 75 bp, synthetic construct
  source 1..75: mol_type = other DNA
gaacggatgccgtatttgaacttgacttcaccggtgataatttaaaatggaataagcttgctcccgtcgcatcac

SEQ ID NO: 205911 - DNA, 75 bp, synthetic construct
  source 1..75: mol_type = other DNA
ttcggcgtgctggccgaagagccggaacaaattgaacaatcctacgccagctgccaaccgtggccggagcaggtg

SEQ ID NO: 205912 - DNA, 75 bp, synthetic construct
  source 1..75: mol_type = other DNA
gcgccgccagtcaacaccgcaaatgagcacactacaacaaccgattagtgccccctggtatgtctttttccgccg

SEQ ID NO: 205913 - DNA, 75 bp, synthetic construct
  source 1..75: mol_type = other DNA
tttggtgcgtgtgagcgggcagataagccgtgagaatggcactacgagcctgaacgttgaggtgatcaaaaagcc

SEQ ID NO: 205914 - DNA, 75 bp, synthetic construct
  source 1..75: mol_type = other DNA
gaacggatgccgtatttgaacttgatttcaccggtaataatttaaaatggaataggcttgctcccgtctcatcac

SEQ ID NO: 205915 - DNA, 75 bp, synthetic construct
  source 1..75: mol_type = other DNA
cgggcctacggagtatcattgccctggaataatagtttattaattattggcggtgaaactgcaggcggcaaagca

SEQ ID NO: 205916 - DNA, 75 bp, synthetic construct
  source 1..75: mol_type = other DNA
tggcagacaaaaaagccaatggttcacgctataccgccgccacctggctggcccgtcacggtattcccgttcgtg

SEQ ID NO: 205917 - DNA, 75 bp, synthetic construct
  source 1..75: mol_type = other DNA
gtcaatatggtcaaatcgcgccgtatactcaaccggaagatgcggtggaaaaagccagacaacagaaaattaatg

SEQ ID NO: 205918 - DNA, 75 bp, synthetic construct
  source 1..75: mol_type = other DNA
cattggcaaaaacagcgagggcttgactcaggtatttaatgacgtacacaaatacaaccccaaaaccaatagttg

SEQ ID NO: 205919 - DNA, 75 bp, synthetic construct
  source 1..75: mol_type = other DNA
tgacagggaaaacgccagacgcctgaaaaacgacgaaatcaacacctggcgtaatgcgatggaagcggcgagtta

SEQ ID NO: 205920 - DNA, 75 bp, synthetic construct
  source 1..75: mol_type = other DNA
atgctgcgtcgtgcgatgggtaagaaaaagccggaagagatggctaagcagcgttctgtatttgctgaaggtgca

SEQ ID NO: 205921 - DNA, 75 bp, synthetic construct
  source 1..75: mol_type = other DNA
gttgagaagtgcatcgcctgcgcccgtgaagtcaatccagaaattgaaatcatccttatttccgccaccagcggc

SEQ ID NO: 205922 - DNA, 75 bp, synthetic construct
  source 1..75: mol_type = other DNA
ctgggtattgagagcgtccggcaaatcgatgaaaaaaccaaccgcctgaaaggttccgaaaagtcatataccttc

SEQ ID NO: 205923 - DNA, 75 bp, synthetic construct
  source 1..75: mol_type = other DNA
ttttattagcgtgtatagggtcatcatccgcttatgcggataacgcattgattttacaaacggattttagcctga

SEQ ID NO: 205924 - DNA, 75 bp, synthetic construct
  source 1..75: mol_type = other DNA
atgcagggcggcggcggtaaaggcgcgatgtcgttcggtaagagcaaagcgcgtatgttgacggaagatcagatc

SEQ ID NO: 205925 - DNA, 75 bp, synthetic construct
  source 1..75: mol_type = other DNA
aaaacgttgctggcgaaagcgattgcaggcgaagcgaaagttccgttctttactatctccggttctgacttcgta

SEQ ID NO: 205926 - DNA, 75 bp, synthetic construct
  source 1..75: mol_type = other DNA
tgagaaaggtgatctgaaaggctttgagttcggcgtatttgactggcacgccaacggcacggcgaccgatgcgaa

SEQ ID NO: 205927 - DNA, 75 bp, synthetic construct
  source 1..75: mol_type = other DNA
ctgggtattgatagcgtccgggaaatcgacgaaaaagctaaccgcctgaaaggttctgaaaagtcatataccttc

SEQ ID NO: 205928 - DNA, 75 bp, synthetic construct
  source 1..75: mol_type = other DNA
gatatcgccgcgatcccgctggatgacaagaaaagcttcgacatgctgcaacgctcggaaaccacggcggtattc

SEQ ID NO: 205929 - DNA, 75 bp, synthetic construct
  source 1..75: mol_type = other DNA
acatctctactatcagagggcggatgcacgcgcgcggttgcgttttggcgcgacgtggcgtgtctctccgagcga

SEQ ID NO: 205930 - DNA, 75 bp, synthetic construct
  source 1..75: mol_type = other DNA
ttttattaacgtgtctgggatcatcatccgcttatgcggataacgctttgattttacaaactgattttagcctga

SEQ ID NO: 205931 - DNA, 75 bp, synthetic construct
  source 1..75: mol_type = other DNA
acgtctggagcaatatcagcgacgagttgctgaatcaggcaggaatcaaactcaacgacacgttgtgtgtgacca

SEQ ID NO: 205932 - DNA, 75 bp, synthetic construct
  source 1..75: mol_type = other DNA
gattacgttcgaacaggtggggccagagcttcctgcaaaagttgtcgaactttcttatcagaaagccaaagcaac

SEQ ID NO: 205933 - DNA, 75 bp, synthetic construct
  source 1..75: mol_type = other DNA
catacagtgcaggcgtgcagattaacccgacagaaaatatcgtggtcgacctggcttatgaagcctcaggacgtg

SEQ ID NO: 205934 - DNA, 75 bp, synthetic construct
  source 1..75: mol_type = other DNA
ggagacaagaatcgccagcttacccgttacagcgatacccgctggcatgaagattccgtgcgtaaccgctggttc

SEQ ID NO: 205935 - DNA, 75 bp, synthetic construct
  source 1..75: mol_type = other DNA
ccgtctgtacgcgtgaatgaatggttcagcgcgtatgcgatggcaggcgtggcttacagccgtgtgtcgactttt

SEQ ID NO: 205936 - DNA, 75 bp, synthetic construct
  source 1..75: mol_type = other DNA
ttacggacactctgggaatggtgacgtcattcagctatgcaggagacaagaatcgccagctgacccgttacagcg

SEQ ID NO: 205937 - DNA, 75 bp, synthetic construct
  source 1..75: mol_type = other DNA
cccgaccgaatccgtggccattgatattgcttatgaatgctccggcagtggcgactggcgcactgacggtttcat

SEQ ID NO: 205938 - DNA, 75 bp, synthetic construct
  source 1..75: mol_type = other DNA
agcgtaatggcggggccgtctgtgcgcgtgaatgaatggttcagcgcgtatgcgatggcgggtgtggcttacagc

SEQ ID NO: 205939 - DNA, 75 bp, synthetic construct
  source 1..75: mol_type = other DNA
agcgatgaactgaacgggattaacgtgaaataccgttatgaatttacggacacgctggggctgattacgtcattc

SEQ ID NO: 205940 - DNA, 75 bp, synthetic construct
  source 1..75: mol_type = other DNA
agcgatacccgctggcatgaagattccgtgcgtaaccgctggttcagcgtgatggtggggccgtctgtgcgcgtg

SEQ ID NO: 205941 - DNA, 75 bp, synthetic construct
  source 1..75: mol_type = other DNA
attgcgggccttctttacgcgcgcaaacatatgcccaatttcaccaccgcacgacgcagattcgatatcactggc

SEQ ID NO: 205942 - DNA, 75 bp, synthetic construct
  source 1..75: mol_type = other DNA
agcgcgtatgcgatggcgggtgtggcttacagccgtgtgtcgactttctccggggattatcttcgcgtaactgac

SEQ ID NO: 205943 - DNA, 75 bp, synthetic construct
  source 1..75: mol_type = other DNA
actttctccggggattatcttcgcgtaactgacaacaaggggaaaacgcacgacgtgctgaccggaagtgatgac

SEQ ID NO: 205944 - DNA, 75 bp, synthetic construct
  source 1..75: mol_type = other DNA
gccacagcaacacgtctctggcgtggggagctggcgtgcagtttaacccgaccgaatccgtggccattgatgtcg

SEQ ID NO: 205945 - DNA, 75 bp, synthetic construct
  source 1..75: mol_type = other DNA
gggggctggcgtgcagtttaacccgaccgaatccgtggccattgatattgcttatgaaggctccggcagtggcga

SEQ ID NO: 205946 - DNA, 75 bp, synthetic construct
  source 1..75: mol_type = other DNA
tgtccgcagccatttgtctggcagtatccggtgcgcctgcatgggcatctgaacatcagtccacgctgagcgcgg

SEQ ID NO: 205947 - DNA, 75 bp, synthetic construct
  source 1..75: mol_type = other DNA
tgtccgcagccatctgtctgtccgtatccggtgcgcctgcatgggcgtctgaacatcagtccacactgagcacag

SEQ ID NO: 205948 - DNA, 75 bp, synthetic construct
  source 1..75: mol_type = other DNA
cccgaccgaatccgtggccattgatattgcttatgaaggttccggcagtggtgactggcgcactgacggcttcat

SEQ ID NO: 205949 - DNA, 75 bp, synthetic construct
  source 1..75: mol_type = other DNA
actttttccggggattatctccgtgtaactgacagcaaggggaaaacgcacgatgtgctgaccggaagtgatgac

SEQ ID NO: 205950 - DNA, 75 bp, synthetic construct
  source 1..75: mol_type = other DNA
attaacgagaaataccgttatgagtttacggacacactggggatggtgacgtcgttcagctatgcaggagacaag

SEQ ID NO: 205951 - DNA, 75 bp, synthetic construct
  source 1..75: mol_type = other DNA
gcggcgtaccggcattgtccggtaccggtgcgcgtgcaggtgatttaaaagggattaatgtgaaataccgttatg

SEQ ID NO: 205952 - DNA, 75 bp, synthetic construct
  source 1..75: mol_type = other DNA
cgaatccgtgaccattgaccttgcttatgaaggttccggtagtggcgactggcgatcggatgcatttattgttgg

SEQ ID NO: 205953 - DNA, 75 bp, synthetic construct
  source 1..75: mol_type = other DNA
attgcttatgaaggctccggcagtggtgactggcgcactgacggtttcatcgtgggtgtcggttataagttctga

SEQ ID NO: 205954 - DNA, 75 bp, synthetic construct
  source 1..75: mol_type = other DNA
tccgttcgtaaccgctggttcagcgtaatggcggggccgtctgtgcgcgtgaatgaatggttcagcgcgtatgcg

SEQ ID NO: 205955 - DNA, 75 bp, synthetic construct
  source 1..75: mol_type = other DNA
acagaatccgtggccgttgatgtcgcttatgaaggctccggcagcggtgactggcgtaccaacagtttcatcgtt

SEQ ID NO: 205956 - DNA, 75 bp, synthetic construct
  source 1..75: mol_type = other DNA
tgtccgcagtagtctggcaggtcgccgctgctacgccagcgagggcatctgaacatcagtccacgctgagcgcgg

SEQ ID NO: 205957 - DNA, 75 bp, synthetic construct
  source 1..75: mol_type = other DNA
attaacgtgaaataccgttatgagtttacggacactatgggaatggtgacgtcattcagctatgcaggagacaag

SEQ ID NO: 205958 - DNA, 75 bp, synthetic construct
  source 1..75: mol_type = other DNA
ggtatcttcatgcccgtacgaacgctcccggcagcgaaaatctgaacgggattaacgtgaaataccgttatgaat

SEQ ID NO: 205959 - DNA, 75 bp, synthetic construct
  source 1..75: mol_type = other DNA
gggtatggcttacagccgtgtgtcgactttctccggggattatctccgcgtaactgacaacaaggggaaaacgca

SEQ ID NO: 205960 - DNA, 75 bp, synthetic construct
  source 1..75: mol_type = other DNA
gccgtggttgcagggcagcggaattaaactcgataaatggggcctgattcaaaccggtgacgtcgggtatttacc

SEQ ID NO: 205961 - DNA, 75 bp, synthetic construct
  source 1..75: mol_type = other DNA
atacccgctggcatgaggattccgtgcgtaaccgctggttcagcgtgatggcgggaccgtctgtgcgcgtgaatg

SEQ ID NO: 205962 - DNA, 75 bp, synthetic construct
  source 1..75: mol_type = other DNA
cccgaccgaatccgtggccgttgatgtcgcttatgaaggctccggcagtggcggctggcgcactgacggggtcat

SEQ ID NO: 205963 - DNA, 75 bp, synthetic construct
  source 1..75: mol_type = other DNA
cagtcgcctggtacgataacgaatatgggtttgttacccagcttattcgcactctcgaaaaattcgccaaactct

SEQ ID NO: 205964 - DNA, 75 bp, synthetic construct
  source 1..75: mol_type = other DNA
tggccgttgatgtcgcttatgaaggctccggcagtggcaactggcgcactgacggtttcatcgtgggtgtcggtt

SEQ ID NO: 205965 - DNA, 75 bp, synthetic construct
  source 1..75: mol_type = other DNA
aatggttcagcgcgtatgcgatggcgggtatggcttacagccgggtgtcgactttttccggggattatctccgcg

SEQ ID NO: 205966 - DNA, 75 bp, synthetic construct
  source 1..75: mol_type = other DNA
ttcatgcccgacgaacgtcccggcagcgatatctgaacgggattaacgtgaaataccgttatgagtttacggaca

SEQ ID NO: 205967 - DNA, 75 bp, synthetic construct
  source 1..75: mol_type = other DNA
ccacgttgttgggaaagggctggcggctaatccggtggcctgccatcattgcaacaatgctccctgcgttacggc

SEQ ID NO: 205968 - DNA, 75 bp, synthetic construct
  source 1..75: mol_type = other DNA
cgcaccagcaagcaggtgcttccaatgctgtatggcccggaaggcagcgccaatgaagtgttgcagggctatcgc

SEQ ID NO: 205969 - DNA, 75 bp, synthetic construct
  source 1..75: mol_type = other DNA
ctgtgggcttttgatccgggcgcgaaagatccgaacgccatcccatcagacgaacacacctttacctttaactcg

SEQ ID NO: 205970 - DNA, 75 bp, synthetic construct
  source 1..75: mol_type = other DNA
gcagtaaacgcgcagcactttggctgtacgccgctctgctgctcggcaccatgatttggggcgtctgggaggtcg

SEQ ID NO: 205971 - DNA, 75 bp, synthetic construct
  source 1..75: mol_type = other DNA
cgtactggcgatgtgaagcagccgaacgatccgggcgaaatcaccaatgaagtgacgccgattaaagtgggcgac

SEQ ID NO: 205972 - DNA, 75 bp, synthetic construct
  source 1..75: mol_type = other DNA
taggttccattattgcaaaatcgatggttacccaagtcttacgtcgtctgggctatcgccatacgggtgatgctg

SEQ ID NO: 205973 - DNA, 75 bp, synthetic construct
  source 1..75: mol_type = other DNA
atgccagctcgattctggcgctgaatgccacaaccgggaaattggcgtggagctaccagaccgttcaccacgacc

SEQ ID NO: 205974 - DNA, 75 bp, synthetic construct
  source 1..75: mol_type = other DNA
cagcggcaaagagaaatggcattacgatcctgagctgaaaaccaacgagtctttccagcacgtaacctgccgtgg

SEQ ID NO: 205975 - DNA, 75 bp, synthetic construct
  source 1..75: mol_type = other DNA
acaacctgctggaaaaatgcattaacggcatcactgctaacaaagaagtgtgcgaaggttacgtttacaactcta

SEQ ID NO: 205976 - DNA, 75 bp, synthetic construct
  source 1..75: mol_type = other DNA
cagccgtgtgtcgactttctccggggattatctccgcgtaactgacaacaaggggaaaacgcacgacgtgctgac

SEQ ID NO: 205977 - DNA, 75 bp, synthetic construct
  source 1..75: mol_type = other DNA
gcgtgcagtttaacccgaccgaatccgtgaccattgatattgcttatgaaggttccggtagtggcgactggcgaa

SEQ ID NO: 205978 - DNA, 75 bp, synthetic construct
  source 1..75: mol_type = other DNA
gacgattactcgtcacgctaacagccctttttgcagcgctttgcgggctgtatctactcattggcggaggctggc

SEQ ID NO: 205979 - DNA, 75 bp, synthetic construct
  source 1..75: mol_type = other DNA
tgtccgcagccatttgtctgcccgtatccggtgcgcctgcatgggcgtctgagcagcaggccacgctgagcgcgg

SEQ ID NO: 205980 - DNA, 75 bp, synthetic construct
  source 1..75: mol_type = other DNA
tggtgacgtcattcagctatgcaggagacaagaatcgccagcttacccgttacagcgatacccgctggcatgaag

SEQ ID NO: 205981 - DNA, 75 bp, synthetic construct
  source 1..75: mol_type = other DNA
aggtccagtatccggatggtaagccgccggtatgggcaaagtgtacgaaaggtgtgtatccgtcttactgggaag

SEQ ID NO: 205982 - DNA, 75 bp, synthetic construct
  source 1..75: mol_type = other DNA
tgctgttttgccatcagcaggcattcgcccgtcaggcgcaattactggcaaatctgtgtgcgcgggtgagcggct

SEQ ID NO: 205983 - DNA, 75 bp, synthetic construct
  source 1..75: mol_type = other DNA
gatgaagctattcgaatggcgaataacactcgcttcggactctcttgcggtctggtttcctccgagagggaaaaa

SEQ ID NO: 205984 - DNA, 75 bp, synthetic construct
  source 1..75: mol_type = other DNA
cgccattcaccgtgaagagtcggtaaaacgtggtatgcctgttatcagagactgccagcgttgtggtggtcgtgg

SEQ ID NO: 205985 - DNA, 75 bp, synthetic construct
  source 1..75: mol_type = other DNA
gtaaggattgccgtgggcgtggtgtcgccattcaccgtgaagagtcggtaaaacgtggtatgcctgttatcagag

SEQ ID NO: 205986 - DNA, 75 bp, synthetic construct
  source 1..75: mol_type = other DNA
ggcgtgtatccgtcttactgggaggaatggaaaaaagtcagggaagtggtaaacgttacctgtccggagtgtggg

SEQ ID NO: 205987 - DNA, 75 bp, synthetic construct
  source 1..75: mol_type = other DNA
caggggccggtgaaggtgattgcctgcatcgaggaccctgtggtcatcgacaagatcctcaaccacctcaaggcc

SEQ ID NO: 205988 - DNA, 75 bp, synthetic construct
  source 1..75: mol_type = other DNA
tgctccctgaacgcccggatattgccaatgctatggctctacgctatgcagaccaaaacgttccggcgatgacct

SEQ ID NO: 205989 - DNA, 75 bp, synthetic construct
  source 1..75: mol_type = other DNA
gatgacttacatgaaaaaaatatataccgcaaagcgctgttgatgccttgttgcgctttgattttccagcactaa

SEQ ID NO: 205990 - DNA, 75 bp, synthetic construct
  source 1..75: mol_type = other DNA
ttatggtgatagaagttccggcggcacaggtttccgtagcggatgctgtctcgacttatctgtttaacagccagt

SEQ ID NO: 205991 - DNA, 75 bp, synthetic construct
  source 1..75: mol_type = other DNA
atgaacgcctgggaagttaatttcgacgggctggtagggctgacgcatcattacgctggcctgtcgtttggtaat

SEQ ID NO: 205992 - DNA, 75 bp, synthetic construct
  source 1..75: mol_type = other DNA
ccaacgcccctggctggctgatgatgcggtcattcggctaactgacgatattaatcgatttgcttttcctcatcg

SEQ ID NO: 205993 - DNA, 75 bp, synthetic construct
  source 1..75: mol_type = other DNA
gtatgaatgacagggcgcgggcaacagaattactggcagattatgcattaagtcagtgcgatcgcgtctcggcgt

SEQ ID NO: 205994 - DNA, 75 bp, synthetic construct
  source 1..75: mol_type = other DNA
gcgagtgtgagcctcagccgggataaaatgcacagtaaccacgacagtgtgcaggagcagacggggatttttgcc

SEQ ID NO: 205995 - DNA, 75 bp, synthetic construct
  source 1..75: mol_type = other DNA
caggaaatgacccgtcagtctctgatccatctggaaaatatcgcttatatgccttaccgcgatattgccggtgtg

SEQ ID NO: 205996 - DNA, 75 bp, synthetic construct
  source 1..75: mol_type = other DNA
agtgtaaaggcggaaacctaaacatgtgcagtgattggcaggagtttcgccgttgcttcgagtacttatctgaat

SEQ ID NO: 205997 - DNA, 75 bp, synthetic construct
  source 1..75: mol_type = other DNA
acacgtctaaactatcagatggttcggtaataacacttagaaacatatctacatcagaaggtcagacaggcgctc

SEQ ID NO: 205998 - DNA, 75 bp, synthetic construct
  source 1..75: mol_type = other DNA
aggctcacgggaacagtgtgctgtacgtgacccgagtcgcgatggtacccggggaccggggcatgtgctgaatgg

SEQ ID NO: 205999 - DNA, 75 bp, synthetic construct
  source 1..75: mol_type = other DNA
gctggcagccagagcgattgccggaatgatgtatccgggcgtgaaacagtcagacctcagtgaagagcagaagca

SEQ ID NO: 206000 - DNA, 75 bp, synthetic construct
  source 1..75: mol_type = other DNA
aaacgagggaacatctggaccgtgtttaaactcaatccaaacggcgagtttgaagatatcaactctgttaccagc

SEQ ID NO: 206001 - DNA, 75 bp, synthetic construct
  source 1..75: mol_type = other DNA
gcgacgtgttccagcctcggcctggctgatttccagaagcgtatgaccgtgcaggagctgtcgaaagaaggtttc

SEQ ID NO: 206002 - DNA, 75 bp, synthetic construct
  source 1..75: mol_type = other DNA
actattctccaaaatcgccaggcctgactgatgcgcccatctcgacgtcaaaagatgcgctgagtatcactgatg

SEQ ID NO: 206003 - DNA, 75 bp, synthetic construct
  source 1..75: mol_type = other DNA
caaagcggcgcagagtgattgctgtatgcaccctggttcagatctggtagggaaggttgaaatgactgagtggtt

SEQ ID NO: 206004 - DNA, 75 bp, synthetic construct
  source 1..75: mol_type = other DNA
ctctggccctgatgggtataaatgcggacgtttatgcggccgatgtaaagatcgatattttaagtgcaacagtga

SEQ ID NO: 206005 - DNA, 75 bp, synthetic construct
  source 1..75: mol_type = other DNA
cgctgatgcattgcagcattatcaactcgcttatgcggaaaaaaataagccctcttatgaagaggccatcgcacg

SEQ ID NO: 206006 - DNA, 75 bp, synthetic construct
  source 1..75: mol_type = other DNA
caccagcgccggttcggtattcctcggcgactggtcgccggaatcggctggcgactacgcctccggtaccaacca

SEQ ID NO: 206007 - DNA, 75 bp, synthetic construct
  source 1..75: mol_type = other DNA
atccggtgcgcctgcatgggcgtctgaacatcagtccacgctgagcgcggggtatcttcatgcccgacgaacgtc

SEQ ID NO: 206008 - DNA, 75 bp, synthetic construct
  source 1..75: mol_type = other DNA
cgtatgcgatggcgggtgtggcttacagccgtgtgtcgactttctccggggattatcttcgcgtaactgacaaca

SEQ ID NO: 206009 - DNA, 75 bp, synthetic construct
  source 1..75: mol_type = other DNA
gaaacagttctgaacggttctcatcatgaaccattccggtcatccaagtatctatcagctaatagtccagcagca

SEQ ID NO: 206010 - DNA, 75 bp, synthetic construct
  source 1..75: mol_type = other DNA
tgatgtagcttttgtaagcgatccatcctacgctgggttaatcaccaaactctggatggattttgtttcttactt

SEQ ID NO: 206011 - DNA, 75 bp, synthetic construct
  source 1..75: mol_type = other DNA
tccgtggggctttatattccgggtggttcagcgccgctgttctccaccgtattaatgctggccactccggcgcgc

SEQ ID NO: 206012 - DNA, 75 bp, synthetic construct
  source 1..75: mol_type = other DNA
ccgaatccgtggccattgatattgcttatgaagggtccggcagtggggactggcgcactgacggtttcatcgtgg

SEQ ID NO: 206013 - DNA, 75 bp, synthetic construct
  source 1..75: mol_type = other DNA
ccgaattcgtggccattgatattgcttatgaagggtccggaagtggtgactggcgcactgacggtttcatcgtgg

SEQ ID NO: 206014 - DNA, 75 bp, synthetic construct
  source 1..75: mol_type = other DNA
ccgaatacgtggccattgatattgcttatgaagggtccggaagtggggactggcgcactgacggtttcatcgtgg

SEQ ID NO: 206015 - DNA, 75 bp, synthetic construct
  source 1..75: mol_type = other DNA
ccgaatgcgtggccattgatattgcttatgaagggtccgggagtggggactggcgcactgacggtttcatcgtgg

SEQ ID NO: 206016 - DNA, 75 bp, synthetic construct
  source 1..75: mol_type = other DNA
ccgaatgcgtggccattgatattgcttatgaagggtccggcagtggcgactggcgcactgacggtttcatcgtgg

SEQ ID NO: 206017 - DNA, 75 bp, synthetic construct
  source 1..75: mol_type = other DNA
ccgaatgcgtggccattgatattgcttatgaagggtccggaagtggagactggcgcactgacggtttcatcgtgg

SEQ ID NO: 206018 - DNA, 75 bp, synthetic construct
  source 1..75: mol_type = other DNA
taggagcttctactgcctcagcaatcaaagctatgttgacggcaaccggtgaaaacatagaagatttctttttac

SEQ ID NO: 206019 - DNA, 75 bp, synthetic construct
  source 1..75: mol_type = other DNA
atgactattgctgaacggctgcggcaggaaggacatcaaattggctggcaggaaggtaaaattgaaggttggcag

SEQ ID NO: 206020 - DNA, 75 bp, synthetic construct
  source 1..75: mol_type = other DNA
tgaagatgcgcccggtgtcattcaggctctaccgttcctgactgcccatacccgccagctcatgggattgccgga

SEQ ID NO: 206021 - DNA, 75 bp, synthetic construct
  source 1..75: mol_type = other DNA
ctgccatcaacggaggcatttaatgccatatgcaaagtgacgagtgctatcacgcttgatacgtggaaaaaatca

SEQ ID NO: 206022 - DNA, 75 bp, synthetic construct
  source 1..75: mol_type = other DNA
atttgtcgctccaccgtgggtaataaataagaagaaaaatgtaatacccgtatttgatttacctgtgcttcctgt

SEQ ID NO: 206023 - DNA, 75 bp, synthetic construct
  source 1..75: mol_type = other DNA
atgagcaagccattaaaattgccttgcgcatgctggagcagggctttgaacgtgagattgtgctggcggcaaccc

SEQ ID NO: 206024 - DNA, 75 bp, synthetic construct
  source 1..75: mol_type = other DNA
ccggatggtaagccgccggtatgggcaaagtgtacgaaaggtgtgtatccgtcttactgggaagaatggaaaaaa

SEQ ID NO: 206025 - DNA, 75 bp, synthetic construct
  source 1..75: mol_type = other DNA
tccagaaattggcggcatgttgacctttggtattcctcctttcaagctcgataaagcggtgttaagccagcggcg

SEQ ID NO: 206026 - DNA, 75 bp, synthetic construct
  source 1..75: mol_type = other DNA
gggaagggagaggtatccactgcctgtaaagattgtcgtgggcgcggtgttgccattcatcgtgaagagtcggaa

SEQ ID NO: 206027 - DNA, 75 bp, synthetic construct
  source 1..75: mol_type = other DNA
actactccccaaaatcgccaggtctgactgatgcatccgtctcgacgtcaaaagatacgctgagtatcactgatg

SEQ ID NO: 206028 - DNA, 75 bp, synthetic construct
  source 1..75: mol_type = other DNA
acaccgacgtattttgcttttgcgaaaggtgccgggttgatgggcgaggccgggcctgaagcaatcatgccactg

SEQ ID NO: 206029 - DNA, 75 bp, synthetic construct
  source 1..75: mol_type = other DNA
gggaagggagagatttccactgcctgtaaagactgccgtgggcgtggtgttgccattcatcgtgaagagtcagaa

SEQ ID NO: 206030 - DNA, 75 bp, synthetic construct
  source 1..75: mol_type = other DNA
aggttcagtatccggatggtaagccgccagtatgggcaaagtgcacaaaaggcgtgtatccgtcttattgggaag

SEQ ID NO: 206031 - DNA, 75 bp, synthetic construct
  source 1..75: mol_type = other DNA
gggctggcgtgcagtttaacccgaccgaatccgtggccattgatattgcttatgaaggttccggcagtggcgact

SEQ ID NO: 206032 - DNA, 75 bp, synthetic construct
  source 1..75: mol_type = other DNA
tgcaaacctgctgatgattatttacctcaaccaggggcggtgttaatcaccggcatcacaccgcaggaagcacgg

SEQ ID NO: 206033 - DNA, 75 bp, synthetic construct
  source 1..75: mol_type = other DNA
attcactcgctttttaccgtaccgaagacctgtattctgggctacaacaatgtgcgtttcgacgacgaagtcaca

SEQ ID NO: 206034 - DNA, 75 bp, synthetic construct
  source 1..75: mol_type = other DNA
tggcatcctgaaaatcgcaatgccgtaattatggtggatttggcaggagacatttcgccattactggaactggat

SEQ ID NO: 206035 - DNA, 75 bp, synthetic construct
  source 1..75: mol_type = other DNA
gagatttaattttcctgagccatcaacgcctcctgatatatcaaccatacgtaaattgttatctctacgatattt

SEQ ID NO: 206036 - DNA, 75 bp, synthetic construct
  source 1..75: mol_type = other DNA
ctcgcctacctgctgaaacatgattcaaactacggaccattcccctggagcgttgattttacggaagattcactt

SEQ ID NO: 206037 - DNA, 75 bp, synthetic construct
  source 1..75: mol_type = other DNA
atgagcggactggatgcatttgacgaatatcttgatcgcgttaaaggcgcggttttacaaataccgttcatcaaa

SEQ ID NO: 206038 - DNA, 75 bp, synthetic construct
  source 1..75: mol_type = other DNA
cgtggggagctggcgtgcagtttaacccgaccgaatccgtggccattgatattgcttatgaaggttccggcagtg

SEQ ID NO: 206039 - DNA, 75 bp, synthetic construct
  source 1..75: mol_type = other DNA
gatgagcaaaaaacgcattacagcgatacccgctggcatgaagattcagtgcgtaaccgctggttcagcatgatg

SEQ ID NO: 206040 - DNA, 75 bp, synthetic construct
  source 1..75: mol_type = other DNA
caaggcacaatttacgaaagaaaccggactttggacatcaaccggtcactcatggaatccgtttaccgtggttgg

SEQ ID NO: 206041 - DNA, 75 bp, synthetic construct
  source 1..75: mol_type = other DNA
ggctctggatatcacctttgttgataagcgtatcgagaaactcctgttcaactaccgcgcccgcaacttccccgg

SEQ ID NO: 206042 - DNA, 75 bp, synthetic construct
  source 1..75: mol_type = other DNA
actccaggcaataatagaacatgatgccgataaagcagaatcattgatggaaattcatcttcagcgccgccttag

SEQ ID NO: 206043 - DNA, 75 bp, synthetic construct
  source 1..75: mol_type = other DNA
taagtggactgacagccaaaagaaaacctgttgtgacaaaaaaactttctgaaatcgtagcagaagaacttgaag

SEQ ID NO: 206044 - DNA, 75 bp, synthetic construct
  source 1..75: mol_type = other DNA
ccgtcgcctggtatgataacgagtatggattcgtcacccaacttattcgcactctggaaaaatttgccaaactct

SEQ ID NO: 206045 - DNA, 75 bp, synthetic construct
  source 1..75: mol_type = other DNA
atacccgctggcatgaggattccgtgcgtaaccgctggttcagcgtgatggcggggccgtctgtacgcgtgaatg

SEQ ID NO: 206046 - DNA, 75 bp, synthetic construct
  source 1..75: mol_type = other DNA
ctaataatataaatgtacttggttcggaaatctatagtgagtctcgcttttttataataggtcatgatgattggg

SEQ ID NO: 206047 - DNA, 75 bp, synthetic construct
  source 1..75: mol_type = other DNA
aagtggcccgccgtacgcagctcgctttcggtgaaaccagtgagccgccttctggtaaggcagacaacacggata

SEQ ID NO: 206048 - DNA, 75 bp, synthetic construct
  source 1..75: mol_type = other DNA
cgtggggagctggcgtgcagtttaacccgaccgaatccgtggccgttgacgtcgcttatgaaggctccggcagcg

SEQ ID NO: 206049 - DNA, 75 bp, synthetic construct
  source 1..75: mol_type = other DNA
atccggtgcgcctgcatgggcgtctgaacatcagtccacgctgagcgcggggtatcttcatgcccggaccaacgt

SEQ ID NO: 206050 - DNA, 75 bp, synthetic construct
  source 1..75: mol_type = other DNA
gtcgcttatgaaggttccggcagtggtgactggcgcactgacggtttcatcgtgggtgtcggttataaattctga

SEQ ID NO: 206051 - DNA, 75 bp, synthetic construct
  source 1..75: mol_type = other DNA
cagggcggcggttttgaaccgggcatgaaacaaaaagccaccaaagaaccgatcaaaaacgaagccaacaacggt

SEQ ID NO: 206052 - DNA, 75 bp, synthetic construct
  source 1..75: mol_type = other DNA
atccggtgcgcctgcatgggcatctgaacatcagtccacactgagcgcggggtatcttcatgccccgacgaacgt

SEQ ID NO: 206053 - DNA, 75 bp, synthetic construct
  source 1..75: mol_type = other DNA
aatggttcagcgcgtatgcgatggcaggcgtggcttacagccgtatttcgactttctccggggattatctccgcg

SEQ ID NO: 206054 - DNA, 75 bp, synthetic construct
  source 1..75: mol_type = other DNA
cagtacctgcttccccgtcagatttaggcaccacggcttccgtcggaaccggtgataattttgaacggttacttg

SEQ ID NO: 206055 - DNA, 75 bp, synthetic construct
  source 1..75: mol_type = other DNA
ggcagcctgagttcacagataaaacactctccaggaaacccggggcggttcagtgcattctgattactgaaattg

SEQ ID NO: 206056 - DNA, 75 bp, synthetic construct
  source 1..75: mol_type = other DNA
atgcgtacattatgtgctgttattttgtccgcagtagtctggcaggtcgccgctgctacgccagcgagtgcagca

SEQ ID NO: 206057 - DNA, 75 bp, synthetic construct
  source 1..75: mol_type = other DNA
ttgtacacaacggcaaagcttatattaccggcggcgttaatcagaatatctttaatggctactttgaggacctta

SEQ ID NO: 206058 - DNA, 75 bp, synthetic construct
  source 1..75: mol_type = other DNA
atgaataaaacaataacggcacttgctatcatgatggcttcatttgccgcaaacgcgtcggtattgccggaaact

SEQ ID NO: 206059 - DNA, 75 bp, synthetic construct
  source 1..75: mol_type = other DNA
tgtggtgttggtggacgaatttgccgacctgatgatgacggtaggtaaaaaagtggaagagctgatagcacgtct

SEQ ID NO: 206060 - DNA, 75 bp, synthetic construct
  source 1..75: mol_type = other DNA
tttgacggctcgtgctgagttggagcaacgtgaagccattcaccgtattgccgctgatgtcttcggtgaccactg

SEQ ID NO: 206061 - DNA, 75 bp, synthetic construct
  source 1..75: mol_type = other DNA
cccggctcctgatgctttcgttctggaaggatttagtgccgacactacccatccaaacattcccgttcgcaagga

SEQ ID NO: 206062 - DNA, 75 bp, synthetic construct
  source 1..75: mol_type = other DNA
gcataaaccgacgacgccgctgccttctctggatttgctgacaccgccgccgagcgaagtggagccggtagatac

SEQ ID NO: 206063 - DNA, 75 bp, synthetic construct
  source 1..75: mol_type = other DNA
tcccgctggcaggcgagcatccagtaagtagtgcggtggtgctctgttttcgcacgcagatttttgttacccgca

SEQ ID NO: 206064 - DNA, 75 bp, synthetic construct
  source 1..75: mol_type = other DNA
gtgtccggtattcaccgtggcgaaccgaaaatcgtcggtcgttatgacagtcttggaaactctctgggggcgtaa

SEQ ID NO: 206065 - DNA, 75 bp, synthetic construct
  source 1..75: mol_type = other DNA
gcgccgcgctggtttgtcggtggcgcatcaggggcatctggtacaaatcccttgtcatcaggttgctgacgccgt

SEQ ID NO: 206066 - DNA, 75 bp, synthetic construct
  source 1..75: mol_type = other DNA
gtggctggcggaaaaacttctggcactgggctacagcggcattgtggcggtggattacaaagaggcgcgggtcat

SEQ ID NO: 206067 - DNA, 75 bp, synthetic construct
  source 1..75: mol_type = other DNA
atgtttgtagaagcattgaaacgccagaatccggcgctgatttccgccgcactaagtttgtggcagcagggcaag

SEQ ID NO: 206068 - DNA, 75 bp, synthetic construct
  source 1..75: mol_type = other DNA
atgtttgtagaagcattgaaacgccagaacccggcgctgatttccgccgctttaagtctgtggcagcagggcaag

SEQ ID NO: 206069 - DNA, 75 bp, synthetic construct
  source 1..75: mol_type = other DNA
gaaggatttagtgccgacactacccatccaaacattcccgttcgcaaggacgagtatgtttttagaaaagaagac

SEQ ID NO: 206070 - DNA, 75 bp, synthetic construct
  source 1..75: mol_type = other DNA
accagaaaaaggctttggtacatcggtgactatattggtaagagtagatggtaatgttatcgtaaaatccttatc

SEQ ID NO: 206071 - DNA, 75 bp, synthetic construct
  source 1..75: mol_type = other DNA
ataatattgagtgtggggcttgtttttgtacgcttgagtcgtttgtacgcattactaagcgcaggaagtcgaaaa

SEQ ID NO: 206072 - DNA, 75 bp, synthetic construct
  source 1..75: mol_type = other DNA
gaaattccccgccgggattaccttaattatctcaatcaaatgcgcctcggacgattgccgaataatttctgggta

SEQ ID NO: 206073 - DNA, 75 bp, synthetic construct
  source 1..75: mol_type = other DNA
tagaaaaacgtcctaaaggggataaccctgaagatgtcagtctgttgcgtttaaggcaggaagatccgccggttc

SEQ ID NO: 206074 - DNA, 75 bp, synthetic construct
  source 1..75: mol_type = other DNA
atgaaaatcgcgcgaaatttaaacctgattattcctgtccggacagaaaagggtaatggctggatccatgccacg

SEQ ID NO: 206075 - DNA, 75 bp, synthetic construct
  source 1..75: mol_type = other DNA
tgagctggatgatgttgcgggtgaactcgttttttttacatgcgtctcgtcaataaattcgccggagcaggcgaa

SEQ ID NO: 206076 - DNA, 75 bp, synthetic construct
  source 1..75: mol_type = other DNA
gaagattccgtgcgtaaccgctggttcagcatgatggcggggccatctgtacgcgtgaatgaatggttcagtgct

SEQ ID NO: 206077 - DNA, 75 bp, synthetic construct
  source 1..75: mol_type = other DNA
ataacgtcaatgacgacactctggatggcaacgacaccattgtttccgtggcgtcatgcaccactaactgtcttg

SEQ ID NO: 206078 - DNA, 75 bp, synthetic construct
  source 1..75: mol_type = other DNA
cttctcgattgaattggcctgttcagcaaattactgcacatggtcgattggagttgtccgatcttatcggtcacc

SEQ ID NO: 206079 - DNA, 75 bp, synthetic construct
  source 1..75: mol_type = other DNA
cggcacgccttgcttgtgtcagtcgtccgactatttacaagttaattaaatctggtgagttaagttacacctctg

SEQ ID NO: 206080 - DNA, 75 bp, synthetic construct
  source 1..75: mol_type = other DNA
gctggtgtccattctcggaaaaaaagtgactaccgaagaggtgaataacgcacttaaacaagcaaccaccaataa

SEQ ID NO: 206081 - DNA, 75 bp, synthetic construct
  source 1..75: mol_type = other DNA
aatggttcagtgcttatgcgatggcaggtgtggcttacagccgtgtttcaactttttccggggattatctccgcg

SEQ ID NO: 206082 - DNA, 75 bp, synthetic construct
  source 1..75: mol_type = other DNA
ttaatctgtatccaggctgaaaatggggacctcacccttaccaagggtgcgctctaccaactgagccatatcagc

SEQ ID NO: 206083 - DNA, 75 bp, synthetic construct
  source 1..75: mol_type = other DNA
ggttcttttacacgccgggtaacggtagctttaacgatgtgcatattcgatctgatgaacgtcttaagatcaaca

SEQ ID NO: 206084 - DNA, 75 bp, synthetic construct
  source 1..75: mol_type = other DNA
gagaccgacctgctggtttgttggttgactgtcaacaaagcgttgatagtgctcatgctatttggaaagcggttg

SEQ ID NO: 206085 - DNA, 75 bp, synthetic construct
  source 1..75: mol_type = other DNA
tctggaacgcggtctgttgactgaagcggaacttgacgatattttctccgtacagaatctgatgcacccggctta

SEQ ID NO: 206086 - DNA, 75 bp, synthetic construct
  source 1..75: mol_type = other DNA
tgatgattaagagtgaacacaatattcttattatggggaattctgactcccacattgataaattttttaagggat

SEQ ID NO: 206087 - DNA, 75 bp, synthetic construct
  source 1..75: mol_type = other DNA
acatatccgacagcattacatctggcattactgctgcgaagcaatgtattgcttgaagctgttgaacacctcgta

SEQ ID NO: 206088 - DNA, 75 bp, synthetic construct
  source 1..75: mol_type = other DNA
tgcaatgatcttgcatgttccgcatccatctggtgttaatcatgctcgtggcttcgagttcacttatgggtctaa

SEQ ID NO: 206089 - DNA, 75 bp, synthetic construct
  source 1..75: mol_type = other DNA
aaccttttctttaaagctggttctcgtcaatctatggactatatggaactcgtccattggggggcaagcaataca

SEQ ID NO: 206090 - DNA, 75 bp, synthetic construct
  source 1..75: mol_type = other DNA
tggaaaccatcaaggccaatatgacattgagcatttgaacgaacagcaaacaaatgctaagaaaatgttgcgtcg

SEQ ID NO: 206091 - DNA, 75 bp, synthetic construct
  source 1..75: mol_type = other DNA
ttatcaattccatgcaagcggagaatttcatgccagtggcaacggaaactttaacgatgtgtatattcgttctga

SEQ ID NO: 206092 - DNA, 75 bp, synthetic construct
  source 1..75: mol_type = other DNA
catattcttactaccgatttaaaagattcttttggtagttggaataatcgcagaccatttagttatgatttcgcc

SEQ ID NO: 206093 - DNA, 75 bp, synthetic construct
  source 1..75: mol_type = other DNA
attgagcatttgaacgaacaacaaactaacagcaaaaagatgttgcgtcgcttccgtagttctgctcctgccact

SEQ ID NO: 206094 - DNA, 75 bp, synthetic construct
  source 1..75: mol_type = other DNA
tgaccgacaatacggggaaaacgcacgatgtgctgaccggaagtgatgacggtcgccacagcaacacgtctctgg

SEQ ID NO: 206095 - DNA, 75 bp, synthetic construct
  source 1..75: mol_type = other DNA
ttgatgtcgcttatgaaggctccggcagtggtgactggcgcactgacggattcatcgtgggtgttggttataaat

SEQ ID NO: 206096 - DNA, 75 bp, synthetic construct
  source 1..75: mol_type = other DNA
acaggaatcgccagattacccgttacagcgatacccgctggcatgaagattccgtgcgtaaccgctggttcagcg

SEQ ID NO: 206097 - DNA, 75 bp, synthetic construct
  source 1..75: mol_type = other DNA
gcggggccgtctgtgcgcgtgaatgaatggttcagcgcgtatgcgatggcgggtgtggcttacagccgtgtttcg

SEQ ID NO: 206098 - DNA, 75 bp, synthetic construct
  source 1..75: mol_type = other DNA
actttttccggggattatcttcaggtgaccgacaacaagggggatacgcacgatgtgctgaccggaagtgatgac

SEQ ID NO: 206099 - DNA, 75 bp, synthetic construct
  source 1..75: mol_type = other DNA
agcgcgtatgcgatggcgggtgtggcttacagccgtgtgtcgactttttccggggattatatccgcgtaactgac

SEQ ID NO: 206100 - DNA, 75 bp, synthetic construct
  source 1..75: mol_type = other DNA
caattgctgaatttgagaaaacattaattacgccggattcaccgtttgataaatggttgcgtggtgatgaaaatg

SEQ ID NO: 206101 - DNA, 75 bp, synthetic construct
  source 1..75: mol_type = other DNA
gtgaaataccgttatgagtttacggacacctggggctgtacgtcattcagtatgcagaagatcaaccttacagcg

SEQ ID NO: 206102 - DNA, 75 bp, synthetic construct
  source 1..75: mol_type = other DNA
tcgactttctccggggattatcttcgcgtaactgacaacaaggggaaaacgcacgatgtgctgaccggaagtgat

SEQ ID NO: 206103 - DNA, 75 bp, synthetic construct
  source 1..75: mol_type = other DNA
cctctggtggtcgcccgatccccgcgcggtgctatggccagaatcactgcatatcagccgtagtatgaagcgatt

SEQ ID NO: 206104 - DNA, 75 bp, synthetic construct
  source 1..75: mol_type = other DNA
gtcattcagttatgccaatgccaaagatgagagaatggcaacaccacgccgctgtttgtggcgcaggggaatcag

SEQ ID NO: 206105 - DNA, 75 bp, synthetic construct
  source 1..75: mol_type = other DNA
gcggggccgtctgtacgcgtgaatgaatggttcagcgcgtatgcgatggtgggtgtggcttacagccgtgtgtcg

SEQ ID NO: 206106 - DNA, 75 bp, synthetic construct
  source 1..75: mol_type = other DNA
atctccgggcagatccagcacatggttggcgctaatgcatcgcaaaccattttcgccatcaataaagataaaaat

SEQ ID NO: 206107 - DNA, 75 bp, synthetic construct
  source 1..75: mol_type = other DNA
cgccgcgctgaaatggaagccacgacaaacgccctgaatgaggagtggcgcacgctgtttcgtgaaagtcagggc

SEQ ID NO: 206108 - DNA, 75 bp, synthetic construct
  source 1..75: mol_type = other DNA
tttgaaaaacgtgcccgcgaccgcaacttcgaggccatgcaaaaggagatgtacggtcagtttgaaaacaccttc

SEQ ID NO: 206109 - DNA, 75 bp, synthetic construct
  source 1..75: mol_type = other DNA
atggcgatggactggaaactggcgctaccgctgcaccctgaatatcgcaccctgccgatggtctggtacgttcct

SEQ ID NO: 206110 - DNA, 75 bp, synthetic construct
  source 1..75: mol_type = other DNA
agtaatcaaccctctccggcagctattcataaaatgaaggttcgtcaggaacgggctgagaaggagaaatcagta

SEQ ID NO: 206111 - DNA, 75 bp, synthetic construct
  source 1..75: mol_type = other DNA
attcagacgctgagcctgcttaaatccacaatgggccgggaagccagtgccgttgtgggtgtggtgaattcagtt

SEQ ID NO: 206112 - DNA, 75 bp, synthetic construct
  source 1..75: mol_type = other DNA
cgaaacgcttgaggattttgatgaactgcttgcatccgaggagagagagaatgcatttttaccgcaggaagccgg

SEQ ID NO: 206113 - DNA, 75 bp, synthetic construct
  source 1..75: mol_type = other DNA
ggttgcagcatggccggtgtgattgttcatccagtggatcggccagcggcaaaagtggcgtggtttagcgagcgg

SEQ ID NO: 206114 - DNA, 75 bp, synthetic construct
  source 1..75: mol_type = other DNA
caccatatcactctgacctccagtgcggtaagcgacatcaaccgcctgattgtggcggaatacctgaacgaattt

SEQ ID NO: 206115 - DNA, 75 bp, synthetic construct
  source 1..75: mol_type = other DNA
cgaatgatcctgcaacaggcgctaaaagaggtggaagtcagaatgggcgatgtggatcgcaaatacatctacgcc

SEQ ID NO: 206116 - DNA, 75 bp, synthetic construct
  source 1..75: mol_type = other DNA
ccgcgatcgcggccaggcaatggtggacctgctggcggagtatgaaaaggtcggcctgcagctggattgtcggga

SEQ ID NO: 206117 - DNA, 75 bp, synthetic construct
  source 1..75: mol_type = other DNA
ggcagcaagatgggcgtaataaccaaaatcttcgccaacccggtggtgccgcagattgatgattactacgaacct

SEQ ID NO: 206118 - DNA, 75 bp, synthetic construct
  source 1..75: mol_type = other DNA
gcgtgatgtgaatggcaagatacgcccgcgtctgggcagcaagatgggcgtaataaccaaaatcttcgccaaccc

SEQ ID NO: 206119 - DNA, 75 bp, synthetic construct
  source 1..75: mol_type = other DNA
atgcacttttgccgcagaaagctgcagaattagccggaaagtatatccacgcgcataatattcttgtggatattc

SEQ ID NO: 206120 - DNA, 75 bp, synthetic construct
  source 1..75: mol_type = other DNA
attaaagcgattcaagaaatgagcgaagaaaataaaatccttcgtgaacgtcttgctgcaattgaggctaaatta

SEQ ID NO: 206121 - DNA, 75 bp, synthetic construct
  source 1..75: mol_type = other DNA
attaacaataaagttgatgtaattaaacgcgaaaccgacgcgacaatcgaggccaataaaaataaagctgcttcc

SEQ ID NO: 206122 - DNA, 75 bp, synthetic construct
  source 1..75: mol_type = other DNA
ttatttttaccaaagaccgagatcatgaagtagttcaaatctctgtttctcctgaaactcacgcggcactagaat

SEQ ID NO: 206123 - DNA, 75 bp, synthetic construct
  source 1..75: mol_type = other DNA
ctcattggggtgttgatcatcttgcggcaatgggtgttcatgctggcggtggtcaagctaccgtaatgatgcata

SEQ ID NO: 206124 - DNA, 75 bp, synthetic construct
  source 1..75: mol_type = other DNA
ttacaagaggtattaccggaagctgttaaaaccgcaaaaattggtggtcttgataacccagaagaaattttaaca

SEQ ID NO: 206125 - DNA, 75 bp, synthetic construct
  source 1..75: mol_type = other DNA
ttggtagttggaataatcgcagaccattcagctatgattttgcggacggtggattatatttaggtggtactgaaa

SEQ ID NO: 206126 - DNA, 75 bp, synthetic construct
  source 1..75: mol_type = other DNA
atgaaacggaatgcgaaaactatcatcgcagggatgattgcactggcaatatcacacaccgctttagccgacgat

SEQ ID NO: 206127 - DNA, 75 bp, synthetic construct
  source 1..75: mol_type = other DNA
tctgatgatctcgccgggtgcgaccaacccggagctgacccaacgcggttatcaatacatcatgcgtactgccgg

SEQ ID NO: 206128 - DNA, 75 bp, synthetic construct
  source 1..75: mol_type = other DNA
tcccggcccgggtaaccctagctgaggaccgccgccgtctgagagtggattcattcgcacttgatatgccagagg

SEQ ID NO: 206129 - DNA, 75 bp, synthetic construct
  source 1..75: mol_type = other DNA
gttatctgggctacagatgagggtattttacatattcgcaataaccacggtggacaatttagtcatcacttccag

SEQ ID NO: 206130 - DNA, 75 bp, synthetic construct
  source 1..75: mol_type = other DNA
tatttggaaagcggttgattggggtcgtcaatatatcgcagcaatggatgtgcattgtcccggtgatggtaataa

SEQ ID NO: 206131 - DNA, 75 bp, synthetic construct
  source 1..75: mol_type = other DNA
cagtgaagatctgaaagaccaccaggggagggtatttgcccgtaaggggcaggtgattaacccgctggatactgt

SEQ ID NO: 206132 - DNA, 75 bp, synthetic construct
  source 1..75: mol_type = other DNA
accagaccgggcttaaaaacctgcttgatacagcggtgctcgaaggtacggatgaagagtcagcgcgctcgctgg

SEQ ID NO: 206133 - DNA, 75 bp, synthetic construct
  source 1..75: mol_type = other DNA
gcggaagatcttaagctgctggccccgttagcaaaagacgggctggtggatgtgagtgagaaggggattcaggtg

SEQ ID NO: 206134 - DNA, 75 bp, synthetic construct
  source 1..75: mol_type = other DNA
atggctgataatcgtaagtgctctttttatatttatccggaacgaaatgcagctgatcgggtagctgacaggttt

SEQ ID NO: 206135 - DNA, 75 bp, synthetic construct
  source 1..75: mol_type = other DNA
aagaatcaccgtttctgataacgcgaaatttattttaagcagcagtaataagaatttctctggtgctattacgct

SEQ ID NO: 206136 - DNA, 75 bp, synthetic construct
  source 1..75: mol_type = other DNA
cgaatttttctggtgccataacgctctattacgactgggataatgaggaagataaagcactggcgacacaatatg

SEQ ID NO: 206137 - DNA, 75 bp, synthetic construct
  source 1..75: mol_type = other DNA
gaaaatggcgatccaatcttcagtaccgaagatatcgaaggacgtattaatctaaatgctcttgattcagaatat

SEQ ID NO: 206138 - DNA, 75 bp, synthetic construct
  source 1..75: mol_type = other DNA
tagcgtaacgctagaaggtgcgacgttaagtggcggaaaagtgagaaccaactcttcaggtcaggctccagtcgt

SEQ ID NO: 206139 - DNA, 75 bp, synthetic construct
  source 1..75: mol_type = other DNA
ttcgccgcttcgcttccattgcggcgaccctcgtcgattgccacgctggacatggcccgctacctgctcacacgc

SEQ ID NO: 206140 - DNA, 75 bp, synthetic construct
  source 1..75: mol_type = other DNA
gttcgatgaaatatggaaagaaggaatgaagccggaagagtggcttgatacctatctggaacaggcgaacctgat

SEQ ID NO: 206141 - DNA, 75 bp, synthetic construct
  source 1..75: mol_type = other DNA
taacgtcattaacagcggtgacagatcaaaacggaatcgcgacaacaagcgtgagaggagcgataacggggagcg

SEQ ID NO: 206142 - DNA, 75 bp, synthetic construct
  source 1..75: mol_type = other DNA
gctagctttatcgctgatccatcgactatcgccgccaccaacactgatttaagtaccttaaaggcaacggttgag

SEQ ID NO: 206143 - DNA, 75 bp, synthetic construct
  source 1..75: mol_type = other DNA
gatagcaatacagtaataatcacagcgcccccaagatccggtggtgctatttaccaaacagttcctcctgaatcg

SEQ ID NO: 206144 - DNA, 75 bp, synthetic construct
  source 1..75: mol_type = other DNA
ctccgcagcagcagactcaaaaacagcggctgcctcatctgccagcgccgcgtcaacaaatgccgggcaggcctc

SEQ ID NO: 206145 - DNA, 75 bp, synthetic construct
  source 1..75: mol_type = other DNA
ggggattatgagcacaacaagcggtagtggccagactcgcaatgcagggaagacatcatcagatggtgctcatac

SEQ ID NO: 206146 - DNA, 75 bp, synthetic construct
  source 1..75: mol_type = other DNA
aggtatatctgaacttgttttacgtgcaggtaatggtaatccgaaggggattactggtgctttatggcagcgcac

SEQ ID NO: 206147 - DNA, 75 bp, synthetic construct
  source 1..75: mol_type = other DNA
atgtcattcagcggtggtgctggttggttcaaattagcaacggtaaccatgccacaggcgagttctgttgtttca

SEQ ID NO: 206148 - DNA, 75 bp, synthetic construct
  source 1..75: mol_type = other DNA
ttttgaacgttatggttttcaggtagttaagcagcagagcgttgaatgccggggagcgtggtttactaattttta

SEQ ID NO: 206149 - DNA, 75 bp, synthetic construct
  source 1..75: mol_type = other DNA
aaaaagggatagtgatgctcacaagtgccacggacagtgacagtgagacgctggcggcaacaccaaaggcggtga

SEQ ID NO: 206150 - DNA, 75 bp, synthetic construct
  source 1..75: mol_type = other DNA
taatctttccgattacagtaattttgatatccgctatgtcagggatatccggctgggcgcacgtgttgttcaggg

SEQ ID NO: 206151 - DNA, 75 bp, synthetic construct
  source 1..75: mol_type = other DNA
aatgtcattcagcggtggtgctggttggttcaaattagcaacggtaaccatgccacaggcgagttctgttgtttc

SEQ ID NO: 206152 - DNA, 75 bp, synthetic construct
  source 1..75: mol_type = other DNA
gcagtgaaagcagctaatgacaatgcgaatggtcgggtaccttctgcccgtaaggtgaatggtaaggcgctttca

SEQ ID NO: 206153 - DNA, 75 bp, synthetic construct
  source 1..75: mol_type = other DNA
gccgttggcgaaggtgagttactcatcggctggagtggtacaagcggtgctcatgctccggcatttattcgttca

SEQ ID NO: 206154 - DNA, 75 bp, synthetic construct
  source 1..75: mol_type = other DNA
ggtaatattcatctcgccggagctgtcattgaagtaatggggataaagtcagcgatgacgatccgcattaccact

SEQ ID NO: 206155 - DNA, 75 bp, synthetic construct
  source 1..75: mol_type = other DNA
tacgatatttacgttgcaatcggaaattatgcgactggtgtaaatattcaatgggattataccagtaatgccagc

SEQ ID NO: 206156 - DNA, 75 bp, synthetic construct
  source 1..75: mol_type = other DNA
gatggaaataaaaccgcaacgtgcactgtaacggttaatgaagccgcagtaagtgtcgactctgtcagcgttgat

SEQ ID NO: 206157 - DNA, 75 bp, synthetic construct
  source 1..75: mol_type = other DNA
gaaggtaagcgccgtcagcgttgaaccgtcaaccaaagaagtgacggtaggtgacagattcacggtcggcgaagc

SEQ ID NO: 206158 - DNA, 75 bp, synthetic construct
  source 1..75: mol_type = other DNA
ggtttaatcaggtgatttatttaataaaaagagagtgtttgtgggtgtcttgtgtatatgtcttactgggcatct

SEQ ID NO: 206159 - DNA, 75 bp, synthetic construct
  source 1..75: mol_type = other DNA
ctgcggcagctgcgcgttcgtttgccctggcaaatgctgacgttgtcatgcttgttggtgcacgactgaattggt

SEQ ID NO: 206160 - DNA, 69 bp, synthetic construct
  source 1..69: mol_type = other DNA
cgcaccacgccttcagtagcggagcaggaaggacatctgatggaaatggaagccacgcaagcaccttaa

SEQ ID NO: 206161 - DNA, 75 bp, synthetic construct
  source 1..75: mol_type = other DNA
cttatcagtaaagagtcgccagcaggttacaaaggtacggcgatgggtgtttactccaccagccagtttcttggc

SEQ ID NO: 206162 - DNA, 75 bp, synthetic construct
  source 1..75: mol_type = other DNA
tcgccagtaccatgaaagaaccgccgtatgtcagcagcttgcgcattgaaatcccggcggacattgccgcaaacg

SEQ ID NO: 206163 - DNA, 75 bp, synthetic construct
  source 1..75: mol_type = other DNA
gaatcaatagatgtattaaagcaatcagacggaaatgatattgaaacggatgatgttattgaccgactaataaaa

SEQ ID NO: 206164 - DNA, 75 bp, synthetic construct
  source 1..75: mol_type = other DNA
tacacgttgcccggagtcaatgaggaaacactgggatgtgttactttctctgatatcaaaagcaattaataatga

SEQ ID NO: 206165 - DNA, 75 bp, synthetic construct
  source 1..75: mol_type = other DNA
atgaaagattatcaattccttttgtatatctcttatttcagtggtctctcccgcatttgcattcggacggaatga

SEQ ID NO: 206166 - DNA, 75 bp, synthetic construct
  source 1..75: mol_type = other DNA
tgtttgacggtcagggggtatttctcgctggcgcaatgctggccgcagtgtggctggcagtcgccagtaccatga

SEQ ID NO: 206167 - DNA, 75 bp, synthetic construct
  source 1..75: mol_type = other DNA
atgaacgattattacagttcgctttctgaatcagagtattttgaaaacaaattatacctatctgtatgctataag

SEQ ID NO: 206168 - DNA, 75 bp, synthetic construct
  source 1..75: mol_type = other DNA
tttctgacgtgaaacgcggtattgaagtcgccctgaaagaactcgatcggacctttggcgatgtctatgccaacg

SEQ ID NO: 206169 - DNA, 75 bp, synthetic construct
  source 1..75: mol_type = other DNA
atccgcgagccgattctcggccttgatgtgctgcaaaccaccacgcggggtgagtggtatcgaagtgattttttt

SEQ ID NO: 206170 - DNA, 75 bp, synthetic construct
  source 1..75: mol_type = other DNA
gatcctgatgcctgcctgcttcggtctggcggatgacaaactctggcgttggttgaacgaagaattaccttgctc

SEQ ID NO: 206171 - DNA, 75 bp, synthetic construct
  source 1..75: mol_type = other DNA
ttgccgcccagcagttcggtacgccggaatcattccctgcaaacagaaaactgaaaaaactgaccacggtttttt

SEQ ID NO: 206172 - DNA, 75 bp, synthetic construct
  source 1..75: mol_type = other DNA
ccatctgaattaccatatgacgactgaacatcagaatttcttcggtaagaacccgacgctggggcataccgaaat

SEQ ID NO: 206173 - DNA, 75 bp, synthetic construct
  source 1..75: mol_type = other DNA
atggcagaaaaaagctgcacgttaacggaatttgttggcaccgctattggcgacactgtaggtctggtcattgcg

SEQ ID NO: 206174 - DNA, 75 bp, synthetic construct
  source 1..75: mol_type = other DNA
ggcggggcgtgttagtgagcaggaaagcgagccgaatgcctttcagcaagggattagccgcgtcagtatgctgct

SEQ ID NO: 206175 - DNA, 75 bp, synthetic construct
  source 1..75: mol_type = other DNA
cgccagccggagcacagcaatccgctggagtgcgacaccctgtgttttatgggcaccaccgtggtgagcggtacg

SEQ ID NO: 206176 - DNA, 75 bp, synthetic construct
  source 1..75: mol_type = other DNA
agctttattttgacaaaattaaagccattgacccgctctctcgtcagttccttgtcgtcaaaaacccacagagga

SEQ ID NO: 206177 - DNA, 75 bp, synthetic construct
  source 1..75: mol_type = other DNA
aaaaccagttgcagcgccagttcgtgcgccagggcggtgtatggatgccgggcgatgaagtgaaaaaagtgacct

SEQ ID NO: 206178 - DNA, 75 bp, synthetic construct
  source 1..75: mol_type = other DNA
ttactttcaggaaacagatgcaggcatttttgatgcgctcatgtatcttcctgttgagtatgtctttacatcgtc

SEQ ID NO: 206179 - DNA, 75 bp, synthetic construct
  source 1..75: mol_type = other DNA
cgtggagtactctggcttacggtcttggtgtaactactgtcagtcttggaatttatgccgcaggaaagccttttg

SEQ ID NO: 206180 - DNA, 75 bp, synthetic construct
  source 1..75: mol_type = other DNA
tggggcgacgctacttggactgctgtttattatgtccagcgtggtggtgattggcgctcaactaatgggttacca

SEQ ID NO: 206181 - DNA, 75 bp, synthetic construct
  source 1..75: mol_type = other DNA
atgcccgatacgttggtgattatcttttttgttgctattttaaccagccttgccacttgggtagttccggtgggg

SEQ ID NO: 206182 - DNA, 75 bp, synthetic construct
  source 1..75: mol_type = other DNA
cttctttcgtgaaaagcaggctgatgttgaacaacgtccgtttacctttggtgactggctggtattgattgtcct

SEQ ID NO: 206183 - DNA, 75 bp, synthetic construct
  source 1..75: mol_type = other DNA
gggattttactgctggttggcaatggcgaagcgggtgatgccagcgtgctgaatactattctcaatagcattgcc

SEQ ID NO: 206184 - DNA, 75 bp, synthetic construct
  source 1..75: mol_type = other DNA
ccgggcctgatgaacttcccgtttgaagggttaacctcaggatcgaaatacgggacagccgttggcatcatcatg

SEQ ID NO: 206185 - DNA, 75 bp, synthetic construct
  source 1..75: mol_type = other DNA
tttcgcattctgaccaacgaggcaggcgaacccgagtatcaccgagtacaactgttcacgacgggagatgaacgc

SEQ ID NO: 206186 - DNA, 75 bp, synthetic construct
  source 1..75: mol_type = other DNA
acgatgccactgcgggactggcgtatggcaatgagccgctttattatcgagttcggtgaccgcctggacggtcac

SEQ ID NO: 206187 - DNA, 75 bp, synthetic construct
  source 1..75: mol_type = other DNA
tggttgtctggagattcagggggccagtctagtcatctacacaaccaacgccatcgagtcgctgaacagcgtaat

SEQ ID NO: 206188 - DNA, 75 bp, synthetic construct
  source 1..75: mol_type = other DNA
atgaatcacagcgaaacaattaccatcgaatgcaccattaacgggatgccttttcagcttcatgccgcaccaggt

SEQ ID NO: 206189 - DNA, 75 bp, synthetic construct
  source 1..75: mol_type = other DNA
ttaccaaacggtaatggcatacaaagtttctgaagtcatcgctgcaatccgcgccgctggcattcgcatcaaagg

SEQ ID NO: 206190 - DNA, 75 bp, synthetic construct
  source 1..75: mol_type = other DNA
atggacgatgccgttgaaggactggcgaatggcaatgagccgctttattatcgagttcggtgaccgcctggacgg

SEQ ID NO: 206191 - DNA, 75 bp, synthetic construct
  source 1..75: mol_type = other DNA
tgccactgcgggactggcgtatggcaatgagccgctttattatcgagttcggtgaccgcctggacggccacttct

SEQ ID NO: 206192 - DNA, 75 bp, synthetic construct
  source 1..75: mol_type = other DNA
ctatcgcaggcaaaagatagtaatggaacaaaaggctatgtttttgtaggggaatcgctggattaccttatcact

SEQ ID NO: 206193 - DNA, 75 bp, synthetic construct
  source 1..75: mol_type = other DNA
aacagaaagaagaatgaatgctcccgctaaaggagctgcacggataggaagaataagcaccaaggagcgggaaag

SEQ ID NO: 206194 - DNA, 75 bp, synthetic construct
  source 1..75: mol_type = other DNA
atggttgattatccaaaacgtgatgctatttccaacatcaacgctataattgtagatacatttttgtatatacaa

SEQ ID NO: 206195 - DNA, 75 bp, synthetic construct
  source 1..75: mol_type = other DNA
aacagatttccacgaggattaccaaacggtaatggcatacaaagtttctgaagtcatcgctgcaatccgcgctgc

SEQ ID NO: 206196 - DNA, 75 bp, synthetic construct
  source 1..75: mol_type = other DNA
gacgtttccggtgaaggcgtacagcaggcactgttgaaactgatcgaaggtactgttgctgccgttccaccgcag

SEQ ID NO: 206197 - DNA, 75 bp, synthetic construct
  source 1..75: mol_type = other DNA
tgctgaaatcatgtcagcaacaactgacacagccctcaaaccatgccagcgccgatctactgccggccatagtag

SEQ ID NO: 206198 - DNA, 75 bp, synthetic construct
  source 1..75: mol_type = other DNA
tctggtcgaatttcatgttcatacgcatactcatacacgttgggataaaaagttcacttcacgagaagaacagtg

SEQ ID NO: 206199 - DNA, 75 bp, synthetic construct
  source 1..75: mol_type = other DNA
agcattactgccagtgactgttacgctggacatcattactgcaccgctgcaatttctggttgtatatgcagtaaa

SEQ ID NO: 206200 - DNA, 75 bp, synthetic construct
  source 1..75: mol_type = other DNA
atttaccggcacaatatcgctttactactactggaataacgaagaagaaaaggcactggcaacgcattatggttt

SEQ ID NO: 206201 - DNA, 75 bp, synthetic construct
  source 1..75: mol_type = other DNA
gcacaatattcaggttgccgatgacgcaagatttgttttaaatgcggggaaaaagaaatttaccggcacaatatc

SEQ ID NO: 206202 - DNA, 75 bp, synthetic construct
  source 1..75: mol_type = other DNA
agaaggcaaagacagcaaaatagccaatcttaccgccgaacgcgatgctcttcgtgaaggtgagatgggcgacgc

SEQ ID NO: 206203 - DNA, 75 bp, synthetic construct
  source 1..75: mol_type = other DNA
cctttcgatcagcgaattaatgcgcttaacgattttatgaagcacttttcgccagctaccgtgctggcactgctg

SEQ ID NO: 206204 - DNA, 75 bp, synthetic construct
  source 1..75: mol_type = other DNA
ttatcgaatggcaggcaactggcgacgctaagagcggactggcatggatttataacacactgtttggccctggcg

SEQ ID NO: 206205 - DNA, 75 bp, synthetic construct
  source 1..75: mol_type = other DNA
gattacggcacaaaaaccacaaatagcgcaggagctcattcacacaatatacctgttggtcacactggcgcgggg

SEQ ID NO: 206206 - DNA, 75 bp, synthetic construct
  source 1..75: mol_type = other DNA
atcagcctggcgattttcagcaactatgcactattttcattagagcggttacgatgacggctagtcagcactatt

SEQ ID NO: 206207 - DNA, 75 bp, synthetic construct
  source 1..75: mol_type = other DNA
gttttgcgtgcaggtaatggtaatccgaaggggattactggtgctttatggcagcgcacatcggcagggtttaca

SEQ ID NO: 206208 - DNA, 75 bp, synthetic construct
  source 1..75: mol_type = other DNA
acgccactacagcgcggaaaggccttgtccagctcagtagcgccaccaacagcgattcagaaacgctcgccgcaa

SEQ ID NO: 206209 - DNA, 75 bp, synthetic construct
  source 1..75: mol_type = other DNA
acaacaatacttcagcatacgcagaaactcccggtaccggtggtggaatgcatgcaactaacacaaacaaggcag

SEQ ID NO: 206210 - DNA, 75 bp, synthetic construct
  source 1..75: mol_type = other DNA
cgtagatcgtattatcaacgtattcagacacagtcagcaggtgctcatacccactcgctgtctggtactgcagca

SEQ ID NO: 206211 - DNA, 75 bp, synthetic construct
  source 1..75: mol_type = other DNA
acgaatgcatcatcaagtgccagtagtgcagcttcctcggcaacggcggcaggaaattccgcgaaggcggcaaaa

SEQ ID NO: 206212 - DNA, 75 bp, synthetic construct
  source 1..75: mol_type = other DNA
atgaagttgaattttaagggattttttaaggctgccggtttgtgttctttggcatttgcgttgaccggatgtatc

SEQ ID NO: 206213 - DNA, 75 bp, synthetic construct
  source 1..75: mol_type = other DNA
ctggagtagcggagcctataacgcaactattagtggtgcatcaacgttaattattcatttttatatgggagaagg

SEQ ID NO: 206214 - DNA, 75 bp, synthetic construct
  source 1..75: mol_type = other DNA
aacagcacttccgagtcactggcggcaacgccaaaagcagttaaggccgcgtatgacctggctaacgggaaatac

SEQ ID NO: 206215 - DNA, 75 bp, synthetic construct
  source 1..75: mol_type = other DNA
ctgaaacggcagcgggacagagcgcctcagctgcggcaggctcaaaaacagcggctgcgtcgtctgccagtgccg

SEQ ID NO: 206216 - DNA, 75 bp, synthetic construct
  source 1..75: mol_type = other DNA
ggctggacgattaagggcaaacctgccagtggtcgggccgtattgtctcaggaacaggacggcattaaatcgcat

SEQ ID NO: 206217 - DNA, 75 bp, synthetic construct
  source 1..75: mol_type = other DNA
gttctgttgtttcaattacgttgattggtagcgcgggatttaacgtggggtcacctcaacaggcaggtatatctg

SEQ ID NO: 206218 - DNA, 75 bp, synthetic construct
  source 1..75: mol_type = other DNA
ccgttaagggactggcgaatggcaatgagccgctttattatcgagtttggtgaccgtcttgacggtcacttttaa

SEQ ID NO: 206219 - DNA, 75 bp, synthetic construct
  source 1..75: mol_type = other DNA
aaacggaaattcatactggcgatgatgatgcactgaaggagattttaactcatgtcaccgaggccacgaaaaaac

SEQ ID NO: 206220 - DNA, 75 bp, synthetic construct
  source 1..75: mol_type = other DNA
atggaaatatcattcacctgaaagggatgacagccgttggcgaaggtgagttactcatcggctggagtggtacaa

SEQ ID NO: 206221 - DNA, 75 bp, synthetic construct
  source 1..75: mol_type = other DNA
tgctggttggttcaaattagcaacggtaaccatgccacaggcgagttctgttgtttcaattacgttgattggtgg

SEQ ID NO: 206222 - DNA, 75 bp, synthetic construct
  source 1..75: mol_type = other DNA
aggaaattccgcgaaggcggcaaaaacgtccgagacgaacgctaagtcttctgaaacggcagcggaacagagtgc

SEQ ID NO: 206223 - DNA, 75 bp, synthetic construct
  source 1..75: mol_type = other DNA
gcttcctcggcaacggcggcaggaaattccgcgaaggcggcaaaaacgtccgagacgaacgctaagtcttctgag

SEQ ID NO: 206224 - DNA, 75 bp, synthetic construct
  source 1..75: mol_type = other DNA
caggcgagttctgttgtttcaattacgttgattggtggggctggatataacgtcggttcacctcaacaggcaggt

SEQ ID NO: 206225 - DNA, 75 bp, synthetic construct
  source 1..75: mol_type = other DNA
caaagacgtctgagacaaacgcctggtcctctgaaacggcagcagcacagagtgcctccgcagcagcaggctcaa

SEQ ID NO: 206226 - DNA, 75 bp, synthetic construct
  source 1..75: mol_type = other DNA
ccgcgtcaacaagtgccgggcaggcctcagccagtgccaccgccgccggaaaatcggcagaaagtgctgcatcgt

SEQ ID NO: 206227 - DNA, 75 bp, synthetic construct
  source 1..75: mol_type = other DNA
tgcagcgaaaaccggtacagaatctgaaggatgtcctcaaagaagtgcctggcgtacaactgacgaacgaaaagg

SEQ ID NO: 206228 - DNA, 75 bp, synthetic construct
  source 1..75: mol_type = other DNA
aaaaaatgcgccaggaaaaacggaaaattatcccactgtgcccgtttgcgaaacacgaatttgataaaacgcgcg

SEQ ID NO: 206229 - DNA, 75 bp, synthetic construct
  source 1..75: mol_type = other DNA
aaatcagagagcattactccgaaagatgatttcgaagaacaaaccagacgcaatctttctatgttaaaaaaataa

SEQ ID NO: 206230 - DNA, 75 bp, synthetic construct
  source 1..75: mol_type = other DNA
aatctggtaaaacttatagagcaaacaacaggatacaaatccacatcgattgatataagtacgctaaaaaacatt

SEQ ID NO: 206231 - DNA, 75 bp, synthetic construct
  source 1..75: mol_type = other DNA
acgggtacaggcactggaacgggtacaggcactggaacgggtagcggtacaggagctggagtcggaacaggttct

SEQ ID NO: 206232 - DNA, 75 bp, synthetic construct
  source 1..75: mol_type = other DNA
gaaagaaagttgtggcatacctgcacccgacactttatccgcaggacagcctgacacaacaaacaatagactctc

SEQ ID NO: 206233 - DNA, 75 bp, synthetic construct
  source 1..75: mol_type = other DNA
taatactgatatgtctgttttatggtgccagaaagggtggtatcgcgctgggtttattaggcggtatcggcctgg

SEQ ID NO: 206234 - DNA, 75 bp, synthetic construct
  source 1..75: mol_type = other DNA
cgcaatgcttcttgcgattgttactggtcagcgccgtgatgacatttgccacatgcgtttttcagatgtgtggaa

SEQ ID NO: 206235 - DNA, 75 bp, synthetic construct
  source 1..75: mol_type = other DNA
atgcctttgcggcatcgggcaatgcgtgtcggatgccgcatgaacgccttatccgacctactgttctgctccagc

SEQ ID NO: 206236 - DNA, 75 bp, synthetic construct
  source 1..75: mol_type = other DNA
tgagctatacattcgggaaggttactgcatttaaaaataacgaatattatatggtagatggtagtaatactaaag

SEQ ID NO: 206237 - DNA, 75 bp, synthetic construct
  source 1..75: mol_type = other DNA
aatttgcttttcttctcacagcactgctgagcaccttctttctcaatatgtttccaccgaacgctgcagggtacg

SEQ ID NO: 206238 - DNA, 75 bp, synthetic construct
  source 1..75: mol_type = other DNA
cccgtgcaggaaaaagaccgcgcgccggtggcgctgaaaggggccgcgctcacgcgccgcccctttcattacgcg

SEQ ID NO: 206239 - DNA, 75 bp, synthetic construct
  source 1..75: mol_type = other DNA
tacccatgttccgacgatgattattcgtctgcgcgcctgatgacacaggcaggcgggaggataaatgcccgtctg

SEQ ID NO: 206240 - DNA, 75 bp, synthetic construct
  source 1..75: mol_type = other DNA
aaaacaagaatggcactattgatatcccaaacgaacacggaacaacagatcgcgccgtaatatataacgggaagc

SEQ ID NO: 206241 - DNA, 75 bp, synthetic construct
  source 1..75: mol_type = other DNA
gattattttgtggttaatcttttaaagttactaaaagaaataaaaccagaaacacatactctcgtgtttgcagga

SEQ ID NO: 206242 - DNA, 75 bp, synthetic construct
  source 1..75: mol_type = other DNA
tttctgcaactgaaggaaagctggcgctattctccaaaccacttgtacgctttagtcagcagctggcaataccag

SEQ ID NO: 206243 - DNA, 75 bp, synthetic construct
  source 1..75: mol_type = other DNA
aactaggtataatcgcgtctcagtatttattgttggtgataatgaccaagccatttatcaagatcttggcgtttc

SEQ ID NO: 206244 - DNA, 75 bp, synthetic construct
  source 1..75: mol_type = other DNA
agctttatgtttcatttttgatataagaaaaatttttatagaaaaaccagtttatgtcttttttagtgtgttgtt

SEQ ID NO: 206245 - DNA, 75 bp, synthetic construct
  source 1..75: mol_type = other DNA
attttaggatctttcggttcacaatctgaaactgatattgatggattcggtgtccgttggggggcttatactcac

SEQ ID NO: 206246 - DNA, 75 bp, synthetic construct
  source 1..75: mol_type = other DNA
ctcaggatattgcagatattcttaacgggctgactgaacaattagatggcctctctgaatatcgcgggatatctt

SEQ ID NO: 206247 - DNA, 75 bp, synthetic construct
  source 1..75: mol_type = other DNA
ttccagcatgccacccatgcaatctgcacaagcattgcagtagcctggaagattaccggcgaattatcggtgatg

SEQ ID NO: 206248 - DNA, 75 bp, synthetic construct
  source 1..75: mol_type = other DNA
caaggcgctggttcgtatgggattggttgaaatgaaatctgacccggttgtgttctggtttgaaaaatatcaaga

SEQ ID NO: 206249 - DNA, 75 bp, synthetic construct
  source 1..75: mol_type = other DNA
atgcaatacgctgaattccaggctgaagcaacagccaatggtatacaaacaggcagtatgactattgattatcac

SEQ ID NO: 206250 - DNA, 75 bp, synthetic construct
  source 1..75: mol_type = other DNA
tttattttatggttgaaagaactttatgtctttttagaaatgaagtaccaaaaatccattaagatagagacagat

SEQ ID NO: 206251 - DNA, 75 bp, synthetic construct
  source 1..75: mol_type = other DNA
ctaatctaagttattgcataattatagccctgataattagcgcttacacatgtcttatgatgatacctcttgtta

SEQ ID NO: 206252 - DNA, 75 bp, synthetic construct
  source 1..75: mol_type = other DNA
tgaacgacccgagcgagaaaaatctcaacgaactggcgaaggttcaggaactgctggatcaccacaacctgtggc

SEQ ID NO: 206253 - DNA, 75 bp, synthetic construct
  source 1..75: mol_type = other DNA
tgccacttatttttgcgatcggtgtcgcccttggctttaccaataacgatggcgtatccgctcttgccgcagttg

SEQ ID NO: 206254 - DNA, 75 bp, synthetic construct
  source 1..75: mol_type = other DNA
ggttcaactgttaatgttgctgattcaacgctgtgtgaaccgccccggaaatcctggagactaaactccctgaga

SEQ ID NO: 206255 - DNA, 75 bp, synthetic construct
  source 1..75: mol_type = other DNA
cagcgaagtgtttaataacaccatcactgttaaagattcaaccgtgacctctggttcatggactgaagtggcaca

SEQ ID NO: 206256 - DNA, 75 bp, synthetic construct
  source 1..75: mol_type = other DNA
agcggaagtgatgaaaaccagtccggaaatcctccgcacctaccacgatgaaggcgaggatgcggcacgcacgct

SEQ ID NO: 206257 - DNA, 75 bp, synthetic construct
  source 1..75: mol_type = other DNA
gataacaccgtgttaataaaaggactaaaaaaggttgtaaatgttaaattttcaagaaatacgcatcttatagaa

SEQ ID NO: 206258 - DNA, 75 bp, synthetic construct
  source 1..75: mol_type = other DNA
attataccttcaatgaagggccgctttctggtttaacattgggaacaggtggtcgttttattggttccagctatg

SEQ ID NO: 206259 - DNA, 75 bp, synthetic construct
  source 1..75: mol_type = other DNA
gatgcatcaatttcagtctgtaaaagaagcattaggttatacacctggcgttacggttagcagtcgtggtgcttc

SEQ ID NO: 206260 - DNA, 75 bp, synthetic construct
  source 1..75: mol_type = other DNA
atggcaccggctctggttgctgcatttggtggtaaagaaaacattactaacctcgacgcatgtattacccgtctg

SEQ ID NO: 206261 - DNA, 75 bp, synthetic construct
  source 1..75: mol_type = other DNA
atctccggtgcgatcgcagcgtacatgtttaaccgtttctaccgtattaagctgcctgagtatcttggcttcttt

SEQ ID NO: 206262 - DNA, 75 bp, synthetic construct
  source 1..75: mol_type = other DNA
accaacgcagcaggtcaggtgttccacggcgacattccgcgttatatggcgggtgacccgactgcaggcaaactg

SEQ ID NO: 206263 - DNA, 75 bp, synthetic construct
  source 1..75: mol_type = other DNA
tctcttcattaaaaaatatctggattcagcgaaaccgggagttaccagaaccatttaaatggattgaccttaaaa

SEQ ID NO: 206264 - DNA, 75 bp, synthetic construct
  source 1..75: mol_type = other DNA
ctggttttgacttcagcgatgcgctggatgatgacggcgtttactcttatcgcctgaccggtcttgcgcgttctg

SEQ ID NO: 206265 - DNA, 75 bp, synthetic construct
  source 1..75: mol_type = other DNA
acccctcttcgagtccatgtgctaacgtgccgcagtctcaatggggccatacactgactcgtcagtacgttatcg

SEQ ID NO: 206266 - DNA, 75 bp, synthetic construct
  source 1..75: mol_type = other DNA
cacgggacctggctggaataattccaccagcaggaaaaacaccaccaacatttcatgaacaacgttccctgtcag

SEQ ID NO: 206267 - DNA, 75 bp, synthetic construct
  source 1..75: mol_type = other DNA
tatttacgattatcggggtaatgactctaacttattgatagtgttttatgttcagataatgcccgatgactttgt

SEQ ID NO: 206268 - DNA, 75 bp, synthetic construct
  source 1..75: mol_type = other DNA
atttaccgaagacatgggcgcagatattgttttcgaaacagcgggttctgcggtcaccgttaaacaggcacctta

SEQ ID NO: 206269 - DNA, 75 bp, synthetic construct
  source 1..75: mol_type = other DNA
acaacccaactaccgcggcgcattaacgcactatctgtgtcatccggagagctttacttacaaactgcccgacaa

SEQ ID NO: 206270 - DNA, 75 bp, synthetic construct
  source 1..75: mol_type = other DNA
gggttagccgaacttatggcaacggagatcaaacgcggaccgtcctgaaaaatgtcgatttgacaatcgttgctg

SEQ ID NO: 206271 - DNA, 75 bp, synthetic construct
  source 1..75: mol_type = other DNA
tctgaaaatacaggacacgcgactgaaaaatggggatattgcaactacaactcacaaagaaaaagcccgaatggc

SEQ ID NO: 206272 - DNA, 75 bp, synthetic construct
  source 1..75: mol_type = other DNA
attctcatcgtctctccacgtgccatctttctctggaaataatctggcatctcaggatattgcagatattcttaa

SEQ ID NO: 206273 - DNA, 75 bp, synthetic construct
  source 1..75: mol_type = other DNA
caaagaaaaagcccgaatggctgcatacctggtttcccgtctgggaaaccaccccattgaaagaactggaagtaa

SEQ ID NO: 206274 - DNA, 75 bp, synthetic construct
  source 1..75: mol_type = other DNA
acagcatgcaggggaagttcctcctggatggaatcctccggaggctacccgtaaaccgatccctaaagtaaccag

SEQ ID NO: 206275 - DNA, 75 bp, synthetic construct
  source 1..75: mol_type = other DNA
ctgctcaaccttaatcggtatgattttcggttatctccccgcccgcaaggcagcaaggatggatccgatcatttc

SEQ ID NO: 206276 - DNA, 75 bp, synthetic construct
  source 1..75: mol_type = other DNA
tctatcgcgtcatccttcagcagcccattactaacgatcaggcggcgctgttacgccagacgctcgctgcctttg

SEQ ID NO: 206277 - DNA, 75 bp, synthetic construct
  source 1..75: mol_type = other DNA
agcgcgtagcgcaggaaatgcaaaaagagatcgctatcatcctgcaacgtgaaattaaagaccctcgtctgggga

SEQ ID NO: 206278 - DNA, 75 bp, synthetic construct
  source 1..75: mol_type = other DNA
tgtcgacagctctgcgctgccatggctgggcgaacagttctcgctgttcggtgacggctgggaactggcggagtc

SEQ ID NO: 206279 - DNA, 75 bp, synthetic construct
  source 1..75: mol_type = other DNA
actgaaaactatcggtggtattgatacccgtattacggggatcaataagtcaaccagtgaagagcttaataaggt

SEQ ID NO: 206280 - DNA, 75 bp, synthetic construct
  source 1..75: mol_type = other DNA
gggccgtggcacgcagtggcaggcgtggcagcacagacacagatatcagttcaggcggtgattgaccagataaaa

SEQ ID NO: 206281 - DNA, 75 bp, synthetic construct
  source 1..75: mol_type = other DNA
tacaggcagcggtacgggtacaggcactggaacgggtacaggcactggaacgggtacaggcactggaacgggtac

SEQ ID NO: 206282 - DNA, 75 bp, synthetic construct
  source 1..75: mol_type = other DNA
agaaatgcgccgtactctacaggatatttcaagattgtcagatcgaaattcccgaaaaggcttctcgttaagtct

SEQ ID NO: 206283 - DNA, 75 bp, synthetic construct
  source 1..75: mol_type = other DNA
catctgaaggcatccgctcagcaaaatcgcgatgagaaagaacgtaaactacagcaacagtacaacaaacaggcc

SEQ ID NO: 206284 - DNA, 75 bp, synthetic construct
  source 1..75: mol_type = other DNA
gtttcacctgaagcaacaggatacgccgttgtttgccgccatccacaaaccggaagagcagccggacaagctttt

SEQ ID NO: 206285 - DNA, 75 bp, synthetic construct
  source 1..75: mol_type = other DNA
gaagtggcggcgcagcaggtttctgatcagcaactggaaactgcccgcttccgcttcccgtacaacacgccaacc

SEQ ID NO: 206286 - DNA, 75 bp, synthetic construct
  source 1..75: mol_type = other DNA
gccatggttgctgaacggatttactgggcagaagatgaatctgtcgcccgtctccatctaaaatcagtcagatga

SEQ ID NO: 206287 - DNA, 75 bp, synthetic construct
  source 1..75: mol_type = other DNA
gctgggataaaaataagaaaccagaaaattttaacaatctacccctggaggagcagagtgagttaattaaagaga

SEQ ID NO: 206288 - DNA, 75 bp, synthetic construct
  source 1..75: mol_type = other DNA
tggctcgtcgtcgtgcttctggtggtggctcatacgccctgaatccgggggtagagatagacagtagcctgatgg

SEQ ID NO: 206289 - DNA, 75 bp, synthetic construct
  source 1..75: mol_type = other DNA
gatgagtggatttgcgatcgtagcggtgaaaccttctgggatttgctggaacaggcggcgacgcagcaggcggga

SEQ ID NO: 206290 - DNA, 75 bp, synthetic construct
  source 1..75: mol_type = other DNA
cggctaccattttgatctgaaaggtgacgaatggatttgcgaccgtagcggtgaaaccttctgggatttgctgga

SEQ ID NO: 206291 - DNA, 75 bp, synthetic construct
  source 1..75: mol_type = other DNA
gacgaatggatttgcgatcgcagtggcgaaaccttctgggatttgctggaacaggcggcgacgcagcaggcggga

SEQ ID NO: 206292 - DNA, 75 bp, synthetic construct
  source 1..75: mol_type = other DNA
aatgtaataccaataatatgtttcttctttatttttttagcatgctatttttataagaggtttcgctcattaatt

SEQ ID NO: 206293 - DNA, 75 bp, synthetic construct
  source 1..75: mol_type = other DNA
agatgggactatacatactgtctttaatgttgctgtttgtttttattatcattttgagcgcaaaaatcccatttt

SEQ ID NO: 206294 - DNA, 75 bp, synthetic construct
  source 1..75: mol_type = other DNA
tggctgatcaactgtggctgaccattgaagaacgtctggacgactgggatggcgacagcgatatcgactgcgaaa

SEQ ID NO: 206295 - DNA, 75 bp, synthetic construct
  source 1..75: mol_type = other DNA
gcaggaattgagatgtttcagggagatctgttttccaaagctaaattgaatggtatcccttcagttgcgtggccg

SEQ ID NO: 206296 - DNA, 75 bp, synthetic construct
  source 1..75: mol_type = other DNA
taatggttctcattttttccagcttctggaaggtccggaagaacaggttcaaatgatatatcgggccatatgcca

SEQ ID NO: 206297 - DNA, 75 bp, synthetic construct
  source 1..75: mol_type = other DNA
agacgaccttgctgatgccgtgctggttgccaccacaccggggcaggtttacggcgatccggttgacccgggatg

SEQ ID NO: 206298 - DNA, 75 bp, synthetic construct
  source 1..75: mol_type = other DNA
gatgagtggatttgcgaccgtagcggcgaaaccttctgggatttgctggaacaggccgcgacgcagcaggcagga

SEQ ID NO: 206299 - DNA, 75 bp, synthetic construct
  source 1..75: mol_type = other DNA
cggctaccattttgatctgaaaggcgatgagtggatttgcgatcgtagcggcgaaaccttctgggatttgctgga

SEQ ID NO: 206300 - DNA, 75 bp, synthetic construct
  source 1..75: mol_type = other DNA
atcaaccgccaggaaccactgcaccaggtgtggctggcaaccaaacagggtggctaccattttgatctgaaaggc

SEQ ID NO: 206301 - DNA, 75 bp, synthetic construct
  source 1..75: mol_type = other DNA
gccaaccggacataaagccagtattctcaaatctttttgcgcgatatttcgtaatccgccattgctggttttatg

SEQ ID NO: 206302 - DNA, 75 bp, synthetic construct
  source 1..75: mol_type = other DNA
gcttgaagttgctgctgatacagaaaatggcgatcgataacaatttttcatttaatttctggcatacatttttct

SEQ ID NO: 206303 - DNA, 75 bp, synthetic construct
  source 1..75: mol_type = other DNA
taccgagcttgatgagcatggtggatggaaacgcaaactgctgagtgagcttgcgtatgccggtgttccttttga

SEQ ID NO: 206304 - DNA, 75 bp, synthetic construct
  source 1..75: mol_type = other DNA
atgaaaagtaaatttgttgcgttggctctctctctgttcctttcacagtcagttctggcgggtggcgtcggactt

SEQ ID NO: 206305 - DNA, 75 bp, synthetic construct
  source 1..75: mol_type = other DNA
tgaatggtataagggcgatttttttgcgccgcaaccgtggcagcagttcggtgtaaccactgatgagacgctacg

SEQ ID NO: 206306 - DNA, 75 bp, synthetic construct
  source 1..75: mol_type = other DNA
ctctctgaccacggtatggaattcggttcaggaatggcaccgggacggcatactgaattcagctgacagggggaa

SEQ ID NO: 206307 - DNA, 75 bp, synthetic construct
  source 1..75: mol_type = other DNA
catatcggtatccccacccccaacagtgacactaccgaccaccgtgaagctgtcgtgatcggcaacctgatattc

SEQ ID NO: 206308 - DNA, 75 bp, synthetic construct
  source 1..75: mol_type = other DNA
cacttcatattatgctcttgtatctgccgtcaattttattattcgtcaaatctccgatgttaataaactcgatgt

SEQ ID NO: 206309 - DNA, 75 bp, synthetic construct
  source 1..75: mol_type = other DNA
cagtctcacaatgatcgccggtggcagtaatgacaacggcctgcaggcagccctgttccggacagccgggaatta

SEQ ID NO: 206310 - DNA, 75 bp, synthetic construct
  source 1..75: mol_type = other DNA
tgacgtagctgacagtgaactagtaactgatccgtcaactggttatcaatcgctatcttttgcaataaatattgt

SEQ ID NO: 206311 - DNA, 75 bp, synthetic construct
  source 1..75: mol_type = other DNA
aacaacccgccgccccgtcgtcagcgccagaaaaagcccctgtcagtgcacagccgcagcaacccgacacaccgg

SEQ ID NO: 206312 - DNA, 75 bp, synthetic construct
  source 1..75: mol_type = other DNA
acaccggcacaacagaaacagcctcaccttctgaacctgcagaaattcagccagtccggcaggccaccgctgaac

SEQ ID NO: 206313 - DNA, 75 bp, synthetic construct
  source 1..75: mol_type = other DNA
ctttctctctgttcctttcccagtctgtcctggcgggtggcgtcgggcttagcgctactcgcgtcatttatgatg

SEQ ID NO: 206314 - DNA, 75 bp, synthetic construct
  source 1..75: mol_type = other DNA
gaagccaccggccttccggttctgatgacagttgatgccggcaatatgattgccgtggcagaaaatgcccgccaa

SEQ ID NO: 206315 - DNA, 75 bp, synthetic construct
  source 1..75: mol_type = other DNA
gcccatccgtaactattgaaaacggcaatgccatcactacgtcaattgacatcgcagagttctttgagaagcaac

SEQ ID NO: 206316 - DNA, 75 bp, synthetic construct
  source 1..75: mol_type = other DNA
ccttcaagcatctgacggaagaaatgcgccgcacgctacaggatatttcaagactgtcagatcgaaattcccgaa

SEQ ID NO: 206317 - DNA, 75 bp, synthetic construct
  source 1..75: mol_type = other DNA
catctgcgggcattcgctcagcaacagcgcgatgataacgcacgtaaactgcagcaacagtataacaaacaggcc

SEQ ID NO: 206318 - DNA, 75 bp, synthetic construct
  source 1..75: mol_type = other DNA
tggaaagagtggtctgacagccaaaaggcggaggacaggcaggaaaaaactctgcaacaggcacaatcccacagc

SEQ ID NO: 206319 - DNA, 75 bp, synthetic construct
  source 1..75: mol_type = other DNA
acatcaccgatgacaacaggaacgcacccgctgaggagctcaatgccgatgccacggttgctgttcacaacaccg

SEQ ID NO: 206320 - DNA, 75 bp, synthetic construct
  source 1..75: mol_type = other DNA
tgccgatgccgggcgcaaaccctgttctggttcgaaagggggggatctcacactgtacggcaggcggcaaatttg

SEQ ID NO: 206321 - DNA, 75 bp, synthetic construct
  source 1..75: mol_type = other DNA
gtcattaaatattacattacccaccagagtgggtagcgtttctaaaattaaatttaacacaatcaatgattttgg

SEQ ID NO: 206322 - DNA, 75 bp, synthetic construct
  source 1..75: mol_type = other DNA
accgtttataattaccccgccgttgttcaggctcgatcctggaaaaaacaatatattgcgtattgtaaatactac

SEQ ID NO: 206323 - DNA, 75 bp, synthetic construct
  source 1..75: mol_type = other DNA
acacgccagttactacatgcgcggctggtcatccgtcgatatcagagacatcgtctggcaatgccagcgatacaa

SEQ ID NO: 206324 - DNA, 75 bp, synthetic construct
  source 1..75: mol_type = other DNA
acgacaggaggtgttacatcgggaggccggaggtccaccaccaaagccaatggattacacagggcacgatggcac

SEQ ID NO: 206325 - DNA, 75 bp, synthetic construct
  source 1..75: mol_type = other DNA
ttcgtggaggaaaagtatccattcatagcacaagaaattaagagacagggattagtcaataacttatctgatatt

SEQ ID NO: 206326 - DNA, 75 bp, synthetic construct
  source 1..75: mol_type = other DNA
ctgcaagaagaagacatcaaagtggtgctggcgattgccaacgattcccatctgatggccgatctgccgtggatt

SEQ ID NO: 206327 - DNA, 75 bp, synthetic construct
  source 1..75: mol_type = other DNA
tattgatatccgccaagagagtacccgtcataccgaagcgttgggtgagctgacccgttacctcggcatcggtga

SEQ ID NO: 206328 - DNA, 75 bp, synthetic construct
  source 1..75: mol_type = other DNA
aaccggatcctcgcgtcgagcaggcgttaatggtcactattgccgggattgcggcaggtatgcgtaataccggct

SEQ ID NO: 206329 - DNA, 75 bp, synthetic construct
  source 1..75: mol_type = other DNA
tggctgtccacctgctactgaaagaagcggggattggattcgcgatgccggtcgcaccgctgtttgaaaccctcg

SEQ ID NO: 206330 - DNA, 75 bp, synthetic construct
  source 1..75: mol_type = other DNA
aaacctgcgttctcgcctgatggcgacccaggcgtggctggaagcgcgcctgaaaggtgaagaactgccaaaacc

SEQ ID NO: 206331 - DNA, 75 bp, synthetic construct
  source 1..75: mol_type = other DNA
acttctgctcagtcgctggaaagcaactgacctgttcctgaaagatattcaggttctggtctccgagttgtcgat

SEQ ID NO: 206332 - DNA, 75 bp, synthetic construct
  source 1..75: mol_type = other DNA
gaagccaaatggggctttgccgtagtagaaaacagcctgtggcaaggcgtaccgaattacctgcgcgaactgaac

SEQ ID NO: 206333 - DNA, 75 bp, synthetic construct
  source 1..75: mol_type = other DNA
catagcgcgtggttgaacagtcattaccagaccggacttaaaaatctgcttgatacagcggtgctcgaaggtacg

SEQ ID NO: 206334 - DNA, 75 bp, synthetic construct
  source 1..75: mol_type = other DNA
aagctatttcccgtggctggttgcgattctggcagggtatatgacattaactcagttggtgaaaggattttatag

SEQ ID NO: 206335 - DNA, 75 bp, synthetic construct
  source 1..75: mol_type = other DNA
tttacaccgacccgctgaacgtattgcaggccgagttgctgcaccgctcccgccaggcagaaaaagaaggccagg

SEQ ID NO: 206336 - DNA, 75 bp, synthetic construct
  source 1..75: mol_type = other DNA
ctgcaagaagaagacatcaaagtggtgctggcaattgccaacgattcccatctgatggccgatctaccgtggatt

SEQ ID NO: 206337 - DNA, 75 bp, synthetic construct
  source 1..75: mol_type = other DNA
aacagatggtgatgattggctattccgactcggcaaaagatgcaggcgtgatggcggcttcctgggcgcaatatc

SEQ ID NO: 206338 - DNA, 75 bp, synthetic construct
  source 1..75: mol_type = other DNA
tgcgatctctaccgtggctacgtacgtgaaaacaaagattttgtgccttacttccgctccgctacgccggaacaa

SEQ ID NO: 206339 - DNA, 75 bp, synthetic construct
  source 1..75: mol_type = other DNA
gttatcaaaatacagcgccaatccggtacaggcattggcgaatcacacggtacagtttgccgctaaccgccagta

SEQ ID NO: 206340 - DNA, 75 bp, synthetic construct
  source 1..75: mol_type = other DNA
gcgagtcacgccagcaaaatacattaagcgcggcagagcgtcggcagtggtttgatgttttgctgaccgggcaac

SEQ ID NO: 206341 - DNA, 75 bp, synthetic construct
  source 1..75: mol_type = other DNA
tcatcggatggtctggtttactgctgacgtctttattgagtaccagcgcactcgcagacaatattggcaccagcg

SEQ ID NO: 206342 - DNA, 75 bp, synthetic construct
  source 1..75: mol_type = other DNA
gaagatgcgaaaaaattgcatgaaattggaatagcgatagatgctgagaatagaataaagcgactcacacccgcc

SEQ ID NO: 206343 - DNA, 75 bp, synthetic construct
  source 1..75: mol_type = other DNA
cgtcatgccgatatcgtagagacaatattatatgttgccgagcaacgtcgtgaaatttctgatggtggaatcgaa

SEQ ID NO: 206344 - DNA, 75 bp, synthetic construct
  source 1..75: mol_type = other DNA
cagaaaaataacgacgaagcaaccgccatccgcgaatttgaatatatacaccagcaggtgccggataatattccg

SEQ ID NO: 206345 - DNA, 75 bp, synthetic construct
  source 1..75: mol_type = other DNA
aacaaacctctgttcactactgacttacaagagaaaagctggctctatctgttatcaaaatacagtgacactccg

SEQ ID NO: 206346 - DNA, 75 bp, synthetic construct
  source 1..75: mol_type = other DNA
tcagtttcggcgtcgaatatcaacatacctttaaggcgattaatcaacgtaccggggaacgcaacaatgcgtttc

SEQ ID NO: 206347 - DNA, 75 bp, synthetic construct
  source 1..75: mol_type = other DNA
tatcgcgtgagctggcatcagaaagttgcggacggacaaactcttgaaccttacgctcatgtacaggacaacggc

SEQ ID NO: 206348 - DNA, 75 bp, synthetic construct
  source 1..75: mol_type = other DNA
catacctttaaggcgattaatcaacgtagcggggagcgcaacaacgcgtttctcaccattggagtgcactggtaa

SEQ ID NO: 206349 - DNA, 75 bp, synthetic construct
  source 1..75: mol_type = other DNA
atttgcgcgccgctctggaactggaacccaataacagcaatacccaggcggcgctcggttacgccttgtgggata

SEQ ID NO: 206350 - DNA, 75 bp, synthetic construct
  source 1..75: mol_type = other DNA
gaaaccgttgccgctggcggcgcaacgccagtggcaaagccagttgccgggtattgctgacaattgcccggcaat

SEQ ID NO: 206351 - DNA, 75 bp, synthetic construct
  source 1..75: mol_type = other DNA
aactggcagtaatttattaagcgttaaaaactacggcgaatttgagttctggctggcgctgtgcaaagtcatcgc

SEQ ID NO: 206352 - DNA, 75 bp, synthetic construct
  source 1..75: mol_type = other DNA
aaccgcagtaaaaccccgtacgtggcggtgttactctccaccggcgcggcattcttaacggtggtggtgaactat

SEQ ID NO: 206353 - DNA, 75 bp, synthetic construct
  source 1..75: mol_type = other DNA
cgtcgccatcgccgaagcgggcccggcggtattactggcctatctgttcgccggattactggtggttatgattat

SEQ ID NO: 206354 - DNA, 75 bp, synthetic construct
  source 1..75: mol_type = other DNA
cggcgaatccggcaccggtaaagaactggtcgctcatgccctgcatcgccacagtccgcgagccaaagcgccatt

SEQ ID NO: 206355 - DNA, 75 bp, synthetic construct
  source 1..75: mol_type = other DNA
gttccgtgaggatctgttccaccgcctgaacgttatccgcgttcatctgccgccgctgcgcgaacgtcgggaaga

SEQ ID NO: 206356 - DNA, 75 bp, synthetic construct
  source 1..75: mol_type = other DNA
cgtttgctgcgcgtgctggcagacggtcagttttaccgcgttggcggctatgcgccggtgaaagtggatgtgcgg

SEQ ID NO: 206357 - DNA, 75 bp, synthetic construct
  source 1..75: mol_type = other DNA
ggtaaaatcaaccgcagtaaaaccccgtatgtggcggtattactctccaccggtgcggcatttttaacggtggtg

SEQ ID NO: 206358 - DNA, 75 bp, synthetic construct
  source 1..75: mol_type = other DNA
ccaacgacgcgctgaaagccaaaatgttggctgagcgcgaaccgcgcaccaccatttcgttttataagtatttcc

SEQ ID NO: 206359 - DNA, 75 bp, synthetic construct
  source 1..75: mol_type = other DNA
gaaaatggcaataagatctttaataaatcacgtggacgcctgaacacgacactggttattcctgatccaacagaa

SEQ ID NO: 206360 - DNA, 75 bp, synthetic construct
  source 1..75: mol_type = other DNA
agcgggccctgcggtattactggcttatctgttcgccggattactggtggttatgattatgcggatgctggcaga

SEQ ID NO: 206361 - DNA, 75 bp, synthetic construct
  source 1..75: mol_type = other DNA
gaatctgacacgccggaaaaacatattgtccgcgcaactaactcggtgatctggcgtatttctatcttctattta

SEQ ID NO: 206362 - DNA, 75 bp, synthetic construct
  source 1..75: mol_type = other DNA
cggagcggcatttttaacggtggtggtgaactattacgcacctgcgaaagtgtttaaattcctgatagacagctc

SEQ ID NO: 206363 - DNA, 75 bp, synthetic construct
  source 1..75: mol_type = other DNA
tcatcaaaacttgctttctgaagcacaaccagagctggagcggacattactgaccaccgcattgcggcatacgca

SEQ ID NO: 206364 - DNA, 75 bp, synthetic construct
  source 1..75: mol_type = other DNA
agacgacggtgaggaatattgcacagcggcagcggatctggctgatgcccaggctgtctgcgacaagctcggcat

SEQ ID NO: 206365 - DNA, 75 bp, synthetic construct
  source 1..75: mol_type = other DNA
gtccggcgctggccctgctgttggccttcatggtcgtagcagtggatttcaccagctacctgctttcggtgattg

SEQ ID NO: 206366 - DNA, 75 bp, synthetic construct
  source 1..75: mol_type = other DNA
agatttaggtgccgattatatcgctaccggtcattacgttcgtcgtgcggatgtcaacggcaagagccgcctgtt

SEQ ID NO: 206367 - DNA, 75 bp, synthetic construct
  source 1..75: mol_type = other DNA
cgccaacatgctgaaatacatcaaaatgacggcgagctctaacttcggtaatgtgttcagcgtgctggtggcgag

SEQ ID NO: 206368 - DNA, 75 bp, synthetic construct
  source 1..75: mol_type = other DNA
gggcaccaccgtggtgagcggcacggcacaagcaatggtgattgctacaggtgccaatacctggtttggtcaact

SEQ ID NO: 206369 - DNA, 75 bp, synthetic construct
  source 1..75: mol_type = other DNA
tcctgggccgttatctcccggcgcaaccgggcaaaatcattaccgtcgatggcgatgaaattggtgagcaccagg

SEQ ID NO: 206370 - DNA, 75 bp, synthetic construct
  source 1..75: mol_type = other DNA
tgacgaccgcgttgcgacatacgcaggggcataaacaggaagcggcgcggctactcggctggggcccgcaacact

SEQ ID NO: 206371 - DNA, 75 bp, synthetic construct
  source 1..75: mol_type = other DNA
tcgatgacgatagttccatccgttgggtgcttgaacgtgcgctcgctggggtaggtttaacctgtacgacgtttg

SEQ ID NO: 206372 - DNA, 75 bp, synthetic construct
  source 1..75: mol_type = other DNA
agctggaaaacacctgtcgctggctaacggtgatggctgccggacaggaagtgttgattcaggatttgcctggcg

SEQ ID NO: 206373 - DNA, 75 bp, synthetic construct
  source 1..75: mol_type = other DNA
gcgtggtctggacagcaacaaagaccagagctacttcctttatacacttagccatgagcagatagcgcaaagcct

SEQ ID NO: 206374 - DNA, 75 bp, synthetic construct
  source 1..75: mol_type = other DNA
gggcagacagagcgctgcgttccggtcatcaaaacttactgtctgaagcgcaaccagagctggagcggacgttac

SEQ ID NO: 206375 - DNA, 75 bp, synthetic construct
  source 1..75: mol_type = other DNA
aactgtttgaatcaaacgtaccggaaagcacttcacacatgcagccggacagttgggcaacgctgttagcacagt

SEQ ID NO: 206376 - DNA, 75 bp, synthetic construct
  source 1..75: mol_type = other DNA
gccactacagcgcgtagtcgggcgaaatatcattactacgcgacaccggtggaactggtgccattgttggaagaa

SEQ ID NO: 206377 - DNA, 75 bp, synthetic construct
  source 1..75: mol_type = other DNA
ggcagcagcgcgggcaatgaaaacgatgggttttagcgaactgcggattgtcgatagtcaggcacacctggagcc

SEQ ID NO: 206378 - DNA, 75 bp, synthetic construct
  source 1..75: mol_type = other DNA
tttatgccggatgcggcgcaaacgccttatccaacctacaaaatcgtgcaaactcaatacattgcagaactctcg

SEQ ID NO: 206379 - DNA, 75 bp, synthetic construct
  source 1..75: mol_type = other DNA
gaaggcattgaaaagtacaacgatatcaacaaagtcgaaccgatgaaccgggcgctgaaagaactgaacgcgcaa

SEQ ID NO: 206380 - DNA, 75 bp, synthetic construct
  source 1..75: mol_type = other DNA
actgggataaccgaacgatatatcagtatctgcaaaaacatggcctgaaatatcatccattatgggacgaaggat

SEQ ID NO: 206381 - DNA, 75 bp, synthetic construct
  source 1..75: mol_type = other DNA
tcgtcggcatgtccggcggtgttgattcctccgtttctgcctggctgttgcaacaacagggatatcaggtcgaag

SEQ ID NO: 206382 - DNA, 75 bp, synthetic construct
  source 1..75: mol_type = other DNA
acaccgggggtagagaggccatccataggctaatggcagcctacgatttcaaatcaagacagcaattgtgcgacc

SEQ ID NO: 206383 - DNA, 75 bp, synthetic construct
  source 1..75: mol_type = other DNA
cgtcacaattagaccactttctaaaatcgtagctcccagtatcaaatacacagaattaagaaatggtgaacttca

SEQ ID NO: 206384 - DNA, 75 bp, synthetic construct
  source 1..75: mol_type = other DNA
gcaattcattgtttataaaaacgtctactgactgctttgtagtggatatatctgtcaaacaggttagcaatggtt

SEQ ID NO: 206385 - DNA, 75 bp, synthetic construct
  source 1..75: mol_type = other DNA
gttgggattgaattaataacccatttctccagtgaagacggtacggttcgcatcccgacgacgcgggttatggcg

SEQ ID NO: 206386 - DNA, 75 bp, synthetic construct
  source 1..75: mol_type = other DNA
ccattgatgttgtcgctgaacaactgaccttaattgactgtcagcgcatggtagagtttgaaattttttcacatt

SEQ ID NO: 206387 - DNA, 75 bp, synthetic construct
  source 1..75: mol_type = other DNA
aagcgccccgtttcggtcttagtggttatctatgcccaggatacgaaacgagtgctgatgctacagcggcgtgat

SEQ ID NO: 206388 - DNA, 75 bp, synthetic construct
  source 1..75: mol_type = other DNA
atgcatactacccgactgaagaaggttggcggctcagttatgctgaccgttccaccggcactgctgaatgcgctg

SEQ ID NO: 206389 - DNA, 75 bp, synthetic construct
  source 1..75: mol_type = other DNA
tccgcgcctgcggtttcgctgctggatacgctggatgcactggcagaataccaacgcgcagggaaaattcgttat

SEQ ID NO: 206390 - DNA, 75 bp, synthetic construct
  source 1..75: mol_type = other DNA
agaatgccatcattaaagtggaggcctttccttacacccgatatggttatctggtgggtaaggtaaaaaatataa

SEQ ID NO: 206391 - DNA, 75 bp, synthetic construct
  source 1..75: mol_type = other DNA
ctttccttacacccgatatggttatctggtgggtaaggtgaaaaatataaatttagatgcaatagaagaccagaa

SEQ ID NO: 206392 - DNA, 75 bp, synthetic construct
  source 1..75: mol_type = other DNA
taacatcgaaagtttacacctggaattaagcgaggaagtattggcagaaattgaagctgtacaccaggtttatac

SEQ ID NO: 206393 - DNA, 75 bp, synthetic construct
  source 1..75: mol_type = other DNA
tctgcgcctgcggtttcgctgctggatacgctggacgcactggcagagtaccaacgcgcgggaaaaattcgttat

SEQ ID NO: 206394 - DNA, 75 bp, synthetic construct
  source 1..75: mol_type = other DNA
taacgtcgaaagtttgcatctggagttaagcgaagacgtattagctgaaattgaagcggtgcatcaggtttatac

SEQ ID NO: 206395 - DNA, 75 bp, synthetic construct
  source 1..75: mol_type = other DNA
cagaaggctgcaacatgatgttgcgcgggagcatggctttgacatgagagacggagtgagcagacagaaccgaac

SEQ ID NO: 206396 - DNA, 75 bp, synthetic construct
  source 1..75: mol_type = other DNA
tcgacatcaaattaggcgtcaataaattccatgttgatgagggccacccgcatatcattttggcggcaaatcccg

SEQ ID NO: 206397 - DNA, 75 bp, synthetic construct
  source 1..75: mol_type = other DNA
tgaccggcagaattgctaatggacaacaaatccccctaccgtcaggattttctgccaaccagtgtacctggagtg

SEQ ID NO: 206398 - DNA, 75 bp, synthetic construct
  source 1..75: mol_type = other DNA
cctattgaaaactcaatagttaaagaaattatcgtaaaagaaggagagtcagtccggaaaggggatgtgttatta

SEQ ID NO: 206399 - DNA, 75 bp, synthetic construct
  source 1..75: mol_type = other DNA
tactgcgtttaacttctttgataaaagaacagttttccacatggcaaaatcagaagtatcaaaaagaactgaatc

SEQ ID NO: 206400 - DNA, 75 bp, synthetic construct
  source 1..75: mol_type = other DNA
aagtgggcgcagcaaagaaattaaacctattgaaaactcaatagttaaagaaattatcgtaaaagaaggagagtc

SEQ ID NO: 206401 - DNA, 75 bp, synthetic construct
  source 1..75: mol_type = other DNA
cgggctgatgacgatggaattatttaccccggcacgcgatgtgctggcgcagcgcactcttggttgggggcgcgt

SEQ ID NO: 206402 - DNA, 75 bp, synthetic construct
  source 1..75: mol_type = other DNA
gctattgcgcaaagcgcctggcgtaacgctgcattgtccggatcgcgtggctaacgttgcccgtactcagagtca

SEQ ID NO: 206403 - DNA, 75 bp, synthetic construct
  source 1..75: mol_type = other DNA
ctaacgtttcccgtacacaggataccgttgaagtgacgctggagagcggcgggacgctgacggggcgcgtgctgg

SEQ ID NO: 206404 - DNA, 75 bp, synthetic construct
  source 1..75: mol_type = other DNA
gatacgtattgttcccgttcccgtagtaatgaagttaacccggcaactggacttcccatgttaaataatacaatt

SEQ ID NO: 206405 - DNA, 75 bp, synthetic construct
  source 1..75: mol_type = other DNA
aacggatattatttcaaaatcagagcagctgaaaaatcgatgtgtattatctgcctgcagagtggccctggtcgt

SEQ ID NO: 206406 - DNA, 75 bp, synthetic construct
  source 1..75: mol_type = other DNA
atcactaccgtgcatgtcagcgatcgcggtcatgccggattcgtcaccctcgccgcagaagattaccaactggcg

SEQ ID NO: 206407 - DNA, 75 bp, synthetic construct
  source 1..75: mol_type = other DNA
tggtcccaggcagatacgctatacaatgaagcacgccagcagaacacattaagtgcggcagaacgccgtcagtgg

SEQ ID NO: 206408 - DNA, 75 bp, synthetic construct
  source 1..75: mol_type = other DNA
aacaatgccctctactggtggctgcatgcgcaacgttacattcctggtcagccggaactcgcactgaacgatctc

SEQ ID NO: 206409 - DNA, 75 bp, synthetic construct
  source 1..75: mol_type = other DNA
cagtcatatattacttacgcgaccgcgctggcttatcgtggcgaaaaagcacgcctccagcattatctcattgaa

SEQ ID NO: 206410 - DNA, 75 bp, synthetic construct
  source 1..75: mol_type = other DNA
gatgtgtgttgttccagtagtaatgaagttaacccggcaactggacttctcatgttagatgatacaattgatgtg

SEQ ID NO: 206411 - DNA, 75 bp, synthetic construct
  source 1..75: mol_type = other DNA
ggtgaaagtgctatggggctattagtatgttttctggttgtgcactttttctctgcaattattacaattgttgtg

SEQ ID NO: 206412 - DNA, 75 bp, synthetic construct
  source 1..75: mol_type = other DNA
ctgcaattggtctttttctcgggagcggtctttgctttatcgggggcagttttcacatgtgttttttcttataaa

SEQ ID NO: 206413 - DNA, 75 bp, synthetic construct
  source 1..75: mol_type = other DNA
aacgtattacgatgcttcagcatgcgatctatgagcagtatgaggaatacagagcagatattcccgtcagctggt

SEQ ID NO: 206414 - DNA, 75 bp, synthetic construct
  source 1..75: mol_type = other DNA
aatgaaatcccgcaagagaatattcagcgcgagctggatcgtatgaagctggcgacgctggatgatctgctggcg

SEQ ID NO: 206415 - DNA, 75 bp, synthetic construct
  source 1..75: mol_type = other DNA
agagaaagatggtcgcgtctacagcgcctttattcgtctgaccgcccgtgaccgtgtgcatctggcgaatatcat

SEQ ID NO: 206416 - DNA, 75 bp, synthetic construct
  source 1..75: mol_type = other DNA
cccgctggcgcaccgtttaggtatccaccacattaaaaccgaactcgaagagctgggttttgaggcgctgtatcc

SEQ ID NO: 206417 - DNA, 75 bp, synthetic construct
  source 1..75: mol_type = other DNA
attcctcgaagtagtggatgaaagctatcgtcacaatgtcccagccggctctgaaagccattttaaagttgtgct

SEQ ID NO: 206418 - DNA, 75 bp, synthetic construct
  source 1..75: mol_type = other DNA
cggtagcgataaggatatgacggctgagaagaaatcatttattgctgaacatcgtcattttacgcaccctgaaac

SEQ ID NO: 206419 - DNA, 75 bp, synthetic construct
  source 1..75: mol_type = other DNA
ccatgatgccgatacctgttatcgcgtgctcggtcagatgcacagcctgtacaagccgcgtccggggcgcgtgaa

SEQ ID NO: 206420 - DNA, 75 bp, synthetic construct
  source 1..75: mol_type = other DNA
ctaatattgctcgctttctgaaagacaaaatagaaacaacttaccggatgcgcaagctgaaagcgttgggcctga

SEQ ID NO: 206421 - DNA, 75 bp, synthetic construct
  source 1..75: mol_type = other DNA
cgataccgatttgctggggatgggcgtttccgccatcagcatgattggcgactgctacgcgcagaaccagaaaga

SEQ ID NO: 206422 - DNA, 75 bp, synthetic construct
  source 1..75: mol_type = other DNA
atccatcacactgcccttagatgtagcgcaacaaatgcttaacacccctgcggtagagtcagctatagagaagtt

SEQ ID NO: 206423 - DNA, 75 bp, synthetic construct
  source 1..75: mol_type = other DNA
gagccaggtccaaacattgaacctaaaaaaaatatcaactccgtgaactccagcaaggttgtacctctttctgaa

SEQ ID NO: 206424 - DNA, 75 bp, synthetic construct
  source 1..75: mol_type = other DNA
tttccagcggaatgggtgattcagtgtgctttggagacaggggtttctttactgtggctcactaccggacagggt

SEQ ID NO: 206425 - DNA, 75 bp, synthetic construct
  source 1..75: mol_type = other DNA
gaaccaggttcaaatattgaccataaaaaagatatcaatttcgtgaactccggcaaggttaaacctctttcggaa

SEQ ID NO: 206426 - DNA, 75 bp, synthetic construct
  source 1..75: mol_type = other DNA
aagaaagcgcgttaccgccagaagaacagcgacgccgtcgggcaggacgtgaaaatggcaataagatctttaata

SEQ ID NO: 206427 - DNA, 75 bp, synthetic construct
  source 1..75: mol_type = other DNA
atccttgtgcgtatcctcgctgacgggcgcaccacagacatcccgctggggcgttttctgcgtgaatttacctgt

SEQ ID NO: 206428 - DNA, 75 bp, synthetic construct
  source 1..75: mol_type = other DNA
tggtgtcctgagcgacgagctgaaacagcgccacattgatcgcgtggcacgccgggagctggtacaggaatatga

SEQ ID NO: 206429 - DNA, 75 bp, synthetic construct
  source 1..75: mol_type = other DNA
aggtggcaggcacaccggcacagcgcaaggtgtggcaggacaaaatagaccagcagggagcagtgcttaaggcca

SEQ ID NO: 206430 - DNA, 75 bp, synthetic construct
  source 1..75: mol_type = other DNA
acgggcgcaccacagacatcccgctggggcgttttctgcgggaatttacctgtgaccgtcctgacctgttcagac

SEQ ID NO: 206431 - DNA, 75 bp, synthetic construct
  source 1..75: mol_type = other DNA
aagcgttcagtccatatatactagcgtcgcgatttgctacctatacgccgtttttcaatctcaattattttgctt

SEQ ID NO: 206432 - DNA, 75 bp, synthetic construct
  source 1..75: mol_type = other DNA
actttgtcctgggcggattcgccactaccctagcctggttgttagcgacccttgtcagtattgtgctgattttta

SEQ ID NO: 206433 - DNA, 75 bp, synthetic construct
  source 1..75: mol_type = other DNA
agcgtggggaactttacatgctctgctggcggatatgaatagtcaggggcaggtgcagatggcgatgaacggcgg

SEQ ID NO: 206434 - DNA, 75 bp, synthetic construct
  source 1..75: mol_type = other DNA
aaactggatgtcgggcagttgctttatcttgatggcactatctcacatatgtatgtgaaaggcggcgcgatcccc

SEQ ID NO: 206435 - DNA, 75 bp, synthetic construct
  source 1..75: mol_type = other DNA
aatctcgcttcaggtgaagggaatttctttatccgtcctggcggcgtgttttatgtcgcgggagataaagtcggc

SEQ ID NO: 206436 - DNA, 75 bp, synthetic construct
  source 1..75: mol_type = other DNA
tctccggctgaccggactgtcagcggcaacactcccgcacatggattatgaggtggcaggcacaccggcacagcg

SEQ ID NO: 206437 - DNA, 75 bp, synthetic construct
  source 1..75: mol_type = other DNA
gcaaaagttcgatttattcaacaaagccttgtcgatcccttatcgcggcggataatcgcttttgaagccattgtg

SEQ ID NO: 206438 - DNA, 75 bp, synthetic construct
  source 1..75: mol_type = other DNA
aaaaaatgaagatagcccatcagccatagcggttgggcagcgtaaagacggggaaatctacacagcggatctcaa

SEQ ID NO: 206439 - DNA, 75 bp, synthetic construct
  source 1..75: mol_type = other DNA
tggatatttacccgcaggacactgttccggtcagccgggcggcaccggtggcgcgggaatggcgggaaattcccc

SEQ ID NO: 206440 - DNA, 75 bp, synthetic construct
  source 1..75: mol_type = other DNA
gcggtgatatcgcacagtcgcgggaaatgctcgaacaggcgcataaagggctaccggacgatccggcactgatcc

SEQ ID NO: 206441 - DNA, 75 bp, synthetic construct
  source 1..75: mol_type = other DNA
gccagggaaaagctatcgtagctacggacaactggaagccgagtaccgcatcggacgcaatatgctgctggaagg

SEQ ID NO: 206442 - DNA, 75 bp, synthetic construct
  source 1..75: mol_type = other DNA
ctcgttcacgttcggaaacaatggaatctacctttagaagctactcaagctgatgtcatccgggcaatggttgta

SEQ ID NO: 206443 - DNA, 75 bp, synthetic construct
  source 1..75: mol_type = other DNA
gtacaatttttactgtgtttattaggtggcaagtcatgggatgcatgtgtaaatagctacagaaatgcattggca

SEQ ID NO: 206444 - DNA, 75 bp, synthetic construct
  source 1..75: mol_type = other DNA
tactacgtctacgatacaaacaaagttaaatctggcgcactggaggcaaccgcattaatcaacgtgaaatacgac

SEQ ID NO: 206445 - DNA, 75 bp, synthetic construct
  source 1..75: mol_type = other DNA
ctgaaacgcgtggcggaactgaaccctgatcgtctgagcgtctttaactacgcgcatctgccgaccatttttgcc

SEQ ID NO: 206446 - DNA, 75 bp, synthetic construct
  source 1..75: mol_type = other DNA
cctcatttgaacgtcatttcccggaggacgggagctttggtcagggtattctggaagtctttgaaggcggtctgt

SEQ ID NO: 206447 - DNA, 75 bp, synthetic construct
  source 1..75: mol_type = other DNA
aattcaacgacatggctggcagggaaccgaagaagggaaacatactggcaatatggcggatgaaccggaaacgaa

SEQ ID NO: 206448 - DNA, 75 bp, synthetic construct
  source 1..75: mol_type = other DNA
tccattccagatcccggcggggctgctgtcaacctttatcggcgcgccatattttatctatttgttgagaaagca

SEQ ID NO: 206449 - DNA, 75 bp, synthetic construct
  source 1..75: mol_type = other DNA
cgcaagatatttctgcaatattcctcaatgaaaaagagtttgccgatacatataacatagacggcaaggatatcc

SEQ ID NO: 206450 - DNA, 75 bp, synthetic construct
  source 1..75: mol_type = other DNA
caaaatggtgatggtaatctggatgtttatgctaatagcgtccatgttatgcgctttgtctccggaagcgttcaa

SEQ ID NO: 206451 - DNA, 75 bp, synthetic construct
  source 1..75: mol_type = other DNA
gaagataatgctgtcggtgtgcttgaggtttttgctgccggcaattttgcaggtactcaacgctttaccacgaga

SEQ ID NO: 206452 - DNA, 75 bp, synthetic construct
  source 1..75: mol_type = other DNA
ttgcttgaaatgtcagaatcaattaaaaaagacagtaagggaagtgattttgattgtattattggcttatcagga

SEQ ID NO: 206453 - DNA, 75 bp, synthetic construct
  source 1..75: mol_type = other DNA
aagaaaattttcggcaactgcaccactattgccacgaataataaatttgtggtgctgaaggcggtgaagttaggg

SEQ ID NO: 206454 - DNA, 75 bp, synthetic construct
  source 1..75: mol_type = other DNA
tggtaatattttcgcaccgtctaaaggtaagcagtacgaagtcggcgtgaaatacgtaccggaagatcgcccaat

SEQ ID NO: 206455 - DNA, 75 bp, synthetic construct
  source 1..75: mol_type = other DNA
ttgagccgtggctgaaggcggctgtgcgcaaagaatttgtcgatgataaccgggtgaaagtgaataatgacggta

SEQ ID NO: 206456 - DNA, 75 bp, synthetic construct
  source 1..75: mol_type = other DNA
gattgcaggttgtaccggcagtctgactgacgtcgccttacgctatgccgggcaagaaaacacgaccctactaag

SEQ ID NO: 206457 - DNA, 75 bp, synthetic construct
  source 1..75: mol_type = other DNA
gaggaactggcgtttagccgccaaccttgcgcgctttctggttacgacgaattgcatatttcccccgttaaataa

SEQ ID NO: 206458 - DNA, 75 bp, synthetic construct
  source 1..75: mol_type = other DNA
taccggcactaaaaccgatacgccgattcaaaaagtgccacagtctatttctgttgtgaccgctgaagagatggc

SEQ ID NO: 206459 - DNA, 75 bp, synthetic construct
  source 1..75: mol_type = other DNA
ctcgtaatgagaagatggtcggctacagcttcgatcacgaatttaacgacacctttactgtgcgtcagaacctgc

SEQ ID NO: 206460 - DNA, 75 bp, synthetic construct
  source 1..75: mol_type = other DNA
agcggataaaggccattatctggcacgtaaatacgtcgttgatgatgagaagctgcaaaactctgatgaatcccc

SEQ ID NO: 206461 - DNA, 75 bp, synthetic construct
  source 1..75: mol_type = other DNA
ggtaataaatccgatcgcgatgataaacagttcacctggcgtggcggtgttaactatctgttcgacaacggcgta

SEQ ID NO: 206462 - DNA, 75 bp, synthetic construct
  source 1..75: mol_type = other DNA
tgcgtaatgacatcaacgcctggtttggttacgacgactctgtgccactgctcaatctgtacaatccggtgaata

SEQ ID NO: 206463 - DNA, 75 bp, synthetic construct
  source 1..75: mol_type = other DNA
caacacttacgattacctgatcatccgcggattcgccgctgacggccaaagccagaacaactatctgaatggcct

SEQ ID NO: 206464 - DNA, 75 bp, synthetic construct
  source 1..75: mol_type = other DNA
acctgacgccgtatgcatcgttaacggggttcaccgctgataaccccgaatatcatttatccaatggcatggaat

SEQ ID NO: 206465 - DNA, 75 bp, synthetic construct
  source 1..75: mol_type = other DNA
cattaatccgcgtattctccccaacgtcgcctcacgcaaaattcgtaatggagtaggaattaataaacaagggaa

SEQ ID NO: 206466 - DNA, 75 bp, synthetic construct
  source 1..75: mol_type = other DNA
acgatttcacatatgtatgtgaaaggcggggcaatcccgtggcaacgctatccttttgttaccatgatttccgtc

SEQ ID NO: 206467 - DNA, 75 bp, synthetic construct
  source 1..75: mol_type = other DNA
gctatgccaaagcgaaactggacgtcgagcagctcctttaccttgatggcacgatttcacatatgtatgtgaaag

SEQ ID NO: 206468 - DNA, 75 bp, synthetic construct
  source 1..75: mol_type = other DNA
agcgtggggaacgttacattcgctgctggctgatgttaatagtcaggatcaggttcagatggtgatgaacggcgg

SEQ ID NO: 206469 - DNA, 75 bp, synthetic construct
  source 1..75: mol_type = other DNA
ctctcaccttactccccttgtttgctgttgccgctgatgactgcacgctctccgatccgacgctgaccgtacaag

SEQ ID NO: 206470 - DNA, 75 bp, synthetic construct
  source 1..75: mol_type = other DNA
gtgttgggattaataaacaagggaacgccgtgtttttgttgagccagcaggcgacaaatttttatgattttgcct

SEQ ID NO: 206471 - DNA, 75 bp, synthetic construct
  source 1..75: mol_type = other DNA
aagacagcacgccggtggcgctgaaaggggccgcgcttacgcgccgcccctttcattacgcggatgttctgctgt

SEQ ID NO: 206472 - DNA, 75 bp, synthetic construct
  source 1..75: mol_type = other DNA
ctgaaccgttttgaaagtaacgtagccggtaaaatgagcagcggtggagccgccaatggcagttaccacagcaac

SEQ ID NO: 206473 - DNA, 75 bp, synthetic construct
  source 1..75: mol_type = other DNA
cctgttcatcttccgcggacgccggggtgaccagataaaagtgttgtggctgacagtgacggactgtgcctcttc

SEQ ID NO: 206474 - DNA, 75 bp, synthetic construct
  source 1..75: mol_type = other DNA
cgtcgcacccgataaagctgtcatgcagcaggtgaaatcatcgctggaacagaaaattaaacagatgcaaatcag

SEQ ID NO: 206475 - DNA, 75 bp, synthetic construct
  source 1..75: mol_type = other DNA
ttcagcagtacgttaagcgggcatttcggggtggggtatagccatggtgccggtgtggaatccccgtggaacggg

SEQ ID NO: 206476 - DNA, 75 bp, synthetic construct
  source 1..75: mol_type = other DNA
cgtggaatataccaggcaggtattaaagcctcattcagcagtacgttaagcgggcatctcggggtagggtatagc

SEQ ID NO: 206477 - DNA, 75 bp, synthetic construct
  source 1..75: mol_type = other DNA
gtgatcatcatgcgcgatcgcaaacaggtggcggagatcccgctggcagagctttccgttccggcgatcatgaac

SEQ ID NO: 206478 - DNA, 75 bp, synthetic construct
  source 1..75: mol_type = other DNA
ctggtgatctcctccgaactggaagagctggtgggctatgccgatcgggtgattatcatgcgcgatcgcaaacag

SEQ ID NO: 206479 - DNA, 75 bp, synthetic construct
  source 1..75: mol_type = other DNA
aaaaggaacgatcgcaccgtttgatctcgaagtacgccccggcgagatcgtcggtctggcaggcttgctgggatc

SEQ ID NO: 206480 - DNA, 75 bp, synthetic construct
  source 1..75: mol_type = other DNA
tcagatgacctgcctgcgtgagctggagtttatcaacggtcagctctatcagcgtccgctacgggaactgagcgc

SEQ ID NO: 206481 - DNA, 75 bp, synthetic construct
  source 1..75: mol_type = other DNA
cgcgatcgcaaacaggtggcggagatcccgctggcagaactttccgttccggcgatcatgaacgccattgcggcg

SEQ ID NO: 206482 - DNA, 75 bp, synthetic construct
  source 1..75: mol_type = other DNA
ctatctcaccgaaaaataccgcccacgcgcaacaactcggcattggcaccgtctatcaggaagtcaacctgctac

SEQ ID NO: 206483 - DNA, 75 bp, synthetic construct
  source 1..75: mol_type = other DNA
aaaaggcgctgcactggttgaacctgagctgtatggaagggtttgataccgggtgtgaagagtttgaaaaattaa

SEQ ID NO: 206484 - DNA, 75 bp, synthetic construct
  source 1..75: mol_type = other DNA
cgcagttcgccgcgattgcccgacaattaccgccaaaattcatcatattgctgccgagtctgaacgcgatgctcg

SEQ ID NO: 206485 - DNA, 75 bp, synthetic construct
  source 1..75: mol_type = other DNA
ggggacggcagtgacaaacaggcagaggttcagcctgttaatgcagggcaacccgcgcagctttctaaaattacg

SEQ ID NO: 206486 - DNA, 75 bp, synthetic construct
  source 1..75: mol_type = other DNA
ttctgatcctcgatgagccaacccgcggcattgatgttggtgcccacgccgagatcatccgcctgattgaaacgc

SEQ ID NO: 206487 - DNA, 75 bp, synthetic construct
  source 1..75: mol_type = other DNA
agtgatcttcggtatcaaacctgctgacagcggcacggcgttgatcaaaggcaaaccgcaaaccctgcgatcgcc

SEQ ID NO: 206488 - DNA, 75 bp, synthetic construct
  source 1..75: mol_type = other DNA
gatttatccgccagctcggtattcgcaccccttctacggaacagccgatagagttcctctctggcggtaatcaac

SEQ ID NO: 206489 - DNA, 75 bp, synthetic construct
  source 1..75: mol_type = other DNA
ggtttattcgtttgtttacctggcatggatccgttctctccagtatcatctttcgactctccctcaatgttggta

SEQ ID NO: 206490 - DNA, 75 bp, synthetic construct
  source 1..75: mol_type = other DNA
atgccttcgacccggctttagagggtttacgcctgaatatcgcgttggatgatgacgggaaatccttctgggtac

SEQ ID NO: 206491 - DNA, 75 bp, synthetic construct
  source 1..75: mol_type = other DNA
tgcgaccatcaccagtaactccgcaggtggtcagccggtttcactggcaaacttaaaagcgatgtacagcatcgc

SEQ ID NO: 206492 - DNA, 75 bp, synthetic construct
  source 1..75: mol_type = other DNA
gatgcgcggcgacgaagcctacagcggcagtcgtagctactatgcattagctgagtcagtaaaaaatatctttgg

SEQ ID NO: 206493 - DNA, 75 bp, synthetic construct
  source 1..75: mol_type = other DNA
gatgacgggaaatccttctgggtactgcgcatgaaggtccgcgatcgcattgttgccgacggtattgacgatcct

SEQ ID NO: 206494 - DNA, 75 bp, synthetic construct
  source 1..75: mol_type = other DNA
cgccatgcttgacgatcccgatgtactatttatcgacatgcgtaaccactatgagtatgaagtggggcactttga

SEQ ID NO: 206495 - DNA, 75 bp, synthetic construct
  source 1..75: mol_type = other DNA
tcatcagtgcggcacaccttgtgacagccataccaattgtagaaatgatggctgtcatctgttgtttatccagtg

SEQ ID NO: 206496 - DNA, 75 bp, synthetic construct
  source 1..75: mol_type = other DNA
cagcgtgaaggcgtgctgcatcgtaacttccagggctacaccacccagggcgataccgatctgctgggaatgggc

SEQ ID NO: 206497 - DNA, 75 bp, synthetic construct
  source 1..75: mol_type = other DNA
gatgaacagggtaatgcgctgtggcgcggtattgcgttaacgcgcgatgactgtattcgccgcgatgtgattaag

SEQ ID NO: 206498 - DNA, 75 bp, synthetic construct
  source 1..75: mol_type = other DNA
tattttccccatcatccagcttcgctgatattacagggtgagtctgacgtcacgttacgctactggtcgctacgc

SEQ ID NO: 206499 - DNA, 75 bp, synthetic construct
  source 1..75: mol_type = other DNA
atcttggtctggtcaccgcgaagaaaaaagactctaccggcatttgcttcattggcgaacgtaaattccgcgagt

SEQ ID NO: 206500 - DNA, 75 bp, synthetic construct
  source 1..75: mol_type = other DNA
aaacaacattctgattgttgcgcaaggccatgaacacccgcgtctgatgtctgtcggtctgattgcccagcagct

SEQ ID NO: 206501 - DNA, 75 bp, synthetic construct
  source 1..75: mol_type = other DNA
gcgaatatttaccgccagcagtcgccagaaaaagccgaagcgtttatcgcctcgctctctgccagccagcggcgc

SEQ ID NO: 206502 - DNA, 75 bp, synthetic construct
  source 1..75: mol_type = other DNA
attacagcttattaaagcattgaaagaaatttcaggaaatacagagaaggactctcattacgatagacttcttga

SEQ ID NO: 206503 - DNA, 75 bp, synthetic construct
  source 1..75: mol_type = other DNA
aaggctttcttgcgagtaatccacatacaaaaataaatattctttatagcaataagactgagcataatattttta

SEQ ID NO: 206504 - DNA, 75 bp, synthetic construct
  source 1..75: mol_type = other DNA
cgacctgctctcagtttatagccgcgtctttgccgataccggagaaaacggggtgatgatgccggtgaaaaatcc

SEQ ID NO: 206505 - DNA, 75 bp, synthetic construct
  source 1..75: mol_type = other DNA
atgagcagggctaaacattggttaaataattggcttagaagttgggtggtatggtcgctgtacgacggcagcggg

SEQ ID NO: 206506 - DNA, 75 bp, synthetic construct
  source 1..75: mol_type = other DNA
ggcggagcaacgtcagtggcaaagtcagttgccgggtattgcagataattgcccggcaatagttcgcttgctggg

SEQ ID NO: 206507 - DNA, 75 bp, synthetic construct
  source 1..75: mol_type = other DNA
acgaaaccattatcaaggctgccgcagacctgatctcccgtgatgcgccggattatcagtatctcgccgcgcgcc

SEQ ID NO: 206508 - DNA, 75 bp, synthetic construct
  source 1..75: mol_type = other DNA
agaaaataatggagtcggatttatgcttgaaagcaatggttctccagtcacatttttaaatatcactgataacag

SEQ ID NO: 206509 - DNA, 75 bp, synthetic construct
  source 1..75: mol_type = other DNA
aggatttattcttgaaagtaatggttcgccagtcacacttttaaatatcactgacagtagtacaggatatacaaa

SEQ ID NO: 206510 - DNA, 75 bp, synthetic construct
  source 1..75: mol_type = other DNA
ttatggagagttttcagcgcagcataatttggttgttcagggggattttgcgctaactcaaacacaaacggcgac

SEQ ID NO: 206511 - DNA, 75 bp, synthetic construct
  source 1..75: mol_type = other DNA
cacagtcgcgggaaatgctcgaaccggcgcataaagggcttccggacgatccggcactgatccgacaactggcct

SEQ ID NO: 206512 - DNA, 75 bp, synthetic construct
  source 1..75: mol_type = other DNA
cattttccattgctgatgcagcaaagcgccggacgttcaatatcaataactttaaccgcagaacaatggttcagg

SEQ ID NO: 206513 - DNA, 75 bp, synthetic construct
  source 1..75: mol_type = other DNA
ttccgataacagccagttactacgtctacgatacaaataaaattaaatctggcgcactggaggcaaccgcattaa

SEQ ID NO: 206514 - DNA, 75 bp, synthetic construct
  source 1..75: mol_type = other DNA
tggcgtaaaccggattttatcttcaatccttgcgcttacggtggctacctgccggaagatgacaaacatcctgct

SEQ ID NO: 206515 - DNA, 75 bp, synthetic construct
  source 1..75: mol_type = other DNA
tttcttgcagggcaagatccagatacagatagtctggcagttctgggcggagtaattgaggagtttatggattta

SEQ ID NO: 206516 - DNA, 75 bp, synthetic construct
  source 1..75: mol_type = other DNA
aatccgtgcgcttacggtggctacctgccggaagatgataagcatccagctttcccggaatacatcgccgaccgc

SEQ ID NO: 206517 - DNA, 75 bp, synthetic construct
  source 1..75: mol_type = other DNA
cgcgtggctttgcccgtgctgtattccttgctaacgaccgtgccatcaatcgtactacgcttaaccgcgttttac

SEQ ID NO: 206518 - DNA, 75 bp, synthetic construct
  source 1..75: mol_type = other DNA
gattcggcggcgcattaatggttggcatgatccccgatattgccgcatgggcatccaacagcgcaggtaaaaaag

SEQ ID NO: 206519 - DNA, 75 bp, synthetic construct
  source 1..75: mol_type = other DNA
tgtttccgatcgcgctggaagaatacgatgtacggtagctaaagatatctggagtgccagcggcaatacaaaact

SEQ ID NO: 206520 - DNA, 75 bp, synthetic construct
  source 1..75: mol_type = other DNA
ggccgccgcgctggaactgcccgacctgctgtcatttgccggtaaggtggttggttttttgtcaccgaattcggc

SEQ ID NO: 206521 - DNA, 75 bp, synthetic construct
  source 1..75: mol_type = other DNA
atggcgtaagccggattttatcttcaacccgtgcgcttacggtggctacctgcctgaagatgacaaacatcctgc

SEQ ID NO: 206522 - DNA, 75 bp, synthetic construct
  source 1..75: mol_type = other DNA
gtccggcgctcgttggtttgccagcaagcgtgaaaaagatcctgacttccaggtgaaggcggcatataacgcaaa

SEQ ID NO: 206523 - DNA, 75 bp, synthetic construct
  source 1..75: mol_type = other DNA
acaaagatgatccgctcactaacgccgcgcggctttgcccgtgctgtattcctggctaaccatgaccgcgtttta

SEQ ID NO: 206524 - DNA, 75 bp, synthetic construct
  source 1..75: mol_type = other DNA
aacggaaaaaagatcctgacttccaggtgaaggcggcgaatagcgcaaaactggtagaaaaactggcggatatgc

SEQ ID NO: 206525 - DNA, 75 bp, synthetic construct
  source 1..75: mol_type = other DNA
tctggtgcgggaatggatttaatcagccgctattcctgcctgtgccaatgcctgatgaatgggaagacagtaagc

SEQ ID NO: 206526 - DNA, 75 bp, synthetic construct
  source 1..75: mol_type = other DNA
atgagcgggcttagaaattgggttatctggtcgctgtacgacggaagcgggtacgccgttaaagattgggcggaa

SEQ ID NO: 206527 - DNA, 75 bp, synthetic construct
  source 1..75: mol_type = other DNA
cgtttgacgggattaggacgtagtcaggatgcgcaacaaaagtacgcaaaaactacaaggtatgcagttgctccc

SEQ ID NO: 206528 - DNA, 75 bp, synthetic construct
  source 1..75: mol_type = other DNA
agatgtacaaaccaacagtgcgcatcgtggaagttaatgtgccacgcgccgcaggcattcgcatcaaagaaggtg

SEQ ID NO: 206529 - DNA, 75 bp, synthetic construct
  source 1..75: mol_type = other DNA
caaaagaaaaccggtaagaaaatcaagccggaagagtttaaagcagtgcgcacagtccaggatgtcgtagaggct

SEQ ID NO: 206530 - DNA, 75 bp, synthetic construct
  source 1..75: mol_type = other DNA
ctttggggatcgattatatgcagggttatcttattggtaagccgcagccgttaattgatacgttgaatgaaatcg

SEQ ID NO: 206531 - DNA, 75 bp, synthetic construct
  source 1..75: mol_type = other DNA
gcaagaagtatttgaggaaatggggctagatggagtaattttagttgaggagtctcccgatacaattagagaacg

SEQ ID NO: 206532 - DNA, 75 bp, synthetic construct
  source 1..75: mol_type = other DNA
atgtaaagatgttgcctcggtggcatgtactgttcgccgtgacttacgtacgcagtccgaatcgcttcattcact

SEQ ID NO: 206533 - DNA, 75 bp, synthetic construct
  source 1..75: mol_type = other DNA
tactggactcgatgtccgacaaagaatgtaaagatgttgcctcggtggcatgtactgttcgccgtgacttacgta

SEQ ID NO: 206534 - DNA, 75 bp, synthetic construct
  source 1..75: mol_type = other DNA
ataaatttcaaagaattggtgagaaattcctctctgaacttgataaaagaacacaacaaattggctttattattt

SEQ ID NO: 206535 - DNA, 75 bp, synthetic construct
  source 1..75: mol_type = other DNA
gaagctgagaatgaaggtcatacggttatttcatggttcgcagaagaagtatggaatcgactaaaacactctgta

SEQ ID NO: 206536 - DNA, 75 bp, synthetic construct
  source 1..75: mol_type = other DNA
ggggcggtcgccaatgggaaaacactaaacataagcccgaacatcatagtgatttgctggctggtgggcaatgtg

SEQ ID NO: 206537 - DNA, 75 bp, synthetic construct
  source 1..75: mol_type = other DNA
atgtgtatctaccttaacttaatgattttgataaaaatcattaggggattcatcagtgttaagcaggcgcaaatc

SEQ ID NO: 206538 - DNA, 75 bp, synthetic construct
  source 1..75: mol_type = other DNA
gattctcttttgtttttctacctgccagccatcttttagtttatgagatgcaggacaaaggtcggcatcttacat

SEQ ID NO: 206539 - DNA, 75 bp, synthetic construct
  source 1..75: mol_type = other DNA
atgctgaagatgattaaaaattttaaactcaaaaaatacattaaaaaattacgtgaggaaggtttgtttttttat

SEQ ID NO: 206540 - DNA, 75 bp, synthetic construct
  source 1..75: mol_type = other DNA
agaaatagacgaatattacgcccatttccgcgtctcaaataatttgctggagctgcgtaatctggtacaggttgc

SEQ ID NO: 206541 - DNA, 75 bp, synthetic construct
  source 1..75: mol_type = other DNA
atgaaacgcctcggcgcagattgtatgttcctcgatatcagccataagcccgccgattttattcgccagcatttc

SEQ ID NO: 206542 - DNA, 75 bp, synthetic construct
  source 1..75: mol_type = other DNA
gactggggattgatctcacgaaaggccctgtgccgattgtgcctgctgcacactatacctgcggtggtgtaatgg

SEQ ID NO: 206543 - DNA, 75 bp, synthetic construct
  source 1..75: mol_type = other DNA
gcctgtcccaatagtgcccgctgcgcactacacctgcggtggcgtgatggtagatgattatgggcgtaccgacgt

SEQ ID NO: 206544 - DNA, 75 bp, synthetic construct
  source 1..75: mol_type = other DNA
cgcagcttgttgcaggtgtggatgaagttgggcgcgggccgttggtcggtgcggtcgttaccgctgccgtgatcc

SEQ ID NO: 206545 - DNA, 75 bp, synthetic construct
  source 1..75: mol_type = other DNA
gccttcgatggctgtggtgaaaggcgatagccgcgtaccggaaatcagtgccgcgtctatcctggcgaaagtgac

SEQ ID NO: 206546 - DNA, 75 bp, synthetic construct
  source 1..75: mol_type = other DNA
gacagcattgactcgcatgtggaagacacattgattgccggggctggtatttgcgatcgccatgcagttgaattt

SEQ ID NO: 206547 - DNA, 75 bp, synthetic construct
  source 1..75: mol_type = other DNA
agagccgggggctgcattttacgctggattatccgcagctactcacccattccggtccgtcgatcctttcccccg

SEQ ID NO: 206548 - DNA, 75 bp, synthetic construct
  source 1..75: mol_type = other DNA
tggtgattcaacataactggcacgagctacgtctgtttatgtgggattacgttggcattgtgcgcacaacgaagc

SEQ ID NO: 206549 - DNA, 75 bp, synthetic construct
  source 1..75: mol_type = other DNA
cgcagccggactttcactggcgctacgcctggctgaccagcatcaggtcatcgttctaagtaaaggcccggtaac

SEQ ID NO: 206550 - DNA, 75 bp, synthetic construct
  source 1..75: mol_type = other DNA
atgaagcgcctcggcgcggattgtatgttcctcgatatcagccataaacctgcggattttattcgtcagcatttc

SEQ ID NO: 206551 - DNA, 75 bp, synthetic construct
  source 1..75: mol_type = other DNA
gccatggcctggcgcgcgggttgccgggttgctaatcttgaatttaatcagttccaccctaccgcactgtatcat

SEQ ID NO: 206552 - DNA, 75 bp, synthetic construct
  source 1..75: mol_type = other DNA
ctgtgtgcaatggttgatcgatcaaggggtattgtttgatacccaggtgcaaccaaatggggaagaaagttacca

SEQ ID NO: 206553 - DNA, 75 bp, synthetic construct
  source 1..75: mol_type = other DNA
gctctgggtcatcagggtaatgtcaaaagccccacttatacgctggtcgaaccctatacgctcgacaatttaatg

SEQ ID NO: 206554 - DNA, 75 bp, synthetic construct
  source 1..75: mol_type = other DNA
cccgacggtggagcggcaattacagcggattattttctctctcgagcgggaagcccgggagaaagcggccaaagt

SEQ ID NO: 206555 - DNA, 75 bp, synthetic construct
  source 1..75: mol_type = other DNA
gtccaccgatgaagatgacaagacccgtgcgtttggcaaacttcagcacatcgcttccggtgcggcttctggcgt

SEQ ID NO: 206556 - DNA, 75 bp, synthetic construct
  source 1..75: mol_type = other DNA
atctataaaagcacggtagagaaacagaatgaaccgccccgggaatcctggagactaaacttcctgagaaagagg

SEQ ID NO: 206557 - DNA, 75 bp, synthetic construct
  source 1..75: mol_type = other DNA
cgctattgtgagctgctggaggaaaacagtctgcgaacctttgatgactgtttgattgaggctgtcgcactgttg

SEQ ID NO: 206558 - DNA, 75 bp, synthetic construct
  source 1..75: mol_type = other DNA
ttacggagaacgccaacagataatcaagaagaaagacctcattactccaagcgactaccgctatgagcaactggt

SEQ ID NO: 206559 - DNA, 75 bp, synthetic construct
  source 1..75: mol_type = other DNA
aggtcgcgcaggagttgcagcagaagtttgacgattttaaggcaaaaaacgacaagcgcattgacgcgatcgaac

SEQ ID NO: 206560 - DNA, 75 bp, synthetic construct
  source 1..75: mol_type = other DNA
atattgtatccggcgacgcgacggcggtgaccgcagacgccattatcaaactgatttacacgctgcgtaaggcac

SEQ ID NO: 206561 - DNA, 75 bp, synthetic construct
  source 1..75: mol_type = other DNA
gttcctgaatccatcgccagtttcgccgcctctttcggtgcaaccattggtcagaacggctgtgccggtttgtat

SEQ ID NO: 206562 - DNA, 75 bp, synthetic construct
  source 1..75: mol_type = other DNA
acctcaaaactgggactgattgaacctttcatgggggaaatctacggtaacccgcaggctacccagaaaatgctg

SEQ ID NO: 206563 - DNA, 75 bp, synthetic construct
  source 1..75: mol_type = other DNA
agaaaccaaaagggttcctggcgtatgaatccaccgatgaaaccgataaggtccgggcgttcggcaaacttcagc

SEQ ID NO: 206564 - DNA, 75 bp, synthetic construct
  source 1..75: mol_type = other DNA
caagcgtccggcaggcggcacgcaaaataaagttgccggtgaacacaaagaagcgtttatcggatttatgcgcaa

SEQ ID NO: 206565 - DNA, 75 bp, synthetic construct
  source 1..75: mol_type = other DNA
gcttcgtctatgaggctggctggactgcttgtgcggttaccagtgatgcgatctataacagcacggtagagaaac

SEQ ID NO: 206566 - DNA, 75 bp, synthetic construct
  source 1..75: mol_type = other DNA
gcagccggtgagcctgaccgtgacgctgcccctgagcgagtattacgacggggactgccagcggaacgaggaaaa

SEQ ID NO: 206567 - DNA, 75 bp, synthetic construct
  source 1..75: mol_type = other DNA
gcgcaaagcgtctgtacgtccggtcgctaccaaacagtgataccttcatattgattaaggctgcaaataccggca

SEQ ID NO: 206568 - DNA, 75 bp, synthetic construct
  source 1..75: mol_type = other DNA
tcgtcggcggaactgagcgacaaacgactgctgctgctatcagtactgccgcgctatgacgcagaaaagcatgag

SEQ ID NO: 206569 - DNA, 75 bp, synthetic construct
  source 1..75: mol_type = other DNA
cgttgccataactgcgaagctctctcctttgatgagtattctttaaggtacttctcaagggcaaaagaacacggc

SEQ ID NO: 206570 - DNA, 75 bp, synthetic construct
  source 1..75: mol_type = other DNA
aaccagcgccctcatcgctgacactatcatccgcaaccgcaatgatcgtcagtatctgcagcgtgtgatcaacga

SEQ ID NO: 206571 - DNA, 75 bp, synthetic construct
  source 1..75: mol_type = other DNA
gaaggtgatgccggagtcactgccggcagcgttctcccgtctcgcggagctgaagcccggacctgcggaaaccac

SEQ ID NO: 206572 - DNA, 75 bp, synthetic construct
  source 1..75: mol_type = other DNA
gcggtatgctggtggattctcaggcgattaagctgatgaagatcggcgctgcggtccgccagaaagccgcggcgt

SEQ ID NO: 206573 - DNA, 75 bp, synthetic construct
  source 1..75: mol_type = other DNA
cgaatttgccgaacaggaagaaatagcctttaccaccggcgatggtaccaagaagccgaaagggttcctggcgta

SEQ ID NO: 206574 - DNA, 75 bp, synthetic construct
  source 1..75: mol_type = other DNA
aataacgtattacgttttattacaaaaatatctctaagacatatgtgggatgtttttaactcctctccattccct

SEQ ID NO: 206575 - DNA, 75 bp, synthetic construct
  source 1..75: mol_type = other DNA
gcatttaattggatgcgtgacaggctgatggagatggctcactcataccaaagagagcacaacgagttaatgctg

SEQ ID NO: 206576 - DNA, 75 bp, synthetic construct
  source 1..75: mol_type = other DNA
tggtgatcgcgtgatcacaacctcccgcaaggtagcagcttacttcgacaagcagcatcaccacatcattcagaa

SEQ ID NO: 206577 - DNA, 75 bp, synthetic construct
  source 1..75: mol_type = other DNA
cgttaaccatttttgtgctgtttgttttaccgatctggttatggctgcattacagcaatcgttccggtcgcagtg

SEQ ID NO: 206578 - DNA, 75 bp, synthetic construct
  source 1..75: mol_type = other DNA
aaagcacaaacaccgaatgtggatttgaaaacaattaatcagactattgatctgaaatcaggccagacagtcatt

SEQ ID NO: 206579 - DNA, 75 bp, synthetic construct
  source 1..75: mol_type = other DNA
tttgaaaacgactcaatccttgcctggattagaaatactgactgggcaaagattggttttaaaaataatgccgac

SEQ ID NO: 206580 - DNA, 75 bp, synthetic construct
  source 1..75: mol_type = other DNA
tttgttgttggaacatggcgatgtggtggtatggggggggagtcgcggctgttttatcatggcattcaaccgttg

SEQ ID NO: 206581 - DNA, 75 bp, synthetic construct
  source 1..75: mol_type = other DNA
gctaactggtctgaatgggcgcaggtctatacgtcaaaagattccgttcccggcgttaatgccaaagggaatcag

SEQ ID NO: 206582 - DNA, 75 bp, synthetic construct
  source 1..75: mol_type = other DNA
atggtatcgcgtggtcgcgtaacggctctgggggcgaatgcacaggggacatccgggattcagctgtatgaggca

SEQ ID NO: 206583 - DNA, 75 bp, synthetic construct
  source 1..75: mol_type = other DNA
gagatcggtttgctggtggtaatagccattttgtatctggtcttctccctgaacgcaccaggctttatctcatta

SEQ ID NO: 206584 - DNA, 75 bp, synthetic construct
  source 1..75: mol_type = other DNA
gggctggacgacccatcggcaaggttatctctattcgcccattgatccgcaaacaaataaaccgtggcccgccat

SEQ ID NO: 206585 - DNA, 75 bp, synthetic construct
  source 1..75: mol_type = other DNA
atccagatttccagccagatgcttgtcttatcaaccgctacgctcctggcgcgaaactgtcgctgcatcaggata

SEQ ID NO: 206586 - DNA, 75 bp, synthetic construct
  source 1..75: mol_type = other DNA
ctgccgataacattggtggcgtatattatagaccggtacagaaatatattaacggaacatggtataacgtggcac

SEQ ID NO: 206587 - DNA, 75 bp, synthetic construct
  source 1..75: mol_type = other DNA
cgcaaacaaataaaccgtggcccgccatgccgcagagttttcataatttatgtcaacgtgcggctacggcggcgg

SEQ ID NO: 206588 - DNA, 75 bp, synthetic construct
  source 1..75: mol_type = other DNA
aagacgagccggatctgcgcgcgccaattgtttctgtttctctgggactgcctgcaattttccagtttggcggct

SEQ ID NO: 206589 - DNA, 75 bp, synthetic construct
  source 1..75: mol_type = other DNA
aagacgaaccggatctgcgcgcgccgattgtttctgtttctctgggcttacctgcgatttttcaatttggtggcc

SEQ ID NO: 206590 - DNA, 75 bp, synthetic construct
  source 1..75: mol_type = other DNA
agacaagaccatgcagaacgcaaattttttgtcggtggacttggtaactaccagtttggtttttacatgattaat

SEQ ID NO: 206591 - DNA, 75 bp, synthetic construct
  source 1..75: mol_type = other DNA
caggatgagctttaccaggctggagccattaacaggacccgttacaaattccctaccattatcaatgcaaacagt

SEQ ID NO: 206592 - DNA, 75 bp, synthetic construct
  source 1..75: mol_type = other DNA
ggtgatggtggacttcagcagccggataatgtcagtgctggctgacggtgtgctggtggcgggtgtggtggttgt

SEQ ID NO: 206593 - DNA, 75 bp, synthetic construct
  source 1..75: mol_type = other DNA
gactgggctgatgcgcgtcactaccgctttggtgcttccagcctgctgaaagcgctgggccacggcgacggtaag

SEQ ID NO: 206594 - DNA, 75 bp, synthetic construct
  source 1..75: mol_type = other DNA
gaaagcactggaagaaaaagtagcccgtgatggcattgagctaactgacagccagatcgcagcactggagcgtaa

SEQ ID NO: 206595 - DNA, 75 bp, synthetic construct
  source 1..75: mol_type = other DNA
atcgttaccgcgaactggtcgatgaaggcggtgtggatgcgctgattaatcgtagtcgccgcgctcctaacctta

SEQ ID NO: 206596 - DNA, 75 bp, synthetic construct
  source 1..75: mol_type = other DNA
cgcagtaccgtgccaccatcaaccagaaacccggtgaactgcagctgctttacctcacaccatcgaagaaaggtt

SEQ ID NO: 206597 - DNA, 75 bp, synthetic construct
  source 1..75: mol_type = other DNA
ttccagccggatacgttctgacaggtggcaactttgatgattcgagagaatggcctgtctacgctcctgttcaga

SEQ ID NO: 206598 - DNA, 75 bp, synthetic construct
  source 1..75: mol_type = other DNA
cgaaattaaaaacagccagaaacattaatggcgtcaggttcgatggttcggctgacattaatatcaatactctgg

SEQ ID NO: 206599 - DNA, 75 bp, synthetic construct
  source 1..75: mol_type = other DNA
ccagaaacattaatggcgtcaggttcgatggttctggtgacattaatatcaatactctggtatcgcgcggtcgcg

SEQ ID NO: 206600 - DNA, 75 bp, synthetic construct
  source 1..75: mol_type = other DNA
aggccgccatgtgcgaacgactgcacgaactggcggaagaactccagaacagcatacagactcactttgaagctc

SEQ ID NO: 206601 - DNA, 75 bp, synthetic construct
  source 1..75: mol_type = other DNA
gcccttcacgaccacgccgacgagctttaccgcagctgcctcgcacgcttcggggatgacggtgaaaacctctga

SEQ ID NO: 206602 - DNA, 75 bp, synthetic construct
  source 1..75: mol_type = other DNA
acgattgccgccaaccaagaaaagctaatatcagaaactagaaaagagttgattggcatccgtggcgacatgcac

SEQ ID NO: 206603 - DNA, 75 bp, synthetic construct
  source 1..75: mol_type = other DNA
ttgatgtggtgactgccgcaggtggcacgccggtgatgtcgaaaaccggacacgcctttattaaagaacgtatgc

SEQ ID NO: 206604 - DNA, 75 bp, synthetic construct
  source 1..75: mol_type = other DNA
tcctgacccggatgtcgaaatacacattgattatcaggcacaaggccgtgaggcgcgcgtgagtgcggtttcctc

SEQ ID NO: 206605 - DNA, 75 bp, synthetic construct
  source 1..75: mol_type = other DNA
ctgtattttcagctctgaccctgggtgttgcgacaagtgcgtctgccgcaatcgtcaatggcggtgctgttcact

SEQ ID NO: 206606 - DNA, 75 bp, synthetic construct
  source 1..75: mol_type = other DNA
cagcatgacctttgccgactggcgctttaacctgcgctcctccaacaccgaaccggtggtgcggttgaatgtgga

SEQ ID NO: 206607 - DNA, 75 bp, synthetic construct
  source 1..75: mol_type = other DNA
gtcggcctgctggcagaagcgttcctcgaaaaaaatcccggcgcgaagatcatccatgatccgcgtctctcctgg

SEQ ID NO: 206608 - DNA, 75 bp, synthetic construct
  source 1..75: mol_type = other DNA
acacggcgcggatatgggcattgcctttgatggcgattttgaccgctgcttcctgtttgacgaaaaagggcagtt

SEQ ID NO: 206609 - DNA, 75 bp, synthetic construct
  source 1..75: mol_type = other DNA
tttgatattgaattaaatgattgtagctcagccgcctcatcaggagcttcaattattttttctggcccccagggt

SEQ ID NO: 206610 - DNA, 75 bp, synthetic construct
  source 1..75: mol_type = other DNA
cagggtgatttcgcgctacgtgttcgaggaactcgtcagcatccaaatcgttgattttgctgatcgcctttttcc

SEQ ID NO: 206611 - DNA, 75 bp, synthetic construct
  source 1..75: mol_type = other DNA
gtgagtcattaccatgagcagttcctgaaacaaaatccgttagccgtcctgggcatgttacgcgatttgcacaaa

SEQ ID NO: 206612 - DNA, 75 bp, synthetic construct
  source 1..75: mol_type = other DNA
acttactgcgcctggcgcacaactcctcatcaatggttgaacaagcgatgtatgtctcgcgcgccggattttacg

SEQ ID NO: 206613 - DNA, 75 bp, synthetic construct
  source 1..75: mol_type = other DNA
gcgcaatgtaccaacgcgttattacggctatgtcacccaaccctggtttatcggccattcgcaacgagaaaatcg

SEQ ID NO: 206614 - DNA, 75 bp, synthetic construct
  source 1..75: mol_type = other DNA
gtgcgtaccatgcagcaatttttaagaaacgccatcgataaaaacctcgatggtgagtatcagctctatgacagt

SEQ ID NO: 206615 - DNA, 75 bp, synthetic construct
  source 1..75: mol_type = other DNA
cctacgatattcgcggcaagctgggtgaagagctgaatgaagacattgcgtggcgcatcggccgcgcgtacggcg

SEQ ID NO: 206616 - DNA, 75 bp, synthetic construct
  source 1..75: mol_type = other DNA
ttatcaccaatgcagttatttgtactggcatagcaattcgcgttgtcacattccggcgtaacgggtcacaacacc

SEQ ID NO: 206617 - DNA, 75 bp, synthetic construct
  source 1..75: mol_type = other DNA
ttatcaccaatgcggttatttgcagtggtatagccgttcgagttgtcacatttcggcgaaacggttctcaacaca

SEQ ID NO: 206618 - DNA, 75 bp, synthetic construct
  source 1..75: mol_type = other DNA
ttgcgaaaatccccgcatcttgggaaactgcgcgtaaccctacatttcatccaggtaactcttcatggctatcat

SEQ ID NO: 206619 - DNA, 75 bp, synthetic construct
  source 1..75: mol_type = other DNA
tgagcacggctaacacatggagtgcgcgccagactttcaacggcgggatcaccggggcgctgacagggaacgccg

SEQ ID NO: 206620 - DNA, 75 bp, synthetic construct
  source 1..75: mol_type = other DNA
tcgctaatgcaatcatctgcggcgggatagcgctgcgggtgatgttcttccagcgcaacggatcgcgccaccgcc

SEQ ID NO: 206621 - DNA, 75 bp, synthetic construct
  source 1..75: mol_type = other DNA
gctgtcatgcttgccgcggttattaaaacacgcggtaacgttgttcagattttcaaaatatcgaggtctaaacat

SEQ ID NO: 206622 - DNA, 75 bp, synthetic construct
  source 1..75: mol_type = other DNA
gctggcgtggctaaactcgccacgctgtcagatggcacagtctttgagcctgtaaacagtttgcagaaaaactag

SEQ ID NO: 206623 - DNA, 75 bp, synthetic construct
  source 1..75: mol_type = other DNA
cggtcgcattgaggattgcgcggagcagaaaacggaaaatctggaatccctgtcagaagaaattctcgcagccag

SEQ ID NO: 206624 - DNA, 75 bp, synthetic construct
  source 1..75: mol_type = other DNA
gaaaatcagtccgatattatcgaccacatcatccgacagcatgagccttacggattccagcgttgtgacaaggtg

SEQ ID NO: 206625 - DNA, 75 bp, synthetic construct
  source 1..75: mol_type = other DNA
gctgtcatgcttgctgcggttcttaaaactcgcggtaacgtcgttcagattttcaaaataacgaggtctaaacat

SEQ ID NO: 206626 - DNA, 75 bp, synthetic construct
  source 1..75: mol_type = other DNA
agccgcaaggtcaaattcagcaacaactggcagaagcagaaacgcaaaatacagcgactgcattcctgtatcgca

SEQ ID NO: 206627 - DNA, 75 bp, synthetic construct
  source 1..75: mol_type = other DNA
actccggttcacccttcagcatcaatggtcgggctggatgctggcgtggctaaactcgccacgctgtcagatggg

SEQ ID NO: 206628 - DNA, 75 bp, synthetic construct
  source 1..75: mol_type = other DNA
ctttcatgggggaaatctacggtaacccgcaggccacccagaaaatgctggatgatgcctttttcaacgtggaag

SEQ ID NO: 206629 - DNA, 75 bp, synthetic construct
  source 1..75: mol_type = other DNA
agcgtgatgccatgcagtcgctggtcctgccgccaccggcacgccaggcgctggcacaggcggcactgacttacc

SEQ ID NO: 206630 - DNA, 75 bp, synthetic construct
  source 1..75: mol_type = other DNA
tgtttgaccggatagaggagaagcctgatgccatgcagtcgctggtcctggcgccaccggcacgccaggcgctgg

SEQ ID NO: 206631 - DNA, 75 bp, synthetic construct
  source 1..75: mol_type = other DNA
ttgaccggatagaggagaagcgtgatgccatgcagtcgctggtcctgccgccaccggcacgccaggcgctggcac

SEQ ID NO: 206632 - DNA, 75 bp, synthetic construct
  source 1..75: mol_type = other DNA
ggggaatttaacagcccggaagaagcccgtgcacagattcattatcagtaccgttatttctacccgcaaactgaa

SEQ ID NO: 206633 - DNA, 75 bp, synthetic construct
  source 1..75: mol_type = other DNA
ccgtacacgcgcggtgaacggtatcgacggcgatatcaaactgaaccgtgccttgtgggtaatggcagaagaatt

SEQ ID NO: 206634 - DNA, 75 bp, synthetic construct
  source 1..75: mol_type = other DNA
ccagagccgccgggaatataccaaacacatgctgcgtctgcggcgggccggagagataaacggagaacatgtccc

SEQ ID NO: 206635 - DNA, 75 bp, synthetic construct
  source 1..75: mol_type = other DNA
tggtgacgaacatcggcccgtcaccaccgccgacattctgacaccacgacgccgggaggattacggtaaggacct

SEQ ID NO: 206636 - DNA, 75 bp, synthetic construct
  source 1..75: mol_type = other DNA
tgtagtggagaaagttatcgaaggggcttacgaggtggtgggcgtgtttgaccggatagaggagaagcgtgatgc

SEQ ID NO: 206637 - DNA, 75 bp, synthetic construct
  source 1..75: mol_type = other DNA
gaatgttgtcgagaaggtgattgaaggggcttacgaagtgctcggtgtgtttgaccgggtggaggagaagcgcga

SEQ ID NO: 206638 - DNA, 75 bp, synthetic construct
  source 1..75: mol_type = other DNA
cttcgcctgccagacctgtgtgcgcgacccgggccgccggggatacacaaaacacatgctgcgcctgcgccgtaa

SEQ ID NO: 206639 - DNA, 75 bp, synthetic construct
  source 1..75: mol_type = other DNA
cattcacagcattgataccgacattaagctcaatcgcgcattgtgggtgatggcagaaacgatgctggagagcct

SEQ ID NO: 206640 - DNA, 75 bp, synthetic construct
  source 1..75: mol_type = other DNA
aacggacaacatgtccctgaaattattctgctcaactcccatgacggtacctccagctaccagatgctgccgggt

SEQ ID NO: 206641 - DNA, 75 bp, synthetic construct
  source 1..75: mol_type = other DNA
gttctacctgtgaactggacagccaggcaggtttgtataacccgggtatgcaatggctggcatccggtgtgctgg

SEQ ID NO: 206642 - DNA, 75 bp, synthetic construct
  source 1..75: mol_type = other DNA
atgcgaaccagatacgccgtgaccgccccttaacccgtgaagaactgatgccggtcgtccccagcgtattcgggg

SEQ ID NO: 206643 - DNA, 75 bp, synthetic construct
  source 1..75: mol_type = other DNA
tccgctgacacacgaagaactgatgcaccatgtaccggggattttcggggaagataaatacacgtcccgaagcca

SEQ ID NO: 206644 - DNA, 75 bp, synthetic construct
  source 1..75: mol_type = other DNA
cgtatccatacccgggccattcacagcattgataccgacattaagctcaaccgtgcattgtgggtgatggcagaa

SEQ ID NO: 206645 - DNA, 75 bp, synthetic construct
  source 1..75: mol_type = other DNA
cgccgggaggattacggtaaggacctgtggagtgcttatcagaccatacaggagaatatgctgaaaggcaggatt

SEQ ID NO: 206646 - DNA, 75 bp, synthetic construct
  source 1..75: mol_type = other DNA
aaggctttcagccgttcttcgcctgccagacccgtgtgcgcgacccgggccgccggggatacaccaaacatatgc

SEQ ID NO: 206647 - DNA, 75 bp, synthetic construct
  source 1..75: mol_type = other DNA
accctgcttgataacctgcagagtgaaggctttcagccattctttgcctgccagactcgagtgcgcgaccagagc

SEQ ID NO: 206648 - DNA, 75 bp, synthetic construct
  source 1..75: mol_type = other DNA
aaggttttcagccattcttcgcctgccagacccgtgtgcgcgacccgggccgccggggatacaccaaacacatgc

SEQ ID NO: 206649 - DNA, 75 bp, synthetic construct
  source 1..75: mol_type = other DNA
gtggaggaagtcgcaacacattgtggaatcagattaaagccaatatgcttgatattccggtaaaagttctcgacg

SEQ ID NO: 206650 - DNA, 75 bp, synthetic construct
  source 1..75: mol_type = other DNA
aggcaatctgctctatccgatcattagctggaaatgtccgcgaacagcagcggttatggacaatattgaacggtt

SEQ ID NO: 206651 - DNA, 75 bp, synthetic construct
  source 1..75: mol_type = other DNA
ccatacccgtgccattcacagcatcgacacggacattaagctcaatcgcgcattgtgggtgatggcagaaacgat

SEQ ID NO: 206652 - DNA, 75 bp, synthetic construct
  source 1..75: mol_type = other DNA
aaggttttcagccattcttcgcctgccagacccgcgtacgtgacccgggccgccggggatacaccaaacacatgc

SEQ ID NO: 206653 - DNA, 75 bp, synthetic construct
  source 1..75: mol_type = other DNA
gggtgcgtctgcggtcagtctctgggagaggtgcgtgttccgcaccggggagacgtggtggagaaagttattgaa

SEQ ID NO: 206654 - DNA, 75 bp, synthetic construct
  source 1..75: mol_type = other DNA
tgcgtctgcggcgggccggagagataaccggtcagcatgtgcctgaaattattctgctcaactcccatgacggta

SEQ ID NO: 206655 - DNA, 75 bp, synthetic construct
  source 1..75: mol_type = other DNA
ccagacccgtgtgcgcgacccgggccgccggggatacacaaacatatgctgcgtctgcggcgggccggagagata

SEQ ID NO: 206656 - DNA, 75 bp, synthetic construct
  source 1..75: mol_type = other DNA
ttcacagcattgataccgacattaagctcaatcgcgcattgtgggtgatggcagaaacgatgctggagagcctgc

SEQ ID NO: 206657 - DNA, 75 bp, synthetic construct
  source 1..75: mol_type = other DNA
ttctgaacaccattcttacccgcgtcggcggcgcgggaaatatcgccagttgtggtcactgtatgacgcgtctgc

SEQ ID NO: 206658 - DNA, 75 bp, synthetic construct
  source 1..75: mol_type = other DNA
gaactatacgtacatccccaccatcaccgtactggaaagtctgcagcgggaaggcttccagccctttttcgcctg

SEQ ID NO: 206659 - DNA, 75 bp, synthetic construct
  source 1..75: mol_type = other DNA
ggaggattacggtaaggacctgtggagtgcttatcagaccattcaggagaatatgctgaaaggcggaatttcagg

SEQ ID NO: 206660 - DNA, 75 bp, synthetic construct
  source 1..75: mol_type = other DNA
ttaatcctggcggagaacagcatattaaagaatttggtataagtagtaatactgaaattaacggcgggtatcagt

SEQ ID NO: 206661 - DNA, 75 bp, synthetic construct
  source 1..75: mol_type = other DNA
agggaatgttgttgagaaggtaattgagggggcttacgaagtactcggcgtgtttgaccgggtggaggagaagcg

SEQ ID NO: 206662 - DNA, 75 bp, synthetic construct
  source 1..75: mol_type = other DNA
accatccttgaaagcctgcagcgggaaggctttgagccgttctttgcctgccagacaaaagttcgcgaccagagc

SEQ ID NO: 206663 - DNA, 75 bp, synthetic construct
  source 1..75: mol_type = other DNA
gtggacagagtcattgaaggggcttacgaggtagtgggcgtgtttgaccggattgaggaaaagcgtgatgccatg

SEQ ID NO: 206664 - DNA, 75 bp, synthetic construct
  source 1..75: mol_type = other DNA
acaaaaaagaggcgcccatcttcttgatgacgatagaaacaagttagttcttgaatattctaggctagttaatga

SEQ ID NO: 206665 - DNA, 75 bp, synthetic construct
  source 1..75: mol_type = other DNA
cttggagggcattgtcttcaattagatgcttcggttattagcggtaagtttcttttagacaaagcgggaataaac

SEQ ID NO: 206666 - DNA, 75 bp, synthetic construct
  source 1..75: mol_type = other DNA
tttccggtcgcagtgccagaggaaaacgtatccatacccgtgccattcacagcatcgacaccgacattaagctca

SEQ ID NO: 206667 - DNA, 75 bp, synthetic construct
  source 1..75: mol_type = other DNA
accgttctggaaaacctgcagcaggaaggcttccagccgttcttcgcctgccagacccgtgtgcgcgaccagagc

SEQ ID NO: 206668 - DNA, 75 bp, synthetic construct
  source 1..75: mol_type = other DNA
aatctgcagcaggaaggctttcagccgttctttgcctgccagacccgcgtgcgcgaccagagccgccgggaatac

SEQ ID NO: 206669 - DNA, 75 bp, synthetic construct
  source 1..75: mol_type = other DNA
cacaggcggcactgacttaccgttatggtgacgaacatcagccgccacaacagcggacatccttacgcaacgacg

SEQ ID NO: 206670 - DNA, 75 bp, synthetic construct
  source 1..75: mol_type = other DNA
tggtgacgaacatcagcccgtcaccaccgccgacattctgacgccacgacgccgggaggattacggtaaggacct

SEQ ID NO: 206671 - DNA, 75 bp, synthetic construct
  source 1..75: mol_type = other DNA
gttttcagccattcttcgcctgccagacccgcgtgcgcgacccgggccgccggggatacacaaaacacatgctgc

SEQ ID NO: 206672 - DNA, 75 bp, synthetic construct
  source 1..75: mol_type = other DNA
tctgccagaacggatgcgtctgtggtcagtctctgggggaagtgcgtgttccgcaccggggaaatgtggtggaga

SEQ ID NO: 206673 - DNA, 75 bp, synthetic construct
  source 1..75: mol_type = other DNA
ccggttactacgctggttttcacgatttcttcggcctgcccatcgatccgcgcggcaatattatcggcgtgttga

SEQ ID NO: 206674 - DNA, 75 bp, synthetic construct
  source 1..75: mol_type = other DNA
cgttgaccgacaatatctgctttatcgactttcacgaacccggcagcagttacgacgccgtggatatcgatctgg

SEQ ID NO: 206675 - DNA, 75 bp, synthetic construct
  source 1..75: mol_type = other DNA
tatcagaccatccaggagaatatgctgaaaggcgggatttccggtcgcagtgcaaaaggaaaacgtatccacacc

SEQ ID NO: 206676 - DNA, 75 bp, synthetic construct
  source 1..75: mol_type = other DNA
cgtctgtggtcagtctctgggggaagtgcatgttccgcaccggggaaatgtggtggacagagtcattgaaggggc

SEQ ID NO: 206677 - DNA, 75 bp, synthetic construct
  source 1..75: mol_type = other DNA
agggctttcagcccttcttcgcctgccagacccgcgtgcgcgacccgggccgccggggatacaccaaacacatgc

SEQ ID NO: 206678 - DNA, 75 bp, synthetic construct
  source 1..75: mol_type = other DNA
ttgaccggattgaagagaaacgtgatgccatgcagtcgctgctcttaccgccaccggcacgccaggcgctggcac

SEQ ID NO: 206679 - DNA, 75 bp, synthetic construct
  source 1..75: mol_type = other DNA
gaacatcggcccgtcaccaccgccgacattctgacgccacgacgccgggaggattacggtaaggacctgtggagt

SEQ ID NO: 206680 - DNA, 75 bp, synthetic construct
  source 1..75: mol_type = other DNA
ttaccgttatggtgacgaacatcggcccgtcaccaccgccgacattctgacaccacgacgccgggaggattacgg

SEQ ID NO: 206681 - DNA, 75 bp, synthetic construct
  source 1..75: mol_type = other DNA
ttacggtaaggacctgtggagtacttaccagaccatccaggagaacatgctgaaaggcgggatttccggtcgcag

SEQ ID NO: 206682 - DNA, 75 bp, synthetic construct
  source 1..75: mol_type = other DNA
aacggctgcgtctgtggccagtctctgggggaagtgcgtgttccgcaccggggaaatgtcgtggacacagtaatt

SEQ ID NO: 206683 - DNA, 75 bp, synthetic construct
  source 1..75: mol_type = other DNA
aacggctgcgtctgtggtcagtctctgggggaagtgcgtgttccgcaccggggaaatgtcgtggatacagtcatt

SEQ ID NO: 206684 - DNA, 75 bp, synthetic construct
  source 1..75: mol_type = other DNA
aacggctgcgtctgtggacagtctctgggggaagtgcgtgttccgcaccggggaaatgtcgtggagacagtcatt

SEQ ID NO: 206685 - DNA, 75 bp, synthetic construct
  source 1..75: mol_type = other DNA
aaatttcactttctaccgccgattttgaactgctctgggagttagccacccacgcggggcaaattatggacagag

SEQ ID NO: 206686 - DNA, 75 bp, synthetic construct
  source 1..75: mol_type = other DNA
aaaggtcttcaggaaacgtctctgacaccttacaaaccattgcatttcggtacgttaactatcgaccccatcaac

SEQ ID NO: 206687 - DNA, 75 bp, synthetic construct
  source 1..75: mol_type = other DNA
cgcgtagtcactctggctaatgctgaaatctcgctctcgacggctgatttcgaattattgtgggaattagccact

SEQ ID NO: 206688 - DNA, 75 bp, synthetic construct
  source 1..75: mol_type = other DNA
tcgtcggcagcctaccctacgtgcgtctgtggccagtctctgggggaagtgcgtgttccgcaccggggaaatgta

SEQ ID NO: 206689 - DNA, 75 bp, synthetic construct
  source 1..75: mol_type = other DNA
ctggacatcatgctgcccggcaaggacggcatgaccatttgtcgtgatttacgcgcaaagtggtccggaccgatt

SEQ ID NO: 206690 - DNA, 75 bp, synthetic construct
  source 1..75: mol_type = other DNA
aacacccatgcgcttatcccccagcatgcaacagaaccaacaaaagcggcgggcaagcgcatcattccggtgaaa

SEQ ID NO: 206691 - DNA, 75 bp, synthetic construct
  source 1..75: mol_type = other DNA
aacggctgcgtctgtgggcagtctctgggggaagtgcgtgttccgcaccggggaaatgtcgtggaaacagtcatt

SEQ ID NO: 206692 - DNA, 75 bp, synthetic construct
  source 1..75: mol_type = other DNA
aacccgttaatgcaaaacgagaaacgtaaaaatctgaccatcttgatcgtcggcgaaacctcgcgggcagagaat

SEQ ID NO: 206693 - DNA, 75 bp, synthetic construct
  source 1..75: mol_type = other DNA
tgctggatatcattcagcgagcgggcatcaacgtgctgtggaatgacaacgatggcggctgtaaaggtgtctgcg

SEQ ID NO: 206694 - DNA, 75 bp, synthetic construct
  source 1..75: mol_type = other DNA
ccaatattctggtttctgtactactgattttgctggtcgccgcactgttttataaagactacgcctcgttgttcc

SEQ ID NO: 206695 - DNA, 75 bp, synthetic construct
  source 1..75: mol_type = other DNA
attctcaaccctgttgggattaaccggcgtcgagacgaagtattatcaagccgcggatgatattctgcaggcatg

SEQ ID NO: 206696 - DNA, 75 bp, synthetic construct
  source 1..75: mol_type = other DNA
ttgctgcgctaattgcctgctggattaaaatcaaaccggccccctcgcgcctgcgcagtgttcttttccgtggag

SEQ ID NO: 206697 - DNA, 75 bp, synthetic construct
  source 1..75: mol_type = other DNA
ccggacagccagaaacaggtgccgatgctgctgtggctgtcagaggattatcaaaaacgttatcaggttgaccag

SEQ ID NO: 206698 - DNA, 75 bp, synthetic construct
  source 1..75: mol_type = other DNA
gaaggggcttacgaggtggtgggtgtctttgaccggatggaggacaagcgtgatgccatgcagtcgctgctactg

SEQ ID NO: 206699 - DNA, 75 bp, synthetic construct
  source 1..75: mol_type = other DNA
gaaggggcttacgaggtggtgggagtctttgaccggattgaggacaagcgtgatgccatgcagtcgctgctactg

SEQ ID NO: 206700 - DNA, 75 bp, synthetic construct
  source 1..75: mol_type = other DNA
gaaggggcttacgaggtggtgggagtttttgaccggatcgaggacaagcgtgatgccatgcagtcgctgctactg

SEQ ID NO: 206701 - DNA, 75 bp, synthetic construct
  source 1..75: mol_type = other DNA
tgcgtctgcgccgtgacggggagataaacggacaacatgtccctgaaattattctgctcaactcccatgacggta

SEQ ID NO: 206702 - DNA, 75 bp, synthetic construct
  source 1..75: mol_type = other DNA
atccaggagaatatgctgaaaggcgggatttccggccgcagtgcaaaaggaaaacgtatccacacccgtgccatt

SEQ ID NO: 206703 - DNA, 75 bp, synthetic construct
  source 1..75: mol_type = other DNA
gaaggggcttacgaggtggtgggtgtgtttgaccggatcgaggacaagcgtgatgccatgcagtcgctgctactg

SEQ ID NO: 206704 - DNA, 75 bp, synthetic construct
  source 1..75: mol_type = other DNA
aaagggcttgatggtctgcgcgagaaagtcgcggagcgtcgctcgcgtatcaacctgacggtgctggaagatctg

SEQ ID NO: 206705 - DNA, 75 bp, synthetic construct
  source 1..75: mol_type = other DNA
atcgctgctacggcatgtttaccgatgagcaaaaaggtctgctggcgaccggaatcattaaagcggaaggcaata

SEQ ID NO: 206706 - DNA, 75 bp, synthetic construct
  source 1..75: mol_type = other DNA
gttggaaaaagtcgcagacggtcgcgatcttgatgaaaagctggcggaagccggaattggcggtagcaataaaag

SEQ ID NO: 206707 - DNA, 75 bp, synthetic construct
  source 1..75: mol_type = other DNA
catggcgagcaattcctgaaagcgattgatatcgtgctggtggcagtcagtgaacacattgaacgtttcgctgcc

SEQ ID NO: 206708 - DNA, 75 bp, synthetic construct
  source 1..75: mol_type = other DNA
ggatgcccgcgttcaacaacgacgaaatcgtcatcccggaatttattaaactcggtattgaaccgcaggacgctt

SEQ ID NO: 206709 - DNA, 75 bp, synthetic construct
  source 1..75: mol_type = other DNA
gccaccagcggcaaagtgttcctgccacaagaaaaagcgttgtcggcaggcaactttaacaatttcgatgaagta

SEQ ID NO: 206710 - DNA, 75 bp, synthetic construct
  source 1..75: mol_type = other DNA
gtgtttgaccggattgaggaaaagcgtgatgccatgcagtcgctgattctgccgccaccggcacgccaggcgctg

SEQ ID NO: 206711 - DNA, 75 bp, synthetic construct
  source 1..75: mol_type = other DNA
agctaccagatgctgccgggttacttcaggttcgtctgccagaacgggtgcgtctgtggtcagtctctgggggaa

SEQ ID NO: 206712 - DNA, 75 bp, synthetic construct
  source 1..75: mol_type = other DNA
ttcacagcatcgacacggacattaagctcaatcgcgcattgtgggtaatgacagaaacgctgctggagaacatgc

SEQ ID NO: 206713 - DNA, 75 bp, synthetic construct
  source 1..75: mol_type = other DNA
tcgcgatggtgtggaaaaagcggttacagcgacagcacagcgtatcgctcaatttgagcaacaaatggaagtcgt

SEQ ID NO: 206714 - DNA, 75 bp, synthetic construct
  source 1..75: mol_type = other DNA
attattctgctcaactctcatgacggtacatccagctaccagatgttgcccggatacttcagtttcatctgcaac

SEQ ID NO: 206715 - DNA, 75 bp, synthetic construct
  source 1..75: mol_type = other DNA
aaatgtggtggagaaagttatcgaaggggcttacgaagtggtggggttttttgaccggattgaggaaaagcgtga

SEQ ID NO: 206716 - DNA, 75 bp, synthetic construct
  source 1..75: mol_type = other DNA
tagcgggttattccgctttctttactgctttgtcaccggaagctcaggacgacatcatcgcccgtaccgaacata

SEQ ID NO: 206717 - DNA, 75 bp, synthetic construct
  source 1..75: mol_type = other DNA
ctgtcagactcgcgttcgtgacccagggcgccgtgaacataccaagcacatgctgcgtctgcggcgtgaggggca

SEQ ID NO: 206718 - DNA, 75 bp, synthetic construct
  source 1..75: mol_type = other DNA
gagaacctgattaagggagggctcagtggccgtaatgccaaaggaggacggtcacatacccgtgccgttcgcggt

SEQ ID NO: 206719 - DNA, 75 bp, synthetic construct
  source 1..75: mol_type = other DNA
aatatcatcaataagttacgtgatgaaggtttccagccattctttgcctgtcagagtcggattcgtgatttggga

SEQ ID NO: 206720 - DNA, 75 bp, synthetic construct
  source 1..75: mol_type = other DNA
aaatgtggtggacagagtcattgaaggggcttacgaagtggtgggggtgtttgaccggattgaggagaagcgtga

SEQ ID NO: 206721 - DNA, 75 bp, synthetic construct
  source 1..75: mol_type = other DNA
accctgctcgataacctccagcgtgaaggatttcatcctttctttgcctgccagacccgtgttcgtgatgtgggt

SEQ ID NO: 206722 - DNA, 75 bp, synthetic construct
  source 1..75: mol_type = other DNA
ccacctcccgctcagcaggcactggcaaaagctgcactcacgtaccgctttggtgaggaccaccagcctgtcagt

SEQ ID NO: 206723 - DNA, 75 bp, synthetic construct
  source 1..75: mol_type = other DNA
gtgaacaagatccgctccggctcgcactcaaaagcctctgcgggaagtccgctgtatcagaacgtcactattggc

SEQ ID NO: 206724 - DNA, 75 bp, synthetic construct
  source 1..75: mol_type = other DNA
gcgaacacgccatcgagatgctgcatagctgctggctgaaactgctggaagtgaacaagatccgctccggctcgc

SEQ ID NO: 206725 - DNA, 75 bp, synthetic construct
  source 1..75: mol_type = other DNA
cagtatcgcgatctggtagtgcgtgtcgcgggctattccgccttcttcaccgcgctctctccagacgctcaggac

SEQ ID NO: 206726 - DNA, 75 bp, synthetic construct
  source 1..75: mol_type = other DNA
tacaaggacaagagctattataggtattgatggtgacattcgagtcaacaaggcattatggatgattgccgaaca

SEQ ID NO: 206727 - DNA, 75 bp, synthetic construct
  source 1..75: mol_type = other DNA
gcgcgattggtcagcaacagctggctgccgcactggcggatgacttcgacggcctgactcacgagcagctgcgtc

SEQ ID NO: 206728 - DNA, 75 bp, synthetic construct
  source 1..75: mol_type = other DNA
gtacaggtgatccgctgcggcttcgggatgccggcgttcaacaacgacgaaatcgtgatcccggaatttattaaa

SEQ ID NO: 206729 - DNA, 75 bp, synthetic construct
  source 1..75: mol_type = other DNA
cgcccgattatcgcttctcgttggccaatgaacgtaccttcctcgcatggatccgtactgcgcttgggtttctgg

SEQ ID NO: 206730 - DNA, 75 bp, synthetic construct
  source 1..75: mol_type = other DNA
actgaggacattcgccttgctctcgcaacagagctagaagcatggacaccccctcaagatgtgatgattgattag

SEQ ID NO: 206731 - DNA, 75 bp, synthetic construct
  source 1..75: mol_type = other DNA
aagcgaccgaggagttgttgaaatcagccagggagcttgggctggaagctgaggggaaattattcagctataacc

SEQ ID NO: 206732 - DNA, 75 bp, synthetic construct
  source 1..75: mol_type = other DNA
cacaatgtctgttacgccaatggttttaatccggatacaacggattttgacgagctctgggaccggatgcgtgat

SEQ ID NO: 206733 - DNA, 75 bp, synthetic construct
  source 1..75: mol_type = other DNA
gtgaaagcgaccggcctggacgcgctgtttgacgccaccatcaaagagatgaaagaagcgggtgataacaccatc

SEQ ID NO: 206734 - DNA, 75 bp, synthetic construct
  source 1..75: mol_type = other DNA
catcgtggtttccacgtctgctcaatgaatatggctgccgccagcgatgcacaaaatataaatatcgaattgacc

SEQ ID NO: 206735 - DNA, 75 bp, synthetic construct
  source 1..75: mol_type = other DNA
gtgccagcaaaggcattggtcgcgccatcgcctgcaagcttgcggcagacggctttaacattggcgttcactatc

SEQ ID NO: 206736 - DNA, 75 bp, synthetic construct
  source 1..75: mol_type = other DNA
tgcgcgctgcgctttaccgtcgcgcggtcgcctgtgcgtggctgaccctgtgcgaacgtcagcaccgctacccgc

SEQ ID NO: 206737 - DNA, 75 bp, synthetic construct
  source 1..75: mol_type = other DNA
ttctacctgcgccagcacggcgaggaaaaaggccgtcagattgcctgtgccctgctcgaagatttaatggaagcc

SEQ ID NO: 206738 - DNA, 75 bp, synthetic construct
  source 1..75: mol_type = other DNA
agtatggcgtctgaaattattgagaaggcgacccgggcgttgctggaatccgccagggaacgcgggctggaagtt

SEQ ID NO: 206739 - DNA, 75 bp, synthetic construct
  source 1..75: mol_type = other DNA
cgggcttgccagttatttaatgtctgatattgcgggttacgtcacccgccaggttatttccatcaacggagggat

SEQ ID NO: 206740 - DNA, 75 bp, synthetic construct
  source 1..75: mol_type = other DNA
gcgcaacacggtgcctggtacggcgtggtcagtaacgccgggatcgcccgcgatgccgcttttccggctttaagc

SEQ ID NO: 206741 - DNA, 75 bp, synthetic construct
  source 1..75: mol_type = other DNA
atgagtggtgaaaaaaaggcgaaaggctggcggttctatggtcttgtaggttttggcgcaatagcactgctttcc

SEQ ID NO: 206742 - DNA, 75 bp, synthetic construct
  source 1..75: mol_type = other DNA
tctatgaacacgatctcacgctgaaagataagctcttttcgtcactcttagatcagcccgcgcaggcggcgctgt

SEQ ID NO: 206743 - DNA, 75 bp, synthetic construct
  source 1..75: mol_type = other DNA
cgcttcgaaatgagcaacgacggctggcatagctttgtggcgttaaatgatgaatccgcaagcgtagatgccagt

SEQ ID NO: 206744 - DNA, 75 bp, synthetic construct
  source 1..75: mol_type = other DNA
agtggtttaagcaagctgctggagccattgctgtttgccgctaccagcgacagccagttaagtaaaacggaaatc

SEQ ID NO: 206745 - DNA, 75 bp, synthetic construct
  source 1..75: mol_type = other DNA
gaaggcgtattaccggtaactcaaactcagcagggcgaagcgcaaatctggcgtcgcgaagtgagttcccgatac

SEQ ID NO: 206746 - DNA, 75 bp, synthetic construct
  source 1..75: mol_type = other DNA
gtgccgtattcgcacggtattgccgaagagatgctctcacaaatcgctcaggaaaacgacaagttgaatggggcg

SEQ ID NO: 206747 - DNA, 75 bp, synthetic construct
  source 1..75: mol_type = other DNA
agataaatagtgaaactattcctgtttatcagttgcgctataacggcaataacgccctgatgttcgcgacttatc

SEQ ID NO: 206748 - DNA, 75 bp, synthetic construct
  source 1..75: mol_type = other DNA
ggggtttggctaccagcgattaatgccttcttttgctggcgtgcgcttcgaatgggtaacgacggctggcacagt

SEQ ID NO: 206749 - DNA, 75 bp, synthetic construct
  source 1..75: mol_type = other DNA
tgcgtggcgctgccttattcgcacggtattgccgaagagatgctctcgcatatcagccgggaaaacgacaaattg

SEQ ID NO: 206750 - DNA, 75 bp, synthetic construct
  source 1..75: mol_type = other DNA
gctggcggttctatggctttgtaggtttgggtgcaatagcactgctttccgcaggcgtttgggcattgcaatatg

SEQ ID NO: 206751 - DNA, 75 bp, synthetic construct
  source 1..75: mol_type = other DNA
ggcacagccgaacaggcgcaactaccagggaaactgtttagccaaaatatcggcgcgcacgaaagcaaagcgccg

SEQ ID NO: 206752 - DNA, 75 bp, synthetic construct
  source 1..75: mol_type = other DNA
ctttctggcattaaatgatggatccgccagtgtagatgccagtttcgatttcactccggtatggaacagtatgcc

SEQ ID NO: 206753 - DNA, 75 bp, synthetic construct
  source 1..75: mol_type = other DNA
ttttgtggcgttaaatgatgaatccgccagcgtagatgccagtttcgattttacgccggtatggaacagtatgcc

SEQ ID NO: 206754 - DNA, 75 bp, synthetic construct
  source 1..75: mol_type = other DNA
caaaggtaaccggaaagaagaaattcatacattattgagtcaaaatagagcttatcataaaactcgttatttatg

SEQ ID NO: 206755 - DNA, 75 bp, synthetic construct
  source 1..75: mol_type = other DNA
atctggattttatctatcgactgctaattacatgcgatatgtatgcggttccatattatatgtataagcataact

SEQ ID NO: 206756 - DNA, 75 bp, synthetic construct
  source 1..75: mol_type = other DNA
cgccgaaaggtgaacgcgtcttaacagctatcgacacactgcaaagctgggtgatgaaactggttcgcctggtca

SEQ ID NO: 206757 - DNA, 75 bp, synthetic construct
  source 1..75: mol_type = other DNA
tggtgatatttttgttcaaaaggcaccagctgcaacaatagatacacttaccaagtcattacttaagttaactaa

SEQ ID NO: 206758 - DNA, 75 bp, synthetic construct
  source 1..75: mol_type = other DNA
actgcgatggtcatccagcctggttcgtccacgcccgactgggtcgtgccgcaggactcggaggtcttcgcggag

SEQ ID NO: 206759 - DNA, 75 bp, synthetic construct
  source 1..75: mol_type = other DNA
agacgagcaaaaatattagcatcaaaaaattatattctctggaggatggtaagactggtaaatagaaaaaagaat

SEQ ID NO: 206760 - DNA, 75 bp, synthetic construct
  source 1..75: mol_type = other DNA
aatccacagtggcgtaaagctgaacctcaactcctggcccccgcttccaccgcccttgaccaacttgacgattaa

SEQ ID NO: 206761 - DNA, 75 bp, synthetic construct
  source 1..75: mol_type = other DNA
gaatttcagactcatcgcccgttaattgcctgtacggtgattggtttaattctcggtgatttaaaaaccggaata

SEQ ID NO: 206762 - DNA, 75 bp, synthetic construct
  source 1..75: mol_type = other DNA
ttcttaaccggaatcagccggcattctactgtgtgcctgctgaactgtatgaaaggatgcttgatgctctggatg

SEQ ID NO: 206763 - DNA, 75 bp, synthetic construct
  source 1..75: mol_type = other DNA
agaaatttcttgatgatgcagtgtgtgaggcaacgaaagtgaaaggtaaaaatcttaccaaagaagaacgaagaa

SEQ ID NO: 206764 - DNA, 75 bp, synthetic construct
  source 1..75: mol_type = other DNA
atatatagatttcgtgatgttgtccttgctataagagaagcaaataaaaccatcgcggataaaggtaatgttgta

SEQ ID NO: 206765 - DNA, 75 bp, synthetic construct
  source 1..75: mol_type = other DNA
caagcgccagtgtcagcgagctgaagaaaaatccgatggcgacagtcagcgccggtgatggtttcccgatcgcta

SEQ ID NO: 206766 - DNA, 75 bp, synthetic construct
  source 1..75: mol_type = other DNA
tgttatgggaatgaaaaatcttttaagaaagctagactttatgcgtgaaatagaggctggaaacattgtaattcc

SEQ ID NO: 206767 - DNA, 75 bp, synthetic construct
  source 1..75: mol_type = other DNA
ttacaggtggaactggatcgtttggtaatgccgtactccgtcgttttttatcgacggatattgctgaaataagga

SEQ ID NO: 206768 - DNA, 75 bp, synthetic construct
  source 1..75: mol_type = other DNA
agtgagaagcttaagttttacataggcgatgtcagggattatcgcagtgtactcaatgccagccgtggcgttgat

SEQ ID NO: 206769 - DNA, 75 bp, synthetic construct
  source 1..75: mol_type = other DNA
tgttgagggaatgaaaaaattactgctaaaacttccttttattcgggcacttcgttctgatgaagattatgagtt

SEQ ID NO: 206770 - DNA, 75 bp, synthetic construct
  source 1..75: mol_type = other DNA
atgaaaaagccattaccgcccgtattacgcgccgcgctatatcggcgcgccgtggcctgtgcatggctgaccctg

SEQ ID NO: 206771 - DNA, 75 bp, synthetic construct
  source 1..75: mol_type = other DNA
tacgcgccgcgctgtatcgtcgtgccgtggcctgtgcatggctgaccctgtgcgaacgccagcatcgctacccac

SEQ ID NO: 206772 - DNA, 75 bp, synthetic construct
  source 1..75: mol_type = other DNA
gtttccttactcgaggattataattcacataatactactagacttgacgttgatggtatggttgctttgctgcgt

SEQ ID NO: 206773 - DNA, 75 bp, synthetic construct
  source 1..75: mol_type = other DNA
ttactggtggtacaggttcatttggtaatgctgtattaaaccgttttctttctacagatataaaagaaattcgta

SEQ ID NO: 206774 - DNA, 75 bp, synthetic construct
  source 1..75: mol_type = other DNA
cctttattcatcagacaagcggttaatggtcaaccgataacagtaactgatccttgtatgactcgttttatgatg

SEQ ID NO: 206775 - DNA, 75 bp, synthetic construct
  source 1..75: mol_type = other DNA
tgtcgaaggaatgaaaaatcttttaagaaagttagactttatgcgcgaaatcgaagctggaaacatcgtaatccc

SEQ ID NO: 206776 - DNA, 75 bp, synthetic construct
  source 1..75: mol_type = other DNA
ccattatttgtcgatctgattaaatcaggtagaccaatgacgataacagaccctaatatgactcgtttcatgatg

SEQ ID NO: 206777 - DNA, 75 bp, synthetic construct
  source 1..75: mol_type = other DNA
tatatgaggttttatgtagcagagaagagatgttggtagccgaagatcaaggtaactattatagaataccgtgcg

SEQ ID NO: 206778 - DNA, 75 bp, synthetic construct
  source 1..75: mol_type = other DNA
taatgctgtattaaaccgttttctttctacagatataaaagaaattcgtattttttctcgcgatgaaaagaaaca

SEQ ID NO: 206779 - DNA, 75 bp, synthetic construct
  source 1..75: mol_type = other DNA
tgtttaaaccgctggatacagaagaagtctgttacgataattccattcattataccgacagtttgttgggacagg

SEQ ID NO: 206780 - DNA, 75 bp, synthetic construct
  source 1..75: mol_type = other DNA
gcatcagcctctatgcatggtgtaccttcggcaccagtttcaatgatggctttgcgataagcgttttacaaagtg

SEQ ID NO: 206781 - DNA, 75 bp, synthetic construct
  source 1..75: mol_type = other DNA
gcttgtttacaagcttatcgagcgggcggaagcttcaaacgcttggaatagtgcattggaatatgccaatgaaca

SEQ ID NO: 206782 - DNA, 75 bp, synthetic construct
  source 1..75: mol_type = other DNA
cggttttgatgagtactttgtacccaatctgatgaacggaggcgccggagttctttccggactgaataatgtggt

SEQ ID NO: 206783 - DNA, 75 bp, synthetic construct
  source 1..75: mol_type = other DNA
ttgaacaggcgcgttttcggcctgcaagcaaaatcgccgcagcgctttgccacgctcgaccagatgatcgatgag

SEQ ID NO: 206784 - DNA, 75 bp, synthetic construct
  source 1..75: mol_type = other DNA
tgaccaatcggcaaaaaatcagcgccaacggtgtgctgcaatggtccaccatccgccgcctgaccgaagaggtga

SEQ ID NO: 206785 - DNA, 75 bp, synthetic construct
  source 1..75: mol_type = other DNA
atgaatgcgccgggacggttgtggctgtgggaagccgcgtgcgttaaaccgggggatcgggtaaatatcgaacct

SEQ ID NO: 206786 - DNA, 75 bp, synthetic construct
  source 1..75: mol_type = other DNA
ggctgtggtgcgggactggctgcaaccgctcgaacacccgagctacgacgttcgccttttgctcaaatcggatat

SEQ ID NO: 206787 - DNA, 75 bp, synthetic construct
  source 1..75: mol_type = other DNA
atggagaagaatgacaaagtacatctaatggaagaaaaggcgtaccgttttgggaaaacattaaaaaaacttccg

SEQ ID NO: 206788 - DNA, 75 bp, synthetic construct
  source 1..75: mol_type = other DNA
gaagaaatactcttaacatatgtggaatggagtatatcaccaaattatttatccctatggctttagcaattatag

SEQ ID NO: 206789 - DNA, 75 bp, synthetic construct
  source 1..75: mol_type = other DNA
cagtagcgaaacacccatcggcacgctttctggtggcaatcagcaaaaagtggtgatcggtcgttgggtctatgc

SEQ ID NO: 206790 - DNA, 75 bp, synthetic construct
  source 1..75: mol_type = other DNA
aatgattattgttattagttttggccatagcatgtgttatgcaccacaggcatcattttttcctgaattattccc

SEQ ID NO: 206791 - DNA, 75 bp, synthetic construct
  source 1..75: mol_type = other DNA
caaaaactggcgtaatttctcgtctggctggtgaagtatttggctcggcggcaacttttggtgcggtaaaaaagg

SEQ ID NO: 206792 - DNA, 75 bp, synthetic construct
  source 1..75: mol_type = other DNA
ctctcgcctatcgtgaagcggactttgatattctggaatggcgtgtggaccactatgccgacctctccaatgtgg

SEQ ID NO: 206793 - DNA, 75 bp, synthetic construct
  source 1..75: mol_type = other DNA
tccgattaaagagatccagttcaaaatgggaacggataatctttggcagaccggattcgattttagtgatgcaat

SEQ ID NO: 206794 - DNA, 75 bp, synthetic construct
  source 1..75: mol_type = other DNA
cattaattatctgttcgataacggtatttcaccttatttcagttatagcgaatccttcgagccagtatctggagc

SEQ ID NO: 206795 - DNA, 75 bp, synthetic construct
  source 1..75: mol_type = other DNA
atgcaatgtgagaaatacactcaggcagcatttatgacattatctcccgataatattttccggttaaccgacagg

SEQ ID NO: 206796 - DNA, 75 bp, synthetic construct
  source 1..75: mol_type = other DNA
ctgcaaatgatcgttatgccgttagtattcgcctctattctgagcgcggttgctcgcctgcataacgcatctcag

SEQ ID NO: 206797 - DNA, 75 bp, synthetic construct
  source 1..75: mol_type = other DNA
tggagccacctgccaactctctaaatcagctgaatcagcttatctatccctcagagaacaactaaaaacgaaaga

SEQ ID NO: 206798 - DNA, 75 bp, synthetic construct
  source 1..75: mol_type = other DNA
ctggtattgatagcggtgctatccggttgcacgtcaacgcaatacccgtgcgagtgtcagacgccaccggaaccg

SEQ ID NO: 206799 - DNA, 75 bp, synthetic construct
  source 1..75: mol_type = other DNA
cgcactaaaaacagcgagtaacactattcagcagatgaaggagcgaaacgccgaactgtcaaaacttgataagag

SEQ ID NO: 206800 - DNA, 75 bp, synthetic construct
  source 1..75: mol_type = other DNA
tttgtttagcgtacaagggggggagattcgttctcgtggctttgagattgaggccaaagcagctgtcaacgctaa

SEQ ID NO: 206801 - DNA, 75 bp, synthetic construct
  source 1..75: mol_type = other DNA
cgcagcaaagaggtttcacatcctactcaagttgcaccggactatttgagtaggtcgttttcagctacacgggac

SEQ ID NO: 206802 - DNA, 75 bp, synthetic construct
  source 1..75: mol_type = other DNA
ccagcagcattgatagagccgcctgtagactcactcccgacgctgaatcggcttatctatccctcagagaacaac

SEQ ID NO: 206803 - DNA, 75 bp, synthetic construct
  source 1..75: mol_type = other DNA
gtcagatcaccgaccagaacacggatggaaatatcacgctaagcggcaccacatcgcagcctgccagcatcgcaa

SEQ ID NO: 206804 - DNA, 75 bp, synthetic construct
  source 1..75: mol_type = other DNA
cgggacgttactttgacgaaacaatagatggcaactctaacgttaccctgcccgtgtccaaacaaatgacggcca

SEQ ID NO: 206805 - DNA, 75 bp, synthetic construct
  source 1..75: mol_type = other DNA
ccgaatgacgatattgctaaagcagcgggacgttactttgacgaaacaatagatggcaactctaacgttaccctg

SEQ ID NO: 206806 - DNA, 75 bp, synthetic construct
  source 1..75: mol_type = other DNA
tcgcagtttactcatgaaaaatggatgaatgacagcactctgaaagagttcatcaaacaatatatcgcagcgtct

SEQ ID NO: 206807 - DNA, 75 bp, synthetic construct
  source 1..75: mol_type = other DNA
atgtggcgcaacatggcaattcgtggacggtcagcgccagatggtggcgaataacgaatatgttcacgaagcgat

SEQ ID NO: 206808 - DNA, 75 bp, synthetic construct
  source 1..75: mol_type = other DNA
accctgcgcgatattctgaatcggttcgatgcccagagtgtgcgcttcttcctgctaagcgcacattatcgtaag

SEQ ID NO: 206809 - DNA, 75 bp, synthetic construct
  source 1..75: mol_type = other DNA
ctgaagaaattataaaccagagcatcgccagtggttggcaggggatttttgagcccaagactccaaaggggaaat

SEQ ID NO: 206810 - DNA, 75 bp, synthetic construct
  source 1..75: mol_type = other DNA
ctgtgaagatattgacctgtgcttgaggcttagcctggctggtgtcagacttcattatgttcccgcttttcatgc

SEQ ID NO: 206811 - DNA, 75 bp, synthetic construct
  source 1..75: mol_type = other DNA
cggtaagggaattgagctaagtgatttcaaagtcacctttacgattgactggttcaacatcagcagcgcgtcccg

SEQ ID NO: 206812 - DNA, 75 bp, synthetic construct
  source 1..75: mol_type = other DNA
atcatgaaaatgagattgcccaatccacctccgccaatgatggcccttacgtaaattactggcttcacaccggca

SEQ ID NO: 206813 - DNA, 75 bp, synthetic construct
  source 1..75: mol_type = other DNA
ggctatggaaagctttcgggacaggatattaccatgcttcgtgccgggacccgcatcgaagtgaatgagtataaa

SEQ ID NO: 206814 - DNA, 75 bp, synthetic construct
  source 1..75: mol_type = other DNA
gaagatctgaaaaaatgcaaattgatcgttttacaactggaagttcaactggaaacagtttaccacgcgattgag

SEQ ID NO: 206815 - DNA, 75 bp, synthetic construct
  source 1..75: mol_type = other DNA
gttcgctaatgaaaaactgaaagccgcactgaaagcgcgcgatatcgttgcaggcattgcatccgaagaagaaga

SEQ ID NO: 206816 - DNA, 75 bp, synthetic construct
  source 1..75: mol_type = other DNA
aacaaacaggttgcggcaggttacgtggtatacggctcctctaccatgctggtttacaccaccggatgcggtgtt

SEQ ID NO: 206817 - DNA, 75 bp, synthetic construct
  source 1..75: mol_type = other DNA
catcgatgttaacgtctctgtcggtaccattttctccatctaccgccgcgttacgcctgtcggcacgccggtaac

SEQ ID NO: 206818 - DNA, 75 bp, synthetic construct
  source 1..75: mol_type = other DNA
gggacggaatagtctacctgcatgggttgttaccggaaaagacagacgatactgctctgaatcgtctggttgtca

SEQ ID NO: 206819 - DNA, 75 bp, synthetic construct
  source 1..75: mol_type = other DNA
actgccctgaatcgtctggttgttaccagcggtgactttggcttggcttatctcactgagcgttgggcagctcgc

SEQ ID NO: 206820 - DNA, 75 bp, synthetic construct
  source 1..75: mol_type = other DNA
aagtcagattttttggagagcgccaatcactattctgatcttggcgagcaccggcagcaattcgctattttcctg

SEQ ID NO: 206821 - DNA, 75 bp, synthetic construct
  source 1..75: mol_type = other DNA
gctcgaacagtttcgtcgtaaattcagggaaatagaggtcggtcatgagcctgttaatgacatcccagcccattg

SEQ ID NO: 206822 - DNA, 75 bp, synthetic construct
  source 1..75: mol_type = other DNA
aacaagaaagataagacgggcagacgcaggatgctgtttccgtaaacgggtatacgctattttccctgggtattt

SEQ ID NO: 206823 - DNA, 75 bp, synthetic construct
  source 1..75: mol_type = other DNA
ggaggagctggatgctgcctccaccctctggctgacaaaagcgcgttaccagtacctcctccggcttgatgccca

SEQ ID NO: 206824 - DNA, 75 bp, synthetic construct
  source 1..75: mol_type = other DNA
cacgcctttacttatgatccgtcactcggcgttttctgcctgtgtcaggaaaaaatgcgtttcccggagaaaggc

SEQ ID NO: 206825 - DNA, 75 bp, synthetic construct
  source 1..75: mol_type = other DNA
cgtatacctcgcgttatatcggttcactggttgcggatttccaccgtaacctgctgaaaggtggaatttatctct

SEQ ID NO: 206826 - DNA, 75 bp, synthetic construct
  source 1..75: mol_type = other DNA
ctctctgcggcgcggcggcgttgtttattgctgcgcttatcagcacagcgcaattatttaagctgcaagtggtta

SEQ ID NO: 206827 - DNA, 75 bp, synthetic construct
  source 1..75: mol_type = other DNA
atcaggagctggttaaactggtagccgaacgcagcaaccaaccgctgcatgatgtggacctggataaatacctat

SEQ ID NO: 206828 - DNA, 75 bp, synthetic construct
  source 1..75: mol_type = other DNA
gcgcagcatttggttccgtgctggggctgatggcatttttctacttcttcgcccgtttgacgctgttttgcgcgg

SEQ ID NO: 206829 - DNA, 75 bp, synthetic construct
  source 1..75: mol_type = other DNA
gtgattttatttcgctgattggtttgttgattgcgctgattgtgacgctttcgatcacctcggttgccggttcgg

SEQ ID NO: 206830 - DNA, 75 bp, synthetic construct
  source 1..75: mol_type = other DNA
cgaaaaagtccaacgccaaccgatcatcgcgcacctgattcgcgcgactgaacgctttaacgatcgactgggtaa

SEQ ID NO: 206831 - DNA, 75 bp, synthetic construct
  source 1..75: mol_type = other DNA
gtctaagaatccagttaacttttcaggaaattaacttcaaagccattgtgggtcagactgatatttcggctgcga

SEQ ID NO: 206832 - DNA, 75 bp, synthetic construct
  source 1..75: mol_type = other DNA
gtcttagaatccaattaacttttcaggaaattaactttaaagctattgtgggtcagactgatatctcggctgcga

SEQ ID NO: 206833 - DNA, 75 bp, synthetic construct
  source 1..75: mol_type = other DNA
gtgggtatggcccgctttcttgaccaggtgcgtggcaatgacgcggtaaacgatgcccagcacccaccccatgat

SEQ ID NO: 206834 - DNA, 75 bp, synthetic construct
  source 1..75: mol_type = other DNA
aactggatggggaatttacgtgaagcaattcgcgcccaatcgcgcgatgtctgggaacgttcgccgcaagatcag

SEQ ID NO: 206835 - DNA, 75 bp, synthetic construct
  source 1..75: mol_type = other DNA
cgtcggtaaccgccatgcgggtgattgcctccgttaacgccgaatttgcgcgtgaactgaaattgccgccgcata

SEQ ID NO: 206836 - DNA, 75 bp, synthetic construct
  source 1..75: mol_type = other DNA
atgccagctttagatttgattcgaccgtcggtcaccgccatgcgggtgattgcctccgttaacgctgattttgcg

SEQ ID NO: 206837 - DNA, 75 bp, synthetic construct
  source 1..75: mol_type = other DNA
ttattaccgcgctgcatctcaacagtattgagtggctgaaaccgacatggcgattgattggtctggcgatttcta

SEQ ID NO: 206838 - DNA, 75 bp, synthetic construct
  source 1..75: mol_type = other DNA
cgcaacaaatgattattagcgcgctgcaccttaatagcattgagtggctgaaaccgacgtggcggttgattggtc

SEQ ID NO: 206839 - DNA, 75 bp, synthetic construct
  source 1..75: mol_type = other DNA
ttttgatggtgtcgtttgccgcagggggctttgtgctggcctcccatccgatgttgctacaggatatcttcgaca

SEQ ID NO: 206840 - DNA, 75 bp, synthetic construct
  source 1..75: mol_type = other DNA
gtctaagaatccagctaacttttcaggaaattaacttcaaagctattgttggtcagactgatatttctgctgcaa

SEQ ID NO: 206841 - DNA, 75 bp, synthetic construct
  source 1..75: mol_type = other DNA
aactcgcccgccgcattcatctctccacccgccagttgctgcgccagttgcggccccccgcgcttgatgaactga

SEQ ID NO: 206842 - DNA, 75 bp, synthetic construct
  source 1..75: mol_type = other DNA
agggcttcacatggaacaaatgtggtagccgacaaccagataagctggtgatggggatggggcatatgactcgtg

SEQ ID NO: 206843 - DNA, 75 bp, synthetic construct
  source 1..75: mol_type = other DNA
ctccatcatcacgagttttaaagcctcgaaagatgttggaatttcaaatggtctaagaatccagctaacttttca

SEQ ID NO: 206844 - DNA, 75 bp, synthetic construct
  source 1..75: mol_type = other DNA
ctccggccgaccacgtttttatctgttacatcgccagcctgaatggaacccctcggaaggagcgtggatgggcta

SEQ ID NO: 206845 - DNA, 75 bp, synthetic construct
  source 1..75: mol_type = other DNA
tctacaaaattccagtttgaatgttccttacgaacagattatttacttgcaccagccaattccttttagtaaagt

SEQ ID NO: 206846 - DNA, 75 bp, synthetic construct
  source 1..75: mol_type = other DNA
cttcttattttgcttgcacgccgctactggcctgcgctggtgctcccccctttgctgatgatgttctggctccat

SEQ ID NO: 206847 - DNA, 75 bp, synthetic construct
  source 1..75: mol_type = other DNA
ttcttaaccttatcagcaactgagaacatggaatttgacagccctatgatggttaccactcaaaatatgcaatca

SEQ ID NO: 206848 - DNA, 75 bp, synthetic construct
  source 1..75: mol_type = other DNA
tcagatgccgctaatgcgcaagcttcaaaggtgcttaataatgctggtacaggtagtactttgaagaaattttct

SEQ ID NO: 206849 - DNA, 75 bp, synthetic construct
  source 1..75: mol_type = other DNA
ggaaattaacttcaaagctattgttggtcagactgatatttctgctgcaactggaaagactgctaccacgaatga

SEQ ID NO: 206850 - DNA, 75 bp, synthetic construct
  source 1..75: mol_type = other DNA
ttcacagcctcagctaatgagcaggcttcaaaagtgcttaagtcgggtaatgctttacgaaagtactctgtgaat

SEQ ID NO: 206851 - DNA, 75 bp, synthetic construct
  source 1..75: mol_type = other DNA
gtctaagaatccagctaacttttcaggaaattaacttcaaagctgttgtgggtcagactgatatttcagcagcta

SEQ ID NO: 206852 - DNA, 75 bp, synthetic construct
  source 1..75: mol_type = other DNA
tccggtagtatccttatctcaagagataataagctggtggagaacttcatcgacactctggaaaactggcgtgac

SEQ ID NO: 206853 - DNA, 75 bp, synthetic construct
  source 1..75: mol_type = other DNA
atcacgttctccacctccggtggcgacgattcaagcgtcacggttacgcccaaccggcaccccattacggacaaa

SEQ ID NO: 206854 - DNA, 75 bp, synthetic construct
  source 1..75: mol_type = other DNA
cagcagctttctccagagccgtaatttgttagccattgtccatcctattctgcgcaatctgatggaagagtctgg

SEQ ID NO: 206855 - DNA, 75 bp, synthetic construct
  source 1..75: mol_type = other DNA
gccgatttcacgtattaccgatgaccgcgtgactgagtttggcgcgatggtaattaaagcggcgaaggaagtaac

SEQ ID NO: 206856 - DNA, 75 bp, synthetic construct
  source 1..75: mol_type = other DNA
gcctgctgatatcacttttcttcagtacagcagttcaggcgaatgtcattgttgcaacaatgtatacaccggtag

SEQ ID NO: 206857 - DNA, 75 bp, synthetic construct
  source 1..75: mol_type = other DNA
acatggtggtgcgtgtcgataccagcagccgccagccgattgattccacctgccgcttccagtacacgctcaacg

SEQ ID NO: 206858 - DNA, 75 bp, synthetic construct
  source 1..75: mol_type = other DNA
ttatgatatttcgtggagtgaagattatgttgtccattcgaaagtgctgtcgctgcaatcgacgggcggaacgat

SEQ ID NO: 206859 - DNA, 75 bp, synthetic construct
  source 1..75: mol_type = other DNA
tctggtcggtggctgataacgttcgctttggcggcgcattgatggcagtgaagatcgctgaaaaactggtgcagg

SEQ ID NO: 206860 - DNA, 75 bp, synthetic construct
  source 1..75: mol_type = other DNA
ttgccgctttgtcacccagatgctgcccttctcctcttcaggttgcgataatggcaaagtgactgtaacacccaa

SEQ ID NO: 206861 - DNA, 75 bp, synthetic construct
  source 1..75: mol_type = other DNA
atcccataatgccaatgacagcgattgccctggtattaatgcattaagtggtggttgggggtgcgatagtctgcc

SEQ ID NO: 206862 - DNA, 75 bp, synthetic construct
  source 1..75: mol_type = other DNA
tgcgcgatctgatggaagaatctggcgaaacggtcaatatggcggtgctcgatcaaagcgatcacgaggcgatta

SEQ ID NO: 206863 - DNA, 75 bp, synthetic construct
  source 1..75: mol_type = other DNA
atggtcacccccattcctgcaaaacgcggcagaaaacctaccgttgccaccgcccccacgactggacaggttcag

SEQ ID NO: 206864 - DNA, 75 bp, synthetic construct
  source 1..75: mol_type = other DNA
tgcggaaattaatggaagattctggtgagacagtcaacctggcggtgctcgatcaaagcgaccatgaagccatca

SEQ ID NO: 206865 - DNA, 75 bp, synthetic construct
  source 1..75: mol_type = other DNA
ggtatgcaggccacactacgaaggtagtttattatcttgatgttcttacccccgatagcgtcaatcatggtgttt

SEQ ID NO: 206866 - DNA, 75 bp, synthetic construct
  source 1..75: mol_type = other DNA
actactcggcggcatttttaaccggtagtcaggcagcgtgtaaggctgcctgcaacgcctttaccgatgctgtac

SEQ ID NO: 206867 - DNA, 75 bp, synthetic construct
  source 1..75: mol_type = other DNA
gcacatgtggtttcgcgtaccggttcttatctctcatcaaccgccgggatcacgcttggcgatccgatggcgtat

SEQ ID NO: 206868 - DNA, 75 bp, synthetic construct
  source 1..75: mol_type = other DNA
taaggggccggacggtcatgccacactttgtcaaactgtttctgtagcaccttatgacgtttcatggaatgagaa

SEQ ID NO: 206869 - DNA, 75 bp, synthetic construct
  source 1..75: mol_type = other DNA
gcggctgacgaagcgaccaagcaggcgatggtcgaagtggtgtatggccgctcgctgtatgccggagcggcgcac

SEQ ID NO: 206870 - DNA, 75 bp, synthetic construct
  source 1..75: mol_type = other DNA
gcggctgacgaagcgaccaagcaggcgatggtcgaagtggtatatggtcgctcgctgtatgcgggcgctgcacac

SEQ ID NO: 206871 - DNA, 75 bp, synthetic construct
  source 1..75: mol_type = other DNA
cccggcggaagtgcgtgccggtctggatgcgatggttgcacatattgaaaatggcgcagcttttccagtgggcca

SEQ ID NO: 206872 - DNA, 75 bp, synthetic construct
  source 1..75: mol_type = other DNA
gcgtgatggacgatcgaggcgcatactgccgctttgtggcgcagatgatcaccttctccacctccggctgtgaca

SEQ ID NO: 206873 - DNA, 75 bp, synthetic construct
  source 1..75: mol_type = other DNA
atggaaagtcagaagttgtgtgatggtagcctgtttgacgagcgcggggctaattgccgttttgtttcgcagatg

SEQ ID NO: 206874 - DNA, 75 bp, synthetic construct
  source 1..75: mol_type = other DNA
tatctactcagataaccagcaccgatctgggagatgttggggctacctatgtcggccctaaagttcataactcca

SEQ ID NO: 206875 - DNA, 75 bp, synthetic construct
  source 1..75: mol_type = other DNA
actacaaccagttgataagcaaatgctgaataatttaaaaacaaatgcgacaagagcgactcaggcaacaaaata

SEQ ID NO: 206876 - DNA, 75 bp, synthetic construct
  source 1..75: mol_type = other DNA
aatatggttattcataaaaaaacattaaatctgaaatcaacagacgccgtagggggaatcattgagacaaccctg

SEQ ID NO: 206877 - DNA, 75 bp, synthetic construct
  source 1..75: mol_type = other DNA
actatgacggtccggtgcacggttgcccgtggctgatttcgacgtatactgacagcaatgtctcttcgatagatg

SEQ ID NO: 206878 - DNA, 75 bp, synthetic construct
  source 1..75: mol_type = other DNA
atgccgccaccattgggattgccgcctgggcgatgacgctgattattatctccggtgagattgatgtcagcgttg

SEQ ID NO: 206879 - DNA, 75 bp, synthetic construct
  source 1..75: mol_type = other DNA
ggctgactttgaaatgcagcgggcataccccggagattcgctgtcagttgagggtaagcccgactatgatgataa

SEQ ID NO: 206880 - DNA, 75 bp, synthetic construct
  source 1..75: mol_type = other DNA
tcgtggagatcatatgtttgtcatacggatagtaattgattcacttttggccatggtgatgattggctttgttgt

SEQ ID NO: 206881 - DNA, 75 bp, synthetic construct
  source 1..75: mol_type = other DNA
aactcctttttccagcaggtggtgcgcggcgtcatcatcgtggtggcggtgctggcgaatatcttgctgactcag

SEQ ID NO: 206882 - DNA, 75 bp, synthetic construct
  source 1..75: mol_type = other DNA
ccattctttatctggtcttctccctgaacgcgccgggctttatctcattgaataaccagatgaacgtgctgcgcg

SEQ ID NO: 206883 - DNA, 75 bp, synthetic construct
  source 1..75: mol_type = other DNA
cagccgcaaaaccgccttcgggcgctcggtttttgccgttggcggtaatgccacggcggcgcagttgtgcggtat

SEQ ID NO: 206884 - DNA, 75 bp, synthetic construct
  source 1..75: mol_type = other DNA
gtcggggcactccagcgatccggcacgcggggtgaatgccatcgagctgatgcatgacgccatcggccatatttt

SEQ ID NO: 206885 - DNA, 75 bp, synthetic construct
  source 1..75: mol_type = other DNA
tctgacggtcgacgagctgcatccgccgatccctggctatgaatgcccaccgaatcatcaactggttgaagtagt

SEQ ID NO: 206886 - DNA, 75 bp, synthetic construct
  source 1..75: mol_type = other DNA
tgagaaattgctcggagcaaagaccgaagtggtgaactactgtaccgaagcgccgtttattcaaacgttatgccc

SEQ ID NO: 206887 - DNA, 75 bp, synthetic construct
  source 1..75: mol_type = other DNA
tgccatttgatgatggtcgctggacgcgcgatccgtttacactgacggagcatgacggcaagctttacggcttag

SEQ ID NO: 206888 - DNA, 75 bp, synthetic construct
  source 1..75: mol_type = other DNA
cgccgtttattcaaacgttatgcccgacgctggttctggggcctggctcaattaatcaggctcatcaacctgatg

SEQ ID NO: 206889 - DNA, 75 bp, synthetic construct
  source 1..75: mol_type = other DNA
aatatctggagacgcggtttattaaacccacccgtgagttgattatccaggtaattcaccatttttgctggcatt

SEQ ID NO: 206890 - DNA, 75 bp, synthetic construct
  source 1..75: mol_type = other DNA
ggtgccgcaaacggtctggagtttgacgtcatcgccgcggtcgcggttccctgttcggtacattgcttggtgtgc

SEQ ID NO: 206891 - DNA, 75 bp, synthetic construct
  source 1..75: mol_type = other DNA
cccggagatatcgttgccgatttctttatgggatcaggctcaactattaaagctgcgctgaagttaggacgtcag

SEQ ID NO: 206892 - DNA, 75 bp, synthetic construct
  source 1..75: mol_type = other DNA
agcttcgtccaaatcaaaacatatctcgcccaattggacactattccactgatgatgcatactcacggcatggtg

SEQ ID NO: 206893 - DNA, 75 bp, synthetic construct
  source 1..75: mol_type = other DNA
tttttatcgttattttatttaatctgggggacgtaatagcccttcttaaaaccgcaattttgaaagtaacaagta

SEQ ID NO: 206894 - DNA, 75 bp, synthetic construct
  source 1..75: mol_type = other DNA
gtgctgcgtctattccactgaacgttgaagcacaaacgcgtcgtctgggtgttcctgaatctatcgccagttttg

SEQ ID NO: 206895 - DNA, 75 bp, synthetic construct
  source 1..75: mol_type = other DNA
gcgtcagtgttcccgaatacctgcggcggctggcgctcggaaagccgctgatcccggtcatcgaccaggacatgc

SEQ ID NO: 206896 - DNA, 75 bp, synthetic construct
  source 1..75: mol_type = other DNA
cgatgctgactttttggggtggattgacgaatttttggcagaattttggcggatattggcccctaatggcagcct

SEQ ID NO: 206897 - DNA, 75 bp, synthetic construct
  source 1..75: mol_type = other DNA
aagagcaaattgcagctattgagaaagttaacccaaatattgaagtgttggaggaagtaacctgcagcacaacaa

SEQ ID NO: 206898 - DNA, 75 bp, synthetic construct
  source 1..75: mol_type = other DNA
ccacggcggcgcagttgtgcggcatcaacgttcgtcgggtacgcattcttatctttaccctttcgggattattag

SEQ ID NO: 206899 - DNA, 75 bp, synthetic construct
  source 1..75: mol_type = other DNA
cgcggcgtgtttaacgtaccaagtttcgttgccacgctggggctgtggagcgccctgcgcggaatggggctgttt

SEQ ID NO: 206900 - DNA, 75 bp, synthetic construct
  source 1..75: mol_type = other DNA
atcctggctcaaagtatcagatagttgaacattttttgaaagaaattggcatgaactcaccaaattattctacaa

SEQ ID NO: 206901 - DNA, 75 bp, synthetic construct
  source 1..75: mol_type = other DNA
ggcaggctattatctccagtgctaattcgatatttggattcattacccttccatttaagttaattgttgttgttt

SEQ ID NO: 206902 - DNA, 75 bp, synthetic construct
  source 1..75: mol_type = other DNA
ttaaaagcactgggcatcagcgcagctgcattttctttgcctcacgctgcgcatgccgatctgcttagctggttt

SEQ ID NO: 206903 - DNA, 75 bp, synthetic construct
  source 1..75: mol_type = other DNA
atgaaccttccattaattgcgaacatcgtggtgttcgttgtgctgctgtttgcgttggcccagactcgccacaaa

SEQ ID NO: 206904 - DNA, 75 bp, synthetic construct
  source 1..75: mol_type = other DNA
ataaaatacgtcattaccctggacagcgatacggtgctcccgcgcgatacggcacacaaactcgtcgcgacgatg

SEQ ID NO: 206905 - DNA, 75 bp, synthetic construct
  source 1..75: mol_type = other DNA
gccagctcctcaccagtcttgaagtttgctggttggggaatgaaaacgaaaatctcaggttcgcgctgctcactg

SEQ ID NO: 206906 - DNA, 75 bp, synthetic construct
  source 1..75: mol_type = other DNA
tgagtcgttgcggtactacccgttcccgacggtaaatgcgaataaacaggcgacggctttctcctcgtcacagca

SEQ ID NO: 206907 - DNA, 75 bp, synthetic construct
  source 1..75: mol_type = other DNA
tcaaaacggctgtgccgggttgtatccggcaatgctggccgtaatggtagcgccaacggtgggtattaacccgct

SEQ ID NO: 206908 - DNA, 75 bp, synthetic construct
  source 1..75: mol_type = other DNA
tgaaccgcttatcgatatgggtcgaactgcattgaacgtgagcggctcaatgaccgcaggtacgctgaccagcca

SEQ ID NO: 206909 - DNA, 75 bp, synthetic construct
  source 1..75: mol_type = other DNA
cgctgacaatactgaccggacaatttgccccccaactgctgtggattgcgttaccgatcggtttggtatggtgtg

SEQ ID NO: 206910 - DNA, 75 bp, synthetic construct
  source 1..75: mol_type = other DNA
ctcccgtcgctggtatcgccactgaattgtccacgaatttatcatatcgcatcagaggcagttgctcacggtgat

SEQ ID NO: 206911 - DNA, 75 bp, synthetic construct
  source 1..75: mol_type = other DNA
tggacagcgatacggtactcccgcgcgatacggcacacaaactcgtcgcgacgatggcgcatccgctgaatacgc

SEQ ID NO: 206912 - DNA, 75 bp, synthetic construct
  source 1..75: mol_type = other DNA
gctttcagaggaaaaagcccccaatacaccggaacatcatattggttattatctcgccggcgaaggtcgacaggc

SEQ ID NO: 206913 - DNA, 75 bp, synthetic construct
  source 1..75: mol_type = other DNA
aacaaatccgcactgtccgccagcatctgccgaaaagctttggcaaaggtcttccgtcgctggtatcgccgttga

SEQ ID NO: 206914 - DNA, 75 bp, synthetic construct
  source 1..75: mol_type = other DNA
ctttctggtaagacgggggccggtctggatccctgcggagcggtgcaatcggcggttacattaattgacggggac

SEQ ID NO: 206915 - DNA, 75 bp, synthetic construct
  source 1..75: mol_type = other DNA
aatgctggtctgctgatgcacatcaccgaacgtcagcaggcatggttcaatttttcccagggggtggcattgccg

SEQ ID NO: 206916 - DNA, 75 bp, synthetic construct
  source 1..75: mol_type = other DNA
cttgtgacgctatcgcggaacattacgcaagaatatggcttgttcccggtatggttgctcgttgttgccatagga

SEQ ID NO: 206917 - DNA, 75 bp, synthetic construct
  source 1..75: mol_type = other DNA
atgctgtcaggtttcatggcgtgttttcagatttgaatggaagtggatatacgattaacggctataacacagtat

SEQ ID NO: 206918 - DNA, 75 bp, synthetic construct
  source 1..75: mol_type = other DNA
agggctacaaggtcgatggctataccaccgcggatctgctcggcagttatcagcttccggtgggtacactcagct

SEQ ID NO: 206919 - DNA, 75 bp, synthetic construct
  source 1..75: mol_type = other DNA
cacaccttcaataagcgccacggaagaagcgctcgatcaaagcaatgcagatttaatcactctgctggcgggttg

SEQ ID NO: 206920 - DNA, 75 bp, synthetic construct
  source 1..75: mol_type = other DNA
agcctgatgaatatctggagacgaggtttatcaagcccacccgcgaactgatcacccaggtgattcaccattttt

SEQ ID NO: 206921 - DNA, 75 bp, synthetic construct
  source 1..75: mol_type = other DNA
gacagctctgaactgcaacagcaactgcggacgcatcagggctttgcaccgctgctggcgctggatgtggacgcc

SEQ ID NO: 206922 - DNA, 75 bp, synthetic construct
  source 1..75: mol_type = other DNA
attcaggggatgcgtgagcgcgtcagtgccctgggcggcgacttaacgctcgaaaaacagcacggcacgcgggta

SEQ ID NO: 206923 - DNA, 75 bp, synthetic construct
  source 1..75: mol_type = other DNA
ttaacgctcgaaaaacagcacggcacgcgggtaattgttaacttgcccacatttttgcaacaaatcgccggataa

SEQ ID NO: 206924 - DNA, 75 bp, synthetic construct
  source 1..75: mol_type = other DNA
gatacgcataatccccccttgcgtacctctttaatcatctggtgtagcctgttttttattattggtatcggcact

SEQ ID NO: 206925 - DNA, 75 bp, synthetic construct
  source 1..75: mol_type = other DNA
gggctcagacaggcgcttgagcaggaagccgctgaactcatgtcagcggtaaccgcaatccgtaatattcacgag

SEQ ID NO: 206926 - DNA, 75 bp, synthetic construct
  source 1..75: mol_type = other DNA
tcatgctggcaacgccggttattagcctgcttcctgccatcattgcacaaaacgtctggcaccgttttccacttt

SEQ ID NO: 206927 - DNA, 75 bp, synthetic construct
  source 1..75: mol_type = other DNA
agctcgcccgccgcattcatctctccacccgccaattgctgcgccagttgcggcctcccagcgcactatgcggat

SEQ ID NO: 206928 - DNA, 75 bp, synthetic construct
  source 1..75: mol_type = other DNA
taacatcgaaagtttgcatctggagttgagcgaagacgtattagctgaaattgaagcggtgcatcaggtttatac

SEQ ID NO: 206929 - DNA, 75 bp, synthetic construct
  source 1..75: mol_type = other DNA
acagggcttcctgaatgggcctggacgcgggcaaccccctataccggaagcgacgagcagttacggaagttaaaa

SEQ ID NO: 206930 - DNA, 75 bp, synthetic construct
  source 1..75: mol_type = other DNA
ccaaaaagcagggtgcagcctggatttggttcgttttattaaacaggaagaaactacgctttcttcgataaaagt

SEQ ID NO: 206931 - DNA, 75 bp, synthetic construct
  source 1..75: mol_type = other DNA
gccatatccagcaccaatgccatgatgctgatggcgaatggtgaaaatgaaatcagcctggaaatcggggcatta

SEQ ID NO: 206932 - DNA, 75 bp, synthetic construct
  source 1..75: mol_type = other DNA
tggctgaatataacagcgaacggccccatgaatcgctgaataacctgacgccggaagaagtaccggctgatgact

SEQ ID NO: 206933 - DNA, 75 bp, synthetic construct
  source 1..75: mol_type = other DNA
tggctgaatataacagcgaacggccccatgaatcgctgaataacctgacgccggaagagtaccggctgatgactg

SEQ ID NO: 206934 - DNA, 75 bp, synthetic construct
  source 1..75: mol_type = other DNA
tgaacgctatccgcgatacggatttaaaaagctctttcaggtacttcgcagacagggcaatagctggaaccataa

SEQ ID NO: 206935 - DNA, 75 bp, synthetic construct
  source 1..75: mol_type = other DNA
gcagagagtcccggcattattgataaagagttcttcaataaaatcggtgaggatttcaaccctaagaagttcaac

SEQ ID NO: 206936 - DNA, 75 bp, synthetic construct
  source 1..75: mol_type = other DNA
gacctgaaagaactgctggcagaatggcagcattactataactgggaacgccctcatagcgctcacaacggtaaa

SEQ ID NO: 206937 - DNA, 75 bp, synthetic construct
  source 1..75: mol_type = other DNA
aatttttcagcctcgcatttcagtatggtgtggcacatgcgctggtggattatccacgaacggatgtgaacgaga

SEQ ID NO: 206938 - DNA, 75 bp, synthetic construct
  source 1..75: mol_type = other DNA
ttttacagatgaaagtggtgaagagcgtatggggtattacgctccggtattttcgctgattgatggtcagtttat

SEQ ID NO: 206939 - DNA, 75 bp, synthetic construct
  source 1..75: mol_type = other DNA
ataaccatcaaaaaatccgcagcaggtttaatatacaggaatcatattgtgccattaagactaatggtgtccttg

SEQ ID NO: 206940 - DNA, 75 bp, synthetic construct
  source 1..75: mol_type = other DNA
ccctcgcccaatgcgggcggggatataaggcgaaaagcccgcagggctttaaagatcaatcaggtgttgactgac

SEQ ID NO: 206941 - DNA, 75 bp, synthetic construct
  source 1..75: mol_type = other DNA
gctttcattgagcgttttaacaggacataccgtacagaaatactcgatttttatctgttcatgtcaacgacggat

SEQ ID NO: 206942 - DNA, 75 bp, synthetic construct
  source 1..75: mol_type = other DNA
cacagggcgatatgcccgcctatggttacactcctccttacacagatggtgcaaaattaactcaaccggaatggt

SEQ ID NO: 206943 - DNA, 75 bp, synthetic construct
  source 1..75: mol_type = other DNA
attacgcaacatcagtatgaccagcatatttatcactatgatgctgatctggttgctgctttccgtgacctcggt

SEQ ID NO: 206944 - DNA, 75 bp, synthetic construct
  source 1..75: mol_type = other DNA
ggaaatggtggccaggggggtacaggcagtgaaaccatcgtcagggatgctgttgccaaatcgcgtaaaggctgg

SEQ ID NO: 206945 - DNA, 75 bp, synthetic construct
  source 1..75: mol_type = other DNA
atgagggagtccaaaaaacaatgaccaacattaccaagagaagtttagtggcggcaggcgttatggctgcgctta

SEQ ID NO: 206946 - DNA, 75 bp, synthetic construct
  source 1..75: mol_type = other DNA
ttcctcgatacccgtcaccagggaacttttgatgtggctcgtgcaggctggtgtgctgactataacgaaccaaca

SEQ ID NO: 206947 - DNA, 75 bp, synthetic construct
  source 1..75: mol_type = other DNA
atgagggagtccaaaaaacaatgaccaacatcaccaagagaagtttagtagcagctggcgttctggctgcgctta

SEQ ID NO: 206948 - DNA, 75 bp, synthetic construct
  source 1..75: mol_type = other DNA
ttcctcaatgttttcatctggagatgaaaaacaccgggtgttgcgaagctttgcgtgttgttgatgaacgcagcg

SEQ ID NO: 206949 - DNA, 75 bp, synthetic construct
  source 1..75: mol_type = other DNA
ggtgtggcaaagagaactttcattgattgggaaaaagatcgcacttctcctactgcagtgcagttatctgcacta

SEQ ID NO: 206950 - DNA, 75 bp, synthetic construct
  source 1..75: mol_type = other DNA
tgttcagaacgctgaatgaagtacgggaaatcactgaaaaatggttatcaaaatataactgtgaacgcccgcatg

SEQ ID NO: 206951 - DNA, 75 bp, synthetic construct
  source 1..75: mol_type = other DNA
atgttcgcgatacgctactagaacgggtggaggttgatgcagaaaacagaaattttattctgcaatgtctggcat

SEQ ID NO: 206952 - DNA, 75 bp, synthetic construct
  source 1..75: mol_type = other DNA
gccccgcgtgtacatcgatcattctaccacaaaccgcggcgcacaccggtgggttttgtatgccctgcgttcagg

SEQ ID NO: 206953 - DNA, 75 bp, synthetic construct
  source 1..75: mol_type = other DNA
gtaatgctcatttgtctgcaaaaaatatcccgccagcctggctgccggatgatgtatctgaatggcgtcggttac

SEQ ID NO: 206954 - DNA, 75 bp, synthetic construct
  source 1..75: mol_type = other DNA
gaagagaaacggctggcagcattgagtgaagaggcccgggcagtggaggtggcacaaaaaaatcttgctgctgca

SEQ ID NO: 206955 - DNA, 75 bp, synthetic construct
  source 1..75: mol_type = other DNA
gcgcttcgccataattccactcatccggaggttattgacctggctcatgccaataatgcagcgatgcaggcagaa

SEQ ID NO: 206956 - DNA, 75 bp, synthetic construct
  source 1..75: mol_type = other DNA
ctggcggtggtggtggaactggaggtagcaaaagtgaaagttctgcagccattcatgccacagctaaatggtcta

SEQ ID NO: 206957 - DNA, 75 bp, synthetic construct
  source 1..75: mol_type = other DNA
gaacagtatggcgtgaagtggcctgtggggtatgaggtgaatatcagtagtcagggagacaactgtcaacgccac

SEQ ID NO: 206958 - DNA, 75 bp, synthetic construct
  source 1..75: mol_type = other DNA
gatcatattcaggccatcctaatggggcgtgttgatatcacccagaataaacactatcagcatcaggccgaatca

SEQ ID NO: 206959 - DNA, 75 bp, synthetic construct
  source 1..75: mol_type = other DNA
actattgcgatattgcagtaaaggccattgctttactacgtcaatatgatcttttcttagttaatattgaagtca

SEQ ID NO: 206960 - DNA, 75 bp, synthetic construct
  source 1..75: mol_type = other DNA
atggataaagtcactgataattctccagatgtggagagcacagaatctactgaggggtcattcccaactgttggg

SEQ ID NO: 206961 - DNA, 75 bp, synthetic construct
  source 1..75: mol_type = other DNA
aggatttagctgaaaaggcgaagggtagtaaatttagtagtgttgatgaagctcttgctgcatttgaaaagtata

SEQ ID NO: 206962 - DNA, 75 bp, synthetic construct
  source 1..75: mol_type = other DNA
gattaacgcgctgtggaaacgtttcgagctcggttatatctacgcgcacaataagattgatgaattcagcggtgt

SEQ ID NO: 206963 - DNA, 75 bp, synthetic construct
  source 1..75: mol_type = other DNA
ttcacagattaaggatgctgttgatgcaacagttagcttttatcaaacgctgactgaaaaatatggagaaaaata

SEQ ID NO: 206964 - DNA, 75 bp, synthetic construct
  source 1..75: mol_type = other DNA
caagagccaatgatccgcttcagaaccgtcctttttttgaagcaaccagacgacgggttggggccggtaagatta

SEQ ID NO: 206965 - DNA, 75 bp, synthetic construct
  source 1..75: mol_type = other DNA
ctgcgcgatgctaatggcaaaccatattatcgcggggaagattataaatttgatatcaatgcgcccgcgcccgaa

SEQ ID NO: 206966 - DNA, 75 bp, synthetic construct
  source 1..75: mol_type = other DNA
ctggctggccagtcagcaggtgtatccgcaattctactggcaacaacgtaatggtgatgaagaagctgccgtcct

SEQ ID NO: 206967 - DNA, 75 bp, synthetic construct
  source 1..75: mol_type = other DNA
cttctcagttcgctggaaaaaggagagcagttagcttttgaattgatttattttgcgcagcaggccgcaagggaa

SEQ ID NO: 206968 - DNA, 75 bp, synthetic construct
  source 1..75: mol_type = other DNA
atggcagtgatttatatcgccggtcccatgaccggatgcaaagactacaacaggacggcattttgcgcggaggac

SEQ ID NO: 206969 - DNA, 75 bp, synthetic construct
  source 1..75: mol_type = other DNA
caaaattattgcaaaaaaaatagttgaaattgaaaaatcaagatcaactattatcaataataaagagtgtttctt

SEQ ID NO: 206970 - DNA, 75 bp, synthetic construct
  source 1..75: mol_type = other DNA
acagcattcaaacaaagtctaacagtgctgttttatcatatatctatggacagtctggattcaccattgttctga

SEQ ID NO: 206971 - DNA, 75 bp, synthetic construct
  source 1..75: mol_type = other DNA
aagtcggaaggcagcgaaagagtttgtgagagatggattaacatatttgatgagcagatatttaacagaatataa

SEQ ID NO: 206972 - DNA, 75 bp, synthetic construct
  source 1..75: mol_type = other DNA
agcagttagcttttgaattgatttattttgcgcagcaggccgcaagggaagctgcaaacaagccgtgggatgaat

SEQ ID NO: 206973 - DNA, 75 bp, synthetic construct
  source 1..75: mol_type = other DNA
tattctattaggttttgacggtacccgtaagcttgataatggttatttcgctggattttcagcacaaccactggc

SEQ ID NO: 206974 - DNA, 75 bp, synthetic construct
  source 1..75: mol_type = other DNA
atggaccagacgatttcacctgcaaccggcgactacgaacgccgccggatttatacacttcataacgcggtttat

SEQ ID NO: 206975 - DNA, 75 bp, synthetic construct
  source 1..75: mol_type = other DNA
gtcagtacccggaacatcccgacttacgcatttgggggctgaatgcgtttgacccgtcacaaggtcatttacttt

SEQ ID NO: 206976 - DNA, 75 bp, synthetic construct
  source 1..75: mol_type = other DNA
gtgaaagcgttccaccactgtttaccaaaattattgcaaaaaaaatagttgaaattgaaaaatcaagatcaacta

SEQ ID NO: 206977 - DNA, 75 bp, synthetic construct
  source 1..75: mol_type = other DNA
actttcattgagtattccggtaataccgctaacgatatttatgctgatggccgtggttatatctatatgatgaaa

SEQ ID NO: 206978 - DNA, 75 bp, synthetic construct
  source 1..75: mol_type = other DNA
aactggtattttgagttaaactcgttacttgaagatggaatatctttatataatgacggtaattatcatgggaga

SEQ ID NO: 206979 - DNA, 75 bp, synthetic construct
  source 1..75: mol_type = other DNA
taatttaccttttaatatgaatacattttatcaattatggggaacaaaaactccagaagaggctcgtaaaaaaat

SEQ ID NO: 206980 - DNA, 75 bp, synthetic construct
  source 1..75: mol_type = other DNA
aagagaaagcaatatctcttgtcggaagggatatatatgagaaattgataaagggatatactgaaaaacaatggg

SEQ ID NO: 206981 - DNA, 75 bp, synthetic construct
  source 1..75: mol_type = other DNA
tggtggtcgattggctgagtataaatattacgacatgcaccaggttatagcatcagcattgaaatttattgagga

SEQ ID NO: 206982 - DNA, 75 bp, synthetic construct
  source 1..75: mol_type = other DNA
ttgatgatccccgcgcatctgtttatttttcgcgggatggcaaaacgaatcgccagactggcagaacaaagcaca

SEQ ID NO: 206983 - DNA, 75 bp, synthetic construct
  source 1..75: mol_type = other DNA
ttgatgatccccgcgcatctgtttatttttcgcggaatggcaaaacaaatcgccagactggcagaacaaagcaca

SEQ ID NO: 206984 - DNA, 75 bp, synthetic construct
  source 1..75: mol_type = other DNA
aaagagcgttatttctttggcaatattttgtggcagacacgggcgttgatggaccgcgcgatcggtcataagctg

SEQ ID NO: 206985 - DNA, 75 bp, synthetic construct
  source 1..75: mol_type = other DNA
cggcagtaaccgttaagcgcttgcatgatcgcgggcgttccggcgcatgggcatttctgatgattgtggcgtgga

SEQ ID NO: 206986 - DNA, 75 bp, synthetic construct
  source 1..75: mol_type = other DNA
acacaaggcgaaaataaatatggtaaagatactcaggatgtgaagtataaagccgacaataaatcaagtaattaa

SEQ ID NO: 206987 - DNA, 75 bp, synthetic construct
  source 1..75: mol_type = other DNA
catttaaagggcgtattggacgccgtgatttctggatttggataggcctgtggttcgcaggcatgctggtgcttt

SEQ ID NO: 206988 - DNA, 75 bp, synthetic construct
  source 1..75: mol_type = other DNA
cataagtatggtgctcatattttccataccaatgataaacaaatatgggaatatgtaaattcatttgtcgagttt

SEQ ID NO: 206989 - DNA, 75 bp, synthetic construct
  source 1..75: mol_type = other DNA
aagcaatatcattagtgggacgtgatttatatgaaaaattaataaaaggttatactgagaaacaatggggaagaa

SEQ ID NO: 206990 - DNA, 75 bp, synthetic construct
  source 1..75: mol_type = other DNA
caagaaatattcgaaaattgcaaaaaaaatcatatatacaggaccgattgatgagtattttgataatgtgctagg

SEQ ID NO: 206991 - DNA, 75 bp, synthetic construct
  source 1..75: mol_type = other DNA
aacattttatggcggtgagcggtaagcgccgctggttgctccccatccccctccccacccgctggatttcggtgt

SEQ ID NO: 206992 - DNA, 75 bp, synthetic construct
  source 1..75: mol_type = other DNA
accgtaacgcgcaatgttggcgaaaacgctctggcaattagccgcgtgccgcagtcgcaaaaagaaggttggcgt

SEQ ID NO: 206993 - DNA, 75 bp, synthetic construct
  source 1..75: mol_type = other DNA
gatcaacaccggtattctgatcgccaacggtgcagatatgaaacgctggctggcgaagctgaccaataataatgc

SEQ ID NO: 206994 - DNA, 75 bp, synthetic construct
  source 1..75: mol_type = other DNA
gtgctgcatacccttgccgggaaagcgatggttcagcatgtcattgatgctgcgaatgaattaggcgcagcgcac

SEQ ID NO: 206995 - DNA, 75 bp, synthetic construct
  source 1..75: mol_type = other DNA
accgggatggataaccagatcctctcgttgtatgccaaagggatgaccactcgtgagatagctgctgcgttcaaa

SEQ ID NO: 206996 - DNA, 75 bp, synthetic construct
  source 1..75: mol_type = other DNA
ggcaacccgctggcgcagcaacacggtccacgttacttcatgctcaataagcctcagggctatgtttgctcaact

SEQ ID NO: 206997 - DNA, 75 bp, synthetic construct
  source 1..75: mol_type = other DNA
tcagcccatatacagtcgtggaagatgcgaatctggcggcggcctgtaccattggcccgtttgcccgtctgcgcc

SEQ ID NO: 206998 - DNA, 75 bp, synthetic construct
  source 1..75: mol_type = other DNA
ttcggtgtggtttctcaatgtgattacttccgtacgccagggcgttgattcaggggctgaaacacgatctgctgg

SEQ ID NO: 206999 - DNA, 75 bp, synthetic construct
  source 1..75: mol_type = other DNA
actgcgggccggaattatcgttggcgcaggttcagcggcgttcgaagtcatgcgcgatatggtctacaacctgcc

SEQ ID NO: 207000 - DNA, 75 bp, synthetic construct
  source 1..75: mol_type = other DNA
cgttcacgcaccacgcccatcgcgctggaaaacttgctgcactatctggtggcgctgttagatcatccggcctgc

SEQ ID NO: 207001 - DNA, 75 bp, synthetic construct
  source 1..75: mol_type = other DNA
aagcaatatcattagttggtcgagatatttttgaaactttaataaaagaatatacagaaaaacaatgggggcgtg

SEQ ID NO: 207002 - DNA, 75 bp, synthetic construct
  source 1..75: mol_type = other DNA
aaagagtatgtaaatggagatgaaccgtactatccggttaatgactctgaaaataatagaaaatatgccaaatat

SEQ ID NO: 207003 - DNA, 75 bp, synthetic construct
  source 1..75: mol_type = other DNA
gcaggttcagcggcgttcgaagtcatgcgcgatatggtctacaacctgccagtgttaacgccgccacgctgggtt

SEQ ID NO: 207004 - DNA, 75 bp, synthetic construct
  source 1..75: mol_type = other DNA
tgataggcattcagtcggagaaactcagtcgttatcttgagcgtttacatactgccggactcaacgtgacgcggg

SEQ ID NO: 207005 - DNA, 75 bp, synthetic construct
  source 1..75: mol_type = other DNA
gttaaccagcaaacgagctggctgattcgcagtgctgcacatgccttcaacgagcttgatgaacgctggttacag

SEQ ID NO: 207006 - DNA, 75 bp, synthetic construct
  source 1..75: mol_type = other DNA
cgcgttgctgaactgaccggcggtgacagcctgaaatccaacatccagctggtgttcaacaacgccattctggcg

SEQ ID NO: 207007 - DNA, 75 bp, synthetic construct
  source 1..75: mol_type = other DNA
tgacctgacgcgagatgttgacggcttctactgtcgtgaagttgtgaagcgaatggttgaagtgtggtgccactg

SEQ ID NO: 207008 - DNA, 75 bp, synthetic construct
  source 1..75: mol_type = other DNA
gcgctttgcgatgtgcagcaccagtaaagtgatggccgcggccgcggtgctgaagaaaagtgaaagcgaaccgaa

SEQ ID NO: 207009 - DNA, 75 bp, synthetic construct
  source 1..75: mol_type = other DNA
cttttgttggcagccggggcatcgcgttctggcaaacgcttaagattgaagatcaacttcagcaacaacagcaag

SEQ ID NO: 207010 - DNA, 75 bp, synthetic construct
  source 1..75: mol_type = other DNA
taaacgcggcgtgaacaatcgcatcggtttcttcctgcatattccttttccgacaccggaaatctttaatgcgct

SEQ ID NO: 207011 - DNA, 75 bp, synthetic construct
  source 1..75: mol_type = other DNA
caaaaagccatacagcctggggcaaagcgtttcgaacagaagtttacccgattggcattgagccaaaagaaatag

SEQ ID NO: 207012 - DNA, 75 bp, synthetic construct
  source 1..75: mol_type = other DNA
aaaaagtcattatgaatcaaatggtatgagtaaagatgagcggtataacgctctattttctcgaatgcaagaagt

SEQ ID NO: 207013 - DNA, 75 bp, synthetic construct
  source 1..75: mol_type = other DNA
caaagttagccgtcgcgatttaccttttgttgttgcggccggaaaaaatggcgctactactgttgcttcaaccat

SEQ ID NO: 207014 - DNA, 75 bp, synthetic construct
  source 1..75: mol_type = other DNA
tattggcggcgtgatgaaagtgggcttaagtaaagaagaaattgaattgctgggccgtgaaggacataacgtgac

SEQ ID NO: 207015 - DNA, 75 bp, synthetic construct
  source 1..75: mol_type = other DNA
ctggcaggcgagttttattcacgacctaaagcagataacaccgcgcagtgcggaaagccaactgcgcgataacgt

SEQ ID NO: 207016 - DNA, 75 bp, synthetic construct
  source 1..75: mol_type = other DNA
actgggggggacggaaatatataaaaaaaagaaaaaaagattattttttttcttggtgcttgcgtgtctttttta

SEQ ID NO: 207017 - DNA, 75 bp, synthetic construct
  source 1..75: mol_type = other DNA
ttcactttcgataataattatttcaccgatagatttcagggggttcctatcggaggatacacacaaataattgat

SEQ ID NO: 207018 - DNA, 75 bp, synthetic construct
  source 1..75: mol_type = other DNA
ttaccgtccgccagcaggataatttcacgcagcttgacgtgcagcagcacgctgtggaagtgcttctcgccagtg

SEQ ID NO: 207019 - DNA, 75 bp, synthetic construct
  source 1..75: mol_type = other DNA
ttgaagggaatagagattagagtaaatactgattattttgctaataaagaatgttttgataggctagcgaagaaa

SEQ ID NO: 207020 - DNA, 75 bp, synthetic construct
  source 1..75: mol_type = other DNA
aggctatttccttagtgggttatgatatttatgagaaattaattaaaggatacaccgaaaaacagtggggaagaa

SEQ ID NO: 207021 - DNA, 75 bp, synthetic construct
  source 1..75: mol_type = other DNA
tcttccgtttaatatgaatacgttttatcaactatggggagttaagacgccatcggaagcattaaatattataaa

SEQ ID NO: 207022 - DNA, 75 bp, synthetic construct
  source 1..75: mol_type = other DNA
ccggtttgtttggggctgtttgtgcgcatgagttaaataaaaaagggaaaaaaatactggtaattgatcgaagag

SEQ ID NO: 207023 - DNA, 75 bp, synthetic construct
  source 1..75: mol_type = other DNA
atgattaatccaaatccaaagcgttctgacgaaccggtattctggggcctcttcggggccggtggtatgtggagc

SEQ ID NO: 207024 - DNA, 75 bp, synthetic construct
  source 1..75: mol_type = other DNA
tcgccgtaacggcgcatctctcggtgagatgatcaaagaagagatggggccagtaccggggactatcgcgctgtt

SEQ ID NO: 207025 - DNA, 75 bp, synthetic construct
  source 1..75: mol_type = other DNA
aaatcgctgatctttgaccccgaggaaatcgggttcgtggtgaaagaaacggtccccatgccagcgagcggagac

SEQ ID NO: 207026 - DNA, 75 bp, synthetic construct
  source 1..75: mol_type = other DNA
atgtacaaatcgctatctcttacagcggcagtaaaaaagagattgtcttgtgcgccgaggcagcgcgaaagcagg

SEQ ID NO: 207027 - DNA, 75 bp, synthetic construct
  source 1..75: mol_type = other DNA
aactggcaggcggaacaccggaagaaaaccgtgacattttaacacgcttgttacaaggtaaaggcgacgccgccc

SEQ ID NO: 207028 - DNA, 75 bp, synthetic construct
  source 1..75: mol_type = other DNA
ctgacgaaccggtattctggggcctcttcggtgcaggcggcatgtggggcgcgatcatcgcaccggtaatggttc

SEQ ID NO: 207029 - DNA, 75 bp, synthetic construct
  source 1..75: mol_type = other DNA
ataatgcttatggttataccgatagcaagggtaattttgtcgatcagtccgatcgtaccggttatggcatgagca

SEQ ID NO: 207030 - DNA, 75 bp, synthetic construct
  source 1..75: mol_type = other DNA
aacggttcgtctgctgcttgagcatgagatggggcaggtgtggatcagtggcgaaatctctaatttcacacaacc

SEQ ID NO: 207031 - DNA, 75 bp, synthetic construct
  source 1..75: mol_type = other DNA
gctggcgacgttccggcatgagcgccacctggtgtgcgctgttgctgatggtgctggcgaatctttggtatatgc

SEQ ID NO: 207032 - DNA, 75 bp, synthetic construct
  source 1..75: mol_type = other DNA
accggacgctatttccaggaaataaacggcaagcgcgtgttgctggagcggggcgattttgtttttatcccgttg

SEQ ID NO: 207033 - DNA, 75 bp, synthetic construct
  source 1..75: mol_type = other DNA
aacggtttggtaatgcagtaacgcacctggaagcagttagcccgctttcgacgctggcgcgtggttatagcgtta

SEQ ID NO: 207034 - DNA, 75 bp, synthetic construct
  source 1..75: mol_type = other DNA
gctgcgctacatgatattttgcatgtgttaaaacgtcgcgatccttctctgccagtgattatttatcccaccgcc

SEQ ID NO: 207035 - DNA, 75 bp, synthetic construct
  source 1..75: mol_type = other DNA
gcgaaatttctaatttcacacaaccggcttccggtcactggtactttacgcttaaagacgataccgcccaggtgc

SEQ ID NO: 207036 - DNA, 75 bp, synthetic construct
  source 1..75: mol_type = other DNA
agaaaggttctgacaggagagatgcatattccattgagaatgtctcagaatataacgtgcctggatggctgaaat

SEQ ID NO: 207037 - DNA, 75 bp, synthetic construct
  source 1..75: mol_type = other DNA
ttaattttcttcatgttgatgcaacttattatctattttgcttttttaactctggggactaaattaagtgtgtat

SEQ ID NO: 207038 - DNA, 75 bp, synthetic construct
  source 1..75: mol_type = other DNA
ggcatgacatgccaaatgaccccaagtggcgaacgattgccagggtatcaggacagccaatcgcaacagtgatgg

SEQ ID NO: 207039 - DNA, 75 bp, synthetic construct
  source 1..75: mol_type = other DNA
gtatcagcggactgcatcagcacgactattatgaatttactctggtattaaccgggcgttatttccaggagatta

SEQ ID NO: 207040 - DNA, 75 bp, synthetic construct
  source 1..75: mol_type = other DNA
gagcagcattacctgccgttgttgccttattgctttgtcgcttcgcaggtataccggaccaataacgcttttctc

SEQ ID NO: 207041 - DNA, 75 bp, synthetic construct
  source 1..75: mol_type = other DNA
ggggtattttgttaagttcagtaataaaaacaggttgaatagttgtgctgcctggtgttcacttattgcatggtt

SEQ ID NO: 207042 - DNA, 75 bp, synthetic construct
  source 1..75: mol_type = other DNA
tttcaggcggtcgtacatcggcgtatctcgttcaccttatggagcaacgcagaaaggcaggtgaaaacgttcatt

SEQ ID NO: 207043 - DNA, 75 bp, synthetic construct
  source 1..75: mol_type = other DNA
gaatacgtctgtaaagacagtgaaatggcaaccgaaggggcgacagacctgtgggaaggctcacttatcgatcaa

SEQ ID NO: 207044 - DNA, 75 bp, synthetic construct
  source 1..75: mol_type = other DNA
cttcggtgtaccgttaattggttatcagacaaaagcgctgcctgcgtttttctgccgaaccagcccatttgaagt

SEQ ID NO: 207045 - DNA, 75 bp, synthetic construct
  source 1..75: mol_type = other DNA
gtctggcctggcagccggatgcgcaccatggcttcggctgcggctggcagcaacagttgggtacaggtgaaaacg

SEQ ID NO: 207046 - DNA, 75 bp, synthetic construct
  source 1..75: mol_type = other DNA
tcgccgtcggaaggatagcttcattggaaagatttgtggatggattggcaccaaagaatggggctgggaaaccta

SEQ ID NO: 207047 - DNA, 75 bp, synthetic construct
  source 1..75: mol_type = other DNA
tgaactggaaaaaatcgtcaggggtattgaaacaggttttcgtggtacggccctgtatgccacagaaaatattgc

SEQ ID NO: 207048 - DNA, 75 bp, synthetic construct
  source 1..75: mol_type = other DNA
catcgttaaatgacctggttcgtcttgctgcggcaatggggtctgaatttccttttgacgaatacgcagaagtgc

SEQ ID NO: 207049 - DNA, 75 bp, synthetic construct
  source 1..75: mol_type = other DNA
tgtatttctgtacggtggtctgcgcgttatatctggtgagtggcgggtataagataatccgtaactatattcgta

SEQ ID NO: 207050 - DNA, 75 bp, synthetic construct
  source 1..75: mol_type = other DNA
catattatcggggtgctatcgctggatgcgtatttaattaccggcaacggtacgcgtgtgcactctctggaaggc

SEQ ID NO: 207051 - DNA, 75 bp, synthetic construct
  source 1..75: mol_type = other DNA
gcgattaattgcctggaggtactgccggtggggtgcaataaaggcgcagcgttggtggtgctgacccaatattta

SEQ ID NO: 207052 - DNA, 75 bp, synthetic construct
  source 1..75: mol_type = other DNA
agcatgttgccggaagccgagcaacaacgcctgctgtttgaaggcggctatccggtgctggcgaaagtcgcaaaa

SEQ ID NO: 207053 - DNA, 75 bp, synthetic construct
  source 1..75: mol_type = other DNA
cggcatggtgcagtcgctgaacgtctccgtcgcatcagcactcattctttacgaagcccagcgtcagcggcaaaa

SEQ ID NO: 207054 - DNA, 75 bp, synthetic construct
  source 1..75: mol_type = other DNA
agcgttagccctggcggatcgggacatcattataccgatgatcggtatggtgcagtcgctgaatgtttccgttgc

SEQ ID NO: 207055 - DNA, 75 bp, synthetic construct
  source 1..75: mol_type = other DNA
cggaagaatttaacgcgtggatggaggcaaataatcttcagtggactatctgcactatggatgaagatgatttta

SEQ ID NO: 207056 - DNA, 75 bp, synthetic construct
  source 1..75: mol_type = other DNA
gagggcgatggatggtttattggttcgatacatgacaccgaagatggcccggtttgtgtctggttgcgaaataag

SEQ ID NO: 207057 - DNA, 75 bp, synthetic construct
  source 1..75: mol_type = other DNA
gagggagaaggctggtttattggctccattcatgatactgaagatggcccggtttgtgtctggttgcgaaacaag

SEQ ID NO: 207058 - DNA, 75 bp, synthetic construct
  source 1..75: mol_type = other DNA
cacccagatgaactctaaagccgatgaggatgtccgtaaagagcttaatgccattgctgacgtatcagccggccg

SEQ ID NO: 207059 - DNA, 75 bp, synthetic construct
  source 1..75: mol_type = other DNA
cacccagatgaactctaaagccgatgatgaagtccgtaaagagcttaatgccattgctgacgtatcagccggccg

SEQ ID NO: 207060 - DNA, 75 bp, synthetic construct
  source 1..75: mol_type = other DNA
cacccagatgaactcaaaagccgatgaggaagtccgtaaagagcttaatgccattgctgacgtatcagccggccg

SEQ ID NO: 207061 - DNA, 75 bp, synthetic construct
  source 1..75: mol_type = other DNA
gcgttatcagccagttacaggcgacggcgatgagcgcccgtgtacaggagtcactgtcgcaaccgactatcagtt

SEQ ID NO: 207062 - DNA, 75 bp, synthetic construct
  source 1..75: mol_type = other DNA
atgtcagctatacaagggctcgaaggggttatcagccagttacaggccacggcaatgagtgcgcgtgcccaggag

SEQ ID NO: 207063 - DNA, 75 bp, synthetic construct
  source 1..75: mol_type = other DNA
atgtcactgacccgggcatatttcggggagctgcaggcatccattgagcaggatattaaccagcccgtccgccag

SEQ ID NO: 207064 - DNA, 75 bp, synthetic construct
  source 1..75: mol_type = other DNA
cgcagtatggatgaagatgattttaacccggatgcagatggtcccgatatttccgcatgggaacctgaacgacca

SEQ ID NO: 207065 - DNA, 75 bp, synthetic construct
  source 1..75: mol_type = other DNA
cgatggatggtttactggttcgatacatgacaccgaagatggtccggtctgcgtctggttacgaaataaggtaat

SEQ ID NO: 207066 - DNA, 75 bp, synthetic construct
  source 1..75: mol_type = other DNA
aagaaggttgccacggctatgcgccaatggtggattgcgctgctggcgtgagtttccagtctatggcaccggatt

SEQ ID NO: 207067 - DNA, 75 bp, synthetic construct
  source 1..75: mol_type = other DNA
cacccagatgaactccaaagccgatgaggacgtccgtaaagagcttaatgccattgctgacgtatcagccggccg

SEQ ID NO: 207068 - DNA, 75 bp, synthetic construct
  source 1..75: mol_type = other DNA
atggtgcacagctttacgcagttcgtgttggtgcgtatcggtatggggattggtgaagcgccgatgaaccgaacc

SEQ ID NO: 207069 - DNA, 75 bp, synthetic construct
  source 1..75: mol_type = other DNA
caaaatccgcagccgaagattcaccgtgcgcaaacgcggatccaacagctggaatatcgtctcgctgaaacactt

SEQ ID NO: 207070 - DNA, 75 bp, synthetic construct
  source 1..75: mol_type = other DNA
cctaagcaatatctctcaatcggtaatcaaaccattcttgaacactcggtgtatgcgctgctggcgcatccccgg

SEQ ID NO: 207071 - DNA, 75 bp, synthetic construct
  source 1..75: mol_type = other DNA
ggcatgacatgccaaatgatcccaagtggcgaacaatttccagggtgtcagggcagccaatcgcaacggtgatgg

SEQ ID NO: 207072 - DNA, 75 bp, synthetic construct
  source 1..75: mol_type = other DNA
caggtactgaaagaggacaatggcaacgtttcacaaaccgcgaaatccccggcagagcgcaagagagcgcagcgc

SEQ ID NO: 207073 - DNA, 75 bp, synthetic construct
  source 1..75: mol_type = other DNA
ctgtgtatatccaccttctggtgagcgcgtcacgaaatgtcacgacatgtcacggcgtgtcactacgtggtcaca

SEQ ID NO: 207074 - DNA, 75 bp, synthetic construct
  source 1..75: mol_type = other DNA
cacccagatgaactcgaaagccgatgacgacgtccgtaaagagcttaatgccattgctgacgtatcagccggccg

SEQ ID NO: 207075 - DNA, 75 bp, synthetic construct
  source 1..75: mol_type = other DNA
cacccagatgaactcgaaagccgatgatgatgtccgtaaagagcttaatgccattgctgacgtatcagccggccg

SEQ ID NO: 207076 - DNA, 75 bp, synthetic construct
  source 1..75: mol_type = other DNA
cacccagatgaactcgaaagccgatgaagaagtccgtaaagagcttaatgccattgctgacgtatcagccggccg

SEQ ID NO: 207077 - DNA, 75 bp, synthetic construct
  source 1..75: mol_type = other DNA
ctgcaaaccccgcacatgaaggcgtatagcgaagccgtaaaaggtgacgtgctggagatgaatatccgtattctg

SEQ ID NO: 207078 - DNA, 75 bp, synthetic construct
  source 1..75: mol_type = other DNA
gatgacgcaaatcgaatcgaccgtgaccagcctgcaccgtgaggctgaagcacagttccggcctgagctggagaa

SEQ ID NO: 207079 - DNA, 75 bp, synthetic construct
  source 1..75: mol_type = other DNA
cacccagatgaactcgaaagccgatgaggaggtccgtaaagagcttaatgccattgctgacgtatcagccggccg

SEQ ID NO: 207080 - DNA, 75 bp, synthetic construct
  source 1..75: mol_type = other DNA
gcttgatggcaacaataattacaacaatgcgttgattactggtgagcgagggatagagaaaatagattctttgct

SEQ ID NO: 207081 - DNA, 75 bp, synthetic construct
  source 1..75: mol_type = other DNA
aaaattatccgatgcggttggtgctctaagtcccaaaatgagtgaaaaggcttttcgtgactctatcggaaagat

SEQ ID NO: 207082 - DNA, 75 bp, synthetic construct
  source 1..75: mol_type = other DNA
atgcagcaggtttttgttccgccaccccggcgttaaggggaaatgaggtcagcatggatactatcgatcttggca

SEQ ID NO: 207083 - DNA, 75 bp, synthetic construct
  source 1..75: mol_type = other DNA
aaggcaagcgacattaacgcaacgcttggtctgatccgcgaaaacaatgaactggctcgatcaggtgcaaataac

SEQ ID NO: 207084 - DNA, 75 bp, synthetic construct
  source 1..75: mol_type = other DNA
ggcgctggggctaatgcgttctacgaaggcatcgacaacgaggggaatatggttcgagttcctgccagttcaatc

SEQ ID NO: 207085 - DNA, 75 bp, synthetic construct
  source 1..75: mol_type = other DNA
actggctcaatcaggtgcaaataacgttggtctgaccgcgttacgtggtctggctggagttgctgatatttataa

SEQ ID NO: 207086 - DNA, 75 bp, synthetic construct
  source 1..75: mol_type = other DNA
aatgaggtcaacatggatacgctcaatcttggcaacaacgaatctctggtatgcggcgtgtttcccaaccaggac

SEQ ID NO: 207087 - DNA, 75 bp, synthetic construct
  source 1..75: mol_type = other DNA
acgtataccaaaagcaaaacgtttaaaaccgaaactggtgcgcgtcgctggctggaaagaaactcaggtgagtga

SEQ ID NO: 207088 - DNA, 75 bp, synthetic construct
  source 1..75: mol_type = other DNA
gccatgacgtataccaaaagcaaatcgtttaaaaccgaagctggcgcgcatcgctggttagcaagaaactccgac

SEQ ID NO: 207089 - DNA, 75 bp, synthetic construct
  source 1..75: mol_type = other DNA
acgaatctctggtgtacggcgtgtttcccaaccaggacggtacgttcaccgcgatgacgtataccaaaagcaaaa

SEQ ID NO: 207090 - DNA, 75 bp, synthetic construct
  source 1..75: mol_type = other DNA
gcgatgacgtataccagaagtaaaacgtttaaaaccgaagctggcgcgcatcgctggttagcaagaaacgctaac

SEQ ID NO: 207091 - DNA, 75 bp, synthetic construct
  source 1..75: mol_type = other DNA
atggatacactcaatcttggcaacaacgaatctctggtatgcggtgtgttccctaaccaggacggcacgtttacc

SEQ ID NO: 207092 - DNA, 75 bp, synthetic construct
  source 1..75: mol_type = other DNA
cgtcgcttggtccgggtgcatttggcaggttcatgatggataacgaaaaggagatgcgtcgtttaggtatccctc

SEQ ID NO: 207093 - DNA, 75 bp, synthetic construct
  source 1..75: mol_type = other DNA
tgagctcagccaaacgtcacaatataaatttaaaagatgctcaagtacaacttaatggcatttatccgaaggatg

SEQ ID NO: 207094 - DNA, 75 bp, synthetic construct
  source 1..75: mol_type = other DNA
ccagacgattgcgtcagagagattttggaaaaaaccgagacaagtaggcaatcaaatccggtagaatctaaagcg

SEQ ID NO: 207095 - DNA, 75 bp, synthetic construct
  source 1..75: mol_type = other DNA
caaggttggtggaaaaaatcattacatacttcactgtctcctctttttaaaaagatatcaatgggtaaagaaagt

SEQ ID NO: 207096 - DNA, 75 bp, synthetic construct
  source 1..75: mol_type = other DNA
tgttcgcaattgtttgtctaacaaaaacttccaaattaaataaatactccatttatttctggatgtttttgtatt

SEQ ID NO: 207097 - DNA, 75 bp, synthetic construct
  source 1..75: mol_type = other DNA
atatatggttggtatggggggagcagatggattctttctcaatttacgtcttgcaaatacattggagggctatac

SEQ ID NO: 207098 - DNA, 75 bp, synthetic construct
  source 1..75: mol_type = other DNA
aaatagaatgtctgagaaattcactaattatataaacgagtgtctaagtgatcatcaattaaaattagttagcaa

SEQ ID NO: 207099 - DNA, 75 bp, synthetic construct
  source 1..75: mol_type = other DNA
tcatgggcaaaatgcaaaatcaggggattgcagcagcccgagatatgggggcatctggcatcaacaccgaagcag

SEQ ID NO: 207100 - DNA, 75 bp, synthetic construct
  source 1..75: mol_type = other DNA
gtaaagggatgagttatgtcgatgatgctcaaagggatgattatggcaatctggcgcttaaagcacaggtagcct

SEQ ID NO: 207101 - DNA, 75 bp, synthetic construct
  source 1..75: mol_type = other DNA
atctgttaaagaatatcaatatttcaacagcctgtctccagagcaacaaaagacatatcttcgtgttcgaggtcg

SEQ ID NO: 207102 - DNA, 75 bp, synthetic construct
  source 1..75: mol_type = other DNA
tatcgggacaggtaaggttgatggcattcttaaagttgataaatacgtggctatgccggggcaggagataacgct

SEQ ID NO: 207103 - DNA, 75 bp, synthetic construct
  source 1..75: mol_type = other DNA
atgcaaagcgggatgctcttcgtgaagctgtggcaaaacttgaacgtgaagagaaaaacgccaaagcccggttac

SEQ ID NO: 207104 - DNA, 75 bp, synthetic construct
  source 1..75: mol_type = other DNA
agacaatccgcagcaatcaggctggcgaggcgctaacagcacgaggacagaacatcacgatgcgcggtcaggatt

SEQ ID NO: 207105 - DNA, 75 bp, synthetic construct
  source 1..75: mol_type = other DNA
tcattcccagaaaagtatgagttttggcctgatgatgtaaaaattgaaatgagaacagttgcgcgtttaataggt

SEQ ID NO: 207106 - DNA, 75 bp, synthetic construct
  source 1..75: mol_type = other DNA
atggataactatgtgctggagcacaatctgatccgtgccattcgtgatgctcgtctgccgggagatctgcacggc

SEQ ID NO: 207107 - DNA, 75 bp, synthetic construct
  source 1..75: mol_type = other DNA
gcaacagcgaatctctggtatgtggcgtgttccccaaccaggacggtacgttcaccgcgatgacgtataccaaaa

SEQ ID NO: 207108 - DNA, 75 bp, synthetic construct
  source 1..75: mol_type = other DNA
cagtggcgaaagtgtgctatgcacaaatggtaaaacagttcctgagtcgtgacccgttcgaatgcgtgctgtgtg

SEQ ID NO: 207109 - DNA, 75 bp, synthetic construct
  source 1..75: mol_type = other DNA
gtgtttaaatttcttgtattaacattaggcattatctcttgccaggcttacgcagaagatacggttatagtaaac

SEQ ID NO: 207110 - DNA, 75 bp, synthetic construct
  source 1..75: mol_type = other DNA
agcgtcactgaacttgatgaaggggaaataagtaagcattttaaggatgcatcaattaaagttttagctggatgc

SEQ ID NO: 207111 - DNA, 75 bp, synthetic construct
  source 1..75: mol_type = other DNA
gcgaatctctggtatgtggcgtgttccccaaccaagacggtacgttcaccgcgatgacatataccaaaagcaaaa

SEQ ID NO: 207112 - DNA, 75 bp, synthetic construct
  source 1..75: mol_type = other DNA
tttaccgcgatgacgtataccaaaagtaaaaagtttaaaaccgaagctggcgcgcgtcgctggttagccagaaac

SEQ ID NO: 207113 - DNA, 75 bp, synthetic construct
  source 1..75: mol_type = other DNA
tttaccgcgatgacgtataccaaaagtaaaacgtttaaaaccgaagctgccgcgcatcgctggttagccagaaac

SEQ ID NO: 207114 - DNA, 75 bp, synthetic construct
  source 1..75: mol_type = other DNA
aatacgcgaactcgccagttgcagctataccgtaactctgaagatttttatccaagccctttgacaagaggataa

SEQ ID NO: 207115 - DNA, 75 bp, synthetic construct
  source 1..75: mol_type = other DNA
atactatcgatcttggcaacagcgaatctctggtatgcggcgtgtttcccaaccaggacggtacgtttaccgcga

SEQ ID NO: 207116 - DNA, 75 bp, synthetic construct
  source 1..75: mol_type = other DNA
tgaatttcaggaccgcagaacggttcgggttgattcaggtggtgaacaaaccagtcgtgttctggtttgagcaat

SEQ ID NO: 207117 - DNA, 75 bp, synthetic construct
  source 1..75: mol_type = other DNA
ttcggtctgtttgtgaaaacttaaagttacaaactaagccagccttaagaattaaaaacaaacgtcaagttatca

SEQ ID NO: 207118 - DNA, 75 bp, synthetic construct
  source 1..75: mol_type = other DNA
tttttaccgttagccgcctgaatcaaacggttcgtcagctgcttgagcatgagatggggcaggtgtggatcagtg

SEQ ID NO: 207119 - DNA, 75 bp, synthetic construct
  source 1..75: mol_type = other DNA
gcggcgctgcacgatattttgcatgtgttaaaacgtcgagatccttctctgccggtgattatttaccctaccgcc

SEQ ID NO: 207120 - DNA, 75 bp, synthetic construct
  source 1..75: mol_type = other DNA
ggcctccggtcactggtactttacgctcaaagacgataccgcccaggttcgctgcgcgatgttccgcaacagcaa

SEQ ID NO: 207121 - DNA, 75 bp, synthetic construct
  source 1..75: mol_type = other DNA
gcgacgacgtataccaaaagcaaaacgtttaaaaccgaatctggcgcgcgtcgctggctggaaagaaattcaggt

SEQ ID NO: 207122 - DNA, 75 bp, synthetic construct
  source 1..75: mol_type = other DNA
acgctggcgcgtggttatagtgtcaccagtacaaccgatggcacagtgttgaagcaggttaagcaggtgaaagcg

SEQ ID NO: 207123 - DNA, 75 bp, synthetic construct
  source 1..75: mol_type = other DNA
gcaggagttgctgcgccaggtgcaatccgcccagcagcggctggaaatggcgatggattattatcttgctaatcg

SEQ ID NO: 207124 - DNA, 75 bp, synthetic construct
  source 1..75: mol_type = other DNA
cggttcagttttttaagatggtgaggtacttcgggttccttgccaaccgggtgtgtggagagaagctgccgcagg

SEQ ID NO: 207125 - DNA, 75 bp, synthetic construct
  source 1..75: mol_type = other DNA
acgaatccctggtgtgcggcgtgttccccaaccaggatggaacgttcaccgccatgacgtataccaaaagcaaga

SEQ ID NO: 207126 - DNA, 75 bp, synthetic construct
  source 1..75: mol_type = other DNA
atgtttgaagaacgtttagagactattcggtctgtttgtgaaaacttaaagttacaaaccaaaccaaagctacga

SEQ ID NO: 207127 - DNA, 75 bp, synthetic construct
  source 1..75: mol_type = other DNA
acgctggcgcgtggatacagcgttactactgctactgacggcaatgtactgaaaaaagtgaagcaagttaaagcg

SEQ ID NO: 207128 - DNA, 75 bp, synthetic construct
  source 1..75: mol_type = other DNA
gcgatgacgtataccaaaagcaccacgtttaaaaccgaatctggcgcgcgtcgctggctggaaagaaactcaggt

SEQ ID NO: 207129 - DNA, 75 bp, synthetic construct
  source 1..75: mol_type = other DNA
gctatgacgtataccaaaagcaaaacgtttaaaaccgaaggtggcgctcgtcgctggctggaaagaaattcaggt

SEQ ID NO: 207130 - DNA, 75 bp, synthetic construct
  source 1..75: mol_type = other DNA
aaattcgcgcctatttgccgctgacgctcggcaaccactcggtgacgccgtatacgcgcattgggctggatcgct

SEQ ID NO: 207131 - DNA, 75 bp, synthetic construct
  source 1..75: mol_type = other DNA
tcggtgacgccgtatacgcgcattgggctggatcgctggagtaactgggactggcaggatgatattgaacgtgaa

SEQ ID NO: 207132 - DNA, 75 bp, synthetic construct
  source 1..75: mol_type = other DNA
cctgcttatctcggttggcgatttggtcgatcgcggtacagagaacgtcgaatgcctggaattaatcacattccc

SEQ ID NO: 207133 - DNA, 75 bp, synthetic construct
  source 1..75: mol_type = other DNA
ttactgatatcggtcggcgaccttatcgatcgcggtactgaaaatgtcgaatgtctggaactattgcagatgccc

SEQ ID NO: 207134 - DNA, 75 bp, synthetic construct
  source 1..75: mol_type = other DNA
aaataaaaaaaagtggatcatttatctcatatgatacaaatgaaaacacgatatacttaatgtctataatgacaa

SEQ ID NO: 207135 - DNA, 75 bp, synthetic construct
  source 1..75: mol_type = other DNA
gtctgcgcgggctgatggcaatccctgcgcctgagtcagaatatgtaaggcagtttgaagttgcacgccaaatgg

SEQ ID NO: 207136 - DNA, 75 bp, synthetic construct
  source 1..75: mol_type = other DNA
atttatgcgggcgctggctgagcgtctgccgcagcatgaggataaactgatgactatcgcagaacgtcttgagca

SEQ ID NO: 207137 - DNA, 75 bp, synthetic construct
  source 1..75: mol_type = other DNA
agcgtctgccgcagcatgaggataaactgatgactattgccgaacgtcttgagcagcaaggaatacagaaaggaa

SEQ ID NO: 207138 - DNA, 75 bp, synthetic construct
  source 1..75: mol_type = other DNA
ccggtcgttcctggcgaatcccgacgtcgccagagattttctggaactgcatcttcctgcggagtaccggcagtt

SEQ ID NO: 207139 - DNA, 75 bp, synthetic construct
  source 1..75: mol_type = other DNA
gaaatattttacatcagaagttaaggctcaatatggcttctataaaattggttttcttaacaaacaggaaatgat

SEQ ID NO: 207140 - DNA, 75 bp, synthetic construct
  source 1..75: mol_type = other DNA
gcggctatctctacaccaccaccgatatcgcctgtgcgaagtaccgttacgagacgctacatgccgatcgcgtgc

SEQ ID NO: 207141 - DNA, 75 bp, synthetic construct
  source 1..75: mol_type = other DNA
tgtgcgtaccctggagttcctcggtcacaacgtaattcgcgctaaccacgtcggtgactggggcacccagttcgg

SEQ ID NO: 207142 - DNA, 75 bp, synthetic construct
  source 1..75: mol_type = other DNA
gcgtccgatcgtctcggtgttgctacaccagaaaaacagaccattgtggtggactactccgcgccaaacgtggcg

SEQ ID NO: 207143 - DNA, 75 bp, synthetic construct
  source 1..75: mol_type = other DNA
tgctgaccgggcatgaacatgaggtggtatcagcgcagccggataccgtgattcaggatacggctgaactggtca

SEQ ID NO: 207144 - DNA, 75 bp, synthetic construct
  source 1..75: mol_type = other DNA
atcgtccgtaaagcgggctatgtaccggaatccgtaccgctggaacaccacatgttcggcatgatgctgggcaaa

SEQ ID NO: 207145 - DNA, 75 bp, synthetic construct
  source 1..75: mol_type = other DNA
ctgcagtttgaagaaaccctcactgtggttgcccgtgaaggcacgccgcatgtgatgtgtgcttatctgtacgat

SEQ ID NO: 207146 - DNA, 75 bp, synthetic construct
  source 1..75: mol_type = other DNA
tttcaaaaccgcctgccgaagccgtgcgcctgcgtattgttaacgcgatgaaagcaaccggcaaaccgacggtgg

SEQ ID NO: 207147 - DNA, 75 bp, synthetic construct
  source 1..75: mol_type = other DNA
tctggaatcgtgagcgggttagcgacgctcagggcggcattgtctcgccgatagccggtgctgatctgtttatct

SEQ ID NO: 207148 - DNA, 75 bp, synthetic construct
  source 1..75: mol_type = other DNA
caggtggcacggtgaaacttgcagacctgctggatgaagcgctggaacgtgcacgtcgtctggtagcagagaaga

SEQ ID NO: 207149 - DNA, 75 bp, synthetic construct
  source 1..75: mol_type = other DNA
gtgcacgtaactacgtggtaaaactgcaaagcggtgacgaatatttccgcgagatgtggcgcaaactggtcgaca

SEQ ID NO: 207150 - DNA, 75 bp, synthetic construct
  source 1..75: mol_type = other DNA
ttgcaactggcctggccgcaacaacaggggcgatatcctctgacgtatcatctttttttgggagtgattgctcgt

SEQ ID NO: 207151 - DNA, 75 bp, synthetic construct
  source 1..75: mol_type = other DNA
ctactggctggttaccaacctgtaccagaacatgcgggccaatgcgctgactgacgcggaattacggcgcaaggc

SEQ ID NO: 207152 - DNA, 75 bp, synthetic construct
  source 1..75: mol_type = other DNA
atggtttcatcgttacagcaggtagcgcagatcatcaatggtgtgttcagccagttactggcaactttcccggcg

SEQ ID NO: 207153 - DNA, 75 bp, synthetic construct
  source 1..75: mol_type = other DNA
acaaggctcattaccagagctacatcaggcatggcaggctgtagacgcacgcccccacgctaatcactttttacc

SEQ ID NO: 207154 - DNA, 75 bp, synthetic construct
  source 1..75: mol_type = other DNA
acctgtatcagaacatgcgggccaatgcgcttactgatgcggaattacggcgcaaggctgccgatgaactgacct

SEQ ID NO: 207155 - DNA, 75 bp, synthetic construct
  source 1..75: mol_type = other DNA
tatgctggcaattcagttattgaatgaaggcggcgtattgttgacgttctcctgttccggcctgatgaccagcga

SEQ ID NO: 207156 - DNA, 75 bp, synthetic construct
  source 1..75: mol_type = other DNA
cgattgaagaacacggcatgaacctgctggtggatattcaccacggacacaaaacggcctactatctggaccagc

SEQ ID NO: 207157 - DNA, 75 bp, synthetic construct
  source 1..75: mol_type = other DNA
gatggagctgacccagggccccgtcaccggcgagttgccgcctgccctgctgccgattgaagaacacggcatgaa

SEQ ID NO: 207158 - DNA, 75 bp, synthetic construct
  source 1..75: mol_type = other DNA
atgtgctcgtacaaagtcgctaaaaaatcaatatcaaaaggacttatcgcagtcatagtggcagcaggtggtgcg

SEQ ID NO: 207159 - DNA, 75 bp, synthetic construct
  source 1..75: mol_type = other DNA
tggttaccaacctgtaccagaacatgcgggccaatgcgctgactgacgcggaattacggcgcaaggctgccgatg

SEQ ID NO: 207160 - DNA, 75 bp, synthetic construct
  source 1..75: mol_type = other DNA
cagcagggaatacagaaaggccgcatggaggagaagcaggatattgcgcgtcagcttcagaaaacgggaatgcca

SEQ ID NO: 207161 - DNA, 75 bp, synthetic construct
  source 1..75: mol_type = other DNA
gctgtttatcttctcgttccttgatcgcatcaacattggttttgccggactcacgatgggacgcgacctcggtct

SEQ ID NO: 207162 - DNA, 75 bp, synthetic construct
  source 1..75: mol_type = other DNA
acgatgggacgcgacctcggtctgagcgccaccatgtttggcctcgctaccaccctgttctatgccgcttatgtc

SEQ ID NO: 207163 - DNA, 75 bp, synthetic construct
  source 1..75: mol_type = other DNA
aacgcgcactactggttggttaccaacctgtaccagaacatgcggaccaatgcgttgactgacgcggaattacgg

SEQ ID NO: 207164 - DNA, 75 bp, synthetic construct
  source 1..75: mol_type = other DNA
ctctaaatcgtgcacaggctctggagaagatcgccgaaatcaaagcgaagtttgggctgaaaggagcaagtgtat

SEQ ID NO: 207165 - DNA, 75 bp, synthetic construct
  source 1..75: mol_type = other DNA
tgtcatgggcggcagacctctaaatcgtgttcaggcgctggcgaagatcgcagaaattaaagctaagttaggact

SEQ ID NO: 207166 - DNA, 75 bp, synthetic construct
  source 1..75: mol_type = other DNA
ccatcacccgggcagtttgtcgcctggtgccgggaagaagcatctgttaacgccgggctgccaaacgtcagcgag

SEQ ID NO: 207167 - DNA, 75 bp, synthetic construct
  source 1..75: mol_type = other DNA
cgctggctgagcgtctgccgcagcatgaggataaactgatgactattgccgaacgtattgagcaacaaggaatac

SEQ ID NO: 207168 - DNA, 75 bp, synthetic construct
  source 1..75: mol_type = other DNA
cgcttaatcgtgttcaggctctggcgaagatcgcagaaatcaaagctaagttcggactgaaaggagcaagagcat

SEQ ID NO: 207169 - DNA, 75 bp, synthetic construct
  source 1..75: mol_type = other DNA
acgatgtaccgactgcgttaatgggcgatccgcggcgtattcgtcaggttataaccaacctgttgagcaacgccc

SEQ ID NO: 207170 - DNA, 75 bp, synthetic construct
  source 1..75: mol_type = other DNA
gatgcacagttaatgggagcggataagatccacgaatggctgacattatttaaacaacataccctgccgcttctt

SEQ ID NO: 207171 - DNA, 75 bp, synthetic construct
  source 1..75: mol_type = other DNA
acgatgtaccgaccgcgttaatgggtgatccgcgacgtattcgccaggttattaccaatttgttgagtaatgccc

SEQ ID NO: 207172 - DNA, 75 bp, synthetic construct
  source 1..75: mol_type = other DNA
ttactaccaggcgattctggatgcggttgaacagcacggtccgtactttgtgctcgcacctggcctggcaatgcc

SEQ ID NO: 207173 - DNA, 75 bp, synthetic construct
  source 1..75: mol_type = other DNA
tcacgacgttgttcgtgagctgatggaagaaaagcgagccagccgtcaggtgacagttccggcggtgatgctgga

SEQ ID NO: 207174 - DNA, 75 bp, synthetic construct
  source 1..75: mol_type = other DNA
ttccgatattgtcaatgaactgatggaggaaaagcgcgtaaaccgtcttgtaacagtccctgcggtgctgctgga

SEQ ID NO: 207175 - DNA, 75 bp, synthetic construct
  source 1..75: mol_type = other DNA
ggtcagttactggcgcactatctccaactgcaagtcaataacgatcaaccgctggatgtatcgcaactcaatgaa

SEQ ID NO: 207176 - DNA, 75 bp, synthetic construct
  source 1..75: mol_type = other DNA
aagattaatgcgttgctgcaagcgttacgggaacaaggttttgacaccaccgctattgaacaacaggagcaggag

SEQ ID NO: 207177 - DNA, 75 bp, synthetic construct
  source 1..75: mol_type = other DNA
cgctgtatcagcaggacagtgaaatcagcaatcgcctgcaaactctcgcccaaaataacatcgcccagttcgcgc

SEQ ID NO: 207178 - DNA, 75 bp, synthetic construct
  source 1..75: mol_type = other DNA
gatgctcagttgatgggggcggagaagatccacgaatggctgatattatttaaacaacatgccctgccgcttctc

SEQ ID NO: 207179 - DNA, 75 bp, synthetic construct
  source 1..75: mol_type = other DNA
gggcgatccgcgacgtattcgtcaggttataaccaacctgttgagcaacgccctacgttttactgacgaagggca

SEQ ID NO: 207180 - DNA, 75 bp, synthetic construct
  source 1..75: mol_type = other DNA
caaactctctcgcccaaaataacatcgcccagttcgcgcagtttagtagcgaagtcagacaccattgagctgcgc

SEQ ID NO: 207181 - DNA, 75 bp, synthetic construct
  source 1..75: mol_type = other DNA
gtgaaaatcggcgttgacctgctggtggcggcagatgtggtagagccgcgttactaccaggcgattctggatggc

SEQ ID NO: 207182 - DNA, 75 bp, synthetic construct
  source 1..75: mol_type = other DNA
gcagcaggtatggggggcggtactggtacaggtgctgcgccggtcgttgctgaagttgcaaaagatttggggatc

SEQ ID NO: 207183 - DNA, 75 bp, synthetic construct
  source 1..75: mol_type = other DNA
gaaactgtgggtaacaccattcgtgcgtttgcttcagataacgctactgtggttattggtacttctcttgacccg

SEQ ID NO: 207184 - DNA, 75 bp, synthetic construct
  source 1..75: mol_type = other DNA
atctccctgctggatgcgttcggcgcagcgaatgatgtactgaaaggcgctgttcagggtatcgccgaactgatt

SEQ ID NO: 207185 - DNA, 75 bp, synthetic construct
  source 1..75: mol_type = other DNA
cgggggcgacggtgacgcattcgtcagggaagaacgcgaagcaatggacgttgtgttacaggcgctggacgggga

SEQ ID NO: 207186 - DNA, 75 bp, synthetic construct
  source 1..75: mol_type = other DNA
aagccgccattgcggcaggtagcacaatggttcgcatcggcacagccatctttggtgcgcgtgattactctaaaa

SEQ ID NO: 207187 - DNA, 75 bp, synthetic construct
  source 1..75: mol_type = other DNA
gaaacggtaggtaacaccatccgtgcatttgcttccgacaacgcgaccgtggttatcggtacttctcttgacccg

SEQ ID NO: 207188 - DNA, 75 bp, synthetic construct
  source 1..75: mol_type = other DNA
gacagacgatgagctggaaaccgtcatgcagcggctggacgatgcttttgagcatggtgcggatgtcagcattgt

SEQ ID NO: 207189 - DNA, 75 bp, synthetic construct
  source 1..75: mol_type = other DNA
agtgagaacgggggcgacggtgacgcgttttcaaattgttccggactgaggccgccacaccaactgtgccgccgc

SEQ ID NO: 207190 - DNA, 75 bp, synthetic construct
  source 1..75: mol_type = other DNA
ccacgacgacaacgatccggtggatatcctcatcaccatggcggcggtcgatgccaacactcaccaggaagtggg

SEQ ID NO: 207191 - DNA, 75 bp, synthetic construct
  source 1..75: mol_type = other DNA
actttgcagacgtacgcaccgtaatgtctgaaatgggctacgcaatgatgggttctggcgtggcgagcggtgaag

SEQ ID NO: 207192 - DNA, 75 bp, synthetic construct
  source 1..75: mol_type = other DNA
cggtatggcaccgctgacgcaagagcagaaaccggtagctaaagtggtgaacgacaatacgccgcaaactgcgaa

SEQ ID NO: 207193 - DNA, 75 bp, synthetic construct
  source 1..75: mol_type = other DNA
gctggaaaaagtgatggcgctggcaggcagtgaaatgaagcgcctgtatgccgtcgggagtgagaacgggggcga

SEQ ID NO: 207194 - DNA, 75 bp, synthetic construct
  source 1..75: mol_type = other DNA
tgacggcggtggatgcaggtacgcgtgctgcgcgctttatgttgcaggatctgctgggcgtggtgtctccgggcc

SEQ ID NO: 207195 - DNA, 75 bp, synthetic construct
  source 1..75: mol_type = other DNA
tggcatctgctgcgcaggtagtgagtagctggggctttagcattacgccagatacgttaaatcagattgccagcg

SEQ ID NO: 207196 - DNA, 75 bp, synthetic construct
  source 1..75: mol_type = other DNA
ctggccccgcgcgactacctctcaaccttcctgaaaatcgggaccatcgtcggtctggcggtaggcattttgatt

SEQ ID NO: 207197 - DNA, 75 bp, synthetic construct
  source 1..75: mol_type = other DNA
taacctgctggcaacggcgctgtgcgtgctggcgtggggctacttcctgcatcagggcgtggtcgatccgctggg

SEQ ID NO: 207198 - DNA, 75 bp, synthetic construct
  source 1..75: mol_type = other DNA
cgcaaatgggctacctgccagggatgatctggctgctcgccggggtggttctcgccggtgcggtgcaggatttca

SEQ ID NO: 207199 - DNA, 75 bp, synthetic construct
  source 1..75: mol_type = other DNA
ttactaccaggcgattctggatggcgttgaacagtttggtccttatttcgttatcgcaccgggactggcaatgcc

SEQ ID NO: 207200 - DNA, 75 bp, synthetic construct
  source 1..75: mol_type = other DNA
gatgcttcttttttgtggcacctcgcgacccattatgcttcggtcatgtcggcagaatatgcagggaagttagag

SEQ ID NO: 207201 - DNA, 75 bp, synthetic construct
  source 1..75: mol_type = other DNA
cgctgaaaaagccgctggagtttaaccacgaagataacgatccggtggatatcctcatcaccatggcggcggttg

SEQ ID NO: 207202 - DNA, 75 bp, synthetic construct
  source 1..75: mol_type = other DNA
aaaataaatctatccgcctgcaagcggaagcagagacatggcaggacgcagtgaaaatcggcgttgatctgctgg

SEQ ID NO: 207203 - DNA, 75 bp, synthetic construct
  source 1..75: mol_type = other DNA
gacgctgaacgcacaccgctggcccactacttccagttactgctcacccgtttgatgaacaatgaagagatcagc

SEQ ID NO: 207204 - DNA, 75 bp, synthetic construct
  source 1..75: mol_type = other DNA
atggctggtcgaagtggaagacagcggctgcggtattgatcccgcgaaactggcagaaatcttccagccatttgt

SEQ ID NO: 207205 - DNA, 75 bp, synthetic construct
  source 1..75: mol_type = other DNA
acggaggcgacggtgacgcattcgtcagggaagaacgcgaagcaatggacgttgtgttacaggcgctggacgggg

SEQ ID NO: 207206 - DNA, 75 bp, synthetic construct
  source 1..75: mol_type = other DNA
ggagtgagaacgggggcgatggtgatgcgttcgtcagggaagaacgcgaagcaatggacgttgtgttacaggcgc

SEQ ID NO: 207207 - DNA, 75 bp, synthetic construct
  source 1..75: mol_type = other DNA
actggcgcactatctccaactgcaagtcaataacgatcaatcgctggatgtatcgcaactcaatgaagatgctca

SEQ ID NO: 207208 - DNA, 75 bp, synthetic construct
  source 1..75: mol_type = other DNA
ggcggcgaactgagcgccaccagcacgccggaggttggaagctgtttttgtttacgcttgccgttacgtgttgcc

SEQ ID NO: 207209 - DNA, 75 bp, synthetic construct
  source 1..75: mol_type = other DNA
caaaataacatcgcccagttcgcgcagtttagtagcgaagtcagtcagctggtcgacaccattgagctgcgtaat

SEQ ID NO: 207210 - DNA, 75 bp, synthetic construct
  source 1..75: mol_type = other DNA
caaagtgccagcaaaccggtagtgcattaccaatgggtgccagtcgctggcggcaataaaaaactggctcgttta

SEQ ID NO: 207211 - DNA, 75 bp, synthetic construct
  source 1..75: mol_type = other DNA
tgctgaccgggaatgaaaatgaggctgtatcagcgcagccggatacagtgattcaggatgcgtctgatctggtca

SEQ ID NO: 207212 - DNA, 75 bp, synthetic construct
  source 1..75: mol_type = other DNA
cactactggctggttaccaacctgtaccagaacatgcgggccaatgcgctgactgacgcggaattacggcgcaag

SEQ ID NO: 207213 - DNA, 75 bp, synthetic construct
  source 1..75: mol_type = other DNA
gcagtaaaaaatctacacggaaaagcgcctgggcacattgttgattcacgtatcaggcgctcccctcaatggaag

SEQ ID NO: 207214 - DNA, 75 bp, synthetic construct
  source 1..75: mol_type = other DNA
gacagccagattttgtccctgtatgccaaaggcatgactacgcgggaaatcgttgccacgttcaaagaaatgtac

SEQ ID NO: 207215 - DNA, 75 bp, synthetic construct
  source 1..75: mol_type = other DNA
gacagtcgctatcctcagataagccgaagctggcaggcaaactggccgaatcttgccacgttcttcgcttatcca

SEQ ID NO: 207216 - DNA, 75 bp, synthetic construct
  source 1..75: mol_type = other DNA
cacgttcttcgcttatccaacggacatccgcaaagtgatctatacgacgaatgccatcgagtcgctaaacagcgt

SEQ ID NO: 207217 - DNA, 75 bp, synthetic construct
  source 1..75: mol_type = other DNA
aaagcgatttatcaggctcccacggaagaggcaggccagcaggcactggaagcgttcgctgcggcctgggacagt

SEQ ID NO: 207218 - DNA, 75 bp, synthetic construct
  source 1..75: mol_type = other DNA
agttctggctgggtgtactgactgagctgaaaaatcgtggccttcaggacatcctgattgcctgcgtggacggcc

SEQ ID NO: 207219 - DNA, 75 bp, synthetic construct
  source 1..75: mol_type = other DNA
tctatcgatatcaatgaggttgctaaactcgattatgtgctgactcctggccgttatgtcggccttgctgatgaa

SEQ ID NO: 207220 - DNA, 75 bp, synthetic construct
  source 1..75: mol_type = other DNA
tcggccatttaattaatcgccgtaccaaagtactttctgacgaagatatcaaaacgattgctgatacctaccata

SEQ ID NO: 207221 - DNA, 75 bp, synthetic construct
  source 1..75: mol_type = other DNA
ttggcgtctggcaaaaatgaacctggcaattcgtgggattaattctgaacacgttcgctggaataatgaaggttc

SEQ ID NO: 207222 - DNA, 75 bp, synthetic construct
  source 1..75: mol_type = other DNA
ttaactatcggtgcttcagatgaatctgctgatacgatcttacctttcctgcttaatcgcgtaagttcggtttat

SEQ ID NO: 207223 - DNA, 75 bp, synthetic construct
  source 1..75: mol_type = other DNA
caaagtgctttccgacgacgatatcaataccattgccgatacctaccataactggcgcaataaaggtggtgaata

SEQ ID NO: 207224 - DNA, 75 bp, synthetic construct
  source 1..75: mol_type = other DNA
aactcgattatgtgctgacacctggccgttatgttggtcttgctgatgaagaagacgatttcgactttaaagaac

SEQ ID NO: 207225 - DNA, 75 bp, synthetic construct
  source 1..75: mol_type = other DNA
gcaacagcctgcggttcgtctcctggaaggactacaaagcggtcacccgcgacctgaaagccatctatcaggctc

SEQ ID NO: 207226 - DNA, 75 bp, synthetic construct
  source 1..75: mol_type = other DNA
atggagaagctgaaatatcacatggctctgatgagccacatattgaaaagcgcaagtggcttttatgtatacccg

SEQ ID NO: 207227 - DNA, 75 bp, synthetic construct
  source 1..75: mol_type = other DNA
ggttaaggttcgtcacggcgggagtgtcattaacaaagcggtgttcctcgcgctgggcatcaataccgacggtca

SEQ ID NO: 207228 - DNA, 75 bp, synthetic construct
  source 1..75: mol_type = other DNA
agcctggttatcaacaaagcggtgttcctggctctgggtattaaccttgatggtcagaaagagctgctgggtatg

SEQ ID NO: 207229 - DNA, 75 bp, synthetic construct
  source 1..75: mol_type = other DNA
taacgatcaacccatcatgagccaaagcattgcttttgctgttattgaaggtaaaaagaacgctcaggcctgcat

SEQ ID NO: 207230 - DNA, 75 bp, synthetic construct
  source 1..75: mol_type = other DNA
aaagaagggctgaatggcgcagttgcactgtggtggaatgcaacatcacacattactacggggattcagtattga

SEQ ID NO: 207231 - DNA, 75 bp, synthetic construct
  source 1..75: mol_type = other DNA
atggaaaagctgaaataccacatgactctgatgagtcacattctgaaaagcgcaagtggcttttatgtatacccg

SEQ ID NO: 207232 - DNA, 75 bp, synthetic construct
  source 1..75: mol_type = other DNA
ccggaaatggacgatgccgttgaaggactggcgaatggcaatgagccgctttattatcgagttcggtgaccgcct

SEQ ID NO: 207233 - DNA, 75 bp, synthetic construct
  source 1..75: mol_type = other DNA
gacgcgctgcgtaaggttgatgtgggcgcgcaggtcagcggtcagttgaaaactctgtcggtggcgattggcgat

SEQ ID NO: 207234 - DNA, 75 bp, synthetic construct
  source 1..75: mol_type = other DNA
cgcccaggcgttaaatcgcagtttgtttgccatcggtattgataacaccctgccggaagagttcgcccgcctgta

SEQ ID NO: 207235 - DNA, 75 bp, synthetic construct
  source 1..75: mol_type = other DNA
gtgctgactgaactgaaaaaccgcggtctgaacgatatcctcatcgcctgtgtggatggcctgaaaggcttcccg

SEQ ID NO: 207236 - DNA, 75 bp, synthetic construct
  source 1..75: mol_type = other DNA
actcccgcaacggttattccacaaagaccgttatcacaggcgacggtccactggaactgcgtactccgtgcgatc

SEQ ID NO: 207237 - DNA, 75 bp, synthetic construct
  source 1..75: mol_type = other DNA
gtgacggtaccttcgaaccacaactggtaaagaaaaatcagacccgtattaccaggatggataaccagatcctct

SEQ ID NO: 207238 - DNA, 75 bp, synthetic construct
  source 1..75: mol_type = other DNA
gacaggctgaatgctgatttaaacagtatcttcgtcgctattgaaagctctgcctacggctacccgtccgaggcc

SEQ ID NO: 207239 - DNA, 75 bp, synthetic construct
  source 1..75: mol_type = other DNA
attatgcagcacttgatgacagcatcattaccgatgacatcaaagacgatgccatcaggactaaaggctacttca

SEQ ID NO: 207240 - DNA, 75 bp, synthetic construct
  source 1..75: mol_type = other DNA
atgacaagtattcaacaacgtgcagagcttcatcgtcaaatctggcaaattgctaacgatgtcaggggttcggtc

SEQ ID NO: 207241 - DNA, 75 bp, synthetic construct
  source 1..75: mol_type = other DNA
cgatgagcgttttgccccggctggcgtcctggcccccaaatcaaaagctgacttcgcctttgtactacatgcgct

SEQ ID NO: 207242 - DNA, 75 bp, synthetic construct
  source 1..75: mol_type = other DNA
gatatcaagctgggtaatacactgactgagccgcacttcagagatgaaaaaccgtttgatgccatcgtttctaac

SEQ ID NO: 207243 - DNA, 75 bp, synthetic construct
  source 1..75: mol_type = other DNA
gaaaacgagtacgaccagatggactcagacgccgctgtggatgaggccattctcgtcaatgcatacatcttcacc

SEQ ID NO: 207244 - DNA, 75 bp, synthetic construct
  source 1..75: mol_type = other DNA
tattgatatttactgagagctcagatcaaggggttccagccggaaacctagatttttccgcgaccagtaacggcg

SEQ ID NO: 207245 - DNA, 75 bp, synthetic construct
  source 1..75: mol_type = other DNA
tggctaacgaactggccaaaaacctcaaaacccctgaagacctcagccagtttgaccgtctactgaaaaagatca

SEQ ID NO: 207246 - DNA, 75 bp, synthetic construct
  source 1..75: mol_type = other DNA
aacaacatcctgaccgatgctcatatcgaacagattatgcaggtatttgccggcaaggaagatgttgctcatctg

SEQ ID NO: 207247 - DNA, 75 bp, synthetic construct
  source 1..75: mol_type = other DNA
gcagcgatgacccgacgctgattaacgatgagcgttttgccccggctggcgttctggcccccaaatccaaagctg

SEQ ID NO: 207248 - DNA, 75 bp, synthetic construct
  source 1..75: mol_type = other DNA
atttgtcgattgaggatttcggatattgatcttaaggcaaagtgtatatatatgggtcttccccgatcatggtgg

SEQ ID NO: 207249 - DNA, 75 bp, synthetic construct
  source 1..75: mol_type = other DNA
caggcagagcagctgggtacgggtcatgccatgcagcaggccgcacctttctttgccgatgatgaagacatttta

SEQ ID NO: 207250 - DNA, 75 bp, synthetic construct
  source 1..75: mol_type = other DNA
gcaggttccggttcgctgttgttgcaggctaaaaagcagtttgataaccatatcattgaagaaggctttttcgga

SEQ ID NO: 207251 - DNA, 75 bp, synthetic construct
  source 1..75: mol_type = other DNA
ccaaagttcagtttattgacgccagcgaactgttcaaaaaagagactaataacaacatcctgaccgatgctcata

SEQ ID NO: 207252 - DNA, 75 bp, synthetic construct
  source 1..75: mol_type = other DNA
taacgaacatcagattgacctgttcggcgatgcctatgagttcctgatttctaactatgcggcaaatgccggtaa

SEQ ID NO: 207253 - DNA, 75 bp, synthetic construct
  source 1..75: mol_type = other DNA
ctgccggcaatgctaactttgcctggatgcaacacttcctgtatcacctgtcgccaaaaggtcaggctggcgttg

SEQ ID NO: 207254 - DNA, 75 bp, synthetic construct
  source 1..75: mol_type = other DNA
gccatcaaaaccaaaggctacttcatctacccaagtcagcttttctgcaacgtagcggcgaaagcaaataccaat

SEQ ID NO: 207255 - DNA, 75 bp, synthetic construct
  source 1..75: mol_type = other DNA
accgatgcccatatcgaacagattatgcaggtatttgccagcaaggaagatgttgctcatctggcgaaatctgtc

SEQ ID NO: 207256 - DNA, 75 bp, synthetic construct
  source 1..75: mol_type = other DNA
acctggcgcgtatgaatatgttcctgcacaacatcaactacgacaagtttgatatccggttagggaacacattac

SEQ ID NO: 207257 - DNA, 75 bp, synthetic construct
  source 1..75: mol_type = other DNA
ctggtgctgagttgctggaaggtgcacacgtcggtaactttgttgagatgaaaaaagcgcgtctgggtaaaggct

SEQ ID NO: 207258 - DNA, 75 bp, synthetic construct
  source 1..75: mol_type = other DNA
gttaacatcggcgcgggaaccattacctgcaactacgatggtgcgaataaatttaagaccattatcggcgacgat

SEQ ID NO: 207259 - DNA, 75 bp, synthetic construct
  source 1..75: mol_type = other DNA
caatgaacatcagattgacctgtttggcgatgcctatgagtttctgatttctaactatgcggcaaatgccggtaa

SEQ ID NO: 207260 - DNA, 75 bp, synthetic construct
  source 1..75: mol_type = other DNA
tcgagcaaatcatggccgtgttcgacagcaaggaaaacgtcgttcactttgccaagtcagtgtcgttagaggaag

SEQ ID NO: 207261 - DNA, 75 bp, synthetic construct
  source 1..75: mol_type = other DNA
acctggcacgtatgaacatgtttttgcacaacatcaactacgacaagtttgatatcaagctgggcaatacgctga

SEQ ID NO: 207262 - DNA, 75 bp, synthetic construct
  source 1..75: mol_type = other DNA
gtgctggcgagcctcggtgggctggtttcctatgcggcaaaggttcatttcaaagaagcaggcaacgccatgaat

SEQ ID NO: 207263 - DNA, 75 bp, synthetic construct
  source 1..75: mol_type = other DNA
gcggccgcgaatgccaggtgcgtatccctggcgtttgcaatggaaattctgaaacctcagtgctggcacatatcc

SEQ ID NO: 207264 - DNA, 75 bp, synthetic construct
  source 1..75: mol_type = other DNA
gatgttgtacgtaataatgtagaaaataatcccttcgcggcaatttccatcgccgcgggtgttggcctgctgatt

SEQ ID NO: 207265 - DNA, 75 bp, synthetic construct
  source 1..75: mol_type = other DNA
acgaaaaaacctcaattgcttgcaaagctgaaacgcctggagagacagggacagtttttattaccgggattcgat

SEQ ID NO: 207266 - DNA, 75 bp, synthetic construct
  source 1..75: mol_type = other DNA
tctggtggagtcgtcgttccgaccgtcttaaagaacgcaaaaagcatacgattcttccctacctgtttgccgctg

SEQ ID NO: 207267 - DNA, 75 bp, synthetic construct
  source 1..75: mol_type = other DNA
attttcgccaactggtaacagcggcagatggcgaaccaataacagactcttttcagatcgctaaggcgtttggta

SEQ ID NO: 207268 - DNA, 75 bp, synthetic construct
  source 1..75: mol_type = other DNA
aactggcggcggcgctggtgagcatgaaaattcgcggcgagcacccgaacgagatcgccggggcagcaaccgcgc

SEQ ID NO: 207269 - DNA, 75 bp, synthetic construct
  source 1..75: mol_type = other DNA
gccagaactccttacccgcctgcgcggtaagctgccgattattggcatttgcctcggtcatcaggcgattgtcga

SEQ ID NO: 207270 - DNA, 75 bp, synthetic construct
  source 1..75: mol_type = other DNA
ggtattaatcttgatatgaacgccgataaatcgcgccaggcgctggatgagttaggcgtatgtttcctctttgcg

SEQ ID NO: 207271 - DNA, 75 bp, synthetic construct
  source 1..75: mol_type = other DNA
gtttgtgttcgcccggagcatactccgcgatcacttcgtcaacgtatatgggggtgagcatggccaatcttcgta

SEQ ID NO: 207272 - DNA, 75 bp, synthetic construct
  source 1..75: mol_type = other DNA
accattgcctgttctgcctgtcacgacgaaatcgaccgccgcacgcattttgtcgatgctgagtacgcaaaagaa

SEQ ID NO: 207273 - DNA, 75 bp, synthetic construct
  source 1..75: mol_type = other DNA
tgttgacgctggatatgcaaaagaatgcgcgctggaaggtatggcgagaacacaggttatctggctgaaagaggg

SEQ ID NO: 207274 - DNA, 75 bp, synthetic construct
  source 1..75: mol_type = other DNA
gcttgtcctgaagagtttgatacaaaactcaattttgaggtttgctataaaaacaatgagttacagaatggtaag

SEQ ID NO: 207275 - DNA, 75 bp, synthetic construct
  source 1..75: mol_type = other DNA
attgccaagaatcaactcgcgcgtgaaaaactgattatttataatagcgaaggtaattataatattattgattct

SEQ ID NO: 207276 - DNA, 75 bp, synthetic construct
  source 1..75: mol_type = other DNA
aactccgggagccgtgattatggcattcaggctctgctaaaaatgccagataacattccggcccccctggttcag

SEQ ID NO: 207277 - DNA, 75 bp, synthetic construct
  source 1..75: mol_type = other DNA
cggccaacgccgggagccgtgattatggcattcaggctctgctaaaaatgccagataacattccggcctcccctg

SEQ ID NO: 207278 - DNA, 75 bp, synthetic construct
  source 1..75: mol_type = other DNA
atggtatcgcattattaccatgtatgaagaccagcagcctgataactggcgcgtacaggcgatactgtatgcgta

SEQ ID NO: 207279 - DNA, 75 bp, synthetic construct
  source 1..75: mol_type = other DNA
cagggcgggttatttttgccgattttaatccatcgaaacgaccatggtcggtggcttcagatgactctaacaaca

SEQ ID NO: 207280 - DNA, 75 bp, synthetic construct
  source 1..75: mol_type = other DNA
ggatactctttctggcatacgaacactggcttttaacggaggagctcaggttcagatggggagcactattgttac

SEQ ID NO: 207281 - DNA, 75 bp, synthetic construct
  source 1..75: mol_type = other DNA
gtaacgccgtaatgctggagtacatgaaagagaaggatgtcgccagcatgtcaggccgtctgctcaatcgctggg

SEQ ID NO: 207282 - DNA, 75 bp, synthetic construct
  source 1..75: mol_type = other DNA
gtcctacaccaaaaaagaagcaatgcgtatcaaaattgcttacatcaacgcattcaactggatgtacgccatgct

SEQ ID NO: 207283 - DNA, 75 bp, synthetic construct
  source 1..75: mol_type = other DNA
gccggggcaatggtttaccggcccggcgcagcaggtgatcggcccgatgtttgccggttataagccggaagattc

SEQ ID NO: 207284 - DNA, 75 bp, synthetic construct
  source 1..75: mol_type = other DNA
aaagtggcggaattttttggtaagagtcataagaacgtattaagaaagatcaggcaaaccatttctgaatgtcct

SEQ ID NO: 207285 - DNA, 75 bp, synthetic construct
  source 1..75: mol_type = other DNA
cagcatgtcaggtcgcctgctcaatcgctggggaaaaattaagaagcctcagctactggcgagaattgaacgcct

SEQ ID NO: 207286 - DNA, 75 bp, synthetic construct
  source 1..75: mol_type = other DNA
acggcgctggcacaggagggaaattgctggatttacgaccagaataccattgcttttggcggaacggttatttcc

SEQ ID NO: 207287 - DNA, 75 bp, synthetic construct
  source 1..75: mol_type = other DNA
gcaccagtttacgcatttgacaatcgtcatgatcgtgcgcaactagcattggtgctgggggataacatggcggtg

SEQ ID NO: 207288 - DNA, 75 bp, synthetic construct
  source 1..75: mol_type = other DNA
atgacggtgatggcgaagacctgtatctcaaagaggtaacccactggatgccgctaccggaaccgccacaggagg

SEQ ID NO: 207289 - DNA, 75 bp, synthetic construct
  source 1..75: mol_type = other DNA
gctgacgaaatagaggtggatggtcatttaatttatgattatgaagactttcctgaaaagggaaattttcttaca

SEQ ID NO: 207290 - DNA, 75 bp, synthetic construct
  source 1..75: mol_type = other DNA
tggcggaatatgccattgtagaaggcaattgcgtgttaaaacatcatgtcctgattggcggaaatgccgttgtgc

SEQ ID NO: 207291 - DNA, 75 bp, synthetic construct
  source 1..75: mol_type = other DNA
ggtaatacgcgcatcaccggcaccagcgtgctgtggggagaggtttacgcaacggataacgtctggatcgataat

SEQ ID NO: 207292 - DNA, 75 bp, synthetic construct
  source 1..75: mol_type = other DNA
acaattgccagaacttaaagaaataaaaataaccgtcaagcgtgatggtcagctgtatgatgcgtttattgctgt

SEQ ID NO: 207293 - DNA, 75 bp, synthetic construct
  source 1..75: mol_type = other DNA
taatgctggttgctgtaggtgtacagcccgttttcgctgcacaatgtcagtacggagcctgtggaacggaaaacg

SEQ ID NO: 207294 - DNA, 75 bp, synthetic construct
  source 1..75: mol_type = other DNA
aatcgctaagccgagggatgagttggcgccggtaaggcagctgaaagccattcgccccgagctggtacaaacacc

SEQ ID NO: 207295 - DNA, 75 bp, synthetic construct
  source 1..75: mol_type = other DNA
gaagacgatttgcgctttacagacacgcctgaccatgccggttggatatacaaatgtcgaaaattatataccact

SEQ ID NO: 207296 - DNA, 75 bp, synthetic construct
  source 1..75: mol_type = other DNA
gtcgatacggagtatattgcaaagacatcagcagtgccaaataatgcattgttcgaaatctatttttattatcct

SEQ ID NO: 207297 - DNA, 75 bp, synthetic construct
  source 1..75: mol_type = other DNA
gctaatttccgggcaaaaaatatttttgacattatgagcctttcacccgttacggcgaataacacattaagcggc

SEQ ID NO: 207298 - DNA, 75 bp, synthetic construct
  source 1..75: mol_type = other DNA
ttcgatgaaattgaaattgatggttgcgagatttacgatggaaatgatctgcctaattcaggaaccactttaaca

SEQ ID NO: 207299 - DNA, 75 bp, synthetic construct
  source 1..75: mol_type = other DNA
cgcggcgctggatagcgggaaagttaaaggcgcaatgctggatgtttttaatcgtgaacccttaccgcctgaaag

SEQ ID NO: 207300 - DNA, 75 bp, synthetic construct
  source 1..75: mol_type = other DNA
gcgcgtggtgttcatgtcgtggaagatgacctgctcgcggcgctggatagcggcaaagttaaaggcgcaatgttg

SEQ ID NO: 207301 - DNA, 75 bp, synthetic construct
  source 1..75: mol_type = other DNA
gttttccgctgcgttgctggagtcgtagccataaaagctggcccggcgtacaaagttttgccggaactgaagagt

SEQ ID NO: 207302 - DNA, 75 bp, synthetic construct
  source 1..75: mol_type = other DNA
ttacacgcgccgacaatcgttgccgaactgcatgacggcgaaattaaaagctatcagctcaccgcagaagacttt

SEQ ID NO: 207303 - DNA, 75 bp, synthetic construct
  source 1..75: mol_type = other DNA
acgcctggcgaccatgagcaatccggtactgatgctttctcctggccccggtgtgccgagcgaagccggttgtat

SEQ ID NO: 207304 - DNA, 75 bp, synthetic construct
  source 1..75: mol_type = other DNA
cgtattgattaatcttctaccgaatacccccgaaacggccggcattattaatcaacaattattagaaaaattacc

SEQ ID NO: 207305 - DNA, 75 bp, synthetic construct
  source 1..75: mol_type = other DNA
atgctggctgggcgcgatcttaaagcggtgtttgcacttggggcaggtgttgattctattttgagcaagctacag

SEQ ID NO: 207306 - DNA, 75 bp, synthetic construct
  source 1..75: mol_type = other DNA
aacccgtaaatcgtggcctggcgtgcaaagctttgccggacgggaagaactgtctgcatttctgagccaatgtcg

SEQ ID NO: 207307 - DNA, 75 bp, synthetic construct
  source 1..75: mol_type = other DNA
gccagactttaccacctcgaaggcgtaatcaggacgcaggcgatactgctgaaggaggggaagattaagtcatga

SEQ ID NO: 207308 - DNA, 75 bp, synthetic construct
  source 1..75: mol_type = other DNA
gctgcaacaaagtattcagtcactgcaggtacatatcaccagcctgcttgcggatatccaggagattgagaaatg

SEQ ID NO: 207309 - DNA, 75 bp, synthetic construct
  source 1..75: mol_type = other DNA
tccagacggagctggcagagaatggcatcatcgttggtcgtgaccgactggcacgtcttcgtaaggagctaaggc

SEQ ID NO: 207310 - DNA, 75 bp, synthetic construct
  source 1..75: mol_type = other DNA
atgtctggaaatataggggcaaatccatttggtgtatccaggagcggttattacaactgggtacagcatgaaccc

SEQ ID NO: 207311 - DNA, 75 bp, synthetic construct
  source 1..75: mol_type = other DNA
aactggagccgttcctcaagcagatgaaagcgattgatgatctggttaaaggtttcgaagagctggataccagca

SEQ ID NO: 207312 - DNA, 75 bp, synthetic construct
  source 1..75: mol_type = other DNA
tcacaatatcccttggtttggcggtaatgtcgatggcgaaagccacaccaactgcacacaagctgttaatggcgc

SEQ ID NO: 207313 - DNA, 75 bp, synthetic construct
  source 1..75: mol_type = other DNA
atgccattttatttcaggaaggagtgtccgttaaactcaggctacctcaaggagcagtttggtctgaaaacatca

SEQ ID NO: 207314 - DNA, 75 bp, synthetic construct
  source 1..75: mol_type = other DNA
gatgaagccatctcagtaatacgggaatacattgagattttctacaatcgtcagcgtcgtcactctcgtctgggg

SEQ ID NO: 207315 - DNA, 75 bp, synthetic construct
  source 1..75: mol_type = other DNA
ctcattaagtcagattatcgccgacaataccccactgaccacggcgataacgacccacggcgatgaattagccgc

SEQ ID NO: 207316 - DNA, 75 bp, synthetic construct
  source 1..75: mol_type = other DNA
tccccaaaaaagtggcgcgtgaatgccagcagcgcggcattaaattattaagtgtttatggttccacagaaagtt

SEQ ID NO: 207317 - DNA, 75 bp, synthetic construct
  source 1..75: mol_type = other DNA
actaccgcgcactgcctccggtaaaatacaaaaatttttgttacgtaaagatattcttcaacggctggaacaaac

SEQ ID NO: 207318 - DNA, 75 bp, synthetic construct
  source 1..75: mol_type = other DNA
tgagattttctacaatcgtcagcgtcgtcactctcgtctggggaatatctccccggcagccttcagggaaaaaca

SEQ ID NO: 207319 - DNA, 75 bp, synthetic construct
  source 1..75: mol_type = other DNA
aaccacaatctgccagttgcgccaaatctgctgaaccagacgttcgctcctacagcaccaaatcaggtctgggtg

SEQ ID NO: 207320 - DNA, 75 bp, synthetic construct
  source 1..75: mol_type = other DNA
ggcgggaagcagaactggtatgggtgctcaataagtgtcaggcaaaaatgttctttgcaccgacgttgtttaaac

SEQ ID NO: 207321 - DNA, 75 bp, synthetic construct
  source 1..75: mol_type = other DNA
gtagcggctgcgcaatcgcaactggcagaacagcaaaaacagctggccgaccctgctttccgcgctcgtgcgcaa

SEQ ID NO: 207322 - DNA, 75 bp, synthetic construct
  source 1..75: mol_type = other DNA
atgtacggtattccgctgctggatggcaaggtgatatggatttaccgccgcagccgctaataccttacgccgact

SEQ ID NO: 207323 - DNA, 75 bp, synthetic construct
  source 1..75: mol_type = other DNA
gatgcggcagatctttatcgtcagcaggatcttaacgtcactcttgagcatgattactggggctcaagcggtact

SEQ ID NO: 207324 - DNA, 75 bp, synthetic construct
  source 1..75: mol_type = other DNA
caggataacgacacctttacccgccttacccgtaatgacgagaaagacgactggctgaaacgcggcgtacgcagc

SEQ ID NO: 207325 - DNA, 75 bp, synthetic construct
  source 1..75: mol_type = other DNA
acctgccgggctaatccaccactctgatcgaggttccagtactgcgcatacgattaccgggtcatacaggagcag

SEQ ID NO: 207326 - DNA, 75 bp, synthetic construct
  source 1..75: mol_type = other DNA
agtactggagtacggtggcgaaaattccggctcgccgtggcgaagcgattaatcagctaaaacgcattaatgcgg

SEQ ID NO: 207327 - DNA, 75 bp, synthetic construct
  source 1..75: mol_type = other DNA
gactggcaggaagaagctgcgcggcaatccaacgatggcggcagcagtcagggctttggctacacggcgcgggca

SEQ ID NO: 207328 - DNA, 75 bp, synthetic construct
  source 1..75: mol_type = other DNA
gatacaccaggcaacaccgggttgcaaaataatttggccttattgctgttcagcagcgaccgtcgcgatgaaggt

SEQ ID NO: 207329 - DNA, 75 bp, synthetic construct
  source 1..75: mol_type = other DNA
ctttatcgtctggaactgattgatcccaataacccggaggttgtcgccgcccgtttccgctctctgttacgtcag

SEQ ID NO: 207330 - DNA, 75 bp, synthetic construct
  source 1..75: mol_type = other DNA
aaatgggcgcaggcagcagcacttcagcgccagcgactggcgctggaccccggcagcgtatggattacttaccga

SEQ ID NO: 207331 - DNA, 75 bp, synthetic construct
  source 1..75: mol_type = other DNA
ggactggcgaacatttatcggcagcaatcgccagaaaaagccgaagcgtttattgcatcgctctctgccagccaa

SEQ ID NO: 207332 - DNA, 75 bp, synthetic construct
  source 1..75: mol_type = other DNA
ccgctcagcaacagttgctggagcaagttcggttaggcgaagcgacccatcgtgaagatctggtgcaacagtcgt

SEQ ID NO: 207333 - DNA, 75 bp, synthetic construct
  source 1..75: mol_type = other DNA
gaacagtttgctgaaagtgaaccgttattggctggcgatccaacagggtgatgccgcactgaaagcgaacaatcc

SEQ ID NO: 207334 - DNA, 75 bp, synthetic construct
  source 1..75: mol_type = other DNA
ccgctacgccggaacaagaactgggcaaactgccgttgggttcacgtccggcgaaacgtcgcccaaccggcggcg

SEQ ID NO: 207335 - DNA, 75 bp, synthetic construct
  source 1..75: mol_type = other DNA
ccggatcctcgcgtcgagcaagcgttaatggtcactattgccgggattgcggcaggtatgcgtaataccggctaa

SEQ ID NO: 207336 - DNA, 75 bp, synthetic construct
  source 1..75: mol_type = other DNA
tacccgtcgtacactgatccacaaaatggtggaagtgaacgcctgcttaaaacagctcgataacaaagatatcgc

SEQ ID NO: 207337 - DNA, 75 bp, synthetic construct
  source 1..75: mol_type = other DNA
gctgacccgctatctcggcattggcgattacgaaagctggtctgaagccgacaaacaagcattcctgatccgcga

SEQ ID NO: 207338 - DNA, 75 bp, synthetic construct
  source 1..75: mol_type = other DNA
ccggtccgttttacttcgtggatgggcggcgaccgtgacggtaacccgaacgttaccgcggatatcacccgacac

SEQ ID NO: 207339 - DNA, 75 bp, synthetic construct
  source 1..75: mol_type = other DNA
tggtgatgattggctattccgactcagcaaaagatgcgggcgtgatggcagcttcctgggcgcaatatcaggcac

SEQ ID NO: 207340 - DNA, 75 bp, synthetic construct
  source 1..75: mol_type = other DNA
gttgccgccagaatggcggatgttcctcttgcaccaggcagtaatgaaaagaaaaaaatgtatctcctgacggat

SEQ ID NO: 207341 - DNA, 75 bp, synthetic construct
  source 1..75: mol_type = other DNA
ccggagctttggccaacgcatttacgcctgcgcggttcgggtttcgttaaggaaggtgcgaacaagttcctgata

SEQ ID NO: 207342 - DNA, 75 bp, synthetic construct
  source 1..75: mol_type = other DNA
cgtttacggagtttatccccgcgacggtgcgtggaaaatggtccgcgcggctctcatttgttggtaactggtcgc

SEQ ID NO: 207343 - DNA, 75 bp, synthetic construct
  source 1..75: mol_type = other DNA
aacaacctaaagaaaaatcttaaaagtaaggatccggcattagttgccgaggttgttacttatatcaatgatgct

SEQ ID NO: 207344 - DNA, 75 bp, synthetic construct
  source 1..75: mol_type = other DNA
ttcgggtatggatcctcatttttggaggaggcctttggtggactggtgcgaaagggaatcagcaaagataagatt

SEQ ID NO: 207345 - DNA, 75 bp, synthetic construct
  source 1..75: mol_type = other DNA
actggataaatccgttcaacaacagttcgcaaaaactaaaaatgcagcgaaaatcctcatataccttcagcaaaa

SEQ ID NO: 207346 - DNA, 75 bp, synthetic construct
  source 1..75: mol_type = other DNA
ttccattggtcgcggcggcgcaccggcccatgcggcactgctgtcgcaaccgccgggaagcctgaaaggcggcct

SEQ ID NO: 207347 - DNA, 75 bp, synthetic construct
  source 1..75: mol_type = other DNA
aaagcgccgcatcattcattatcgctggaagagatgccgcctgaagttagccgtagacgggtcgcaaaatataaa

SEQ ID NO: 207348 - DNA, 75 bp, synthetic construct
  source 1..75: mol_type = other DNA
acgtaacgcaaaccgctttattgaaggaaagcattttttcaaagtggctggcgatgagttaaaaactttgcgagt

SEQ ID NO: 207349 - DNA, 75 bp, synthetic construct
  source 1..75: mol_type = other DNA
aaggtatcgtgatgttcgagaaagtcgaagttccggtactgggtattgtcgagaacatgagcgtccatatttgca

SEQ ID NO: 207350 - DNA, 75 bp, synthetic construct
  source 1..75: mol_type = other DNA
gatattttattgcagcaccctaaaattcatgatgcctgtgtggttgcaatgcccgatgaacggttaggcgagcga

SEQ ID NO: 207351 - DNA, 75 bp, synthetic construct
  source 1..75: mol_type = other DNA
agaggtggtggctttttttagccgtaaacgggtcgcaaaatataaatatcctgaacatatcgtggtaatcgaaaa

SEQ ID NO: 207352 - DNA, 75 bp, synthetic construct
  source 1..75: mol_type = other DNA
aaacgggtcgcaaaatataaatatcctgaacatatcgtggtaatcgaaaaactaccggcactgcctcaggtaaaa

SEQ ID NO: 207353 - DNA, 75 bp, synthetic construct
  source 1..75: mol_type = other DNA
aggcattccggcagagaaagtttgcttggctggataaagagggagtgcgcagatcaattaaagagtgcggctaac

SEQ ID NO: 207354 - DNA, 75 bp, synthetic construct
  source 1..75: mol_type = other DNA
tttatccgtatgaatgaggaaaaagacaatgagcaaagacgagaaagaaattccagaacagcaggaaccgactca

SEQ ID NO: 207355 - DNA, 75 bp, synthetic construct
  source 1..75: mol_type = other DNA
tcaacggataaaggtcagtacgaatatgcaggccagcggaaaagtgggaatgaaactttggccctgcttaaacgt

SEQ ID NO: 207356 - DNA, 75 bp, synthetic construct
  source 1..75: mol_type = other DNA
aggtaaagccctgtttatggcgctcaggagccagcgcccacctgccgggctaatccaccactctgatcgaggttc

SEQ ID NO: 207357 - DNA, 75 bp, synthetic construct
  source 1..75: mol_type = other DNA
aacgccaaaaggtcaggccggttaaagcgggcagctatcaagttactgaaaggaccgggtgtgaataaacgctat

SEQ ID NO: 207358 - DNA, 75 bp, synthetic construct
  source 1..75: mol_type = other DNA
cagagcagttgttaaatgcaaacagctggcaagaattgcatcaagcgatgcggcaaaacggactggaattacgcc

SEQ ID NO: 207359 - DNA, 75 bp, synthetic construct
  source 1..75: mol_type = other DNA
cttcattttgtggtttacctagttcacttgcaggtttgcataagaaagctaagaaagagtcatggcggacacgtc

SEQ ID NO: 207360 - DNA, 75 bp, synthetic construct
  source 1..75: mol_type = other DNA
ccgtacatgctggaggtgatgccttcttacgatgtggttcgttatgccatgaagaaattgccggaagtggtgaaa

SEQ ID NO: 207361 - DNA, 75 bp, synthetic construct
  source 1..75: mol_type = other DNA
tcgacggtggcacgcgctttgtggtgggctggagccttgacctggctgaaaatgttttcgccgtagccggtgcca

SEQ ID NO: 207362 - DNA, 75 bp, synthetic construct
  source 1..75: mol_type = other DNA
cttccgtctttaatcacatcatcttctgaaataacagaaaggccatatgacggctcgggtttgaattctgcagta

SEQ ID NO: 207363 - DNA, 75 bp, synthetic construct
  source 1..75: mol_type = other DNA
tatagatctttctgttgaaaaagcctggatgttggcaagcatccgttttggcgatcacaaaattcgtagcggatg

SEQ ID NO: 207364 - DNA, 75 bp, synthetic construct
  source 1..75: mol_type = other DNA
ccatacatgctggaggtgatgccttcctatgatgttgtccggtatgccatgaaaaaactgccggaagtggtgaaa

SEQ ID NO: 207365 - DNA, 75 bp, synthetic construct
  source 1..75: mol_type = other DNA
cggggatcgacagcgaaaagctgtcaccgcatgtgttgcgtcacgcctttgccacccatttgttaaatcatggtg

SEQ ID NO: 207366 - DNA, 75 bp, synthetic construct
  source 1..75: mol_type = other DNA
cgcattaaacattatgctgtgctggcggggatcgacagcgaaaagctgtcaccgcatgtgttgcgtcacgccttt

SEQ ID NO: 207367 - DNA, 75 bp, synthetic construct
  source 1..75: mol_type = other DNA
gctgggccatagcgatctctccacgactcaaatttatacgcatgtcgccaccgagcgtctgcggcaacttcatca

SEQ ID NO: 207368 - DNA, 75 bp, synthetic construct
  source 1..75: mol_type = other DNA
gagcagtggaacgccgctttggcagcgagcttccggcgtctccagtggagtggctgacggataatggttcatgct

SEQ ID NO: 207369 - DNA, 75 bp, synthetic construct
  source 1..75: mol_type = other DNA
gttgctgttgctgatgcgttacgccacggaattaaaaatcacggaaaaccgtacatctattattcagataatggc

SEQ ID NO: 207370 - DNA, 75 bp, synthetic construct
  source 1..75: mol_type = other DNA
atgatcaggtttgctatgcaatgaacaaactcccggttgttgtgaaacaacgcggacgcattactggcagtgagt

SEQ ID NO: 207371 - DNA, 75 bp, synthetic construct
  source 1..75: mol_type = other DNA
gagtacaaacgccatatcgaaaaagatccggcgctgacccggcgttttcaggtgttgcaggtggcagagccggaa

SEQ ID NO: 207372 - DNA, 75 bp, synthetic construct
  source 1..75: mol_type = other DNA
ggatgttgggtcttgaaccgaagaccacggcggtgcggagtccggagagtaacggaatagcagagagcttcgtga

SEQ ID NO: 207373 - DNA, 75 bp, synthetic construct
  source 1..75: mol_type = other DNA
ggatgttgggtcttgaaccgaagaacacggcggtgcggagtccggagagtaacggcatagcagagagcttcgtga

SEQ ID NO: 207374 - DNA, 75 bp, synthetic construct
  source 1..75: mol_type = other DNA
tctctggacagaacgcggggctgcacgtcacgccaaaatgcttgaaaccgatcaggcttgggatgtgttcgaacg

SEQ ID NO: 207375 - DNA, 75 bp, synthetic construct
  source 1..75: mol_type = other DNA
gtcagcctgaacaactggcacctgctgcgtcaccggagaacccgatggcgcaacatataaaatcccacaattctg

SEQ ID NO: 207376 - DNA, 75 bp, synthetic construct
  source 1..75: mol_type = other DNA
ggatgttggggcttgaaccgaagaccacggcggtgcggagtccggagagtaacggtatagcagagagcttcgtga

SEQ ID NO: 207377 - DNA, 75 bp, synthetic construct
  source 1..75: mol_type = other DNA
ggatgttgggccttgaaccgaagatcacggcggtgcggagtccggagagtaacgggatagcagagagcttcgtga

SEQ ID NO: 207378 - DNA, 75 bp, synthetic construct
  source 1..75: mol_type = other DNA
acgctctgaatgtatccgtagggcggcacgcccaccagcaactacagacagattcggagatttaagacaggcagt

SEQ ID NO: 207379 - DNA, 75 bp, synthetic construct
  source 1..75: mol_type = other DNA
gtggtgaaacaaaaagggcgtgttaccggcagtgaataccgtcagcttgaaggattcacccgccgcgactggaca

SEQ ID NO: 207380 - DNA, 75 bp, synthetic construct
  source 1..75: mol_type = other DNA
tcggctatatcgaacaacatatcctcccacaactgtcccgttactggttgcaggcgatgacagagaaaacggcca

SEQ ID NO: 207381 - DNA, 75 bp, synthetic construct
  source 1..75: mol_type = other DNA
agacgtggttacgagtttcagaaagatctcagcttcgatcgtcgtcactggataatctccgccaggctcccttat

SEQ ID NO: 207382 - DNA, 75 bp, synthetic construct
  source 1..75: mol_type = other DNA
gcgatgagttaaaaactttgcgagtgactttaagtcactcacaaaatttgcgggtagctttaaactactcacaaa

SEQ ID NO: 207383 - DNA, 75 bp, synthetic construct
  source 1..75: mol_type = other DNA
atggcgcacaataccaaacatcacaattctgataccgaccttgccagcaggcacgggctgcgttctcacgcattc

SEQ ID NO: 207384 - DNA, 75 bp, synthetic construct
  source 1..75: mol_type = other DNA
tagccgtttcggcatcttcagtattttccctatgctgttggtcgtgctctatggcgttgggatttatctaaccac

SEQ ID NO: 207385 - DNA, 75 bp, synthetic construct
  source 1..75: mol_type = other DNA
aatgtcgcgtaaaggtaactgttacgacaacgctccgatggaaagcttctggggaacgctgaaaaatgagagcct

SEQ ID NO: 207386 - DNA, 75 bp, synthetic construct
  source 1..75: mol_type = other DNA
catatccgcactcgcgaaacatatggaacccggcggctccagacggagctggcagagaatggcatcatcgttggt

SEQ ID NO: 207387 - DNA, 75 bp, synthetic construct
  source 1..75: mol_type = other DNA
cgcagggaatcgtcgccatgcgcgaacgggtggcgcaaattattgcagaacgcgaatacctgattgccgcactga

SEQ ID NO: 207388 - DNA, 75 bp, synthetic construct
  source 1..75: mol_type = other DNA
aaaaaacaccggcaaaggcggtgctctaatgaacggcctcaactacgccacatgtgaccaggtttttttaagcga

SEQ ID NO: 207389 - DNA, 75 bp, synthetic construct
  source 1..75: mol_type = other DNA
ttcggtttctctgatcgtactaaagtcgaagaccttgatctcacctggacattggtggcaaacggctaccgtatt

SEQ ID NO: 207390 - DNA, 75 bp, synthetic construct
  source 1..75: mol_type = other DNA
gcgtttatcgctacgctggttatgatgcttttactgcgcggcgtgaccatggtttataccaacggtagcccagtg

SEQ ID NO: 207391 - DNA, 75 bp, synthetic construct
  source 1..75: mol_type = other DNA
gaacaaatggtagtgtccgctattgccagtacacctcacagctttcgagggtgcgggcgagggcgcataacacct

SEQ ID NO: 207392 - DNA, 75 bp, synthetic construct
  source 1..75: mol_type = other DNA
atctccccggcagccttcagggaaaaatatcatcagatggctgcttaaaaaagaacaaatggtagtgtccgctat

SEQ ID NO: 207393 - DNA, 75 bp, synthetic construct
  source 1..75: mol_type = other DNA
gaaaaatgagagcctgagccactatcgttttaataaccgggatgaagccatctcagtaatacgggaatacattga

SEQ ID NO: 207394 - DNA, 75 bp, synthetic construct
  source 1..75: mol_type = other DNA
tgcttttactgcgcggcgtgaccatggtttacaccaacggtagtccggtgaataccggatttactgagaacgccg

SEQ ID NO: 207395 - DNA, 75 bp, synthetic construct
  source 1..75: mol_type = other DNA
ctgctggtgctgatcgcgattgtctcgacgttaagtccgaactttttcaccatcaataacttattcaatattctc

SEQ ID NO: 207396 - DNA, 75 bp, synthetic construct
  source 1..75: mol_type = other DNA
gcaggcatcgctggctggctggctggcggaatatccgcacctggctattttgcgcacactgtcgaaagcttttgc

SEQ ID NO: 207397 - DNA, 75 bp, synthetic construct
  source 1..75: mol_type = other DNA
gacggataatggttcatgctaccgggcgaatgaaacacgacagttggccaggatgttgggccttgaaccgaagat

SEQ ID NO: 207398 - DNA, 75 bp, synthetic construct
  source 1..75: mol_type = other DNA
gacggataatggttcatgctaccgggctaatgaaacacgacagttggccaggatgttgggccttgaaccgaagaa

SEQ ID NO: 207399 - DNA, 75 bp, synthetic construct
  source 1..75: mol_type = other DNA
gacggataatggttcatgctaccgggcaaatgaaacacgacagttggcctggatgttgggccttgaaccgaagac

SEQ ID NO: 207400 - DNA, 75 bp, synthetic construct
  source 1..75: mol_type = other DNA
atgaagccccaggagatatttctatcaaccctggggctacctacccaaacccgaacaatttggatggtagtccct

SEQ ID NO: 207401 - DNA, 75 bp, synthetic construct
  source 1..75: mol_type = other DNA
caaaccacgaatgaacagccgcttgatacttcgcaattaatggaagatgtccgcctgatgggtgcagaaaaaata

SEQ ID NO: 207402 - DNA, 75 bp, synthetic construct
  source 1..75: mol_type = other DNA
gtatttggtcacaatcataacaggctggcggagagcgccgtcgaacaatgggttgctggcgatcgtgagtacgtc

SEQ ID NO: 207403 - DNA, 75 bp, synthetic construct
  source 1..75: mol_type = other DNA
agtgcgtgaaattctcgccaaagagagctggtgggatccgaacgtcatctatccggatgcgattaacgcggcgcg

SEQ ID NO: 207404 - DNA, 75 bp, synthetic construct
  source 1..75: mol_type = other DNA
gaaccatcggacaaacaggaacgtcggtagaaggtggtgtttcacaagtgacctacacagatccggcgcaggccg

SEQ ID NO: 207405 - DNA, 75 bp, synthetic construct
  source 1..75: mol_type = other DNA
tcgctgcggatttacctcagtaatgatcgacggttcgctgctgccgtatgaagaaaacgtggcgctgaccgcaga

SEQ ID NO: 207406 - DNA, 75 bp, synthetic construct
  source 1..75: mol_type = other DNA
gactgctgtgaccgtgaggcactgcactgggcagtcactacgggcggcttcgacagtgaaacagtacaggacgta

SEQ ID NO: 207407 - DNA, 75 bp, synthetic construct
  source 1..75: mol_type = other DNA
ttaaaaggggcaggtctgctgccacatatccgcgccaccgtaaagttgccgatgattgttatgaagcgcacgcta

SEQ ID NO: 207408 - DNA, 75 bp, synthetic construct
  source 1..75: mol_type = other DNA
aacaaaagcaatcgcatcgccagaatgaatttccggttcctgttccgcaatatattcaatatcctgcggccagat

SEQ ID NO: 207409 - DNA, 75 bp, synthetic construct
  source 1..75: mol_type = other DNA
gtttgcttcgcgtcggcggtttatatcccggagctttggccaacgcatttacgcctgcgcggttcgggtttcgtt

SEQ ID NO: 207410 - DNA, 75 bp, synthetic construct
  source 1..75: mol_type = other DNA
gctgagtttgccattacgccagttgttggggccgaagtggtcacaggttcttcgcgaatgaaagcaggcacggcg

SEQ ID NO: 207411 - DNA, 75 bp, synthetic construct
  source 1..75: mol_type = other DNA
atgaacacctgcacgacgcctatgagctgctgtgggaaatgccgggtaatgatggttatttgcaactggtgggta

SEQ ID NO: 207412 - DNA, 75 bp, synthetic construct
  source 1..75: mol_type = other DNA
ctctcagggcggtgtgcgcggcggtgcggcaacgctgttctacccgatgtggcatctggaagttgaaagcctgct

SEQ ID NO: 207413 - DNA, 75 bp, synthetic construct
  source 1..75: mol_type = other DNA
aaaatattcgaacagacagggcattgcgtgacgcaaaaaataagttacgagaactggagaaagagcttaagcgta

SEQ ID NO: 207414 - DNA, 75 bp, synthetic construct
  source 1..75: mol_type = other DNA
tccggggagtgccgtttccaccaccgccgagtttgccattacaccgattgtaggtgccgaagtggtcactggttc

SEQ ID NO: 207415 - DNA, 75 bp, synthetic construct
  source 1..75: mol_type = other DNA
aattgaccgcgtatcgacgctggaaatgtgccggattatcaacgatgaagataaaaccgtaccgcttgccgttga

SEQ ID NO: 207416 - DNA, 75 bp, synthetic construct
  source 1..75: mol_type = other DNA
ccggtcgtatctatattcagaacgttgaccactgtaatacccatagcccgtttgatccggccatcgcgccagtgc

SEQ ID NO: 207417 - DNA, 75 bp, synthetic construct
  source 1..75: mol_type = other DNA
atttccagactgcggtgaaatcctgctctcagggcggcgtgcgcggcggtgcggcaacgctgttctacccgatgt

SEQ ID NO: 207418 - DNA, 75 bp, synthetic construct
  source 1..75: mol_type = other DNA
aagacgacagcatccgcaagcagcgtgtgaaagccgttgagctgttctcgctgatgatgcaggaacgtgcgtcta

SEQ ID NO: 207419 - DNA, 75 bp, synthetic construct
  source 1..75: mol_type = other DNA
gatgtatacccgtctgctgaaaggtgaagatatcactctgttcagcccgtccgacgtaccggggctgtacgacgc

SEQ ID NO: 207420 - DNA, 75 bp, synthetic construct
  source 1..75: mol_type = other DNA
caacctgggcgcaattaatagcctggatgaactggaagagctggcgattctggcggttcgtgcacttgacgcgct

SEQ ID NO: 207421 - DNA, 75 bp, synthetic construct
  source 1..75: mol_type = other DNA
ggcatcctgccgatcgatacctacaagaaagatctggatgctatcgccaatgaaccgctgcattacgactgggaa

SEQ ID NO: 207422 - DNA, 75 bp, synthetic construct
  source 1..75: mol_type = other DNA
tctcggtgcgggaacatccggtcgtctggggattctggatgccagcgaatgtccgcccacctacggcgtgaaacc

SEQ ID NO: 207423 - DNA, 75 bp, synthetic construct
  source 1..75: mol_type = other DNA
cgggagcatggctttgacatgagagacagagtgagcagacagaaccgaactgaacctgaacgggttaaatcaccg

SEQ ID NO: 207424 - DNA, 75 bp, synthetic construct
  source 1..75: mol_type = other DNA
gcattccaataagtggcatccttattattatatacaccatagatacagttttaaccgaacttaaacaaccactct

SEQ ID NO: 207425 - DNA, 75 bp, synthetic construct
  source 1..75: mol_type = other DNA
atgagtgagaaaaagtcactatccataaatgctgtacggtttgtttatggtgatgaaaccatcgtggtgcagtgt

SEQ ID NO: 207426 - DNA, 75 bp, synthetic construct
  source 1..75: mol_type = other DNA
agagcggcaaactgcattactggtcgctggatgacgaacaggccgcgattaaagccgaaagctgcgatgactgtg

SEQ ID NO: 207427 - DNA, 75 bp, synthetic construct
  source 1..75: mol_type = other DNA
gatttagggcgcttgagaaagattacgatgcgctcatttccacaaaatatactgcgcagaacgttctcactcaca

SEQ ID NO: 207428 - DNA, 75 bp, synthetic construct
  source 1..75: mol_type = other DNA
caagtcggttacgttggctgaaccggcctgaaggagagctgatgcgcggtttgctgagtctggatcagcaacata

SEQ ID NO: 207429 - DNA, 75 bp, synthetic construct
  source 1..75: mol_type = other DNA
ttatcctgacgcctggctttcagagcagcgttatttcgaactttggtcgcgtgttattcacttgcgccatgcagg

SEQ ID NO: 207430 - DNA, 75 bp, synthetic construct
  source 1..75: mol_type = other DNA
ataagttagataatatttcacagttagatatttcattctctgagaaaaactccactaaaggagataaagatgact

SEQ ID NO: 207431 - DNA, 75 bp, synthetic construct
  source 1..75: mol_type = other DNA
aacaaaaaaaatgtatcgaaaaggaaatcacgtacaaagaaaaaaaatagtaatataaagagtgatgagggaagg

SEQ ID NO: 207432 - DNA, 75 bp, synthetic construct
  source 1..75: mol_type = other DNA
gatggggcaggttatgccgggctgggaaaaggttaagaagcgactggatggtatggctgggatgttgttggcaga

SEQ ID NO: 207433 - DNA, 75 bp, synthetic construct
  source 1..75: mol_type = other DNA
cgccaacgcgtaattgttttgctttctcaccccgccaaccggcgtgaccacactaatgttttgatacacgttcag

SEQ ID NO: 207434 - DNA, 75 bp, synthetic construct
  source 1..75: mol_type = other DNA
gcttatcgacagttatcggcgagcaaccgcttcttgcgccgctgatgcgtatcaaacactatatggcgctttatc

SEQ ID NO: 207435 - DNA, 75 bp, synthetic construct
  source 1..75: mol_type = other DNA
ctacagcaccgctgacgatgatcttttcaccctgccggaaggcgatatctctatcggcactcctcacgttctgga

SEQ ID NO: 207436 - DNA, 75 bp, synthetic construct
  source 1..75: mol_type = other DNA
aggctggataaagggcaccccgcaggatggaggctggatgatcaaacctctcggtcgctggtcgttaatcatgga

SEQ ID NO: 207437 - DNA, 75 bp, synthetic construct
  source 1..75: mol_type = other DNA
agtctggatgataacggttcgttgctgctggattttggcccacggcagttcaccgtcagctttgatgaaacctta

SEQ ID NO: 207438 - DNA, 75 bp, synthetic construct
  source 1..75: mol_type = other DNA
aggagctcacatacagcctcctcaacgcatcactctggttcggcatgacatacctgctacggcagtttttcataa

SEQ ID NO: 207439 - DNA, 75 bp, synthetic construct
  source 1..75: mol_type = other DNA
attcctttcccttctgacgggattattaactgtaatgacgctgacggacatcgccgtctgtcggcttccccggat

SEQ ID NO: 207440 - DNA, 75 bp, synthetic construct
  source 1..75: mol_type = other DNA
tatgacggtcgcggagatcgtcgaaaaggaagagtgggctggatttcgcgccagagagaccgcggcgctggaagc

SEQ ID NO: 207441 - DNA, 75 bp, synthetic construct
  source 1..75: mol_type = other DNA
tgactccagcggtagaaaatattataaatggttctaaatctatcgaaatacggtcgtggtatcctgaaacgatac

SEQ ID NO: 207442 - DNA, 75 bp, synthetic construct
  source 1..75: mol_type = other DNA
agccttcgatttttgagaggctgattgcccgcatgacacaacaggaatactggcaagcctgtgagaagtgtgaca

SEQ ID NO: 207443 - DNA, 75 bp, synthetic construct
  source 1..75: mol_type = other DNA
agattgtgacggtattcaccagctttatcagaccggtggtgaagaggtccaaaaccgcattctggacggattcta

SEQ ID NO: 207444 - DNA, 75 bp, synthetic construct
  source 1..75: mol_type = other DNA
caggatggtggctggatcggctggatgatcaaacctctgggccgctggtcgttaatcatggaaatcgatgaaggc

SEQ ID NO: 207445 - DNA, 75 bp, synthetic construct
  source 1..75: mol_type = other DNA
taaaggttgggtgcgtggtgaaccgcaggatggtggctggatcggctggatgatcaaacctctgggccgctggtc

SEQ ID NO: 207446 - DNA, 75 bp, synthetic construct
  source 1..75: mol_type = other DNA
atgcagcttaacggcatcgcccagaaactgaaattcaaagcattacaggagcgggcaaaagaaaaaattgccgac

SEQ ID NO: 207447 - DNA, 75 bp, synthetic construct
  source 1..75: mol_type = other DNA
atgaatcagcaacgatttgatgacagcactctaatccgtatcttcgcgctttatgagttacatcgactgaaagaa

SEQ ID NO: 207448 - DNA, 75 bp, synthetic construct
  source 1..75: mol_type = other DNA
ctggaatacgcgcgccaactcggctgccgtacagtgggaatttcctgtaatccggggagcgcggtttccaccacc

SEQ ID NO: 207449 - DNA, 75 bp, synthetic construct
  source 1..75: mol_type = other DNA
cggtggaaggcgctgaagatagccgggaaggtggtgttaacgatctgaaaaacatcggcttaaccgcgcaggatg

SEQ ID NO: 207450 - DNA, 75 bp, synthetic construct
  source 1..75: mol_type = other DNA
cgattatctcgaccttgttattctgcgttgtagtgatgtatttaggcggttatgtcgcaccaggggcaacgcaat

SEQ ID NO: 207451 - DNA, 75 bp, synthetic construct
  source 1..75: mol_type = other DNA
gatgtatacccgcctgctgaaaggtgaagatatcaccctgttcagcccgtccgatgtgccagggttatacgacgc

SEQ ID NO: 207452 - DNA, 75 bp, synthetic construct
  source 1..75: mol_type = other DNA
cgcgattgtaaaatacgtctcccagcgtgccggtatcggtatcaacgccgggcgtattcgtgcgctgggtagccc

SEQ ID NO: 207453 - DNA, 75 bp, synthetic construct
  source 1..75: mol_type = other DNA
ttcgcgaatgaaagcaggcacggcgcagaaactggtgctcaatatgctctccaccgggctgatgattaagtcagg

SEQ ID NO: 207454 - DNA, 75 bp, synthetic construct
  source 1..75: mol_type = other DNA
aactgacccgctgggcaggcagaaaatgcccgagtggtcgggtcatggggctggcgaataaaggctggataaagg

SEQ ID NO: 207455 - DNA, 75 bp, synthetic construct
  source 1..75: mol_type = other DNA
gccagttagcgctgccgtttgccccgtttctctgcgcgtccctgtatgtgctgaccctcttccctgattccgtta

SEQ ID NO: 207456 - DNA, 75 bp, synthetic construct
  source 1..75: mol_type = other DNA
tggctgatattcaccagtggcaaaatctggatgactattacaaccagtaccgccaacgcgtaattgttttgcttt

SEQ ID NO: 207457 - DNA, 75 bp, synthetic construct
  source 1..75: mol_type = other DNA
catcacagtcggtattggttttattggtttaggtctggttgttggtttattaaacagttcattacagccagctat

SEQ ID NO: 207458 - DNA, 75 bp, synthetic construct
  source 1..75: mol_type = other DNA
tcaccgtcagctttgatgaaaccttaaaaccgtttgtgcgtgatgtttccggcagccgcctgaaagacctgccca

SEQ ID NO: 207459 - DNA, 75 bp, synthetic construct
  source 1..75: mol_type = other DNA
gaaagacgtctgttccgccgactcactggcgggatttgcctgggatctgtttaccgcctggcagaccgctggcgc

SEQ ID NO: 207460 - DNA, 75 bp, synthetic construct
  source 1..75: mol_type = other DNA
tttacatgccgctacatgccctcaataaattggttaaagggctatcaacggaaataactgcattcagggctacca

SEQ ID NO: 207461 - DNA, 75 bp, synthetic construct
  source 1..75: mol_type = other DNA
attcaccgggcagctactggttaacgtggagaatggacgcgtggcaagtaattatcacctgccggatggtgcaat

SEQ ID NO: 207462 - DNA, 75 bp, synthetic construct
  source 1..75: mol_type = other DNA
gctgaccgcgttgcagcccagctttattggcagggagaagtcattcctggcgagatttccttccgcgcggtctaa

SEQ ID NO: 207463 - DNA, 75 bp, synthetic construct
  source 1..75: mol_type = other DNA
acgggtgatatcaagttggccagcgagggtaaaattcgttccagaattgaacacttcacggaaatcatgggcgat

SEQ ID NO: 207464 - DNA, 75 bp, synthetic construct
  source 1..75: mol_type = other DNA
gttgacaagtatgagaccaacgaacgcacgattgcgcagcttgttggacatgtccggggcagcactactgcgatg

SEQ ID NO: 207465 - DNA, 75 bp, synthetic construct
  source 1..75: mol_type = other DNA
gctattggttacccctattagcgttatatagcggtgggcgaatgaatgagttatgccaactttatctttctgata

SEQ ID NO: 207466 - DNA, 75 bp, synthetic construct
  source 1..75: mol_type = other DNA
attgcatgtatatcgcccgattttgcactggaagcatgaagatgtatttgcaatagccagaagacatgacattaa

SEQ ID NO: 207467 - DNA, 75 bp, synthetic construct
  source 1..75: mol_type = other DNA
ggagctgcccggggtggggcaggagctgacctagggggtggggcaggagctgcccccagaacctatcactctttt

SEQ ID NO: 207468 - DNA, 75 bp, synthetic construct
  source 1..75: mol_type = other DNA
cattcagaacacagttcagggaatggcgtaaaactaccaggggtacggcaagcgagtttgccacgatgctggcag

SEQ ID NO: 207469 - DNA, 75 bp, synthetic construct
  source 1..75: mol_type = other DNA
gctagatttcctatggatgcagaaataaaattatttgatggacagcatcgtgctgcaggattagctgagttctgc

SEQ ID NO: 207470 - DNA, 75 bp, synthetic construct
  source 1..75: mol_type = other DNA
gaagaggttaagcgtgttgcggaatgggagcgacttgtcgccgcatgctccagacgcggaaattctactttcttc

SEQ ID NO: 207471 - DNA, 75 bp, synthetic construct
  source 1..75: mol_type = other DNA
gtggcggggcacagtttgatttgctggcttcggtgaatgataagtcagtttgcagtagtgtctatgccggtgtat

SEQ ID NO: 207472 - DNA, 75 bp, synthetic construct
  source 1..75: mol_type = other DNA
atgtcgcagcgtgataatctctatcgccgtccaagtggtatctatgttcttcggatcactgttccggttcgttat

SEQ ID NO: 207473 - DNA, 75 bp, synthetic construct
  source 1..75: mol_type = other DNA
tggggccgggacaggcgttgcaattgtttgacggtagcaaccaggtctttgacgccgaaattaccagcgccagca

SEQ ID NO: 207474 - DNA, 75 bp, synthetic construct
  source 1..75: mol_type = other DNA
cacttttttctgaacgctgcggcgttaaactggatagtgaacgtctgaacaagaagctccagcagtggcagaaga

SEQ ID NO: 207475 - DNA, 75 bp, synthetic construct
  source 1..75: mol_type = other DNA
ggaatttacgatccagaaatcgatcgaactcggtgtaagcctcattacgccgcttttttctgagcgctgcggcgt

SEQ ID NO: 207476 - DNA, 75 bp, synthetic construct
  source 1..75: mol_type = other DNA
aggtaatgtcacgcggtgaaaaaatggaattcactatccagaaatcgatcgaacttggggtaagcctcattacgc

SEQ ID NO: 207477 - DNA, 75 bp, synthetic construct
  source 1..75: mol_type = other DNA
cgtccagcaatggatctggaagcctggtgtgcagagcaggatgaaggactgaaactgaatcttcacccgcgcgcc

SEQ ID NO: 207478 - DNA, 75 bp, synthetic construct
  source 1..75: mol_type = other DNA
ggtgtgcagagcaggatgaaggactgaaactgaatcttcacccgcgcgccagtaacagcatcaacacgttgccgt

SEQ ID NO: 207479 - DNA, 75 bp, synthetic construct
  source 1..75: mol_type = other DNA
atgaccaccttgcgccaacaactggctgaaatgcaaaaagaactcgatcttagcgttcaggctggtaaggcctca

SEQ ID NO: 207480 - DNA, 75 bp, synthetic construct
  source 1..75: mol_type = other DNA
tgccgcgcctgagagtgatgctaaatgaaaaagaatctgcgccgcagctctgtcaccactgtgaagatgcaccct

SEQ ID NO: 207481 - DNA, 75 bp, synthetic construct
  source 1..75: mol_type = other DNA
acgggtgatattaagctagccagcgaggggaaaattcgttccagaattgaacacttcgtggagataatgggcgat

SEQ ID NO: 207482 - DNA, 75 bp, synthetic construct
  source 1..75: mol_type = other DNA
atgaggaaaggcagaaaagccataaatggacttttactaaagactgataagcatcttaagtggtttaccactgat

SEQ ID NO: 207483 - DNA, 75 bp, synthetic construct
  source 1..75: mol_type = other DNA
cgaataaatttgatgatatcgcctccgactacgagcgtcgacgtctggatttcgaaaacttaacgcagagccagc

SEQ ID NO: 207484 - DNA, 75 bp, synthetic construct
  source 1..75: mol_type = other DNA
cagccaactcggcaccctacacaaggacctgagcaaagaactaaaagatgcttgggatgcatggttggaagagtt

SEQ ID NO: 207485 - DNA, 75 bp, synthetic construct
  source 1..75: mol_type = other DNA
cgctgatttatctcggttcggcggcgctgattgtacccattgcggtacgtcttggtctgggatcggtacttggct

SEQ ID NO: 207486 - DNA, 75 bp, synthetic construct
  source 1..75: mol_type = other DNA
tggaagaggttggtctgtcgatggcgatgggcgcgtttctggcgggcgtgctgctggcaagctcggaatatcgtc

SEQ ID NO: 207487 - DNA, 75 bp, synthetic construct
  source 1..75: mol_type = other DNA
gtgctgctgttccaggatatcgcggcgatcccgctggtggcgatgatccccttgctggcggcgagcagtgcctcg

SEQ ID NO: 207488 - DNA, 75 bp, synthetic construct
  source 1..75: mol_type = other DNA
taacgccattgacgatccgcaaaccaacctgcaactgacggagatggtgaaagaacatttcccgcatttgcagat

SEQ ID NO: 207489 - DNA, 75 bp, synthetic construct
  source 1..75: mol_type = other DNA
ctggcgtggaaaggccagagcgtgaaacctttgagggagcgctcaaaaccgggcgtctggcactggaaagtttag

SEQ ID NO: 207490 - DNA, 75 bp, synthetic construct
  source 1..75: mol_type = other DNA
ttttttatcggcgttgggatgtcgatagactttggcacgctgattgaaaacccgttgcgcattgtcattctgctg

SEQ ID NO: 207491 - DNA, 75 bp, synthetic construct
  source 1..75: mol_type = other DNA
agattatcccctttgatttccatgctctccagggatgcctgtggcctgcggttcctataaatcagataacgacgt

SEQ ID NO: 207492 - DNA, 75 bp, synthetic construct
  source 1..75: mol_type = other DNA
tgctggacgcgcgtatggaacaagaaggctacgctcgcagttccatcaacccgttcctgtttccgggggaagggg

SEQ ID NO: 207493 - DNA, 75 bp, synthetic construct
  source 1..75: mol_type = other DNA
gcgaacaacgtcaatattgcccggtttgtggttctatgccggtgtccagcatggtgcaaattggcaccactcagg

SEQ ID NO: 207494 - DNA, 75 bp, synthetic construct
  source 1..75: mol_type = other DNA
ttcccggggcggttcaaccagtgttatggctatcgtcgcctgcatgcgatgctcaggcatgagggggttcggcta

SEQ ID NO: 207495 - DNA, 75 bp, synthetic construct
  source 1..75: mol_type = other DNA
ccggcaggttatgaagttctacaagaacttgatgagttggattctttattaattatagatctcgggggcaccaca

SEQ ID NO: 207496 - DNA, 75 bp, synthetic construct
  source 1..75: mol_type = other DNA
ttgagcaacgtgtattaaatacgctcaatgaattttctggttatacacatgttatggttataggcggtggcgcag

SEQ ID NO: 207497 - DNA, 75 bp, synthetic construct
  source 1..75: mol_type = other DNA
tttcctcatcatcaaaatcgccatgctgtggctgattgcccgaccgttgcaggtgccaaataaacagcgtcgctg

SEQ ID NO: 207498 - DNA, 75 bp, synthetic construct
  source 1..75: mol_type = other DNA
gccgaacttactgcactggtgaactatgtcaccagctcgcagttgtccatgaaggatgtgcaaacgcatctcgac

SEQ ID NO: 207499 - DNA, 75 bp, synthetic construct
  source 1..75: mol_type = other DNA
gggtcatacaggagcagtttggtctgaaaacatcaatgtcgcgtaaaggtaactgttacgacaacgctccgatgg

SEQ ID NO: 207500 - DNA, 75 bp, synthetic construct
  source 1..75: mol_type = other DNA
cagggcaccagcttcaactttgttgcgccgctgattatgggcggaacagcactaaagaccggtggtgccgatgtt

SEQ ID NO: 207501 - DNA, 75 bp, synthetic construct
  source 1..75: mol_type = other DNA
aggtaaacaaggccaagaatgagcttatcgcgatgaaggttatccttcgcgaaggccagcaaatcgggcctaaca

SEQ ID NO: 207502 - DNA, 75 bp, synthetic construct
  source 1..75: mol_type = other DNA
tcagcgtcgtcactctcgtctggggaatatctccccggcagccttcagggaaaaatatcatcagatggctgctta

SEQ ID NO: 207503 - DNA, 75 bp, synthetic construct
  source 1..75: mol_type = other DNA
gccgaacttactgcactggtgaactatgtcaccagctcacagctatccatgaaggatgtgcagacacatctcgat

SEQ ID NO: 207504 - DNA, 75 bp, synthetic construct
  source 1..75: mol_type = other DNA
aagttgcctttacatgtaagaaactactttgaggaactacttaaaaccgcgaatgatagagttactcattttgac

SEQ ID NO: 207505 - DNA, 75 bp, synthetic construct
  source 1..75: mol_type = other DNA
atggatagccatacgctgattcaggcgctgatttatctcggttcggcggcgctgattgtacccattgcggtgcgc

SEQ ID NO: 207506 - DNA, 75 bp, synthetic construct
  source 1..75: mol_type = other DNA
tctacggcgattgctatgcaggcgatgaatgaacgtaatcttatggtgacgcaaatgggccgcagtgcctttgcg

SEQ ID NO: 207507 - DNA, 75 bp, synthetic construct
  source 1..75: mol_type = other DNA
atcagtttgaacgtgcgaacggttcgacttatcgggaattggaaatcgcattaccccgtgaactgacagcggaac

SEQ ID NO: 207508 - DNA, 75 bp, synthetic construct
  source 1..75: mol_type = other DNA
caaagtttgaaagagacgaacttagaagattaatttctaatgtaaactggattatattcaaacctaaaataaaaa

SEQ ID NO: 207509 - DNA, 75 bp, synthetic construct
  source 1..75: mol_type = other DNA
cacctcagatgaagttgatcattgctatctttggattaaaaatcgattattgtgaacatattaattcgggaaaac

SEQ ID NO: 207510 - DNA, 75 bp, synthetic construct
  source 1..75: mol_type = other DNA
ccctacagcctatcctgcataaccagatccccgttatcaccacggagctgcttgccaaactatatggctgtagcg

SEQ ID NO: 207511 - DNA, 75 bp, synthetic construct
  source 1..75: mol_type = other DNA
gtacaaccggtctgggaaagcagtgctggcagcgtttttcggacgcgattcaaaatgatctcaccgaaacgaatt

SEQ ID NO: 207512 - DNA, 75 bp, synthetic construct
  source 1..75: mol_type = other DNA
cgcgtcgaacgccgtgcagctgcaccaggatcatatcgtcggcaatctgtttaagttgagttatcgccctaactg

SEQ ID NO: 207513 - DNA, 75 bp, synthetic construct
  source 1..75: mol_type = other DNA
agtgtcaatatgctacttggtattttttacttataccgctactgaggaggagatgttttttatagttactctatt

SEQ ID NO: 207514 - DNA, 75 bp, synthetic construct
  source 1..75: mol_type = other DNA
tctggaccgaacgcggggctgcacgtcacgccaaaatgcttgaaactaaccaagcgtgggatgtgttcgaacggc

SEQ ID NO: 207515 - DNA, 75 bp, synthetic construct
  source 1..75: mol_type = other DNA
cactgacggcacttacttctgcgccaccaacgtggcgcgggtgaatcttatccgacaagtacaggagccacgcag

SEQ ID NO: 207516 - DNA, 75 bp, synthetic construct
  source 1..75: mol_type = other DNA
gcggtgcatctcaccgaaccactggctatcgactacgagccggagggacgcaaagtgaaataccagcaggccagc

SEQ ID NO: 207517 - DNA, 75 bp, synthetic construct
  source 1..75: mol_type = other DNA
ggcgcggtggtctccggcatcgcttccggcgactggacgctctcctgtgtacgcggggaaatcacctccatgacc

SEQ ID NO: 207518 - DNA, 75 bp, synthetic construct
  source 1..75: mol_type = other DNA
gatccctacccgtttaagctgctgattggcgaggacaacctcaccgccaatggcgttgagctgccggacgtggcg

SEQ ID NO: 207519 - DNA, 75 bp, synthetic construct
  source 1..75: mol_type = other DNA
cgcgttcaacggtgaaacctgcgtacaaccggtgtgggagagctgcgccggcagcgtttttcggacgcgattcaa

SEQ ID NO: 207520 - DNA, 75 bp, synthetic construct
  source 1..75: mol_type = other DNA
ggtcgcccgctgcaacctgcgttagcctttccctccgcaatgcaggacgtctcgctgaaacccgaaacaccaccg

SEQ ID NO: 207521 - DNA, 75 bp, synthetic construct
  source 1..75: mol_type = other DNA
cacccgccagttagctatcgactacgagcctgacggacggcgggtgaactaccgcaaggcgggtgatcgcactgg

SEQ ID NO: 207522 - DNA, 75 bp, synthetic construct
  source 1..75: mol_type = other DNA
ggttctgggactgcttctcggagcctggaacggatggtgggtcgcgtaccgcaaagtcccttcatttattgtcac

SEQ ID NO: 207523 - DNA, 75 bp, synthetic construct
  source 1..75: mol_type = other DNA
tatggaaaaggctaaatgtaatggaatagaaatcgttggtgttggtattaagactgatgaaataattggttttga

SEQ ID NO: 207524 - DNA, 75 bp, synthetic construct
  source 1..75: mol_type = other DNA
atgtcttcagagctcaaagcgaatctaaaaatagagggcatgttggcctcgtattagttcgtgatatttcagcgt

SEQ ID NO: 207525 - DNA, 75 bp, synthetic construct
  source 1..75: mol_type = other DNA
ggaaccggtgcaggttcagaagtcatgagccgtatcgcggcacccatgattggtgggatgatcacggctccgctg

SEQ ID NO: 207526 - DNA, 75 bp, synthetic construct
  source 1..75: mol_type = other DNA
gtaacaccattcgccctgtgacggcagttcctggactttccgctctggagattgacccgcaggaagccgcccaac

SEQ ID NO: 207527 - DNA, 75 bp, synthetic construct
  source 1..75: mol_type = other DNA
gaatcgatcctcacgaggaaacagaacgctatcgtcagcatgttcttgataccaagggtggagaactggatgaag

SEQ ID NO: 207528 - DNA, 75 bp, synthetic construct
  source 1..75: mol_type = other DNA
aaagagattgaaggtattgcatcaaaagtatccgatgacgtgaaagccgaattcggtgcttctgaatgggatatc

SEQ ID NO: 207529 - DNA, 75 bp, synthetic construct
  source 1..75: mol_type = other DNA
atgtcgaaaagcaatccgtctgaagaattagccgtaccgacatccggtggcctttccgggctgaagtcactgaat

SEQ ID NO: 207530 - DNA, 75 bp, synthetic construct
  source 1..75: mol_type = other DNA
gcgtaccgtaaagtcccttcatttattgtcaccctcgcgggcatgttggcatttcgcggcatactcattggcatc

SEQ ID NO: 207531 - DNA, 75 bp, synthetic construct
  source 1..75: mol_type = other DNA
gcaccagtctggctggcggtgtgggaagcgttgccggagcggtaatggggcattcatcatggcttcactggataa

SEQ ID NO: 207532 - DNA, 75 bp, synthetic construct
  source 1..75: mol_type = other DNA
cgggtgtgggctggatttttgaatatgcccttgtcgatcgcagcggaaaacacgacctttcagaactgcgttctc

SEQ ID NO: 207533 - DNA, 75 bp, synthetic construct
  source 1..75: mol_type = other DNA
gcaccatgtacggcaacgcattgttagttgcagaagaagcggaagccattttgtccgggcaaggacacaaagcaa

SEQ ID NO: 207534 - DNA, 75 bp, synthetic construct
  source 1..75: mol_type = other DNA
cactgacggcacttacttctgcgccaccaacgtggcgcgggtgaatcttatccgacaggtacaggagccacgcaa

SEQ ID NO: 207535 - DNA, 75 bp, synthetic construct
  source 1..75: mol_type = other DNA
acaggcatcgctggctggctggctgacggaatatccgcacctggctattttgcgcacactgtcgaaagcttttgc

SEQ ID NO: 207536 - DNA, 75 bp, synthetic construct
  source 1..75: mol_type = other DNA
tgccgtgcggggaagtgacactacaggaacagaaagaggcagaggcccggctaatggtgctgaatgaccgacgaa

SEQ ID NO: 207537 - DNA, 75 bp, synthetic construct
  source 1..75: mol_type = other DNA
gcagtactgcaaattcgtgacgatttatccgctgaacaacgtgaagatcgtgcgaacgaattgatggaagagttt

SEQ ID NO: 207538 - DNA, 75 bp, synthetic construct
  source 1..75: mol_type = other DNA
actcagcaaacgctgaaccgctaccctgaatgccagccgaaagcagtgattgagaattacgcgcagtatgctgac

SEQ ID NO: 207539 - DNA, 75 bp, synthetic construct
  source 1..75: mol_type = other DNA
tgaacgccaacgaatatcccacagccgtggagtttcagctcactcagcaaacgctcaaccgctacccggaatgtc

SEQ ID NO: 207540 - DNA, 75 bp, synthetic construct
  source 1..75: mol_type = other DNA
tttcgactccgaaaccaactacattctggcgcgctttaaagcctccagtgcagtgtttaaatctttgtgggatca

SEQ ID NO: 207541 - DNA, 75 bp, synthetic construct
  source 1..75: mol_type = other DNA
tattcagatggctcttcggagtatgttatttataaagcatacccaaatagtcttggtgaattaattagtgagttt

SEQ ID NO: 207542 - DNA, 75 bp, synthetic construct
  source 1..75: mol_type = other DNA
acgcgtgtagcggcggctcatgccgtacataacggtctgactgtcctaccgcaaaccgagaagtttctccacggc

SEQ ID NO: 207543 - DNA, 75 bp, synthetic construct
  source 1..75: mol_type = other DNA
ggtgggtggtctgggcgatcgttttactcgcgttgcagcagcccatgccgtacataacggtctgaccgttttgcc

SEQ ID NO: 207544 - DNA, 75 bp, synthetic construct
  source 1..75: mol_type = other DNA
atggcaacattaacagcaaagaaccttgcaaaagcctataagggtcgccgcgtggtggaagacgtcagtctgacc

SEQ ID NO: 207545 - DNA, 75 bp, synthetic construct
  source 1..75: mol_type = other DNA
cctgagcgtctacgataacctgatggcagtgctacaaattcgtgacgacttatcggctgaacagcgcgaagaccg

SEQ ID NO: 207546 - DNA, 75 bp, synthetic construct
  source 1..75: mol_type = other DNA
ccgcatcatgatcagcctgctgaccattagcgaagagctgtttgattacgcattaaaaggctatacaggcaatat

SEQ ID NO: 207547 - DNA, 75 bp, synthetic construct
  source 1..75: mol_type = other DNA
acgctggcaaacgaagaagtcatcaacctgctgatgaaagtgatcgccccctacccgctctcgacaccggttgcc

SEQ ID NO: 207548 - DNA, 75 bp, synthetic construct
  source 1..75: mol_type = other DNA
aggatctggcatggaaactgactaaccgcttgatccatgcgccaacgaaatcacttcaacaggccgcccgtgacg

SEQ ID NO: 207549 - DNA, 75 bp, synthetic construct
  source 1..75: mol_type = other DNA
gggcggtgatgcgcaaactattatgcaggatctggcatggaaactgactaaccgcttgatccatgcgccaacaaa

SEQ ID NO: 207550 - DNA, 75 bp, synthetic construct
  source 1..75: mol_type = other DNA
gataagctcgatcaggcgcttgacagcctgcttgcgcagccgatggtgcagggcggcgtggtgctgtcgacgtgc

SEQ ID NO: 207551 - DNA, 75 bp, synthetic construct
  source 1..75: mol_type = other DNA
cccgcccggcttaggcctgacacccggcgaactgcccgcagacgtacagccggacatccgctggctggagccgct

SEQ ID NO: 207552 - DNA, 75 bp, synthetic construct
  source 1..75: mol_type = other DNA
agttaaagacccggaagtggttcgatcagcagaatggtgttgatcgctacgcaacggaggtggtggtgagtgtca

SEQ ID NO: 207553 - DNA, 75 bp, synthetic construct
  source 1..75: mol_type = other DNA
ttatcctgataggacatctggggcaggatccggatatccggtatttccccaatggcggtggcgctgtggcgaatc

SEQ ID NO: 207554 - DNA, 75 bp, synthetic construct
  source 1..75: mol_type = other DNA
agtatgtcaacgcggtgcttgttcatgtggcagcttctcaccattacccgaccagccgaggcctctgaagcgaga

SEQ ID NO: 207555 - DNA, 75 bp, synthetic construct
  source 1..75: mol_type = other DNA
agtcgaagacaggtggcacttatttttgatatcggcctttcaaccctttatcgttattatcctgcgagcgtttcg

SEQ ID NO: 207556 - DNA, 75 bp, synthetic construct
  source 1..75: mol_type = other DNA
gtgcagacaccgcaaggagtcagcaacaattgtaaattaccggacggtgaaacgattgatgaatgggcattgtgg

SEQ ID NO: 207557 - DNA, 75 bp, synthetic construct
  source 1..75: mol_type = other DNA
aacttgatgataactttcatcaaattctgacccagatcgccgattgtccgctcgcctgggacacgattgaaaacc

SEQ ID NO: 207558 - DNA, 75 bp, synthetic construct
  source 1..75: mol_type = other DNA
cattgagtgcgcagtagcccgccgggcggcaaccatgattaccgaaagccagtgctatcaactggagcaaaatct

SEQ ID NO: 207559 - DNA, 75 bp, synthetic construct
  source 1..75: mol_type = other DNA
ccagttcgtgaagccttcattaagctggcggaaaatggcctgattcaaattcgcccgcaacgtggcagctacgtc

SEQ ID NO: 207560 - DNA, 75 bp, synthetic construct
  source 1..75: mol_type = other DNA
ggaatgaaaagcgcactgcgcaggatcagcaacacgcacagcaggcttttggtgacgccatcggccagagttttg

SEQ ID NO: 207561 - DNA, 75 bp, synthetic construct
  source 1..75: mol_type = other DNA
atgtcattcagccattcttccctctcctcgcaagtaaaatcacatctgacgtttcttcctgaagaaattcgccag

SEQ ID NO: 207562 - DNA, 75 bp, synthetic construct
  source 1..75: mol_type = other DNA
atgtcattcagccattcttccctctcctcccaagtaaaatcagatctgacgtttcttcctgaagaaattcgccag

SEQ ID NO: 207563 - DNA, 75 bp, synthetic construct
  source 1..75: mol_type = other DNA
aaaatccttgaacatctccacagtgttattcattacgagcccgtgattggcattatgggtaaatccggtgccgga

SEQ ID NO: 207564 - DNA, 75 bp, synthetic construct
  source 1..75: mol_type = other DNA
tcctctgaacggctgcacccgccaggctcatcgtcttaccctgcagctcggtgaacgcagaatgacgctggtcga

SEQ ID NO: 207565 - DNA, 75 bp, synthetic construct
  source 1..75: mol_type = other DNA
ggggggaaaaccgctctgaacaggcccggaaacacgcacaacagacttttggtgatgccatcgggaaaagttttg

SEQ ID NO: 207566 - DNA, 75 bp, synthetic construct
  source 1..75: mol_type = other DNA
gtgatggtgttttggttgattctgtgtcgctcatggtgctgtcctgtaaagcaatgcgccggacttcttcaaact

SEQ ID NO: 207567 - DNA, 75 bp, synthetic construct
  source 1..75: mol_type = other DNA
ctctgtgcttctttatcgaattgctcttttagctctggagaaattcgcattctgaattgtggggattgcccgtcc

SEQ ID NO: 207568 - DNA, 75 bp, synthetic construct
  source 1..75: mol_type = other DNA
tagcaatgcgccgtaatacctcacaccacggcgctgatagtttttatcctttgggttctataccgcgccgcttta

SEQ ID NO: 207569 - DNA, 75 bp, synthetic construct
  source 1..75: mol_type = other DNA
atgtcattcagccattcttccctctcctctcaagtgaaatcatatctgacgtttcttcctgaagaaattcgccag

SEQ ID NO: 207570 - DNA, 75 bp, synthetic construct
  source 1..75: mol_type = other DNA
atgtcattcagccattcttccctctcctctcaagttaaatcaaatctgacgtttcttcctgaagaaattcgccag

SEQ ID NO: 207571 - DNA, 75 bp, synthetic construct
  source 1..75: mol_type = other DNA
ttgccgggcagctgcacgtcgcgctcgatcgcataagcgatacacaaacagccgcccgcacgcaggcagaaaaat

SEQ ID NO: 207572 - DNA, 75 bp, synthetic construct
  source 1..75: mol_type = other DNA
atcgcgtgtttcctgctgaagaatggaatgccacagaaaaatgcccgtcccgtcaccaggaactctcactggcga

SEQ ID NO: 207573 - DNA, 75 bp, synthetic construct
  source 1..75: mol_type = other DNA
ggagcatcttacggagcgccttcaggcattaaatgaaagggttcccgagctgattactgacagtaaggcgttaag

SEQ ID NO: 207574 - DNA, 75 bp, synthetic construct
  source 1..75: mol_type = other DNA
atcataaacgcgatcagcaggcacaggagcatcttacggagcgccttcaggcattaaatgaaagggttcccgagc

SEQ ID NO: 207575 - DNA, 75 bp, synthetic construct
  source 1..75: mol_type = other DNA
ctgcccgcctcccgcgtttatcccggctcatcacgtcaggcgtaccttgctaaccgtgcgcttcatgagttacga

SEQ ID NO: 207576 - DNA, 75 bp, synthetic construct
  source 1..75: mol_type = other DNA
atggggaaccgtttgtcgatggtttggcaccagtgacctgggctgggaaaactatgacgaggatgtgagtcgcag

SEQ ID NO: 207577 - DNA, 75 bp, synthetic construct
  source 1..75: mol_type = other DNA
tggaggagatcgatgccagaacccgggaattactgacgggggtctgcacctcactggaagaggagctgaatgact

SEQ ID NO: 207578 - DNA, 75 bp, synthetic construct
  source 1..75: mol_type = other DNA
tggaggaaagaactgagacagtcacccgtcgccgtcggcagagtggtttctggggaaagatttgtggagcgtttg

SEQ ID NO: 207579 - DNA, 75 bp, synthetic construct
  source 1..75: mol_type = other DNA
gcagagtggtttatggggaaagatttgtggagcgtttggcaccagtgactggggctgggaaacctataaagagga

SEQ ID NO: 207580 - DNA, 75 bp, synthetic construct
  source 1..75: mol_type = other DNA
gtgagcgcagaatgacgctggtcgatctgcccggcatcggtgaaacaccgcagcatgatcaggaataccggacac

SEQ ID NO: 207581 - DNA, 75 bp, synthetic construct
  source 1..75: mol_type = other DNA
gatccacgcgctgccaccacaggcaaccagcgcagtttattcacatatccggggggaaaaccgctctgaacaggc

SEQ ID NO: 207582 - DNA, 75 bp, synthetic construct
  source 1..75: mol_type = other DNA
ctgcccgcctcccgcgtttatccaggatcctcacgccaggcatacctggctaaccgtgcgcttcatgagttacgg

SEQ ID NO: 207583 - DNA, 75 bp, synthetic construct
  source 1..75: mol_type = other DNA
tgcaacaaaaactcgccaccccggcaggacagcaagtcgcacagaccctgcagcaaaccggggataccagcgaac

SEQ ID NO: 207584 - DNA, 75 bp, synthetic construct
  source 1..75: mol_type = other DNA
gaatacgtctgtaaagacagcgaactggtcaccgaaggggcgacagacctgtgggaaggctcacttatcgatcaa

SEQ ID NO: 207585 - DNA, 75 bp, synthetic construct
  source 1..75: mol_type = other DNA
tgcctggcaatgccaaatatggggaacccggtggtcgactgcgcttgatgttgtctgcagaatgagcaaacgata

SEQ ID NO: 207586 - DNA, 75 bp, synthetic construct
  source 1..75: mol_type = other DNA
atggcgggactggaaaaacagcgtgaacaatatgctcatgccgttgaagcgttgtctgacccaacacgcacccga

SEQ ID NO: 207587 - DNA, 75 bp, synthetic construct
  source 1..75: mol_type = other DNA
aattaaaggcgtcctgcctgatgacgtcgttagcagcatcaacgaacaactgtcgggtgcatgcacaaccgagat

SEQ ID NO: 207588 - DNA, 75 bp, synthetic construct
  source 1..75: mol_type = other DNA
cggtggttcatccgttgaaatagccgaagcggagtatatggtccgcgccagcggctatctgcagagcattgatga

SEQ ID NO: 207589 - DNA, 75 bp, synthetic construct
  source 1..75: mol_type = other DNA
cgccagtggatgcgctgccggatctctccgatgtgcaggtgattattaaaaccagctatcccggccaggcaccgc

SEQ ID NO: 207590 - DNA, 75 bp, synthetic construct
  source 1..75: mol_type = other DNA
gcaccgatgattggcggcatgatcaccgcacctttgctgtcgctgtttattatcccggcggcgtataagctgatg

SEQ ID NO: 207591 - DNA, 75 bp, synthetic construct
  source 1..75: mol_type = other DNA
ggggattcatccctggggctggattatcaataacagcctttcgattgcacagacgcaatcgccgctgctttgcca

SEQ ID NO: 207592 - DNA, 75 bp, synthetic construct
  source 1..75: mol_type = other DNA
gtaataccattcgccctgtggcagcagttcctggactttccgctctggaaatcgacccgcaggaagccgccaaac

SEQ ID NO: 207593 - DNA, 75 bp, synthetic construct
  source 1..75: mol_type = other DNA
gggtgattcgtgaagcgggtaaacggtttgttgtcatggataccgcccctacgggacacacgctgttgctgctgg

SEQ ID NO: 207594 - DNA, 75 bp, synthetic construct
  source 1..75: mol_type = other DNA
ggtcaggtatttaatcaaactattggtaacgctattactcctgtgacagcggttcccgatttgtcagcgctggaa

SEQ ID NO: 207595 - DNA, 75 bp, synthetic construct
  source 1..75: mol_type = other DNA
gcgatatggcaacgggagcaggaggcactggcaaatctccctgccggtttatccgggctgctgacagatacctta

SEQ ID NO: 207596 - DNA, 75 bp, synthetic construct
  source 1..75: mol_type = other DNA
gtttgttgtcatggataccgcccctaccggacacacgctgttgctgctggatgcgaccggggcttaccaccgaga

SEQ ID NO: 207597 - DNA, 75 bp, synthetic construct
  source 1..75: mol_type = other DNA
tctggaaggtggccgctacattgatgttgatatcaatcgggaaaaagcatcccgttacgggatgacggtcggcga

SEQ ID NO: 207598 - DNA, 75 bp, synthetic construct
  source 1..75: mol_type = other DNA
ctactgcacctcatggtacagctgcaggccgggaaggtttagatgctttactggcaacttccgcattaactgacg

SEQ ID NO: 207599 - DNA, 75 bp, synthetic construct
  source 1..75: mol_type = other DNA
gtgacagggtggtacagttctgatgaaacgaattgcgtttgtttttctactgcgcctcatggtacagctgctggt

SEQ ID NO: 207600 - DNA, 75 bp, synthetic construct
  source 1..75: mol_type = other DNA
cctgaacaccatgctttcgaacagctcgatgaataccgcgcattataagagcccggcctttgacagcattatggc

SEQ ID NO: 207601 - DNA, 75 bp, synthetic construct
  source 1..75: mol_type = other DNA
aacaagttaaagtcgttttcattagctaaaataaaatggctggatataaaaaaagaaaagtttgcaaagagtgag

SEQ ID NO: 207602 - DNA, 75 bp, synthetic construct
  source 1..75: mol_type = other DNA
accctttgttgtcgaagccacgccgctcgaagcagatgccttacgccgcgaacttggcaactacgatgtaatttt

SEQ ID NO: 207603 - DNA, 75 bp, synthetic construct
  source 1..75: mol_type = other DNA
atgaaacgaattgcgtttgttttttctactgcgcctcatggtacagctgcaggccgggaaggtttagatgcttta

SEQ ID NO: 207604 - DNA, 75 bp, synthetic construct
  source 1..75: mol_type = other DNA
cgggggtgggctggatatttgaatatgcccttgtcgatcgcagcggaaaacacgacctttcagaactgcgttctc

SEQ ID NO: 207605 - DNA, 75 bp, synthetic construct
  source 1..75: mol_type = other DNA
ctgtcgccaaccgtttcctggtcatgatgggggccctgtttctcagcatctggggcacatggacgattattaaca

SEQ ID NO: 207606 - DNA, 75 bp, synthetic construct
  source 1..75: mol_type = other DNA
tgtcggtggttaatgatattaaaacggctatcagtcagaaagtgaaacttagaccgggtaccagcgtgtcattct

SEQ ID NO: 207607 - DNA, 75 bp, synthetic construct
  source 1..75: mol_type = other DNA
tgaaactaggtatggaccgcgatatcattgttaataaagtgaaagcgcagggcgacatgcccgcctatggttaca

SEQ ID NO: 207608 - DNA, 75 bp, synthetic construct
  source 1..75: mol_type = other DNA
cgtgtacgtcatttttgaagatggtaccgatttgtactgggcgcggtcacgcgttctggaatatctgaaccaggt

SEQ ID NO: 207609 - DNA, 75 bp, synthetic construct
  source 1..75: mol_type = other DNA
gcagggcttccatatgtctgtggcgacaggaaccgggtttatcgccctggcaggggtggcagcagagtttggcgt

SEQ ID NO: 207610 - DNA, 75 bp, synthetic construct
  source 1..75: mol_type = other DNA
acgcaatcattttgcgatgtggtggatgctattattgctggtggtgggatggtcggtggtctgggcgatcgtttt

SEQ ID NO: 207611 - DNA, 75 bp, synthetic construct
  source 1..75: mol_type = other DNA
tgtgactttgactattcatattcttattgaatttatgagtaatcaattccctgtaggtgctgaaataggtttagg

SEQ ID NO: 207612 - DNA, 75 bp, synthetic construct
  source 1..75: mol_type = other DNA
atatttttcctttaggattgctgatacccagcgttgccaacgcagccgctgattttgaattgcctgttaatatgc

SEQ ID NO: 207613 - DNA, 75 bp, synthetic construct
  source 1..75: mol_type = other DNA
ctgaaccattgttaatgcaaatacgtctgcctgcaaactatggtcgccgttataatgaagcctttagcgccattt

SEQ ID NO: 207614 - DNA, 75 bp, synthetic construct
  source 1..75: mol_type = other DNA
gtgctgaccagtcagtacggcactctcaacggtcagtatgcgttacggatagaacatttgattaacccgatttta

SEQ ID NO: 207615 - DNA, 75 bp, synthetic construct
  source 1..75: mol_type = other DNA
tggagattggcaacctgaccggcgaatttaatatctgcctgccattcagcatgatcgagccgctacgggaattgt

SEQ ID NO: 207616 - DNA, 75 bp, synthetic construct
  source 1..75: mol_type = other DNA
aggtctttaggtaaaggtataggcaaactagcacaagcaggtatgggtaaattgcgtggcggtgtgaaagctggc

SEQ ID NO: 207617 - DNA, 75 bp, synthetic construct
  source 1..75: mol_type = other DNA
cggcggccctggcccctaaagtcaaagccgaaatggcagcactacaggcccagctggatgccttgccagcagagg

SEQ ID NO: 207618 - DNA, 75 bp, synthetic construct
  source 1..75: mol_type = other DNA
atgttatcgccctgatcccgctgggcggttatgtcaaaatgctggatgagcgcgcagaaccggtcgttccggaac

SEQ ID NO: 207619 - DNA, 75 bp, synthetic construct
  source 1..75: mol_type = other DNA
cgtcttcttgggctgtttccccctgtcatcagggattcgatggcctgggctgtcctgtcactgttgcagttcatt

SEQ ID NO: 207620 - DNA, 75 bp, synthetic construct
  source 1..75: mol_type = other DNA
caaccgcgacgcccagccgtttattgccgactggatggcgaagcagttgcagcctttagtaaatcatgactcata

SEQ ID NO: 207621 - DNA, 75 bp, synthetic construct
  source 1..75: mol_type = other DNA
tgtgccgatctgcgctttggccgctacatcgatgcgctgggcaacgacctggttttacaccctaaacatggtcac

SEQ ID NO: 207622 - DNA, 75 bp, synthetic construct
  source 1..75: mol_type = other DNA
tttttgccgaagaaggcctggtgacggagcgttttactcatcgcgcaccgattaaatttaacgtccaccacaacg

SEQ ID NO: 207623 - DNA, 75 bp, synthetic construct
  source 1..75: mol_type = other DNA
tgcccgcaacctgccggtgccgaccaacctgaacctaatccacctgaaaccgctgcgcggcacagggctggtggt

SEQ ID NO: 207624 - DNA, 75 bp, synthetic construct
  source 1..75: mol_type = other DNA
agtggagtggctgacggataatggttcatgctaccgggctaatgaaacacgccagtttgcccggatggtgggact

SEQ ID NO: 207625 - DNA, 75 bp, synthetic construct
  source 1..75: mol_type = other DNA
agtggagtggctgacggataatggttcatgctaccgggctaatgaaacacgccagtttgcccggatgatggggct

SEQ ID NO: 207626 - DNA, 75 bp, synthetic construct
  source 1..75: mol_type = other DNA
agtggagtggctgacggataatggttcatgctaccgggctaatgaaacacgtcagtttgcccggatgttgggcct

SEQ ID NO: 207627 - DNA, 75 bp, synthetic construct
  source 1..75: mol_type = other DNA
aatagcagagagcttcgtgaaaacgataaagcgtgactacatcagtatcatgcccaaaccagacgggttaacggc

SEQ ID NO: 207628 - DNA, 75 bp, synthetic construct
  source 1..75: mol_type = other DNA
agtggagtggctgacggataatggttcatgctaccgggctaatgaaacacggcagtttgcccggatgctgggact

SEQ ID NO: 207629 - DNA, 75 bp, synthetic construct
  source 1..75: mol_type = other DNA
agtggagtggctgacggataatggttcatgctaccgggctaatgaaacacggcagtttgcccggatgatgggcct

SEQ ID NO: 207630 - DNA, 75 bp, synthetic construct
  source 1..75: mol_type = other DNA
gttcgcccggatgttgggacttgaaccgaagaacacggcggtgcggagtccggagagtaacggcataacagagag

SEQ ID NO: 207631 - DNA, 75 bp, synthetic construct
  source 1..75: mol_type = other DNA
ctcatcccctctgaaacctgggcagaaagaataagccgttcaggctacagccgtcagaatgtcaactgtctggtt

SEQ ID NO: 207632 - DNA, 75 bp, synthetic construct
  source 1..75: mol_type = other DNA
ctgccatatgttgatgctgaacgcattggcgtgctgggtgtgtgtggggggggggtggctatgccattaatgccg

SEQ ID NO: 207633 - DNA, 75 bp, synthetic construct
  source 1..75: mol_type = other DNA
agtggagtggctgacggataatggttcatgctaccgggctaatgaaacacgacagtttgcccggatggtgggcct

SEQ ID NO: 207634 - DNA, 75 bp, synthetic construct
  source 1..75: mol_type = other DNA
agtggagtggctgacggataatggttcatgctaccgggctaatgaaacacgacagtttgcccggatgctggggct

SEQ ID NO: 207635 - DNA, 75 bp, synthetic construct
  source 1..75: mol_type = other DNA
tagaaacaaggaacgttttatagaaggtaaacacttttttaggatagaaggtaaagagttacgagagttgaagaa

SEQ ID NO: 207636 - DNA, 75 bp, synthetic construct
  source 1..75: mol_type = other DNA
aactttgggatattcaacggtaagtctcagacacaaaatgcaaccacgggaaatgatggtcgtgcgacgataacg

SEQ ID NO: 207637 - DNA, 75 bp, synthetic construct
  source 1..75: mol_type = other DNA
acttccagttccgccggtaaagcgactgttagtgcgacagtcagtgatggggctgaggttaaagcgactgaggtc

SEQ ID NO: 207638 - DNA, 75 bp, synthetic construct
  source 1..75: mol_type = other DNA
ctaaaacaaaatgtgaaatgaatagtggtcgtttaccgtcatctacaagtgagttaaaggatgtgtataaccaat

SEQ ID NO: 207639 - DNA, 75 bp, synthetic construct
  source 1..75: mol_type = other DNA
cagctggtggtgttgctggtcatacgaataaaatggctaaaatgtccccggacatgaccaaaagcaacatgaccg

SEQ ID NO: 207640 - DNA, 75 bp, synthetic construct
  source 1..75: mol_type = other DNA
gactgtattatctgacatctttaacgcatggggggcagcaaataaatatagccattataacactatgagctcaat

SEQ ID NO: 207641 - DNA, 75 bp, synthetic construct
  source 1..75: mol_type = other DNA
aattataattcggccagttctatttgcggaaaaattaatggctcgttaccatcttcaattgcagagctggaaaca

SEQ ID NO: 207642 - DNA, 75 bp, synthetic construct
  source 1..75: mol_type = other DNA
ggctcgggggaaaccgccgacgtcctggataaggagattgtggggatactgccgcgactggggattaatcacccg

SEQ ID NO: 207643 - DNA, 75 bp, synthetic construct
  source 1..75: mol_type = other DNA
aacctgccagccaggacactacaggaactgataaaaatatctgcggataaactggccgcaggtgcaaaaccataa

SEQ ID NO: 207644 - DNA, 75 bp, synthetic construct
  source 1..75: mol_type = other DNA
gtggtgcattacaagaaaattaacaattctgataattcagccgtctttgccagcgggcacgggcggcgccctcac

SEQ ID NO: 207645 - DNA, 75 bp, synthetic construct
  source 1..75: mol_type = other DNA
aatgtctttaacacatggggagcagcaaataaatatgaatattacaagtctcttctgactataagctcttgggta

SEQ ID NO: 207646 - DNA, 75 bp, synthetic construct
  source 1..75: mol_type = other DNA
attctgccgcccttgccagtaggcaaggacggtgttcgcacgtatttaaaaccgactggttccagcatcccctat

SEQ ID NO: 207647 - DNA, 75 bp, synthetic construct
  source 1..75: mol_type = other DNA
ggagtaagagacccggcgggggagaaatccctcgccaccgctgatgtgtcaggcatcctcaacgcacccgcactt

SEQ ID NO: 207648 - DNA, 75 bp, synthetic construct
  source 1..75: mol_type = other DNA
atgacaaggcactaaattatgcggcacaacaggctgcgagtctcggtagccaacttcagtctcgctcactgaacg

SEQ ID NO: 207649 - DNA, 75 bp, synthetic construct
  source 1..75: mol_type = other DNA
actttcaaatctgactggttccagcatgacccatgtactgaagaacaggccgaatggctcattcagtgttaccgc

SEQ ID NO: 207650 - DNA, 75 bp, synthetic construct
  source 1..75: mol_type = other DNA
gataatctacgtcagactcccttattccgaacgcccaccgcgtccgtcccgcacattccagcaacggatctggag

SEQ ID NO: 207651 - DNA, 75 bp, synthetic construct
  source 1..75: mol_type = other DNA
atcataataattcgaccgttcttgcctgtacgcacgagcggtatcctcacacattcaaatctgactggtatcagc

SEQ ID NO: 207652 - DNA, 75 bp, synthetic construct
  source 1..75: mol_type = other DNA
tcgagttcgagtttcgctgtgataacggagaaaaactgcgagtcacgttcgcgcaggactgctgtgaccgtgagg

SEQ ID NO: 207653 - DNA, 75 bp, synthetic construct
  source 1..75: mol_type = other DNA
atctccgtcaggctcccttattccgaacgcccaccgcgtccgtcccgcacattccagcagcgcatctggaggtaa

SEQ ID NO: 207654 - DNA, 75 bp, synthetic construct
  source 1..75: mol_type = other DNA
gccagacggaggtcgctgtcttcacagcttacgaacctgaggagtaagagaccaggcgggggagaatccctcgcc

SEQ ID NO: 207655 - DNA, 75 bp, synthetic construct
  source 1..75: mol_type = other DNA
gttacgtattctgaggctgaaaataaatgccagacaaatggagcagctttagcacagtcaaaagaaatattggca

SEQ ID NO: 207656 - DNA, 75 bp, synthetic construct
  source 1..75: mol_type = other DNA
aatttaggtaagttgaatttacagacggtagaaacgaataaagatggtcttgcctcggtaactttaacttctgtt

SEQ ID NO: 207657 - DNA, 75 bp, synthetic construct
  source 1..75: mol_type = other DNA
gtattactgagattaaagctagtaagaccaccgcaaaggcggatggtgttgatgctattttatacacagttaaag

SEQ ID NO: 207658 - DNA, 75 bp, synthetic construct
  source 1..75: mol_type = other DNA
ccacacgcacgagcggtattctcacgcatttaagtcagactggtaccagcatcccccatgcactgaagaacaggc

SEQ ID NO: 207659 - DNA, 75 bp, synthetic construct
  source 1..75: mol_type = other DNA
acgtagccagggcggtcagattcagcatagcggaagccaaagcgcacaagattaccaggctattttgcctgctta

SEQ ID NO: 207660 - DNA, 75 bp, synthetic construct
  source 1..75: mol_type = other DNA
caacttatgacttaataacacaaaaccctcataagggtgttaagctagacgctccaaatgtctatgcagtttgtg

SEQ ID NO: 207661 - DNA, 75 bp, synthetic construct
  source 1..75: mol_type = other DNA
ctgggttatcgctcgccacgggaatatctgcggcagcgggcttgtaatgggttaagtgataacagatgtctggag

SEQ ID NO: 207662 - DNA, 75 bp, synthetic construct
  source 1..75: mol_type = other DNA
agcgatggtgctctgacgggttcgagttctgctgtgataacggagagagactgcgtgtcacgttcgcgctggact

SEQ ID NO: 207663 - DNA, 75 bp, synthetic construct
  source 1..75: mol_type = other DNA
agagcttcgtgaaaacgataaagcgtgattacatcagtatcatgcccaaaccagacgggttaacggcagcaaaga

SEQ ID NO: 207664 - DNA, 75 bp, synthetic construct
  source 1..75: mol_type = other DNA
cgccagtaagcaaattgttattcgcgcggttatggaagtgaccaatgctgacgcggtgacgcttttgatcgaccc

SEQ ID NO: 207665 - DNA, 75 bp, synthetic construct
  source 1..75: mol_type = other DNA
attctggtatccgcaggcttgaatgcgacgttgaatgcgggtgaacaccagattcaaatcagtaatggcgttccg

SEQ ID NO: 207666 - DNA, 75 bp, synthetic construct
  source 1..75: mol_type = other DNA
tattgtcttgatgtaacccgagctggacataatggcgtccttgccgctttgttattacgtgcgctgtttaatggc

SEQ ID NO: 207667 - DNA, 75 bp, synthetic construct
  source 1..75: mol_type = other DNA
ctgggttatcgctcgccacgggaatgtctacggcagcgggcttgtaatgggttaagtgataacaggtgtctggaa

SEQ ID NO: 207668 - DNA, 75 bp, synthetic construct
  source 1..75: mol_type = other DNA
agtccggagagtaacggaatagcagagagcttcgtgaaaacgataaagcgtgactacataagggaaggtgcgaac

SEQ ID NO: 207669 - DNA, 75 bp, synthetic construct
  source 1..75: mol_type = other DNA
atgaacattacgatgtcaccacagcagcctatgctgtcggttactattgcccggggatggggagtaagcttagtc

SEQ ID NO: 207670 - DNA, 75 bp, synthetic construct
  source 1..75: mol_type = other DNA
ctggcaaagtggccgtgaaagtaaagcaatcaacgatggtgctctgacgggttcgagttcgagtttcgctgtgat

SEQ ID NO: 207671 - DNA, 75 bp, synthetic construct
  source 1..75: mol_type = other DNA
gtagtccatgaggtctggcgtggtcagctcaatacattaaaaattgcgccagataatccggcctgggttatcgca

SEQ ID NO: 207672 - DNA, 75 bp, synthetic construct
  source 1..75: mol_type = other DNA
acgcaatcattttgcgatgtggtggatgccattattgctggtggtgggatggttggtggtctgggcgatcgtttt

SEQ ID NO: 207673 - DNA, 75 bp, synthetic construct
  source 1..75: mol_type = other DNA
ctgggttatcgctcgccacgggaatgctgccaacttactgatttagtgtatgatggtgattttaaggtgcttgcg

SEQ ID NO: 207674 - DNA, 75 bp, synthetic construct
  source 1..75: mol_type = other DNA
aaaatgattgcccacaccctacgtccggtggaatccattcattatctgccagtcacgctgacaccagatactttg

SEQ ID NO: 207675 - DNA, 75 bp, synthetic construct
  source 1..75: mol_type = other DNA
acaaaacttccaccagcgtttgagctgcccggcgcaaaacatattttgtttcgtggtcattgcagcgaaaacgat

SEQ ID NO: 207676 - DNA, 75 bp, synthetic construct
  source 1..75: mol_type = other DNA
tcgtcggccctgctaactacttttctcatcccggaagcctgaatcacctgcatgattttttcaccaacgaacagc

SEQ ID NO: 207677 - DNA, 75 bp, synthetic construct
  source 1..75: mol_type = other DNA
acatctgtgggccgatattaccggggtgccggatgggacaacggcgcagaaaggggttgtgaagcttaatagctc

SEQ ID NO: 207678 - DNA, 75 bp, synthetic construct
  source 1..75: mol_type = other DNA
acgcagcttaacagctccaccaatagcacgctggaaacgcaggcagcaacgccgaaggcggtgaaggcggcgatg

SEQ ID NO: 207679 - DNA, 75 bp, synthetic construct
  source 1..75: mol_type = other DNA
gttactggataccgacggcacgctggtcgctattggtaaattcccggaaacctataagccacgattacctgcggg

SEQ ID NO: 207680 - DNA, 75 bp, synthetic construct
  source 1..75: mol_type = other DNA
actgtaggtgctgcgactggcgggatatctgtatcttctgtcgccgacacgttacgtagattgtatggttcttcg

SEQ ID NO: 207681 - DNA, 75 bp, synthetic construct
  source 1..75: mol_type = other DNA
ccggcctggtgcttgatattgccgcactttcggaaaacgatctggcattttattgccttgatgtcacccgagctg

SEQ ID NO: 207682 - DNA, 75 bp, synthetic construct
  source 1..75: mol_type = other DNA
tcaggcggtggtgggggcggtggtggtggggcaatcgccggaggctcgacagtggtacaacctaaatttggacta

SEQ ID NO: 207683 - DNA, 75 bp, synthetic construct
  source 1..75: mol_type = other DNA
cgcgcaaacggccgcgaccgtaaccgtctcgccaaacaatgctcgtgaggttgtcgatacgctcaacgccaaacc

SEQ ID NO: 207684 - DNA, 75 bp, synthetic construct
  source 1..75: mol_type = other DNA
tggctgtgaaagaaagtaatcagcgatggtgctctgacgggttcgagttccgctgtgataacggagaaaaactgc

SEQ ID NO: 207685 - DNA, 75 bp, synthetic construct
  source 1..75: mol_type = other DNA
cgttcgagcattataacgaatggcatccgcatagtgcgctgggttatcgctcgccacgggaatatctgcggcagc

SEQ ID NO: 207686 - DNA, 75 bp, synthetic construct
  source 1..75: mol_type = other DNA
gatgatctgcaaagcatcatttcgcacaacctggcgcagcgtaaagccgcagcggttgaggcggaaactattgtc

SEQ ID NO: 207687 - DNA, 75 bp, synthetic construct
  source 1..75: mol_type = other DNA
gcgagaacgtgtttcgttttcgccggacaagctcgatgaggcgctggacagcctgctcgcgcagccgatggtgca

SEQ ID NO: 207688 - DNA, 75 bp, synthetic construct
  source 1..75: mol_type = other DNA
aagccgtcgcaaccaaccgatgctgttggtggatattgccgttccgcgcgatgtcgaaccggaagtcggaaaact

SEQ ID NO: 207689 - DNA, 75 bp, synthetic construct
  source 1..75: mol_type = other DNA
tgtttgcggttggaatactgatattcggtctgatgcatggctctttctccgtcccggcatcggaagtaggacgag

SEQ ID NO: 207690 - DNA, 75 bp, synthetic construct
  source 1..75: mol_type = other DNA
aagaaagcaatcagcgatggtgctctgacgggttcgagttctgctgtgataacggagagagactgcgtgtcacgt

SEQ ID NO: 207691 - DNA, 75 bp, synthetic construct
  source 1..75: mol_type = other DNA
gactgctgtgaccgtgaggcactgcactgggcggtcacaacgggtggcttcgacagtgaaacagtacaggacgtc

SEQ ID NO: 207692 - DNA, 75 bp, synthetic construct
  source 1..75: mol_type = other DNA
gatatccgcttgccaagagtcatcatggcattgctatgcggggccatgttaggtatggcaggagccgcaatgcaa

SEQ ID NO: 207693 - DNA, 75 bp, synthetic construct
  source 1..75: mol_type = other DNA
tgttagtcggtatttcagcctgttggatgttgccagccgctcttttattgctgttcaccgccaggacggcagata

SEQ ID NO: 207694 - DNA, 75 bp, synthetic construct
  source 1..75: mol_type = other DNA
tcgctctgcttggtcatcagattgcaaccgggttaggggtgaatagttcccgtctggcgttattgcgtgtagccg

SEQ ID NO: 207695 - DNA, 75 bp, synthetic construct
  source 1..75: mol_type = other DNA
cgaaaccattcgcgagtatcgcagtcaggcagagcaggttcgcgatgagttaaccgccaaagcgttagccgccct

SEQ ID NO: 207696 - DNA, 75 bp, synthetic construct
  source 1..75: mol_type = other DNA
ctcgatctttagtgatggcgatagcgtagctgcggcgcaatcgcaactggcagaacagcaaaaacagctggccga

SEQ ID NO: 207697 - DNA, 75 bp, synthetic construct
  source 1..75: mol_type = other DNA
gacctcacgctggctgactgggcgcaacaacgacgtgattacaccgccgcccgcgctgcatatcagaatgtcctg

SEQ ID NO: 207698 - DNA, 75 bp, synthetic construct
  source 1..75: mol_type = other DNA
taatcagctaaaacgcattaatgcggatacgccgggcaatacgggcctgcaaaacaatctggcgctattgctgtt

SEQ ID NO: 207699 - DNA, 75 bp, synthetic construct
  source 1..75: mol_type = other DNA
acgttcgcgctggactgctgtgatcgtgaggcactgcactgggcggtcactaccggcggcttcaacagtgaaaca

SEQ ID NO: 207700 - DNA, 75 bp, synthetic construct
  source 1..75: mol_type = other DNA
gtacaggacgtcatgctgggagcggttgaacgccgcttcggcaacgagcttccggcgtctccagtagagtggctg

SEQ ID NO: 207701 - DNA, 75 bp, synthetic construct
  source 1..75: mol_type = other DNA
cagcgggaacataaaggccgaatatcggtgaaggaaagcgaccagcgttggtgttccgatggttttgagttcggt

SEQ ID NO: 207702 - DNA, 75 bp, synthetic construct
  source 1..75: mol_type = other DNA
ctgagtggctactcactcggtcagggcggttactacagtccgcaggaatacctgtcgtttgccataccggtgatg

SEQ ID NO: 207703 - DNA, 75 bp, synthetic construct
  source 1..75: mol_type = other DNA
ggcacgtagccagctggcgaaactgcccgctaccgataacgcctcgctgaacacacagcggcgcgtggcgctggc

SEQ ID NO: 207704 - DNA, 75 bp, synthetic construct
  source 1..75: mol_type = other DNA
tgaccgggcagaacgcctgttccagcaggcgcgtaatgtcgataacaccgacagctatgcagtgctggggctggg

SEQ ID NO: 207705 - DNA, 75 bp, synthetic construct
  source 1..75: mol_type = other DNA
cgccggatggtcgtcaggcactgcaacaggcaagattgcaggcgacgactggtcatgcagaagaagctgtggcga

SEQ ID NO: 207706 - DNA, 75 bp, synthetic construct
  source 1..75: mol_type = other DNA
cgatgtggcgatggcgcgcaaagattatcccgccgccgaacgttattatcagcagaccttgcgtatggacagcgg

SEQ ID NO: 207707 - DNA, 75 bp, synthetic construct
  source 1..75: mol_type = other DNA
cgccggatggtcgtcaggcactgcaacaggctcgattgcaggcgactaccggtcatgcggaagaggccgtggcga

SEQ ID NO: 207708 - DNA, 75 bp, synthetic construct
  source 1..75: mol_type = other DNA
ttgccgtggtcttcggcgtgcatcagggctttattcccgtttatcttgccttaatggacagccagggtttcaaca

SEQ ID NO: 207709 - DNA, 75 bp, synthetic construct
  source 1..75: mol_type = other DNA
ggcaaaactcagcgcagtacaaaaacgctatcaggcaggaaaggcactggctggaaatgcggcatcgatgggcgc

SEQ ID NO: 207710 - DNA, 75 bp, synthetic construct
  source 1..75: mol_type = other DNA
ggcgaaactgagagcagtacaaaaacgctatcaggcagggaaggctctggcagggaatgccgcctcgatgggcgc

SEQ ID NO: 207711 - DNA, 75 bp, synthetic construct
  source 1..75: mol_type = other DNA
cgtattgagggattccgcaagaccagtgcacagctcgccgtgactggtcatgcatttgaaaaggctcgacaggaa

SEQ ID NO: 207712 - DNA, 75 bp, synthetic construct
  source 1..75: mol_type = other DNA
aaatggccgcgctccgcaagcaggcgcgccagctcggcgataataccgccgcctcggcggatgatgcggccggtg

SEQ ID NO: 207713 - DNA, 75 bp, synthetic construct
  source 1..75: mol_type = other DNA
ttaaacagttgccgtaacgtcggtgtcatgttcggtcaggcgctggctgatgctttgctgatgccgcttaatgcc

SEQ ID NO: 207714 - DNA, 75 bp, synthetic construct
  source 1..75: mol_type = other DNA
tgaagcccggttatgattttgctcagaaaaactctgagttacaggccgttctcggtgtcggtaaagactcagctg

SEQ ID NO: 207715 - DNA, 75 bp, synthetic construct
  source 1..75: mol_type = other DNA
cgatacaaatcaggtaaagagctcgccggtaacatggccgcagcaggtgctgccggggtcggtatcgcgacagcg

SEQ ID NO: 207716 - DNA, 75 bp, synthetic construct
  source 1..75: mol_type = other DNA
tttaacagcctgagcggcaaggttgactggctgctggagaaactcggcgttatcaaaaaagaatcgaccgacctc

SEQ ID NO: 207717 - DNA, 75 bp, synthetic construct
  source 1..75: mol_type = other DNA
tggcgtttggtcaggcgctggctgatgcgctgttgacgccgctcaacctgtttaacagcctgagcggcaaggttg

SEQ ID NO: 207718 - DNA, 75 bp, synthetic construct
  source 1..75: mol_type = other DNA
ggaaaacgccgctttgcttattggcaccaaatcggcattcgggctcgcagatgacaaggcatcgcatatagcaga

SEQ ID NO: 207719 - DNA, 75 bp, synthetic construct
  source 1..75: mol_type = other DNA
atggcggcagcggcaagcggaaaactcgataagctaactgccacgataaaggattcagacggtaaaacagaggag

SEQ ID NO: 207720 - DNA, 75 bp, synthetic construct
  source 1..75: mol_type = other DNA
gacctctacgaccagcaagatagctcgttgcgtcagctcactcagacagcaacgcgatacgtgttaaagctcgat

SEQ ID NO: 207721 - DNA, 75 bp, synthetic construct
  source 1..75: mol_type = other DNA
accaggcagcacagcaaaaatgactttcggttcagtcttctttggtaacagtaaaggaacgctgaataatgatat

SEQ ID NO: 207722 - DNA, 75 bp, synthetic construct
  source 1..75: mol_type = other DNA
agtgcgcagtttctcaaaacggggataagacagatatggcttgccgagcagtcgctaaaaaagcgttggggaata

SEQ ID NO: 207723 - DNA, 75 bp, synthetic construct
  source 1..75: mol_type = other DNA
tgcctttcgaccgacgccagattacacgctaattttcaattcgagtatcggcagcgatttttatgaagacagcga

SEQ ID NO: 207724 - DNA, 75 bp, synthetic construct
  source 1..75: mol_type = other DNA
gcagcgatttttatgaagacagcgaaggtaatgactccaacttactgatagtgttttatgttcagataatgcccg

SEQ ID NO: 207725 - DNA, 75 bp, synthetic construct
  source 1..75: mol_type = other DNA
cctggccggttatcaccggcatcaatgccattatcgcggcagcaggcgcaatgggggcaatcttcacgacggttg

SEQ ID NO: 207726 - DNA, 75 bp, synthetic construct
  source 1..75: mol_type = other DNA
ccgcgatggaaggccgtcatttaggttttccggcgcttgccgtctcgcttgacgggcataaacattacgacactg

SEQ ID NO: 207727 - DNA, 75 bp, synthetic construct
  source 1..75: mol_type = other DNA
atgcgtttcgttcttttctgtccctcaggaatcgtaccagcgcagttcgtagctctatcaaccggttctgtcggc

SEQ ID NO: 207728 - DNA, 75 bp, synthetic construct
  source 1..75: mol_type = other DNA
aactatttctcctttagccgccaacatgggctggactatcgcctgggaaccggcagatcgtgacttcatcggtcg

SEQ ID NO: 207729 - DNA, 75 bp, synthetic construct
  source 1..75: mol_type = other DNA
tctctggtcttatgctggcaatggttgcaggtacagcttctgctgatatggacggtggtcagttaaatatcagtg

SEQ ID NO: 207730 - DNA, 75 bp, synthetic construct
  source 1..75: mol_type = other DNA
cttctgctgatatggatggtggtcagttaaatatcagtggtctggttgttgataacacctgtgaaacccgcgttg

SEQ ID NO: 207731 - DNA, 75 bp, synthetic construct
  source 1..75: mol_type = other DNA
cgcggttgcggccttatgcgcccgctatctgatttaaaacggatgatgcctggatcgttcggtcagattgatgaa

SEQ ID NO: 207732 - DNA, 75 bp, synthetic construct
  source 1..75: mol_type = other DNA
atgatagcgaaacaaacaagctatcactatttatcgaattcgaacgccggatcgtggttgtgccctgggcacggc

SEQ ID NO: 207733 - DNA, 75 bp, synthetic construct
  source 1..75: mol_type = other DNA
ggtatcagtgacgaacatgttaatgcgatggccgatgagctttatgctttggtacgccaacgccagcgcgaagaa

SEQ ID NO: 207734 - DNA, 75 bp, synthetic construct
  source 1..75: mol_type = other DNA
gcgatggcgcatggcattgacgcaaaactggtgagtgaacacagcatcacgcttaaccacgacgcgggccgctgg

SEQ ID NO: 207735 - DNA, 75 bp, synthetic construct
  source 1..75: mol_type = other DNA
ttttgctactgccgctgttcgccagcccgcagcaaacccgtattgaagaacagaccatcacccacacacaggcgc

SEQ ID NO: 207736 - DNA, 75 bp, synthetic construct
  source 1..75: mol_type = other DNA
cagaaacctgccacctgtagaacgtagaaatatgctggcagcttttcaaatgcgacttcaaaaactgaccgaatt

SEQ ID NO: 207737 - DNA, 75 bp, synthetic construct
  source 1..75: mol_type = other DNA
cttggtacctcacaaaaggccgagtacgtgaaaacgatattcggcgaggaggctatgaagtctgcaagtgtcctt

SEQ ID NO: 207738 - DNA, 75 bp, synthetic construct
  source 1..75: mol_type = other DNA
gtgattgagggcatcatgagcgcgtttgcaccggtcggggaaatgttcgctccattagccccaatctttgacgga

SEQ ID NO: 207739 - DNA, 75 bp, synthetic construct
  source 1..75: mol_type = other DNA
aaaaaactccgagctgcaggctgtgctcggggtcgataagcagtcgccagaaatgcaggcgttacgcaaacaggc

SEQ ID NO: 207740 - DNA, 75 bp, synthetic construct
  source 1..75: mol_type = other DNA
cgagggtaaagcctactttaccggcgaaccgaccacggccgcgctgaaggtgtccttcttggggtcagtttggat

SEQ ID NO: 207741 - DNA, 75 bp, synthetic construct
  source 1..75: mol_type = other DNA
cggggaaatatctgcacggaactaaatatactggcagtatcccccccggttccacaggaattgtatcacttcaaa

SEQ ID NO: 207742 - DNA, 75 bp, synthetic construct
  source 1..75: mol_type = other DNA
gattatcaggttactttatccgtgatttaattcaacgaaccaacttatcattacgtgaaacacaaacattttcac

SEQ ID NO: 207743 - DNA, 75 bp, synthetic construct
  source 1..75: mol_type = other DNA
aaaaacagcaaggggatccagcttcgtgcatctgaaaaaccgctttcaaaaatgaacagctcgcagaagaattaa

SEQ ID NO: 207744 - DNA, 75 bp, synthetic construct
  source 1..75: mol_type = other DNA
ctgtggatcctttcacggacccctactatttcagatgaaatgaaacagcaaatgttagccatcgcgacccgggaa

SEQ ID NO: 207745 - DNA, 75 bp, synthetic construct
  source 1..75: mol_type = other DNA
acatacagcttgcgcgacgacggcggcatcaacgttattaacaagggctataaccctgacagggagatgtggcag

SEQ ID NO: 207746 - DNA, 75 bp, synthetic construct
  source 1..75: mol_type = other DNA
gtagaggctgcctaccgtaaagagctggtttatggtgaagacgatgccacgcgcgcgacgccgcctacggtacgc

SEQ ID NO: 207747 - DNA, 75 bp, synthetic construct
  source 1..75: mol_type = other DNA
caaacaccggccattctgaatatgtcgctggcaaataaaaaaactatggaggaaaacgccgctttgcttattggc

SEQ ID NO: 207748 - DNA, 75 bp, synthetic construct
  source 1..75: mol_type = other DNA
tgttgccggtacgattacgctcggtctgatgacacagattaccaatgtgttcggtcaggtccgaggtgcattcca

SEQ ID NO: 207749 - DNA, 75 bp, synthetic construct
  source 1..75: mol_type = other DNA
actgggtactggaaaagctcggggtcatcaacaaagagtcagacacacttgaccagaccgccgccagaactcatg

SEQ ID NO: 207750 - DNA, 75 bp, synthetic construct
  source 1..75: mol_type = other DNA
gcaggcgcaggtgcttgaatccgcgaagcgtgccgccgaagggctgcagacgaaatacaacagcctcacggagtc

SEQ ID NO: 207751 - DNA, 75 bp, synthetic construct
  source 1..75: mol_type = other DNA
gcgtgaccttaacgggcaggcagcaaaaattgacggctttcgtaaggccagcgcacaactggccgtaacgggaca

SEQ ID NO: 207752 - DNA, 75 bp, synthetic construct
  source 1..75: mol_type = other DNA
atggataaaaaaggcaatacacggccaatctttaccatcctgaaagaaatacaaaccagctttaagcgcaacaac

SEQ ID NO: 207753 - DNA, 75 bp, synthetic construct
  source 1..75: mol_type = other DNA
gaccagacagcggcgaaagccaatgcagcgacgcagaacggttacagcccggcaatcagcgcatacaacagctat

SEQ ID NO: 207754 - DNA, 75 bp, synthetic construct
  source 1..75: mol_type = other DNA
cattaaagagctcggcgtcaaaacggctgatggtaaggggaacacacgtccaatatttaccatcctgaaagaaat

SEQ ID NO: 207755 - DNA, 75 bp, synthetic construct
  source 1..75: mol_type = other DNA
caaaacctccatcagcgaaacgacggcgcagcttaatcgacagcgtgaggcactggcgcgcgtcagtgcgcagca

SEQ ID NO: 207756 - DNA, 75 bp, synthetic construct
  source 1..75: mol_type = other DNA
tcgacggctggatacagaaaaacaaatcactggcgtcaaccattggcctcattgccggtggcgcgctggcgctta

SEQ ID NO: 207757 - DNA, 75 bp, synthetic construct
  source 1..75: mol_type = other DNA
actggctgggcgaaaagttacaggccgcgtggcagtggtttaaaaacctgattgccccggtcaaagccacccagg

SEQ ID NO: 207758 - DNA, 75 bp, synthetic construct
  source 1..75: mol_type = other DNA
ctctccagttgcaaaaatgtcggcgttacttttggtcaggcgctggctgatgcgctgatgatgccgctcaagatg

SEQ ID NO: 207759 - DNA, 75 bp, synthetic construct
  source 1..75: mol_type = other DNA
ccaggcatgactctagaaggagacgtcaaccttgatactcgtcatttatgggaatggctgacagagcccctatgg

SEQ ID NO: 207760 - DNA, 75 bp, synthetic construct
  source 1..75: mol_type = other DNA
gcgggctgcattatcagttagaaccttatgcacaagggaaattggtgcgctgcgttgttggtgaagtttttgacg

SEQ ID NO: 207761 - DNA, 75 bp, synthetic construct
  source 1..75: mol_type = other DNA
gagacggcggaatttgtttataagacgacgaattattatcaccctgagagtgacagaggaattatttggaatgat

SEQ ID NO: 207762 - DNA, 75 bp, synthetic construct
  source 1..75: mol_type = other DNA
catgcttcagtccggaaactttcgggaaaacaagaattcgtcaaccaataattttcgggaaatcgcggaaacgtc

SEQ ID NO: 207763 - DNA, 75 bp, synthetic construct
  source 1..75: mol_type = other DNA
tttgatgggcttaataataaagttcatcacgattactgggttgtccctgatggagacagtgcgccagttgcgtcg

SEQ ID NO: 207764 - DNA, 75 bp, synthetic construct
  source 1..75: mol_type = other DNA
atccgaccaggtcaacgggtatctctgaagttttcggccttcccttatcagaaatttggtatccagtacggcaca

SEQ ID NO: 207765 - DNA, 75 bp, synthetic construct
  source 1..75: mol_type = other DNA
ggcggcattatgccgtttctgcggcgatttacattgcaaaacccagagtgatttttttgatattatcggctttaa

SEQ ID NO: 207766 - DNA, 75 bp, synthetic construct
  source 1..75: mol_type = other DNA
cgactcagtattatcatcctgaatgtgaacgagggatcagatgggatgatcagactataaatataaaatggggta

SEQ ID NO: 207767 - DNA, 75 bp, synthetic construct
  source 1..75: mol_type = other DNA
tctgcagtagtgctttgtcattatcgcaaaaagatcaagaagcaaaattattttcagaattattggacagtgaac

SEQ ID NO: 207768 - DNA, 75 bp, synthetic construct
  source 1..75: mol_type = other DNA
acggggtacatgcgcccggtatacaaacgttggcgaaagctctgcgtgagtttgctgacgttcaggtggtcgccc

SEQ ID NO: 207769 - DNA, 75 bp, synthetic construct
  source 1..75: mol_type = other DNA
gttatttattccggtacggtagccgcagcgatggaaggtcgtcatttaggctttccggcgctggcggtttccctg

SEQ ID NO: 207770 - DNA, 75 bp, synthetic construct
  source 1..75: mol_type = other DNA
gtccggggaccgattttgctgcggtagatgaaggctatgtctccatcacgccgctgcatgtagatttaaccgcgc

SEQ ID NO: 207771 - DNA, 75 bp, synthetic construct
  source 1..75: mol_type = other DNA
tcaagtatagaaaaaaacgctttacatcggcctctacctgatgtggctcagcgtctggtgcagcatcttgcagag

SEQ ID NO: 207772 - DNA, 75 bp, synthetic construct
  source 1..75: mol_type = other DNA
tgccatcatcgcggcagcaggcgcaatgggggcagtcttcacgacggttggcagtgctgttatgaccgccatcgg

SEQ ID NO: 207773 - DNA, 75 bp, synthetic construct
  source 1..75: mol_type = other DNA
atcccgcccgtttaaatccatccgcacagcgagcaagtcgctgtcgggggatatccgggaaacacaaaaatcact

SEQ ID NO: 207774 - DNA, 75 bp, synthetic construct
  source 1..75: mol_type = other DNA
ccatgcttcagtccggaaactttcgggaaaacaagaattcgtcaaccaataattttcgggaaatcgcggaaacgt

SEQ ID NO: 207775 - DNA, 75 bp, synthetic construct
  source 1..75: mol_type = other DNA
tggccggttgtggccgtggtggccgccattgtcgccggggcgttgcttatccgtaaatactgggagcctgtcagc

SEQ ID NO: 207776 - DNA, 75 bp, synthetic construct
  source 1..75: mol_type = other DNA
gaaaaaccgtatcagtgaaaccaccgcacagcttaaccgtcagcgtgacgcgctggcacgtgtcagtgcgcaaca

SEQ ID NO: 207777 - DNA, 75 bp, synthetic construct
  source 1..75: mol_type = other DNA
gtaaatactgggagcctgtcagcgcattctttggcggtgtggttgaagggctgaaagcggcatttgcgccggtgg

SEQ ID NO: 207778 - DNA, 75 bp, synthetic construct
  source 1..75: mol_type = other DNA
ttcgtcaatcaataattttcggataacctcggaaacgtcaaccaactctccggcaatccctgatgaggtgttgtc

SEQ ID NO: 207779 - DNA, 75 bp, synthetic construct
  source 1..75: mol_type = other DNA
ttgctgacattgctaactttcgtgatcgcgctttggttaacaccacaaacgccgatcagcatggtgaaaatgtgg

SEQ ID NO: 207780 - DNA, 75 bp, synthetic construct
  source 1..75: mol_type = other DNA
gcaggcattctgcaatactgcgcgaagcaaaagctggcttcggtaaccgatgccgaaaacatcaagaatcaggtg

SEQ ID NO: 207781 - DNA, 75 bp, synthetic construct
  source 1..75: mol_type = other DNA
cgataccactcccattccgaatggatggaaacttgtcccaattgacccaacaaaagatatgttgcgtgcgggtca

SEQ ID NO: 207782 - DNA, 75 bp, synthetic construct
  source 1..75: mol_type = other DNA
gatgatttgacagatgattttattagcatgcttactggtagagccaaatatcttcgagaaaaaggagagatcaaa

SEQ ID NO: 207783 - DNA, 75 bp, synthetic construct
  source 1..75: mol_type = other DNA
ggagttcttcgaaacgcagagccgcaatgtaacccactggatgccgctaccggagccgccacaggaggttaaccg

SEQ ID NO: 207784 - DNA, 75 bp, synthetic construct
  source 1..75: mol_type = other DNA
gtgcgaattgaccaggcgaatacagtctgttttcccttcaacgcgcgttactgttaaaaagggatccatgaccgg

SEQ ID NO: 207785 - DNA, 75 bp, synthetic construct
  source 1..75: mol_type = other DNA
aatttttctgttgttttttccgcgccgcctattgatgaaacctttgcaaaggagggcaaagtgaaagtaaatatc

SEQ ID NO: 207786 - DNA, 75 bp, synthetic construct
  source 1..75: mol_type = other DNA
ttggccctttctatggcggctataacgtcattgcgctcgaccgggagtatcgccacgcgctggtttgcggcccgg

SEQ ID NO: 207787 - DNA, 75 bp, synthetic construct
  source 1..75: mol_type = other DNA
ctctacatcccggaagtttaccctgactattgtagtgaagggatgatggtgatggagcgcatttacggcattccg

SEQ ID NO: 207788 - DNA, 75 bp, synthetic construct
  source 1..75: mol_type = other DNA
ggcggaacgcggcgtgcaggtgttcttcactcaggtttttcgcgacagctttttccatgccgatatgcaccctgg

SEQ ID NO: 207789 - DNA, 75 bp, synthetic construct
  source 1..75: mol_type = other DNA
gatggccgactggcgaagcaacagattgaagcagcaatgggtggcctgccggtggaagcgtggtttgatgatttt

SEQ ID NO: 207790 - DNA, 75 bp, synthetic construct
  source 1..75: mol_type = other DNA
gcacaggtaactgttatcgatgttagtgacttcccgtctatcgttgaacaaattggcgaaaacggcttggtagtt

SEQ ID NO: 207791 - DNA, 75 bp, synthetic construct
  source 1..75: mol_type = other DNA
cggattccgttaaacgccagcagcgggaactggccgctgtgggaattaatacccgcaatcttgcacatgatgagc

SEQ ID NO: 207792 - DNA, 75 bp, synthetic construct
  source 1..75: mol_type = other DNA
tgtaagtcttgaacaggcagcggccatgacaggtgtgctgcatgacaataacatcagggggtcaatggcgggtac

SEQ ID NO: 207793 - DNA, 75 bp, synthetic construct
  source 1..75: mol_type = other DNA
ggatgatggtggattgaatgtcatcaacaaaggctataatccggacagggagatgtggcaacagagcgaagggaa

SEQ ID NO: 207794 - DNA, 75 bp, synthetic construct
  source 1..75: mol_type = other DNA
aacaagggttataatccggacagagagatgtggcagcaaagcgaaggaaaagcgtactttacgggagacccgcat

SEQ ID NO: 207795 - DNA, 75 bp, synthetic construct
  source 1..75: mol_type = other DNA
gtgaaacaggagatgctggcaatcgcgacccgggaagggtttgatatcagtaagtttatttgggtacagcaaccc

SEQ ID NO: 207796 - DNA, 75 bp, synthetic construct
  source 1..75: mol_type = other DNA
cttgcaggataaagttgcgccttttgatggcgaactggcgaagcaacagattgaaactgcaatgggtggcctgcc

SEQ ID NO: 207797 - DNA, 75 bp, synthetic construct
  source 1..75: mol_type = other DNA
atcaacactatcagcgtcaaacgtgtaccggacttgtgcagaaatcctccagccaacctgcttctgatatattaa

SEQ ID NO: 207798 - DNA, 75 bp, synthetic construct
  source 1..75: mol_type = other DNA
atgatggtgcagcacctgaaaagacggccattaagccgctatcttaaagactttaagcacagccagacccattgc

SEQ ID NO: 207799 - DNA, 75 bp, synthetic construct
  source 1..75: mol_type = other DNA
gaagtgaatctattacgaacgtggggaaccctggcaccattttttgtgctgcccatattttttttatgtataatt

SEQ ID NO: 207800 - DNA, 75 bp, synthetic construct
  source 1..75: mol_type = other DNA
attggcaccagtgaagaagtggttgatgaattgctgacccgtggcgaaaaagtcggcgtattgaaagttcgcttg

SEQ ID NO: 207801 - DNA, 75 bp, synthetic construct
  source 1..75: mol_type = other DNA
acgccgtttgtcctgcatgttgcggcacgtaccgttgccacacatgcactctctatttttggcgatcattccgac

SEQ ID NO: 207802 - DNA, 75 bp, synthetic construct
  source 1..75: mol_type = other DNA
ctctcaacatcgtttacgtcatcgcagggtttgctgctgatgatcccaacgctgtacaaactggcaggcgaactc

SEQ ID NO: 207803 - DNA, 75 bp, synthetic construct
  source 1..75: mol_type = other DNA
atattacagatgtccagttatctgacaaagattctaagcaagcgacattccgagaatacactgcccaagatgtta

SEQ ID NO: 207804 - DNA, 75 bp, synthetic construct
  source 1..75: mol_type = other DNA
cagatgtgttaatttttgaacctaaagttttcggtgatgaccgtggcttcttttttgaaagttttagccaaaagg

SEQ ID NO: 207805 - DNA, 75 bp, synthetic construct
  source 1..75: mol_type = other DNA
tggcgctgcaagaactcgggccggtgtggattaagttcgggcagatgttatctacccgccgcgacctgttcccgc

SEQ ID NO: 207806 - DNA, 75 bp, synthetic construct
  source 1..75: mol_type = other DNA
atacatttgagccacattattttatacgcgtaaatgactttaatagcagcaatggaaaagatcatcactgggaaa

SEQ ID NO: 207807 - DNA, 75 bp, synthetic construct
  source 1..75: mol_type = other DNA
ccgactattatgatagcagtagtgaaggctgtttaatctggaatgatgagcaagttgggattgcatggccagtaa

SEQ ID NO: 207808 - DNA, 75 bp, synthetic construct
  source 1..75: mol_type = other DNA
gtgcgtgaaaatccgtggacgggcgtcggtatcggcgctgccatcggcgtagtgctgggcgtactgctgtcacgt

SEQ ID NO: 207809 - DNA, 75 bp, synthetic construct
  source 1..75: mol_type = other DNA
tattgatgcctttaaaggggatcatgcagaatctccattacttctcataacctctgcaattgccagcattttgcc

SEQ ID NO: 207810 - DNA, 75 bp, synthetic construct
  source 1..75: mol_type = other DNA
cgggagccttttttctctcggcctttatttgggcactgattgccgtgatcttctggcaagccggtggtggtgatt

SEQ ID NO: 207811 - DNA, 75 bp, synthetic construct
  source 1..75: mol_type = other DNA
cgaagtggaatcgacaggataaccgcgcaggttaactacctgcaggagtacatcaggacgcaatgccttcgatga

SEQ ID NO: 207812 - DNA, 75 bp, synthetic construct
  source 1..75: mol_type = other DNA
tgttgccggtacgattacgctcggcctgatgacgcagattaccaacgtttttggtcaggttcgcggtgctttcca

SEQ ID NO: 207813 - DNA, 75 bp, synthetic construct
  source 1..75: mol_type = other DNA
gttaagtgaattgctgtgcgaagaagaaatacttgaacaactcttaactgcaacatcagaaaaacaattagcgga

SEQ ID NO: 207814 - DNA, 75 bp, synthetic construct
  source 1..75: mol_type = other DNA
caacgtgatgtagcagaactcgacgccagatacacaaaggagcttgctgatgctaacgcgactatcgaaagtctt

SEQ ID NO: 207815 - DNA, 75 bp, synthetic construct
  source 1..75: mol_type = other DNA
tgggcgatggagaaagcccaggacttacagcagatgctgaactcaattattaccgtctccgaagtggaatcgaca

SEQ ID NO: 207816 - DNA, 75 bp, synthetic construct
  source 1..75: mol_type = other DNA
acgggattatttcgtcctcagagatcgaatcgcaatcaacgacaaaatgatcaggggactgcaggaatatattcg

SEQ ID NO: 207817 - DNA, 75 bp, synthetic construct
  source 1..75: mol_type = other DNA
gggtggcgcgtatcaccggagcttccgggcagatcccgattagcgccgcgcgtttctggtcgttggatttcctga

SEQ ID NO: 207818 - DNA, 75 bp, synthetic construct
  source 1..75: mol_type = other DNA
gaattagctgatgcgagagctgaaaatgaaacttttcgcgctgacgttgccgctggtcgtaagcgcctgcgtatc

SEQ ID NO: 207819 - DNA, 75 bp, synthetic construct
  source 1..75: mol_type = other DNA
aagaacagcgcgataaagccacatccatcatcgctgacatgcagaagcgtcaacgtgacgtagcagaactcgatg

SEQ ID NO: 207820 - DNA, 75 bp, synthetic construct
  source 1..75: mol_type = other DNA
taccgtgataacgccatcgcctacaaagagcagcgcgataaggccacatccacaatcgctgacatgcagaagcgt

SEQ ID NO: 207821 - DNA, 75 bp, synthetic construct
  source 1..75: mol_type = other DNA
gttaagtgaattactgtgcgaagaagaaatactcgaacaactattaacagcaacatcaaaaaaacaattagcgga

SEQ ID NO: 207822 - DNA, 75 bp, synthetic construct
  source 1..75: mol_type = other DNA
agattatcgccgaacttacccacggtggcgcggatgttgcgctcgattgttccggtaatgccgcaggtcgcttac

SEQ ID NO: 207823 - DNA, 75 bp, synthetic construct
  source 1..75: mol_type = other DNA
gtggtttttgcccgaactgccgtcgcggttttcctatttcttgtactggcgaaggaaaagcggcttacggctggc

SEQ ID NO: 207824 - DNA, 75 bp, synthetic construct
  source 1..75: mol_type = other DNA
gaagatggtgcgtttatcagttgcggcgttggtacagcgtatgaagggattttgcgcggcgaagtttccggcagt

SEQ ID NO: 207825 - DNA, 75 bp, synthetic construct
  source 1..75: mol_type = other DNA
cgggattatttcgttctcagagagcgcattgaaaccataactaaccaattgaatggcctgcaagagtatgtgaga

SEQ ID NO: 207826 - DNA, 75 bp, synthetic construct
  source 1..75: mol_type = other DNA
agagctgaaaatgaaactcttcgcgctgacgttgccgctggtcgtaagcgcctgcggatcaacgccacctgtcca

SEQ ID NO: 207827 - DNA, 75 bp, synthetic construct
  source 1..75: mol_type = other DNA
gtggccgcgtaacgccattacccatcgcttcacgctggaacaggcaggagatgcctatgcgctgatggcgagcgg

SEQ ID NO: 207828 - DNA, 75 bp, synthetic construct
  source 1..75: mol_type = other DNA
ttattaccgtctccgacgtggaatcgacaagataaccgcgcaggttaactacgtgcaggactacatcaggacgca

SEQ ID NO: 207829 - DNA, 75 bp, synthetic construct
  source 1..75: mol_type = other DNA
ttattaccgtctccgacgtggaatcgacaagataaccgcgcaggttaactacctgcaggagtacatcaggacgca

SEQ ID NO: 207830 - DNA, 75 bp, synthetic construct
  source 1..75: mol_type = other DNA
catcatcgctgatatgcagaagcgtcaacgtgatgtagcagaactcgacgccagatatacaaaggagcttgctga

SEQ ID NO: 207831 - DNA, 75 bp, synthetic construct
  source 1..75: mol_type = other DNA
gggattaaccaggtactgatcaaaatgaaatcctccggaatttgcggaagcgatgtccactatatctaccaccaa

SEQ ID NO: 207832 - DNA, 75 bp, synthetic construct
  source 1..75: mol_type = other DNA
acgggaagttgcggtgccgacaccagggattaaccaggtactgatcaaaatgaaatcttccggaatttgcggaag

SEQ ID NO: 207833 - DNA, 75 bp, synthetic construct
  source 1..75: mol_type = other DNA
ttattaccgtctccgaggtggaatcgacaagataaccgcgcaggttaactacctgcaggactacatcaggacgca

SEQ ID NO: 207834 - DNA, 75 bp, synthetic construct
  source 1..75: mol_type = other DNA
gtggccttcacggccaagatcgcctccggtctggataatctctactgggcgtcacagcgcaccggcgcgacggtt

SEQ ID NO: 207835 - DNA, 75 bp, synthetic construct
  source 1..75: mol_type = other DNA
gcgtagtagccattgtcgaggtcgacagcggtcagcttggcgtcgatagcgcgatggcggaattacagcaactgc

SEQ ID NO: 207836 - DNA, 75 bp, synthetic construct
  source 1..75: mol_type = other DNA
ccagctgcgttttcgcgtttcgctgggcaactattggcagtattgcccgatcctatcgtacggcgaaaacgacga

SEQ ID NO: 207837 - DNA, 75 bp, synthetic construct
  source 1..75: mol_type = other DNA
aattcttcaattttagactttcttgttttgggtgtgatcctttactattttgaaaataaaaggcaaaataaagat

SEQ ID NO: 207838 - DNA, 75 bp, synthetic construct
  source 1..75: mol_type = other DNA
gtggccttcacggctaagatcgcctccggcctggataatctttactgggcgtcacagcgcaccggcgcgacggtc

SEQ ID NO: 207839 - DNA, 75 bp, synthetic construct
  source 1..75: mol_type = other DNA
caaaatgcactggaaatcctcggtacattcatcgcgggtgtctgggtatccagggttctgggggctttcgggaaa

SEQ ID NO: 207840 - DNA, 75 bp, synthetic construct
  source 1..75: mol_type = other DNA
cgctgatgcagttatttagcttccgggatcataagtcgctttattcgctgctggcaaaaacggagcgaatggggt

SEQ ID NO: 207841 - DNA, 75 bp, synthetic construct
  source 1..75: mol_type = other DNA
caacattcctgagtcagtacaacgtcaagcatcgcccggacggactcatcacactacctggcggcaacgtgatcg

SEQ ID NO: 207842 - DNA, 75 bp, synthetic construct
  source 1..75: mol_type = other DNA
aaaccagcatgtgcaactggaggcaaaacaccgcgacgttttccgcttttacaccctcgatgaactgaaaaacct

SEQ ID NO: 207843 - DNA, 75 bp, synthetic construct
  source 1..75: mol_type = other DNA
tcattactcgtatgaaagagtacggtcagctgcggtttcgcgtttcgctgggtaattattttactggacctggca

SEQ ID NO: 207844 - DNA, 75 bp, synthetic construct
  source 1..75: mol_type = other DNA
aaagcgatggacaataacggcttgctgcggcgaacgctggcggcgtggtttcgccacaatgtgcaaccgctggca

SEQ ID NO: 207845 - DNA, 75 bp, synthetic construct
  source 1..75: mol_type = other DNA
gaccgctggcgcggctgaaagcgatggacaataacggcttgctgcgacgaacgctggcggcgtggtttcgtcaca

SEQ ID NO: 207846 - DNA, 75 bp, synthetic construct
  source 1..75: mol_type = other DNA
acgctgacttaaccggcttgaatatgagcgaatcatacattagagattgttctttcgataattgcacaattcaag

SEQ ID NO: 207847 - DNA, 75 bp, synthetic construct
  source 1..75: mol_type = other DNA
tatttcaccctcagagagcgaatcgtcacagtgacgaagcaggtcggctatctgcaggactacattaaagagcaa

SEQ ID NO: 207848 - DNA, 75 bp, synthetic construct
  source 1..75: mol_type = other DNA
gctgcagctcaacgcaaactgtcccgcgaacggaacgaccggctccagcggcatgggcgatgcttccggcccccg

SEQ ID NO: 207849 - DNA, 75 bp, synthetic construct
  source 1..75: mol_type = other DNA
aaaaagcagcttgatgatttgcagcgttgtgttcgcactggcaagtgtgggctgcacttcaacgccagatgtccc

SEQ ID NO: 207850 - DNA, 75 bp, synthetic construct
  source 1..75: mol_type = other DNA
cgattatcgggcatataccatatggactggtgattgcagccatcgtatggtcgttgatgggaaccggattgctgg

SEQ ID NO: 207851 - DNA, 75 bp, synthetic construct
  source 1..75: mol_type = other DNA
tgcgacggcttgagtcagcaggtgcagagattagccgggcaggtggaccgcttgagtcggttatttatcacgaac

SEQ ID NO: 207852 - DNA, 75 bp, synthetic construct
  source 1..75: mol_type = other DNA
taccgcgataacgccatcacctacaaagcgcagcgcgataaaaaagtcagtgagctgaaactggcgaatgccact

SEQ ID NO: 207853 - DNA, 75 bp, synthetic construct
  source 1..75: mol_type = other DNA
tatgtcacgcagaaactactcggccaccgcgatattaaggtgacgctcagctatattgaacacaatgtcgagatg

SEQ ID NO: 207854 - DNA, 75 bp, synthetic construct
  source 1..75: mol_type = other DNA
cgccattacctgctaaatgtgcgctgtatcaagccggtgagctggaatcactatatgcgccatatgcgagccttg

SEQ ID NO: 207855 - DNA, 75 bp, synthetic construct
  source 1..75: mol_type = other DNA
attcagagcgaaggcagcaaaagtcatgatgaacatatcgttcctattgcctcccggctgcggccctatctggag

SEQ ID NO: 207856 - DNA, 75 bp, synthetic construct
  source 1..75: mol_type = other DNA
aaaaagcagcttgatgatctgcagcgttgtgttcgcactggcaagtgtgggctgcacttcaatgcccgatgtcca

SEQ ID NO: 207857 - DNA, 75 bp, synthetic construct
  source 1..75: mol_type = other DNA
ccgctctggttatctgcatcatcgtctgcttgtcatgggctgttgataattaccgtgatgacgccatcgtctaca

SEQ ID NO: 207858 - DNA, 75 bp, synthetic construct
  source 1..75: mol_type = other DNA
agaaatcgaagtaggccgcgtctacaatggtaaagtgacccgaatcgttgactttggcgcatttgttgccatcgg

SEQ ID NO: 207859 - DNA, 75 bp, synthetic construct
  source 1..75: mol_type = other DNA
atcggcggcggtaaagaaggtctggtacacatctctcagatcgctgacaaacgcgttgagaaagtgaccgattac

SEQ ID NO: 207860 - DNA, 75 bp, synthetic construct
  source 1..75: mol_type = other DNA
attggtcacggtcgtctggcgaagcgcggtgtgctggcagtcatgccggatatggacaaattcccgtacaccgta

SEQ ID NO: 207861 - DNA, 75 bp, synthetic construct
  source 1..75: mol_type = other DNA
aattatttcaccctcagagatagactgataataatgcagaaacaactggaagggactcagcagtatattaaggaa

SEQ ID NO: 207862 - DNA, 75 bp, synthetic construct
  source 1..75: mol_type = other DNA
tgcgcttagtctggggctgaatcattaccgcgataacgccatcacctacaaagagcagcgcgataaaaaagccag

SEQ ID NO: 207863 - DNA, 75 bp, synthetic construct
  source 1..75: mol_type = other DNA
actttggcgcatttgttgccattggtggcggtaaagaaggtctggtccacatctctcaaatcgctgataaacgcg

SEQ ID NO: 207864 - DNA, 75 bp, synthetic construct
  source 1..75: mol_type = other DNA
catcgccattaaaggcaccattaaacaggcggtgatgcttggactggcggcaactatttcacatacggcggtggt

SEQ ID NO: 207865 - DNA, 75 bp, synthetic construct
  source 1..75: mol_type = other DNA
ttgcctttggcgggatggtgatcagcaaacgctttactgctcaatcagcagaaccgtggctccagttgatttccg

SEQ ID NO: 207866 - DNA, 75 bp, synthetic construct
  source 1..75: mol_type = other DNA
aactgtgctgctgatttgtattcaactgaaagccctcactctgggagcaactctggtcgttagtttcagtattgg

SEQ ID NO: 207867 - DNA, 75 bp, synthetic construct
  source 1..75: mol_type = other DNA
gaagctcgtctgagcgatgcttaccgcatcaccgacaaacaagagcgttatgcgcaggttgatgtcatcaaatct

SEQ ID NO: 207868 - DNA, 75 bp, synthetic construct
  source 1..75: mol_type = other DNA
atggacgcaggtgtgccaatcaaagccgctgttgcgggtatcgcaatggggctggtgaaagaaggcgacaactac

SEQ ID NO: 207869 - DNA, 75 bp, synthetic construct
  source 1..75: mol_type = other DNA
ggacgagctgaaagagagcaaactggatctggttgttgccggtactgaagccgctgttctgatggttgaatctga

SEQ ID NO: 207870 - DNA, 75 bp, synthetic construct
  source 1..75: mol_type = other DNA
attactgacatgcagatgcgccagcgtgatgttgctgcactggatgaaaaatacacgaaggagttagctaatgcg

SEQ ID NO: 207871 - DNA, 75 bp, synthetic construct
  source 1..75: mol_type = other DNA
agccgatgcgagagctgaaaatgaaactctgcgtgctgatgttgccgctggtcgtaagcgcctgcggctcaacgc

SEQ ID NO: 207872 - DNA, 75 bp, synthetic construct
  source 1..75: mol_type = other DNA
ttgatgctaaatactcgagggaattagccgatgcgagagctgaaaatgaaactctgcgtgctgatgttgccgctg

SEQ ID NO: 207873 - DNA, 75 bp, synthetic construct
  source 1..75: mol_type = other DNA
ctgcctgtcatgggctgttaatcattaccgtgataacgccatcgcctacaaagaacagcgtgataaaaaagtcag

SEQ ID NO: 207874 - DNA, 75 bp, synthetic construct
  source 1..75: mol_type = other DNA
aaataagatctttgtcgtagctgtcttcatacattgctttggtgacaaggaaaaactaaaacaagaaattaccgc

SEQ ID NO: 207875 - DNA, 75 bp, synthetic construct
  source 1..75: mol_type = other DNA
atgaaacatcatttaagcattggtaagcacgaatacgaaatcacagaaagcggatacacactggcaaaacagatc

SEQ ID NO: 207876 - DNA, 75 bp, synthetic construct
  source 1..75: mol_type = other DNA
ctgtctgtcatgggctgttaatcattaccgtgataacgcaatcgcctacaaagagcagcgcgataaaaaagtcag

SEQ ID NO: 207877 - DNA, 75 bp, synthetic construct
  source 1..75: mol_type = other DNA
aactcataacgctggtgaagagcctctgtgtacttgtcggcatttcattttttagtcatgctggttgccatttct

SEQ ID NO: 207878 - DNA, 75 bp, synthetic construct
  source 1..75: mol_type = other DNA
atgagcagggtaaccgttattatctccgctctggttatctgcattatcgcttgcctgtcatgggctgttaatcat

SEQ ID NO: 207879 - DNA, 75 bp, synthetic construct
  source 1..75: mol_type = other DNA
caacgccacctgtccaggctccgtgcgtgaagcccccaccacctccggcgtggataatgcaactggcccccaact

SEQ ID NO: 207880 - DNA, 75 bp, synthetic construct
  source 1..75: mol_type = other DNA
gctgctaatcattaccgtgataacgccatgacctacaaagagcagcgcgataaaaaagtcagtgaactgaagcag

SEQ ID NO: 207881 - DNA, 75 bp, synthetic construct
  source 1..75: mol_type = other DNA
cagacaccgctgaacgggattatttcatcctcagagaacggttgatgacaatgcagaagcagctggaaggggcac

SEQ ID NO: 207882 - DNA, 75 bp, synthetic construct
  source 1..75: mol_type = other DNA
ccgggaacgactggtaatgatgcaggcccaacttgaaggtgctcagcaatacataaccgagcagtgtttaaagta

SEQ ID NO: 207883 - DNA, 75 bp, synthetic construct
  source 1..75: mol_type = other DNA
tatcagagacggaatcatcagcgaccaggcagcattgagaatgcttcaggaatatatccgcactcagtgtattaa

SEQ ID NO: 207884 - DNA, 75 bp, synthetic construct
  source 1..75: mol_type = other DNA
tgcgcttagtctggggctgaatcattaccgtgataacgccataacctacaaagcgcagcgcgataaaaaagtcag

SEQ ID NO: 207885 - DNA, 75 bp, synthetic construct
  source 1..75: mol_type = other DNA
atgaaccgtattctgtatgtggtgattattgtactgctggtggcctgtggtgcgcttagtctggggctgaatcat

SEQ ID NO: 207886 - DNA, 75 bp, synthetic construct
  source 1..75: mol_type = other DNA
cgacagggagactcctctgcgcgagtgtgcggggataatcaaaaacgatacacaccggggtttaccgcgttaacg

SEQ ID NO: 207887 - DNA, 75 bp, synthetic construct
  source 1..75: mol_type = other DNA
atcaacgctatcatgacgttgatcgccttcctgccggtactggtaacgctctctgcgcatgtgccggagctgccg

SEQ ID NO: 207888 - DNA, 75 bp, synthetic construct
  source 1..75: mol_type = other DNA
gcgataaaaaagtcagtgagctggagctggcaaatgcaaccattactgatatgcagcagcgccagcgtgatgttg

SEQ ID NO: 207889 - DNA, 75 bp, synthetic construct
  source 1..75: mol_type = other DNA
aatgcaaccggcccccgactggcagacaccgctgaacgggattatttcactctcagagagcggttgatgctgatg

SEQ ID NO: 207890 - DNA, 75 bp, synthetic construct
  source 1..75: mol_type = other DNA
ggagttagctgatgcgaaagctgaaaataatgctctgcgtgctgatgatgtggccgctggtcgtcgccggttgcg

SEQ ID NO: 207891 - DNA, 75 bp, synthetic construct
  source 1..75: mol_type = other DNA
cctccggcgtggataatgcaaccggcccccgactggcagaagccgctgaacgggattatttcatcctcagagaac

SEQ ID NO: 207892 - DNA, 75 bp, synthetic construct
  source 1..75: mol_type = other DNA
tactcgagggaattagccgatgcgagagctgaaaatgaaactctgcgtgctgatgttgccgctggtcgtaagcgc

SEQ ID NO: 207893 - DNA, 75 bp, synthetic construct
  source 1..75: mol_type = other DNA
aaattactggaagagtatgttggtcagccgcaggttcgttcgcagatggagattttcatcaaagcagcgaaactg

SEQ ID NO: 207894 - DNA, 75 bp, synthetic construct
  source 1..75: mol_type = other DNA
gctttttgcagcgtacaccgcgcgggcgtatggcgacagtgcgggcgtggaaccacttcggcatcacgccaccag

SEQ ID NO: 207895 - DNA, 75 bp, synthetic construct
  source 1..75: mol_type = other DNA
tgttgatatgcattcagttgaaagccctgacactgggcgcaacactggtcgtcagtttcagcattggcctggcgt

SEQ ID NO: 207896 - DNA, 75 bp, synthetic construct
  source 1..75: mol_type = other DNA
ggcatgggcaatggagaaagcccaagacttacagcagatgctgaactcaattattaccgtctccgaagtgggatc

SEQ ID NO: 207897 - DNA, 75 bp, synthetic construct
  source 1..75: mol_type = other DNA
atgagcagggtaaccgcgattatctccgctctggttatttgcatcatcgtctgcctgtcgtgggctgttaatcat

SEQ ID NO: 207898 - DNA, 75 bp, synthetic construct
  source 1..75: mol_type = other DNA
aagcgcagcgcgataaaaaagccagagagctggagctggcaaacgcaaccattactgatatgcaggtgcgccagc

SEQ ID NO: 207899 - DNA, 75 bp, synthetic construct
  source 1..75: mol_type = other DNA
tcacctacaaagcgcagcgcgataaaaaagccagagagctggaacaggcgaatgccaccattactgacatgcagg

SEQ ID NO: 207900 - DNA, 75 bp, synthetic construct
  source 1..75: mol_type = other DNA
tgctggtggtctgtggtgtgcttagtctggggctgaatcattaccgcgataacgccatcacctacaaagcgcagc

SEQ ID NO: 207901 - DNA, 75 bp, synthetic construct
  source 1..75: mol_type = other DNA
aaaggcgggcgatctggcagcgatgctcactaaccttgaaccgcatgacgtgctgtttattgatgagatccaccg

SEQ ID NO: 207902 - DNA, 75 bp, synthetic construct
  source 1..75: mol_type = other DNA
atcaggtgccggatctgcaatatattgtcagtcgcagcgcacgctttatggggcttgagatgagtgatgacggcg

SEQ ID NO: 207903 - DNA, 75 bp, synthetic construct
  source 1..75: mol_type = other DNA
atcactatcaagacaaacggtcacaacaaaacggcagaatggagaaacaacagaacctccggtgttaatgttgtc

SEQ ID NO: 207904 - DNA, 75 bp, synthetic construct
  source 1..75: mol_type = other DNA
cagtggcgctgacgcggcggatctcggtgatttccggcggtcctggcaccggtaaaacgaccaccgtagcgaagt

SEQ ID NO: 207905 - DNA, 75 bp, synthetic construct
  source 1..75: mol_type = other DNA
tgccgcatcacaccacgctgccgctgtttgaaaaactggtgcagcgcgaaccggtaacgctggtgtcgctgatgg

SEQ ID NO: 207906 - DNA, 75 bp, synthetic construct
  source 1..75: mol_type = other DNA
gtatttccaggatgaaatgacaatgaaaagctacccggttaacattatcgtcggttcccgctatgaccggtacaa

SEQ ID NO: 207907 - DNA, 75 bp, synthetic construct
  source 1..75: mol_type = other DNA
atggtcagtgtcatcacgaatgacacgccatggagtcagaatgcggtcacatcagccggtatgctgaaaggtgtt

SEQ ID NO: 207908 - DNA, 75 bp, synthetic construct
  source 1..75: mol_type = other DNA
ggcacttatctggatccggcactcgtcaaacgtatcgaagttgtccgcggaccaaactccagtctgtacggcagt

SEQ ID NO: 207909 - DNA, 75 bp, synthetic construct
  source 1..75: mol_type = other DNA
tagatgaaatcccacaacaactcaaatccaagatcgtaaatttactaagtacctttgctaataatttctcagaaa

SEQ ID NO: 207910 - DNA, 75 bp, synthetic construct
  source 1..75: mol_type = other DNA
caattttgaaggctcgccaggtggcggctgatggtggcaagtatccacatatggctaaacagcttaaaggcggtc

SEQ ID NO: 207911 - DNA, 75 bp, synthetic construct
  source 1..75: mol_type = other DNA
taaaactgatgccaaagcgtcagacaagcaagctcaaaccgataagaagaacgctgataaggtggcaaaggcaga

SEQ ID NO: 207912 - DNA, 75 bp, synthetic construct
  source 1..75: mol_type = other DNA
cagtgacatcagtatacctgttggtcatggaggagtttctgccggatggcgtgctgaactttcggcagcagccac

SEQ ID NO: 207913 - DNA, 75 bp, synthetic construct
  source 1..75: mol_type = other DNA
cggatatttcggaacggatgccagaaactatattgccacgcgcgtggatatgaaacggatgcgttcttattctta

SEQ ID NO: 207914 - DNA, 75 bp, synthetic construct
  source 1..75: mol_type = other DNA
actctggataatgccttcaacaagcttgccatgaatggcaaaggggtgccgctttcaggcagaactgtcagtctt

SEQ ID NO: 207915 - DNA, 75 bp, synthetic construct
  source 1..75: mol_type = other DNA
gcgtaacgaacgtttctttaagtctctgttaaaaggtgattattacgaacgcctttttgagcaaacccaaaaagt

SEQ ID NO: 207916 - DNA, 75 bp, synthetic construct
  source 1..75: mol_type = other DNA
gatcaattatcagaatcgataaaagagttgcatcagcatggaatggtgtctggcgatcctcataaaggaaatttt

SEQ ID NO: 207917 - DNA, 75 bp, synthetic construct
  source 1..75: mol_type = other DNA
ttcggtggatcttctgtgggtaaatggtgaaaacttccgcaccttaaaagaggccaatttattacaaaccggctg

SEQ ID NO: 207918 - DNA, 75 bp, synthetic construct
  source 1..75: mol_type = other DNA
ttcggtggatctgctctgggtgaacggcgaaaacttccgcaccttaaaagaggccaatttactgcaaaccgactg

SEQ ID NO: 207919 - DNA, 75 bp, synthetic construct
  source 1..75: mol_type = other DNA
ttcgtggctgggatgacgggcgtggagtggatgcgggacgtgccttgctaagtcttcaggatgactcttttgaag

SEQ ID NO: 207920 - DNA, 75 bp, synthetic construct
  source 1..75: mol_type = other DNA
ctattggcgttccgttcttctggccgtccgctgcaatgccaaatactgtaatcgacagctggtccagtatggtgt

SEQ ID NO: 207921 - DNA, 75 bp, synthetic construct
  source 1..75: mol_type = other DNA
atgatatataataaaacgataaatgggttgaaagttttcataaaagataatgatcccttttatgagcaagttctg

SEQ ID NO: 207922 - DNA, 75 bp, synthetic construct
  source 1..75: mol_type = other DNA
caacttcctgctctcacccaatgcgcaactgcgtaaagcggatcccgctgtctggggcgatccttctgttctcga

SEQ ID NO: 207923 - DNA, 75 bp, synthetic construct
  source 1..75: mol_type = other DNA
taaaattcagcaatcaattaattcattgcatcaacatggtatggtttctggtgatcctcatcgtggtaacttcat

SEQ ID NO: 207924 - DNA, 75 bp, synthetic construct
  source 1..75: mol_type = other DNA
attaagaatgagattaaagatctcggttattatcttttagtttatcgtaaaaaaatacgtaatcttatgcgccgc

SEQ ID NO: 207925 - DNA, 75 bp, synthetic construct
  source 1..75: mol_type = other DNA
aaaggatttcccgccttcgcccgcgcggatggatgctctgctgaaagccgacacattgcgcctgtcgctgacctt

SEQ ID NO: 207926 - DNA, 75 bp, synthetic construct
  source 1..75: mol_type = other DNA
taatcctgcacatgcccagcaaaaaatcgccagtggcgatttgccggcaagcagttacagttttggttttaacga

SEQ ID NO: 207927 - DNA, 75 bp, synthetic construct
  source 1..75: mol_type = other DNA
cagcattaaaagaagcgccgaacgatgcgactttcgcccgtatcactgcgcccttgtggcaatatcttgatgcgc

SEQ ID NO: 207928 - DNA, 75 bp, synthetic construct
  source 1..75: mol_type = other DNA
gctccactggcataatcttgaaccggaaggcgttattctgagtcatgaacatctggatcaccggggagggctgga

SEQ ID NO: 207929 - DNA, 75 bp, synthetic construct
  source 1..75: mol_type = other DNA
caaatcgtcatatttcatggcattagtctgacctcgtttattgcaaatctattagcaattcccttggtgacattt

SEQ ID NO: 207930 - DNA, 75 bp, synthetic construct
  source 1..75: mol_type = other DNA
aatcaacccttgttcgaacttgaaggcccatcccgcgtgctgttaacgggcgaacgcactgcgctcaattttgtg

SEQ ID NO: 207931 - DNA, 75 bp, synthetic construct
  source 1..75: mol_type = other DNA
aaagtggcactcgcatcggcatcgcgctataacgcatggcgattgccctctaataaagttaagcatcgctatcaa

SEQ ID NO: 207932 - DNA, 75 bp, synthetic construct
  source 1..75: mol_type = other DNA
atcttgatcaccggggagggctggactcgatattacgtacctggccggcgttatgggtcagaagccccttaaacc

SEQ ID NO: 207933 - DNA, 75 bp, synthetic construct
  source 1..75: mol_type = other DNA
cattacggtcaaattactcatctacaaggtcgacgtatattccctgcgccaggcctcgtgctgtatggcgaatat

SEQ ID NO: 207934 - DNA, 75 bp, synthetic construct
  source 1..75: mol_type = other DNA
cgtttaccgggcgtgatgttgccgtgttctatgccattgcttgtcccagcgcgaaaccggaagagggtggctaca

SEQ ID NO: 207935 - DNA, 75 bp, synthetic construct
  source 1..75: mol_type = other DNA
aatgagttggaaagttcaaagaaagctgatattagtgcaagcatggtctctgtaggaaatagagaatataaacta

SEQ ID NO: 207936 - DNA, 75 bp, synthetic construct
  source 1..75: mol_type = other DNA
acgatgatgtgacaacctggtccattgagtgcgaaagcgcgggccaggtaactgtaaccgatccggttgccgcat

SEQ ID NO: 207937 - DNA, 75 bp, synthetic construct
  source 1..75: mol_type = other DNA
tgcgttctgccctgaaatacgcggtactttgcggcggcggcgctaaccaccgcctgggcctttccgacgccttcc

SEQ ID NO: 207938 - DNA, 75 bp, synthetic construct
  source 1..75: mol_type = other DNA
tgtctttattatcaatagataatgtgattgctgtgcctcaatggtattttgatgtaataggtataaatgacaaag

SEQ ID NO: 207939 - DNA, 75 bp, synthetic construct
  source 1..75: mol_type = other DNA
tcgatggttgtcggtgctttctcaccgaatatggatttccttattgcctgccgttttgtgatgggcgttgggctg

SEQ ID NO: 207940 - DNA, 75 bp, synthetic construct
  source 1..75: mol_type = other DNA
agatgctaagccgttactggcagcaagtgcaggcaacattgcttcaggtacctcaccatggcagtaatacctcat

SEQ ID NO: 207941 - DNA, 75 bp, synthetic construct
  source 1..75: mol_type = other DNA
agtttcagttggcaggatatttatttcagcacctccttctccatggaccagatgagcggacgcagctatggctac

SEQ ID NO: 207942 - DNA, 75 bp, synthetic construct
  source 1..75: mol_type = other DNA
gcaggtatcggcagtaccctttcgctggggcgcatgggtgctgtctctgccgacgtttctgtatcgcgtgctgaa

SEQ ID NO: 207943 - DNA, 75 bp, synthetic construct
  source 1..75: mol_type = other DNA
gtacgttaacgacgtcaaaggcggttcgaaatcgttcgttaaagtgatcatcctcgccgggatttttatcggtgt

SEQ ID NO: 207944 - DNA, 75 bp, synthetic construct
  source 1..75: mol_type = other DNA
ggctgtatcgtggcttactgctgcataccagaatataaatccagagaacaaacatgagaatctggactcgtccgg

SEQ ID NO: 207945 - DNA, 75 bp, synthetic construct
  source 1..75: mol_type = other DNA
ctctgctgatggattacagcctgaccggaaaccggaataattctgatgattattcatcgcggagcctgtacgcca

SEQ ID NO: 207946 - DNA, 75 bp, synthetic construct
  source 1..75: mol_type = other DNA
aaaaccggattgacctgcgtactgacggtctgccggaagatatcgtactggcagagacatcagcacgtactgtac

SEQ ID NO: 207947 - DNA, 75 bp, synthetic construct
  source 1..75: mol_type = other DNA
atggcagtaaaaattcatgcggtaaaaattgcgccaaaatatcttgatgcagtagtggctggtcagaaaaaggcc

SEQ ID NO: 207948 - DNA, 75 bp, synthetic construct
  source 1..75: mol_type = other DNA
ctccctgaaacaaagcatccctcttaatgaacagcgagatgaacttaaggaagatatgctccaggttgaatatcc

SEQ ID NO: 207949 - DNA, 75 bp, synthetic construct
  source 1..75: mol_type = other DNA
gatgacggaacgtatagcattcttttaaccggtgatattgaagcattcgctgaacaaaaaatgctaagtcgttac

SEQ ID NO: 207950 - DNA, 75 bp, synthetic construct
  source 1..75: mol_type = other DNA
ggtaagaaaaccgtcgaactgaacgaaaacggcgttccggcgcgcgcagcgtggatccagttcctgatcgtcatc

SEQ ID NO: 207951 - DNA, 75 bp, synthetic construct
  source 1..75: mol_type = other DNA
atattctgaccatcattttttataacgtcggcggtattgttatcttcctcggctttgcgtggtggaaatacagta

SEQ ID NO: 207952 - DNA, 75 bp, synthetic construct
  source 1..75: mol_type = other DNA
aacgactttcaacagtacttgcagagaacgaacttcctccctatctggcgcagttactgatgcgcttacatgccc

SEQ ID NO: 207953 - DNA, 75 bp, synthetic construct
  source 1..75: mol_type = other DNA
gattagtcgaattaacggcaaccggcgataaattcttttgtgcgggtggcgatattaaatcgtggtcagcctatt

SEQ ID NO: 207954 - DNA, 75 bp, synthetic construct
  source 1..75: mol_type = other DNA
aaacaagggatacgccagttactgccacattcgaaagacgttggcgtgccgattgcgctggagccactgcaccca

SEQ ID NO: 207955 - DNA, 75 bp, synthetic construct
  source 1..75: mol_type = other DNA
agcggtaatggtcgagcggcaagtcagcgcctggctgcatggcaattttcgttacgtggcacattctgactgggt

SEQ ID NO: 207956 - DNA, 75 bp, synthetic construct
  source 1..75: mol_type = other DNA
gaatgtagcacggtggtgagtgaacgtgtaggtgtggcgtttcacggtgtcgcggatggtaaaaatccggatgtg

SEQ ID NO: 207957 - DNA, 75 bp, synthetic construct
  source 1..75: mol_type = other DNA
taccgcccggctaaattagcgttgccacccgatcaggccgcagaaaaattaagattccgtcgcggcacaaattct

SEQ ID NO: 207958 - DNA, 75 bp, synthetic construct
  source 1..75: mol_type = other DNA
ctccagcagatcgctcgccagcttgccgccagtaacatgagcgtttccggtttgtgtcgtagcacctattacacc

SEQ ID NO: 207959 - DNA, 75 bp, synthetic construct
  source 1..75: mol_type = other DNA
tagccgtcaggcgtggattttacggcagatgtatcagttaggcggtgagtcgtttatgcaacaacaccagctgga

SEQ ID NO: 207960 - DNA, 75 bp, synthetic construct
  source 1..75: mol_type = other DNA
gcgatgagcagccacgacgcattaatggtagcgagcggcatcaccaccgtactggatgccgtggcgattggcgat

SEQ ID NO: 207961 - DNA, 75 bp, synthetic construct
  source 1..75: mol_type = other DNA
caccacgctgccgctgtttgaaaaactggtcgagcgagaacccgtgacgctggtgtcgctgatggatcactcacc

SEQ ID NO: 207962 - DNA, 75 bp, synthetic construct
  source 1..75: mol_type = other DNA
ggtgatttccggcggccctggcaccggtaaaacgaccaccgtggcgaagttgctggcagcgttaattcaaatggc

SEQ ID NO: 207963 - DNA, 75 bp, synthetic construct
  source 1..75: mol_type = other DNA
ctctgtatgccgatgagcgtattttgagtgcggcaatcgccacgcgcactgagcggcgcagtggtctggcggcat

SEQ ID NO: 207964 - DNA, 75 bp, synthetic construct
  source 1..75: mol_type = other DNA
caaggctttgcgccagttaccgctgaccgatgaacaaaagaaacgcattccggaagatgccagcactttgcaccg

SEQ ID NO: 207965 - DNA, 75 bp, synthetic construct
  source 1..75: mol_type = other DNA
aaaaacgtcaatgtaaggaaatcgcaggaaataacattctgcttgctggcaggtatcctgatgttcatggcaatg

SEQ ID NO: 207966 - DNA, 75 bp, synthetic construct
  source 1..75: mol_type = other DNA
tgatttcgacctggaaacaagcgcagccacaaaagaacaggccatatttcatgccagcgtgttgctgctacgaac

SEQ ID NO: 207967 - DNA, 75 bp, synthetic construct
  source 1..75: mol_type = other DNA
gtcattcccgtgacgtgccattatctcgccgggcacgcaatttcctccagatgctgcccgtggcgctgcacggag

SEQ ID NO: 207968 - DNA, 75 bp, synthetic construct
  source 1..75: mol_type = other DNA
cgctatgcgcaatttattacgtgacctgaaatccaatctgctggataacgcaacgtttcgccgtgaactggaaaa

SEQ ID NO: 207969 - DNA, 75 bp, synthetic construct
  source 1..75: mol_type = other DNA
ctgtggcaagggaaactcttcgcggatatcgggatatttctgacggtgtggcaaaacaggtcagggatgaagtca

SEQ ID NO: 207970 - DNA, 75 bp, synthetic construct
  source 1..75: mol_type = other DNA
cgttgttgtgcggtttattactggcgctgatgctttttctgttgccggaatatcaccgaaatattcatcaaccgc

SEQ ID NO: 207971 - DNA, 75 bp, synthetic construct
  source 1..75: mol_type = other DNA
actggcacaggcggctcagcggggtgaacgcgttcccacgccaggcgagctacccgcaaacattaatgaacgggc

SEQ ID NO: 207972 - DNA, 75 bp, synthetic construct
  source 1..75: mol_type = other DNA
gcttgaatttaaaagcctgaaagattttgaacccgaacaggtagcaaaaaaatatcccacagcttcgtgtattac

SEQ ID NO: 207973 - DNA, 75 bp, synthetic construct
  source 1..75: mol_type = other DNA
gttacgtggcacattctgactgggtcagtatggatcaaatctcgccgtggatgggactggcggtgattgccgcag

SEQ ID NO: 207974 - DNA, 75 bp, synthetic construct
  source 1..75: mol_type = other DNA
catgctgaagcgatatactcatctgcgggcgtatcagctggtcagcaagctcgatgcaaagcgtaaacagacctg

SEQ ID NO: 207975 - DNA, 75 bp, synthetic construct
  source 1..75: mol_type = other DNA
gctatttcagagataaaaatcagcagctctacgttatcttccatctggccctggaaacagcaatgcgacaggggg

SEQ ID NO: 207976 - DNA, 75 bp, synthetic construct
  source 1..75: mol_type = other DNA
actggcacaagccgcccagcgaggagagcgcgtccccactcctggcgaacttcctacaaacattgatgaacgggt

SEQ ID NO: 207977 - DNA, 75 bp, synthetic construct
  source 1..75: mol_type = other DNA
caaaagtgcctggcgaacagcacttcacgaactgaagatagaaaatttgcattttcatgacctccgtcatgaggc

SEQ ID NO: 207978 - DNA, 75 bp, synthetic construct
  source 1..75: mol_type = other DNA
cgtgttttaagaacaactaatgggacttcatgggcgggtgcttcagctgccggttgtttattcgcaataggttat

SEQ ID NO: 207979 - DNA, 75 bp, synthetic construct
  source 1..75: mol_type = other DNA
gtccgctgcaatgccaaatactgtaatcgacagctggtccagtatggtgtttttgaagttcaacggggcgaaatt

SEQ ID NO: 207980 - DNA, 75 bp, synthetic construct
  source 1..75: mol_type = other DNA
aatcccggatatgaactcttttcatatctcaacgtcacaaacaggatggtgcaaatttccaaatggactaatttt

SEQ ID NO: 207981 - DNA, 75 bp, synthetic construct
  source 1..75: mol_type = other DNA
cgtaccttaagccgcctgatgacgcctgctcacgggcatgtctggctggatggtgagcacattcaacattacgcc

SEQ ID NO: 207982 - DNA, 75 bp, synthetic construct
  source 1..75: mol_type = other DNA
gcgctgcgaactgccgcatcacaccacgctgccgctgtttgaaaaactggtgcagcgcgagccggtgacgctggt

SEQ ID NO: 207983 - DNA, 75 bp, synthetic construct
  source 1..75: mol_type = other DNA
cctcgcgcaagcatggcatgaacgtgctgatgggcgcgccgaatatcgtgcgcggcggttcgcactccggtaacg

SEQ ID NO: 207984 - DNA, 75 bp, synthetic construct
  source 1..75: mol_type = other DNA
ctaaccaccacggcaatggcggtaacgctgatgatatttcggctggtgtctccggttcacctcccaaaaactttg

SEQ ID NO: 207985 - DNA, 75 bp, synthetic construct
  source 1..75: mol_type = other DNA
ttgcctgatttacgtggtgagtttattcgtggctgggatgacgggcgtggtattgatgctgtacgtgccttgcta

SEQ ID NO: 207986 - DNA, 75 bp, synthetic construct
  source 1..75: mol_type = other DNA
ggctggtttaggtgccgcagcctcagaaacgcgtccgcgtaatattgcatttaactatatcgtgagggcagcctg

SEQ ID NO: 207987 - DNA, 75 bp, synthetic construct
  source 1..75: mol_type = other DNA
ggaatgccgggagatggcgtcatcaatattccgtcaattcgtcggctggttgaaaacgccggatttaatggcgct

SEQ ID NO: 207988 - DNA, 75 bp, synthetic construct
  source 1..75: mol_type = other DNA
atactgtcaattttcatcagaaaaatatgcagaaaaaaatcaatgcaccgaataagacgcaggttgcctgctacg

SEQ ID NO: 207989 - DNA, 75 bp, synthetic construct
  source 1..75: mol_type = other DNA
gccttcagctacgccgccaacaggctggctgaaatgcaacggggctgctttttcggctgaagaatacccggaact

SEQ ID NO: 207990 - DNA, 75 bp, synthetic construct
  source 1..75: mol_type = other DNA
gcgagaaggaaaaattatcgcccagggtgcgcctaaggagattgtcactgccgaattaattgagcgtatctatgg

SEQ ID NO: 207991 - DNA, 75 bp, synthetic construct
  source 1..75: mol_type = other DNA
ggtttgggagaagccagattctctggtcgtatgtcattcagcgaggagctaatgtcaatggtgcatggatacgct

SEQ ID NO: 207992 - DNA, 75 bp, synthetic construct
  source 1..75: mol_type = other DNA
tctggccatggaacgtcacctgggtattgccaacgaaataaaagattatggctactattcagtaatctacagaac

SEQ ID NO: 207993 - DNA, 75 bp, synthetic construct
  source 1..75: mol_type = other DNA
gctgactaatttgagtggaaaggatgtagctggtcttctcgcataccttggtttgggagaagcggcaaaacggga

SEQ ID NO: 207994 - DNA, 75 bp, synthetic construct
  source 1..75: mol_type = other DNA
tgaagtgattgaatttcctctgccagatcagatgcagttacgcgagttgctggcgttaaagctacgcggcattcg

SEQ ID NO: 207995 - DNA, 75 bp, synthetic construct
  source 1..75: mol_type = other DNA
gtccgccttgatgtattggtatcctcatttctgggtgaaacagccgcaaatctgcgtaaaatttttgattttatt

SEQ ID NO: 207996 - DNA, 75 bp, synthetic construct
  source 1..75: mol_type = other DNA
aaagtggtgcagatatcgaacgcattgttcgccgggccactaaacacatgatcctgcgtcatcaggaattcctga

SEQ ID NO: 207997 - DNA, 75 bp, synthetic construct
  source 1..75: mol_type = other DNA
gtctgcctaccgctttcacgactggagaataacgaggcgtcaaatccgctactggcaacctgcgtcagcgaaatc

SEQ ID NO: 207998 - DNA, 75 bp, synthetic construct
  source 1..75: mol_type = other DNA
aagctgtggagcacaaacagctacgcccgctggacgtgcagtttgccctgaccgtggcgggagatgaacatcctg

SEQ ID NO: 207999 - DNA, 75 bp, synthetic construct
  source 1..75: mol_type = other DNA
accacagcgcgaaaaggccttgtccagctcagcagcgccactaacagcacgtcagaaacgcaggctgccacacca

SEQ ID NO: 208000 - DNA, 75 bp, synthetic construct
  source 1..75: mol_type = other DNA
tagtcccgacccggttaaatttatatccagagccagtaatcctggcctcggcgcttcatttttagcgttaggctg

SEQ ID NO: 208001 - DNA, 75 bp, synthetic construct
  source 1..75: mol_type = other DNA
agacgctgactcatttgagtggaaaggatgttgccggtcttctcgcataccttggtttgggggaattggctctgg

SEQ ID NO: 208002 - DNA, 75 bp, synthetic construct
  source 1..75: mol_type = other DNA
attgtgttcaaagtcgacaaaccactgaatgcagcctttccttcagataccagcgtctcagcgttaatcattgga

SEQ ID NO: 208003 - DNA, 75 bp, synthetic construct
  source 1..75: mol_type = other DNA
gcgtcatgtaatgtcaccgggcactgctaccggaaatcagccatacgtgtggctaaaaatcgtcactcccaccga

SEQ ID NO: 208004 - DNA, 75 bp, synthetic construct
  source 1..75: mol_type = other DNA
catgcctgctggccgtgattccggcgcttaaccttgacaccagtgatacggcggcggtggccggccttgtgatga

SEQ ID NO: 208005 - DNA, 75 bp, synthetic construct
  source 1..75: mol_type = other DNA
gctgtggggatgggctgtgattgcccagttcgcgtattacgttgccggctttccctggtatgaggggaatatcct

SEQ ID NO: 208006 - DNA, 75 bp, synthetic construct
  source 1..75: mol_type = other DNA
ttgtccggcaccagttacggcgttgccgggctgctgatgctggcggtcagccaccggttgtaccgggcggaagac

SEQ ID NO: 208007 - DNA, 75 bp, synthetic construct
  source 1..75: mol_type = other DNA
tgtcaggttcagtctggctcctggtagtgttattcatcctgctcaacggtttcttcttttttgatgtctacccac

SEQ ID NO: 208008 - DNA, 75 bp, synthetic construct
  source 1..75: mol_type = other DNA
ctttctgtacggagcatgctggcgctctgtctttttccggtcgttgctctcgttaacctgcaggacagcgtgact

SEQ ID NO: 208009 - DNA, 75 bp, synthetic construct
  source 1..75: mol_type = other DNA
ccaccggctgtaccgggcggaagacagagcggaacgtctggcgctggtcgcctgtctgctggctgttattccggc

SEQ ID NO: 208010 - DNA, 75 bp, synthetic construct
  source 1..75: mol_type = other DNA
tttttgggtgtttttttaatctttttgggttttaaattcctatcgatgaacacgacacgtaacgattcactggct

SEQ ID NO: 208011 - DNA, 75 bp, synthetic construct
  source 1..75: mol_type = other DNA
gtgctgggctggaaatattcaggcaatcgtcatcacccgacggaaaagcccgttattgcccagttcgcatattat

SEQ ID NO: 208012 - DNA, 75 bp, synthetic construct
  source 1..75: mol_type = other DNA
ttgtcggttttggttcgggtaagttcagaagccgcgaatcccttgattcttgcgggattactggaccatgcaaac

SEQ ID NO: 208013 - DNA, 75 bp, synthetic construct
  source 1..75: mol_type = other DNA
cacgtaacgattcactggctgcccggaccgatacctggctgcagtcgttgctggtctggtcacccggacagcggg

SEQ ID NO: 208014 - DNA, 75 bp, synthetic construct
  source 1..75: mol_type = other DNA
cctggtggcgttccgcagagaccatgttgcttctggtgtcaacgccacgatgtttgaccgttatttgccattttc

SEQ ID NO: 208015 - DNA, 75 bp, synthetic construct
  source 1..75: mol_type = other DNA
ctttccgctgtttgccctggtgtgggggctgaatctgtcccgtcatgcgcatatccggcagtcagccattaaccg

SEQ ID NO: 208016 - DNA, 75 bp, synthetic construct
  source 1..75: mol_type = other DNA
ttaccgactgtaccgggcggaagacagagcggaacgtctggcgctgcttgcatgcctgctggccgttattccggt

SEQ ID NO: 208017 - DNA, 75 bp, synthetic construct
  source 1..75: mol_type = other DNA
attcccgccgtcacatgccgggaccatcaccgtgtatgaagattctcaacccggtacgctgaatgattttctcgg

SEQ ID NO: 208018 - DNA, 75 bp, synthetic construct
  source 1..75: mol_type = other DNA
ccggacaggccgcgtcgtcggctcagtcagcgtcttccagcgcaggaacggcatcgacaaagacccgtgaagcag

SEQ ID NO: 208019 - DNA, 75 bp, synthetic construct
  source 1..75: mol_type = other DNA
tcgtattatcaacgtattcagacacagtcagcaggtgctcatacccactcgctgtctggtactgcagcaagttct

SEQ ID NO: 208020 - DNA, 75 bp, synthetic construct
  source 1..75: mol_type = other DNA
tttcgtaatggcagcgggatactgaatggcggggatttccagaccacggccagtatgagcatgatttataactga

SEQ ID NO: 208021 - DNA, 75 bp, synthetic construct
  source 1..75: mol_type = other DNA
tccagatatgcgcggctggacaatcaagggcaaacccgccagtggccgggccgtattgtctcaggaacaggacgg

SEQ ID NO: 208022 - DNA, 75 bp, synthetic construct
  source 1..75: mol_type = other DNA
gtataaagagttggaaaataccattcccggctttacccgccctgatcatggctatcttgagagctgggcgcgtca

SEQ ID NO: 208023 - DNA, 75 bp, synthetic construct
  source 1..75: mol_type = other DNA
ccaaaattgatgatgtaaaagccattgcggatgcctggcaaattaccggcgaaaacgagcgggaattattacagc

SEQ ID NO: 208024 - DNA, 75 bp, synthetic construct
  source 1..75: mol_type = other DNA
aatgcctgactgaactggcttatgaactgggaatgaatgacgcaccgcgccgtaaggggccactctcccgcgctt

SEQ ID NO: 208025 - DNA, 75 bp, synthetic construct
  source 1..75: mol_type = other DNA
ctggcgctggtcgcctgcctgctggctgttattccggtgcttaaccttgccaccagtgatgcagcggcggtggcc

SEQ ID NO: 208026 - DNA, 75 bp, synthetic construct
  source 1..75: mol_type = other DNA
atctggataatatcggtactactccgctagcagagaaagtgaaaaccaaagcttgcgatctggtattaaaacaag

SEQ ID NO: 208027 - DNA, 75 bp, synthetic construct
  source 1..75: mol_type = other DNA
atctggataacatcggaacgactccgctggcagaaaaggtgaaaaccaaagcctgcgatctggtgttaaagcagg

SEQ ID NO: 208028 - DNA, 75 bp, synthetic construct
  source 1..75: mol_type = other DNA
ccagcgtcacggagtgtctgctggagctggccgatgcgctggggattgattacacccgcgcgaacaaaggggcat

SEQ ID NO: 208029 - DNA, 75 bp, synthetic construct
  source 1..75: mol_type = other DNA
aaaagccgcggcaaccgctgctttggttggcgggattatttcatcagcattggggatcttaggttcttttgcagc

SEQ ID NO: 208030 - DNA, 75 bp, synthetic construct
  source 1..75: mol_type = other DNA
gtgatgagcaggggtactggacgcatcctgcactgtcaggcagcggctgtgagagcgctgcagacattcatgact

SEQ ID NO: 208031 - DNA, 75 bp, synthetic construct
  source 1..75: mol_type = other DNA
gtgctcagaaacaggatattaagtgcgctccctggaatgggagggcgaaactctttgcaggaaaaaatatcggag

SEQ ID NO: 208032 - DNA, 75 bp, synthetic construct
  source 1..75: mol_type = other DNA
gttataagtctgtggagaacttccagcagggtaatttggatctgtataagcaagaagttcgcagagcgcaggatg

SEQ ID NO: 208033 - DNA, 75 bp, synthetic construct
  source 1..75: mol_type = other DNA
gatgatatcaccaaccgtctgcgtgagatgacctccgctgttcgcgatctcattgatgttcagaatcgtatgggg

SEQ ID NO: 208034 - DNA, 75 bp, synthetic construct
  source 1..75: mol_type = other DNA
cgatgcagaaaactatggctacaacaacgaaagcggccagccgtgcatctgatgttgctgatgatgttgcgagag

SEQ ID NO: 208035 - DNA, 75 bp, synthetic construct
  source 1..75: mol_type = other DNA
gaaaaactcagaattgcaggctgtgctcggtgtggcaaaagactccgccgaaatggccgcgctacgcaagcaggc

SEQ ID NO: 208036 - DNA, 75 bp, synthetic construct
  source 1..75: mol_type = other DNA
gctcaatggcggggacgggaagccgtgccgtgttaagccgcctgcaggcaccgacgggaaaagcatgggatgcac

SEQ ID NO: 208037 - DNA, 75 bp, synthetic construct
  source 1..75: mol_type = other DNA
acaggtgtgctgcatgacaataacatcagggggtcaatggcggggacgggtagcagtgccgttgtcacccgatta

SEQ ID NO: 208038 - DNA, 75 bp, synthetic construct
  source 1..75: mol_type = other DNA
gaagggcagattggaggatttctcctgggaggggagagagttagagtttcttatatgccagatacaggccgtttt

SEQ ID NO: 208039 - DNA, 75 bp, synthetic construct
  source 1..75: mol_type = other DNA
gtagcctggccggttatcaccggcatcaatgccatcatcgcggcagcaggcgcaatgggggcaatcttcacgacg

SEQ ID NO: 208040 - DNA, 75 bp, synthetic construct
  source 1..75: mol_type = other DNA
ggcgattagctggccggttgtggccgtggtgaccgccattgtcgccggggcgttgcttatccgtaaatactggga

SEQ ID NO: 208041 - DNA, 75 bp, synthetic construct
  source 1..75: mol_type = other DNA
ggatgtttctggccgggcgaggagcctttccgctgtttgccctggtgtgggggctgaatctgtcccgtcatgcga

SEQ ID NO: 208042 - DNA, 75 bp, synthetic construct
  source 1..75: mol_type = other DNA
acgtgctggctgaagagaagcaacaaccctattttcttaatacccttcagaccgtcgccagcgagcggcagtccg

SEQ ID NO: 208043 - DNA, 75 bp, synthetic construct
  source 1..75: mol_type = other DNA
agagcggaacgtctggcgctgttggcctgcctgctggccgttattccggctcttaaccttgccgccagtgatgca

SEQ ID NO: 208044 - DNA, 75 bp, synthetic construct
  source 1..75: mol_type = other DNA
agagcggaacgtctggcgctgttggcctgcctgctggccgttattccggcacttaaccttgcctccagtgatgca

SEQ ID NO: 208045 - DNA, 75 bp, synthetic construct
  source 1..75: mol_type = other DNA
aaccattttgtgctggcaaatcagtggctggaacaacgtggcgagacgccgattgactggatgccagtattaccg

SEQ ID NO: 208046 - DNA, 75 bp, synthetic construct
  source 1..75: mol_type = other DNA
cgtttctggcccggagactttttcccgacgttctatgcctgtcatctggctgtgctgggcgttctggcgctgtga

SEQ ID NO: 208047 - DNA, 75 bp, synthetic construct
  source 1..75: mol_type = other DNA
acgattcactggctgctcggaccgatacctggttgcagtcgttgctggtttggtcccccggacagcgggatatca

SEQ ID NO: 208048 - DNA, 75 bp, synthetic construct
  source 1..75: mol_type = other DNA
tacagcctctgaagcttcaactaaagcactggcgaaggcttccgaaagtattgcagatgcagcagatgatgcagc

SEQ ID NO: 208049 - DNA, 75 bp, synthetic construct
  source 1..75: mol_type = other DNA
gatatgacaacgacagcccgtgaccttaccgaccttattaatcgcctggggcaatcggctcgcttagctgggtaa

SEQ ID NO: 208050 - DNA, 75 bp, synthetic construct
  source 1..75: mol_type = other DNA
atgaatactatcgataataacaatgcggcaatcgcagttaattctgttttgagcagcacgactgacagcaccagt

SEQ ID NO: 208051 - DNA, 75 bp, synthetic construct
  source 1..75: mol_type = other DNA
agagcggaacgtctggcgctgttggcctgcctgctggctgttattccggcccttaaccttgccgccagtgatgca

SEQ ID NO: 208052 - DNA, 75 bp, synthetic construct
  source 1..75: mol_type = other DNA
agagcggaacgtctggcgctgttggcctgcctgctggcagttattccggcccttaaccttgcctccagtgatgca

SEQ ID NO: 208053 - DNA, 75 bp, synthetic construct
  source 1..75: mol_type = other DNA
atgacaacggataacacgaacacgacacgtaacgattcactggctgcccggaccgatacctggctgcagtcgttg

SEQ ID NO: 208054 - DNA, 75 bp, synthetic construct
  source 1..75: mol_type = other DNA
aacgccctgcacgatgcgcgttaccaggcaaaatacgtgtcagcaatctggcaaaaactgatcccgagtcaagct

SEQ ID NO: 208055 - DNA, 75 bp, synthetic construct
  source 1..75: mol_type = other DNA
cagtcgatgccgacaaattactggctgcctcgcgtggagaattcgttgaaggcatcagtaaccctgctgatccga

SEQ ID NO: 208056 - DNA, 75 bp, synthetic construct
  source 1..75: mol_type = other DNA
acatctcttgaagcagcctctcttcataaagatccttcatggtttcaatcaattaataaatgtggtgaaaatttt

SEQ ID NO: 208057 - DNA, 75 bp, synthetic construct
  source 1..75: mol_type = other DNA
cttattatctggttacagaatatggcggctggagaaatcgtaaacttattgatttttttatccgttttgcaacga

SEQ ID NO: 208058 - DNA, 75 bp, synthetic construct
  source 1..75: mol_type = other DNA
tctggcagcgactggagactaaaaaacgccggctggggatgggcaatccgaaactgattgtggatgcccggggct

SEQ ID NO: 208059 - DNA, 75 bp, synthetic construct
  source 1..75: mol_type = other DNA
gctgggtggaacaaacagtcgcgcaaaagccgaattaaacggagcattctttaacataacccgcccccgcaatat

SEQ ID NO: 208060 - DNA, 75 bp, synthetic construct
  source 1..75: mol_type = other DNA
ttgtttcgtgaaaaatacagagttggtataggtagggataaaaacgaaaacgttggtttgggggaaggctcggcg

SEQ ID NO: 208061 - DNA, 75 bp, synthetic construct
  source 1..75: mol_type = other DNA
tttcttctgttgtggggaataataaaaaaggagaagtgaagtggcctgaatttaacgaactgaggaatatctccc

SEQ ID NO: 208062 - DNA, 75 bp, synthetic construct
  source 1..75: mol_type = other DNA
ttctctcacgcaacaccccgtcatatcagcccggccgaattcgacaagttcatctccacctggatgaaaacagac

SEQ ID NO: 208063 - DNA, 75 bp, synthetic construct
  source 1..75: mol_type = other DNA
gaacaaaacagcccggatacgcaacaaaacggaccggaagagcaacagcctgggccagtaatgcaacaggaagtg

SEQ ID NO: 208064 - DNA, 75 bp, synthetic construct
  source 1..75: mol_type = other DNA
agggaaaacattccccccaggaatccagtcgatgccgacaaattactggcagcttctcgaggagaattcgttgaa

SEQ ID NO: 208065 - DNA, 75 bp, synthetic construct
  source 1..75: mol_type = other DNA
ttctacatttataggtgtcaatgcaaacaaatcttcctataagatcttgttaaggcgtggtggtatcagtcccaa

SEQ ID NO: 208066 - DNA, 75 bp, synthetic construct
  source 1..75: mol_type = other DNA
cggtattatatcaacgcttatagctcgaagagcaatcctcacagacctctttgtcgatgaacagtacgagcaact

SEQ ID NO: 208067 - DNA, 75 bp, synthetic construct
  source 1..75: mol_type = other DNA
tggaaaatctatactgcatttacttgttagcgatatggttctttatattataaaaaaacaagagttaactcatca

SEQ ID NO: 208068 - DNA, 75 bp, synthetic construct
  source 1..75: mol_type = other DNA
cctgcatggtcatgtgcccccttcacggtttattcctctcgcagaagagattggtgaaatcgaaaatattgggcg

SEQ ID NO: 208069 - DNA, 75 bp, synthetic construct
  source 1..75: mol_type = other DNA
tgtacttatattctggaattgccagagagggaatcaaagataagcgcagcgcggcgcaaaaccgctggaaaaaac

SEQ ID NO: 208070 - DNA, 75 bp, synthetic construct
  source 1..75: mol_type = other DNA
gtgagcaaaattgaccatcaggcactgcgtgaggcggcagagaaagcaacgtggggagactgggactcatataaa

SEQ ID NO: 208071 - DNA, 75 bp, synthetic construct
  source 1..75: mol_type = other DNA
tacccttggatttctgatggtaagatcattgaaagtattgatgaaaatgttgaaaaagctgtgctccttaagttt

SEQ ID NO: 208072 - DNA, 75 bp, synthetic construct
  source 1..75: mol_type = other DNA
tcattcatctggcgcaaaaccaggggaaagccattgcgcttaaaaccggagctgccgcggcgaaaagtgaatatc

SEQ ID NO: 208073 - DNA, 75 bp, synthetic construct
  source 1..75: mol_type = other DNA
gcgctatcaacggtgctgcctgcctgtgtactgggtgaccccatgcaggccatttttggctttcgggggaaccag

SEQ ID NO: 208074 - DNA, 75 bp, synthetic construct
  source 1..75: mol_type = other DNA
cggaacacgccgtccagatcctgaatcacaaagaagacatgatgcgtgcatgcatgctagtggtggtcaacaggc

SEQ ID NO: 208075 - DNA, 75 bp, synthetic construct
  source 1..75: mol_type = other DNA
atttgctcagaaccatggtgttaagaagggcctggaagcaaaagagtttgactatttatttttctcagatcagga

SEQ ID NO: 208076 - DNA, 75 bp, synthetic construct
  source 1..75: mol_type = other DNA
ccgttaaatattgaattgacacatatcgcagcgacacatactgccggaatattattgtgtacgttatgtttactg

SEQ ID NO: 208077 - DNA, 75 bp, synthetic construct
  source 1..75: mol_type = other DNA
ttagctggaagctgcagttgaatcagtggacgatttttttacgagccacgggcgctgtgctggatattaatgcct

SEQ ID NO: 208078 - DNA, 75 bp, synthetic construct
  source 1..75: mol_type = other DNA
taatcttgggtgcttttttttacgtcgaggagcaattgaaaactattacgggacgatagaagaaattggaactgg

SEQ ID NO: 208079 - DNA, 75 bp, synthetic construct
  source 1..75: mol_type = other DNA
acaccgttgagatcgccaaacgctgtaacgtaaccgtgcgtcttggtgaatacttcctgccgcagttcccgaccg

SEQ ID NO: 208080 - DNA, 75 bp, synthetic construct
  source 1..75: mol_type = other DNA
ggccgggccgtggttctggtgcagggtcactggtggcctacgcgctgaaaatcaccgacctcgatccgctggaat

SEQ ID NO: 208081 - DNA, 75 bp, synthetic construct
  source 1..75: mol_type = other DNA
tctctgttgatatagaagcctccggccccgttcccgggaaatacagtttgctcagtattggtgcatgtcttgtat

SEQ ID NO: 208082 - DNA, 75 bp, synthetic construct
  source 1..75: mol_type = other DNA
gagtcatgggatgttcatggtatgaaaccagatccagtgcgattgataaaattgtgagtccaagccaaaagggag

SEQ ID NO: 208083 - DNA, 75 bp, synthetic construct
  source 1..75: mol_type = other DNA
tcggttgctgatgccttagaagtcacagggttgacaatggcagaagcagaaaaaaaagggttgccgccagttgaa

SEQ ID NO: 208084 - DNA, 75 bp, synthetic construct
  source 1..75: mol_type = other DNA
ttgccgaaggtaaattccgcgaagatctcttctaccgacttaatgttatcccgataactctgccaccgctgcgtg

SEQ ID NO: 208085 - DNA, 75 bp, synthetic construct
  source 1..75: mol_type = other DNA
tgcaggataagtgccttacaaatctccggggtacagataccagcatcgtgaatttgtggcttgctcttaagcgat

SEQ ID NO: 208086 - DNA, 75 bp, synthetic construct
  source 1..75: mol_type = other DNA
tgcattgtcagagattaggattgctccatctgaacatttagaactgataattcagcatgctcttcctgggattaa

SEQ ID NO: 208087 - DNA, 75 bp, synthetic construct
  source 1..75: mol_type = other DNA
tgtttaatgacgcccagcgtcaggcggtggaagggatgaaaccgttctttggcgtgcaggcgggcgatctgttta

SEQ ID NO: 208088 - DNA, 75 bp, synthetic construct
  source 1..75: mol_type = other DNA
agtacccgcttgacgcggtgcatacggtgaagtttgccgagttgcttggtaagccagaatcggcagttaccaaga

SEQ ID NO: 208089 - DNA, 75 bp, synthetic construct
  source 1..75: mol_type = other DNA
gggttttcattccagagtttaatcgcgctgtacgtgaggcgttttataaccgaccggttgaacagcgtgatgcat

SEQ ID NO: 208090 - DNA, 75 bp, synthetic construct
  source 1..75: mol_type = other DNA
gtactcgatgtaccgatgactgctaatcataacgccctgaaggatgcaatatttcaggccaatttgttcagtgcg

SEQ ID NO: 208091 - DNA, 75 bp, synthetic construct
  source 1..75: mol_type = other DNA
catacttgtgatgaagcagtttctcatctgcgcttgaagctgggtaatacccgtaaccgcattgatactgccgag

SEQ ID NO: 208092 - DNA, 75 bp, synthetic construct
  source 1..75: mol_type = other DNA
ccaatgaatgggtttgtgaaagcgttctaatcgcaattaccgggctcaaaccaggcacaattcttcgggcccgga

SEQ ID NO: 208093 - DNA, 75 bp, synthetic construct
  source 1..75: mol_type = other DNA
ttttaatatagccgctgttggtgtgatgaagaatggtatgtcgaagagtttattttcttctgtgggaaatacagt

SEQ ID NO: 208094 - DNA, 75 bp, synthetic construct
  source 1..75: mol_type = other DNA
cgctctgtaccggataaaagcgtatcagatgattttatgaatgctgttctcagtaactgcaccacaagaatcgta

SEQ ID NO: 208095 - DNA, 75 bp, synthetic construct
  source 1..75: mol_type = other DNA
gacgtggacaggccgtggacgtatgccgttagcactgaaagaactgattgagaagggcgaagagctggaaagctt

SEQ ID NO: 208096 - DNA, 75 bp, synthetic construct
  source 1..75: mol_type = other DNA
gcggtgggtatcgtattgaaaacccaacgccctattatgtcactgttattggtctgggaggaagtgaaaagcagg

SEQ ID NO: 208097 - DNA, 75 bp, synthetic construct
  source 1..75: mol_type = other DNA
ctgtcttatattaatgactatggtggtcgcccggtactgtcgtttatctgtaatggcagccgttgctctgtgaaa

SEQ ID NO: 208098 - DNA, 75 bp, synthetic construct
  source 1..75: mol_type = other DNA
atgctgaaaatgaaaccggcgctgaaaaaaacgctgatggcggtagcgtgtctgagcacagtaccggcagcccag

SEQ ID NO: 208099 - DNA, 75 bp, synthetic construct
  source 1..75: mol_type = other DNA
acacattgcgctcgccagccacgatgacgccacgcacgcccacgtagcccaatcccatcagcttggcagcgtgat

SEQ ID NO: 208100 - DNA, 75 bp, synthetic construct
  source 1..75: mol_type = other DNA
catcacggtcgcaagcataaagaagatatggaagcgcgccatgaacagttaaccaaaggcggcaccatcctctga

SEQ ID NO: 208101 - DNA, 75 bp, synthetic construct
  source 1..75: mol_type = other DNA
aatgcccgcccgctttgaaccctaccgcctgaccggctggtcactcgaccatcaccttgataaccagctagtgcg

SEQ ID NO: 208102 - DNA, 75 bp, synthetic construct
  source 1..75: mol_type = other DNA
tggggaaatggagccaactttgacaacgtaattttacgccgttcatatgaacggcaggggatcccctgcccatgg

SEQ ID NO: 208103 - DNA, 75 bp, synthetic construct
  source 1..75: mol_type = other DNA
cagaaacgaaacagcctgaaccagaagagcaacaagaaccggaaaaagtctgcaccgcctgcggtcagaccggcg

SEQ ID NO: 208104 - DNA, 75 bp, synthetic construct
  source 1..75: mol_type = other DNA
gcggcaactgtcctgactgtggtgcggtgatgggcgacgcaacctaccaggaaacattcgatggagagagcctga

SEQ ID NO: 208105 - DNA, 75 bp, synthetic construct
  source 1..75: mol_type = other DNA
tagagcgtgaggggccgttctatttcctcttcgcagataaggacggagaaaaatgcggtcgcgcaaacaaacttt

SEQ ID NO: 208106 - DNA, 75 bp, synthetic construct
  source 1..75: mol_type = other DNA
ccgaatcggaacaaaacgaccagaaagcggaacaaaacagtccaaatgcgttacaaaacgagccagaaacgaaac

SEQ ID NO: 208107 - DNA, 75 bp, synthetic construct
  source 1..75: mol_type = other DNA
gaatattttgcccgaaaaaatggcacatacacgggcttaccgcaaaatgtggataccgctgaagattccgaacaa

SEQ ID NO: 208108 - DNA, 75 bp, synthetic construct
  source 1..75: mol_type = other DNA
tattatcaacgaactccatcttcccgagaaactggccggtgtgatgatggggacgccgccgggctggaaatcccg

SEQ ID NO: 208109 - DNA, 75 bp, synthetic construct
  source 1..75: mol_type = other DNA
atggcgcattcacctgtcattctgttgggcttgcagctgctaaatgctatttttattggcattctgggcgcatcg

SEQ ID NO: 208110 - DNA, 75 bp, synthetic construct
  source 1..75: mol_type = other DNA
aagcgccgcgccgtaaccgtcgcgatacgctgctgctgtttgtcatttgtacattgatgtggggctcgaacagcc

SEQ ID NO: 208111 - DNA, 75 bp, synthetic construct
  source 1..75: mol_type = other DNA
gcaatttctggagcaatatcctgctgctcaggactgcgcttataaatttcttgtctgcgaagataaacctggcat

SEQ ID NO: 208112 - DNA, 75 bp, synthetic construct
  source 1..75: mol_type = other DNA
accgcacaaaattctgaacaaccagaaccggtaaaagttaccgctgacgaagtaaagaaaattatgcaggcagcc

SEQ ID NO: 208113 - DNA, 75 bp, synthetic construct
  source 1..75: mol_type = other DNA
tggcgggcatcgtcgccgaaatctggaattatcacgctgtgttctggtttgcgatggtgatgattatcgccactc

SEQ ID NO: 208114 - DNA, 75 bp, synthetic construct
  source 1..75: mol_type = other DNA
cgtcgcgaatacaggcagacatggaaaacactggatgaagagctggcttacgctctctggcctggtgatattgat

SEQ ID NO: 208115 - DNA, 75 bp, synthetic construct
  source 1..75: mol_type = other DNA
tatcggggctctcaatggtgccattatcgcggcttctcccgatttgtcagaagctgccgcacgcctggaggcgct

SEQ ID NO: 208116 - DNA, 75 bp, synthetic construct
  source 1..75: mol_type = other DNA
ctggagcattatccggctgctcaggactgcgcttataaatttcttgtttgcgaggataaacccggtataccccgc

SEQ ID NO: 208117 - DNA, 75 bp, synthetic construct
  source 1..75: mol_type = other DNA
gtgattttacgccgttcatacgaacgacagggtatcccctgcccgtggcgctactgcaacgatcgcgatgtacgc

SEQ ID NO: 208118 - DNA, 75 bp, synthetic construct
  source 1..75: mol_type = other DNA
cactgtattacgaagccaaaaatgacaaagtcagaaaacgtcttgggattaaaggcggtttttactggcgcacag

SEQ ID NO: 208119 - DNA, 75 bp, synthetic construct
  source 1..75: mol_type = other DNA
ttgtctgtgaggataaacccggcataccccgccctgccctcgattcctgggatgctgaatatatgcaggaaaacc

SEQ ID NO: 208120 - DNA, 75 bp, synthetic construct
  source 1..75: mol_type = other DNA
acttttcattgctgaaaaaattgttccaggcaatgaacctctgccagatccccggacgtgcaggcgcactgctta

SEQ ID NO: 208121 - DNA, 75 bp, synthetic construct
  source 1..75: mol_type = other DNA
gagcgccacaatgcgctggatgatgcccgttaccaggcaaaatacgtttcaactatctggcaaaaactgctcccg

SEQ ID NO: 208122 - DNA, 75 bp, synthetic construct
  source 1..75: mol_type = other DNA
gtcattaaatggtggctgaagcaatcacgtgaagcgcagtctgccattatgaccgatgaaatcccgttagatgat

SEQ ID NO: 208123 - DNA, 75 bp, synthetic construct
  source 1..75: mol_type = other DNA
agcccggatacgcaacaaaacgggccagaagaacaacaaccagaaccagcagtgcaacaggaactggaaaaagtt

SEQ ID NO: 208124 - DNA, 75 bp, synthetic construct
  source 1..75: mol_type = other DNA
gtgaattttttgttcaggtctggggtaacggtgcaactttcgacaacgtgattttacgccgttcatatgaacggc

SEQ ID NO: 208125 - DNA, 75 bp, synthetic construct
  source 1..75: mol_type = other DNA
atgcaggcagccaatatcagccagcctgacgccgataagttacttgctgtatcgcgtggtgaatttgttgagggg

SEQ ID NO: 208126 - DNA, 75 bp, synthetic construct
  source 1..75: mol_type = other DNA
gatgacgcccgttaccaggcaaaatacgtttcagttatctggcaaaaactgatcccgagtcaggctgattcttaa

SEQ ID NO: 208127 - DNA, 75 bp, synthetic construct
  source 1..75: mol_type = other DNA
agtcagccagcctgacgccaatcagttgcttgctgcctctcgcggagaatttgttgcagggattagcgacccgaa

SEQ ID NO: 208128 - DNA, 75 bp, synthetic construct
  source 1..75: mol_type = other DNA
gcgcacaggaattactacaggaagacatggcaacattcggcggacatatcgttgaagcgtttatgaaaatgccag

SEQ ID NO: 208129 - DNA, 75 bp, synthetic construct
  source 1..75: mol_type = other DNA
tgtaccggtcgaacctgaatccgatccgatgaacgtcaattttgacaagctgtcccctgaagtacagaacgcagt

SEQ ID NO: 208130 - DNA, 75 bp, synthetic construct
  source 1..75: mol_type = other DNA
cccctgtcactgcagtcattcgtcgcgaatataagcagacatggaaaacactggatgacgaactggcctacgctc

SEQ ID NO: 208131 - DNA, 75 bp, synthetic construct
  source 1..75: mol_type = other DNA
actatcacgatagcgatggtgaaactggcgagacgacaaataccttaattaaggcgaacgatcatcacaaagcca

SEQ ID NO: 208132 - DNA, 75 bp, synthetic construct
  source 1..75: mol_type = other DNA
gcaattcctggagcattatccggctgctcaggactgcgcttataaatttcttgtttgcgaggataaacccggtat

SEQ ID NO: 208133 - DNA, 75 bp, synthetic construct
  source 1..75: mol_type = other DNA
ctattccggacgaacaggcaataaaggaagaaggtgccgtcgctgtagccactgccattgaagccggtgatgaac

SEQ ID NO: 208134 - DNA, 75 bp, synthetic construct
  source 1..75: mol_type = other DNA
ctggatactgctggcggagtcattgatcgtgacgtcattaaatggtggctgaagcaatcacgtgaagcgcagtct

SEQ ID NO: 208135 - DNA, 75 bp, synthetic construct
  source 1..75: mol_type = other DNA
gtgaatttgttgaggggattagcgcccctaatgatccgaaatgggtcaaggggatccagactcgcgattctgtga

SEQ ID NO: 208136 - DNA, 75 bp, synthetic construct
  source 1..75: mol_type = other DNA
cggtcatcacgttatcacatccaccagcaggacgtgtgaccatctaatgatcgaccttgaaaccatgggaaaaaa

SEQ ID NO: 208137 - DNA, 75 bp, synthetic construct
  source 1..75: mol_type = other DNA
atgcgctggatgatgcccgttaccaggcaaaatacgtttcaactatctggcaaaaactgatcccgaatcaggctg

SEQ ID NO: 208138 - DNA, 75 bp, synthetic construct
  source 1..75: mol_type = other DNA
acaaggagaacactggcggcaatcagcatcacaatagcgataatgaaactggcgagacggcagatcactcaatta

SEQ ID NO: 208139 - DNA, 75 bp, synthetic construct
  source 1..75: mol_type = other DNA
atcgcgaagactggaagcgcatttccgcatcaatgcgcaaacaacccgatgccgttcgctacgaccgtcagacta

SEQ ID NO: 208140 - DNA, 75 bp, synthetic construct
  source 1..75: mol_type = other DNA
agccagaaacgaaacagcctgaaccagtggcgcaacaggaagtggaaaaagtctgcaccgcctgcggtcagaccg

SEQ ID NO: 208141 - DNA, 75 bp, synthetic construct
  source 1..75: mol_type = other DNA
gaaaactcagcaggaaaaatcaaccccgccactgccgccattcatcgcgaatacaagcagacatggaaaacgctg

SEQ ID NO: 208142 - DNA, 75 bp, synthetic construct
  source 1..75: mol_type = other DNA
gataagttgcttgctgcatcacgtggtgaatttattgaagggattagcgacccgaatgatccgaaatgggttaag

SEQ ID NO: 208143 - DNA, 75 bp, synthetic construct
  source 1..75: mol_type = other DNA
gggcatcgtcgccgagatctggaattatcacgctgtgttctggtttgcgatggtgatgattatcgccactctgtt

SEQ ID NO: 208144 - DNA, 75 bp, synthetic construct
  source 1..75: mol_type = other DNA
ctgtcactgcagtcattcgtcgcgaatataagcagacatggaaaacactggatgacgaactggcctacgctctct

SEQ ID NO: 208145 - DNA, 75 bp, synthetic construct
  source 1..75: mol_type = other DNA
ccgctgacgaagtaaacaaaattatgcaggcagccaatatcagccagcctgacgccgataagttgcttgctgcat

SEQ ID NO: 208146 - DNA, 75 bp, synthetic construct
  source 1..75: mol_type = other DNA
gacgccattaaatggtggcttaagcaatcacgcgaagcgcaatctgccattatgaccgatgaaatcccgttagat

SEQ ID NO: 208147 - DNA, 75 bp, synthetic construct
  source 1..75: mol_type = other DNA
cgaagtgaacaaaattatgcaggcagccaatatcagcctgcctgacgccagtcagttgctcgctgcatcacgtgg

SEQ ID NO: 208148 - DNA, 75 bp, synthetic construct
  source 1..75: mol_type = other DNA
ctgattaagttcggtacatgtgaaaacatcaccgttgatatggcgattgacgctcaggaattactgcaggaagac

SEQ ID NO: 208149 - DNA, 75 bp, synthetic construct
  source 1..75: mol_type = other DNA
cagaaacgaaacaacctgagccagtagcgcaacaggaaccggaaaaagtctgcaccgcctgcggtcaaagcggtg

SEQ ID NO: 208150 - DNA, 75 bp, synthetic construct
  source 1..75: mol_type = other DNA
cacaaggagaacactgtcagcgatcagtatcacgccagcgataataaaactggcgagacagcaaatcccttaatt

SEQ ID NO: 208151 - DNA, 75 bp, synthetic construct
  source 1..75: mol_type = other DNA
cgacccgaatgatccgaaatgggtgaaggggattgaaacccgcgattctgtgaatcagaaccagcaagaaacgga

SEQ ID NO: 208152 - DNA, 75 bp, synthetic construct
  source 1..75: mol_type = other DNA
cagctttagctcatagtgataaaaatgaagtcaggaaggcttataatcgctcaacttatcttcaacagagaattg

SEQ ID NO: 208153 - DNA, 75 bp, synthetic construct
  source 1..75: mol_type = other DNA
tgctgttcccagtgtaaatatcggaaaagcgtttgagaaaccgcaaaagaaaaacaatgccaagcatacgcccgg

SEQ ID NO: 208154 - DNA, 75 bp, synthetic construct
  source 1..75: mol_type = other DNA
agaacatgccgagcatccgcccagatcagttaccacaagtgatgcaaacaatgagaaatgccaacattattttgc

SEQ ID NO: 208155 - DNA, 75 bp, synthetic construct
  source 1..75: mol_type = other DNA
acttgctgatgcccgagggctaagagcggattaccttgccctattagccaacggaatcgacccgcaaattcaagc

SEQ ID NO: 208156 - DNA, 75 bp, synthetic construct
  source 1..75: mol_type = other DNA
tgaagtaagaaaagcatacaatcgcaccacctatctgccacagcgaataacacttatgaattggtggggagattt

SEQ ID NO: 208157 - DNA, 75 bp, synthetic construct
  source 1..75: mol_type = other DNA
gaggcctcaggtgctcggtgggcagagatcgatctcgaagcaaagctttggaccattccagccaaacgaatgaag

SEQ ID NO: 208158 - DNA, 75 bp, synthetic construct
  source 1..75: mol_type = other DNA
tgcgggaatttatcgacgaaaactccggtgaatttttgttcaggtctggggtaatggggccaacttcgacaacgt

SEQ ID NO: 208159 - DNA, 75 bp, synthetic construct
  source 1..75: mol_type = other DNA
cgtctttaccgataaggacggggaaaaatacggcagggcaaacaaactttctggcctggacaaggcgctggctgc

SEQ ID NO: 208160 - DNA, 75 bp, synthetic construct
  source 1..75: mol_type = other DNA
gaatatatgcaggaaaaccgctgggatgaggaatccgcttcctttattccggtcgaaccagaatccgatccgatg

SEQ ID NO: 208161 - DNA, 75 bp, synthetic construct
  source 1..75: mol_type = other DNA
tggcgacattagcgttacagatattaaagctcacacactggttcaggccgtccaaccggttcaggccagaggagc

SEQ ID NO: 208162 - DNA, 75 bp, synthetic construct
  source 1..75: mol_type = other DNA
gaagcggctgaagctctctgggaagaggtagacatagaagcgcgagagtggaagattcctgcagcacgcatgaaa

SEQ ID NO: 208163 - DNA, 75 bp, synthetic construct
  source 1..75: mol_type = other DNA
agatcgatttagaatccaaactttggagaattcctgctgaaaggatgaaagcaaagcgcgaacatatagttcctt

SEQ ID NO: 208164 - DNA, 75 bp, synthetic construct
  source 1..75: mol_type = other DNA
tgaagtgcgaaaagcttataatcgcgcgacatatatcaatgctagaaaagaaattatgaattggtggggaaattg

SEQ ID NO: 208165 - DNA, 75 bp, synthetic construct
  source 1..75: mol_type = other DNA
gaccagcacttaatcacgctcgcgcaaggcatggatccacaacagcagctggagcaagcgtcagtacaacgccag

SEQ ID NO: 208166 - DNA, 75 bp, synthetic construct
  source 1..75: mol_type = other DNA
ccgatgaacgtcaattttgacaagctgtcccctgaagtacagaacgcagtcctggttaaattcgacacatgcgaa

SEQ ID NO: 208167 - DNA, 75 bp, synthetic construct
  source 1..75: mol_type = other DNA
taagaacgattgttgccctggggctggtgatggatttcgatgctcgaagtgtcatcacatttgagggtgaacgcc

SEQ ID NO: 208168 - DNA, 75 bp, synthetic construct
  source 1..75: mol_type = other DNA
cagcgcattaacgaaataatgatttatgcagtcaacaccggcctgattgatgctaaccctgcatcaggtgttgga

SEQ ID NO: 208169 - DNA, 75 bp, synthetic construct
  source 1..75: mol_type = other DNA
agagcaagcatcagagcaacgtcagattgagctggatagcattttctcaactgtcgccgccaactggttcaaaat

SEQ ID NO: 208170 - DNA, 75 bp, synthetic construct
  source 1..75: mol_type = other DNA
atggcttttgagaaacccaaaaagcaaaatatgcccacgctacggccagaagaattacctaagcttatgcgttct

SEQ ID NO: 208171 - DNA, 75 bp, synthetic construct
  source 1..75: mol_type = other DNA
ctgctcttgcacatagtgataaaaatgaagtgcgcagagcatataatcgttcaacttaccttgagcaacgaatag

SEQ ID NO: 208172 - DNA, 75 bp, synthetic construct
  source 1..75: mol_type = other DNA
gaacaacgtatagacttgatgaattggtggggtgaatttgtgcacaatcgccaccgcctcatgcaagcgatttaa

SEQ ID NO: 208173 - DNA, 75 bp, synthetic construct
  source 1..75: mol_type = other DNA
ttagtcatgtcaaatctgtctgttccgactcgctgtctaatcgaatggcaactcctgacccttgtgcgcccttct

SEQ ID NO: 208174 - DNA, 75 bp, synthetic construct
  source 1..75: mol_type = other DNA
gatcgacattcataaagatcccgtggcgctgaacaaatacatcactgaatacctgactacaaagggcctatttga

SEQ ID NO: 208175 - DNA, 75 bp, synthetic construct
  source 1..75: mol_type = other DNA
ggaatgatcctaaacaacctatgaatagccaaactgctaatgctgctcttaaaaggattggttatggcggtaaac

SEQ ID NO: 208176 - DNA, 75 bp, synthetic construct
  source 1..75: mol_type = other DNA
atggcatttgagaaacctaaaaagcaaaacatgccgacattgcggccagaagaactgccaaagttaatgcgatca

SEQ ID NO: 208177 - DNA, 75 bp, synthetic construct
  source 1..75: mol_type = other DNA
aaattaacgctatgtatccggaacgcaaactgttcgctatcggatgggttaaacacaaatgtaagccgggtacca

SEQ ID NO: 208178 - DNA, 75 bp, synthetic construct
  source 1..75: mol_type = other DNA
acacgtctgttgttgatctcgcccgcgccagagccaatcaacagcacactgaaaattcaacaggaaaaatcagcc

SEQ ID NO: 208179 - DNA, 75 bp, synthetic construct
  source 1..75: mol_type = other DNA
cgaaggtgagcgccataatgcacttgatgacgcccgttaccaggcaaaatacgtttcagttatctggcaaaaact

SEQ ID NO: 208180 - DNA, 75 bp, synthetic construct
  source 1..75: mol_type = other DNA
agggccaggcggtgaagggcaatcagctgttgcccgtctcactggtgaaaagaaaaaccaccctggcgcccaata

SEQ ID NO: 208181 - DNA, 75 bp, synthetic construct
  source 1..75: mol_type = other DNA
ggcggagctgaattacattcccaaccgcgtggcacaacaactggcgggcaaacagtcgttgctgattggcgttgc

SEQ ID NO: 208182 - DNA, 75 bp, synthetic construct
  source 1..75: mol_type = other DNA
cttcatgcgccttcacaaattgttgcggcaattaaatcccgcgccgatcaactcggtgccagcgtagtggtatca

SEQ ID NO: 208183 - DNA, 75 bp, synthetic construct
  source 1..75: mol_type = other DNA
ctgcacgatgcgcgttaccaggcaaaatacgtttcagctatctggcaaaaactgatcccgagtcaggctgatttt

SEQ ID NO: 208184 - DNA, 75 bp, synthetic construct
  source 1..75: mol_type = other DNA
caggaaccggaaatagcctgcaatgcctgcggccagactggcggggataactgccctgactgtggtgcggtgatg

SEQ ID NO: 208185 - DNA, 75 bp, synthetic construct
  source 1..75: mol_type = other DNA
tgcactggatgatgcccgccaccaggcaaaatacgtttcagctatctggcaaaaactgatcccgaatcaggctga

SEQ ID NO: 208186 - DNA, 75 bp, synthetic construct
  source 1..75: mol_type = other DNA
cacgcgaagcgcaatctgccattatgaccgatgaaatcccgttagatgatgcactgttacaattgcgagaattta

SEQ ID NO: 208187 - DNA, 75 bp, synthetic construct
  source 1..75: mol_type = other DNA
agtgaaactggcgaggcgtcagatcccttaattaaggtgaacggtcatcataatctcacatccaccagcagagcg

SEQ ID NO: 208188 - DNA, 75 bp, synthetic construct
  source 1..75: mol_type = other DNA
gaacaaaacagcccaaatacgcaacaaaacgagccagaaacgaaacaacctgagccagtagcgcaacaggaaccg

SEQ ID NO: 208189 - DNA, 75 bp, synthetic construct
  source 1..75: mol_type = other DNA
gcaattcctggaacataatccggctgctcaggactgcgcttataaatttcttgtctgcgaggataaacccggtat

SEQ ID NO: 208190 - DNA, 75 bp, synthetic construct
  source 1..75: mol_type = other DNA
tgaaggctcgctcctgctgtgggtgctgctgatgagcggctggacctttgcggtagcgatttttagtcagcgtat

SEQ ID NO: 208191 - DNA, 75 bp, synthetic construct
  source 1..75: mol_type = other DNA
ggtgacagattttgtattgttaacgatcctgaattcagaaaggaaattaatgatgcgcttaatatttgtcagcaa

SEQ ID NO: 208192 - DNA, 75 bp, synthetic construct
  source 1..75: mol_type = other DNA
tgactacaaagggcgtgtttgaagatgaaggaagaaatcagagcgcaactgatactctctcgtcgccagtaccag

SEQ ID NO: 208193 - DNA, 75 bp, synthetic construct
  source 1..75: mol_type = other DNA
tgggggcagtaaaaataaaacccagtgaaaatagcctgcttaaattaggtcgcttcgggacggattatagttatg

SEQ ID NO: 208194 - DNA, 75 bp, synthetic construct
  source 1..75: mol_type = other DNA
tattgatctgtggggaatgtggcgttcacgagtatttttatggactgattcaacaaccggtattcgtgatgaagg

SEQ ID NO: 208195 - DNA, 75 bp, synthetic construct
  source 1..75: mol_type = other DNA
ataccggcaccaatctgccagcgcagatcgatctttatgccgttgatggcgacgagtacaaattcctctgtatcg

SEQ ID NO: 208196 - DNA, 75 bp, synthetic construct
  source 1..75: mol_type = other DNA
gtacgcacaatcgttgagctggggaaagccatagacttcgatgccagaacggctattccattcgaaggtgagcgc

SEQ ID NO: 208197 - DNA, 75 bp, synthetic construct
  source 1..75: mol_type = other DNA
tactacaacgatcgcgatgtacgcacaatcgttgagctggggaaagccatagacttcgatgccagaactgctacc

SEQ ID NO: 208198 - DNA, 75 bp, synthetic construct
  source 1..75: mol_type = other DNA
tacaacgatcgcgatgtacgcacaatcgttgagctggggaaagccatagacttcgatgccagaacggctattcca

SEQ ID NO: 208199 - DNA, 75 bp, synthetic construct
  source 1..75: mol_type = other DNA
catgaatcggaacggaactaccaaaaagcggaacaaaacagtccaaatgcgttacaaaacgagccagaaacgaaa

SEQ ID NO: 208200 - DNA, 75 bp, synthetic construct
  source 1..75: mol_type = other DNA
gcaaaaacggtacatactcaggttcacaacaaaatactggtgcatctgacacgaccgcacaaccagggccggtaa

SEQ ID NO: 208201 - DNA, 75 bp, synthetic construct
  source 1..75: mol_type = other DNA
aagccatagacttcgatgccagaacggctattccattcgaaggtgagcgccataatgcacttgatgacgcccgtt

SEQ ID NO: 208202 - DNA, 75 bp, synthetic construct
  source 1..75: mol_type = other DNA
tttcgatccacaaaccggagagcaggggcctgaattcagcaaaataattgatatgggtacatgtggcggcactgt

SEQ ID NO: 208203 - DNA, 75 bp, synthetic construct
  source 1..75: mol_type = other DNA
cgatattcatttcctatagcgatgttctatttagcatatatgccgcagagtttatccgccggactcatacggtcg

SEQ ID NO: 208204 - DNA, 75 bp, synthetic construct
  source 1..75: mol_type = other DNA
ctgctggcgacgctgaatctgaagctggaaccggcggatgattttcgtgatgagccggtgaagttaacggcgtga

SEQ ID NO: 208205 - DNA, 75 bp, synthetic construct
  source 1..75: mol_type = other DNA
tggctgcaacttattccgaaactctgaatatgactgtcttcggtgatgactttatcgcgaacaaagctagaaatt

SEQ ID NO: 208206 - DNA, 75 bp, synthetic construct
  source 1..75: mol_type = other DNA
gtgctggaagaggatatcttaatatcgagttattggatgaaaatccagtagctgaaaaattccgctatttacatg

SEQ ID NO: 208207 - DNA, 75 bp, synthetic construct
  source 1..75: mol_type = other DNA
gacgaactggttgttgatgctatttctcttaagaatcctggcttacacatatcattgttaaaaaagatgagtttg

SEQ ID NO: 208208 - DNA, 75 bp, synthetic construct
  source 1..75: mol_type = other DNA
tatgttcatcgacagaagctggttaatgatggcattcgctactggaaaagaaagataagaaacctgggacaagct

SEQ ID NO: 208209 - DNA, 75 bp, synthetic construct
  source 1..75: mol_type = other DNA
atccaatggtaatcaaaaatgttctcaggttggctttatggactggatgccgaaccggggagttatgccagctct

SEQ ID NO: 208210 - DNA, 75 bp, synthetic construct
  source 1..75: mol_type = other DNA
attatctacgctgtcagtgaagaagatgacgctaaaaagatttcggaaaagctgggctatatcaccaccaaatcg

SEQ ID NO: 208211 - DNA, 75 bp, synthetic construct
  source 1..75: mol_type = other DNA
cgatgctctgaccaaaatcagggaatatcacgaaacggaagatgaacagcgttcaagcattgatggttctttccg

SEQ ID NO: 208212 - DNA, 75 bp, synthetic construct
  source 1..75: mol_type = other DNA
taatcctggtaatggtggaaggcagtttattagaacgtatgcagacaatcgatggaataataatttactatcgct

SEQ ID NO: 208213 - DNA, 75 bp, synthetic construct
  source 1..75: mol_type = other DNA
atatggaaattagccggtcatcgacaaaaattaacttagataatctcggtttattaaccatgcaggccaacatta

SEQ ID NO: 208214 - DNA, 75 bp, synthetic construct
  source 1..75: mol_type = other DNA
atgagatagcagaggccgtattggggcatacacgtggcggcgttgaagggatctacaatttgtataagtatgatg

SEQ ID NO: 208215 - DNA, 75 bp, synthetic construct
  source 1..75: mol_type = other DNA
agatggttctaatcttaaactattattacctaagccggttagcggtggccgatttgtaactaatgatggttctgt

SEQ ID NO: 208216 - DNA, 75 bp, synthetic construct
  source 1..75: mol_type = other DNA
cgcatcgcggcgaaccgggaaccggagaaattaattatgattatctctttaaggtaatcgaaaattcggtagtga

SEQ ID NO: 208217 - DNA, 75 bp, synthetic construct
  source 1..75: mol_type = other DNA
tgctgcaggtaccagaattgaacagattgaactgaaacgcctgacagtaaaagacctgaagcaggtgcgcaaaat

SEQ ID NO: 208218 - DNA, 75 bp, synthetic construct
  source 1..75: mol_type = other DNA
ccttcagtcaaaaggtaaagaccttggtgttcatggtgaccgagacttagtcctgagagatcccctcataatttc

SEQ ID NO: 208219 - DNA, 75 bp, synthetic construct
  source 1..75: mol_type = other DNA
ctgaagaggtgttctcagttctgttcgacaacccgttcctgcataccaccacctttggcggcaacccgctggcct

SEQ ID NO: 208220 - DNA, 75 bp, synthetic construct
  source 1..75: mol_type = other DNA
gagaacgtacagccggatatcctctgccttgccaaagcgctcggcggcggcgtgatgccgattggcgcaaccatc

SEQ ID NO: 208221 - DNA, 75 bp, synthetic construct
  source 1..75: mol_type = other DNA
atgttacgtttctctgctaatttatcgatgttatttggcgaatatgattttctcagccgttttgagaaagccgct

SEQ ID NO: 208222 - DNA, 75 bp, synthetic construct
  source 1..75: mol_type = other DNA
taaggttatctacggtaacaacagcctgaatgcatctggtcaaaatgctgaagtatgggcagctggtctgaaata

SEQ ID NO: 208223 - DNA, 75 bp, synthetic construct
  source 1..75: mol_type = other DNA
aaggcaaccgtgctgaatctcaaggttcttccaaagacaaaacccgtcttgcatttgcaggcctgaaatttggtg

SEQ ID NO: 208224 - DNA, 75 bp, synthetic construct
  source 1..75: mol_type = other DNA
atcattgttaaaaaaagatgagtttgcttatgatctttcagctctgaatgttcaggatagtccatggttaattgt

SEQ ID NO: 208225 - DNA, 75 bp, synthetic construct
  source 1..75: mol_type = other DNA
gattatgaaggatttggcgttgctgcaacctatgcaaaatctgaccgtactgatgggcaggtatcctatgctaaa

SEQ ID NO: 208226 - DNA, 75 bp, synthetic construct
  source 1..75: mol_type = other DNA
cagccagaaagtaaagtgcccggactcgactatttcgattcaaaaattgacgacgccttcgggaattatttcagt

SEQ ID NO: 208227 - DNA, 75 bp, synthetic construct
  source 1..75: mol_type = other DNA
tcgaaagggaaagaacttggccattacggcgatcaggatctgattgagtacattgatgtcggtgcgacatattac

SEQ ID NO: 208228 - DNA, 75 bp, synthetic construct
  source 1..75: mol_type = other DNA
ggctggtgaaggatgtcgatgattttgttgcgtcagcggtcgttttatatgaccagataaatcgcggcggcccgg

SEQ ID NO: 208229 - DNA, 75 bp, synthetic construct
  source 1..75: mol_type = other DNA
tgtcgcagtggcaatcgccggtttcaatcagatgaaccgtggtggtccggcgggaaatgccctggtgatgcacta

SEQ ID NO: 208230 - DNA, 75 bp, synthetic construct
  source 1..75: mol_type = other DNA
gctgaaataacccgggcttattttgagctgggtatgacgttcccggagctatatgacgacaggcatccggaagcg

SEQ ID NO: 208231 - DNA, 75 bp, synthetic construct
  source 1..75: mol_type = other DNA
ctggctcgcaatacccagaaaattttccgctggatagagaaagacacccctgatgcagttgaaaaaattcaggcg

SEQ ID NO: 208232 - DNA, 75 bp, synthetic construct
  source 1..75: mol_type = other DNA
tgatgcggttgaaaaaattcaggcgttgttacctgcgatcgaaaaggcaatgccgcctctgctggtggcccgtat

SEQ ID NO: 208233 - DNA, 75 bp, synthetic construct
  source 1..75: mol_type = other DNA
ctggctcgcaatacccagaaaattttccgctgggtggagaaagacacccctgatgcagttgaaaaaattcaggcg

SEQ ID NO: 208234 - DNA, 75 bp, synthetic construct
  source 1..75: mol_type = other DNA
ctggctcgcaatactcagaaaattttccgctgggtggagaaagacactcctgatgcggttaaaaaaattcaggcg

SEQ ID NO: 208235 - DNA, 75 bp, synthetic construct
  source 1..75: mol_type = other DNA
gcgcagccacagttcggaatatcaccgggagcttgtcgagcgacgggagcgcctggtgaaagatatcgacgagtt

SEQ ID NO: 208236 - DNA, 75 bp, synthetic construct
  source 1..75: mol_type = other DNA
tgattttgtcgcagcggcgatcgcctggggcaccctgactaacagtggtggtcagcctggtaatgctgttgtcgt

SEQ ID NO: 208237 - DNA, 75 bp, synthetic construct
  source 1..75: mol_type = other DNA
tgccgcctttgctggtggcccgtatgcgcagtcacagttctgagtattaccgggagattgtcgaacggcgggatc

SEQ ID NO: 208238 - DNA, 75 bp, synthetic construct
  source 1..75: mol_type = other DNA
gactggtgagagacgctgatgattttgtcgcagtggcgattgccggtttcaatcagatgaaccgtggtggcccgg

SEQ ID NO: 208239 - DNA, 75 bp, synthetic construct
  source 1..75: mol_type = other DNA
tccgctgggtggagaaggacacgtctgatgctgttgaaaaaattcaggcgctgttaccggcgatcgaaaaggcga

SEQ ID NO: 208240 - DNA, 75 bp, synthetic construct
  source 1..75: mol_type = other DNA
ccacagttcagcttattttcgggagctggtggagacgcgggaacgactggtgagagacgctgatgattttgtcgc

SEQ ID NO: 208241 - DNA, 75 bp, synthetic construct
  source 1..75: mol_type = other DNA
cactggcctatgacttcctcaacctgttctttaacttcgttgtggaagtcacgttacgtgaaaaccctgactttg

SEQ ID NO: 208242 - DNA, 75 bp, synthetic construct
  source 1..75: mol_type = other DNA
ggatgttgctctttatggtgacgcgaagtttgccagtgataatgatttaagaaaatcgaaacttctgaaatggga

SEQ ID NO: 208243 - DNA, 75 bp, synthetic construct
  source 1..75: mol_type = other DNA
cttaacctgttttttaactttgcgataaaagtcagtatgcgggaaaaccctgattttgttcgtgacctgaaatat

SEQ ID NO: 208244 - DNA, 75 bp, synthetic construct
  source 1..75: mol_type = other DNA
atcggttatatgccgataatcaaaaaaggttccggctatatagctggctataaactaaaactactaaccatctat

SEQ ID NO: 208245 - DNA, 75 bp, synthetic construct
  source 1..75: mol_type = other DNA
tggcgtgtaataattgatagtagcatcaaaagtgaagttagatttacggctcttccttcattgctttcaggagcg

SEQ ID NO: 208246 - DNA, 75 bp, synthetic construct
  source 1..75: mol_type = other DNA
atttctttattaactacgacccttcctggcttggtgagttcgggcttaaacctgttttctcaattggttctgtag

SEQ ID NO: 208247 - DNA, 75 bp, synthetic construct
  source 1..75: mol_type = other DNA
cttaagcgcgatgaacggctttgaacgcgaactgaataaccgcattctggcggtggtgccgcatggtgaaattga

SEQ ID NO: 208248 - DNA, 75 bp, synthetic construct
  source 1..75: mol_type = other DNA
gctggaataacccaggcttattttgagttgggtatgacgtttccggaactgtatgacgacagccatccggaagcc

SEQ ID NO: 208249 - DNA, 75 bp, synthetic construct
  source 1..75: mol_type = other DNA
tgtcgcagtggcaatcgccggcttcaatcagatgaaccgtggtggtccggcaggaaatgctgtggcggtacattg

SEQ ID NO: 208250 - DNA, 75 bp, synthetic construct
  source 1..75: mol_type = other DNA
agaagatattagggagtgaggtttatctctttgaccccttttccagaaaaacacatggttttaatgctctggcct

SEQ ID NO: 208251 - DNA, 75 bp, synthetic construct
  source 1..75: mol_type = other DNA
tggcaggaagcactggataacgtgcaaaaagtgccaggtattgccgccgctgcgccgtatatcaatttcaccgga

SEQ ID NO: 208252 - DNA, 75 bp, synthetic construct
  source 1..75: mol_type = other DNA
aagtgaagcagggcgattgggtatcgatcatgatcccaaactcgaatcccgagcataaactgatgcagccgaaac

SEQ ID NO: 208253 - DNA, 75 bp, synthetic construct
  source 1..75: mol_type = other DNA
ggaaacggaaggcgctgaacatccacacaaggagaaccctggcggcaatcagcatcacgccagcgataataaaac

SEQ ID NO: 208254 - DNA, 75 bp, synthetic construct
  source 1..75: mol_type = other DNA
aaatacggtcgcgcaaacaaactttctggtctggaaaaagcactggccttgggagctacggaaatcacaaaagag

SEQ ID NO: 208255 - DNA, 75 bp, synthetic construct
  source 1..75: mol_type = other DNA
tatcccaaaaaatgaaaccgcgccggaagctgaaccatctgtagagcgtgaggggccgttctatttcctcttcgc

SEQ ID NO: 208256 - DNA, 75 bp, synthetic construct
  source 1..75: mol_type = other DNA
tttttgttcaggtctggggtaacggtgcaactttcgacaacgtgattttacgccgttcatatgaacggcagggga

SEQ ID NO: 208257 - DNA, 75 bp, synthetic construct
  source 1..75: mol_type = other DNA
cttgactattcccgcgccgctatttttgcacttatccggagcgcccaccctgagttttatcactacccgggacgc

SEQ ID NO: 208258 - DNA, 75 bp, synthetic construct
  source 1..75: mol_type = other DNA
gcgaggcggcagctctctcaattaaggtgaacggtcatcacgaaatcacatccaccagcaggacgtgtgaccatc

SEQ ID NO: 208259 - DNA, 75 bp, synthetic construct
  source 1..75: mol_type = other DNA
ggaacaagagctggctgcatttgccgctgagctagaacagcacaaattgctggttgcccgcgtgttctctttgcc

SEQ ID NO: 208260 - DNA, 75 bp, synthetic construct
  source 1..75: mol_type = other DNA
gccagaacgactattccattcgaaggtgaacgccataacgccctgcacgatgcgcgttaccaagcaaaatacgtg

SEQ ID NO: 208261 - DNA, 75 bp, synthetic construct
  source 1..75: mol_type = other DNA
ggcagacgggctaccgctgtatgtgtcgctgtaccccacagaagggggcatgcaggatattattgactgcattcg

SEQ ID NO: 208262 - DNA, 75 bp, synthetic construct
  source 1..75: mol_type = other DNA
gaaggtgaacaccataacgccctgcacgatacgcgttaccaggcaaaatacgtttcagccatctggcaaaaactg

SEQ ID NO: 208263 - DNA, 75 bp, synthetic construct
  source 1..75: mol_type = other DNA
cgctggatgtggagattgcagcagccacacttccgatggattttaatatttatgaaattccgggcagcgtttatc

SEQ ID NO: 208264 - DNA, 75 bp, synthetic construct
  source 1..75: mol_type = other DNA
aaagttaccgctgacgaagtaaacaaaattatgcaggcagccaatatcagccagcctgacgccgataagttgctt

SEQ ID NO: 208265 - DNA, 75 bp, synthetic construct
  source 1..75: mol_type = other DNA
ggcaggggatcccctgcccgtggcgttactacaacgatcgcgatgtacgcacaatcgttgagctggggaaagcca

SEQ ID NO: 208266 - DNA, 75 bp, synthetic construct
  source 1..75: mol_type = other DNA
gataccgaatatatgcaggaaaaccgctgggatgaggagtcagcttcctttgtaccggtcgaactgaatccgatc

SEQ ID NO: 208267 - DNA, 75 bp, synthetic construct
  source 1..75: mol_type = other DNA
catatcgtcacggttgagtcagaactccccaccgcggcacgttttgaatgggtgcatcgtcatttgccggggctg

SEQ ID NO: 208268 - DNA, 75 bp, synthetic construct
  source 1..75: mol_type = other DNA
aaagctgttcgccatcgggtgggttaaacataaatgtaagccgggcgcaaaatggcctgagatccagacagaatt

SEQ ID NO: 208269 - DNA, 75 bp, synthetic construct
  source 1..75: mol_type = other DNA
ggaatccaattctcaaaaaaatgaaatcctggtggaagctgaaccatctgtagagcgtgaagggcctttttattt

SEQ ID NO: 208270 - DNA, 75 bp, synthetic construct
  source 1..75: mol_type = other DNA
cagaaagcggaacaaaacagcccaaatgcgttacaaaacgagccagaaacgaaacagcctgaaccagtggcgcaa

SEQ ID NO: 208271 - DNA, 75 bp, synthetic construct
  source 1..75: mol_type = other DNA
accccgccctgccctcgattcctgggatgctgaatatatgcaggaaaaccgctgggatgagggggtctgcttcct

SEQ ID NO: 208272 - DNA, 75 bp, synthetic construct
  source 1..75: mol_type = other DNA
ggtcgcgcaaacaaactttctggtctggataaggcactggctgccggggctactgaaatcacgaaagaagaatat

SEQ ID NO: 208273 - DNA, 75 bp, synthetic construct
  source 1..75: mol_type = other DNA
attacgatgccgacaatgtgcagcaccgttataaaccacaggcgcagccgcttcgtttgatcattccacggctgc

SEQ ID NO: 208274 - DNA, 75 bp, synthetic construct
  source 1..75: mol_type = other DNA
attgcattctgtgctgcgagaaatcgggaaagatattgcaagcgagccagcaacaggaaccggaaaaagtctgca

SEQ ID NO: 208275 - DNA, 75 bp, synthetic construct
  source 1..75: mol_type = other DNA
ggaaatggaaggcgctgaacatccacacaaggagaacactggcggcaatcagcatcacaatagcgataatgaaac

SEQ ID NO: 208276 - DNA, 75 bp, synthetic construct
  source 1..75: mol_type = other DNA
ctgtaactgccgccattcatcgcgaatacaagcagacatggaaaaccctgggcagggagctggcctactatctct

SEQ ID NO: 208277 - DNA, 75 bp, synthetic construct
  source 1..75: mol_type = other DNA
tcgggacaccattaaatggtggcttaagcaatcacgcgaagcgcaatctgccattatgaccgatgaaatcccgtt

SEQ ID NO: 208278 - DNA, 75 bp, synthetic construct
  source 1..75: mol_type = other DNA
aggtcagcgcgtgtggaccggcggcggtgatgaagaagcactgtcgaaaggcgtctataacacctatatcgaaga

SEQ ID NO: 208279 - DNA, 75 bp, synthetic construct
  source 1..75: mol_type = other DNA
gaaagagatcctcgcccagctttcgcagtatccggtatccacccgcttgtcactcaccggcacaattatcgtcgg

SEQ ID NO: 208280 - DNA, 75 bp, synthetic construct
  source 1..75: mol_type = other DNA
gcatcggcggcccggcagctgtgctggcgcagcagagcattaagcatctggaatgcgttgcttatccagaactgg

SEQ ID NO: 208281 - DNA, 75 bp, synthetic construct
  source 1..75: mol_type = other DNA
cagccgccaccgttgagtcataccagcaaaccgggatacacgttgcccagtcgataattgatttctttgcgggga

SEQ ID NO: 208282 - DNA, 75 bp, synthetic construct
  source 1..75: mol_type = other DNA
gatctgtcagaagctgccgtacgcctggaggcgctctgggatcatctggggaataatcaggtgctgtcggtaaac

SEQ ID NO: 208283 - DNA, 75 bp, synthetic construct
  source 1..75: mol_type = other DNA
acataccgacgcctggcgtcagcagggctatgaagacacgatgctgacgatggagcatatccggaaaccgctggc

SEQ ID NO: 208284 - DNA, 75 bp, synthetic construct
  source 1..75: mol_type = other DNA
ctattcctgacgaacaggccataaaagaagatagcgctgttgcggtggccactaccattgaagccggtgatgagc

SEQ ID NO: 208285 - DNA, 75 bp, synthetic construct
  source 1..75: mol_type = other DNA
ggcgtgccgtgtaccattaacagcctgattcgcggcgattatgagcggcagccggagattggctatatcgagtcg

SEQ ID NO: 208286 - DNA, 75 bp, synthetic construct
  source 1..75: mol_type = other DNA
tgttcgtctgggcttcaaaggcgaaactcaaatcaacgatcaactgactggtttcggtcagtgggaatatgaatt

SEQ ID NO: 208287 - DNA, 75 bp, synthetic construct
  source 1..75: mol_type = other DNA
cgtcaggcgggcgaaggcgaagcggtaaaagtcgatctcaaccgcccaatgaaagagatcctcgcccaactttcg

SEQ ID NO: 208288 - DNA, 75 bp, synthetic construct
  source 1..75: mol_type = other DNA
aacgtatctctaccaggaaaccaaagccctgctgactcccggcaaactgaaaaacttcctcgtcgagaaaatgcg

SEQ ID NO: 208289 - DNA, 75 bp, synthetic construct
  source 1..75: mol_type = other DNA
gcctcggcgcgcagtttggcggtaaatacttcgctcacgacatccgcgtgatccgcctgccgcgtcacggcgcat

SEQ ID NO: 208290 - DNA, 75 bp, synthetic construct
  source 1..75: mol_type = other DNA
tgcgcggtcatcgccggaaaagattgttatcaggcggacacgctatcattgctgcctggtgtgaaaataatatcg

SEQ ID NO: 208291 - DNA, 75 bp, synthetic construct
  source 1..75: mol_type = other DNA
ggaaaaaatcctgatgccccgatcatctcaataggtgcaatatttttcgatccgcaaaccggagatatgggaccg

SEQ ID NO: 208292 - DNA, 75 bp, synthetic construct
  source 1..75: mol_type = other DNA
tggcccctgaagtacagaacgctctcatggttaagttcgacacatgtgaaaacatcaccgttgatatggttatta

SEQ ID NO: 208293 - DNA, 75 bp, synthetic construct
  source 1..75: mol_type = other DNA
gcatttgcaggcctgaaattcggcgactacggctctatcgattatggtcgtaactacggtgtagcatacgacatt

SEQ ID NO: 208294 - DNA, 75 bp, synthetic construct
  source 1..75: mol_type = other DNA
ggcgcacagatcagtatggtctcaggagccagtatcggggctctcaatggtgccattatcgcggcctctcccgat

SEQ ID NO: 208295 - DNA, 75 bp, synthetic construct
  source 1..75: mol_type = other DNA
gcactgacccggtcagagacggaattgcagaaaagcctggagataactgaaggtgcagattcggcactgagaaac

SEQ ID NO: 208296 - DNA, 75 bp, synthetic construct
  source 1..75: mol_type = other DNA
gtgtcgcatctgagtgacggttctttatgggatcgccaggcttttccggacaccacaatccttgagatccgtccc

SEQ ID NO: 208297 - DNA, 75 bp, synthetic construct
  source 1..75: mol_type = other DNA
atggtatttccggttcgataatgcttgtaccaacagggagggaatacgatggcattaacagatatcaaagtcaga

SEQ ID NO: 208298 - DNA, 75 bp, synthetic construct
  source 1..75: mol_type = other DNA
tttgccctacatgcggtgggttacgtaactgcactgtgcatgggaagctaaccactagctgggaggattcccaat

SEQ ID NO: 208299 - DNA, 75 bp, synthetic construct
  source 1..75: mol_type = other DNA
atgaaagacgaaattgaaagacttgttaagcaattccagatcctcgaatcagcagcagccgagaaaactggagcc

SEQ ID NO: 208300 - DNA, 75 bp, synthetic construct
  source 1..75: mol_type = other DNA
gcagatgatggcgacacaacttatgctcgtctgggtttcaaaggcgaaactcaaatcaacgaccaattgactggt

SEQ ID NO: 208301 - DNA, 75 bp, synthetic construct
  source 1..75: mol_type = other DNA
ttcgtctgggcttcaaaggcgaaacccaaatcaacgatcagctgactggtttcggtcagtgggaatatgaattca

SEQ ID NO: 208302 - DNA, 75 bp, synthetic construct
  source 1..75: mol_type = other DNA
ctgttctgcacgcccccgccactttacgttttggctgggccaataaacatatcattaagaatttgcatcgtgatg

SEQ ID NO: 208303 - DNA, 75 bp, synthetic construct
  source 1..75: mol_type = other DNA
accgttttacgatcgcagcggcggcggtttaacgctttcgggtggtgagccctttatgcagccggaaatggcgat

SEQ ID NO: 208304 - DNA, 75 bp, synthetic construct
  source 1..75: mol_type = other DNA
cgttggacaaaatttactactggcactaccgtcaacgctcaaaggtgacgcaagacgcaatgcagtggatgatgc

SEQ ID NO: 208305 - DNA, 75 bp, synthetic construct
  source 1..75: mol_type = other DNA
tgctctgcttcgcgcccttctcgctcagccaaaagcgttgctactggatgagccattcagccgtcttgatgtggc

SEQ ID NO: 208306 - DNA, 75 bp, synthetic construct
  source 1..75: mol_type = other DNA
gaagagataacgttgctgtcggtcaagcagcaatgcaaaataactcaactggtggtggtaatacctatataggag

SEQ ID NO: 208307 - DNA, 75 bp, synthetic construct
  source 1..75: mol_type = other DNA
agcggctaactgccggttatcccccaactgtcaaaccagaacagcaaagcactgacggccagctgtcggcggcat

SEQ ID NO: 208308 - DNA, 75 bp, synthetic construct
  source 1..75: mol_type = other DNA
catcgggaaaagttaaccccggagcattttacggcgctaaccgactgctgcccgacacaggcgttaaccgtgtgt

SEQ ID NO: 208309 - DNA, 75 bp, synthetic construct
  source 1..75: mol_type = other DNA
ggttaaacagaatgtcgtgtctcttactcctgaaactacaagtaaattagagaatatgcaatatgatgatggcaa

SEQ ID NO: 208310 - DNA, 75 bp, synthetic construct
  source 1..75: mol_type = other DNA
cgagccgtggctgaaaggtcagagagttggggtgattggatcgggtgagttccaggtctcgcgccatatcaacgt

SEQ ID NO: 208311 - DNA, 75 bp, synthetic construct
  source 1..75: mol_type = other DNA
gtcattcggaaactgcttttctgctgcacagcgacgacagcgatgtgcgcatccgctactttacgccaacggttg

SEQ ID NO: 208312 - DNA, 75 bp, synthetic construct
  source 1..75: mol_type = other DNA
agccattcagccgtcttgatgtggctctgcgcgataattttcgccagtgggtgttcagcgaagttcgcgaactgg

SEQ ID NO: 208313 - DNA, 75 bp, synthetic construct
  source 1..75: mol_type = other DNA
aatgagagaggaaaacggcactgtcagcatcattgatgatactggcaatccttccgaagtggctgtttattccaa

SEQ ID NO: 208314 - DNA, 75 bp, synthetic construct
  source 1..75: mol_type = other DNA
gatgtattttttgatttagcaatgaaaaatgatgctggcgtaaaaattggcacagtaagagtcaatgctcaggct

SEQ ID NO: 208315 - DNA, 75 bp, synthetic construct
  source 1..75: mol_type = other DNA
aacctatcagtaaggaaagtgtaaatcaagtaattgaactcctcgggtataaaggaagagttacaggacacggtt

SEQ ID NO: 208316 - DNA, 75 bp, synthetic construct
  source 1..75: mol_type = other DNA
acagggttttaattctgcctggattgaaattcaattagctcatgtggataaaaacgccatcagaggcacctataa

SEQ ID NO: 208317 - DNA, 75 bp, synthetic construct
  source 1..75: mol_type = other DNA
ggacgtaataatcgtactaaaccaatttctaaagaaagtatatcacaagtgatcgaattacttggttataaggga

SEQ ID NO: 208318 - DNA, 75 bp, synthetic construct
  source 1..75: mol_type = other DNA
agactcacagggcacggtttcagacacactatgagtacaattctgcatgagcagggctttaattccgcctggatt

SEQ ID NO: 208319 - DNA, 75 bp, synthetic construct
  source 1..75: mol_type = other DNA
tcaccggtcgtgacgtgcgttttgtgaccgacctgaatcagccggttagcgtttacatgacgccgaaagagcgtt

SEQ ID NO: 208320 - DNA, 75 bp, synthetic construct
  source 1..75: mol_type = other DNA
atattggcaaacgtcccatcgctgatattaaaccaatggagctactggaaactttacgtaaaatggagaaacgcg

SEQ ID NO: 208321 - DNA, 75 bp, synthetic construct
  source 1..75: mol_type = other DNA
tgtggacaatccctgaaagccggatgaaaatgcgacgtaaacatgtcgtaccactgtcacaacaggccactgaca

SEQ ID NO: 208322 - DNA, 75 bp, synthetic construct
  source 1..75: mol_type = other DNA
ctttctattggcgtataccccgatgtatcgctagccgatgctcgcgaaaaacgcagtgaagccaggaaaatcctc

SEQ ID NO: 208323 - DNA, 75 bp, synthetic construct
  source 1..75: mol_type = other DNA
gcaaacggcattgatccagtagaagaacgtaaggctcagaaaattgctcagaaattatcaattgaaacctctttt

SEQ ID NO: 208324 - DNA, 75 bp, synthetic construct
  source 1..75: mol_type = other DNA
gaattacaattagctcatgctgataaaaataatatccgaggcacttataatcatgcactatatctagataaaaga

SEQ ID NO: 208325 - DNA, 75 bp, synthetic construct
  source 1..75: mol_type = other DNA
tcattatgttaactggtgtacgcacacaagaattgcgtttcgcacactgggaggatatcaatcttgagaaaaaat

SEQ ID NO: 208326 - DNA, 75 bp, synthetic construct
  source 1..75: mol_type = other DNA
accttcgaaaaagacatttttccctaccttggtaagcgccctattgccgaaataaaaccaatggagttactggaa

SEQ ID NO: 208327 - DNA, 75 bp, synthetic construct
  source 1..75: mol_type = other DNA
gctgctggaggcgatcctggggaggtcaaaaaagaagaaaaaatcgcgctgcaaatgagtttgaaaaacacgttc

SEQ ID NO: 208328 - DNA, 75 bp, synthetic construct
  source 1..75: mol_type = other DNA
tgccttttggctcgccactcggcagatgctgccagtatattaattcgttacttgcaggaattgcagcagggaacg

SEQ ID NO: 208329 - DNA, 75 bp, synthetic construct
  source 1..75: mol_type = other DNA
cgatttgagagccgccatatatctgtccagagaaactatgccaataggtgcatatgtggttggtttatcgtcgta

SEQ ID NO: 208330 - DNA, 75 bp, synthetic construct
  source 1..75: mol_type = other DNA
ctgggggaatggtttctaagggggttggggcaattaaaaatatttttagtaacggtgttaatgaaaatacatacc

SEQ ID NO: 208331 - DNA, 75 bp, synthetic construct
  source 1..75: mol_type = other DNA
ttgtatcgctcaacacaatattgatgcgactgattcagcgcaagttggaacagcatggctgaccggaatgttcaa

SEQ ID NO: 208332 - DNA, 75 bp, synthetic construct
  source 1..75: mol_type = other DNA
ctacagaaatgcgccgacctcgcaggcgattacgccgcatacatggctattgaagacacgatagagaagattgaa

SEQ ID NO: 208333 - DNA, 75 bp, synthetic construct
  source 1..75: mol_type = other DNA
gtcaaatacctactgatgcaccaaagacatggactgatagtccaacgactaaatctttcatcagtcaatgggccc

SEQ ID NO: 208334 - DNA, 75 bp, synthetic construct
  source 1..75: mol_type = other DNA
atgttctggcgtacctggcgcggcgaacgcaactggctggagaatatgcacgggcatgattatgagcatcatcat

SEQ ID NO: 208335 - DNA, 75 bp, synthetic construct
  source 1..75: mol_type = other DNA
tatccagaagaaaggcgatttcaccgtactggtgattcaggaggtgacgccacgcctagtactgcgttccggtaa

SEQ ID NO: 208336 - DNA, 75 bp, synthetic construct
  source 1..75: mol_type = other DNA
gttctcgttatccaggaaatcacaccacggcttgtactacgttcgggtgatgccgtagtggggctgaaaaataac

SEQ ID NO: 208337 - DNA, 75 bp, synthetic construct
  source 1..75: mol_type = other DNA
ttgctgaaagccgatggcaccaaagcaacaaccgcatctgatattgctcacgtagtagttgaaccggcttatgaa

SEQ ID NO: 208338 - DNA, 75 bp, synthetic construct
  source 1..75: mol_type = other DNA
ctcattgagcatattgcgaccttcgcacttaattacaaaattaagtataatgaagacaataagctcattgagcag

SEQ ID NO: 208339 - DNA, 75 bp, synthetic construct
  source 1..75: mol_type = other DNA
tttcgaatagtaaagaattagtaattggagcaactacatccggaactgcaccaagtgcaggtaagtatcaaggcg

SEQ ID NO: 208340 - DNA, 75 bp, synthetic construct
  source 1..75: mol_type = other DNA
cctgccaggcaaggcggctttcatcgcactcaaaaacacagacagccatgggaaaattgaaatcaccaggatgaa

SEQ ID NO: 208341 - DNA, 75 bp, synthetic construct
  source 1..75: mol_type = other DNA
aaacctggtcagaagagttgaaacaaagtgtcagccgttacccttcactggatcaatccaggcaaattgttgagg

SEQ ID NO: 208342 - DNA, 75 bp, synthetic construct
  source 1..75: mol_type = other DNA
ttttgcaggcgctgttttccacacactcgccgctttttattgactttgcccgattcgttatcagccatccggcat

SEQ ID NO: 208343 - DNA, 75 bp, synthetic construct
  source 1..75: mol_type = other DNA
gcggatgatgaacagggagccgcccgatttttgtctgctctcgaaaactggaatcgcccatggtctggctttacg

SEQ ID NO: 208344 - DNA, 75 bp, synthetic construct
  source 1..75: mol_type = other DNA
gcatccgctactttacgccaacggttgaagcgccaatttgcggtcacgcgacggtggctgcgcactatgtacgtg

SEQ ID NO: 208345 - DNA, 75 bp, synthetic construct
  source 1..75: mol_type = other DNA
ggaaaacatcgcgtgactatcgaaaatcacaatgatgattatcgtatttcactggaacaaggtccgccgggcttt

SEQ ID NO: 208346 - DNA, 75 bp, synthetic construct
  source 1..75: mol_type = other DNA
gacggtgacaattcgcaataaccaaccggagaaagtcaccatttctggcacagcggtgatttttcatgccgaatg

SEQ ID NO: 208347 - DNA, 75 bp, synthetic construct
  source 1..75: mol_type = other DNA
gcggaccgggtgcgactaacctggtgaccgccattgccgatgcgaggctggactccatcccgctgatttgcatca

SEQ ID NO: 208348 - DNA, 75 bp, synthetic construct
  source 1..75: mol_type = other DNA
cggcaccgacgccttccaggaagtcgacacctacggcatctctatccccataaccaaacacaactatctggtcag

SEQ ID NO: 208349 - DNA, 75 bp, synthetic construct
  source 1..75: mol_type = other DNA
aggctgctatggcagaaaaagccgccgcacccgcctttagcgaagaaagcattcgtgacgcagctacaatgatta

SEQ ID NO: 208350 - DNA, 75 bp, synthetic construct
  source 1..75: mol_type = other DNA
ttttgcaggcgctgtttttcacacactcgccgctttttgttgactttgcccgagtcgttatcagtcatccggtat

SEQ ID NO: 208351 - DNA, 75 bp, synthetic construct
  source 1..75: mol_type = other DNA
atccacaccaataaacgcgacctggcgcgcgccatgaaagggcatatgggtttcttcaatactcacccgtttctg

SEQ ID NO: 208352 - DNA, 75 bp, synthetic construct
  source 1..75: mol_type = other DNA
ttacaagcgtcttttaactacgaacgtatgcaggcttctggctggttgtacggtctgctgcctgctctgaaaaag

SEQ ID NO: 208353 - DNA, 75 bp, synthetic construct
  source 1..75: mol_type = other DNA
aacgtatccgtgaaacccgtgctaaatatccggatctgcaaattatcggcggcaacgtggcaacagctgcaggtg

SEQ ID NO: 208354 - DNA, 75 bp, synthetic construct
  source 1..75: mol_type = other DNA
cgcttagtgctgcgcgatatctcggcccgcaacacgctggcgggggcgcgtgtggtgatgcttaacccgccgcgt

SEQ ID NO: 208355 - DNA, 75 bp, synthetic construct
  source 1..75: mol_type = other DNA
ataaaaactatatcagcgagaattacattcaggcaattaaaggttccaccattaacaatggtccttattatattc

SEQ ID NO: 208356 - DNA, 75 bp, synthetic construct
  source 1..75: mol_type = other DNA
tggcccctgaagtacagaacgctgtcatggttaagttcgacacatgtgaaaacatcactgttgatatggtgatta

SEQ ID NO: 208357 - DNA, 75 bp, synthetic construct
  source 1..75: mol_type = other DNA
gatgctgaatatatgcaggaaaaccgctgggatgaggaatccgcttcctttattccggtcgaatcagaatccgat

SEQ ID NO: 208358 - DNA, 75 bp, synthetic construct
  source 1..75: mol_type = other DNA
gctaccacaacgatcgcgatgtacgcacaatcgttgagctgggaaaaacaatcgactttgatgccagaaccgtta

SEQ ID NO: 208359 - DNA, 75 bp, synthetic construct
  source 1..75: mol_type = other DNA
atgattttcagcgtacagtggagcggttcctggcgttacaaaccatggggactgaaacggcgcgccaggatgcgc

SEQ ID NO: 208360 - DNA, 75 bp, synthetic construct
  source 1..75: mol_type = other DNA
aagattttcaacggacggtggaacggttccttgcactacaaaccatgggtacagaaacggcacgccaggatgcac

SEQ ID NO: 208361 - DNA, 75 bp, synthetic construct
  source 1..75: mol_type = other DNA
gccgaagtgtggcgttgcattgacgaggaacttagctcgcattttacgctgcaccttgttgacctgcccggcttc

SEQ ID NO: 208362 - DNA, 75 bp, synthetic construct
  source 1..75: mol_type = other DNA
atcatgtcggtgctggcggatggggggctggtctgcggcattgtggtattgctgtggccggtgataaaaagaaac

SEQ ID NO: 208363 - DNA, 75 bp, synthetic construct
  source 1..75: mol_type = other DNA
gcgggatttcagcagcaactcagtgatgattttcagcgtacggtggagcggttcctggcgttacaaaccatgggt

SEQ ID NO: 208364 - DNA, 75 bp, synthetic construct
  source 1..75: mol_type = other DNA
gcaaaacgtgtccatgccgtttttgcgattgtatggctatctcgacggtctggtgccgcgcaaagtggtgccgat

SEQ ID NO: 208365 - DNA, 75 bp, synthetic construct
  source 1..75: mol_type = other DNA
gctcaggactgcgcttataaatttattgtctgcgaggataaacccggcataccccgccctgccctcgattcatgg

SEQ ID NO: 208366 - DNA, 75 bp, synthetic construct
  source 1..75: mol_type = other DNA
cgacaattaattcacagcgctcatggacaaattgaaggtcaccttctggacttgcctcgtcaaaatttcaccgag

SEQ ID NO: 208367 - DNA, 75 bp, synthetic construct
  source 1..75: mol_type = other DNA
gttttctcggtagcgggaaaaccacttctattcttcatctgttagcacacaagaatccgcaagaaaaatgggcgg

SEQ ID NO: 208368 - DNA, 75 bp, synthetic construct
  source 1..75: mol_type = other DNA
atcagcatggcgtgaaaaaagggttagcagcgttaagcctgccagagcatcaacgctggcgtcgcagtctgaaca

SEQ ID NO: 208369 - DNA, 75 bp, synthetic construct
  source 1..75: mol_type = other DNA
tggcgaagtttctgaacagaccattcattcagcccgcgagcagggattgcatttttatgccgcaggtcaccatgc

SEQ ID NO: 208370 - DNA, 75 bp, synthetic construct
  source 1..75: mol_type = other DNA
cctgtatggctggcatttgccgcttgacgcacatcctgagctgggcaataacgcacagctggcggcgttactggg

SEQ ID NO: 208371 - DNA, 75 bp, synthetic construct
  source 1..75: mol_type = other DNA
gtgaccaggaccaacctcatcaccggttttctcggcagcgggaaaactacgtcgattcttcatctgttagcccat

SEQ ID NO: 208372 - DNA, 75 bp, synthetic construct
  source 1..75: mol_type = other DNA
tggaagaaattaaccgcgaggtggttactgagcgtgaaacagaagaagaaaaaccacaaccatctgacgcaatgg

SEQ ID NO: 208373 - DNA, 75 bp, synthetic construct
  source 1..75: mol_type = other DNA
tgtcccggtcgaaccagagccgaatacagaaattgttaactttaatcagttatccgacgacaaacaggccgctgt

SEQ ID NO: 208374 - DNA, 75 bp, synthetic construct
  source 1..75: mol_type = other DNA
agacgtgatttaaaaccaacagccaaatggcccgacgttcaggcgtattttctcgaacgtaaaaaacgcatggaa

SEQ ID NO: 208375 - DNA, 75 bp, synthetic construct
  source 1..75: mol_type = other DNA
tcaggaagatgatccggaggaaatggaaggcgctgaacatccacacaaggagaacactggcggcaatcagcatca

SEQ ID NO: 208376 - DNA, 75 bp, synthetic construct
  source 1..75: mol_type = other DNA
accagggccggtaaaagttaccgctgacgaagtaaacaaaattatgcaggcagccaatatcagccagcctgacgc

SEQ ID NO: 208377 - DNA, 75 bp, synthetic construct
  source 1..75: mol_type = other DNA
aaaattatgcaggcagccaatatcagccagcctgacgccgataagttgcttgctgtatcacgtggtgaatttgtt

SEQ ID NO: 208378 - DNA, 75 bp, synthetic construct
  source 1..75: mol_type = other DNA
gcaggtgcgggtaacgaagagcgtgttgatgcgctggttgccgcaggcgttgacgttctgctgatcgactcctct

SEQ ID NO: 208379 - DNA, 75 bp, synthetic construct
  source 1..75: mol_type = other DNA
catggttggtacatcacaacgtattgcccacgatggcaaggtgctgcgtgttaaaggcaatcaggggcgcgcatt

SEQ ID NO: 208380 - DNA, 75 bp, synthetic construct
  source 1..75: mol_type = other DNA
acggtagcagcgcactatgtacgttcaaaggtattgggtttgggaaattgcaccgtctggcaaacatcgttggcg

SEQ ID NO: 208381 - DNA, 75 bp, synthetic construct
  source 1..75: mol_type = other DNA
atgatgagtatcttcatcatgaccctttccttatttatggccccttcctcgggaggggctttcccgtttcagcgt

SEQ ID NO: 208382 - DNA, 75 bp, synthetic construct
  source 1..75: mol_type = other DNA
tgaaagaactgaccgagcgtaacggctttgctggctacccggtggttaccgaagaaaacgaactggtcggcatta

SEQ ID NO: 208383 - DNA, 75 bp, synthetic construct
  source 1..75: mol_type = other DNA
ttgttactggcgtcggtgtaccgcagatcactgccgttgctgacgcagtagaagccctggaaggcaccgggattc

SEQ ID NO: 208384 - DNA, 75 bp, synthetic construct
  source 1..75: mol_type = other DNA
agataattgccgaactcacccacggcggcgcggatgttgcgctcgattgttccggtaatgctgcggggcgcttgc

SEQ ID NO: 208385 - DNA, 75 bp, synthetic construct
  source 1..75: mol_type = other DNA
ccgcggcggcaactggatttatgagtgggccacccaggcgatggtgtggcaacaaaaagcctgtgcggaagaaga

SEQ ID NO: 208386 - DNA, 75 bp, synthetic construct
  source 1..75: mol_type = other DNA
gtgttatcccgtgagaaagttgatgcaaccaaacagtacgacatcaacgaagctatcgcactgctgaaagagctg

SEQ ID NO: 208387 - DNA, 75 bp, synthetic construct
  source 1..75: mol_type = other DNA
ccctgaaacctcgacgcttgtccgccgctttaatcacggtgcacaaccgcctgtgcagtcggctcttgatggcaa

SEQ ID NO: 208388 - DNA, 75 bp, synthetic construct
  source 1..75: mol_type = other DNA
catgttttaaaggcgttgccaaacgtgccgtgggtggatcacacacgcgtcgcagcctttggtttccgttttggt

SEQ ID NO: 208389 - DNA, 75 bp, synthetic construct
  source 1..75: mol_type = other DNA
caccgcgccacggcggcggcgcccgataaaccgttataccagggatttatcaacggtcatgaaccgtgcgggcag

SEQ ID NO: 208390 - DNA, 75 bp, synthetic construct
  source 1..75: mol_type = other DNA
acgcacatgaaatcactcaggcttgctgctgaagatttccccctggcgcttgcgacggccaagatccttccgtgg

SEQ ID NO: 208391 - DNA, 75 bp, synthetic construct
  source 1..75: mol_type = other DNA
gcggatgttgatgacgtgctggcgcagttgatcccgctggtggaagcgcaaccgcgtgcagagtggcaccagttg

SEQ ID NO: 208392 - DNA, 75 bp, synthetic construct
  source 1..75: mol_type = other DNA
acgccgccaaacgcccggtgctttatctgggtggtggtgtaatcaacgcacctgcgcgggtgcgtgaactggcgg

SEQ ID NO: 208393 - DNA, 75 bp, synthetic construct
  source 1..75: mol_type = other DNA
gcgggccaggcgcgacaaatctggtgactgcaattgccgacgcgcggctggattccatcccgctgatttgcatca

SEQ ID NO: 208394 - DNA, 75 bp, synthetic construct
  source 1..75: mol_type = other DNA
aggttgttcagcagataaaagaaagcagtccctttgcgccgaccagcgattatgagcaactgtcattctcgaaga

SEQ ID NO: 208395 - DNA, 75 bp, synthetic construct
  source 1..75: mol_type = other DNA
tctactttgccacagtactccgtgcctctgtcggtcagtattctcagcatcggcaggccctgagacgcataaaac

SEQ ID NO: 208396 - DNA, 75 bp, synthetic construct
  source 1..75: mol_type = other DNA
ggcagtacgccggcgggtaaaaagattgacaatccggagttcgaaccgaaagaagaggcaaaatacactgccaaa

SEQ ID NO: 208397 - DNA, 75 bp, synthetic construct
  source 1..75: mol_type = other DNA
gatgatatcgtggttgatgaagacaataagattgtcaccacccccagcatatatgctggcgcagaacattgcaga

SEQ ID NO: 208398 - DNA, 75 bp, synthetic construct
  source 1..75: mol_type = other DNA
atttaaggccccttcctcgggaggggctttcccgtttcagcgtcccgctgaaatcgtcggcttacctccttctgt

SEQ ID NO: 208399 - DNA, 75 bp, synthetic construct
  source 1..75: mol_type = other DNA
cccggtgtatcggaattttgacaaaggtcttcaggaaatcaccggctggatcgaaaaaacgcttgtgttaaaaat

SEQ ID NO: 208400 - DNA, 75 bp, synthetic construct
  source 1..75: mol_type = other DNA
gccgttgccgcctgcgtggatgacaacgcgattattaccactgatgttggtcagcatcagatgtggacggcgcag

SEQ ID NO: 208401 - DNA, 75 bp, synthetic construct
  source 1..75: mol_type = other DNA
cgtgagttaaacgaagaactgggcatcgaagcaactgttggtgactatgttgccagccatcagcgagaagtttcg

SEQ ID NO: 208402 - DNA, 75 bp, synthetic construct
  source 1..75: mol_type = other DNA
ccagcatatatgctggcgcagaacattgcagaagcggcgagcggcattgataagctggtttcccgcgtgctggtt

SEQ ID NO: 208403 - DNA, 75 bp, synthetic construct
  source 1..75: mol_type = other DNA
caccaaatatccgggcacaggcagcttcaacattgttcctgattttgcttacgacgatggtcgctttacgttcgt

SEQ ID NO: 208404 - DNA, 75 bp, synthetic construct
  source 1..75: mol_type = other DNA
tatgtctatcccggatacctgggcggtcgataaaaacggtgcaccaacaaccgatccatttgcagttaacgccct

SEQ ID NO: 208405 - DNA, 75 bp, synthetic construct
  source 1..75: mol_type = other DNA
aagtgctcgacgcccgctcgcgcaatatgtctatacccgatacctgggcggtcgataaaaacggtgcgccaacaa

SEQ ID NO: 208406 - DNA, 75 bp, synthetic construct
  source 1..75: mol_type = other DNA
tactacgcggaacgcatttcaaaaggcggcaccaaccgcgaaccggagtttcgtcttgaggaaaccgggccgtgt

SEQ ID NO: 208407 - DNA, 75 bp, synthetic construct
  source 1..75: mol_type = other DNA
actgtgtaaaatatggcccgtttagcttattggaagccaatacgtctctatcaacgatcgttaatcaaaactttt

SEQ ID NO: 208408 - DNA, 75 bp, synthetic construct
  source 1..75: mol_type = other DNA
ggtcgatactccacaaatgattatgtgaaattattagataagtgttatttgtctgaatataaaattcaatatttg

SEQ ID NO: 208409 - DNA, 75 bp, synthetic construct
  source 1..75: mol_type = other DNA
cggcgcaatctcttattttgtgcagcaggcagcccacgccggattaattggcatttcgatgtgtcagtccgatcc

SEQ ID NO: 208410 - DNA, 75 bp, synthetic construct
  source 1..75: mol_type = other DNA
tcaattgtattggtgatgcacgagcggtatgcataggcacagcaccttattacattaagggactcagatttattg

SEQ ID NO: 208411 - DNA, 75 bp, synthetic construct
  source 1..75: mol_type = other DNA
taaaatctgtttctgcgatgccagaagaactaaaagatagaaataccttgcaatttgcaatgaaagcccggctta

SEQ ID NO: 208412 - DNA, 75 bp, synthetic construct
  source 1..75: mol_type = other DNA
atgtcagttttttctcgagtttgtttaggttttacgtttcttcttacggcattgcaagttcaggcaagtattgtt

SEQ ID NO: 208413 - DNA, 75 bp, synthetic construct
  source 1..75: mol_type = other DNA
caggtttattatcccggacaggatcaggatattaaacaacgcaaagccgccgtcgaaggcatcgaaattgttgat

SEQ ID NO: 208414 - DNA, 75 bp, synthetic construct
  source 1..75: mol_type = other DNA
aatggtggtgccgtttggcggcgcggaaatttactacggcactaacccactggcctttgccgcgccgggagaagg

SEQ ID NO: 208415 - DNA, 75 bp, synthetic construct
  source 1..75: mol_type = other DNA
acaatataaagaatgtatccgtgatcatgaaaaggggaccgtgttttgtgtcgctacattggctaaacgtcctaa

SEQ ID NO: 208416 - DNA, 75 bp, synthetic construct
  source 1..75: mol_type = other DNA
aagcctgaaatcaccgcgcagtgtcgcaccgtggacgcgcgaggagtggcaaagaaaactggagagagagtatca

SEQ ID NO: 208417 - DNA, 75 bp, synthetic construct
  source 1..75: mol_type = other DNA
atgttgtcggggtatcgtgtattttccagacgctatgttaaatcttttccatgtctatcaaggggatttgaaatc

SEQ ID NO: 208418 - DNA, 75 bp, synthetic construct
  source 1..75: mol_type = other DNA
tggtgtatccggaaaaaatggatatccgatagaaaaatggcaaagcctgcttctggaatggcttgcggaacataa

SEQ ID NO: 208419 - DNA, 75 bp, synthetic construct
  source 1..75: mol_type = other DNA
accgtatcatcggccaaaaaagaccacttcagatatctcatatctgggggacccgaatccggcttgaactggaag

SEQ ID NO: 208420 - DNA, 75 bp, synthetic construct
  source 1..75: mol_type = other DNA
cagttattgcgcaggttatcggcgtattgattggtgtgcagattggccttggcaatattccaccgcatctggctt

SEQ ID NO: 208421 - DNA, 75 bp, synthetic construct
  source 1..75: mol_type = other DNA
tggtgattgaggatgcttccgatatgctgctggcaatcactcaggcaggccgtatgttgatgttcccggtaagcg

SEQ ID NO: 208422 - DNA, 75 bp, synthetic construct
  source 1..75: mol_type = other DNA
tctgacatctttgagcgaaaatatacgccagcaaaaagaggaattgaaacttaccgagttctatcaggaatacag

SEQ ID NO: 208423 - DNA, 75 bp, synthetic construct
  source 1..75: mol_type = other DNA
caggctatatggcaaatggctatttatccggtgggattgttaatcatgatgacggggacattatatgttctgaat

SEQ ID NO: 208424 - DNA, 75 bp, synthetic construct
  source 1..75: mol_type = other DNA
atgaatatgatgatctcatatcaggaacttgttcgcaccttccttagtttatgggttcctcaggaagaggccgca

SEQ ID NO: 208425 - DNA, 75 bp, synthetic construct
  source 1..75: mol_type = other DNA
gtggggtgagcgttttccgtcactggccggaatggaacgctggcagtggcaggatatgccgttctggcgtaagcg

SEQ ID NO: 208426 - DNA, 75 bp, synthetic construct
  source 1..75: mol_type = other DNA
cacagtgggcactggcgttacatcagttgcaggaacagcgtcagccggtgcaaaaaacggtcaatcccccggttg

SEQ ID NO: 208427 - DNA, 75 bp, synthetic construct
  source 1..75: mol_type = other DNA
caatacaaccgaatttttcatgggtgggtagcaaaacttggtctcgaagattcgctttacagtacacattccttg

SEQ ID NO: 208428 - DNA, 75 bp, synthetic construct
  source 1..75: mol_type = other DNA
ccacggctgcacctgtatgttcagattaacgcccggctttcatactgccgaccatctgttctggccgtacccagc

SEQ ID NO: 208429 - DNA, 75 bp, synthetic construct
  source 1..75: mol_type = other DNA
ctggcagttccgttactatcggcctctaaccaaacagcgaaccaaacagagcttcggtgcctaccctgctgtctc

SEQ ID NO: 208430 - DNA, 75 bp, synthetic construct
  source 1..75: mol_type = other DNA
cgccagtacagccctaaatgaacaaggcttcccacctgatgttattgaggcggcacttgctcatgtggataagaa

SEQ ID NO: 208431 - DNA, 75 bp, synthetic construct
  source 1..75: mol_type = other DNA
atggcaagaaaaaccaagccgttaaccgatacggaaatcaaagccgccaaacctaaagatgccgattaccagctt

SEQ ID NO: 208432 - DNA, 75 bp, synthetic construct
  source 1..75: mol_type = other DNA
ctaacaccgaagtatcacgtgctaaagcaacagaaaaggatcgaacactacacgatggcgatggactttttctac

SEQ ID NO: 208433 - DNA, 75 bp, synthetic construct
  source 1..75: mol_type = other DNA
cgatgatgcagtggtgggcttactttgtgaaaaaggcagatagtggcagactcactgacgttgaattaacaacat

SEQ ID NO: 208434 - DNA, 75 bp, synthetic construct
  source 1..75: mol_type = other DNA
gcttctcaccattacccgccctgccgaagctgctgaggcacgatgggatgagatcgatttcaatgctaaagaatg

SEQ ID NO: 208435 - DNA, 75 bp, synthetic construct
  source 1..75: mol_type = other DNA
gctacaaaaaaaagaacaatgatggggataggtgctttccccgctctttcacttgctgatgctcgacggttaaga

SEQ ID NO: 208436 - DNA, 75 bp, synthetic construct
  source 1..75: mol_type = other DNA
tggaaaaggacatattcccagctatcggggagctccctgtccagcaaatcaaagcccggactctagtcgaagccc

SEQ ID NO: 208437 - DNA, 75 bp, synthetic construct
  source 1..75: mol_type = other DNA
tgcaagtacagcgatgaatgaggcaggttttaattcagatgttattgaaactgcactttctcatgttgacaaaga

SEQ ID NO: 208438 - DNA, 75 bp, synthetic construct
  source 1..75: mol_type = other DNA
gaaagaacaggtaagaaattctcaagaggccaaaaccaacactttcctgttagttgccgagcgttggtggaatgt

SEQ ID NO: 208439 - DNA, 75 bp, synthetic construct
  source 1..75: mol_type = other DNA
cgaagttaggcgcgcatacaaccgctccatttatctgccgcaacgcacaaatcttatggattggtgggggaattt

SEQ ID NO: 208440 - DNA, 75 bp, synthetic construct
  source 1..75: mol_type = other DNA
tgaatttatcgaagaacaacaacagatagctctagacagtattttttcgactgttgcgaccaactggtttcagat

SEQ ID NO: 208441 - DNA, 75 bp, synthetic construct
  source 1..75: mol_type = other DNA
catcgtgaatatgtttttccaagcagaaataatcctcaacagccaatgaatagtcaaactgctaatgccgcacta

SEQ ID NO: 208442 - DNA, 75 bp, synthetic construct
  source 1..75: mol_type = other DNA
atgccagaacggctattccattcgaaggtgagcgccataatgcacttgatgacgcccgttaccagacaacgtttc

SEQ ID NO: 208443 - DNA, 75 bp, synthetic construct
  source 1..75: mol_type = other DNA
aggaaatattcgatgaagagaatcagcctgaagttcaggaaaatgatccggaggaaatggaaggcactgcgcatc

SEQ ID NO: 208444 - DNA, 75 bp, synthetic construct
  source 1..75: mol_type = other DNA
agatgatgcactgttacaattgcgggaatttatcgacgaaaactccggtgaattttttgttcaggtctggggaaa

SEQ ID NO: 208445 - DNA, 75 bp, synthetic construct
  source 1..75: mol_type = other DNA
taaaatctgtttctgctatgccagaagaactaaaagataagaatatcttgcaatttgcaatgaaagcacgactta

SEQ ID NO: 208446 - DNA, 75 bp, synthetic construct
  source 1..75: mol_type = other DNA
agcgatagtgaaactggcgagacggcagatcccttaattacggtgaacggtcatcacgttatcacatccaccagc

SEQ ID NO: 208447 - DNA, 75 bp, synthetic construct
  source 1..75: mol_type = other DNA
gaacgctggcggtaatcagcatcacaccagcgataatgaagctggcgggacggcaaatcccttaattaccatgaa

SEQ ID NO: 208448 - DNA, 75 bp, synthetic construct
  source 1..75: mol_type = other DNA
gcagttacaggatcaaacattgccttttttgctaaaaataatagcagtgtttgctacgcttgccctgacttatca

SEQ ID NO: 208449 - DNA, 75 bp, synthetic construct
  source 1..75: mol_type = other DNA
aaatagatcttaatgcaaggctctggacaatacctgctgaacgtatgaaagcaaatagagaacatattgttccct

SEQ ID NO: 208450 - DNA, 75 bp, synthetic construct
  source 1..75: mol_type = other DNA
agcaagcacagcaatgaatgaggctggttttaatgctgatgtaattgaagctgcattagcccatactgataaaaa

SEQ ID NO: 208451 - DNA, 75 bp, synthetic construct
  source 1..75: mol_type = other DNA
tcatcgcgaatacaagcagacatggaaaacactggatgacgaactggcctacgctctctggcctggtgatgtgga

SEQ ID NO: 208452 - DNA, 75 bp, synthetic construct
  source 1..75: mol_type = other DNA
tgcaccgcctgcggtaagagcggtggcggcaactgccctgattgtggcgcggtgatgggtgacgcaacataccag

SEQ ID NO: 208453 - DNA, 75 bp, synthetic construct
  source 1..75: mol_type = other DNA
tgatgcactgctgcaattacgggaatttatcgacgaaaactccggtgaattttttgttcaggtctggggtaacgg

SEQ ID NO: 208454 - DNA, 75 bp, synthetic construct
  source 1..75: mol_type = other DNA
catttggggggctgttagcggacagccagcgcattcttgatgccgcagaaagcaaggaaggacgttttattggca

SEQ ID NO: 208455 - DNA, 75 bp, synthetic construct
  source 1..75: mol_type = other DNA
ttaaccaggccgtggcagttggtgacaatctcgaagcggatttaggccaggtctataacgttaccgccaatctct

SEQ ID NO: 208456 - DNA, 75 bp, synthetic construct
  source 1..75: mol_type = other DNA
atggcgcgatttgtggtgttagtgattgatagcttcggcgtgggagcaatgaaagatgtcacgcgggtacgcccg

SEQ ID NO: 208457 - DNA, 75 bp, synthetic construct
  source 1..75: mol_type = other DNA
cggatgccctttcgcgatgtgattgaccgtgttgaacaggcattagtcaccgctggctggcgggttgagcgccgt

SEQ ID NO: 208458 - DNA, 75 bp, synthetic construct
  source 1..75: mol_type = other DNA
aatttttccgcgcatcgccgccacaaaacggcacttcctttttatcgtcctttcgctttcagggtgactctttat

SEQ ID NO: 208459 - DNA, 75 bp, synthetic construct
  source 1..75: mol_type = other DNA
agaagggcgctttattggtattaatgcgccgcgttctggcgcttatgacaacggcttccaggtcgtgcatatggg

SEQ ID NO: 208460 - DNA, 75 bp, synthetic construct
  source 1..75: mol_type = other DNA
gaccggtgagcgtggtcgccgtggcaccttgatgcgcggtttacagcgtatcgaccgtgtcgagattgactcacc

SEQ ID NO: 208461 - DNA, 75 bp, synthetic construct
  source 1..75: mol_type = other DNA
cgaagcggaaatcatcacctcccgggcggagatccgcaaaatctacgaaaatggtcgtggttctgtgcgtatgcg

SEQ ID NO: 208462 - DNA, 75 bp, synthetic construct
  source 1..75: mol_type = other DNA
cgcatgttgatgttcccggtaagcgagcttccgcaactgtcgaagggtaaaggcaacaagatcatcaacatcccg

SEQ ID NO: 208463 - DNA, 75 bp, synthetic construct
  source 1..75: mol_type = other DNA
ttgcagctaccaacgctggagaagctggggctaatcaacgcattgggttatgcgccaggcgatatgcagccgtca

SEQ ID NO: 208464 - DNA, 75 bp, synthetic construct
  source 1..75: mol_type = other DNA
ggcgatgaactgcaatttctgtgggtcaatcaggcggttgcgattggcgataatctcgaggcggatttaggccag

SEQ ID NO: 208465 - DNA, 75 bp, synthetic construct
  source 1..75: mol_type = other DNA
aggtacgcgccccttgccgccgctgcggatgccctttcgcgacgttattgatcgtgttgaacgagccttaatggc

SEQ ID NO: 208466 - DNA, 75 bp, synthetic construct
  source 1..75: mol_type = other DNA
aggtacgcgcccgttaccgccgctgcggatgccctttcgtgatgtgattgaccgtgttgagcaggcattagtttc

SEQ ID NO: 208467 - DNA, 75 bp, synthetic construct
  source 1..75: mol_type = other DNA
gaaagtcctcaagcgcctgcatatcctcgaaggtttactggtggcgtttctcaatatcgacgaagtgattgagat

SEQ ID NO: 208468 - DNA, 75 bp, synthetic construct
  source 1..75: mol_type = other DNA
cggtgacgtactgggtaaataccatccgcacggcgatagcgcctgttatgaagcgatggtcctgatggcgcagcc

SEQ ID NO: 208469 - DNA, 75 bp, synthetic construct
  source 1..75: mol_type = other DNA
atccggtttttacaagctgatcgccagaagtcggaaagctgttactcctggcacgttcgcccatcgtttcagtaa

SEQ ID NO: 208470 - DNA, 75 bp, synthetic construct
  source 1..75: mol_type = other DNA
ccttccgtcaccaaagagctgaacggcaaagaacatgtggttaacagcagtatccggaagaaaggcgatttcacc

SEQ ID NO: 208471 - DNA, 75 bp, synthetic construct
  source 1..75: mol_type = other DNA
tacaacgtcgagctgaatgtcatcgatgataaatcggcacaacaacccgctttccaggtgagctatcgctatccg

SEQ ID NO: 208472 - DNA, 75 bp, synthetic construct
  source 1..75: mol_type = other DNA
caaacgctctacgaactgcggttccgggacggtgataaggaggttgctgcgctcatggcctgcacgtccaggtaa

SEQ ID NO: 208473 - DNA, 75 bp, synthetic construct
  source 1..75: mol_type = other DNA
gtgaacgttcgcgtggtgtatctgaacggcgatccgtggtttgttgcaaaggatgtctgcgctgcgctggaactg

SEQ ID NO: 208474 - DNA, 75 bp, synthetic construct
  source 1..75: mol_type = other DNA
ctatctggatgcgtgagactagcgggatggcaaactcctttagcgaacgatgcaacaggttcaacgcattgctac

SEQ ID NO: 208475 - DNA, 75 bp, synthetic construct
  source 1..75: mol_type = other DNA
tcgtcatggccgatcacggtaacgacccgactatcggtcacagccaccatacccgcgaagtggtgccggtgctgg

SEQ ID NO: 208476 - DNA, 75 bp, synthetic construct
  source 1..75: mol_type = other DNA
gtttgtgctgcgctggaactgaccaattcgcgtacggcgttgcagatgcttgatgatgacgaaaagggagtaaat

SEQ ID NO: 208477 - DNA, 75 bp, synthetic construct
  source 1..75: mol_type = other DNA
tcccatggggtgcattacaggatttttcccgccgtaaagagcaatatcaaataagtgccagcgagaaggggaggg

SEQ ID NO: 208478 - DNA, 75 bp, synthetic construct
  source 1..75: mol_type = other DNA
cagataagtgccagcgagaaggggagggagctacaggcatgtaagcgcaaaaagcgtgagctggaggaagaagaa

SEQ ID NO: 208479 - DNA, 75 bp, synthetic construct
  source 1..75: mol_type = other DNA
acattgctggctggtcttttctccggtctatttctggttaattctctcgaatttcattctttatatttctccaga

SEQ ID NO: 208480 - DNA, 75 bp, synthetic construct
  source 1..75: mol_type = other DNA
gttttgcgttaggcaatattattgccagtggcgtagcaaaaatagaagccataggaagaagtggggcgattgggt

SEQ ID NO: 208481 - DNA, 75 bp, synthetic construct
  source 1..75: mol_type = other DNA
gctacgcccaaattatggtggggcgtacagggccgacttcggtcgggccgggttcggtagtctccggtaacgcca

SEQ ID NO: 208482 - DNA, 75 bp, synthetic construct
  source 1..75: mol_type = other DNA
acgcgacagcggcgcatcaggcaatgcggtgtattacctgatgcatatttaaatccaccacaagaagccccatat

SEQ ID NO: 208483 - DNA, 75 bp, synthetic construct
  source 1..75: mol_type = other DNA
atgcagcaatatttaaatccaccacaagaagccccatttatgaaaaacgcgacgttctaccttctggacaatgac

SEQ ID NO: 208484 - DNA, 75 bp, synthetic construct
  source 1..75: mol_type = other DNA
aggaagaagtggggcgattgggtaacgtgcttaagtttggcgattttagctctggggccgttattcaattattta

SEQ ID NO: 208485 - DNA, 75 bp, synthetic construct
  source 1..75: mol_type = other DNA
atgatgaataaaatcagactttatattcctccgttaattcttggtttttttattgtgccgttgttggtgtggccg

SEQ ID NO: 208486 - DNA, 75 bp, synthetic construct
  source 1..75: mol_type = other DNA
atgattaaattccggatttatattccccctgtaattcttggttttgttatcgtgccattattggtatggcggacg

SEQ ID NO: 208487 - DNA, 75 bp, synthetic construct
  source 1..75: mol_type = other DNA
tctcggcgctcattggcatcattatggcttctggccttggtgactggattgcccacggtcttgctccgctggcca

SEQ ID NO: 208488 - DNA, 75 bp, synthetic construct
  source 1..75: mol_type = other DNA
atcaggcgtatttcacttctgcaattacaactatggttatcggctgaatatgcgcttttctgctgtgcaatggtg

SEQ ID NO: 208489 - DNA, 75 bp, synthetic construct
  source 1..75: mol_type = other DNA
ggcttcccctgaatttttcccctttttggccgcagccgtggactgattttgtcggcccgattagtgcacaggttg

SEQ ID NO: 208490 - DNA, 75 bp, synthetic construct
  source 1..75: mol_type = other DNA
attttggtcccaaccgtggattgactttgtcggtccaataagcgcacagcttggttttgcgttgggatattattg

SEQ ID NO: 208491 - DNA, 75 bp, synthetic construct
  source 1..75: mol_type = other DNA
atgaatcagcacaatacacgccttattcgtttaccagaggttctaaatcgaaccggctatggtaaagcctggatc

SEQ ID NO: 208492 - DNA, 75 bp, synthetic construct
  source 1..75: mol_type = other DNA
cgtattaacctcaatatgattggtctggatgggcgtccggcggtgaaaaacctgctggaaatcctctccgaatgg

SEQ ID NO: 208493 - DNA, 75 bp, synthetic construct
  source 1..75: mol_type = other DNA
cggacgatccgaaatcgttcgcggcaatgcgttataccgaatcccgcctgtcgaaatattctgagctgttactga

SEQ ID NO: 208494 - DNA, 75 bp, synthetic construct
  source 1..75: mol_type = other DNA
gcaaaaataccgaaagcattgaataccgcgatgttctggtcgcaaaaggcatctataacgtagaggataaactgc

SEQ ID NO: 208495 - DNA, 75 bp, synthetic construct
  source 1..75: mol_type = other DNA
cgctgccgtcggcgcgtggtcagggcgaaccactcaccggtaaactgacgttaccgccaggtgccacagttgatc

SEQ ID NO: 208496 - DNA, 75 bp, synthetic construct
  source 1..75: mol_type = other DNA
acctgctgaagaaagagctacaggccgacgcacaggcctacggcgacgatcgccgttcgccgttgcaggaacgcg

SEQ ID NO: 208497 - DNA, 75 bp, synthetic construct
  source 1..75: mol_type = other DNA
acgcgccgggcctgaattataaagcgggtgatagcttcaaagcggcggtgaaaggtaagagcaaccaaccggtag

SEQ ID NO: 208498 - DNA, 75 bp, synthetic construct
  source 1..75: mol_type = other DNA
ttattgtaactgtagggtcagcggcagggcttgtaggaagtatgaaagatttggcccttgcagctaaaaagttgg

SEQ ID NO: 208499 - DNA, 75 bp, synthetic construct
  source 1..75: mol_type = other DNA
ccacgcccgctgaatattttcgttaatgtcgcgctgatttttacggttctgatgcatggtatgcaactggcgctg

SEQ ID NO: 208500 - DNA, 75 bp, synthetic construct
  source 1..75: mol_type = other DNA
atgctgattaatattggtcgtttgttaatgctctgcgtttggggatttttaatcctcaacctggtgcatcccttc

SEQ ID NO: 208501 - DNA, 75 bp, synthetic construct
  source 1..75: mol_type = other DNA
agttgccgcacctgtatctcttattgtaggcgctgttgcgggggttatcactgctatccttgaggcttctaaaca

SEQ ID NO: 208502 - DNA, 75 bp, synthetic construct
  source 1..75: mol_type = other DNA
cgttgaatatcgccagtgaaactctgaagatggccgtcagttctgttggttctgtcagtaagtttgcagacacgt

SEQ ID NO: 208503 - DNA, 75 bp, synthetic construct
  source 1..75: mol_type = other DNA
cgttaaccagttcacttctctccttacaactgttcaatcgattctctcaacctcactggctggggtcgacctcaa

SEQ ID NO: 208504 - DNA, 75 bp, synthetic construct
  source 1..75: mol_type = other DNA
tcagtggcttttctggttatgttctgtgtgctcggatggggaatgaaaacaatactcgacaggaactacaacgcc

SEQ ID NO: 208505 - DNA, 75 bp, synthetic construct
  source 1..75: mol_type = other DNA
gcggtgccggtgtatgacaatcgggcgatcattaaacgtcactggatgtcgctgacggcgggcgtactgacggca

SEQ ID NO: 208506 - DNA, 75 bp, synthetic construct
  source 1..75: mol_type = other DNA
ttatgtacaaccaaccacctttggtgccgctgccggtgccgccaatgccatgctctcactggtaaaactggccgg

SEQ ID NO: 208507 - DNA, 75 bp, synthetic construct
  source 1..75: mol_type = other DNA
agattacataaatgagcaatttactttctatcagttaattattggaaagctaataggacgtttttcctctttttc

SEQ ID NO: 208508 - DNA, 75 bp, synthetic construct
  source 1..75: mol_type = other DNA
atggttacgctttggggaaattatgaggggatctctcagggcacccgctgctttatcgacgccgataatatgcgt

SEQ ID NO: 208509 - DNA, 75 bp, synthetic construct
  source 1..75: mol_type = other DNA
ccattcaggcaacaaaagcggctgcggcggtccgtaaaatcacgattgaagcaaaccagaccgctgattttgaag

SEQ ID NO: 208510 - DNA, 75 bp, synthetic construct
  source 1..75: mol_type = other DNA
ccacactcaaactgaaaaagacagcaccgttctctgctctgttgtctgttaacggcgagcgtaactcccagaagt

SEQ ID NO: 208511 - DNA, 75 bp, synthetic construct
  source 1..75: mol_type = other DNA
gggtgatgggccgccgtctgcgtacccagacgcgctttgatttggcattaggcgatgtctgcggcgaggcggcct

SEQ ID NO: 208512 - DNA, 75 bp, synthetic construct
  source 1..75: mol_type = other DNA
tgtcgaaaatgcttatgctgagctggtggcgcagggatggctggtcaggcggggacaggcgggtacctttgtcag

SEQ ID NO: 208513 - DNA, 75 bp, synthetic construct
  source 1..75: mol_type = other DNA
acgcgtctcacgcgggattgaatgccagccagaacaggtctttatcactcatggttatgcagcctcaatggcctt

SEQ ID NO: 208514 - DNA, 75 bp, synthetic construct
  source 1..75: mol_type = other DNA
tggttctgcgcattattcagctggaagcggtgcaggaagatatggctaacgaatttcgtgatctgcttgttgaga

SEQ ID NO: 208515 - DNA, 75 bp, synthetic construct
  source 1..75: mol_type = other DNA
gctaatggtgacaccattcaggcaaccaaagcggctgcggcagtccgtaaaatcacaattgaagcaaaccagacc

SEQ ID NO: 208516 - DNA, 75 bp, synthetic construct
  source 1..75: mol_type = other DNA
tttctggcgacatctgaaaaaaatgcgtcagcactatgctcaacggcgacagtggattgagcaggcgcttatgca

SEQ ID NO: 208517 - DNA, 75 bp, synthetic construct
  source 1..75: mol_type = other DNA
gcgttccgtttgaaggtctgaaagaacgttcgtttaaattacgcctcagcattatcactggcgatcgtcctgtac

SEQ ID NO: 208518 - DNA, 75 bp, synthetic construct
  source 1..75: mol_type = other DNA
gcaggtgtcagaatttgccagttagtcgataaccatgccatcacacattctgaagggcatatcaacattaccgtg

SEQ ID NO: 208519 - DNA, 75 bp, synthetic construct
  source 1..75: mol_type = other DNA
acgtccgtttaaattacgcctcagcattatcactggcgatcgtccggtactggttctgcgcattattcagctgga

SEQ ID NO: 208520 - DNA, 75 bp, synthetic construct
  source 1..75: mol_type = other DNA
ttacgcctcagcattatcactggcgatcgtcctgtactggttctgcgcattattcagctggaagcggtgcaggaa

SEQ ID NO: 208521 - DNA, 75 bp, synthetic construct
  source 1..75: mol_type = other DNA
gaagaaatggctaacgaatttcgtgatctgcttgttgagaaattcaaagacagcaaagtagaaacctttattggt

SEQ ID NO: 208522 - DNA, 75 bp, synthetic construct
  source 1..75: mol_type = other DNA
taatatgcgtgccgtcagtgtgcttaacctgggtactattgatgaaccaggtcacgcagataacaccgccactct

SEQ ID NO: 208523 - DNA, 75 bp, synthetic construct
  source 1..75: mol_type = other DNA
ttacgcaacactgagcctctgaatctttatttaatgttgttggatattgaccgatttaaatggttaatgatacct

SEQ ID NO: 208524 - DNA, 75 bp, synthetic construct
  source 1..75: mol_type = other DNA
aatcacgattgaagctaaccagaccgctgattttgaagataatgacttcagcggcaaacgctctctgatggattc

SEQ ID NO: 208525 - DNA, 75 bp, synthetic construct
  source 1..75: mol_type = other DNA
aaagaacgtccgtttaaattacgcctcagcattatcactggcgatcgtcctgtactggttctgcgcattattcag

SEQ ID NO: 208526 - DNA, 75 bp, synthetic construct
  source 1..75: mol_type = other DNA
ggattgaagactgggccgactaccttgtgggctttgatgctaatggtgacgccattcaggcaacaaaagcggctg

SEQ ID NO: 208527 - DNA, 75 bp, synthetic construct
  source 1..75: mol_type = other DNA
ttcacccgactggtgcatgtgtggagcgcgccgtttgagtacttcacccgccggtatcagattgtgcgctcgcgg

SEQ ID NO: 208528 - DNA, 75 bp, synthetic construct
  source 1..75: mol_type = other DNA
ttcacccgactggtgcatgtatggagcgcaccatttgagtactttacccgcaggtatcagattgtacgttcgcgg

SEQ ID NO: 208529 - DNA, 75 bp, synthetic construct
  source 1..75: mol_type = other DNA
atgattcagtatctgaacgtctttttttacgatatctacccgtacatttgtgcgacggtgtttttcctcggcagc

SEQ ID NO: 208530 - DNA, 75 bp, synthetic construct
  source 1..75: mol_type = other DNA
aaggctatgacagagtcccgctggtggtgccgttgctgttttatcatggcgaaacctcgccctacccatactcac

SEQ ID NO: 208531 - DNA, 75 bp, synthetic construct
  source 1..75: mol_type = other DNA
acccgttttattgaggagattgccgaacgttcaccactacaaaaggagagattaatgactattgctgaacggcta

SEQ ID NO: 208532 - DNA, 75 bp, synthetic construct
  source 1..75: mol_type = other DNA
gaaaacagcccgtaaaattaataacgtttcgtttgatggaacatcagatattaacctgacgccgaaaaatattgg

SEQ ID NO: 208533 - DNA, 75 bp, synthetic construct
  source 1..75: mol_type = other DNA
tcagccagcgcactcggggtcgcaacgtttcaaaccgcactgatctccgcgctattgctgtctggtttactttgc

SEQ ID NO: 208534 - DNA, 75 bp, synthetic construct
  source 1..75: mol_type = other DNA
ccgctggaaatgcaaaagtagctgaagctacgggatcatgctggtttcaatcacctagaatttcatcgttggatt

SEQ ID NO: 208535 - DNA, 75 bp, synthetic construct
  source 1..75: mol_type = other DNA
gtgcttctgcgcccgtcaaaaagaagtcgtttttttctaaattcactcgtctgaatatgcttcgcctggttcgtg

SEQ ID NO: 208536 - DNA, 75 bp, synthetic construct
  source 1..75: mol_type = other DNA
aatattggcgttaccagcctgacgtttatgaaacacaatggaatgattccaaccactgacaatcttgactcctat

SEQ ID NO: 208537 - DNA, 75 bp, synthetic construct
  source 1..75: mol_type = other DNA
ccaggataaatcagcttttctggacaatattggtgttaccagcctgacgtttatgaaaaacaacggcgaaatgcc

SEQ ID NO: 208538 - DNA, 75 bp, synthetic construct
  source 1..75: mol_type = other DNA
gtaattactgggcttggcattgtcggcgaagttgatggcgacgatccggcagtattcagaccaatacaaaagtta

SEQ ID NO: 208539 - DNA, 75 bp, synthetic construct
  source 1..75: mol_type = other DNA
ggaacaggtacaacccttaaaggccgcacctttgagcgcgtctttaccggcagctcatggagcgaatggcgggaa

SEQ ID NO: 208540 - DNA, 75 bp, synthetic construct
  source 1..75: mol_type = other DNA
caaacgctacatcgcaggagtgacttgtcaacggatttatgaatctttaagagataaaaaatatcagatgtatat

SEQ ID NO: 208541 - DNA, 75 bp, synthetic construct
  source 1..75: mol_type = other DNA
ctggaagtctttgaaggcggtctgtatgggagaatgcaacgttacaccacccgtagtgggactatgtacattcgc

SEQ ID NO: 208542 - DNA, 75 bp, synthetic construct
  source 1..75: mol_type = other DNA
gaatataccaataaccctgaattatcaattgccaatgttacatcgttagtggagaacacagaatgtctgaattaa

SEQ ID NO: 208543 - DNA, 75 bp, synthetic construct
  source 1..75: mol_type = other DNA
taaggcgaccttcggtaaggactccagtgttgttaaatgggttgttctggctgaagttctggtcggtgctgtcat

SEQ ID NO: 208544 - DNA, 75 bp, synthetic construct
  source 1..75: mol_type = other DNA
ctgtgatcccggctgctgttctgatgatgttcttcccgcagctggcgatggccgctggcagcagtggtcaggacc

SEQ ID NO: 208545 - DNA, 75 bp, synthetic construct
  source 1..75: mol_type = other DNA
gattgggcaatctgaattatttagcgccctgattgtggaagacaaagacaaactgtttttgtcggagctggcggg

SEQ ID NO: 208546 - DNA, 75 bp, synthetic construct
  source 1..75: mol_type = other DNA
cagcaaatcgctatttcctgcattgcgctgtgcgtggctggtggtgccggtggagcagattacgcaattccgcca

SEQ ID NO: 208547 - DNA, 75 bp, synthetic construct
  source 1..75: mol_type = other DNA
aaacaaaggcgtagcggcattcgctggcttcgtcggttatgcggtaatgaacctcgcggtaaacttctggttgac

SEQ ID NO: 208548 - DNA, 75 bp, synthetic construct
  source 1..75: mol_type = other DNA
catgatgaccaaaaatgtcaagttcctggtcggctttgccatactctctgtatttattgcagtaggtatgtctgt

SEQ ID NO: 208549 - DNA, 75 bp, synthetic construct
  source 1..75: mol_type = other DNA
gtacatgatgaccaaaaacgtcaagttcctggccggctttgccatactctctgtatttattgctgtgggtatgtc

SEQ ID NO: 208550 - DNA, 75 bp, synthetic construct
  source 1..75: mol_type = other DNA
ctgaagttctggtcggtgctgtcatgtacatgatgaccaaaaacgtcaagttcctggccggttttgccatcatct

SEQ ID NO: 208551 - DNA, 75 bp, synthetic construct
  source 1..75: mol_type = other DNA
ggtggtgcaggtcaggacctgatggccagcggtaatggtacggtcaaggccaccttcggtaaggattccagtgcg

SEQ ID NO: 208552 - DNA, 75 bp, synthetic construct
  source 1..75: mol_type = other DNA
ccacaccgattttattttaaatctgatccgccacagcgagcacagtaaaccgcagcaggtggcgaaatccgtcaa

SEQ ID NO: 208553 - DNA, 75 bp, synthetic construct
  source 1..75: mol_type = other DNA
actttctcaaaaagcatcgcagcaatatcaccttaaaaaagattggctgcgaaatggatattattaataaaaacg

SEQ ID NO: 208554 - DNA, 75 bp, synthetic construct
  source 1..75: mol_type = other DNA
aaacctccggtattgcgctgaaattaaaactggacagcagcacggtgattacccactgggcgtatcaattaacct

SEQ ID NO: 208555 - DNA, 75 bp, synthetic construct
  source 1..75: mol_type = other DNA
cgacaggatcaccacgcttttggttagaggcttcactaatgacagccagctacaaacactgtttaattatctgct

SEQ ID NO: 208556 - DNA, 75 bp, synthetic construct
  source 1..75: mol_type = other DNA
cgcatgatgcggtgtttaaaacgtttatgttttcacctgaaaccgcgcgggattttctggaaatacatctgccgg

SEQ ID NO: 208557 - DNA, 75 bp, synthetic construct
  source 1..75: mol_type = other DNA
cgcatgatgcggtgtttaaaacctttatgttcacacccgaaaccgcacgggattttctcgaaatacatttaccag

SEQ ID NO: 208558 - DNA, 75 bp, synthetic construct
  source 1..75: mol_type = other DNA
tctaaggcattcattaagaagcacacggtgtcgcactacagggccggacaactcgtctcgaaagaggaatttgag

SEQ ID NO: 208559 - DNA, 75 bp, synthetic construct
  source 1..75: mol_type = other DNA
tggaactgattcaaaagcatattcgcgaccgcgatttaatcggtatggtcgacaggatcaccacgcttttggtta

SEQ ID NO: 208560 - DNA, 75 bp, synthetic construct
  source 1..75: mol_type = other DNA
atgacagaatcaacaacatcctccccgcatgatgcggtatttaaaacctttatgttctcgcccgaaaccgcacgg

SEQ ID NO: 208561 - DNA, 75 bp, synthetic construct
  source 1..75: mol_type = other DNA
aaagtgggcagactgagccagtctactgtgtggccacaacgtcaggctcatgggctgtaccggaagggaccgtga

SEQ ID NO: 208562 - DNA, 75 bp, synthetic construct
  source 1..75: mol_type = other DNA
cgtgaccgcgccattccccgagtgatggctgcggcgctgctgtcatccacggaacaggcatttgaacggcaggca

SEQ ID NO: 208563 - DNA, 75 bp, synthetic construct
  source 1..75: mol_type = other DNA
ggtgtttgcccggcttcagtttgtgggcggcggaaaagacctggcccgcagtgtggcggcgagtcttctgtcatc

SEQ ID NO: 208564 - DNA, 75 bp, synthetic construct
  source 1..75: mol_type = other DNA
gcggaacggattacaaacgctgctgcattcgaagatgtttatcgctttctattgaatggttccggtcggttggag

SEQ ID NO: 208565 - DNA, 75 bp, synthetic construct
  source 1..75: mol_type = other DNA
tattggcagcaggacggtaaaaattacgcctcaaagctggaagcgaaaagttactgtgtcagaagtaactacgac

SEQ ID NO: 208566 - DNA, 75 bp, synthetic construct
  source 1..75: mol_type = other DNA
ctggtttatggcgatacctattcctatttttcaacggtggcatcacaggttcaggtcaacaagtatgcaatatct

SEQ ID NO: 208567 - DNA, 75 bp, synthetic construct
  source 1..75: mol_type = other DNA
atatcttcggtcaggacctcaccagtcaggacggattgtttcgactggatgaaattcgccgggtcggtatccaga

SEQ ID NO: 208568 - DNA, 75 bp, synthetic construct
  source 1..75: mol_type = other DNA
catctgccggagaacgtgtgaaacgcttctggccgcggcagttcttcgtgatgttctatgcggtgcacctggcgg

SEQ ID NO: 208569 - DNA, 75 bp, synthetic construct
  source 1..75: mol_type = other DNA
tttctggccgcggcatttcttcgcaatgttctatgctgtgcacctggcggtactgggtattgtcgtctcaatgtg

SEQ ID NO: 208570 - DNA, 75 bp, synthetic construct
  source 1..75: mol_type = other DNA
gcgcgacagacagctggcttcagcgcctgctgacctggacaccgggacaaacggatatgattaaaacggtcgcac

SEQ ID NO: 208571 - DNA, 75 bp, synthetic construct
  source 1..75: mol_type = other DNA
agcggaagacctggcgcgtgaagcgtcgtttgctcagggattacgcgcgatgattggcggtatcttaaccgcatc

SEQ ID NO: 208572 - DNA, 75 bp, synthetic construct
  source 1..75: mol_type = other DNA
agagattttttcagaaaatggatttcacagtgcctcgatgaaagccatctgtaaatcctgcgccattagtcccgg

SEQ ID NO: 208573 - DNA, 75 bp, synthetic construct
  source 1..75: mol_type = other DNA
cttctggccgcggcagttcttcgtgatgttctatgcggtgcacctggcggtactcggtattgtcgtctcgatgta

SEQ ID NO: 208574 - DNA, 75 bp, synthetic construct
  source 1..75: mol_type = other DNA
gataagtccgttatcaatatcatgatggtgtccggccagcgaaataaacgccgtgtaatcaactatcgaatgctg

SEQ ID NO: 208575 - DNA, 75 bp, synthetic construct
  source 1..75: mol_type = other DNA
atgtccgaaacaaaaaacgaacttgaagacctgctggaaaaagcagcaaccgaaccggctcatcgtccggctttt

SEQ ID NO: 208576 - DNA, 75 bp, synthetic construct
  source 1..75: mol_type = other DNA
cgccggacgtgaagtctcacaggctgagtattcagactatcaagctgtgaccgctggtcgctgtgagtggaggta

SEQ ID NO: 208577 - DNA, 75 bp, synthetic construct
  source 1..75: mol_type = other DNA
gctgtactctgggcggtcatggttttgcttatgaatatccatgatgccgggcaggctgtggcggggttggcaatt

SEQ ID NO: 208578 - DNA, 75 bp, synthetic construct
  source 1..75: mol_type = other DNA
gtgaaacaagcggttctgctgggactggcggcgaccatttcgcacacctctgtggtctggctcattgccatgggt

SEQ ID NO: 208579 - DNA, 75 bp, synthetic construct
  source 1..75: mol_type = other DNA
gcgtcaccagagatccacgctggcgcgatatggtaatcaaataccgctacaactttacccaggctgttgtcgata

SEQ ID NO: 208580 - DNA, 75 bp, synthetic construct
  source 1..75: mol_type = other DNA
taaaaaatcattagcagcttccttcctggcgtccatcatggcattaccggcgacagccggtatccctgtaatcga

SEQ ID NO: 208581 - DNA, 75 bp, synthetic construct
  source 1..75: mol_type = other DNA
taaaaaagctttaatagttcctttcgtggcgtccgtcatggcattaccggtgaaggccggaattcccgttattga

SEQ ID NO: 208582 - DNA, 75 bp, synthetic construct
  source 1..75: mol_type = other DNA
atgaatttaatgttccgagtggtttcattacaaagagggattttagccgctaaaaaagctttaatagttcctttc

SEQ ID NO: 208583 - DNA, 75 bp, synthetic construct
  source 1..75: mol_type = other DNA
cactggcgtcgttcggccagcagatatgtgtgggataacagggatgttatgtgaactgaactgtgttttgttagc

SEQ ID NO: 208584 - DNA, 75 bp, synthetic construct
  source 1..75: mol_type = other DNA
ccagacgcagctgcagcagtatgaaaacatgctcaaaaataccgtcgcacctgcggcctatatctgggatcaggc

SEQ ID NO: 208585 - DNA, 75 bp, synthetic construct
  source 1..75: mol_type = other DNA
accttgcagatttgcaaactcaggcaaccagcgcacaagggcaaatggaagctattcaggccgctaaccagcttg

SEQ ID NO: 208586 - DNA, 75 bp, synthetic construct
  source 1..75: mol_type = other DNA
agcagtgcaggaggaaatggctaacgaatttcgtgatctgcttgttgataaattcaaagacagcaaagtagaaac

SEQ ID NO: 208587 - DNA, 75 bp, synthetic construct
  source 1..75: mol_type = other DNA
gcaggaagaaatggctaacgaatttcgtgatctgcttgttgagaaattcaaggacagcaaagtagaaacctttat

SEQ ID NO: 208588 - DNA, 75 bp, synthetic construct
  source 1..75: mol_type = other DNA
gcgttccgtttgaaggcctgaaagaacgtccgtttaaattacgcctcagcattatcactggcgatcgtcctgtac

SEQ ID NO: 208589 - DNA, 75 bp, synthetic construct
  source 1..75: mol_type = other DNA
atttcatggggcgttcccgggaaaacaagactgatgtttgactcaaaggagcaggcactggaagttaaggaaggg

SEQ ID NO: 208590 - DNA, 75 bp, synthetic construct
  source 1..75: mol_type = other DNA
gtcgcagctgggctatgccgttacgctggattgagcgccatattggcttgcctgagcaaccgtcactgaccacgc

SEQ ID NO: 208591 - DNA, 75 bp, synthetic construct
  source 1..75: mol_type = other DNA
aatttcggacgtcagccgggagatttctttgcccgtacagtctttgtgctgttgcacaatctgtgtccggactgt

SEQ ID NO: 208592 - DNA, 75 bp, synthetic construct
  source 1..75: mol_type = other DNA
gcagcaaagtgctgccgcgacacttgctcaggcacaggcagataaagatgcgcagcgtactgctgcatcagcggc

SEQ ID NO: 208593 - DNA, 75 bp, synthetic construct
  source 1..75: mol_type = other DNA
ggcctggcataatgcagctggaataaccggaaatggacactttgtaatcagccgcccggatgtggatttacatcg

SEQ ID NO: 208594 - DNA, 75 bp, synthetic construct
  source 1..75: mol_type = other DNA
atggcagtgtgcgttttcgtgatcggaggaatggcgagttagtctgtgtggattatggggaccgtgtggtgttct

SEQ ID NO: 208595 - DNA, 75 bp, synthetic construct
  source 1..75: mol_type = other DNA
cagcaaaatactttacaagctgatgcagataacctcgcagatctccagactcaggcaagcggcgcaacgggccaa

SEQ ID NO: 208596 - DNA, 75 bp, synthetic construct
  source 1..75: mol_type = other DNA
atgtcatccattgatgcagcggtcgtggtggacgttacgcgtctccagcgggtgtttgcccggcttcagtttgtg

SEQ ID NO: 208597 - DNA, 75 bp, synthetic construct
  source 1..75: mol_type = other DNA
attggcgcacgtccgtatatgggctttgatcaggtggcagaacaggagatcatggacgaaatcagaaaacgcttt

SEQ ID NO: 208598 - DNA, 75 bp, synthetic construct
  source 1..75: mol_type = other DNA
ggattatggcgatacctgggcgctgattggatcaaatgaaccttatgcggccattcatcagtggggtggcctgcc

SEQ ID NO: 208599 - DNA, 75 bp, synthetic construct
  source 1..75: mol_type = other DNA
gaggcccaacaaatagtagctgatgaaaaagcgttagctggcgagaacacaccaagcccgaagcgaatttggtga

SEQ ID NO: 208600 - DNA, 75 bp, synthetic construct
  source 1..75: mol_type = other DNA
gcgcaggctcaggccgataaagaggcccagcaagcggctgcatcagaaacttttagggcagggacttataccaaa

SEQ ID NO: 208601 - DNA, 75 bp, synthetic construct
  source 1..75: mol_type = other DNA
gctcaggcacaggcagataaagatgcgcagcgtactgctgcatcagcggcaataagagaagggacttacactaaa

SEQ ID NO: 208602 - DNA, 75 bp, synthetic construct
  source 1..75: mol_type = other DNA
cgctggctcagaccgataaagaggcccaacaaatagttgctgatgaaaaagcgttagctggcgagaacacaccaa

SEQ ID NO: 208603 - DNA, 75 bp, synthetic construct
  source 1..75: mol_type = other DNA
catcactgagagggattttagcagctaaaaaatctttagcagcttccttcctggcatccatcatggcattaccgg

SEQ ID NO: 208604 - DNA, 75 bp, synthetic construct
  source 1..75: mol_type = other DNA
ctgatcgcaaatttatgattggtggtctggggaataagcaatttggcatctacatgattaataattcaaggacag

SEQ ID NO: 208605 - DNA, 75 bp, synthetic construct
  source 1..75: mol_type = other DNA
cagcggtgataccggactgcgcgaggtccagcgtctggcagaagcaaacgactttccccccgtcgatgaaaccaa

SEQ ID NO: 208606 - DNA, 75 bp, synthetic construct
  source 1..75: mol_type = other DNA
ggcaccgaagagatttatttcgccacgttccatctcggcgtggatggcggcattgaagttaccgccagccataaa

SEQ ID NO: 208607 - DNA, 75 bp, synthetic construct
  source 1..75: mol_type = other DNA
ggcaccgaagagatttatttcgccacgttccatctcggcgtggatggcggcattgaagttacagccagccataac

SEQ ID NO: 208608 - DNA, 75 bp, synthetic construct
  source 1..75: mol_type = other DNA
cagcggggataccggactgcgcgatgtccagcgtctggcagaagccaacgactttccccccgtcgatgaaaccaa

SEQ ID NO: 208609 - DNA, 75 bp, synthetic construct
  source 1..75: mol_type = other DNA
cagcggcgataccggactgcgcgatgtccagcgtctggcagaagcgaacgactttccccccgtcgatgaaaccaa

SEQ ID NO: 208610 - DNA, 75 bp, synthetic construct
  source 1..75: mol_type = other DNA
cagcggcgataccggactgcgcgaagtccagcgtctggcagaagctaacgactttccccccgtcgatgaaaccaa

SEQ ID NO: 208611 - DNA, 75 bp, synthetic construct
  source 1..75: mol_type = other DNA
ttcatgcctcgcgtggcgtgttaaaacccgccggtgtaatgctgaaatcagagtgtgctgtggtcgcgggaatcg

SEQ ID NO: 208612 - DNA, 75 bp, synthetic construct
  source 1..75: mol_type = other DNA
gaatttattcaaacgcataccgtcggctttgacgagctacgccgtgacgtgctcaattccgagtggaaagatatc

SEQ ID NO: 208613 - DNA, 75 bp, synthetic construct
  source 1..75: mol_type = other DNA
cgccgtgacgttctcaattccgagtggaaagatatcgaacgtatttctggactaagtcagacacaaatcgccgaa

SEQ ID NO: 208614 - DNA, 75 bp, synthetic construct
  source 1..75: mol_type = other DNA
accgaaccggtggtgcggttgaatgtggaatcgcgcggtgatgtgccgctgatggtagcgagaacgcgaactctg

SEQ ID NO: 208615 - DNA, 75 bp, synthetic construct
  source 1..75: mol_type = other DNA
atgaaaaaattaacctgctttaaagcctacgatattcgcgggaaattaggcgaagaattgaatgaagatattgcc

SEQ ID NO: 208616 - DNA, 75 bp, synthetic construct
  source 1..75: mol_type = other DNA
gctcgagcattgatctgcatgggggcaattttgcgctggcaatgccagatcgggaagcgagcgctgtaccgttaa

SEQ ID NO: 208617 - DNA, 75 bp, synthetic construct
  source 1..75: mol_type = other DNA
ctgcgtgacgcttacgttgatcacctgttcggttatatcaacgtcaaaaaccttacgccgctcaagctggtgatc

SEQ ID NO: 208618 - DNA, 75 bp, synthetic construct
  source 1..75: mol_type = other DNA
cagcggcgacaccggcctgcgggatatccagcgcctggcggaggagaaccagttcccgccggtggacccggcgcg

SEQ ID NO: 208619 - DNA, 75 bp, synthetic construct
  source 1..75: mol_type = other DNA
ctttaaagccctcggcgcacctgtggaattgatcaaagtgcacaacacgccggacggcaatttccccaacggtat

SEQ ID NO: 208620 - DNA, 75 bp, synthetic construct
  source 1..75: mol_type = other DNA
tggtatgcggccattttccggaatgacaggctatgacggcattgttgcctgtcttcagcaggcaatggcggacac

SEQ ID NO: 208621 - DNA, 75 bp, synthetic construct
  source 1..75: mol_type = other DNA
ccgattgtcacgccaaaatccttgggttggcacacatttgatatcaactcttatcggggcagggattgagattca

SEQ ID NO: 208622 - DNA, 75 bp, synthetic construct
  source 1..75: mol_type = other DNA
tctctgcatccacaaccgccatgtttgaacatttcatggcgaaccattcaccggcagcggtacagggtggcgtgc

SEQ ID NO: 208623 - DNA, 75 bp, synthetic construct
  source 1..75: mol_type = other DNA
tgttctgcagccatgctgctggcgtcggcctgctcccgacggctggttacccagacatcccgtatcggctccatt

SEQ ID NO: 208624 - DNA, 75 bp, synthetic construct
  source 1..75: mol_type = other DNA
gttttcttttgcgcgctggggcgcgagatgggggcagcaagtctttcggtaccgcaacagcaggtacagcttgat

SEQ ID NO: 208625 - DNA, 75 bp, synthetic construct
  source 1..75: mol_type = other DNA
agcgaggcgctgaaactggcgttagccaatggcctgcgcgacgcgggcgttgacgtgctcgatatcgggctttcc

SEQ ID NO: 208626 - DNA, 75 bp, synthetic construct
  source 1..75: mol_type = other DNA
ggtggcacgccggtaatgtcgaaaaccggacacgcctttattaaagaacgtatgcgcaaggaagacgccatctac

SEQ ID NO: 208627 - DNA, 75 bp, synthetic construct
  source 1..75: mol_type = other DNA
tgaacgtttcatggcgaaccattcaccggcagcggtgcagggcggcatgtcacagacgtcagcagacggtgatgc

SEQ ID NO: 208628 - DNA, 75 bp, synthetic construct
  source 1..75: mol_type = other DNA
ccggcacgctggtacaccggctgggtggcatgcggccattttccggaatgactggctatgacggcattgtcgcct

SEQ ID NO: 208629 - DNA, 75 bp, synthetic construct
  source 1..75: mol_type = other DNA
gcggccattttccggaatgacaggctatgacggcattgtcgcctgtcttcagcaggcaatggcggatagccaggt

SEQ ID NO: 208630 - DNA, 75 bp, synthetic construct
  source 1..75: mol_type = other DNA
tgtgaagaagcgaacggtcgtgaacaactggcggcaacgctggcggcgatgccggagatgacggtggaaaaagcc

SEQ ID NO: 208631 - DNA, 75 bp, synthetic construct
  source 1..75: mol_type = other DNA
cggcggcaccgcagcagccggtggcatccgcgcagagtgaagccgatcgcattatggcgtgtgaagaagcgaacg

SEQ ID NO: 208632 - DNA, 75 bp, synthetic construct
  source 1..75: mol_type = other DNA
caccggctgcggtccaggggggcgtgtcacaggcgtcagaagacggtgatgcggacgtgaaaatgctcatggcca

SEQ ID NO: 208633 - DNA, 75 bp, synthetic construct
  source 1..75: mol_type = other DNA
cggcctgttctgcagccatgctgctggcgtcggcctgctcccgacggctggttacccagacatcccgtatcggct

SEQ ID NO: 208634 - DNA, 75 bp, synthetic construct
  source 1..75: mol_type = other DNA
tgcacgcattaccgggcaaatcagtagcattaccgtgtggggtgtcattattccggtaattggcctgtgcattat

SEQ ID NO: 208635 - DNA, 75 bp, synthetic construct
  source 1..75: mol_type = other DNA
ctggcggcaacgctggcggcgatgccggagatgacggtggaaaaagcccgcccgatcctggcggctgcaccactg

SEQ ID NO: 208636 - DNA, 75 bp, synthetic construct
  source 1..75: mol_type = other DNA
tcaccggcagcggtacagggtggcgtgccacagacgtcagcagacggtgatgcggacgtgaaaatgctcatggcc

SEQ ID NO: 208637 - DNA, 75 bp, synthetic construct
  source 1..75: mol_type = other DNA
cggatgccggaccctcactccgtgatcagatcatggcactggatgaggcaaaaggggctgaggcgcaggctgaac

SEQ ID NO: 208638 - DNA, 75 bp, synthetic construct
  source 1..75: mol_type = other DNA
catgagcgttgaacaggcccgggcgattctggccgcggcggcaccgcagcagccggtggcatccgcacagagtga

SEQ ID NO: 208639 - DNA, 75 bp, synthetic construct
  source 1..75: mol_type = other DNA
gaggttcgccaggacatgcagcagcggattgatgcggcgcgccggatgtttgccgaaaaagtggcgatgtttacc

SEQ ID NO: 208640 - DNA, 75 bp, synthetic construct
  source 1..75: mol_type = other DNA
ggtctgtctgttgatgcagtcacgggaacagaggccgctgtttttgaaggtcagtccggcattgaggccgggctg

SEQ ID NO: 208641 - DNA, 75 bp, synthetic construct
  source 1..75: mol_type = other DNA
ccggcagcggtacggggtggcgtgccacagacgtcagcagacggtgatgcggacgtgaaaatgctcatggccatg

SEQ ID NO: 208642 - DNA, 75 bp, synthetic construct
  source 1..75: mol_type = other DNA
tttgaacgcatcatggcgaaccattcaccggcagcggtacaggggggcgtgtcacagacgtcagcagacggtgat

SEQ ID NO: 208643 - DNA, 75 bp, synthetic construct
  source 1..75: mol_type = other DNA
cagcggcgacaccggcctgcgggatatccagcgcctggcggaggaaaaccagttcccgccagtggacccggcgcg

SEQ ID NO: 208644 - DNA, 75 bp, synthetic construct
  source 1..75: mol_type = other DNA
tcccgaacccgctgctgccggagtgccgccaggacaccgccgacgcggtgcgtgcgcatcaggcggacatgggta

SEQ ID NO: 208645 - DNA, 75 bp, synthetic construct
  source 1..75: mol_type = other DNA
ggtatcagtattgaataccctgagtggcgctttaacctgcgcacgtccaacacggagccggtggtgcgtctgaac

SEQ ID NO: 208646 - DNA, 75 bp, synthetic construct
  source 1..75: mol_type = other DNA
ctcggcgcacccgtggaattaatcaaagtgcacaacacgccggacggcaatttccccaacggtattcctaacccg

SEQ ID NO: 208647 - DNA, 75 bp, synthetic construct
  source 1..75: mol_type = other DNA
cgaagaactgaatgaagatattgcctggcgcattggtcgtgcctatggcgaatttctcaaaccgaaaaccattgt

SEQ ID NO: 208648 - DNA, 75 bp, synthetic construct
  source 1..75: mol_type = other DNA
tcctaacccgttgttgccagagtgccgttctgatacaagcaatgcggtgattgagctcggtgcagacatgggaat

SEQ ID NO: 208649 - DNA, 75 bp, synthetic construct
  source 1..75: mol_type = other DNA
gaaaccaaacgcggtcgctatcagcaaatcaatctgcgtgacgcttacgttgatcacctgttcggttatatcaac

SEQ ID NO: 208650 - DNA, 75 bp, synthetic construct
  source 1..75: mol_type = other DNA
gaacagaggccgccgtttttgaaggtcaggcggcgatgccggagatgacggtggaaaaagcccgcccgatcctgg

SEQ ID NO: 208651 - DNA, 75 bp, synthetic construct
  source 1..75: mol_type = other DNA
tggccacggaggccgcagtatttatcggcgcggacgcgattaaatctggtctcgctgatcaactcgttaattacg

SEQ ID NO: 208652 - DNA, 75 bp, synthetic construct
  source 1..75: mol_type = other DNA
aacacgccggacggcaatttccccaacggtattcctaacccgttgctgccggaatgtcgcgacgacacccgcaat

SEQ ID NO: 208653 - DNA, 75 bp, synthetic construct
  source 1..75: mol_type = other DNA
catgtccggcaccgaagagatctatttcgccacgttccatctcggcgtggatggcggcattgaagttaccgccag

SEQ ID NO: 208654 - DNA, 75 bp, synthetic construct
  source 1..75: mol_type = other DNA
ccttacgccgctcaagctggtgatcaactccgggaacggcgcggcgggtccggtggtggacgccatcgaagcccg

SEQ ID NO: 208655 - DNA, 75 bp, synthetic construct
  source 1..75: mol_type = other DNA
ggaatgttgcgggctactttataccaacattaattgcaatcccagcgtttggattaattgcaagggaaattggtg

SEQ ID NO: 208656 - DNA, 75 bp, synthetic construct
  source 1..75: mol_type = other DNA
cgattggcgactgcgtaaggctcgggagcgcgatctggcggtgaactttgtcgtgcgtgaagagcatttgtggtc

SEQ ID NO: 208657 - DNA, 75 bp, synthetic construct
  source 1..75: mol_type = other DNA
accacaacctctgattgacacgcaaatcctcgccgcattctgtggacgcccgatgtcatggggctttgcctctat

SEQ ID NO: 208658 - DNA, 75 bp, synthetic construct
  source 1..75: mol_type = other DNA
ttttaactgttattcacaaatctcttttgccaacatacaggcctttggaaaagcaaaatacactgcatacatcca

SEQ ID NO: 208659 - DNA, 75 bp, synthetic construct
  source 1..75: mol_type = other DNA
acgtcaaatcccgcttcacacctttgattgcggatgaacctgccttactggaatccctgctaagaaaagcattgg

SEQ ID NO: 208660 - DNA, 75 bp, synthetic construct
  source 1..75: mol_type = other DNA
cgagataatggcaccgtccctaacttccctaatctggcaaaagtaggctctttgatcttacccagcaatagtgga

SEQ ID NO: 208661 - DNA, 75 bp, synthetic construct
  source 1..75: mol_type = other DNA
gtgaggcaagggaaggggcgtaaataccgtgaaattcacgtggcggatgcggtggacaaggccatccgcgcatgg

SEQ ID NO: 208662 - DNA, 75 bp, synthetic construct
  source 1..75: mol_type = other DNA
ggccacagcgacatatccacgacgacgcgctatgactgtcgtggtgatactatgaagatcagtgccagcaagcgc

SEQ ID NO: 208663 - DNA, 75 bp, synthetic construct
  source 1..75: mol_type = other DNA
acagtgcgttgtttaggcgaattcagcgcagtggtaaggtcgcaagccaaccgctgactacgaccgggttaacgg

SEQ ID NO: 208664 - DNA, 75 bp, synthetic construct
  source 1..75: mol_type = other DNA
aaagcgtttaaagcgattaagtcgctgattactgacgtgagcgaaacgcacaagatcagcgccgaattgctggca

SEQ ID NO: 208665 - DNA, 75 bp, synthetic construct
  source 1..75: mol_type = other DNA
ttaaaccgcagcgccagcatacttaaacgcggtgtggatgcagcagactatccgtgggaacaactcaactacgcc

SEQ ID NO: 208666 - DNA, 75 bp, synthetic construct
  source 1..75: mol_type = other DNA
gcgcagcggtaaggttgcaagccagcctctgacaacaaccgggttaacgggtatcctggctgagttacagcaaac

SEQ ID NO: 208667 - DNA, 75 bp, synthetic construct
  source 1..75: mol_type = other DNA
gggcaggaaaaatccatcaaaacgcttgcccgagaacgtcagcgcatcgtaatgggacctgactgtggaaccgcc

SEQ ID NO: 208668 - DNA, 75 bp, synthetic construct
  source 1..75: mol_type = other DNA
ctgattgcggtcgctaacatggcggaaagctataagcctgaactcgctgaaggctccgggcgcgcgcagacctgc

SEQ ID NO: 208669 - DNA, 75 bp, synthetic construct
  source 1..75: mol_type = other DNA
aatgaccatcttcctgctcttcccgttcacccgactggtgcatgtctggagcgcgccgtttgagtactttactcg

SEQ ID NO: 208670 - DNA, 75 bp, synthetic construct
  source 1..75: mol_type = other DNA
cctgttcggcatgttaacgccgcactggatgtacgcgtggtttttgccagtggcagcgaaacaactaatggcgat

SEQ ID NO: 208671 - DNA, 75 bp, synthetic construct
  source 1..75: mol_type = other DNA
gtgagggatgtccgacttggcacacgtgttgttcagaccatgcaaaaaggcgtgatgtatgagaaatcaggccat

SEQ ID NO: 208672 - DNA, 75 bp, synthetic construct
  source 1..75: mol_type = other DNA
aggacgggattaaatcgcatactcacagcgccagtgcgtcaaatacggacttaggaacgaaaacgaccagttcat

SEQ ID NO: 208673 - DNA, 75 bp, synthetic construct
  source 1..75: mol_type = other DNA
aatcagaaaccacacaggggcgcacttttgagcgcgtctacgccgggagcacatggaccgaatggcgagaagtgt

SEQ ID NO: 208674 - DNA, 75 bp, synthetic construct
  source 1..75: mol_type = other DNA
ggactggccaggggcgtacccctaaagcactggccgaacaacttgaagccggtaaaacactggatgatttcctca

SEQ ID NO: 208675 - DNA, 75 bp, synthetic construct
  source 1..75: mol_type = other DNA
ggactggacagggccgtacccccaaagctctggcagaacaaattgcagccggtaaaagtcttgatgatttcctga

SEQ ID NO: 208676 - DNA, 75 bp, synthetic construct
  source 1..75: mol_type = other DNA
ccatcgccaggcgatacgcggtgttttcgccggaggaaccttctgctacgaagcgcaacttatctgccaacaaaa

SEQ ID NO: 208677 - DNA, 75 bp, synthetic construct
  source 1..75: mol_type = other DNA
ttcactagactggtgcatgtgtggagcgcgccgtttgagtactttacccgtcggtatcagattgtacgttcgcgg

SEQ ID NO: 208678 - DNA, 75 bp, synthetic construct
  source 1..75: mol_type = other DNA
aagtaccataccgttttcagcacagtatcctgatggtagcgaaatgatgaaactggtgggttgggcgcaaagtat

SEQ ID NO: 208679 - DNA, 75 bp, synthetic construct
  source 1..75: mol_type = other DNA
gcaaccactaccggagcggatatcctgatcctgtcgctgctcgttatccagtgcgcgctgggcttgctgaccatt

SEQ ID NO: 208680 - DNA, 75 bp, synthetic construct
  source 1..75: mol_type = other DNA
gcgtcgggcgattcgttataaccgcgaagaagatatcgatgtcacggcgaaaagcgtgcagttcggtctttcttc

SEQ ID NO: 208681 - DNA, 75 bp, synthetic construct
  source 1..75: mol_type = other DNA
gttatcggctggtgcgcagcgcggaagagtgcaaaattgccctttcaagcgcagcggaaacccgcgcgtcgctgc

SEQ ID NO: 208682 - DNA, 75 bp, synthetic construct
  source 1..75: mol_type = other DNA
ctgcttaacgatctggtacgcgatgcccgcgaaccggaaaaagtggccctgttacagaaagtctggcgtcagcgt

SEQ ID NO: 208683 - DNA, 75 bp, synthetic construct
  source 1..75: mol_type = other DNA
cgagtgcagcttctgttacgcctgcgcgcaggcttgccccgaatcgctattttctccgcgccacaccagggcctg

SEQ ID NO: 208684 - DNA, 75 bp, synthetic construct
  source 1..75: mol_type = other DNA
actggcgtcgctcctctaaacagagactccgggaaaatgcgagggaaacggaccacgtttggtggcagagccgga

SEQ ID NO: 208685 - DNA, 75 bp, synthetic construct
  source 1..75: mol_type = other DNA
aactggcgctggataacgcccaggaaaaaccggacgttatctatctgaccggcggtagcgcccgttcgccgctga

SEQ ID NO: 208686 - DNA, 75 bp, synthetic construct
  source 1..75: mol_type = other DNA
gtgatcaactccgggaacggcgcagcgggtccggtggtggacgccatcgaagcccgctttaaagccctcggcgca

SEQ ID NO: 208687 - DNA, 75 bp, synthetic construct
  source 1..75: mol_type = other DNA
ctacattgtcggtttgctggcagaagcgttcctcgaaaaaaatcccggcgcgaagatcatccacgatccacgtct

SEQ ID NO: 208688 - DNA, 75 bp, synthetic construct
  source 1..75: mol_type = other DNA
agcatgtattagttatagacaataaacaatctaaagtagttgtaaatttctctattgaataccatgagaatagtc

SEQ ID NO: 208689 - DNA, 75 bp, synthetic construct
  source 1..75: mol_type = other DNA
gtgtttattggttttgattacggtacagcaaactgttcagtggcggtcatgcgtgacggtaaaccgcatttgcta

SEQ ID NO: 208690 - DNA, 75 bp, synthetic construct
  source 1..75: mol_type = other DNA
aacgtgtactggtggtggatatcggtggcggtacgactgactgttcattgttgcttatgggcccccagtggcgtt

SEQ ID NO: 208691 - DNA, 75 bp, synthetic construct
  source 1..75: mol_type = other DNA
ggattctggaacaggtgcaactggcgctggataacgcccaggaaaaaccggacgttatctacctgaccggcggta

SEQ ID NO: 208692 - DNA, 75 bp, synthetic construct
  source 1..75: mol_type = other DNA
ttttccggtttctgctgtcagggggatggcgcctgtttcgaaggtgattaccgctatcagcccggtgccgcacaa

SEQ ID NO: 208693 - DNA, 75 bp, synthetic construct
  source 1..75: mol_type = other DNA
taacgctgcatggggagtgcgaacactgtggtttgatctcgtcacaaatatagatatggatatacataaaaagaa

SEQ ID NO: 208694 - DNA, 75 bp, synthetic construct
  source 1..75: mol_type = other DNA
aaagaaaattgaaatgcagcatgaagagtttcagaaaatgacggcgcgcgagttagtgcctttattgaaatcacc

SEQ ID NO: 208695 - DNA, 75 bp, synthetic construct
  source 1..75: mol_type = other DNA
aatcgaaatgcagcatgaagagtttcagaaaatgacagagcgcgagaaagtgcctttattgaaatcgccagaata

SEQ ID NO: 208696 - DNA, 75 bp, synthetic construct
  source 1..75: mol_type = other DNA
ctttgcggaacgggcctgcgggccggggaactggttaaacttgagcgccgggactatgacaacggcatcctgacg

SEQ ID NO: 208697 - DNA, 75 bp, synthetic construct
  source 1..75: mol_type = other DNA
aaggaaaatcgaaatgcagcatgaagagtttcagaaaatgacagagcgcgagcaagtgcctttattgaaattgcc

SEQ ID NO: 208698 - DNA, 75 bp, synthetic construct
  source 1..75: mol_type = other DNA
acaggtatgcgagttatgatcttagaaggaaaatcgaaatgcagcatgaagagtttggtgatgctgccaacttac

SEQ ID NO: 208699 - DNA, 75 bp, synthetic construct
  source 1..75: mol_type = other DNA
ccattggccaaaaagcagcttgtagaatggcaggagttagtgggttacaaaatgattggcgtacgctcctccagc

SEQ ID NO: 208700 - DNA, 75 bp, synthetic construct
  source 1..75: mol_type = other DNA
cattggtggaacccgttatacgtcgaacattgggaataattcgccgtaaagatgccgtactttctccagcagcag

SEQ ID NO: 208701 - DNA, 75 bp, synthetic construct
  source 1..75: mol_type = other DNA
gcccgctggttatatcagcaactggaaacgcaatatgactggctgacctcaccggaagccgtggatgaggcgctt

SEQ ID NO: 208702 - DNA, 75 bp, synthetic construct
  source 1..75: mol_type = other DNA
cttcggggcgatgtggccccgctgctccctggtattttctttcgccccttctatgccctgccgggcattgcatga

SEQ ID NO: 208703 - DNA, 75 bp, synthetic construct
  source 1..75: mol_type = other DNA
gggcaaaggtcattgtcgcagactgtaatatcagtgaagaggcgctgatctggctcctggataacgccgccgacg

SEQ ID NO: 208704 - DNA, 75 bp, synthetic construct
  source 1..75: mol_type = other DNA
acgagcacgactggcttatctcagactctgccgtggatgaggccattctcatcaacgaatacactttcaccgaaa

SEQ ID NO: 208705 - DNA, 75 bp, synthetic construct
  source 1..75: mol_type = other DNA
tggtgacgaacatcagcccgtcaccaccgctgacattctgaccccccgacgctgggaggattacggtgaggacct

SEQ ID NO: 208706 - DNA, 75 bp, synthetic construct
  source 1..75: mol_type = other DNA
tggtgacgaacatcagcctgtcaccaccgctgacattctgaccccgcgacgcagggaggattacggtgaggacct

SEQ ID NO: 208707 - DNA, 75 bp, synthetic construct
  source 1..75: mol_type = other DNA
tggtgacgaacatcagccagtcaccaccgctgacattctgacccctcgacgccgggaggattacggtgaggacct

SEQ ID NO: 208708 - DNA, 75 bp, synthetic construct
  source 1..75: mol_type = other DNA
attgtccgccattttccccacgcattttctgcaatgaccgcgttgcaaaaacagcccagtacttcagaaaggtga

SEQ ID NO: 208709 - DNA, 75 bp, synthetic construct
  source 1..75: mol_type = other DNA
gggagggctttcagcccttcttcgcctgtcagacccgcgtatgtgacccgggccgccggggatacacaaaacaca

SEQ ID NO: 208710 - DNA, 75 bp, synthetic construct
  source 1..75: mol_type = other DNA
tccgctgacacatgaagaactgatgcactatgtacccagtatttttggggaagagcggcatacctcccgcagtga

SEQ ID NO: 208711 - DNA, 75 bp, synthetic construct
  source 1..75: mol_type = other DNA
gcgacgctgaccgatgataaaccgcgagtcattgcacttcagccaattagccagaaggaagatgctacgcgttta

SEQ ID NO: 208712 - DNA, 75 bp, synthetic construct
  source 1..75: mol_type = other DNA
ggtttccttttttatatgttggtggtattacaaactatgtcagatctctagttatttctcaacgtaatgccggac

SEQ ID NO: 208713 - DNA, 75 bp, synthetic construct
  source 1..75: mol_type = other DNA
ctgcgtctgcggcgggccggagagataaacggagaacatgtccctgaaatcattctgctcaactcccatgacggt

SEQ ID NO: 208714 - DNA, 75 bp, synthetic construct
  source 1..75: mol_type = other DNA
ttctcccggctctgtccgcacgtcaaaggcccgctgcggggccagccaatcgagctggagccgtggcaacagttc

SEQ ID NO: 208715 - DNA, 75 bp, synthetic construct
  source 1..75: mol_type = other DNA
ccaagcgtttcaatatctggtgtcagggttctacaccgtggatgggtgccggggcatgggatgcctgtgcactcg

SEQ ID NO: 208716 - DNA, 75 bp, synthetic construct
  source 1..75: mol_type = other DNA
caccatccagaaagcacggggcataccgtcgcagtgggtggaaatgctgaccaaacgtttcaatatctggtgtca

SEQ ID NO: 208717 - DNA, 75 bp, synthetic construct
  source 1..75: mol_type = other DNA
gtgacgcaatctgcaatgtgcatcccgctgtggcccgcccgaaacggtaatactgcgcatctagtcatgtgccct

SEQ ID NO: 208718 - DNA, 75 bp, synthetic construct
  source 1..75: mol_type = other DNA
gttgcagacccgccaggacttacatgcttttgcagatctagtgatgcagcgcgagaaagagggactaaccctttc

SEQ ID NO: 208719 - DNA, 75 bp, synthetic construct
  source 1..75: mol_type = other DNA
aacatcgataccgatattaagctcaaccgcgcattgtgggtgatggcagaaacgctgctggagagcctgcgctga

SEQ ID NO: 208720 - DNA, 75 bp, synthetic construct
  source 1..75: mol_type = other DNA
aaacgtccacagcggctaccggatccttcaggagtatttctgttacccggatgcgtttctcttttttgatctttg

SEQ ID NO: 208721 - DNA, 75 bp, synthetic construct
  source 1..75: mol_type = other DNA
ccgtccgctgacatatgaagagctgatgcaccatgtgccggggattttcggggaagagaaacacacgtcccgaag

SEQ ID NO: 208722 - DNA, 75 bp, synthetic construct
  source 1..75: mol_type = other DNA
tcccccacaggccagtgtgataaagcaaggcagtacggtaagagggtttatcgcagggatcgcctgttcagtggc

SEQ ID NO: 208723 - DNA, 75 bp, synthetic construct
  source 1..75: mol_type = other DNA
gtcaccaccgccgacattctgacgccacgacgccgggaggattacggtaaggacctgtggagtgcttatcagacc

SEQ ID NO: 208724 - DNA, 75 bp, synthetic construct
  source 1..75: mol_type = other DNA
aaaaatcatccaacaagatagacccgagcgttgcggcgctgatggcgtttggcacattccaggcagagcatgagg

SEQ ID NO: 208725 - DNA, 75 bp, synthetic construct
  source 1..75: mol_type = other DNA
ggcgcatgggctgagtgtgccggaacgttcacggaggaagatttacacggccaggagtgttacgcggggctggac

SEQ ID NO: 208726 - DNA, 75 bp, synthetic construct
  source 1..75: mol_type = other DNA
atcatgctggtttcccgtcattatctgccggagcagcagctacagaatcccgccaataaaaaccgcgccatctat

SEQ ID NO: 208727 - DNA, 75 bp, synthetic construct
  source 1..75: mol_type = other DNA
catttatcgccagtgggctaaatcgggctggttgcggataacgccgggcgactgcattgattacgaccggatccg

SEQ ID NO: 208728 - DNA, 75 bp, synthetic construct
  source 1..75: mol_type = other DNA
caaaaaaattatgctgctttcccgtcactatctgccggaatttcagctacagaaccccgccaacaagaaccgggc

SEQ ID NO: 208729 - DNA, 75 bp, synthetic construct
  source 1..75: mol_type = other DNA
gggggctacgccgtggatgggtaacggtgcatgggcggagtgcgccggaacgttcgcggaggcggatttatacgg

SEQ ID NO: 208730 - DNA, 75 bp, synthetic construct
  source 1..75: mol_type = other DNA
cgccaaccagcgtgctgataatgccgaacgtataagcattgagctggaaacaaaactcaatgaaatgaccgcgat

SEQ ID NO: 208731 - DNA, 75 bp, synthetic construct
  source 1..75: mol_type = other DNA
atgcccatgattttaagaacgggcgccaactggcagcctggttggggctaacgccatcacaatacagtagtggcg

SEQ ID NO: 208732 - DNA, 75 bp, synthetic construct
  source 1..75: mol_type = other DNA
aaaaggagttggtcccacaactgcctgtgctctggttgcctgtatcggtaatgcacatgattttaaaaatggacg

SEQ ID NO: 208733 - DNA, 75 bp, synthetic construct
  source 1..75: mol_type = other DNA
gggatggaggcatgctccggggctcactactgggcaaggttgtttcggcagtatggtcatgagccgcgcctgatg

SEQ ID NO: 208734 - DNA, 75 bp, synthetic construct
  source 1..75: mol_type = other DNA
gtccgtcgagttgagtgggcgcaagaggttatgttggcagatgcagagctgccgttcgaaccggaattcattgat

SEQ ID NO: 208735 - DNA, 75 bp, synthetic construct
  source 1..75: mol_type = other DNA
atgagcacttcagcacaaaaccaatcaatcgaaaatgtatctatccctgatgtcctgaatgccggtatcccggcc

SEQ ID NO: 208736 - DNA, 75 bp, synthetic construct
  source 1..75: mol_type = other DNA
gtgcgtgttattgccattgtggggtgtgatggttcaggtaaatcgactctcacagcaagtctggtgaatgaactg

SEQ ID NO: 208737 - DNA, 75 bp, synthetic construct
  source 1..75: mol_type = other DNA
acattcaatggcgcaaagatccttgaactggatggtcggcaaccagccgatgaaatcctgcaagcctcattacgc

SEQ ID NO: 208738 - DNA, 75 bp, synthetic construct
  source 1..75: mol_type = other DNA
cgctgttccgctatacgttggcgattatgctattggcgataggcggggcgtggctgtttattcgtatccagaacc

SEQ ID NO: 208739 - DNA, 75 bp, synthetic construct
  source 1..75: mol_type = other DNA
catcgtacccgacagggttttatcgaagagaaaacagcaacatataatcgtcttcgagggttgatatcagaattc

SEQ ID NO: 208740 - DNA, 75 bp, synthetic construct
  source 1..75: mol_type = other DNA
acattcaatggcgcaaagatccttgaactggatggtcggcaaccagccgatgaaattatgcaagcgtcactacgc

SEQ ID NO: 208741 - DNA, 75 bp, synthetic construct
  source 1..75: mol_type = other DNA
ccgggtttccgctttgatggcccgcaattggcaaaaaccacgggcggtaacggttggataaaaatgttaaggtag

SEQ ID NO: 208742 - DNA, 75 bp, synthetic construct
  source 1..75: mol_type = other DNA
gaaagggattggtcccacaacggcctgtgcgctggtcgccagtatcggtaatgcccatgattttaagaatggacg

SEQ ID NO: 208743 - DNA, 75 bp, synthetic construct
  source 1..75: mol_type = other DNA
ttgcagggcaggttcaggtgccgtgcattgagcgtaatgccattgcctctgtgaaggcgattaacgccgcacgga

SEQ ID NO: 208744 - DNA, 75 bp, synthetic construct
  source 1..75: mol_type = other DNA
aatgcaaaacgaactggcgctgcacagcaaaaaagagatcgatgaatattttgctcatgtctggcaaaccatgca

SEQ ID NO: 208745 - DNA, 75 bp, synthetic construct
  source 1..75: mol_type = other DNA
ttattattccatcggcggcggctttatcgtcgatgaagaacattttggtcaggatgccgcaaacgacgtgagcgt

SEQ ID NO: 208746 - DNA, 75 bp, synthetic construct
  source 1..75: mol_type = other DNA
catatgaactacataaaagattacacactcttatccccgtacctgacagccccttgtttttcagctatcagctat

SEQ ID NO: 208747 - DNA, 75 bp, synthetic construct
  source 1..75: mol_type = other DNA
aggcgtttattgcttggataaataatctaaatagaaaaactatagtacagttgaatgctggtgtgaaaaagctta

SEQ ID NO: 208748 - DNA, 75 bp, synthetic construct
  source 1..75: mol_type = other DNA
accgaaggcgtactgccaggcccgctgcgcgtgccgcgtcgtgcgtcggccctgcgccggatgctggtttccagc

SEQ ID NO: 208749 - DNA, 75 bp, synthetic construct
  source 1..75: mol_type = other DNA
gggggctgcgagcagcgaagatttgttagcggtcataagtcgtcaggggtataccgcgcgtcacgtggtgattac

SEQ ID NO: 208750 - DNA, 75 bp, synthetic construct
  source 1..75: mol_type = other DNA
attcattttaccggtaccggttatctgttacgttccgtcgtctggtcgtcacactcatccggcgttatggtgtca

SEQ ID NO: 208751 - DNA, 75 bp, synthetic construct
  source 1..75: mol_type = other DNA
gggcaaaggtcattgtcgcagactgtaatatcagtgaagagacattggtctggattctggataatgccgctggcg

SEQ ID NO: 208752 - DNA, 75 bp, synthetic construct
  source 1..75: mol_type = other DNA
ccccatgagctggcgacaggtgtcatgacggcattagttggtgcacctgtttttgtcattatggcgacgaggatg

SEQ ID NO: 208753 - DNA, 75 bp, synthetic construct
  source 1..75: mol_type = other DNA
gctttgtggcgcggccgtatcgattgctggcccgattggttttgtcggcttgctcgtaccgcagattgtccggcg

SEQ ID NO: 208754 - DNA, 75 bp, synthetic construct
  source 1..75: mol_type = other DNA
ggtgcccgatttattgcaccacaaacggtgttgcaggcatttcttcattttgaaccgcaaaacttcgatcacaac

SEQ ID NO: 208755 - DNA, 75 bp, synthetic construct
  source 1..75: mol_type = other DNA
tgacgaacatcagcccgtccccaccgccgacattctgacaccacgacgccgggaggattacggtaaggacctgtg

SEQ ID NO: 208756 - DNA, 75 bp, synthetic construct
  source 1..75: mol_type = other DNA
aaatgtggtggagaaagttatggaaggggcttacgaggtggtgggtgtgtttgaccggatggaggaaaagcgtga

SEQ ID NO: 208757 - DNA, 75 bp, synthetic construct
  source 1..75: mol_type = other DNA
aaatgtggtggagaaagttatcgaaggggcttacgaggtggtgggtgtgtttgaccggatcgaggaaaagcgtga

SEQ ID NO: 208758 - DNA, 75 bp, synthetic construct
  source 1..75: mol_type = other DNA
atcaccgtactggaaagtctgcagcgggaaggcttccagccctttttcgcctgccagacccgtgtgcgcgacccg

SEQ ID NO: 208759 - DNA, 75 bp, synthetic construct
  source 1..75: mol_type = other DNA
cgccgggaggattacggtaaggacctgtggagtgcttatcagaccatccaggagaatatgctgaaaggggggatt

SEQ ID NO: 208760 - DNA, 75 bp, synthetic construct
  source 1..75: mol_type = other DNA
gataaacggagaacatgtccctgaaattattcagctcaactctcatgacggtacctccagctaccagatgctgcc

SEQ ID NO: 208761 - DNA, 75 bp, synthetic construct
  source 1..75: mol_type = other DNA
aaatgtggtggagaaagttatagaaggggcttacgaggtggtgggtgtgtttgaccggatagaggaaaagcgtga

SEQ ID NO: 208762 - DNA, 75 bp, synthetic construct
  source 1..75: mol_type = other DNA
cttacgaggtggtgggcgtgtttgaccggatagaggagaagcatgatgccatgcagtcgctggtcctgtcgccac

SEQ ID NO: 208763 - DNA, 75 bp, synthetic construct
  source 1..75: mol_type = other DNA
catccagctaccagatgttacccggatattttcgtgccatctgcaccaatggcttggtctgcggtcagtcgctgg

SEQ ID NO: 208764 - DNA, 75 bp, synthetic construct
  source 1..75: mol_type = other DNA
aaatgtggtggagaaagttattgaaggggcttacgaggtggtgggtgtgtttgaccggattgaggaaaagcgtga

SEQ ID NO: 208765 - DNA, 75 bp, synthetic construct
  source 1..75: mol_type = other DNA
aaatgtggtggagaaagttatagaaggggcttacgaggtggtgggtgtgtttgaccggatggaggagaagcgtga

SEQ ID NO: 208766 - DNA, 75 bp, synthetic construct
  source 1..75: mol_type = other DNA
aaatgtggtggagaaagttatagaaggggcttacgaggtggtgggtgtgtttgaccggatcgaggacaagcgtga

SEQ ID NO: 208767 - DNA, 75 bp, synthetic construct
  source 1..75: mol_type = other DNA
ggtgcttacgaagtggtgggcgtgtttgacctgattgaggaaaagcgtgatgccatgcagtcgctggtactgccg

SEQ ID NO: 208768 - DNA, 75 bp, synthetic construct
  source 1..75: mol_type = other DNA
accactaacccatgaagagctgttgagtcatgtccccagcgtgttcggaagcgacaagcatgaatcacgttcaga

SEQ ID NO: 208769 - DNA, 75 bp, synthetic construct
  source 1..75: mol_type = other DNA
gggaggactacagcgatgacctgtggaccgtctaccagcgcgtgcaggagaacctgatgaaaggtggattgtcag

SEQ ID NO: 208770 - DNA, 75 bp, synthetic construct
  source 1..75: mol_type = other DNA
ggggcttacgaagtgctcggtgtctttgaccgggttgaagaaaaacgtgatgccatgcagtcactggcgctgcca

SEQ ID NO: 208771 - DNA, 75 bp, synthetic construct
  source 1..75: mol_type = other DNA
ggtcgtcgtgaacatacaaagcatatgctgcgtctgcggcgggaagggcagatcaccggtatacaggtgccggaa

SEQ ID NO: 208772 - DNA, 75 bp, synthetic construct
  source 1..75: mol_type = other DNA
aactcatacccgtgctgtgcgtggcattgacggggatgtgaagctcaaccgggcgctgtggatgatggcggaaac

SEQ ID NO: 208773 - DNA, 75 bp, synthetic construct
  source 1..75: mol_type = other DNA
aatcgtcgcgaacacacaaagcacatgctgcgtctgcggcgtgaggggcagattaccggtaagcaggtcccggaa

SEQ ID NO: 208774 - DNA, 75 bp, synthetic construct
  source 1..75: mol_type = other DNA
aaccggccaccaggtccccgaaattatcctcctcaacagccatgacggctcatccagctatcagatgctgccggg

SEQ ID NO: 208775 - DNA, 75 bp, synthetic construct
  source 1..75: mol_type = other DNA
cccggttttattgctgcgggtctgttgctggggatagcgacgttaatcgccacggtgatgcacgttccggcagat

SEQ ID NO: 208776 - DNA, 75 bp, synthetic construct
  source 1..75: mol_type = other DNA
cgttcggcggcacgggcgtcaatggcgcaattatcgccgcgctctttttgctcggttataaccctgctgccacca

SEQ ID NO: 208777 - DNA, 75 bp, synthetic construct
  source 1..75: mol_type = other DNA
ggtctggtctgcggccagtcattcggagaagtgcgggtatcgcataaaggcaatgtcgtcgagaaggtgattgaa

SEQ ID NO: 208778 - DNA, 75 bp, synthetic construct
  source 1..75: mol_type = other DNA
aagcgggaacacaccaaacacatgcttcgtctgcgtcgagccgggcaacttaccgggcatcaggtaccggaaatc

SEQ ID NO: 208779 - DNA, 75 bp, synthetic construct
  source 1..75: mol_type = other DNA
tacaaggacgcgagccattaacggaattgatggggacgtgaaacttaaccgggcattatggacgttaagtgaaga

SEQ ID NO: 208780 - DNA, 75 bp, synthetic construct
  source 1..75: mol_type = other DNA
aaggttttcagcccttctttgcctgccagacccgcgtgcgcgacccgggccgccggggatacaccaaacacatgc

SEQ ID NO: 208781 - DNA, 75 bp, synthetic construct
  source 1..75: mol_type = other DNA
atgcgattagtcagtcgttttggttatgctgcaaaccagatacgccgtgaccgtccgctgacacatgaagagctg

SEQ ID NO: 208782 - DNA, 75 bp, synthetic construct
  source 1..75: mol_type = other DNA
ccatacccgggccattcacagcattgataccgacattaagctcaaccgtgcattgtgggtgatggctgaaacgct

SEQ ID NO: 208783 - DNA, 75 bp, synthetic construct
  source 1..75: mol_type = other DNA
cacccgtgccattcacagcatcgacaccgatattaagctcaaccgcgcattgtgggtgatggcagaaacgctgct

SEQ ID NO: 208784 - DNA, 75 bp, synthetic construct
  source 1..75: mol_type = other DNA
ggagcatatgaagtgctcgatgtctttgataaggtcactgataatatggaggcgatgaaagaaattcatcttaac

SEQ ID NO: 208785 - DNA, 75 bp, synthetic construct
  source 1..75: mol_type = other DNA
acgtaaatcaaatccgtcgcgatcgcccattaacgcatgacgaaatgatgcagtatgtccccagcgtatttgggg

SEQ ID NO: 208786 - DNA, 75 bp, synthetic construct
  source 1..75: mol_type = other DNA
cttttcggtcgcaccgggaacagacctccgcacgctggatatgaacaaacttcgcttctggctcgggaatgatga

SEQ ID NO: 208787 - DNA, 75 bp, synthetic construct
  source 1..75: mol_type = other DNA
ccggtgttaatcccccgtaatgagcagtttacaaccaacgccggggaaatcagagtcgatgaagtgctgccctcc

SEQ ID NO: 208788 - DNA, 75 bp, synthetic construct
  source 1..75: mol_type = other DNA
atgcgaaccagatacgccgtgaccgccccttaactcgcgaagaactgatgcaagtcgtccccagcgtattcgggg

SEQ ID NO: 208789 - DNA, 75 bp, synthetic construct
  source 1..75: mol_type = other DNA
aagaccggcacacctcccgcagtgaacggtatgcgtacattcccaccattaccgtcctggaaagtctgcagcggg

SEQ ID NO: 208790 - DNA, 75 bp, synthetic construct
  source 1..75: mol_type = other DNA
gcttagcaagctgctggcaacggaaaaaccccatctggcccgcttcctggccgaaaaagatgcggatccggatat

SEQ ID NO: 208791 - DNA, 75 bp, synthetic construct
  source 1..75: mol_type = other DNA
ccagacccgcgtgcgcgacccgggccgccgggggtataccaaacacatgctgcgtctgcgccgtgacggggagat

SEQ ID NO: 208792 - DNA, 75 bp, synthetic construct
  source 1..75: mol_type = other DNA
cccggttttattgccgccggtctgctgctggggatagcgacgttaattgccacggtgatgcacgttccggctgat

SEQ ID NO: 208793 - DNA, 75 bp, synthetic construct
  source 1..75: mol_type = other DNA
gctgctggagagccatgcgctgataaaacatatccctgaaggcgtgattcaggtaccagaatcacccgacgcccc

SEQ ID NO: 208794 - DNA, 75 bp, synthetic construct
  source 1..75: mol_type = other DNA
atcgacaccgatattaagctcaaccgcgcattgtgggtaatggcagaaacgctgctggagagccatgcgctgata

SEQ ID NO: 208795 - DNA, 75 bp, synthetic construct
  source 1..75: mol_type = other DNA
tttttgaccggattgaggaaaagcgtgatgccatgcagtcgccggccctgccgccacccgcacgccaggcgctgg

SEQ ID NO: 208796 - DNA, 75 bp, synthetic construct
  source 1..75: mol_type = other DNA
aaggcatgtcgtggctgtttatgcacctgaacagtaatccgctcggttgtgcagttttagccgggctgttcctga

SEQ ID NO: 208797 - DNA, 75 bp, synthetic construct
  source 1..75: mol_type = other DNA
gacaacgtaccagcgtatccaggagaacctgctgaaaggcgggcttccgggacgtactgcgaagggcaaaagcag

SEQ ID NO: 208798 - DNA, 75 bp, synthetic construct
  source 1..75: mol_type = other DNA
ttgtgcattgaaacctgcattgcgcgtaattggcgtttgtcgatgcaaacacataaatatttaaatattgcctga

SEQ ID NO: 208799 - DNA, 75 bp, synthetic construct
  source 1..75: mol_type = other DNA
ggaaattgaaaccgcgctttaccccggcagcattgaagtgaaaatgcacccgctgtcgatcaaacgcgcggtggc

SEQ ID NO: 208800 - DNA, 75 bp, synthetic construct
  source 1..75: mol_type = other DNA
gcagcggcacggagccgaatcgcgcctggttccaggtagaagatgacggtccgggtattgcgccggaacaacgta

SEQ ID NO: 208801 - DNA, 75 bp, synthetic construct
  source 1..75: mol_type = other DNA
agccttgcaggttggtaaagggattattccgccgccgctgcgtgagtatggcgcgtccgaggtgcgttccgttac

SEQ ID NO: 208802 - DNA, 75 bp, synthetic construct
  source 1..75: mol_type = other DNA
aatatgctgaaaggcggaatttccggtcgcagtgccagagggaaacgtatccatacccgtgccattcacagcatc

SEQ ID NO: 208803 - DNA, 75 bp, synthetic construct
  source 1..75: mol_type = other DNA
cctccagctaccagatgctgccgggttacttcaggttcgtctgccagaacggatgcgtctgtggccagtctctgg

SEQ ID NO: 208804 - DNA, 75 bp, synthetic construct
  source 1..75: mol_type = other DNA
tgctgaacttcgcgattttgccgagtctccagcagtttaataaagtcctcgcgtacgaagtgcgtatgttgatga

SEQ ID NO: 208805 - DNA, 75 bp, synthetic construct
  source 1..75: mol_type = other DNA
gaacggggcgggctttccattcgcgcctggctgcctgtgccggtaacgcgggcgcagggtgcgacaaaagaaggg

SEQ ID NO: 208806 - DNA, 75 bp, synthetic construct
  source 1..75: mol_type = other DNA
gacaacaagggtaccatgactgtcaccgatccggagtccatcggtattcagatcgacggcgacaaggccatcgtc

SEQ ID NO: 208807 - DNA, 75 bp, synthetic construct
  source 1..75: mol_type = other DNA
gtgagcgcagatggcgcaacgaagtggcaatatgaaccgccccgggaatcctggagactaaacttcctgagaaag

SEQ ID NO: 208808 - DNA, 75 bp, synthetic construct
  source 1..75: mol_type = other DNA
aacagcggcaaaaccaccgttgacggcaaggattccactggcacggaaatcaacggcaataacgggaaagtgata

SEQ ID NO: 208809 - DNA, 75 bp, synthetic construct
  source 1..75: mol_type = other DNA
gtcaataacgacggtgacagtgccatcagtaacggcggcaccggcacgcagattaacggtgatgaagccaccgta

SEQ ID NO: 208810 - DNA, 75 bp, synthetic construct
  source 1..75: mol_type = other DNA
ggcaaaaccatcgttgatggtaaagattccactggcacggagatcgccggtaataacgggaaagttattcaggac

SEQ ID NO: 208811 - DNA, 75 bp, synthetic construct
  source 1..75: mol_type = other DNA
ggcggcggtcacggtattgatatcaccggcgacagcgcgacggtggacaacaaaggcggcatgactgtcaccgat

SEQ ID NO: 208812 - DNA, 75 bp, synthetic construct
  source 1..75: mol_type = other DNA
aaacacccgacttaacgctgtgctggattatattgacgcggtgacggcaacagataccagcacagcgccggacgt

SEQ ID NO: 208813 - DNA, 75 bp, synthetic construct
  source 1..75: mol_type = other DNA
ctccggcgatgttcggcagactgccggaccagcgggactatgtgcgctggcgggtgagtgcgaacgaagggcagg

SEQ ID NO: 208814 - DNA, 75 bp, synthetic construct
  source 1..75: mol_type = other DNA
aaaaagacgctgccggagcaccacccattgccgtggagttttgtgctatcgccggggtttctccccattggcggg

SEQ ID NO: 208815 - DNA, 75 bp, synthetic construct
  source 1..75: mol_type = other DNA
cctgatgccatggctttccacaggcgctgctgcgttaatcacggccttagccgtagtggaactaaacgacgatga

SEQ ID NO: 208816 - DNA, 75 bp, synthetic construct
  source 1..75: mol_type = other DNA
tacgggtgatgatgcgacggccaacaacagtggcaataccaccgttgacggacagggctcgaccggtaccgaaat

SEQ ID NO: 208817 - DNA, 75 bp, synthetic construct
  source 1..75: mol_type = other DNA
ctgtgctggattatattgacgcggtgacggcaacagataccagcacagcgccggacgtcatctggcctgaactgc

SEQ ID NO: 208818 - DNA, 75 bp, synthetic construct
  source 1..75: mol_type = other DNA
tggcgaacgggatctcgatgaaattattgccattgccgggcaagaactgaatgaaaaaggcttccgcgccgatga

SEQ ID NO: 208819 - DNA, 75 bp, synthetic construct
  source 1..75: mol_type = other DNA
gcctcagtgtaccgatgacgatgcgctgattatcagcaattgcatggcgcaactgaacgtcaacaacagcgattt

SEQ ID NO: 208820 - DNA, 75 bp, synthetic construct
  source 1..75: mol_type = other DNA
atgactaagaaaataaaatgtgcttaccacctttgcaataaagaagttgaaaaaagcaaaagcattacaaaacca

SEQ ID NO: 208821 - DNA, 75 bp, synthetic construct
  source 1..75: mol_type = other DNA
gcgtgtgttatcgcagaaatgcccacggaacccctgaatgtggccagctggcttaaaagaaagccaggtacgccg

SEQ ID NO: 208822 - DNA, 75 bp, synthetic construct
  source 1..75: mol_type = other DNA
gcgaccaggcaaacctgcgccgcgaacatgtgctggcggtgcgctactgcctgtgtacggcgctggacgaagccg

SEQ ID NO: 208823 - DNA, 75 bp, synthetic construct
  source 1..75: mol_type = other DNA
tcacccgtggcttgctgacggtggaggaagatgagcatcacagtcgggtggtcttccggggcgacacgatgtttg

SEQ ID NO: 208824 - DNA, 75 bp, synthetic construct
  source 1..75: mol_type = other DNA
aggcggcgaataccctgccatttcagccatcaaccggggggggaaagacacccgacaatgacggttacggcgcgg

SEQ ID NO: 208825 - DNA, 75 bp, synthetic construct
  source 1..75: mol_type = other DNA
gggacgaatgccaccgttcactccagacggtcaacaagaactcagtacggaaatcgatatgccggaggattactg

SEQ ID NO: 208826 - DNA, 75 bp, synthetic construct
  source 1..75: mol_type = other DNA
catattattattccagaggttaatcttctttctggtaatttaataaaccccaggggagattacagggtaaatgaa

SEQ ID NO: 208827 - DNA, 75 bp, synthetic construct
  source 1..75: mol_type = other DNA
aacgggtagtgattctggtcgccgcctggcttggcgatgctcgcctgatcgacaacaaaatcgtcgaactggcgt

SEQ ID NO: 208828 - DNA, 75 bp, synthetic construct
  source 1..75: mol_type = other DNA
ctgcggaacaaaaggaaagagaatttaccgcattgcaggctgataaagaatctgtcagagaacagactgatcagg

SEQ ID NO: 208829 - DNA, 75 bp, synthetic construct
  source 1..75: mol_type = other DNA
ctcttgagttgaaagaatctaatccggttcaggtcagtacacgcgatcatctcggcaatttgtctatcagggaag

SEQ ID NO: 208830 - DNA, 75 bp, synthetic construct
  source 1..75: mol_type = other DNA
tttcatgggacagtcgcaatccagcggaagagattctggactgcgatgcgatgtacattcaggaggaagaggacg

SEQ ID NO: 208831 - DNA, 75 bp, synthetic construct
  source 1..75: mol_type = other DNA
gggctaaggtcattgtcgcagactgtaatatcagtgaagaggcattggtctggattctggataatgccgccgacg

SEQ ID NO: 208832 - DNA, 75 bp, synthetic construct
  source 1..75: mol_type = other DNA
tcctgcagtccatgaacgcacaggaatatgaagatatccgtgctgcgggacgtgacgcgcgtcgggaactgacac

SEQ ID NO: 208833 - DNA, 75 bp, synthetic construct
  source 1..75: mol_type = other DNA
tcagcggtgaaagtggttggtctgcgccgatcaaaaccaatgtcattaatgttaccggagcgggcgatgccatga

SEQ ID NO: 208834 - DNA, 75 bp, synthetic construct
  source 1..75: mol_type = other DNA
cgtccggatgtggtggcacacatctctgaccatgtgttctatgccaatgcgaacaaagcagctacgccgctggtg

SEQ ID NO: 208835 - DNA, 75 bp, synthetic construct
  source 1..75: mol_type = other DNA
ttatcagttcctgaattatctgctacgcccggatgtgattgcgcatatctccgaccatgtgttctatgccaatgc

SEQ ID NO: 208836 - DNA, 75 bp, synthetic construct
  source 1..75: mol_type = other DNA
gcattatgttcgccgggagacgtctctcagctctggatgctggttctggtgaattgtggtggacagcctttcgcc

SEQ ID NO: 208837 - DNA, 75 bp, synthetic construct
  source 1..75: mol_type = other DNA
tgaaatcgtttttgtcggtgtcaccagtgcgcatcgcagcggcgttgatatgggtcagttgcgacatacttattt

SEQ ID NO: 208838 - DNA, 75 bp, synthetic construct
  source 1..75: mol_type = other DNA
agcgcgatttaagcggttttggcaacatgctgtttatggcgttaatcggtattgtgctggcatcgttggtgaatt

SEQ ID NO: 208839 - DNA, 75 bp, synthetic construct
  source 1..75: mol_type = other DNA
gatccgcttccgcgaacctatcgaagggattcattttgttgactatatggtcgagtcgatagtttctctcactca

SEQ ID NO: 208840 - DNA, 75 bp, synthetic construct
  source 1..75: mol_type = other DNA
ggcaaagattgctggcgctgtgtggattcataaccttcattctactggtgaagagaaaatggcaattcagacgcc

SEQ ID NO: 208841 - DNA, 75 bp, synthetic construct
  source 1..75: mol_type = other DNA
ttgctaaaatcacagtggcaaaattgtgcgagtatataactagagagagtgaaggttatcattataaaacgatta

SEQ ID NO: 208842 - DNA, 75 bp, synthetic construct
  source 1..75: mol_type = other DNA
ttgtggtgttaagaactttataaatttaggaagctcttgcatgtaccctaaaggtattgacactgcaatttctga

SEQ ID NO: 208843 - DNA, 75 bp, synthetic construct
  source 1..75: mol_type = other DNA
gttgactgcgggagttttccagccgctggataaaagcaaattgccggagtggaagaatctcgatccggagctgct

SEQ ID NO: 208844 - DNA, 75 bp, synthetic construct
  source 1..75: mol_type = other DNA
ctggcattatgttcgccgggagacgtctctcagctctggatgctggttctggtgaatggtggtggacagcctttc

SEQ ID NO: 208845 - DNA, 75 bp, synthetic construct
  source 1..75: mol_type = other DNA
tccagtccatgaacgcacaggaatatgaagatatccgtgctgcgggaagcgatatgcgccgtaatctcactcacg

SEQ ID NO: 208846 - DNA, 75 bp, synthetic construct
  source 1..75: mol_type = other DNA
ttcagcccatgaacgcacaggaatatgaagatatccgtgctgcgggaagcgatatgcgccgtaatctcactcacg

SEQ ID NO: 208847 - DNA, 75 bp, synthetic construct
  source 1..75: mol_type = other DNA
gggctgccggacgtgccggtagtggaactgcccggtgtgcgccacctgccatggccgggctggccggacaaaatg

SEQ ID NO: 208848 - DNA, 75 bp, synthetic construct
  source 1..75: mol_type = other DNA
tgagccgttaccgtgccgggcggctgatgacacatctgaatctgagcagttgtcagcccggaaaacatcagtaca

SEQ ID NO: 208849 - DNA, 75 bp, synthetic construct
  source 1..75: mol_type = other DNA
gtgtcaggccgtggcagtgatgccccttgcggcgaaggttctcaaaaaggtgatggtgaatacggcagcgagttt

SEQ ID NO: 208850 - DNA, 75 bp, synthetic construct
  source 1..75: mol_type = other DNA
cgcacaggaatatgaagatatccgtgctgcgggaagcgatatgcgccgtaatctcactcacgaggtgatgcgtga

SEQ ID NO: 208851 - DNA, 75 bp, synthetic construct
  source 1..75: mol_type = other DNA
gttgactgcgggagttttccagccgctggacaaaagcaaattgccggagtggaagaatctcgacccggagctgct

SEQ ID NO: 208852 - DNA, 75 bp, synthetic construct
  source 1..75: mol_type = other DNA
accaaagcagatgattacaccggaccggctaccgacttactgttgaaactgcgcccgaatattcgctatttccac

SEQ ID NO: 208853 - DNA, 75 bp, synthetic construct
  source 1..75: mol_type = other DNA
ggaggcacagcatctgctggattatcgttgtggcgtcaccaaactggtagaccgtccaacggtgcaagccaatga

SEQ ID NO: 208854 - DNA, 75 bp, synthetic construct
  source 1..75: mol_type = other DNA
gagtacggcagcgagttcgggggctttttccccgtccaggtccgtttcacgccagcccacgaacgtttccacctg

SEQ ID NO: 208855 - DNA, 75 bp, synthetic construct
  source 1..75: mol_type = other DNA
atatgaagatatccgtgctgcgggaagcgatatgcgccgtaatctcactcacgaggtgatgcgtgaagtggacgt

SEQ ID NO: 208856 - DNA, 75 bp, synthetic construct
  source 1..75: mol_type = other DNA
atgattgaagcgatgggtgacattcagttggaaatctttgatcgtgatttccttcgggcttatgagagcaagttg

SEQ ID NO: 208857 - DNA, 75 bp, synthetic construct
  source 1..75: mol_type = other DNA
gtcagttgagttgcctgttgcgcaattaatacaggcggtgatgaaccgtaatctgcccgtattctggctggcgac

SEQ ID NO: 208858 - DNA, 75 bp, synthetic construct
  source 1..75: mol_type = other DNA
agacatggtgaaaaaagcaacggacgaaattcaaagcaacgttaatcagataacgcaagatttttacgaaaaaac

SEQ ID NO: 208859 - DNA, 75 bp, synthetic construct
  source 1..75: mol_type = other DNA
tggctttgtggtctggcttacctttaattttcgtgcactggaagaactattttatcgtagaaacagaaaaggaga

SEQ ID NO: 208860 - DNA, 75 bp, synthetic construct
  source 1..75: mol_type = other DNA
gtcaatcgagttgcctgtatcgcagttgattcaggcggtgataaatcgcaatttgccagtgttctggttagcgac

SEQ ID NO: 208861 - DNA, 75 bp, synthetic construct
  source 1..75: mol_type = other DNA
gcgagttaatgaaatcgctcagttactgctgagtgatgttctggcagacgacggcgtctattatttgaaccttga

SEQ ID NO: 208862 - DNA, 75 bp, synthetic construct
  source 1..75: mol_type = other DNA
tgaatgttcacttccacatgctgtttctcgacggtgtgtatgtcgagcaatcccacggctcagcgcgtttccgct

SEQ ID NO: 208863 - DNA, 75 bp, synthetic construct
  source 1..75: mol_type = other DNA
cgacatcgagacctgcagcggctgcggcggcgccatgaaagtcatcgcctgcattgaagaccctatagtgatcaa

SEQ ID NO: 208864 - DNA, 75 bp, synthetic construct
  source 1..75: mol_type = other DNA
ctttggatcgataaagttttctcgcacggctgggcttacggtcacggcggcacggcgctgcatggcaaacatttg

SEQ ID NO: 208865 - DNA, 75 bp, synthetic construct
  source 1..75: mol_type = other DNA
atggctggggcgatgcaagctctccacaatgccgtggattctcaccagaggaatttcaggcgctggattttagta

SEQ ID NO: 208866 - DNA, 75 bp, synthetic construct
  source 1..75: mol_type = other DNA
ttgatgaacgcttgattcacggtcaggtcggcgttcagtgggtaggatttgcgggggcaaatctggtgctggtag

SEQ ID NO: 208867 - DNA, 75 bp, synthetic construct
  source 1..75: mol_type = other DNA
gcaccgggcgttggtcacgccggcaaaacggggcaggggcaacaaggtcagggtggctgatgaaccggcaacacc

SEQ ID NO: 208868 - DNA, 75 bp, synthetic construct
  source 1..75: mol_type = other DNA
tggttcatttttaaaagaggcaaggaatcttatagacaatactccttctgataaggttaacgtctgtcttttcga

SEQ ID NO: 208869 - DNA, 75 bp, synthetic construct
  source 1..75: mol_type = other DNA
catggaacgtaaaacttaacagcccgatccaaaaacttgtcttaattgcgtttgcagaaaaggcagacaacaaag

SEQ ID NO: 208870 - DNA, 75 bp, synthetic construct
  source 1..75: mol_type = other DNA
acgctcaagaaggaaatgtatggcattactgagcgccgtttccctgcaagcaaacttcacccgacgttagggcaa

SEQ ID NO: 208871 - DNA, 75 bp, synthetic construct
  source 1..75: mol_type = other DNA
atgcgttttatttgtgataacagttattttctggagggagtgaaggagtatattaatcccggtaaattcattatc

SEQ ID NO: 208872 - DNA, 75 bp, synthetic construct
  source 1..75: mol_type = other DNA
gactgatttattcagtcgttgggtctgttcactggtcgatcgcagaggatactggcgtgccgttgtagccatcgc

SEQ ID NO: 208873 - DNA, 75 bp, synthetic construct
  source 1..75: mol_type = other DNA
atcttgctaaaaatgtgttcgctgttcactgcgttgatcaacacggtaaaactgttctggttaaacccaaagtac

SEQ ID NO: 208874 - DNA, 75 bp, synthetic construct
  source 1..75: mol_type = other DNA
ttggctgaaaaggcggataaccgccgccacgccagggtgtcacaccaagaaatcgcaaaaatgtgtgaacttcct

SEQ ID NO: 208875 - DNA, 75 bp, synthetic construct
  source 1..75: mol_type = other DNA
tggaaggtctgaccggctttacgatgtatggcaaaacggcaggcgttatcggcacgggtaaaatcggtgtggcta

SEQ ID NO: 208876 - DNA, 75 bp, synthetic construct
  source 1..75: mol_type = other DNA
ctgaataagcgaattaactcccggacagatgatgcttttctgaaggagttaatgagactgggaaggatgcagaag

SEQ ID NO: 208877 - DNA, 75 bp, synthetic construct
  source 1..75: mol_type = other DNA
aaagttaactcactgactgatgaccgggtgctgaaagaagtcatgcgactgggggcgttgcagaaaaaactcttt

SEQ ID NO: 208878 - DNA, 75 bp, synthetic construct
  source 1..75: mol_type = other DNA
gaagtggcggcgtttgccgctggcgctgaagcacaacttagcggagaactggcggtctgtgccggatcgtgcggt

SEQ ID NO: 208879 - DNA, 75 bp, synthetic construct
  source 1..75: mol_type = other DNA
ctgacgaccgtatgattgatgagattatgcgtcttggccgtcttcagaagcatctgtttgtggagggaaaacgca

SEQ ID NO: 208880 - DNA, 75 bp, synthetic construct
  source 1..75: mol_type = other DNA
cgcctgtctgcctgccacaacgtgctgtttaccgggcaccaggcattcctgacagcagaagctctgaccagtatt

SEQ ID NO: 208881 - DNA, 75 bp, synthetic construct
  source 1..75: mol_type = other DNA
ggcgaaggccgaaagcgatgtacagagtaagcaagcgattgtttccagagttgcaggggagcttgaaaacgctca

SEQ ID NO: 208882 - DNA, 75 bp, synthetic construct
  source 1..75: mol_type = other DNA
aatattccagaatagctcaggatttagctgaaaaggcgaagggtagtaaatttaatagtgttgatgaagcacttg

SEQ ID NO: 208883 - DNA, 75 bp, synthetic construct
  source 1..75: mol_type = other DNA
aacaaataccagacagcttgaacgaatcattgcacaagctcagatttgtggtgctctggcgaccacggctaaagg

SEQ ID NO: 208884 - DNA, 75 bp, synthetic construct
  source 1..75: mol_type = other DNA
aaggtgtaacgcagcaaacgctgacgctgacctttaacagtagcggtgtgttgaccaatattgataacaaacctg

SEQ ID NO: 208885 - DNA, 75 bp, synthetic construct
  source 1..75: mol_type = other DNA
tattccgccttcttcaccgcactctctccagacgcacaggacgatatcatcgcccgtaccgaacacatgctgtaa

SEQ ID NO: 208886 - DNA, 75 bp, synthetic construct
  source 1..75: mol_type = other DNA
gtggggttcactggggtggtggctctgggcatggtaataatggtggtcagggaaattcaaattcatctggttcta

SEQ ID NO: 208887 - DNA, 75 bp, synthetic construct
  source 1..75: mol_type = other DNA
atgaccgacgatattctgacgcaacctgcggtgaatactctgctattacaaccttcaatgaagggaacaaggtcg

SEQ ID NO: 208888 - DNA, 75 bp, synthetic construct
  source 1..75: mol_type = other DNA
taccggggcagaaaaccgtgaatgatgcgctccgcccggtgattgataaggccgcgcgagagattgcgcgtgtgg

SEQ ID NO: 208889 - DNA, 75 bp, synthetic construct
  source 1..75: mol_type = other DNA
ccggatgcgccgggtgccggtctggctgagtgccggaatggctctgctggtgatgctgacgttgtttggccttta

SEQ ID NO: 208890 - DNA, 75 bp, synthetic construct
  source 1..75: mol_type = other DNA
gagaaaggagagtccgctcgccgcagccgaacgaccgagcgtagcgagtcagtgagcgaggaagcggaagagcgc

SEQ ID NO: 208891 - DNA, 75 bp, synthetic construct
  source 1..75: mol_type = other DNA
atggaaaaagcgcctgtggcgcggccttttccggggtttttgttttttgcgcacatgttctttcccgggttatcc

SEQ ID NO: 208892 - DNA, 75 bp, synthetic construct
  source 1..75: mol_type = other DNA
agcttcgctgctgacatctggtggcgttccggctagccgaattcggggtgtcggtaaaggggatactatgccggt

SEQ ID NO: 208893 - DNA, 75 bp, synthetic construct
  source 1..75: mol_type = other DNA
tgccggaagatatggaaggcactgcaaagcggcgactcatttgcgaattaagtcgtcgttttggcgtgtcaataa

SEQ ID NO: 208894 - DNA, 75 bp, synthetic construct
  source 1..75: mol_type = other DNA
ctggcagaacagaaagaagttattcgctactctgcggaacacacttccgttaccagtgaaattctggagagcctg

SEQ ID NO: 208895 - DNA, 75 bp, synthetic construct
  source 1..75: mol_type = other DNA
atctttgccatggacttcactcaggatatcgacgaactgttcctccctctgctgcactggctttaccacaaccag

SEQ ID NO: 208896 - DNA, 75 bp, synthetic construct
  source 1..75: mol_type = other DNA
atccccgaataacgacgacagtgttgacgtggttattgagctgccggtatgggaacgcgtgagggtgacacgcac

SEQ ID NO: 208897 - DNA, 75 bp, synthetic construct
  source 1..75: mol_type = other DNA
acctttatttgtgacgacgaaaccctcgaagggcaggcgcgtcactataagcaacgtctgctggaatggcaggag

SEQ ID NO: 208898 - DNA, 75 bp, synthetic construct
  source 1..75: mol_type = other DNA
acgtcattttcgaaccattggatttcattgcaaggctggccgccctggtaccgaagcccagagtcaacctaaccc

SEQ ID NO: 208899 - DNA, 75 bp, synthetic construct
  source 1..75: mol_type = other DNA
ggtgaactggtaactccgatatctggtgggtacgcaatggtaatccgtcatgatcagaaaataattccccgacat

SEQ ID NO: 208900 - DNA, 75 bp, synthetic construct
  source 1..75: mol_type = other DNA
agttcttaccgcatgacgtgcatttgaatgtgctggaatctatttttgttgctctgcgtgcttcaaagataggga

SEQ ID NO: 208901 - DNA, 75 bp, synthetic construct
  source 1..75: mol_type = other DNA
tgttgaaaaatatttttctccttcttctccgtctacaccttcccttaatgaactaatcaaattaaaagctaagga

SEQ ID NO: 208902 - DNA, 75 bp, synthetic construct
  source 1..75: mol_type = other DNA
atgttgttcttaaatgataaagagcaaatcatcaagtatcgagatgaaatgctgaaaattaatccacaaattacc

SEQ ID NO: 208903 - DNA, 75 bp, synthetic construct
  source 1..75: mol_type = other DNA
catattcttaatccgctgctggcagaaggtcaggtacacggcggaatggggatgggcattggctgggcgctattt

SEQ ID NO: 208904 - DNA, 75 bp, synthetic construct
  source 1..75: mol_type = other DNA
tggatgaggaatttttggggcgtttgagtggagaagagcaggagctgtttatgcagttggtgcgcaagatgatga

SEQ ID NO: 208905 - DNA, 75 bp, synthetic construct
  source 1..75: mol_type = other DNA
cgcatccgtggacgaatagagcattgttctcatggcttgttacaacttatcgttgatggtgtcattccggattaa

SEQ ID NO: 208906 - DNA, 75 bp, synthetic construct
  source 1..75: mol_type = other DNA
gggaatgcgaccgttttccggaatgacaggctatgacggcattgttacctgtcttcagcaggcaatggcagacac

SEQ ID NO: 208907 - DNA, 75 bp, synthetic construct
  source 1..75: mol_type = other DNA
tcgtcagtatctggttaacctcgcgcatttacaggagattcgtctggaagataacggccaggctgagttgatttt

SEQ ID NO: 208908 - DNA, 75 bp, synthetic construct
  source 1..75: mol_type = other DNA
ggccggtatgcgcacccgccgtcacgtcacgatagtggagagtacgctgatgacaacggggtgtgcacagcaggc

SEQ ID NO: 208909 - DNA, 75 bp, synthetic construct
  source 1..75: mol_type = other DNA
acctttgtgccggtgagcataccggcactgagggcggacagtctgaactggctggtctctgaggtgacgttcagc

SEQ ID NO: 208910 - DNA, 75 bp, synthetic construct
  source 1..75: mol_type = other DNA
ctgttactgacccgggtgggaacacgtcgtgcggcaagtgggatagccgaaggggtaaatgtcgagcaggcatac

SEQ ID NO: 208911 - DNA, 75 bp, synthetic construct
  source 1..75: mol_type = other DNA
ataacggccaggccgagttgattttgcgtaatggcttaaccgtgccggtcagccgccgttatctgaaaagcttaa

SEQ ID NO: 208912 - DNA, 75 bp, synthetic construct
  source 1..75: mol_type = other DNA
acgaatatgcgattaaagcctttgaagaacatgcctttgattatctgcttaagccgattgatgaagtgcggcttg

SEQ ID NO: 208913 - DNA, 75 bp, synthetic construct
  source 1..75: mol_type = other DNA
ctgtgggccgggaaatattcagattcgtaccattggctatggcgagagctatatcaacgccacggggttacgcca

SEQ ID NO: 208914 - DNA, 75 bp, synthetic construct
  source 1..75: mol_type = other DNA
tctgatgagagcgggtctgatcaaaattacacagacgatggtgagcagttgaacaacactgatgctccggatgat

SEQ ID NO: 208915 - DNA, 75 bp, synthetic construct
  source 1..75: mol_type = other DNA
ataaaaataactttaatgctgttctggctgatatctcgccgtcagtacgcctgaatgtggagaacacacttgccg

SEQ ID NO: 208916 - DNA, 75 bp, synthetic construct
  source 1..75: mol_type = other DNA
gaactgaccttgcgcacgctggagagccgtacgccattactgcgttgtcatcgacaatatctggttaaccttgcg

SEQ ID NO: 208917 - DNA, 75 bp, synthetic construct
  source 1..75: mol_type = other DNA
gttgaaggtacagtgcttaaccaacgtttgtgtttatttcactggctacgacgtggtttccgtctgtgtccgtca

SEQ ID NO: 208918 - DNA, 75 bp, synthetic construct
  source 1..75: mol_type = other DNA
ctgccctttctgctccccagcgccgctgccagatcttgttaacgctatttcagccggggttggccgctaccacgg

SEQ ID NO: 208919 - DNA, 75 bp, synthetic construct
  source 1..75: mol_type = other DNA
tgccgtcattgttgccggtgtccgttctggccagcacggtggtatataccgacagccagcacttgcctgaaaatc

SEQ ID NO: 208920 - DNA, 75 bp, synthetic construct
  source 1..75: mol_type = other DNA
aaattggctacctgcaatctactggcgcgaccgtggagattgacggcgaaaccgttactctgccgccaaggccat

SEQ ID NO: 208921 - DNA, 75 bp, synthetic construct
  source 1..75: mol_type = other DNA
agctgtccggtactgatgtgctggtgggtatcccagcgggcccaccgcgtgaagattcgccgctgagcaacgctg

SEQ ID NO: 208922 - DNA, 75 bp, synthetic construct
  source 1..75: mol_type = other DNA
tgcgctgaagcagctgtcaggcactgatgtgctggttggtatcccggcaggtcctccgcgcgatgatgcgccgct

SEQ ID NO: 208923 - DNA, 75 bp, synthetic construct
  source 1..75: mol_type = other DNA
ttgaattggctacgaatttcttcaatgacatctgttctgttaaacgagtaaaatatgatgcaataggattttgcc

SEQ ID NO: 208924 - DNA, 75 bp, synthetic construct
  source 1..75: mol_type = other DNA
tcaataatgaaaaaataaatatcaagttctataatataaagaataatgcaattgatgaccaatttgaaatcatta

SEQ ID NO: 208925 - DNA, 75 bp, synthetic construct
  source 1..75: mol_type = other DNA
aaggtaaggcagatgtggcgtcgatgcatcttgaagccgcaggccagattgccagctcagcttctaaggcggtaa

SEQ ID NO: 208926 - DNA, 75 bp, synthetic construct
  source 1..75: mol_type = other DNA
aagccataccgacagaaagggaattgtcagaatattatttaagtagcagaacaactattcgaaaggcaatagaaa

SEQ ID NO: 208927 - DNA, 75 bp, synthetic construct
  source 1..75: mol_type = other DNA
gagtatgtagagatggtttatcccgcaagtcggtactcctacaaagcacgaattacaaaagacagttttagcgtg

SEQ ID NO: 208928 - DNA, 75 bp, synthetic construct
  source 1..75: mol_type = other DNA
cggaatttcgcgtaacttttacgacgataccaatctacaagcgttagtgaatctctgctcccgacggctgcaaaa

SEQ ID NO: 208929 - DNA, 75 bp, synthetic construct
  source 1..75: mol_type = other DNA
gggattgccaggcgacaagccactctatgcccatggctatctcctgcgctcaatcacctacgttgtgagaggtaa

SEQ ID NO: 208930 - DNA, 75 bp, synthetic construct
  source 1..75: mol_type = other DNA
tgaccaaagctaaccgccgggcgcagggattgccaggcgacaagccactctatgcccatggctatctcctgcgct

SEQ ID NO: 208931 - DNA, 75 bp, synthetic construct
  source 1..75: mol_type = other DNA
agagcgccggacagattgcccgtgacgctgcaaaagccgttatcggtgctggcgaccggttgcacccgctttctg

SEQ ID NO: 208932 - DNA, 75 bp, synthetic construct
  source 1..75: mol_type = other DNA
ctgcaggataaatcatctaactttgccgacggcattgaagatgataactgggaagagcaggcggcaaaccgtctg

SEQ ID NO: 208933 - DNA, 75 bp, synthetic construct
  source 1..75: mol_type = other DNA
atcggagcgtgactaccaaatctatagcgagtgcgatgggcgcaactacgccgaattagcgaagaaatataatct

SEQ ID NO: 208934 - DNA, 75 bp, synthetic construct
  source 1..75: mol_type = other DNA
cttcgggctggcgcttgactgctacagcagcacaccacaacggctggaagccgcgccggtggcttcaggcacagg

SEQ ID NO: 208935 - DNA, 75 bp, synthetic construct
  source 1..75: mol_type = other DNA
tgctaactcgaacgttacaatctgcgctggaacaacgcgcgtctgatattcatatcgaaccagcggacaatgcct

SEQ ID NO: 208936 - DNA, 75 bp, synthetic construct
  source 1..75: mol_type = other DNA
ggtgttggttaccggcccaaccggtagcggcaaaacagtcacactttatagcgcgctgcaaacgctgaataccgt

SEQ ID NO: 208937 - DNA, 75 bp, synthetic construct
  source 1..75: mol_type = other DNA
gatccggttgagatccccatagccggactaaaccagacgcaaatccatccgcgtgccggactcacctttcagggc

SEQ ID NO: 208938 - DNA, 75 bp, synthetic construct
  source 1..75: mol_type = other DNA
gagctgcaatacaacctcaatccgtactacttcaaggagaacacctcagcaaaagagatggatgaagataaagta

SEQ ID NO: 208939 - DNA, 75 bp, synthetic construct
  source 1..75: mol_type = other DNA
atgatgattcataaaccatttggctttacgggcggtgatgcggaggacatgcgcacctatgccgacctgctcgat

SEQ ID NO: 208940 - DNA, 75 bp, synthetic construct
  source 1..75: mol_type = other DNA
tgggaaacccggtcattatgccggaaaactccttcatgatgattcataaaccatttggctttacgggcggtgatg

SEQ ID NO: 208941 - DNA, 75 bp, synthetic construct
  source 1..75: mol_type = other DNA
gctggactgttatgctggtgtgcctcagcgtctggaggcaacaccgcctgcacctgaaccggagaagtcaggagt

SEQ ID NO: 208942 - DNA, 75 bp, synthetic construct
  source 1..75: mol_type = other DNA
acgccgtcctgtcaggatttcctgaaagcggatgcaaagaaacgcggtgacgccggggagctcaccgaccgcgtg

SEQ ID NO: 208943 - DNA, 75 bp, synthetic construct
  source 1..75: mol_type = other DNA
cggaaagcaatccgtttggtctggcgctggactgttatgacgggacgcctcagcgtctggaagcggtgattcaga

SEQ ID NO: 208944 - DNA, 75 bp, synthetic construct
  source 1..75: mol_type = other DNA
atcacctgctggacgcgccagcagatggaaggccacgccagccggtcacaacataggttgcccgtagcagccccg

SEQ ID NO: 208945 - DNA, 75 bp, synthetic construct
  source 1..75: mol_type = other DNA
gcacattttctcccgaatgggtgtggagctccctgtcagtacaatggcggatatggtcggtgttgctggcgctgc

SEQ ID NO: 208946 - DNA, 75 bp, synthetic construct
  source 1..75: mol_type = other DNA
tgcagaaaaagcgctggatgatgtgaaaaaacgggttagccaggcttcagacagttattactatcgggcgaagca

SEQ ID NO: 208947 - DNA, 75 bp, synthetic construct
  source 1..75: mol_type = other DNA
ttcccgccgctgagtttacgggcgacccacaaaacacgtcgctgggccttagcgtgaacgggctagttcgtcaac

SEQ ID NO: 208948 - DNA, 75 bp, synthetic construct
  source 1..75: mol_type = other DNA
tatcggaaaaattgcccgttctttagctgaaatcaaactgaagccgcaaactccggaggaagaacaacatgactg

SEQ ID NO: 208949 - DNA, 75 bp, synthetic construct
  source 1..75: mol_type = other DNA
ttaccctgaatgcgccaggccgtcataacgcgctgaatgccgcagctgcggtcgctgttgccacggaagagggga

SEQ ID NO: 208950 - DNA, 75 bp, synthetic construct
  source 1..75: mol_type = other DNA
ttatttcaaccatcgcccggaaaacgtacgtgatgccagcgtggtcgttgtttccagcgccatttctgccgataa

SEQ ID NO: 208951 - DNA, 75 bp, synthetic construct
  source 1..75: mol_type = other DNA
ttccgcgccaaaaaatacctctccgagctggccaaattccgcccggatatcctcgaagcctgccaggccgcggtg

SEQ ID NO: 208952 - DNA, 75 bp, synthetic construct
  source 1..75: mol_type = other DNA
attcctcctctaacacctgagaccggatatggttacattcaacgtggtaatagcattggcaccgtagagggaagt

SEQ ID NO: 208953 - DNA, 75 bp, synthetic construct
  source 1..75: mol_type = other DNA
ggagtggtagccggttatggccactttctcgagtattatatccgaaacaatttcatcacctttatggtgactata

SEQ ID NO: 208954 - DNA, 75 bp, synthetic construct
  source 1..75: mol_type = other DNA
ccgagtgaaactgaccttgaactcattgaggttcaattaggttcgtatttaggggaagatgatatcatccgtttt

SEQ ID NO: 208955 - DNA, 75 bp, synthetic construct
  source 1..75: mol_type = other DNA
aaaatcaatcaacatatattcctgccggaattgtacacacacttgaaaacccgagtgaaactgaccttgaactca

SEQ ID NO: 208956 - DNA, 75 bp, synthetic construct
  source 1..75: mol_type = other DNA
cactgcccctgcaattgcattagcggcgttgctgatgtctaagtctgataaaagtgcagatgatcttatgctcgt

SEQ ID NO: 208957 - DNA, 75 bp, synthetic construct
  source 1..75: mol_type = other DNA
atgtttacgtagcgcagatttctcttggcgcgcagttaaaccagacggtaaaagcgattcaggaagcggaggcgt

SEQ ID NO: 208958 - DNA, 75 bp, synthetic construct
  source 1..75: mol_type = other DNA
atgctactccaataccggcggtcaggcgtctaaagcaacgccgcttggcgcggtgactaagtttggtgaacacgg

SEQ ID NO: 208959 - DNA, 75 bp, synthetic construct
  source 1..75: mol_type = other DNA
aatcgaccgccagtggtttccgatgccgcccctgattttgtgaaaaccgtaaccgcggcgatgctcgccgggctt

SEQ ID NO: 208960 - DNA, 75 bp, synthetic construct
  source 1..75: mol_type = other DNA
ggcggaacagttatggaaagatgccgcagccgatctgcaaaaacgctatgatttcctcgcgcaaatggcggggaa

SEQ ID NO: 208961 - DNA, 75 bp, synthetic construct
  source 1..75: mol_type = other DNA
cggttgcttcggtggcgtttcgcaccagtgaagttatctccatctaccctattacccccagttccacgatggcag

SEQ ID NO: 208962 - DNA, 75 bp, synthetic construct
  source 1..75: mol_type = other DNA
tgggcttccgcctgacggtcgatcagcatcgtgtccgcgtattgcgtctgctggatcagtttgctgataaaattc

SEQ ID NO: 208963 - DNA, 75 bp, synthetic construct
  source 1..75: mol_type = other DNA
cgcactggcagaagcctttaataatggcgagcgtgaaacactcccccgagtgattggcggtcgctatggcctttc

SEQ ID NO: 208964 - DNA, 75 bp, synthetic construct
  source 1..75: mol_type = other DNA
tgttcttcaatttatggcggtaacctgccctctacaccgtataccaccgatgccaacggtcgtgggccggcatgg

SEQ ID NO: 208965 - DNA, 75 bp, synthetic construct
  source 1..75: mol_type = other DNA
tcttaccgtgcaatttgcaaggagaagaaagccatgaagctaccgcgaaacgccctggtctggtgcgtattaatc

SEQ ID NO: 208966 - DNA, 75 bp, synthetic construct
  source 1..75: mol_type = other DNA
ctctcgacatcgtttacatcatcgcagggtttactgctgatgattccgacgttgtacaaactggcgggcgaactg

SEQ ID NO: 208967 - DNA, 75 bp, synthetic construct
  source 1..75: mol_type = other DNA
ggattcacgcccgccgtcagaagcactggaagaaacgttacttcacgagcaacgtttccgtcggctgaattcgca

SEQ ID NO: 208968 - DNA, 75 bp, synthetic construct
  source 1..75: mol_type = other DNA
ctgattttgttggctgccaccagttacagtttatcgacaaatatcagatggccgaacgtctgaaacccggcggca

SEQ ID NO: 208969 - DNA, 75 bp, synthetic construct
  source 1..75: mol_type = other DNA
gttcgtttctatgatgaacaggggttatgcgatcagctttatactcatctcgctcaggcattacgccgcagtttg

SEQ ID NO: 208970 - DNA, 75 bp, synthetic construct
  source 1..75: mol_type = other DNA
gtttactgatactgctgcctctgacagcaaccagtaagcccttaatcccaataatgaagacactttttacggatg

SEQ ID NO: 208971 - DNA, 75 bp, synthetic construct
  source 1..75: mol_type = other DNA
tgcctacgtaactggcgtacagaacgtgcgtgacgttattccgttcccgcgtactccgcgcaacgccagtttcta

SEQ ID NO: 208972 - DNA, 75 bp, synthetic construct
  source 1..75: mol_type = other DNA
caacaccagccgtcacctggcggaattctggatgctggagccagaagtggcgtttgctaacctgaacgatatcgc

SEQ ID NO: 208973 - DNA, 75 bp, synthetic construct
  source 1..75: mol_type = other DNA
ggtaacgcggttgaagttcgtgaagcggtgcagttcctgacgggtgaatatcgtaacccgcgtctgtttgatgtc

SEQ ID NO: 208974 - DNA, 75 bp, synthetic construct
  source 1..75: mol_type = other DNA
gtgtgctgcacgttgttaatattcacactcctgacccggaatcgtctgtgcgaagtccggctgaaggacggatac

SEQ ID NO: 208975 - DNA, 75 bp, synthetic construct
  source 1..75: mol_type = other DNA
tgccaccactgacatattatccgcatcccggacaacagcatgaaaatgatccacccggcagtaccacgacattag

SEQ ID NO: 208976 - DNA, 75 bp, synthetic construct
  source 1..75: mol_type = other DNA
cggctatggacgttctggctccgggcatcggtgagatcattggtggctcccagcgtgaagaacgtctggacgtgc

SEQ ID NO: 208977 - DNA, 75 bp, synthetic construct
  source 1..75: mol_type = other DNA
gtgtgctgcacgttgttgatattcacactcctgacccggaatcgcctgtgcgaagtccggctgaaggacggatat

SEQ ID NO: 208978 - DNA, 75 bp, synthetic construct
  source 1..75: mol_type = other DNA
tcttaccgtgcaatttgcaaggaggagtaaaccatgaaactgccgcgaaacgcccttatctggtgcgtattgatc

SEQ ID NO: 208979 - DNA, 75 bp, synthetic construct
  source 1..75: mol_type = other DNA
cgcctacgtgactggtgtgcaaaacgtgcgtgacgtgattccgttcccgcgtaccccgcgtaacgccagcttcta

SEQ ID NO: 208980 - DNA, 75 bp, synthetic construct
  source 1..75: mol_type = other DNA
aaagcgccggtcgtggtgaaaaactatccgaaagatattaaggcgttctatatgcgtcttaacgaagacggtaaa

SEQ ID NO: 208981 - DNA, 75 bp, synthetic construct
  source 1..75: mol_type = other DNA
tgcttacgtaactggcgtgcaaaacgtgcgtgatgtgattccgttcccacgtactccgcgcaacgccagcttctg

SEQ ID NO: 208982 - DNA, 75 bp, synthetic construct
  source 1..75: mol_type = other DNA
cccactttcatttacctttcttaataatacggagtggaacagttctggagggcatgtttttgattacccgccagc

SEQ ID NO: 208983 - DNA, 75 bp, synthetic construct
  source 1..75: mol_type = other DNA
ccacacatctgatgattgaagatctcctgcaacaacaaggatggagtaatggttggggtacgctactgaaaatag

SEQ ID NO: 208984 - DNA, 75 bp, synthetic construct
  source 1..75: mol_type = other DNA
ccgagcagcaaatgatggaatggcaactctggtttctgaataaccagcgcctggcgataaaaaaactggaagagc

SEQ ID NO: 208985 - DNA, 75 bp, synthetic construct
  source 1..75: mol_type = other DNA
tcaggaagggaccacgctgttgctggtatcccatgataaacaagcgatccaaagcatttgcgaccgggccatttt

SEQ ID NO: 208986 - DNA, 75 bp, synthetic construct
  source 1..75: mol_type = other DNA
tgacattaatttcgaagtcgctccgggcgaggctgtcggtattatcggtatcaacggtgcaggcaagagtaccct

SEQ ID NO: 208987 - DNA, 75 bp, synthetic construct
  source 1..75: mol_type = other DNA
ccgtggttcaccgtttacccggacgtaggcaacctcagcgcctggggcaatgatgttcccgccgaactgaaactg

SEQ ID NO: 208988 - DNA, 75 bp, synthetic construct
  source 1..75: mol_type = other DNA
ggttatcacgtcgtcgcgtatcagcctgaacgtcaatcagcagttaagtaactttgtcaaaacggatacgggcgt

SEQ ID NO: 208989 - DNA, 75 bp, synthetic construct
  source 1..75: mol_type = other DNA
tatccagttaattacgctgaaactccttatattggggttgctagcggtttggtatatgatacagaagcaatttta

SEQ ID NO: 208990 - DNA, 75 bp, synthetic construct
  source 1..75: mol_type = other DNA
ttgctttccagggacagggctatgtaggtgtcaaacaaagagatgatgcagcaaaagaaatggggtggaaacgta

SEQ ID NO: 208991 - DNA, 75 bp, synthetic construct
  source 1..75: mol_type = other DNA
agagaaacccccatgccaaaagaagctcttttgagttatttatgtcaaattatcgttgcgtttcaaaactcacct

SEQ ID NO: 208992 - DNA, 75 bp, synthetic construct
  source 1..75: mol_type = other DNA
gactggagccgcgagcagcgtctggcactggtgaatgcgattgttgaaaccggcgtgcgcgtaccgtccatgtgc

SEQ ID NO: 208993 - DNA, 75 bp, synthetic construct
  source 1..75: mol_type = other DNA
ctaatatcgaaatatcgatttgatatatcttatacgggaaactgctatcgtgaggaaactgatttcatgttatct

SEQ ID NO: 208994 - DNA, 75 bp, synthetic construct
  source 1..75: mol_type = other DNA
ggtggttttaatgttattgcacctggaaaaatttttgtaggaagtgcctggttaaataacgaatgttccgtcaat

SEQ ID NO: 208995 - DNA, 75 bp, synthetic construct
  source 1..75: mol_type = other DNA
accgcttcaacgagcagaccgcagcgaaagcaggcgtggcattcagtgatggggatgcctcctggaacgttggtg

SEQ ID NO: 208996 - DNA, 75 bp, synthetic construct
  source 1..75: mol_type = other DNA
ggctataccacgctgatacgcggtgtgccggatttagtgttaatgctgctgatattctacggtttgcagatcgcg

SEQ ID NO: 208997 - DNA, 75 bp, synthetic construct
  source 1..75: mol_type = other DNA
tgccggatttagtgttgatgctgctgattttctacggtttgcagattgcgctaaacacggtgacggaggcgatgg

SEQ ID NO: 208998 - DNA, 75 bp, synthetic construct
  source 1..75: mol_type = other DNA
catgcacaggatcatttgatgaatgcaatattatgccaggatttagccagggaaattattatactcttaaggata

SEQ ID NO: 208999 - DNA, 75 bp, synthetic construct
  source 1..75: mol_type = other DNA
gaaaagcgaagtttgtctttatcccgaagaagtgcaggtactcagaaagctttcaacaacgattaatagaattgg

SEQ ID NO: 209000 - DNA, 75 bp, synthetic construct
  source 1..75: mol_type = other DNA
ttctgtcatcttctctggtagggcttctgtttgtgagtgctgagggtttcgcacaggtatcagtatatccgaaag

SEQ ID NO: 209001 - DNA, 75 bp, synthetic construct
  source 1..75: mol_type = other DNA
gaacagttgcttgatacggccaacgtagaaaacgtcgatctgatcctgacttcatcaccaatgctgctccagcac

SEQ ID NO: 209002 - DNA, 75 bp, synthetic construct
  source 1..75: mol_type = other DNA
atcgagtgttgtagctggttttatggatgcatcattatattgctggatttttgcagccataagcgcattgtttct

SEQ ID NO: 209003 - DNA, 75 bp, synthetic construct
  source 1..75: mol_type = other DNA
atgaatgaaaactcagtaatcttaataagtttattttggtttttttttggatcgagtgttgtagctggttttatg

SEQ ID NO: 209004 - DNA, 75 bp, synthetic construct
  source 1..75: mol_type = other DNA
ggatgatgatattgccagtcttgatatcagcgaaacaggacaggagatcctgcgctatcatcaactcacactgac

SEQ ID NO: 209005 - DNA, 75 bp, synthetic construct
  source 1..75: mol_type = other DNA
gtgcaatcggcggcacactcaacctgaactcactgtggtcgaagctgggcacattcagcatcagctacaatgatg

SEQ ID NO: 209006 - DNA, 75 bp, synthetic construct
  source 1..75: mol_type = other DNA
ctgtaaaacaccttcctgcccctgctgactgggacgatcttgctttgccgatctatcaggacgctttattgatga

SEQ ID NO: 209007 - DNA, 75 bp, synthetic construct
  source 1..75: mol_type = other DNA
gtcggtatcgacgccaccgatgctgtacgttgttccgcgaaaaccggcgttggcgtgcaggacgttctcgaacgt

SEQ ID NO: 209008 - DNA, 75 bp, synthetic construct
  source 1..75: mol_type = other DNA
tgcggttagtatgaatggggtggccgtcgtacccggggattcgaaagacatcacgatagatttcgggcagggtga

SEQ ID NO: 209009 - DNA, 75 bp, synthetic construct
  source 1..75: mol_type = other DNA
ttcagtttgcgttgatggtggtgagtttgcagttgttgaaaatcaacgccgaaacagttcgagttctgaggtttt

SEQ ID NO: 209010 - DNA, 75 bp, synthetic construct
  source 1..75: mol_type = other DNA
atttggtttattgagcactttaaactccaaaatattacaatattggtgtactttttaggtgggcacacatattca

SEQ ID NO: 209011 - DNA, 75 bp, synthetic construct
  source 1..75: mol_type = other DNA
ttgatacggtgccgccggggttactctggatgctgaatccaccattatctccggcaataatgtctccattaacga

SEQ ID NO: 209012 - DNA, 75 bp, synthetic construct
  source 1..75: mol_type = other DNA
ttccctgtgctcacagaatctcaaagctaatgtactgctaaatagtgatgaccacgaagtacctatacatcagaa

SEQ ID NO: 209013 - DNA, 75 bp, synthetic construct
  source 1..75: mol_type = other DNA
cccagctacattcaacatcaggtgcggaatgcgaaaacaggcgtctgggaagattatgttcctggcatgaccatt

SEQ ID NO: 209014 - DNA, 75 bp, synthetic construct
  source 1..75: mol_type = other DNA
gggtattagccaccgaaatcgccaagccttcggtcgccgccgcgcaatacaacattgccgctaaccatattgata

SEQ ID NO: 209015 - DNA, 75 bp, synthetic construct
  source 1..75: mol_type = other DNA
ggtgtgctcggatatgaagcgcaacttgttaatgccgtaatcagtactcgtgggccgctaaccgggcgtattgaa

SEQ ID NO: 209016 - DNA, 75 bp, synthetic construct
  source 1..75: mol_type = other DNA
tgaatgctgctcgaccacatctgggtgaattatatgaggcgtataaaacgacactgacagatatgaaaccagaat

SEQ ID NO: 209017 - DNA, 75 bp, synthetic construct
  source 1..75: mol_type = other DNA
tattcaaaaaaaaggttctagtcagaaggaattgcttaaatctctttatgaaacagtagggatcaaatttaacat

SEQ ID NO: 209018 - DNA, 75 bp, synthetic construct
  source 1..75: mol_type = other DNA
tatcgaaattgcccgaataatgtgccgctggctttttggtggggagattatgaaccaacaggtgctcccgcattg

SEQ ID NO: 209019 - DNA, 75 bp, synthetic construct
  source 1..75: mol_type = other DNA
cgcaatatcaaaacgatccgtgcacataaatttaatgtgatgtcgaaactgggcgtcagttctgacgcagggttg

SEQ ID NO: 209020 - DNA, 75 bp, synthetic construct
  source 1..75: mol_type = other DNA
tcagcgttgataacagcgatgttattgaaatcgacgtgctgaacttcatctggcgcattgatggtaaggatgttc

SEQ ID NO: 209021 - DNA, 75 bp, synthetic construct
  source 1..75: mol_type = other DNA
atttatcgttgattcaggatgatgaatttgcggggaatatccgtcgcctgatggcggaacaacatcagggattgg

SEQ ID NO: 209022 - DNA, 75 bp, synthetic construct
  source 1..75: mol_type = other DNA
tcgtgcgattccagcgagtgcacaagatatcacccggctggaacacagcctggcaacgcttgctgagcaactgaa

SEQ ID NO: 209023 - DNA, 75 bp, synthetic construct
  source 1..75: mol_type = other DNA
gcccactgctggcgctggagaatatctttgttgatcaggattttagcaataaagagcaggcgatccagttcctgt

SEQ ID NO: 209024 - DNA, 75 bp, synthetic construct
  source 1..75: mol_type = other DNA
ctgttccgtactgaaatgctctatatggatcgcgacagcgcgccggacgagcaggagcaatttgaagcctaccag

SEQ ID NO: 209025 - DNA, 75 bp, synthetic construct
  source 1..75: mol_type = other DNA
atgacagaacaacatcaggggctgggtgtagcgatcatcagcaatatggagcaggtttgcgccaaactttctgct

SEQ ID NO: 209026 - DNA, 75 bp, synthetic construct
  source 1..75: mol_type = other DNA
gcgcagacgctggcggataaacgtcagcaacaacaggcgcaggccgccgcgcagctggcctattcccgtgataac

SEQ ID NO: 209027 - DNA, 75 bp, synthetic construct
  source 1..75: mol_type = other DNA
catccagtacggcaacggctgcaagcagcaagccagttaccagtgtggcgtcaggtccgcgcgcactaagccgta

SEQ ID NO: 209028 - DNA, 75 bp, synthetic construct
  source 1..75: mol_type = other DNA
atccagcgcgtgcgcaggcattgcgcattgaagggcaggttaaagttaaatttgacgttacaccggatggtcgcg

SEQ ID NO: 209029 - DNA, 75 bp, synthetic construct
  source 1..75: mol_type = other DNA
tgcgcagatggcgttatgaacccggtaagccaggcactggcatagtggttaacattgtgtttcgcatcaatggca

SEQ ID NO: 209030 - DNA, 75 bp, synthetic construct
  source 1..75: mol_type = other DNA
aatggacatcggaggcgataaaagcattccttatctgaatattccccaggaagagaacccgttcctcggctatcg

SEQ ID NO: 209031 - DNA, 75 bp, synthetic construct
  source 1..75: mol_type = other DNA
gcaacgcttgccgagcaactgaaccagcaattgcgtgagcgtgacggcgaaagcaaaactatcctcagcgcccat

SEQ ID NO: 209032 - DNA, 75 bp, synthetic construct
  source 1..75: mol_type = other DNA
tctgccagcgattatctgcgcgaacgagttagtgatattcgtgatatcagcgaacagttgctgcatatcacctgg

SEQ ID NO: 209033 - DNA, 75 bp, synthetic construct
  source 1..75: mol_type = other DNA
gttaaatgaagctcgccttgagcgagatatattaaaaaaagcaactgtagattcaattggtcaacgcaacagtta

SEQ ID NO: 209034 - DNA, 75 bp, synthetic construct
  source 1..75: mol_type = other DNA
tgtcaccttcggggccggaagcgaacccgtcccggtctgtgacagtctggtccgctccctgatgaacacctggcc

SEQ ID NO: 209035 - DNA, 75 bp, synthetic construct
  source 1..75: mol_type = other DNA
gaaacaccgccaaaaagcattattgaagctgcggcgaacggtgcaatgaccgggctgaaaatcgccgccggtgtg

SEQ ID NO: 209036 - DNA, 75 bp, synthetic construct
  source 1..75: mol_type = other DNA
aggactgcgttatcaggccttgatgactagtctcaacggcgtaagatttagttttaattgctctatgaaagggtt

SEQ ID NO: 209037 - DNA, 75 bp, synthetic construct
  source 1..75: mol_type = other DNA
actgaaaaagctccctgctggtattacgaccagtgaacagcagatacgcaaactggcacagaagcacgcgcagat

SEQ ID NO: 209038 - DNA, 75 bp, synthetic construct
  source 1..75: mol_type = other DNA
gtgagcaagattgactatcaggcactgcgtgatgcagcagtagcaattgaaacagtagcaacgcctcaaaaattg

SEQ ID NO: 209039 - DNA, 75 bp, synthetic construct
  source 1..75: mol_type = other DNA
ctatttgtagcggcatggcgtctattgcgggttcgatgatgattggctatgccggaatgggcgtgccgattgact

SEQ ID NO: 209040 - DNA, 75 bp, synthetic construct
  source 1..75: mol_type = other DNA
acagcggcggtgtatcagaaagtggtgacactggaagataaactggtggagaaacctgtcacggggaagagccgg

SEQ ID NO: 209041 - DNA, 75 bp, synthetic construct
  source 1..75: mol_type = other DNA
caatttgtagcgggatggcgtccattgctggttcgatgatgattggttatgccggaatgggcgtaccaattgact

SEQ ID NO: 209042 - DNA, 75 bp, synthetic construct
  source 1..75: mol_type = other DNA
gcgtgggtgatgggggttgactggagtgatgcaaatcttgccgggagtttgattgggcagaagctggcgatcaat

SEQ ID NO: 209043 - DNA, 75 bp, synthetic construct
  source 1..75: mol_type = other DNA
gtttgattgggcagaaactggcgattaatgagtttgttgcttatctcaatttctcgccctatctgcaaacgagcg

SEQ ID NO: 209044 - DNA, 75 bp, synthetic construct
  source 1..75: mol_type = other DNA
tggagtcgattttaggttacctgttggccccattggcgtgggtgatgggtgttgactggagtgatgcaaatcttg

SEQ ID NO: 209045 - DNA, 75 bp, synthetic construct
  source 1..75: mol_type = other DNA
ggtatccatcccacgtcactggtgtttgccgggggaggctcgaagggcaaactctggagccagattctggcggac

SEQ ID NO: 209046 - DNA, 75 bp, synthetic construct
  source 1..75: mol_type = other DNA
tcaagattggaccggctggaaagcaggaaagtggcattacaaagcgatactccggtaaaaaaagaaaaagtgcgg

SEQ ID NO: 209047 - DNA, 75 bp, synthetic construct
  source 1..75: mol_type = other DNA
tttgcagcatcaataacaggctcatttttgaaaggttacaaaggcttatcgattcgtacctcaatagaaatgcct

SEQ ID NO: 209048 - DNA, 75 bp, synthetic construct
  source 1..75: mol_type = other DNA
atcggtgcattcagacctgaatggaaatataaactactatggtctgttccctgtaaggttggtaaatgcttatgt

SEQ ID NO: 209049 - DNA, 75 bp, synthetic construct
  source 1..75: mol_type = other DNA
actggaagagccacaggaaaaaatcatcaatcctgtgccggtacagaattatagcgaggtaagcgagcagcgaac

SEQ ID NO: 209050 - DNA, 75 bp, synthetic construct
  source 1..75: mol_type = other DNA
gcggaacgtgaaacaacaattattgagcaggatgccggggaaaactggatcagggctttccgtgaacgtattgag

SEQ ID NO: 209051 - DNA, 75 bp, synthetic construct
  source 1..75: mol_type = other DNA
tgttgattgatgagttaattgcggagttatccattgaaattaaggatatgggagaagagcgtgatgatctggctt

SEQ ID NO: 209052 - DNA, 75 bp, synthetic construct
  source 1..75: mol_type = other DNA
gatcgtgcaatcagagctgtgctatatagtgattacgtaaacgaagatgcttatttagataatccagagctatat

SEQ ID NO: 209053 - DNA, 75 bp, synthetic construct
  source 1..75: mol_type = other DNA
caaacatcattcaactcaacattttgggaagtctatctttatgcagtgataaaaaattatggcttagatgttgac

SEQ ID NO: 209054 - DNA, 75 bp, synthetic construct
  source 1..75: mol_type = other DNA
atgagatggataatatgccaattacgctattttgggcgttgcatatattcgatacatatcttgaaccacaaagcc

SEQ ID NO: 209055 - DNA, 75 bp, synthetic construct
  source 1..75: mol_type = other DNA
ttatcagtgcgaaaccatttttgtcgacccaccgcgcagcggtctggacagtgaaaccgagaaaatggtgcaggc

SEQ ID NO: 209056 - DNA, 75 bp, synthetic construct
  source 1..75: mol_type = other DNA
attacctcaccacgctgagtaatcaggcggtggtttccctgctgtaccataaaaagctggatgatgagtggcgtc

SEQ ID NO: 209057 - DNA, 75 bp, synthetic construct
  source 1..75: mol_type = other DNA
tgtcaaaatattatgagcagttaaacaatcattttgccgccgaaaatgaaataaagaaaattttacccataaaat

SEQ ID NO: 209058 - DNA, 75 bp, synthetic construct
  source 1..75: mol_type = other DNA
gaaaagctgttgaacgagatggggcgcgagtccacgccatccaataaaaataccccggctcatatttatgccggt

SEQ ID NO: 209059 - DNA, 75 bp, synthetic construct
  source 1..75: mol_type = other DNA
tgctgataaagacagcgcaaccagccagttttttattaacgttgccgataacgccttcctcgaccacggccagcg

SEQ ID NO: 209060 - DNA, 75 bp, synthetic construct
  source 1..75: mol_type = other DNA
ttgcggaagacctgaaagccctgggcgatgtctcacatatcgacctgcggatccattcgccaggtggtgacgtgt

SEQ ID NO: 209061 - DNA, 75 bp, synthetic construct
  source 1..75: mol_type = other DNA
atgaacgaccagcaaatcgaaaaagaaatcgctgagaaaggcaaaacggcaccgcgagttacgccccaatatatc

SEQ ID NO: 209062 - DNA, 75 bp, synthetic construct
  source 1..75: mol_type = other DNA
tgaggttgggtaaacgagaagtgtctgttgttcgtgatggcaggtttttaagaagccgcacggtgaaaagcacca

SEQ ID NO: 209063 - DNA, 75 bp, synthetic construct
  source 1..75: mol_type = other DNA
gccacaaaaatccgtattgatgccggtgtggcaccacttgactggcgcgggctggtgcgttcgtcggtggcctga

SEQ ID NO: 209064 - DNA, 75 bp, synthetic construct
  source 1..75: mol_type = other DNA
gcgttttaacgagcgcctgctcgctgccgtgcgagtaaccttaagcggcaccgagggagcgatggattccctgcg

SEQ ID NO: 209065 - DNA, 75 bp, synthetic construct
  source 1..75: mol_type = other DNA
ttcatcctggtggatggcggatgcaggcgtggaagatcgcggtgtgatgacggcgtttatgcaggcactgggatt

SEQ ID NO: 209066 - DNA, 75 bp, synthetic construct
  source 1..75: mol_type = other DNA
atgaagctgaccatcattcgattagaaaaatttagcgaccaggaccggattgacctgcaaaagatctggccggag

SEQ ID NO: 209067 - DNA, 75 bp, synthetic construct
  source 1..75: mol_type = other DNA
ccatctgtcacagcaatggcgcgaattgaatcgaaacgcacaggagatttttcacacatgccggaaaccattaaa

SEQ ID NO: 209068 - DNA, 75 bp, synthetic construct
  source 1..75: mol_type = other DNA
tattccccttcctctttacaggttgacgataaccaccgtatctacgccgcgcgttttaacgagcgcctgctcgcg

SEQ ID NO: 209069 - DNA, 75 bp, synthetic construct
  source 1..75: mol_type = other DNA
ggtgtggaagatcgcagcgtgatggcggcgtttatgcaggcgttgggatttaaggaacaaccgggcggctgggaa

SEQ ID NO: 209070 - DNA, 75 bp, synthetic construct
  source 1..75: mol_type = other DNA
tatcgacggcgagcgacagttgagttaccgggagctgaatcaggcggcggataacctcgcgtgtagtttacgccg

SEQ ID NO: 209071 - DNA, 75 bp, synthetic construct
  source 1..75: mol_type = other DNA
ctggaaaggaactagaagaactttctgacaaggagttaattgcattaactaaagccgtaattacaggtatgacct

SEQ ID NO: 209072 - DNA, 75 bp, synthetic construct
  source 1..75: mol_type = other DNA
ttggtcggaagattgcccggcagaatgctgtaaacaaaatctggatgcttgaaggttacttgctgaagcagaagt

SEQ ID NO: 209073 - DNA, 75 bp, synthetic construct
  source 1..75: mol_type = other DNA
actgtgcaggggcgcgagaaagatcagatcaaccgtggcggcgagaagatcgctgccgaagagatcgaaaacctg

SEQ ID NO: 209074 - DNA, 75 bp, synthetic construct
  source 1..75: mol_type = other DNA
aaatgtggcgaagtaggctggttggtatgtgcgattaaagatatccacggcgcaccagtcggtgacaccttaacg

SEQ ID NO: 209075 - DNA, 75 bp, synthetic construct
  source 1..75: mol_type = other DNA
ggcattaccatcaaagcgcaaagcgtgacgctggactacaaagcgtctgacggcgaaacctatcagcttaacttt

SEQ ID NO: 209076 - DNA, 75 bp, synthetic construct
  source 1..75: mol_type = other DNA
cgtagcagaagaaattgaagatatcgttggtatcgacgccaccgacgcagtgcgctgctcagcgaaaaccggcgt

SEQ ID NO: 209077 - DNA, 75 bp, synthetic construct
  source 1..75: mol_type = other DNA
ccgtcttgatgatagcgcggagaaaattatccatacccagggttacccaatgtgcccggacgatgaagtgtgggt

SEQ ID NO: 209078 - DNA, 75 bp, synthetic construct
  source 1..75: mol_type = other DNA
atcgctgggggtatttctcgctggcggcactgtcgttctggcggccgatcccagcgccacgctctgtttcccatt

SEQ ID NO: 209079 - DNA, 75 bp, synthetic construct
  source 1..75: mol_type = other DNA
ccgcgtacccacaatgactattactacagcgtgcgccgtagcgtcgaaatttgtcagttcacgcagcagacgcgc

SEQ ID NO: 209080 - DNA, 75 bp, synthetic construct
  source 1..75: mol_type = other DNA
gtggtgcaactgctcaacgacagcggtgagcataacttgcaggatgcgattaaccatccggcagacggttttact

SEQ ID NO: 209081 - DNA, 75 bp, synthetic construct
  source 1..75: mol_type = other DNA
ataatcttgcttgtcgtctacgtcgtcagggaattaaatccggtgaaaccgcgctggtacagttgggtaatgttg

SEQ ID NO: 209082 - DNA, 75 bp, synthetic construct
  source 1..75: mol_type = other DNA
tctttcttgccggaggaacggttgttctggcggccgatcccagcgccacgctttgcttcccattgattgaaaaac

SEQ ID NO: 209083 - DNA, 75 bp, synthetic construct
  source 1..75: mol_type = other DNA
gccccgatggctgatttcagcagcgccactattgctactggtagtctgcctccgggagaccatacactttactcc

SEQ ID NO: 209084 - DNA, 75 bp, synthetic construct
  source 1..75: mol_type = other DNA
taacgcaaataactccacattcctgatgcataccaacaacagtcaggctgaccagctgaatgtcacgaataaact

SEQ ID NO: 209085 - DNA, 75 bp, synthetic construct
  source 1..75: mol_type = other DNA
ttatagaaaaaaccgtcgcctttcattcttacattcaattaaatatatcatttattatttttttcatgccttgtt

SEQ ID NO: 209086 - DNA, 75 bp, synthetic construct
  source 1..75: mol_type = other DNA
gggatgaatgcggaaattaaggacaatatgcgttttggcctggagctggagaaatcggcgttcgggaaatataac

SEQ ID NO: 209087 - DNA, 75 bp, synthetic construct
  source 1..75: mol_type = other DNA
cggggaatggccctgagcatgaaagacaaggattataacccactgattggtcgtaccggtgttgacgtgggaaga

SEQ ID NO: 209088 - DNA, 75 bp, synthetic construct
  source 1..75: mol_type = other DNA
caatctggtcggtaaacttgataaagccccgatggctgatttcagcagtgccacgattactaccggtagtctgcc

SEQ ID NO: 209089 - DNA, 75 bp, synthetic construct
  source 1..75: mol_type = other DNA
gtccgctgctggcgctggagaatatcttcgttgatcagacttttagcaataaagagcaggctattcagttcctgt

SEQ ID NO: 209090 - DNA, 75 bp, synthetic construct
  source 1..75: mol_type = other DNA
ggcgttggttttggcgtggcgatcccgcacaccaaatctcagtggatccgtcattccagtatcagcattgcccgg

SEQ ID NO: 209091 - DNA, 75 bp, synthetic construct
  source 1..75: mol_type = other DNA
agcgcgcaggaaattgaagcgttacttaccgcgtttacgccggaagaagacgttcgcccactgctggcactatag

SEQ ID NO: 209092 - DNA, 75 bp, synthetic construct
  source 1..75: mol_type = other DNA
atgaacaagcaagcaacaacatctctttcttttccaggtggtagaaaagaaagcattgctgaacgtctgaaaagg

SEQ ID NO: 209093 - DNA, 75 bp, synthetic construct
  source 1..75: mol_type = other DNA
atgacgtgacatttattccgggtcacggaccattatccactctcggttatgagcgcctgcataatcccttcttgc

SEQ ID NO: 209094 - DNA, 75 bp, synthetic construct
  source 1..75: mol_type = other DNA
ctacgtttcatcggcggcttttctacgcgctcaatcgctgaatctgtgaatcgtagccaccttagcgtcagaaca

SEQ ID NO: 209095 - DNA, 75 bp, synthetic construct
  source 1..75: mol_type = other DNA
tgctgtttttgatcgtgttggcagctttgtcaacagcagcctgaccctcgaaaaaggagcaaaactaacggctca

SEQ ID NO: 209096 - DNA, 75 bp, synthetic construct
  source 1..75: mol_type = other DNA
acaggatcgcctgcaagggcgcatcaaccagctgttcgagcgtattgaagcgcagttgcgtcaggtattgcgcga

SEQ ID NO: 209097 - DNA, 75 bp, synthetic construct
  source 1..75: mol_type = other DNA
atccattcaccaggtggcgacgtgtttgaaggtatcgccatctataacctgctacggaatcatccggcagacatt

SEQ ID NO: 209098 - DNA, 75 bp, synthetic construct
  source 1..75: mol_type = other DNA
ctatggaaataactgggtcgtcaccactcaggatttccttggtcagcaaccgcaaaatgattttgacaaaaccat

SEQ ID NO: 209099 - DNA, 75 bp, synthetic construct
  source 1..75: mol_type = other DNA
aggagaccattgcactggcgacctacggggaaattttctccatcacccgtcaggccattatcaatgatgacctga

SEQ ID NO: 209100 - DNA, 75 bp, synthetic construct
  source 1..75: mol_type = other DNA
cacgcaacagtgccccgcgtgataccacagtgacaatccctgcaccggcggtaacagaaccatcaccggtaccgg

SEQ ID NO: 209101 - DNA, 75 bp, synthetic construct
  source 1..75: mol_type = other DNA
ctgcgtcaggtgcgtgaaggggcagaatataaatacgtcaccaccggagataaacaggccactattgcactggcg

SEQ ID NO: 209102 - DNA, 75 bp, synthetic construct
  source 1..75: mol_type = other DNA
ctcatcggtaagtacgttcaccatgacaacgagtataccgcaactttcgccggccttggcaccagagactacagc

SEQ ID NO: 209103 - DNA, 75 bp, synthetic construct
  source 1..75: mol_type = other DNA
atgttaatggatcagatataatgagttttggacatattcaaaataattatactgtagtaggagagaacaaacata

SEQ ID NO: 209104 - DNA, 75 bp, synthetic construct
  source 1..75: mol_type = other DNA
tcttgagcaatggaggtgttttcgcaaactccgggctgaatattaaggataacggccatctcactgtccagagcg

SEQ ID NO: 209105 - DNA, 75 bp, synthetic construct
  source 1..75: mol_type = other DNA
cagaggtcaataacctgaacaaacgtatgggtgacctgcgggatactcagggggatgccggtgtctgggcacgca

SEQ ID NO: 209106 - DNA, 75 bp, synthetic construct
  source 1..75: mol_type = other DNA
tgacattaatgtaccggttaatactatcagtatttttggggggaaaggaacgccgggagacctgtattatgacag

SEQ ID NO: 209107 - DNA, 75 bp, synthetic construct
  source 1..75: mol_type = other DNA
tcggatattcatgcaggaaccacggcggcaaccattaatctgggagacagtgatgctgctgtcgggaagacgggt

SEQ ID NO: 209108 - DNA, 75 bp, synthetic construct
  source 1..75: mol_type = other DNA
aattacagtcgctgtttgcccgggtggcagaagagaaacatcagcgcggtgaactggaaaagccccaccaccagc

SEQ ID NO: 209109 - DNA, 75 bp, synthetic construct
  source 1..75: mol_type = other DNA
tttttatgggctcaggttcaacggtaaaagcggcactggcgctcgggcgtcgtgcgattggcgttgagctggaga

SEQ ID NO: 209110 - DNA, 75 bp, synthetic construct
  source 1..75: mol_type = other DNA
cacggatgtgtggacacataaaccggtgcagttctatcccgggaaacatccgtgcgaaaaaccggcagaaatgct

SEQ ID NO: 209111 - DNA, 75 bp, synthetic construct
  source 1..75: mol_type = other DNA
ggctggaccagtgtctggcgcacttctggcgggtattaaagcccgagggaagcatttacctgttctgtgggcatc

SEQ ID NO: 209112 - DNA, 75 bp, synthetic construct
  source 1..75: mol_type = other DNA
ggtgttgaactggagactgaacgttttgagcagacggttcgggaagtacaggatttagtcagccagaacggatga

SEQ ID NO: 209113 - DNA, 75 bp, synthetic construct
  source 1..75: mol_type = other DNA
tacccgaaaattctgttgacctgatagtcacggacccgccgtactttaaagtgaagcctgagggctgggataacc

SEQ ID NO: 209114 - DNA, 75 bp, synthetic construct
  source 1..75: mol_type = other DNA
gtgcagttttatccgggcaaacatccctgtgaaaaaccggcagatatgttgcggcagataattgaggccagcagt

SEQ ID NO: 209115 - DNA, 75 bp, synthetic construct
  source 1..75: mol_type = other DNA
ggataacggcaaaacagattgctgatgccacaggaaagaaaaacatggtgtcgcactggttcagtgccagccagt

SEQ ID NO: 209116 - DNA, 75 bp, synthetic construct
  source 1..75: mol_type = other DNA
ccggaaagaaaaacatggcttcgcactggtttggtaccagtcagtggcagttgccgaacgaggctgattacaaaa

SEQ ID NO: 209117 - DNA, 75 bp, synthetic construct
  source 1..75: mol_type = other DNA
gccagatggctgggataaccagtggaagggcgatgatgattacctgaaatggctggatcagtgtctggcgcagtt

SEQ ID NO: 209118 - DNA, 75 bp, synthetic construct
  source 1..75: mol_type = other DNA
caggaaagaaaaacatggtgtcgcactggttcagtgccagtcagtggcagttgccgaacgaaagcgattatctga

SEQ ID NO: 209119 - DNA, 75 bp, synthetic construct
  source 1..75: mol_type = other DNA
gaaagatgccgggtatgcggcgaagggcagtgcactgaaacagcatgtgatggccccgctgatttcttactttcg

SEQ ID NO: 209120 - DNA, 75 bp, synthetic construct
  source 1..75: mol_type = other DNA
tggtcagcacatacagcgaactgaaccggcaatatgccagcctgctggaggaatacaaatcactgcggcgttatt

SEQ ID NO: 209121 - DNA, 75 bp, synthetic construct
  source 1..75: mol_type = other DNA
ggggcatcaaatcaatggtcattgagaccgctgacaacatcaccttgaaaaccagtgagtttgtgctggaggctg

SEQ ID NO: 209122 - DNA, 75 bp, synthetic construct
  source 1..75: mol_type = other DNA
tcacccaaggcggcggcgcgatgagttccaacggagtcgtggttgacgaccatgagcatactggcgtcctgaaag

SEQ ID NO: 209123 - DNA, 75 bp, synthetic construct
  source 1..75: mol_type = other DNA
agggaaaactggctttgccgggtgaaaacaggcgacttagaaaccaactggatcagctggctgaccctgcgtgcc

SEQ ID NO: 209124 - DNA, 75 bp, synthetic construct
  source 1..75: mol_type = other DNA
gtccgctgacaatatcaccctgaaaaccagtgagtttgtactggaggctgaccgcacgcgcattaacagcgaagt

SEQ ID NO: 209125 - DNA, 75 bp, synthetic construct
  source 1..75: mol_type = other DNA
gaccgctgacaatatcaccttgaaaaccagtgagtttgtactggaggctgaccgcacgcggattaacagcgaagt

SEQ ID NO: 209126 - DNA, 75 bp, synthetic construct
  source 1..75: mol_type = other DNA
ggggcatcaaatcaatggtcattgagaccgctgacaacatcaccgtgaaaaccagtgagtttgttctggaggctg

SEQ ID NO: 209127 - DNA, 75 bp, synthetic construct
  source 1..75: mol_type = other DNA
gatgcgtgagcgctttaatgtgctgaaccacattatctgggcgaagccgtccgggcgctggaacgggtgcaacaa

SEQ ID NO: 209128 - DNA, 75 bp, synthetic construct
  source 1..75: mol_type = other DNA
gggcgtcgtgcgattggtgttgagctggagaccggacgttttgagcagacagtcagggaagttcaggatttaatc

SEQ ID NO: 209129 - DNA, 75 bp, synthetic construct
  source 1..75: mol_type = other DNA
gggacgtcgtgcaactggcgttgaactggagactgaacgttttgagcagacggtgcgggaagtacaggatttaat

SEQ ID NO: 209130 - DNA, 75 bp, synthetic construct
  source 1..75: mol_type = other DNA
ctggcgatggaagacgcctggcagattattgatatgggggaaagcccggttcgggatttacagaatggtttctcc

SEQ ID NO: 209131 - DNA, 75 bp, synthetic construct
  source 1..75: mol_type = other DNA
tactggggagaagaacacgtatggtgggacggcagggctgcttttcatggtgaggttgtcagacctgcctgtact

SEQ ID NO: 209132 - DNA, 75 bp, synthetic construct
  source 1..75: mol_type = other DNA
acggcaaaacagattgcagatgccacaggaaagaaaaacatggtgtcgcactggttcagtgccagccagtggcag

SEQ ID NO: 209133 - DNA, 75 bp, synthetic construct
  source 1..75: mol_type = other DNA
tacggatgtctggatgtataagcctgtacagtattacctcggcaaacatccctgtgaaaaaccggcggagatgtt

SEQ ID NO: 209134 - DNA, 75 bp, synthetic construct
  source 1..75: mol_type = other DNA
ttaccgaacgaggatgattacagaaaactgcaggcgttgtttgcgcgtgttgcagcagaaaaacatcaacgcggg

SEQ ID NO: 209135 - DNA, 75 bp, synthetic construct
  source 1..75: mol_type = other DNA
gcaacagagcgcattctgtttgccgaacattatcaggggccataccagccaaaaaatgacggctatgcggcaaag

SEQ ID NO: 209136 - DNA, 75 bp, synthetic construct
  source 1..75: mol_type = other DNA
cgggttcgacagtcaaagcggcgctggcactggggcgtcgtgcgattggcgttgagctggagactgagcgttttg

SEQ ID NO: 209137 - DNA, 75 bp, synthetic construct
  source 1..75: mol_type = other DNA
aaaagcggcactgtcgctgggacgcagggcgattggcgtggaactggaagaggagcgttttaatcagacggtcag

SEQ ID NO: 209138 - DNA, 75 bp, synthetic construct
  source 1..75: mol_type = other DNA
ctggtttggtgccagccagtggcagttaccgaacgaagctgattacagaaagcttcaggcgttgtttgtgcgtgt

SEQ ID NO: 209139 - DNA, 75 bp, synthetic construct
  source 1..75: mol_type = other DNA
atgcttaatactgtaaaaatatccagttgtgagttagtcaacgctgactgcctggaatttatccgcttgttaccc

SEQ ID NO: 209140 - DNA, 75 bp, synthetic construct
  source 1..75: mol_type = other DNA
cgctgttcgcgtgtgttgcagaagaaaagcaccagcgtggggagctggcaacgccacaccagcaactggtcagca

SEQ ID NO: 209141 - DNA, 75 bp, synthetic construct
  source 1..75: mol_type = other DNA
gcaaactgagaaccgttgcatcagaaggaaatgtggcacgatttacccagcgttttggtcgttttgttggtgcga

SEQ ID NO: 209142 - DNA, 75 bp, synthetic construct
  source 1..75: mol_type = other DNA
atgatggggcttcgtgaagagattcagtcagaggttgccgctgcttttgatgaggatttagcagacgccgtgagt

SEQ ID NO: 209143 - DNA, 75 bp, synthetic construct
  source 1..75: mol_type = other DNA
tggaagagtacaaatccctgcggcgttatttttccgtatcggcagccgttccttatacggatgtctggacgcaca

SEQ ID NO: 209144 - DNA, 75 bp, synthetic construct
  source 1..75: mol_type = other DNA
gaactggaaaagccccaccaccagctgctgaagacgtatacttcactgaaccggcagtatgtggaactgcagagt

SEQ ID NO: 209145 - DNA, 75 bp, synthetic construct
  source 1..75: mol_type = other DNA
gggcgcgagcttaaacagcatgtcatggccccgctgatttcttactttcgtgatgcgcgcgaatcactggggata

SEQ ID NO: 209146 - DNA, 75 bp, synthetic construct
  source 1..75: mol_type = other DNA
agcattaccaggggccgtataaaccaaagagcgacggttacgcggagaagggaagcgagctgaagcagcatgtaa

SEQ ID NO: 209147 - DNA, 75 bp, synthetic construct
  source 1..75: mol_type = other DNA
gtgttgagttagtcaacgctgatagcctgcaatacatcgccactctccctgataactccattgacctgatagtca

SEQ ID NO: 209148 - DNA, 75 bp, synthetic construct
  source 1..75: mol_type = other DNA
ctggcggttactgaagcctgccggaagtctttacctgttctgtggtcatcgcctggcatctgatatcgaaatcat

SEQ ID NO: 209149 - DNA, 75 bp, synthetic construct
  source 1..75: mol_type = other DNA
atgactaatactgtaaaaatatccagttgtgagttaatcaacgctgattgcctggaatttatccagaccttaccg

SEQ ID NO: 209150 - DNA, 75 bp, synthetic construct
  source 1..75: mol_type = other DNA
gtcgtgcaattggcgttgagctggagactgaacgttttgagcagacggttcgggaagtacaggatttagtcagcc

SEQ ID NO: 209151 - DNA, 75 bp, synthetic construct
  source 1..75: mol_type = other DNA
gatgcgtgagcggtttaacgtgctgaaccatatcatctgggcaaagccgtccggacgctggaacgggtgtaacaa

SEQ ID NO: 209152 - DNA, 75 bp, synthetic construct
  source 1..75: mol_type = other DNA
gatgcgtgaacgcttcagtgtactgaaccatattatctgggcaaagccgtccggacgctggaacgggtgcaacaa

SEQ ID NO: 209153 - DNA, 75 bp, synthetic construct
  source 1..75: mol_type = other DNA
gcgtcagataatttctgccagcagtcgtccgggggatgtggttgcggattttttatgggatcgggggcaacaata

SEQ ID NO: 209154 - DNA, 75 bp, synthetic construct
  source 1..75: mol_type = other DNA
tacggatgtctggacgtacaagccagtgcagtattatccgggcaaacatccctgtgaaaaaccagcggatatgtt

SEQ ID NO: 209155 - DNA, 75 bp, synthetic construct
  source 1..75: mol_type = other DNA
tggtgaaaccgctaatcgacaccgggcaatatcgcagagcgattacccatgttgtgagggataaagatgccgact

SEQ ID NO: 209156 - DNA, 75 bp, synthetic construct
  source 1..75: mol_type = other DNA
acatcgaaacagatagcggaagcgaccggaaagaaaaacatggcgtcacactggtttggtacaagtcagtggcag

SEQ ID NO: 209157 - DNA, 75 bp, synthetic construct
  source 1..75: mol_type = other DNA
catgaccattaccggctttacaccgcttgctgatagcaccgttgaagcacgcgcacgccgtgggcgcaaaggggc

SEQ ID NO: 209158 - DNA, 75 bp, synthetic construct
  source 1..75: mol_type = other DNA
ccatgaaccgcgtgcggtgcaggctattgaagagtgttggtgtattgcgctccccatgaaacactaccgcccgct

SEQ ID NO: 209159 - DNA, 75 bp, synthetic construct
  source 1..75: mol_type = other DNA
cacgtatatggctatccctctggctcacctggacggtcgttacgatggtcgtattgtgggttggcagcgaatcga

SEQ ID NO: 209160 - DNA, 75 bp, synthetic construct
  source 1..75: mol_type = other DNA
gttattaaacgacaccctatttttacgaaaactctgcgtcaccttaagtcataaaaattatcgtaatattgtttc

SEQ ID NO: 209161 - DNA, 75 bp, synthetic construct
  source 1..75: mol_type = other DNA
attgaagagtgttggtgccttgcgctccctatgaaacattaccgtccgctgttattaaacgacacgctattttta

SEQ ID NO: 209162 - DNA, 75 bp, synthetic construct
  source 1..75: mol_type = other DNA
ttaaaaacagaaagcagttgtcaggactggcgctggagatggacccggagaataaattctccgggatgatgcagt

SEQ ID NO: 209163 - DNA, 75 bp, synthetic construct
  source 1..75: mol_type = other DNA
tttgcaatgaacaacatcgttttattgtcgcggagcaattgcgtcaactaaacaaactcaccgagaacattattc

SEQ ID NO: 209164 - DNA, 75 bp, synthetic construct
  source 1..75: mol_type = other DNA
cagatgcaccatcaccgcgcggaacactgggtggtggttgcgggaacggcaaaagtcaccattgacggtgatatc

SEQ ID NO: 209165 - DNA, 75 bp, synthetic construct
  source 1..75: mol_type = other DNA
ctgtttggaaaacccagggaagatacctctcgatttaattgaagtgcgctccggcgcgtatctggaagaggacga

SEQ ID NO: 209166 - DNA, 75 bp, synthetic construct
  source 1..75: mol_type = other DNA
cgatccgtccatcacaaaatttcttcatgcaggcagtgaagatctggaagtgttcctcaatgtctttggcgaatt

SEQ ID NO: 209167 - DNA, 75 bp, synthetic construct
  source 1..75: mol_type = other DNA
tcgaaccggcagggcgtaacacggcacctgccattgcgctggcggcgctggcggcaaaacgtcatagcccggaga

SEQ ID NO: 209168 - DNA, 75 bp, synthetic construct
  source 1..75: mol_type = other DNA
gaaaccgggcgagggcttgtcggtacagatgcaccatcaccgcgcggaacactgggtggtggttgcgggaacggc

SEQ ID NO: 209169 - DNA, 75 bp, synthetic construct
  source 1..75: mol_type = other DNA
ggttcgctaccagagaagaacgggaaggaaaggtgagcacgaacctgatttttaaggagtgtcgccagagtgccg

SEQ ID NO: 209170 - DNA, 75 bp, synthetic construct
  source 1..75: mol_type = other DNA
gctgcatcaggtaaagctgaaccagtctctgcctccacgacatccatgtttgaacgtttcatggcgaaccattca

SEQ ID NO: 209171 - DNA, 75 bp, synthetic construct
  source 1..75: mol_type = other DNA
tcagtccggcattgatgccgggctggcggatgaattagtcaatgcgtcggatgccatcagtgtgatggccacggc

SEQ ID NO: 209172 - DNA, 75 bp, synthetic construct
  source 1..75: mol_type = other DNA
agaaggaaatgttgcacggttcacccaacgttttggtcgttttgttagcacgaaaagggggcatgatgaaagtcc

SEQ ID NO: 209173 - DNA, 75 bp, synthetic construct
  source 1..75: mol_type = other DNA
gcggtccagggtggcgtgtcacagacgtcagcagacggtgatgcggacgtgaaaatgctcatggccatgccatga

SEQ ID NO: 209174 - DNA, 75 bp, synthetic construct
  source 1..75: mol_type = other DNA
aatcattcaccggcagcggtgcggggtggcgtgtcacagacgtcagaagacggtgatgcggacgtgaaaatgctc

SEQ ID NO: 209175 - DNA, 75 bp, synthetic construct
  source 1..75: mol_type = other DNA
gcagagtgaagccgatcgcattatggcgtgtgaagaagcgaaaggtcgtgaacaactggcggcaacgctggcggc

SEQ ID NO: 209176 - DNA, 75 bp, synthetic construct
  source 1..75: mol_type = other DNA
tccggaatgacaggctatgacggcattgtcgcctgtcttcagcaggcaatggcagatagccaggtgcggggcgta

SEQ ID NO: 209177 - DNA, 75 bp, synthetic construct
  source 1..75: mol_type = other DNA
gctggcaggacaacagggcatgagcgttgaacaggcccggggcgattctggccgcggcggcaccgcagcagccgg

SEQ ID NO: 209178 - DNA, 75 bp, synthetic construct
  source 1..75: mol_type = other DNA
ctgcttcaccgcaggcggatgccggaccctcactccgtgatcagatcatggcactggatgaggcaaaaggggctg

SEQ ID NO: 209179 - DNA, 75 bp, synthetic construct
  source 1..75: mol_type = other DNA
tccacttcctgccagtttttccgtttactggttttaccgatccccggattcatgctgttggtcggatcgttctcg

SEQ ID NO: 209180 - DNA, 75 bp, synthetic construct
  source 1..75: mol_type = other DNA
atgtaccccaaactggcacaggcttaccccacgaataaattaccggatttacggggcgaatttatccgtggctgg

SEQ ID NO: 209181 - DNA, 75 bp, synthetic construct
  source 1..75: mol_type = other DNA
tgcacaaaaatatgactggtgggcttatgtatcagctcgtccgcgtaatattgcatttaattacatcgtaagagc

SEQ ID NO: 209182 - DNA, 75 bp, synthetic construct
  source 1..75: mol_type = other DNA
gaaaactggagctgatgcgtgatagcgcaatggctcacccggcggcacgctggatgttggaagcacctggttact

SEQ ID NO: 209183 - DNA, 75 bp, synthetic construct
  source 1..75: mol_type = other DNA
attcaaaccagtttccgccgccgtccaagtctgaggacggcaacgtgacggaatacccagacggcggttggtttg

SEQ ID NO: 209184 - DNA, 75 bp, synthetic construct
  source 1..75: mol_type = other DNA
tgggagaaggctctgctttgcctgttggcgttccggtgccgtggcctcttgccgtcccgccagcgggatggctca

SEQ ID NO: 209185 - DNA, 75 bp, synthetic construct
  source 1..75: mol_type = other DNA
aaggtgcacaaagatatgattggtgggcttacgtatccgcgcgtccccgtaatattgcatttaattatatcgtga

SEQ ID NO: 209186 - DNA, 75 bp, synthetic construct
  source 1..75: mol_type = other DNA
gaacgccatccagactgtcagattgtgaagcgaaaaggacggctgtatgtgatttgtaaatctaatccacgtttt

SEQ ID NO: 209187 - DNA, 75 bp, synthetic construct
  source 1..75: mol_type = other DNA
accgcgtttgccctacctgctgtctactcaaatcagtttccaccaccttctgactctgaggacggcaacgtggtt

SEQ ID NO: 209188 - DNA, 75 bp, synthetic construct
  source 1..75: mol_type = other DNA
gcccgctgacaatatcaccatgaaaaccagtgagtttgtactggaggctgaccgcacgcgtattaacagcgaagt

SEQ ID NO: 209189 - DNA, 75 bp, synthetic construct
  source 1..75: mol_type = other DNA
tcgtgatgtggcggatatggggattactgtacttgatgccgagcagtggcggaaactggagctgatgcgtgatag

SEQ ID NO: 209190 - DNA, 75 bp, synthetic construct
  source 1..75: mol_type = other DNA
gaacacctatcacgagtgccgcatcagtgatgaatggggtggcgtggaaattattaaacgccctgaatgggcaag

SEQ ID NO: 209191 - DNA, 75 bp, synthetic construct
  source 1..75: mol_type = other DNA
tcagcaacgaggactaccacgccggtgacggcgtgagtaagtcacaactggatatggtggccaagaaccctgccc

SEQ ID NO: 209192 - DNA, 75 bp, synthetic construct
  source 1..75: mol_type = other DNA
atcaccaatctgatccgcataggtgtagtcaccgaagtggaccgggaaaactggctttgtcgggtgaaaacgggc

SEQ ID NO: 209193 - DNA, 75 bp, synthetic construct
  source 1..75: mol_type = other DNA
attcgaatcagttcgcaccaccgtcgacgtcggcggacgcctgtgtgacagaacatcctgacggtggctggtttg

SEQ ID NO: 209194 - DNA, 75 bp, synthetic construct
  source 1..75: mol_type = other DNA
gggcggcggcgcaatgagttctaacgggatcgtagttgatgaccatgagcatactggcgttctgaaaggcggcga

SEQ ID NO: 209195 - DNA, 75 bp, synthetic construct
  source 1..75: mol_type = other DNA
aaacaggcgacttagaaaccaactggatcagctggctgaccctgcgtgccgggaatgcccggacatggtggcgac

SEQ ID NO: 209196 - DNA, 75 bp, synthetic construct
  source 1..75: mol_type = other DNA
caaaaacgggaaagtaatattcattcgccatgttcatgacgatgaacttgtaggaagtctttcaacattcctgtt

SEQ ID NO: 209197 - DNA, 75 bp, synthetic construct
  source 1..75: mol_type = other DNA
atggatacatttctgtggatggcaaaaagagcgggttacacgattattccaccagcaaaggagcaaacattatga

SEQ ID NO: 209198 - DNA, 75 bp, synthetic construct
  source 1..75: mol_type = other DNA
cgctgggacagaagctatgcctctcgtgccaaaaatcactggcgaaaggtagctcccgatcgttttgagatttta

SEQ ID NO: 209199 - DNA, 75 bp, synthetic construct
  source 1..75: mol_type = other DNA
gtaatcgaggccgcagacagcgtcacctacaaaaccagtgagtttgtggtggaagcagacagaacgcgtattaac

SEQ ID NO: 209200 - DNA, 75 bp, synthetic construct
  source 1..75: mol_type = other DNA
gctgagtctgggaggcaatctggaaaccgcgtttgcgctgcccgccatctattcgaatcagttcgcgccaccgtc

SEQ ID NO: 209201 - DNA, 75 bp, synthetic construct
  source 1..75: mol_type = other DNA
atgcaaactgcaaccatgaacgcacaactcacagaaatcatgcgccttatcaccaacctgatccgcacaggtgta

SEQ ID NO: 209202 - DNA, 75 bp, synthetic construct
  source 1..75: mol_type = other DNA
cgccaccgggcgctggtatgtcagaggcatcaaatcaatggtcattgaggccgctgacaacatcaccatgaaaac

SEQ ID NO: 209203 - DNA, 75 bp, synthetic construct
  source 1..75: mol_type = other DNA
gtggtgctgctgagtctgggaggcaatctggaaaccgcctttgcgttgcccgctgtctattcgaatcagttcgcg

SEQ ID NO: 209204 - DNA, 75 bp, synthetic construct
  source 1..75: mol_type = other DNA
ggaggctgaccgcacgcgtattaacagcgaagtggtgatcaatggtggtgttacccagagtggcggtgcaatgag

SEQ ID NO: 209205 - DNA, 75 bp, synthetic construct
  source 1..75: mol_type = other DNA
atcgtaccgtggtgttccacgacaccagtgctgatgagtactttaaaattggctccactatcaaaacagaccgtg

SEQ ID NO: 209206 - DNA, 75 bp, synthetic construct
  source 1..75: mol_type = other DNA
aatgccgggtacggcgcatcaactgatgcgcgtgctttcagatgttctgctgaagtatgagccacgtattaagcg

SEQ ID NO: 209207 - DNA, 75 bp, synthetic construct
  source 1..75: mol_type = other DNA
ggtggaattactcccccagcccggtctagggcatcttaattacctgatccacgcgcagcttcccgataccggctg

SEQ ID NO: 209208 - DNA, 75 bp, synthetic construct
  source 1..75: mol_type = other DNA
tgctgaaagataaaaaaagttattcctgtaaagaggttgctgaatggctgacgtcagaaggctattcagtaacgg

SEQ ID NO: 209209 - DNA, 75 bp, synthetic construct
  source 1..75: mol_type = other DNA
atgcgcgtgctttcagacgttctgctgaagtatgagccacgtattaagcgcgtcgacgtgacgatgcaggaacag

SEQ ID NO: 209210 - DNA, 75 bp, synthetic construct
  source 1..75: mol_type = other DNA
ggttcgttacggaacaacatttatgccggagggcagggtgttactgcgacatctgaaacagcagcggtacgttca

SEQ ID NO: 209211 - DNA, 75 bp, synthetic construct
  source 1..75: mol_type = other DNA
gtgctttcagatgttctgctgaagtatgagccacgtattaagcgtgtcggggtgacgatgcaggaacagactcag

SEQ ID NO: 209212 - DNA, 75 bp, synthetic construct
  source 1..75: mol_type = other DNA
tatggtgattgtttttccaggaagttatacgaacttgagtattgcactgataaacataatgagcttggcataaaa

SEQ ID NO: 209213 - DNA, 75 bp, synthetic construct
  source 1..75: mol_type = other DNA
ggaaaaagattgcacactcattgtgtatggtgattgtttttccaggaagttatacgaacttgagtattgcactga

SEQ ID NO: 209214 - DNA, 75 bp, synthetic construct
  source 1..75: mol_type = other DNA
agtattataacccacctctgggagctggatgcagagatgacagatcctgtcatagctatgtttaatcacgtctga

SEQ ID NO: 209215 - DNA, 75 bp, synthetic construct
  source 1..75: mol_type = other DNA
cggtgctcgataatatgcagcgtattctgaatacccgggctggaagccttaaacatcttccggattatggtctgc

SEQ ID NO: 209216 - DNA, 75 bp, synthetic construct
  source 1..75: mol_type = other DNA
ctctttggaaatacttattacagcaataacatctgatgatattgatgccactgatctgagtactgatatgtttac

SEQ ID NO: 209217 - DNA, 75 bp, synthetic construct
  source 1..75: mol_type = other DNA
agattttttattgcactctgtttcagacaactgtcagtcctgcatattgaggggggcatcgtataacgaaaaagc

SEQ ID NO: 209218 - DNA, 75 bp, synthetic construct
  source 1..75: mol_type = other DNA
gaatttgtacccgaaggtcgggttctgttgaggcatttgaagcaacaacagtatctcgacacgacaactcgtatg

SEQ ID NO: 209219 - DNA, 75 bp, synthetic construct
  source 1..75: mol_type = other DNA
tgggtgtcgttcagttaaccatactgacgatggtcaacatgatgggctccggtatcatcatgctgccgacaaagc

SEQ ID NO: 209220 - DNA, 75 bp, synthetic construct
  source 1..75: mol_type = other DNA
caaagcaaaggccgaagctgcggtaaatgcgctgatcaactcagtgacagaggagcttaaagcgggtgggacagt

SEQ ID NO: 209221 - DNA, 75 bp, synthetic construct
  source 1..75: mol_type = other DNA
tggcgcaactgctgtgccgtattacggggcggaagatgcctgtatcgtcaataacaatgcggcggcggtgttatt

SEQ ID NO: 209222 - DNA, 75 bp, synthetic construct
  source 1..75: mol_type = other DNA
cgacacgggctggacggctgattttgattacttgctgagagaagattcgttaacgggagttcgggaagggaagtt

SEQ ID NO: 209223 - DNA, 75 bp, synthetic construct
  source 1..75: mol_type = other DNA
ggtcagctttgatgacttcagcggtgggcttaaaatgaccgctcgcgaagtgatggatattgacgaagcccggga

SEQ ID NO: 209224 - DNA, 75 bp, synthetic construct
  source 1..75: mol_type = other DNA
aagccatgctatacggttccatcgtgaccttcctcggttggacactgtatggcctggtatctccacgttttgaac

SEQ ID NO: 209225 - DNA, 75 bp, synthetic construct
  source 1..75: mol_type = other DNA
gaccacccgaatcctgaagtcctgaaattcattgaatacccaaccaggcctgcggggatacagacatttaatgaa

SEQ ID NO: 209226 - DNA, 75 bp, synthetic construct
  source 1..75: mol_type = other DNA
catcaactgatgcgcgtgcttgcagatgttctgctgaagtatgagccccgccttaaacgtgtcaacgtgacgatg

SEQ ID NO: 209227 - DNA, 75 bp, synthetic construct
  source 1..75: mol_type = other DNA
gtgctttcagacgttctgctgaagtatgagccacgtattaagcgcgtcgacgtgacgatgcaggaacagactcag

SEQ ID NO: 209228 - DNA, 75 bp, synthetic construct
  source 1..75: mol_type = other DNA
caaccggaataaatcatcggacaaagcagaagtacaaaaaccagcatcacctgtttctggtcacaatctgaacag

SEQ ID NO: 209229 - DNA, 75 bp, synthetic construct
  source 1..75: mol_type = other DNA
cggtagttgtgcaacaagctcttcggtccataatgaaaagcttctctccgagccgtcagaattaccagaacttaa

SEQ ID NO: 209230 - DNA, 75 bp, synthetic construct
  source 1..75: mol_type = other DNA
gctggcaataagtgatggagacattcgggaggatgcctataccttcactaatctggtgttaaaaccattgattga

SEQ ID NO: 209231 - DNA, 75 bp, synthetic construct
  source 1..75: mol_type = other DNA
gtcagatattgaggcatatctgatgatggatggaatcaaccagatcatgaaagcactggctgaagagggctatgc

SEQ ID NO: 209232 - DNA, 75 bp, synthetic construct
  source 1..75: mol_type = other DNA
gaaacagtctagtctggcgttataggtgtgtcggaaaccgtgctgtccggctggaggtcagggaactctgggcag

SEQ ID NO: 209233 - DNA, 75 bp, synthetic construct
  source 1..75: mol_type = other DNA
tgcccgtgttgctccccgtacagactggcagcagtttgcacggcagagagccgaacgctgtcagcgacggagata

SEQ ID NO: 209234 - DNA, 75 bp, synthetic construct
  source 1..75: mol_type = other DNA
aaaacggcagccgctaccaccgcttcacaaccggaaattgcctccggtagcgcgatgattgttgatctgaatacc

SEQ ID NO: 209235 - DNA, 75 bp, synthetic construct
  source 1..75: mol_type = other DNA
tgaaacaagtactggacgttgccgcagcattaaaagcactgcgtgctgaaaacatctcaaccaaagtctttaata

SEQ ID NO: 209236 - DNA, 75 bp, synthetic construct
  source 1..75: mol_type = other DNA
ggcggcggcatcacaagtcatgctggcggtggagattatggacaccgcgtttatgaactccatcagcaaatggaa

SEQ ID NO: 209237 - DNA, 75 bp, synthetic construct
  source 1..75: mol_type = other DNA
ggcattaactgtattgcgctggaaaacaccaccgctgcgttgcagcatttacacggtttaacggtgctgccgctg

SEQ ID NO: 209238 - DNA, 75 bp, synthetic construct
  source 1..75: mol_type = other DNA
cagcgaatttcgcacgcagattgaaagcacgttgcaggaacttcatcaggtcctcgacgccatgcagtccgtcgc

SEQ ID NO: 209239 - DNA, 75 bp, synthetic construct
  source 1..75: mol_type = other DNA
acaatatcagaagcacgtaaccgattctgaatgcctgcgggaactccacgaagccccgatacaggctctaaacgt

SEQ ID NO: 209240 - DNA, 75 bp, synthetic construct
  source 1..75: mol_type = other DNA
tgcctgcatagctccccggacagactggcagcagtttgcccgaaaaagggctgaacactgccacctgcgctgtcg

SEQ ID NO: 209241 - DNA, 75 bp, synthetic construct
  source 1..75: mol_type = other DNA
ggaacggtcaggtctggcgttaccagcgtgccggcgggcgggccgttattctggaggtcagtggacgctggatgg

SEQ ID NO: 209242 - DNA, 75 bp, synthetic construct
  source 1..75: mol_type = other DNA
atgaatggattcagaaacagttcacggaacggccaggtctggcgctaccagcttgccggcgggcaggccgttatt

SEQ ID NO: 209243 - DNA, 75 bp, synthetic construct
  source 1..75: mol_type = other DNA
ctgttccggcagcagcgttgagctataaaaaacaaaaagccgctcagatggcggcggcggggcagacggcgcaga

SEQ ID NO: 209244 - DNA, 75 bp, synthetic construct
  source 1..75: mol_type = other DNA
cacagttttatttccattttcaatggataagcatggctaacttggttggcgataataaattagttgctcagcgtc

SEQ ID NO: 209245 - DNA, 75 bp, synthetic construct
  source 1..75: mol_type = other DNA
caaggcattaatctgttcagacaaagcgtagctagcctgcaatttgtgttggacgagcagattgaggccatgtgg

SEQ ID NO: 209246 - DNA, 75 bp, synthetic construct
  source 1..75: mol_type = other DNA
ctgtgaacattttatccaacgtgtggcagagcgtgaggctcttggtgggatctataccgccctccagcctgaaaa

SEQ ID NO: 209247 - DNA, 75 bp, synthetic construct
  source 1..75: mol_type = other DNA
tgaacagtcttgttgatcgtgagctcagacataatttacgtatgaattctgaatatcgaaaataccgctggaatg

SEQ ID NO: 209248 - DNA, 75 bp, synthetic construct
  source 1..75: mol_type = other DNA
tatgattcaccaacaatgtatgtcgccatagggttattattagtttgtatgtatggcttagtaaggatatcaaca

SEQ ID NO: 209249 - DNA, 75 bp, synthetic construct
  source 1..75: mol_type = other DNA
ccgtaggtgagcaaaagaatgcatttaaaaatgctgttagcaccaaaagacggaaagaacaacgcaataaggcca

SEQ ID NO: 209250 - DNA, 75 bp, synthetic construct
  source 1..75: mol_type = other DNA
taagttgtgcgcctggcagcgtcattcatatgtacatagaaaaacccatcgcagaatttttaaaacgttttgttt

SEQ ID NO: 209251 - DNA, 75 bp, synthetic construct
  source 1..75: mol_type = other DNA
cttgagagtattacattcactcactggcatcgcgatgcaattctaagtataggttggacattacaacttgaattt

SEQ ID NO: 209252 - DNA, 75 bp, synthetic construct
  source 1..75: mol_type = other DNA
atatacaagcactaaggtttattgctgcagctatggtggttttggcacatgccgaacttggacaatatggcattg

SEQ ID NO: 209253 - DNA, 75 bp, synthetic construct
  source 1..75: mol_type = other DNA
ttactggacgaaggcacgggattgtttcatcgaagcgtcgccagcctgcaatttgttctgtctgaacaattagac

SEQ ID NO: 209254 - DNA, 75 bp, synthetic construct
  source 1..75: mol_type = other DNA
gcgtaagcagagcgagttgttggatgacagttggcaggtattgatctgcgataggcgcggcgaagacggactgaa

SEQ ID NO: 209255 - DNA, 75 bp, synthetic construct
  source 1..75: mol_type = other DNA
aacccttgatgcctggcgtgccgcggcctggcgcaaccccgcacagcatcaacatctggattccacaacgcttga

SEQ ID NO: 209256 - DNA, 75 bp, synthetic construct
  source 1..75: mol_type = other DNA
gaccgcgaccgggcaggggcagaagtctgcaggagataccggttttacgctggcctggaaaccgggagaagaagg

SEQ ID NO: 209257 - DNA, 75 bp, synthetic construct
  source 1..75: mol_type = other DNA
gggcagagcaccacgctgaccgtggcattccagccggatggcgcaaccgacaagagcttccgtgcggtgtctgcg

SEQ ID NO: 209258 - DNA, 75 bp, synthetic construct
  source 1..75: mol_type = other DNA
cggtaaaaggttccggcaccacgctctgggtttacaccggtaagggtgatgcttatgcaaacccgctgtcagatg

SEQ ID NO: 209259 - DNA, 75 bp, synthetic construct
  source 1..75: mol_type = other DNA
agtgaccaacgtgggcaaaccttctgtggcggaagaacgcagcgaaattacgccggtcactgcgattaaggtgac

SEQ ID NO: 209260 - DNA, 75 bp, synthetic construct
  source 1..75: mol_type = other DNA
ggatgtgtttcgtggctggatcagcagtatcggtaaggcagtgacggcgaaagaagtgatcacccgaacagtgaa

SEQ ID NO: 209261 - DNA, 75 bp, synthetic construct
  source 1..75: mol_type = other DNA
aggatatcctgaaaaacgagctggcagagaaagagaaaaatctggccttgttgctggactctgtagcgaacgata

SEQ ID NO: 209262 - DNA, 75 bp, synthetic construct
  source 1..75: mol_type = other DNA
gcagcgtgatttgattgcctggtttgacagcagtgagacccgggcctacaaaatccgcttcccgaacggtacggt

SEQ ID NO: 209263 - DNA, 75 bp, synthetic construct
  source 1..75: mol_type = other DNA
atcccggtcatgagtaatggtggcgctttctccgccgtggccaccgtaacggtcacaacccctgcagcacagcct

SEQ ID NO: 209264 - DNA, 75 bp, synthetic construct
  source 1..75: mol_type = other DNA
acggcagaatcctatgacgataactacctggacgatgaggatgctgactgggtttccaccgggcagggacagaaa

SEQ ID NO: 209265 - DNA, 75 bp, synthetic construct
  source 1..75: mol_type = other DNA
atgtcaacaccaaatccccttgagccggtaaaaggtgccggtaccaccctgtgggtttataacggtaagggtgat

SEQ ID NO: 209266 - DNA, 75 bp, synthetic construct
  source 1..75: mol_type = other DNA
gaaggatctgacccccggcgagatgacggcagaatcctacgatgataactatctggatgatgaggatgctgactg

SEQ ID NO: 209267 - DNA, 75 bp, synthetic construct
  source 1..75: mol_type = other DNA
cagatccctgtggtgagcggaaatggtcagttcgccgcagtggctgaagtcaccgttactgaagcgggcgctgca

SEQ ID NO: 209268 - DNA, 75 bp, synthetic construct
  source 1..75: mol_type = other DNA
atgctggcacctgcagaccagccacctgatgacattctggattacgtggttgttgatacagataaaacaggacaa

SEQ ID NO: 209269 - DNA, 75 bp, synthetic construct
  source 1..75: mol_type = other DNA
aacggtgacgccgactatcttcgctggcttgatatgtgtcttgcccagttctggcgagtgcttaagcctgccggc

SEQ ID NO: 209270 - DNA, 75 bp, synthetic construct
  source 1..75: mol_type = other DNA
aagcttgaacatcctcaccaccagctggtggctacctaccagtcattaaaccgcaagtattcagaattgctggag

SEQ ID NO: 209271 - DNA, 75 bp, synthetic construct
  source 1..75: mol_type = other DNA
ttgccgaacgaaagcgattatctgaaattacaggcactgtttgctagggtggcagaagagaagcatcagcggggg

SEQ ID NO: 209272 - DNA, 75 bp, synthetic construct
  source 1..75: mol_type = other DNA
gagtataaatctttgcggcgttatttttccgtatcagctgccgttccttatacggatgtctggacgcacaaacct

SEQ ID NO: 209273 - DNA, 75 bp, synthetic construct
  source 1..75: mol_type = other DNA
gttgtaaattaatcaacgctgactgcctggaatttatccagaccttacctgaaaactctgtcgatctgatagtca

SEQ ID NO: 209274 - DNA, 75 bp, synthetic construct
  source 1..75: mol_type = other DNA
gggggttaaggatggaaaagtcagcatccctgtgatttccggtaatggtcagtttgctgcggtggctgaaattac

SEQ ID NO: 209275 - DNA, 75 bp, synthetic construct
  source 1..75: mol_type = other DNA
aagaggtgatcacccgtaccgtgaagatcaccaatatcggtcgtccgtcgctggcggaagatcagggggacatca

SEQ ID NO: 209276 - DNA, 75 bp, synthetic construct
  source 1..75: mol_type = other DNA
gcagaagatcgcagcacggtgacggcgacgaccggcatgacggtgacacccgccagtgcttccgtagtgaaaggg

SEQ ID NO: 209277 - DNA, 75 bp, synthetic construct
  source 1..75: mol_type = other DNA
cgaagggcagggcactgaaacagcatgtgatggctccgctgatttcttactttcgtgatgcgcgtgctgccctgg

SEQ ID NO: 209278 - DNA, 75 bp, synthetic construct
  source 1..75: mol_type = other DNA
aagggcgatgatgattacctgaagtggctggaccagtgtctggctcagttctggcgggtattaaagcccgccgga

SEQ ID NO: 209279 - DNA, 75 bp, synthetic construct
  source 1..75: mol_type = other DNA
actatccgtgtgtgggcggactctatgccgtactgcgtctgatcaaggatgacagtcagcatataccgacattca

SEQ ID NO: 209280 - DNA, 75 bp, synthetic construct
  source 1..75: mol_type = other DNA
caatcgcctacaaagagcagcgcgataacaaggccagtgaactggagaaggcgaacgccaccattactgacatgc

SEQ ID NO: 209281 - DNA, 75 bp, synthetic construct
  source 1..75: mol_type = other DNA
taccgtgataacgctatcgcctacaaagagcagcgcgacaaaaacgccagagagctgaagcaggcgaccgccacc

SEQ ID NO: 209282 - DNA, 75 bp, synthetic construct
  source 1..75: mol_type = other DNA
cgaaacgttctcggtatcagagatggaatcatcagagaccaggcagccttgagaacgctgcaggaatacatcaga

SEQ ID NO: 209283 - DNA, 75 bp, synthetic construct
  source 1..75: mol_type = other DNA
gggggttaaggctggaaaagtgagtatccccgtgatttccggaaatggtcagttcgccgcagtggctgaagtcac

SEQ ID NO: 209284 - DNA, 75 bp, synthetic construct
  source 1..75: mol_type = other DNA
ggaggcgtaaggctgaaagacatgcacccgacagaacgtggtaaagtcatcacggctgcggggctcgttgttgcc

SEQ ID NO: 209285 - DNA, 75 bp, synthetic construct
  source 1..75: mol_type = other DNA
taccgtgataacgccatcgcctacaaagagcagcgcgataacaaagccagtgaactggagaaggcgaacgcgatc

SEQ ID NO: 209286 - DNA, 75 bp, synthetic construct
  source 1..75: mol_type = other DNA
gaatattcatccttcatcgttagtctttgcaggcggaggttcaaaagggaaattatggagtcaaattctcgctga

SEQ ID NO: 209287 - DNA, 75 bp, synthetic construct
  source 1..75: mol_type = other DNA
ggaggcgacgtgcagcttggttgccttgggttaggcgttgtgcgtccggcacaaaccgcggttcttggcggcaca

SEQ ID NO: 209288 - DNA, 75 bp, synthetic construct
  source 1..75: mol_type = other DNA
cgaatcgactacgaatccttcctgaacgcctacaacaccgaagtcggtgacaggcttccacacgctgttgcggtc

SEQ ID NO: 209289 - DNA, 75 bp, synthetic construct
  source 1..75: mol_type = other DNA
caacgccacctgctcaggttccgtgcgtgaagccaccgccaccgcccgcgtgggcaatgatgccagcgtcgaact

SEQ ID NO: 209290 - DNA, 75 bp, synthetic construct
  source 1..75: mol_type = other DNA
cgaaacctccagcgcctccggcatgggcaatgatgccaccgtcgaactctctccagttgctggacgaaacgttct

SEQ ID NO: 209291 - DNA, 75 bp, synthetic construct
  source 1..75: mol_type = other DNA
aaagctgaaaatgatgctcttcggcgcaagcttgataatggtggcagggtgctcgtcaaaggaaaatgccctgtg

SEQ ID NO: 209292 - DNA, 75 bp, synthetic construct
  source 1..75: mol_type = other DNA
tcaacttcggcgtgcagtgggcgtcgaaagatgccggattaatgcagtttgctaatggtacgcagatccctatcg

SEQ ID NO: 209293 - DNA, 75 bp, synthetic construct
  source 1..75: mol_type = other DNA
cggtgaaaggggccgggaccacactgtgggtttataaggggaacggtgacccttatgcgaatccgctttcagacg

SEQ ID NO: 209294 - DNA, 75 bp, synthetic construct
  source 1..75: mol_type = other DNA
cgcacttgagaaaggaacaacgtcggtcgtggtcatgagtgataacggtaattttgttgctctggcgacagtaac

SEQ ID NO: 209295 - DNA, 75 bp, synthetic construct
  source 1..75: mol_type = other DNA
acctggatgatgaagacgcggactggaccgcgaccgggcagggacagaaatctgcaggagataccagttttacgc

SEQ ID NO: 209296 - DNA, 75 bp, synthetic construct
  source 1..75: mol_type = other DNA
ggtcactgcgattaaggtgacgccgacatccggtacggtggcaaaagggaaaacaaccaccctgacggtttcttt

SEQ ID NO: 209297 - DNA, 75 bp, synthetic construct
  source 1..75: mol_type = other DNA
tgatatgtccgcactgccgtcgcccctggcatgaggtggccaccggacgcacggatgatgaacggcgcctggtgg

SEQ ID NO: 209298 - DNA, 75 bp, synthetic construct
  source 1..75: mol_type = other DNA
aagaggtgatcacccgtaccgtgaagatcaccaatatcggtcgtccttcgctggcggaggatcggggtgacatca

SEQ ID NO: 209299 - DNA, 75 bp, synthetic construct
  source 1..75: mol_type = other DNA
gcggcgtaccttgaacagtacggcttcaacaataccggcggtattcttctgccccgtcgcaggctgttcaccatt

SEQ ID NO: 209300 - DNA, 75 bp, synthetic construct
  source 1..75: mol_type = other DNA
ggttccattttcgatcatacagcggttggcctggcgctgaccggctactcgatgccgatcttctggtggggcatg

SEQ ID NO: 209301 - DNA, 75 bp, synthetic construct
  source 1..75: mol_type = other DNA
acatccggtacggtggcaaaagggaaaacaaccaccctgactgtttcttttgagccggaaagtgcaaccgacaag

SEQ ID NO: 209302 - DNA, 75 bp, synthetic construct
  source 1..75: mol_type = other DNA
gtgaaagggaagagcaccacgctgaccgtggcattccagccggaaggcgcaaccgacaagagcttccgtgcagtg

SEQ ID NO: 209303 - DNA, 75 bp, synthetic construct
  source 1..75: mol_type = other DNA
ttcgaaatcaccgttctcggctggggcatgaacgaagaatgctgggtgattgcgcatgacgtgatttttggtgac

SEQ ID NO: 209304 - DNA, 75 bp, synthetic construct
  source 1..75: mol_type = other DNA
ccgaactgggcttgtcgccgaaaacggtgcacgtccatcgcgccaacctgatggaaaaactgggtgtcagtaacg

SEQ ID NO: 209305 - DNA, 75 bp, synthetic construct
  source 1..75: mol_type = other DNA
ctgcgctggttgagcaggcgcttaacgcgggggcgcgcggctttctctccaaacgctgtagccctgacgaactga

SEQ ID NO: 209306 - DNA, 75 bp, synthetic construct
  source 1..75: mol_type = other DNA
agcggtattgtgctgattgtgctggcactggcgctggtaagccgtaagaaaaaagaagccgtcagcgtaaaaaaa

SEQ ID NO: 209307 - DNA, 75 bp, synthetic construct
  source 1..75: mol_type = other DNA
caaagacaaagacaatcgcagcaaaaacgtaaacccgaatcacacggacgacccaggttactggcagtacggcag

SEQ ID NO: 209308 - DNA, 75 bp, synthetic construct
  source 1..75: mol_type = other DNA
cggtagcaaatatggtttccactctcaaagacaaagacaatcgcagcaaaaacgtaaacccgaatcacacggacg

SEQ ID NO: 209309 - DNA, 75 bp, synthetic construct
  source 1..75: mol_type = other DNA
aagcagaactcaagcaatcagaaaaaggtgcccgattcattgagttttctggagaatccgacgacggacggaaaa

SEQ ID NO: 209310 - DNA, 75 bp, synthetic construct
  source 1..75: mol_type = other DNA
cagcggcggagcggggaaggtggcgatcctgagctataccatgccgttctgggtggtgattttcgccgcgttgtt

SEQ ID NO: 209311 - DNA, 75 bp, synthetic construct
  source 1..75: mol_type = other DNA
gcagaagtagctaaagcacttagctgtaaagtagaagatgtcgataaggaatttgtattaggaatgttattacaa

SEQ ID NO: 209312 - DNA, 75 bp, synthetic construct
  source 1..75: mol_type = other DNA
gtaaggtggataatgttgataaggagtttgtattaggagtgttaatgcattttaaaaatgttagtactgaggata

SEQ ID NO: 209313 - DNA, 75 bp, synthetic construct
  source 1..75: mol_type = other DNA
gccctgttacaaacctgcgggatggtagggctggcgcaatgggcactggtcagcggcggtgcgggaaaagtggct

SEQ ID NO: 209314 - DNA, 75 bp, synthetic construct
  source 1..75: mol_type = other DNA
gatgctctatgcggcgctggtgatgagtgtggtcgctttactggtgccgcaacgtgaaattgactggcagcccac

SEQ ID NO: 209315 - DNA, 75 bp, synthetic construct
  source 1..75: mol_type = other DNA
atgaaaagtgccatgctggcaatcctctccggcgtcagttggggggcgagcgcgattgttgctaaacgcctatac

SEQ ID NO: 209316 - DNA, 75 bp, synthetic construct
  source 1..75: mol_type = other DNA
gcgggcattgatggatggatcgattctcacttctgggagcgttttggtggttctcttatgctcagtatggttcag

SEQ ID NO: 209317 - DNA, 75 bp, synthetic construct
  source 1..75: mol_type = other DNA
gccgaggccatcatcagcaccatcgcgccgctggagagtatcaaacgcagccaggacgcccgtttccgccagttg

SEQ ID NO: 209318 - DNA, 75 bp, synthetic construct
  source 1..75: mol_type = other DNA
tccgcgaccgtttcaatgtgccggtgtctgatgcagatatcgaaaaactgccgtacatcaccttcccggaaggtt

SEQ ID NO: 209319 - DNA, 75 bp, synthetic construct
  source 1..75: mol_type = other DNA
cacggcatcaacagtgaatccggactccgccgctacctgcttgagtggctctccggtgccggcagacaccctgaa

SEQ ID NO: 209320 - DNA, 75 bp, synthetic construct
  source 1..75: mol_type = other DNA
cattgccatggaagacaacgatgtgaaagggaaaaccctgaaggcagcagctattgccgaagccattatcagtac

SEQ ID NO: 209321 - DNA, 75 bp, synthetic construct
  source 1..75: mol_type = other DNA
caaactgcaacgcgccggtaagcagctgtctgacatcatggacgccagcgcagtggaagccgtccgcgcccgtct

SEQ ID NO: 209322 - DNA, 75 bp, synthetic construct
  source 1..75: mol_type = other DNA
gcgtcctggctggaaagtcaagggattgatacaacgaagagttttgatgctgtacagggcgcagccacgccccgt

SEQ ID NO: 209323 - DNA, 75 bp, synthetic construct
  source 1..75: mol_type = other DNA
aaatccgtactggtcttggtcagaattttgaccctgttgagaataaagcaattatcaatccaggcgctactggtt

SEQ ID NO: 209324 - DNA, 75 bp, synthetic construct
  source 1..75: mol_type = other DNA
accggaacggcagcaattgtgattatctcgatggtgatgcgtaacgttccggtgggtattcgcgccgggattgca

SEQ ID NO: 209325 - DNA, 75 bp, synthetic construct
  source 1..75: mol_type = other DNA
ttgactacactctgacgctggataactttatcacgttatttggtcaggggatgagcgacggcgcctggccttcac

SEQ ID NO: 209326 - DNA, 75 bp, synthetic construct
  source 1..75: mol_type = other DNA
ttcccgtcaccgccacgctgaacacgctctttctcagctctgccacagtcggggaatgcccgctgttccgctttc

SEQ ID NO: 209327 - DNA, 75 bp, synthetic construct
  source 1..75: mol_type = other DNA
ggtattactgcggaaacctacggctttggtatccgtttctttactgtcgaaaaaaccattaatgtcatcggcaaa

SEQ ID NO: 209328 - DNA, 75 bp, synthetic construct
  source 1..75: mol_type = other DNA
acgtaaattggtagaaggtggcattgacctgaaagatgtcaacgtcggcaatatgcatttctcggaagggaaaaa

SEQ ID NO: 209329 - DNA, 75 bp, synthetic construct
  source 1..75: mol_type = other DNA
ctgccgttataccgatatctacaaagtcgccgtggtcggtggcgatgccgggtatctcgtcaccaacattgtgaa

SEQ ID NO: 209330 - DNA, 75 bp, synthetic construct
  source 1..75: mol_type = other DNA
cggagcgtggatattgctgtcacgaacggtgcaatagtgatccacacccaacgcctgaaatcagatccagggggg

SEQ ID NO: 209331 - DNA, 75 bp, synthetic construct
  source 1..75: mol_type = other DNA
tagaaacctatggctgttttgcctttcattcaggtttgctggctaatggctgcccatctgcggaagatactcatc

SEQ ID NO: 209332 - DNA, 75 bp, synthetic construct
  source 1..75: mol_type = other DNA
gcgccacgaatggcgtgaacctgcgccgtgaacttatcgctgcccgtctggctcaggatgaaaaggtctaccgta

SEQ ID NO: 209333 - DNA, 75 bp, synthetic construct
  source 1..75: mol_type = other DNA
ggctgccatcggagccaacgaacgcaagcgcatcaccacggagatcctgcaggacctctttcagatcgaagagat

SEQ ID NO: 209334 - DNA, 75 bp, synthetic construct
  source 1..75: mol_type = other DNA
gtcggcaagccgcagccgggggcggacagcgcggacgagaacgagccgtccttcggctacaccctgcgccgtaag

SEQ ID NO: 209335 - DNA, 75 bp, synthetic construct
  source 1..75: mol_type = other DNA
ggacctttgccgtccttgccgcctttggcttctcgataaacacgctaacaatgttcgggatggtgctcgccatcg

SEQ ID NO: 209336 - DNA, 75 bp, synthetic construct
  source 1..75: mol_type = other DNA
ccatcgttgtcgtagaaaacgtggaacgtgtgatggcggaagaaggtttgccgccgaaagaagccactcgtaaat

SEQ ID NO: 209337 - DNA, 75 bp, synthetic construct
  source 1..75: mol_type = other DNA
tgagaaatcatccagcagcttcctgatggttgtcggcgttatcaacaccgatggcaccatgacgcaggaggatat

SEQ ID NO: 209338 - DNA, 75 bp, synthetic construct
  source 1..75: mol_type = other DNA
cgacgctgagtcaaccggaattttatgatccagaaattgtcttctttgcagacaaactggacgcttatacagatc

SEQ ID NO: 209339 - DNA, 75 bp, synthetic construct
  source 1..75: mol_type = other DNA
cttcgtcagtttgcgctcagtcacggcgtggcgatggacgggctacaggtgattgatccgcatggcaacctcgca

SEQ ID NO: 209340 - DNA, 75 bp, synthetic construct
  source 1..75: mol_type = other DNA
cgacgctgaatcaaccggaattttatgatccagaaatagtcttctttgcagacaaactggacgcttacacagatc

SEQ ID NO: 209341 - DNA, 75 bp, synthetic construct
  source 1..75: mol_type = other DNA
gaaatattaagattgcgtgaatcagtgccttcgcatgttaatcccaccgctcagtggctggcgtttaatcaacgg

SEQ ID NO: 209342 - DNA, 75 bp, synthetic construct
  source 1..75: mol_type = other DNA
ttatggccgcactgttttcggcaaattctgtatctgcagctgatgcgccgactggtaatggagcgccgcagcaaa

SEQ ID NO: 209343 - DNA, 75 bp, synthetic construct
  source 1..75: mol_type = other DNA
aaagcgcatgcttacttccgtctgcttccttagttggtaacgatttcgttcattacgatcttacgcctaagccca

SEQ ID NO: 209344 - DNA, 75 bp, synthetic construct
  source 1..75: mol_type = other DNA
ctctggctgccttctgccacttgcggcactgttcaattttttgttcgattgttttcatatggcaaaaaaaaggcg

SEQ ID NO: 209345 - DNA, 75 bp, synthetic construct
  source 1..75: mol_type = other DNA
gaacagaaaaaacattaaaacaaaaggttgcttttgctcagcttgaacttaatcgtcttaagtctctggaaaaat

SEQ ID NO: 209346 - DNA, 75 bp, synthetic construct
  source 1..75: mol_type = other DNA
cgaacaaaattgttggcatgtactctgctccggcaggcagcaccattctgattgaccgtaactgccacaaatcgc

SEQ ID NO: 209347 - DNA, 75 bp, synthetic construct
  source 1..75: mol_type = other DNA
gcccctccatataattcgagtccctgtgcatctggtggtgaactgtgtgttggctatattccaggatcggcggta

SEQ ID NO: 209348 - DNA, 75 bp, synthetic construct
  source 1..75: mol_type = other DNA
ggcgaatggcccggtgatggaatcgaaattgacgacactgttgccgccgaatttatgaaggaagcaccagaagga

SEQ ID NO: 209349 - DNA, 75 bp, synthetic construct
  source 1..75: mol_type = other DNA
ccgactgggctctatcgccgctgtttgcctcgcagaactggccaccaacgctgtttaataccgcgttttacagca

SEQ ID NO: 209350 - DNA, 75 bp, synthetic construct
  source 1..75: mol_type = other DNA
atttatgaaggaagcaccagaaggaaagtacagaggtgtcatcgacggaatgccagcatggattgatattccacc

SEQ ID NO: 209351 - DNA, 75 bp, synthetic construct
  source 1..75: mol_type = other DNA
aaagaaagaaaacaaagttaaatcaagcaaccaatgacgctaaatattcaaaacaaatattagatgaaaatgaaa

SEQ ID NO: 209352 - DNA, 75 bp, synthetic construct
  source 1..75: mol_type = other DNA
aaatcaaaatatgatatatacacaacactatctatagtatggattggtgacaaatatcaagtcccttatttggga

SEQ ID NO: 209353 - DNA, 75 bp, synthetic construct
  source 1..75: mol_type = other DNA
ggtattaccgcggaaacctacggctttggcattcgtttctttactatcgaaaaaaccattaacgtcatcggcaaa

SEQ ID NO: 209354 - DNA, 75 bp, synthetic construct
  source 1..75: mol_type = other DNA
gagtccgatattcttctcggacaggcgcgaatgaggcaaatgaccggttcatgcagtcgtcatttatgctggccg

SEQ ID NO: 209355 - DNA, 75 bp, synthetic construct
  source 1..75: mol_type = other DNA
ccgttactgacaccgctaaatacattacaggcattattagcgggtttgttaattggtattagtggtttttgcggc

SEQ ID NO: 209356 - DNA, 75 bp, synthetic construct
  source 1..75: mol_type = other DNA
aagttacattacgtattcgtacctggtggagcatcgttatttgtttttcactagtgatttcaggtccacgcttga

SEQ ID NO: 209357 - DNA, 75 bp, synthetic construct
  source 1..75: mol_type = other DNA
ggtccctggtgttccacaaccggtggttactggcagagatgagccgtattgcagcggatgtgatactggaaatct

SEQ ID NO: 209358 - DNA, 75 bp, synthetic construct
  source 1..75: mol_type = other DNA
agtctgatcgaggaaaagcagacctttattaagctgctcaaagaaaaacgccaagcactgatcagccatgtggtc

SEQ ID NO: 209359 - DNA, 75 bp, synthetic construct
  source 1..75: mol_type = other DNA
tgttcgtcaagcattaacatttcagtcaagaacatcggtaggtaactacaacctgagcattccttcactagctaa

SEQ ID NO: 209360 - DNA, 75 bp, synthetic construct
  source 1..75: mol_type = other DNA
atgaaaagtatggagggttacagtattttgagtacgggatatataattgatgctaggcatttaccagtattaatg

SEQ ID NO: 209361 - DNA, 75 bp, synthetic construct
  source 1..75: mol_type = other DNA
tgtgtcttgctgtggcatcgtcacttactcttactgcttgcgatgtagttgatgctgcctatgacgagattttaa

SEQ ID NO: 209362 - DNA, 75 bp, synthetic construct
  source 1..75: mol_type = other DNA
ggtattttccctgggtgtctggtttcatatcgtcgcccgtcttgttcacagcaaacccgggatggctttttttct

SEQ ID NO: 209363 - DNA, 75 bp, synthetic construct
  source 1..75: mol_type = other DNA
ccatccatgaatatccagggcggggccttactggtgttatttcttttggcattaaccgcgtcaaacgatattgca

SEQ ID NO: 209364 - DNA, 75 bp, synthetic construct
  source 1..75: mol_type = other DNA
aactattaccaggacatggcggactccttgacaggattgactcattaattttcaccgctccggtatttttttatt

SEQ ID NO: 209365 - DNA, 75 bp, synthetic construct
  source 1..75: mol_type = other DNA
gagtttcactcgcatactcacacgcaccggcgctgggattgcatgccagatatccgtagtccactgaatttgctc

SEQ ID NO: 209366 - DNA, 75 bp, synthetic construct
  source 1..75: mol_type = other DNA
cggcgtgacaccagaccacacctggaaaaaccttcatttttacgcccgtaaggtgatgagcatgtggcggataag

SEQ ID NO: 209367 - DNA, 75 bp, synthetic construct
  source 1..75: mol_type = other DNA
ccatgcagaaaggggtgatgtatgagaaagcagggcacgtaattaccgggcttggtattgtcggtgaagtcgatg

SEQ ID NO: 209368 - DNA, 75 bp, synthetic construct
  source 1..75: mol_type = other DNA
tgtctccggaagcgttcaaagtaataaaaccataaatattacggggcgtgttaatccctcggattacggtaactt

SEQ ID NO: 209369 - DNA, 75 bp, synthetic construct
  source 1..75: mol_type = other DNA
ggtataggaacatccagtgctcttggcggtaattcgattgttttgggtgataatgacacgggctttaaacaaaat

SEQ ID NO: 209370 - DNA, 75 bp, synthetic construct
  source 1..75: mol_type = other DNA
gggaacgaataatacccaaatcgcaaacacggctttcgttatggccgcgattgccgcacttgtagactcttcacc

SEQ ID NO: 209371 - DNA, 75 bp, synthetic construct
  source 1..75: mol_type = other DNA
ggatgaaacgaacaagaaagccccattaaacagcccggcactgaccggaacgccaacaacaccaactgcacaaca

SEQ ID NO: 209372 - DNA, 75 bp, synthetic construct
  source 1..75: mol_type = other DNA
tttactcagttaagcaatgcgaccaacagcacgtctgaaacactggccgcaacgccgaaagcggtaaaggccgcc

SEQ ID NO: 209373 - DNA, 75 bp, synthetic construct
  source 1..75: mol_type = other DNA
aaatagcctggcatgcttcgatacagcgagaaccgaatggccggaagactgtcaccacacagcggtttgtccagg

SEQ ID NO: 209374 - DNA, 75 bp, synthetic construct
  source 1..75: mol_type = other DNA
agattttgcgcgttattgagaagtacaacacgagcaataacactgtccaagaatcaaaggcggtgacagtaaaga

SEQ ID NO: 209375 - DNA, 75 bp, synthetic construct
  source 1..75: mol_type = other DNA
ccagtgcggaacggtttattgatatggaaggaataaaccgattttcagaacgcttagctatggctatgggaaaca

SEQ ID NO: 209376 - DNA, 75 bp, synthetic construct
  source 1..75: mol_type = other DNA
acagaaaaaacagaacggcgcagatattcccgataaaaaactattcctgcgtaatatcggcacaacaaattcaac

SEQ ID NO: 209377 - DNA, 75 bp, synthetic construct
  source 1..75: mol_type = other DNA
cacgctatgtaaaagatgttcgcctgggtacacgtgttgttcagactatgcaaaaaggtgtgatgtatgaaaaat

SEQ ID NO: 209378 - DNA, 75 bp, synthetic construct
  source 1..75: mol_type = other DNA
accaccaggcgatttctgcaggaactggagagatataactggcactggtcgccacggcaggctaaccagtggata

SEQ ID NO: 209379 - DNA, 75 bp, synthetic construct
  source 1..75: mol_type = other DNA
atcataacgcgtggccccgcaccagccccggagaagtgcgccggcgtcttgcgtcctggctggaaagtcagggga

SEQ ID NO: 209380 - DNA, 75 bp, synthetic construct
  source 1..75: mol_type = other DNA
gtcgggcaaccagaactggctaccaaactgtccgaacgcaatatggaagtcagggaagtcgttcagcgctgtgag

SEQ ID NO: 209381 - DNA, 75 bp, synthetic construct
  source 1..75: mol_type = other DNA
actaaaaaaacaggtgttatttccagcaacaaaaaaagcgtttggccttttccgtgacccgtttgctgacgaagc

SEQ ID NO: 209382 - DNA, 75 bp, synthetic construct
  source 1..75: mol_type = other DNA
tcaggacgcccgctttcgccagttgcatcgcgtcctgaaagacagccgccaggcggggttcagccacgttctggt

SEQ ID NO: 209383 - DNA, 75 bp, synthetic construct
  source 1..75: mol_type = other DNA
tatcaaccgcgagaatgcgccggttattgttatcgagccatacatcatcgctatggaagacaacgatgtgaaagg

SEQ ID NO: 209384 - DNA, 75 bp, synthetic construct
  source 1..75: mol_type = other DNA
accacaccggacattcgctacgtgcgtgaggcgctgtaccagacagcccgtcatggcgggtttatggccgtcatc

SEQ ID NO: 209385 - DNA, 75 bp, synthetic construct
  source 1..75: mol_type = other DNA
atgagcgacggcgcgtggccttcactgctggataccctgctctacgccgggattgccgctcccattaccgctatc

SEQ ID NO: 209386 - DNA, 75 bp, synthetic construct
  source 1..75: mol_type = other DNA
gatcgaacgcagagaaaccctctttcacaccctatttatcgggctgcccagcttgccagaagatgtctggggtgc

SEQ ID NO: 209387 - DNA, 75 bp, synthetic construct
  source 1..75: mol_type = other DNA
gcctgttccgggaaacgtcatctgctacaactaagtcgcaccgaagagtgttttctaccgacaggcgatatgagg

SEQ ID NO: 209388 - DNA, 75 bp, synthetic construct
  source 1..75: mol_type = other DNA
gcacatctctccgggcatctacgcacgcgccttcctggaaggtcgtctgacgcaagagcagatggataacttccg

SEQ ID NO: 209389 - DNA, 75 bp, synthetic construct
  source 1..75: mol_type = other DNA
aatatggttagcctgctgtatccgctggccgtcagtaacctggtaatagccgccatgaatctggccgctgaaatc

SEQ ID NO: 209390 - DNA, 75 bp, synthetic construct
  source 1..75: mol_type = other DNA
tatggctggtcgcattttaatatcagctggctgtggtatttactcccgagcctgttgctggtccgcccgtttagt

SEQ ID NO: 209391 - DNA, 75 bp, synthetic construct
  source 1..75: mol_type = other DNA
tcaggacgcccgctttcgccagctgcatcgcgtcctgaaagacagctgccaggcggggttcagccacgttctggt

SEQ ID NO: 209392 - DNA, 75 bp, synthetic construct
  source 1..75: mol_type = other DNA
actcccacggcgcgccgctgggcgacgctgaaattgccctgacccgcgaacaactgggctggaaatatgcgccgt

SEQ ID NO: 209393 - DNA, 75 bp, synthetic construct
  source 1..75: mol_type = other DNA
tgatttcctgaaacacaacccgcagaatccgtcctgggctgaccgtgaccgcttcgtgctgtccaacggccacgg

SEQ ID NO: 209394 - DNA, 75 bp, synthetic construct
  source 1..75: mol_type = other DNA
cggcggaagacataagtcgtttgaaaacagaatgcttcagagtattgctgatgcccaccaaaaaacgatttctca

SEQ ID NO: 209395 - DNA, 75 bp, synthetic construct
  source 1..75: mol_type = other DNA
agcctgaagcatgggctccgttaggtggtggacgacataaaccctttgaaaataatctgcttcagagtattgcag

SEQ ID NO: 209396 - DNA, 75 bp, synthetic construct
  source 1..75: mol_type = other DNA
tggatgcatggattgcccgtgtcagccgggaagagcgtgaggcgctggaagccaggcaacaggccatgatggaag

SEQ ID NO: 209397 - DNA, 75 bp, synthetic construct
  source 1..75: mol_type = other DNA
ggggcgcttgcgcgtcaggtgggctcgcttcgagggatccgcatgacggacctgttcaacaccgatgttgatgct

SEQ ID NO: 209398 - DNA, 75 bp, synthetic construct
  source 1..75: mol_type = other DNA
caggacgcccgctttcgccagctgcatcgcgtcctgaaagacagccgccaggcggggttcagccacgttctggtg

SEQ ID NO: 209399 - DNA, 75 bp, synthetic construct
  source 1..75: mol_type = other DNA
ctgacggacattatggacgccggcgcagtggatgccatacgtgcccgcctgagcaatccgggaagtcatcgtaaa

SEQ ID NO: 209400 - DNA, 75 bp, synthetic construct
  source 1..75: mol_type = other DNA
tctgctccggcagagctgctgtttgaagagttcggcttcactgttgataacgttgttgcgaaagcaaaagaactg

SEQ ID NO: 209401 - DNA, 75 bp, synthetic construct
  source 1..75: mol_type = other DNA
cgactcaccagccggtagagcaggtcgcttctctgcgcgtaaccccgaacatgtctacatggcgtccgtgtgacc

SEQ ID NO: 209402 - DNA, 75 bp, synthetic construct
  source 1..75: mol_type = other DNA
accctgtggtctggttctaaagcaatcaacgaagatgctgcgggtaactacatccactacggtgttcgcgagttc

SEQ ID NO: 209403 - DNA, 75 bp, synthetic construct
  source 1..75: mol_type = other DNA
ccgccaaaagaagctacccgtaagtcgatggggcagattcagggcgctctggtcggtatcgcgatggtactgtcg

SEQ ID NO: 209404 - DNA, 75 bp, synthetic construct
  source 1..75: mol_type = other DNA
aacgtgtcggcacaaacccgatgattcagaagacggacaatgccgacagtagattccagaagctcgataccccgg

SEQ ID NO: 209405 - DNA, 75 bp, synthetic construct
  source 1..75: mol_type = other DNA
cgctgaaaaacgagatggagatgaagcgtgaactgtcacgtaattcagtgctgaccattatcgacagggagaatc

SEQ ID NO: 209406 - DNA, 75 bp, synthetic construct
  source 1..75: mol_type = other DNA
atgtcgtggcactggcagtcatgctggcctgcagcacaatggccggcgcggcggagaatgaacgcagtacgttcg

SEQ ID NO: 209407 - DNA, 75 bp, synthetic construct
  source 1..75: mol_type = other DNA
gcgacgcagccctcgatgccgccagtgattcggttcgtcctctgactactaacggttgtgatgaatctcgcctga

SEQ ID NO: 209408 - DNA, 75 bp, synthetic construct
  source 1..75: mol_type = other DNA
gcgacgcagccctcgatgctgccagtgattccgttcgtcctctgaccactaatggttgtgacgaatctcgcctga

SEQ ID NO: 209409 - DNA, 75 bp, synthetic construct
  source 1..75: mol_type = other DNA
cttgatgaaagtggaaacggtcaattcaactggcagatgagcccgtgtaatctgaagatggcaaaagcaatttaa

SEQ ID NO: 209410 - DNA, 75 bp, synthetic construct
  source 1..75: mol_type = other DNA
tctgaactaacagatgaactcatggcaaaaatcagaacccacgaatacaaccgctcaatggatgtcatcagttga

SEQ ID NO: 209411 - DNA, 75 bp, synthetic construct
  source 1..75: mol_type = other DNA
tgtatccgtgtaatgataggagggaagatgcaggactatcttttggagtcattgaagctccagcgtattgatttt

SEQ ID NO: 209412 - DNA, 75 bp, synthetic construct
  source 1..75: mol_type = other DNA
gacttcaccagaaagcatcagcacctatcgaaggtgctgcatacttggaatgaagttgtttctcaaagcaaaccc

SEQ ID NO: 209413 - DNA, 75 bp, synthetic construct
  source 1..75: mol_type = other DNA
cggccagccagcgattaaaccgacgcatgacctggcgaaagcgggattcaatattctgaataagcagcctgtcac

SEQ ID NO: 209414 - DNA, 75 bp, synthetic construct
  source 1..75: mol_type = other DNA
cgatctggccgtttcccggggcgtgattcaggcgctgaaagatgatccggacaacgtcgccctggtgcagcgcct

SEQ ID NO: 209415 - DNA, 75 bp, synthetic construct
  source 1..75: mol_type = other DNA
atgacgatgaaggtaaagactctggtgatgatggtgatgatggtgatgctgtcctgcagtacgccggtcatggca

SEQ ID NO: 209416 - DNA, 75 bp, synthetic construct
  source 1..75: mol_type = other DNA
cagtgcgatggctctgacgctggatgacgctcgaactcaggggcgtgttggcgaaacgtataatggttatctggt

SEQ ID NO: 209417 - DNA, 75 bp, synthetic construct
  source 1..75: mol_type = other DNA
cgcttccggctgcgcagcgggcgtcacagtctggtgattgttgatttgccgggcgtgggcgaaaacggacaacgg

SEQ ID NO: 209418 - DNA, 75 bp, synthetic construct
  source 1..75: mol_type = other DNA
cctttatgtagaaaaaaacatcgggaagctggtggaatccaaccagcggttgtcggacaggcgagcggggaaaat

SEQ ID NO: 209419 - DNA, 75 bp, synthetic construct
  source 1..75: mol_type = other DNA
gcagaattacgctcagtacagcaaaatcaaagctctgcgtgaggctggcggcgatgtgatgctgtctatcggtgg

SEQ ID NO: 209420 - DNA, 75 bp, synthetic construct
  source 1..75: mol_type = other DNA
gcacagagccggtaaagtcgcaagcccgtgacagttttggtgaagcggtggggagggtgtttgatacggcagaat

SEQ ID NO: 209421 - DNA, 75 bp, synthetic construct
  source 1..75: mol_type = other DNA
ccattaccacgatgtttaagccacatcacccggtctgcgtggtatccgcatgtaccggatggggcgtggaggata

SEQ ID NO: 209422 - DNA, 75 bp, synthetic construct
  source 1..75: mol_type = other DNA
ggtgttgtgggtcattaaggccgatgaccgggcgctgtcggtggacgagcatttctggcgcggcgtgatgcagcc

SEQ ID NO: 209423 - DNA, 75 bp, synthetic construct
  source 1..75: mol_type = other DNA
atgtatgaggagcgtgtgacatttttcatgacagtaaaacaggtgataacctcctttcgtaaggggaattcacag

SEQ ID NO: 209424 - DNA, 75 bp, synthetic construct
  source 1..75: mol_type = other DNA
atgtatgaggagagtgtgacatttttcatgagagtaaaacaggtgataacctcctttcgtaaggggcattcacag

SEQ ID NO: 209425 - DNA, 75 bp, synthetic construct
  source 1..75: mol_type = other DNA
ttatcgtcggaattcttggtattgttttgtttactcccctgttgtcgtcagtgctcagagggttacccgtattga

SEQ ID NO: 209426 - DNA, 75 bp, synthetic construct
  source 1..75: mol_type = other DNA
ccggaattccacggcctgactaaagaacaggcaccgaagtacgcatttagcgaaatcttcgcgccgtttactaag

SEQ ID NO: 209427 - DNA, 75 bp, synthetic construct
  source 1..75: mol_type = other DNA
gctggcgggtgtgaacgtgatgacaatggactacggtaacgcgatttgtcagtctgcaaataccgaaggccagaa

SEQ ID NO: 209428 - DNA, 75 bp, synthetic construct
  source 1..75: mol_type = other DNA
atgtatgaggagggtgtgacatttttcatgaaagtaaaacaggtgataacctcctttcgtaaggggcattcacag

SEQ ID NO: 209429 - DNA, 75 bp, synthetic construct
  source 1..75: mol_type = other DNA
ctggttctacgagcaggcaatggaaaccccaaagggattaccggagctttgtggaagcgtacagccgtcggatta

SEQ ID NO: 209430 - DNA, 75 bp, synthetic construct
  source 1..75: mol_type = other DNA
cacacaccgtctggcacgccgacgatatccgccgcggagaacgcgaggcggcagatgcgctggggctcacactct

SEQ ID NO: 209431 - DNA, 75 bp, synthetic construct
  source 1..75: mol_type = other DNA
ggaaatgcaggcatggctagcggcggcatgggcgatgtgctctctggtattattggcgcattgctcgggcaaaaa

SEQ ID NO: 209432 - DNA, 75 bp, synthetic construct
  source 1..75: mol_type = other DNA
aacccatgcgactgatgctgcaggctcagcacgtgcagccagcacgtcagccggacaggccgcttcgtcggctca

SEQ ID NO: 209433 - DNA, 75 bp, synthetic construct
  source 1..75: mol_type = other DNA
gtaatcagaacaccactggtaatgctgcaactgctacaaaacttcagactgcaagaaaaatatccggtgttccat

SEQ ID NO: 209434 - DNA, 75 bp, synthetic construct
  source 1..75: mol_type = other DNA
cctgatgcaggggcagacttttgacaaatctgcatacccgaaacttgcagcggcttatccgtcaggcgtgatccc

SEQ ID NO: 209435 - DNA, 75 bp, synthetic construct
  source 1..75: mol_type = other DNA
gagttgttttcgacggttctgcaaatattaaccttccaggtgtaaacactacgggtaatcagaacaccactggta

SEQ ID NO: 209436 - DNA, 75 bp, synthetic construct
  source 1..75: mol_type = other DNA
ctatggttttgaggaagactgggcagaagtttatacctcgaaaaatcttccaccagaaagctacccagtcggcgc

SEQ ID NO: 209437 - DNA, 75 bp, synthetic construct
  source 1..75: mol_type = other DNA
cggcggcgatggctacgtggtcgcgcgactggccaaagcggtcggcattgaggtcacgttgttggcccaggagag

SEQ ID NO: 209438 - DNA, 75 bp, synthetic construct
  source 1..75: mol_type = other DNA
taccggacaactgcattttgactcactgaggctggatagctggctggcaggtcaggagacgaaaattcagcggtt

SEQ ID NO: 209439 - DNA, 75 bp, synthetic construct
  source 1..75: mol_type = other DNA
cgaatccattagccagttaatcgaccacgctaatactcaccctgcgccgattgtggcggttgatatcccttccgg

SEQ ID NO: 209440 - DNA, 75 bp, synthetic construct
  source 1..75: mol_type = other DNA
tggccagactcgtaatgcagggaagacatcatcagatggtgctcatacccactcgctgtccggcactgctgcaag

SEQ ID NO: 209441 - DNA, 75 bp, synthetic construct
  source 1..75: mol_type = other DNA
gttccatttgatggttctactgatatcactttaaccgccgcgcatgtggctgcttttgccagaagggcaacggat

SEQ ID NO: 209442 - DNA, 75 bp, synthetic construct
  source 1..75: mol_type = other DNA
acccactcgctgtccggcactgctgcaagcgcaggcgcacatgcacatactgtcggtattggtgctcatacgcac

SEQ ID NO: 209443 - DNA, 75 bp, synthetic construct
  source 1..75: mol_type = other DNA
tacaagcaagcggttgagcagaaatgcaatacagccctgagcgttgagcagctcaactcaaaggcattcaccaat

SEQ ID NO: 209444 - DNA, 75 bp, synthetic construct
  source 1..75: mol_type = other DNA
gctggcagtgcgacggcggcagctcagagcaaaagtacggcggaatccgcggcaacgcgcgccgagacagcagca

SEQ ID NO: 209445 - DNA, 75 bp, synthetic construct
  source 1..75: mol_type = other DNA
gcgcagcttcctcggcaacggcggcaggaaattccgcgaaggcggcaaaaacgtcagagacgaacgccaggtctt

SEQ ID NO: 209446 - DNA, 75 bp, synthetic construct
  source 1..75: mol_type = other DNA
ctccgcggttgcacagaacacggcagccgcgaagaagtcagccagcgatgccagcatatctgccagtgaggcggc

SEQ ID NO: 209447 - DNA, 75 bp, synthetic construct
  source 1..75: mol_type = other DNA
cctggatcaacacatccggcgatacatatgatatttacgttgagattggcaattatgcgacgagtgtaaatatcc

SEQ ID NO: 209448 - DNA, 75 bp, synthetic construct
  source 1..75: mol_type = other DNA
tcaggtccgttgtctgttactgatgggatcaccggggcactgaaggggaacgccgataccgcgacgaaacttgcg

SEQ ID NO: 209449 - DNA, 75 bp, synthetic construct
  source 1..75: mol_type = other DNA
tgttcatactcatggtaatggtattcgttggccaggaggcggcggttctgcgttagcattttatgatggcggtgg

SEQ ID NO: 209450 - DNA, 75 bp, synthetic construct
  source 1..75: mol_type = other DNA
caacgaaggctggcgaagccactgaacaggccagcgcagcagcgaggtctgcttccgcagcgaagacatccgaaa

SEQ ID NO: 209451 - DNA, 75 bp, synthetic construct
  source 1..75: mol_type = other DNA
atgatcactattaccaaagggcgactgctgacaatcaagcagtggcgcgaaacatacggaccgggtagcaacgtt

SEQ ID NO: 209452 - DNA, 75 bp, synthetic construct
  source 1..75: mol_type = other DNA
cgggtgtgttgcgtacagaacagacgctgtcggatcaggcttatgagcgcctgaagaaagattttgaggagcgtc

SEQ ID NO: 209453 - DNA, 75 bp, synthetic construct
  source 1..75: mol_type = other DNA
gcctgaaatgtggtgatcaattgattgtgacaaaactggatcgccttggttgtaatgcaatggatatcaggaaaa

SEQ ID NO: 209454 - DNA, 75 bp, synthetic construct
  source 1..75: mol_type = other DNA
atttctgcgatgaggttacagaaataaaatatagtcttcgtgatcttttttataacctgccttatattcatcgaa

SEQ ID NO: 209455 - DNA, 75 bp, synthetic construct
  source 1..75: mol_type = other DNA
gatgtgctgtcgcaaaccggacagccgctgccgtgtgccgatctctggttaggcaatgccaaagcgaccagcgaa

SEQ ID NO: 209456 - DNA, 75 bp, synthetic construct
  source 1..75: mol_type = other DNA
aactgggaagcagcctgacggggaaacggctcctgcaatggcaggcaagctgtgaaccagaagagtactggattg

SEQ ID NO: 209457 - DNA, 75 bp, synthetic construct
  source 1..75: mol_type = other DNA
atgatattcgagtgattagtaaagaaaaacttcctgatgggatcgctgatctagtcgtgacttcacctccgtatg

SEQ ID NO: 209458 - DNA, 75 bp, synthetic construct
  source 1..75: mol_type = other DNA
ataccataacacctgttttcctttctctcgcaccgaaagaacgctggacaagttctatgcgattactgacagata

SEQ ID NO: 209459 - DNA, 75 bp, synthetic construct
  source 1..75: mol_type = other DNA
atttgttgtgagtgccttaatgcactgaataacacaggggcaatatcttcagcattaaaaaaatatataaaggag

SEQ ID NO: 209460 - DNA, 75 bp, synthetic construct
  source 1..75: mol_type = other DNA
ccgttaactgatgctgatgtgcttggtctctttctggataaattagaggatcaattcaatcggatagaaaaattc

SEQ ID NO: 209461 - DNA, 75 bp, synthetic construct
  source 1..75: mol_type = other DNA
gtatccattcatataaagggaaattttatccacagttagcgaaaagtttattaaatatcagcgggtttggtcctg

SEQ ID NO: 209462 - DNA, 75 bp, synthetic construct
  source 1..75: mol_type = other DNA
ggttttgatcctattgcattagggcatgtcgaaattggttcccatttaaaacatcagagagaatcgagtggcttt

SEQ ID NO: 209463 - DNA, 75 bp, synthetic construct
  source 1..75: mol_type = other DNA
tgtgaacccgaagagtactggattgttgatgacattgaagggcgacttgatccggcacaccatcgtggacgtcgc

SEQ ID NO: 209464 - DNA, 75 bp, synthetic construct
  source 1..75: mol_type = other DNA
cctggttttaaccggttgcttgatcgtctggaaagtggcgatgtattgatagtcacaaaactggatcgcctcggt

SEQ ID NO: 209465 - DNA, 75 bp, synthetic construct
  source 1..75: mol_type = other DNA
gggtatcaactctggaacaaacaaccaaaaatcaacgtcgggaaatcgaaagtgcaggttttaacatcaaatctc

SEQ ID NO: 209466 - DNA, 75 bp, synthetic construct
  source 1..75: mol_type = other DNA
tatcagagtgcattgcttagcattggctggcattgacctgaccagtccaacaggaaaaatgatgatgcaagtaat

SEQ ID NO: 209467 - DNA, 75 bp, synthetic construct
  source 1..75: mol_type = other DNA
ggacggggatgtcctatcaggaacgtctctccggcaaccaggcaccttcactgtacgcgatttcgttgattgtcg

SEQ ID NO: 209468 - DNA, 75 bp, synthetic construct
  source 1..75: mol_type = other DNA
aacgctggtcgaagcgatcatcctcgtgttcctggtaatgtatctgttcttgcagaacttccgcgcgacgttgat

SEQ ID NO: 209469 - DNA, 75 bp, synthetic construct
  source 1..75: mol_type = other DNA
tatcaacaccgatggcaccatgacgcaggaggatatctccgactacgtagcggcgaatatgaaagatgccatcag

SEQ ID NO: 209470 - DNA, 75 bp, synthetic construct
  source 1..75: mol_type = other DNA
tatccgcgttcattgcctggccttgggcggggtggatctgaccagccctgcaggaaaaatgaccatgcaggtgat

SEQ ID NO: 209471 - DNA, 75 bp, synthetic construct
  source 1..75: mol_type = other DNA
ccaggatttgccaggctgcttgaccgtatggaaaatggcgatgtgcttattgtcaccaaacttgaccgcctcgga

SEQ ID NO: 209472 - DNA, 75 bp, synthetic construct
  source 1..75: mol_type = other DNA
ggtggtgttgatctgaccagttcggcaggaaaaatgacaatgcaagtgatttcagcggtcgctgaatttgaacga

SEQ ID NO: 209473 - DNA, 75 bp, synthetic construct
  source 1..75: mol_type = other DNA
aaagttcagctgctgggctccggttccatcctgcgtcacgtccgtgaagcagctgagatcctggcgaaagattac

SEQ ID NO: 209474 - DNA, 75 bp, synthetic construct
  source 1..75: mol_type = other DNA
gactgaaaagaggtgatgcattgattgtcacaaaactggatcgcctcggttgtaatccaatggatatcagtaaaa

SEQ ID NO: 209475 - DNA, 75 bp, synthetic construct
  source 1..75: mol_type = other DNA
ctggcattgcgcgggcaaaagcagccggaaagcggtttggccgtccttcagtactgaatgaagagcagaaaacta

SEQ ID NO: 209476 - DNA, 75 bp, synthetic construct
  source 1..75: mol_type = other DNA
gcaggccgacaaaacggagccctgccatgaatgggatatggccggtattcagccttctcccgcacaggaacagaa

SEQ ID NO: 209477 - DNA, 75 bp, synthetic construct
  source 1..75: mol_type = other DNA
tgtgttgcctctgttgtccgtacggccctgcgcgctgttcgtgacaccgtggtctctgttgcccgcgcggtatgg

SEQ ID NO: 209478 - DNA, 75 bp, synthetic construct
  source 1..75: mol_type = other DNA
aagccgtattgccggacccgaaaaatttgctgctggtgctggatgaaggtcatcacctgccggacgtggcgcggg

SEQ ID NO: 209479 - DNA, 75 bp, synthetic construct
  source 1..75: mol_type = other DNA
tcgacgattaaggcgaagctaaatgccgtacaacagcagttcctgccgcatcattcggtttgtgtggtatcagcc

SEQ ID NO: 209480 - DNA, 75 bp, synthetic construct
  source 1..75: mol_type = other DNA
ccattgagaagcctctggcttcactgcctcctactcttcgcagtcttattcttaaacgtcttcgtagtctcacac

SEQ ID NO: 209481 - DNA, 75 bp, synthetic construct
  source 1..75: mol_type = other DNA
acgacacaactgcatggaaggctctgcaccgagccggtaaaaaagcaggcacgtgagcgctttggtcatgcagtt

SEQ ID NO: 209482 - DNA, 75 bp, synthetic construct
  source 1..75: mol_type = other DNA
atgggatggtctgcgcgatcatacggatatcgccattgatgatgatctctggcgtcggttgagtaccgacaaagc

SEQ ID NO: 209483 - DNA, 75 bp, synthetic construct
  source 1..75: mol_type = other DNA
agcaaaaaacatctcggtatgttggtactgtttgccagcgggcgggcgatgcagcgctttctcgactatgtgacg

SEQ ID NO: 209484 - DNA, 75 bp, synthetic construct
  source 1..75: mol_type = other DNA
ggcgtatgctgccagagcttgacctagtgctgtgggtcatcaaagctgatgaccgtgcgctgtcggtggacgagc

SEQ ID NO: 209485 - DNA, 75 bp, synthetic construct
  source 1..75: mol_type = other DNA
tcactgccgcttttgggcgtgggcgctacgtttgcccgcgtaatctgacggcgcttgccagcactgagcccacgc

SEQ ID NO: 209486 - DNA, 75 bp, synthetic construct
  source 1..75: mol_type = other DNA
aagcggtattgcctgacccgaaaaatttactgctggtgctggacgaaggccatcacctgccagatgtggcgcggg

SEQ ID NO: 209487 - DNA, 75 bp, synthetic construct
  source 1..75: mol_type = other DNA
aggtgcaaagcctgccgagcgcctcgtttaacctgattcagcaggttgggcgactgattcgaagccacggttgct

SEQ ID NO: 209488 - DNA, 75 bp, synthetic construct
  source 1..75: mol_type = other DNA
cgtgaacagtttaccggtgcggtggaccggatatttgacacggcggagagcgtctgtgttgcctctgttgcacgc

SEQ ID NO: 209489 - DNA, 75 bp, synthetic construct
  source 1..75: mol_type = other DNA
aatcttcagcgcaggtgttggtgcctcctggcaaaaacattatggcacggatgtctacccaactcggctacgggc

SEQ ID NO: 209490 - DNA, 75 bp, synthetic construct
  source 1..75: mol_type = other DNA
ctggattcggttatgccgatggacaatttagcgaaggaaaagggattgttcgcgactggcttgcgggtgttgagt

SEQ ID NO: 209491 - DNA, 75 bp, synthetic construct
  source 1..75: mol_type = other DNA
tgcttataacgcaccaggaaatcagggactgcgcattgattacgcgagtgtgttacaagcccgcggttggcctcg

SEQ ID NO: 209492 - DNA, 75 bp, synthetic construct
  source 1..75: mol_type = other DNA
cgcttaatatggcgaagtttattaaggggcagaccctgcttttgctggaaaaacttaatgaactcgagctcgatg

SEQ ID NO: 209493 - DNA, 75 bp, synthetic construct
  source 1..75: mol_type = other DNA
aagggattgttcgcgactggcttgcgggtgttgagtggcggtcacgtaatatctggctcgaggcagagtacgctg

SEQ ID NO: 209494 - DNA, 75 bp, synthetic construct
  source 1..75: mol_type = other DNA
attgatgctggcgcaacgctacgctgggaaaaacgaccttatgacggtgacagagaacacaacttatacgttgaa

SEQ ID NO: 209495 - DNA, 75 bp, synthetic construct
  source 1..75: mol_type = other DNA
ttactgacaggtgacaaacctggctccgaacctgaaacccaggcgctgtgccagcttatacaccgcattcaacct

SEQ ID NO: 209496 - DNA, 75 bp, synthetic construct
  source 1..75: mol_type = other DNA
ccattacggcgatgtttcgtccccgccatcgggtctgtgtggtgtcagcgctgaccggatggggcgtggaagcga

SEQ ID NO: 209497 - DNA, 75 bp, synthetic construct
  source 1..75: mol_type = other DNA
gggtaaaagcggtgcgggtaaatcctcgctctgcaacgaactcttccggggtgaggtctcccccgtcagtgatgt

SEQ ID NO: 209498 - DNA, 75 bp, synthetic construct
  source 1..75: mol_type = other DNA
cctcgtgcagcagaaaatgaattaaaaaaagcagaagtgatcgagccacgtaatattaatctggaggttgaacaa

SEQ ID NO: 209499 - DNA, 75 bp, synthetic construct
  source 1..75: mol_type = other DNA
gatgaaaactcttcggttgtcaccctctcctgcgcgctacgcacattgacgccttcattgcgccgtcatcatgtg

SEQ ID NO: 209500 - DNA, 75 bp, synthetic construct
  source 1..75: mol_type = other DNA
cctgcctgggtggtctcattccacgatccactggcctgtattgaagatcccagacacagcgaattaggcgaatgg

SEQ ID NO: 209501 - DNA, 75 bp, synthetic construct
  source 1..75: mol_type = other DNA
tctggcgcaccatggcaccgctaacccgcgatgctattagtgcaatgtgggacgagctggaagaagattctgaag

SEQ ID NO: 209502 - DNA, 75 bp, synthetic construct
  source 1..75: mol_type = other DNA
gttaacctggtatttcacctacagggcaggagctggacgccaggtatcaccggaacgcctgaaactgggaaatta

SEQ ID NO: 209503 - DNA, 75 bp, synthetic construct
  source 1..75: mol_type = other DNA
atgccagccaatatggaactcaccgacggtggtcaacgcatcaagttaaaaatggataactggatagtgaaataa

SEQ ID NO: 209504 - DNA, 75 bp, synthetic construct
  source 1..75: mol_type = other DNA
acgttatgagcttaatcacgccgtacaggaagcgttatcacctgtgacagttaaggaagcgctcaattactggct

SEQ ID NO: 209505 - DNA, 75 bp, synthetic construct
  source 1..75: mol_type = other DNA
caggtatgcaagcaggcgcttaagtactgccgcaaacgacgctacgcaatcagcaacgttcttgatgatatggtt

SEQ ID NO: 209506 - DNA, 75 bp, synthetic construct
  source 1..75: mol_type = other DNA
ctggacagtaccgaaggagcacagcaaaacgaaggtcgccatattcaggccaataccggaaagcattttgccgtt

SEQ ID NO: 209507 - DNA, 75 bp, synthetic construct
  source 1..75: mol_type = other DNA
taaatctcactttgagagggtgattaatccactcccccaaaccaataaaaaagatgccggaggacaaaaaaccca

SEQ ID NO: 209508 - DNA, 75 bp, synthetic construct
  source 1..75: mol_type = other DNA
cttacgcagccggcaattctcatgcctcagtcggactggaacagcggcgaccggatgtgggtctgtgactgggtt

SEQ ID NO: 209509 - DNA, 75 bp, synthetic construct
  source 1..75: mol_type = other DNA
agaaaaatttgctctaataaatttcgttttctaagtgcaaaaaatcaccatttcgagctggtgattgaaggttga

SEQ ID NO: 209510 - DNA, 75 bp, synthetic construct
  source 1..75: mol_type = other DNA
ctcagccaggaggcagaggcgcgttatcttacgcagccggcaattctcatgcctcagtcggactggaacagcggc

SEQ ID NO: 209511 - DNA, 75 bp, synthetic construct
  source 1..75: mol_type = other DNA
agagagacacgaccggaacgtattaagctgggaaattatcctaatctgagcctgaaagcagccagggaaaaagcc

SEQ ID NO: 209512 - DNA, 75 bp, synthetic construct
  source 1..75: mol_type = other DNA
gtcgaacttaggttatcggagatcggcgagtgggattttaccgaaatgctctggaccgttccgaaggagcacagc

SEQ ID NO: 209513 - DNA, 75 bp, synthetic construct
  source 1..75: mol_type = other DNA
ctgaacgcgttaagctgggaaattatcccgatctgagtctgaaagcagccagggaaaaagccgcccagtgtcgcg

SEQ ID NO: 209514 - DNA, 75 bp, synthetic construct
  source 1..75: mol_type = other DNA
ggcgctatgcaatcagcaacgttctggacgatctgaacgtggcggacgttgggaaaaaaccggatataagcgaac

SEQ ID NO: 209515 - DNA, 75 bp, synthetic construct
  source 1..75: mol_type = other DNA
tatcaggcggtggaagtgtggctgcgcagacgtgcagcgggaaagcagaacgggagcaagacaaatgaccctgag

SEQ ID NO: 209516 - DNA, 75 bp, synthetic construct
  source 1..75: mol_type = other DNA
atggaccattccggttggtgcaaccgcgccgcaggcagcgggcaaaatccatactgattttgaaaaaggctttat

SEQ ID NO: 209517 - DNA, 75 bp, synthetic construct
  source 1..75: mol_type = other DNA
acgaagacggttttgaaaacaacccatatcttgaccaggtgcgtgaaatcgcggcgaaagaaggttctgttgtgg

SEQ ID NO: 209518 - DNA, 75 bp, synthetic construct
  source 1..75: mol_type = other DNA
ctggacagtaccgaaagagcacagcaaaacgaaggtcgccatattcaggccaataccggaaagcattttaccgtt

SEQ ID NO: 209519 - DNA, 75 bp, synthetic construct
  source 1..75: mol_type = other DNA
caggcaaagcgggacgcgttgaatctgtgggttgagcgtcttgatgtgctggctggaaatcatgaaaatattgtt

SEQ ID NO: 209520 - DNA, 75 bp, synthetic construct
  source 1..75: mol_type = other DNA
atatgtgggtggagcggttggagatactggcgggagcacatgaaaacgtaaccacgctaccagtatccagaagaa

SEQ ID NO: 209521 - DNA, 75 bp, synthetic construct
  source 1..75: mol_type = other DNA
atatgtggatggagcggttagggatactggcgggaacacatgaaaacgtaaccgcactaccagcagccagaagaa

SEQ ID NO: 209522 - DNA, 75 bp, synthetic construct
  source 1..75: mol_type = other DNA
aaaatattttccccttactacgtcgcgttaatccgcctcctgattgtcttcggagccagaacggtagaactgagg

SEQ ID NO: 209523 - DNA, 75 bp, synthetic construct
  source 1..75: mol_type = other DNA
caaagaacttggcgaattattgcaggcactggacaaaaaaatattttccccttactacgtcgcactaatccgcct

SEQ ID NO: 209524 - DNA, 75 bp, synthetic construct
  source 1..75: mol_type = other DNA
gacgcgctgcttcagcggggtattgatcttatggaggaggaactggtggcggcacatatccagacgcagtccaac

SEQ ID NO: 209525 - DNA, 75 bp, synthetic construct
  source 1..75: mol_type = other DNA
ctgtggttactgccacaaactgcatgagcaaatggcagactacaacgcgctggggatcaccgtgcgttatcttgc

SEQ ID NO: 209526 - DNA, 75 bp, synthetic construct
  source 1..75: mol_type = other DNA
ctgactaacagcggtgtgttgtacatcaccgatgatggtaaacatatcattcaggggccaatgtatgacgttagt

SEQ ID NO: 209527 - DNA, 75 bp, synthetic construct
  source 1..75: mol_type = other DNA
aaggcgcgaaagaagcaggcaaaatgcgggcagaaggtaaagagtacatcgtaaaagacggcgatgtaatgaact

SEQ ID NO: 209528 - DNA, 75 bp, synthetic construct
  source 1..75: mol_type = other DNA
atgacaacatcattcacgtttccggcaaagttaatccggcagatgatattgaagttatcaataccgagctggcac

SEQ ID NO: 209529 - DNA, 75 bp, synthetic construct
  source 1..75: mol_type = other DNA
ggcttattctcctgaaatacgacaactattgggactcactgcgcgtaaccgacgcaacgggtggtttaaatcggt

SEQ ID NO: 209530 - DNA, 75 bp, synthetic construct
  source 1..75: mol_type = other DNA
cgcacgcggaccaatggggctggaagcgctgaccacctacaagtggatcggtattggtgattacaccgttcgtgc

SEQ ID NO: 209531 - DNA, 75 bp, synthetic construct
  source 1..75: mol_type = other DNA
gtaacctcgccgatccggtggggcaggtaatcgatggcagcgtactggacagcggcctgcgtcttgagcgtcgtc

SEQ ID NO: 209532 - DNA, 75 bp, synthetic construct
  source 1..75: mol_type = other DNA
caccatcatacactaaatcagtaagttggcagcatcacctgttcatcattaaaaaacattatcgtgatattttac

SEQ ID NO: 209533 - DNA, 75 bp, synthetic construct
  source 1..75: mol_type = other DNA
atgaagaaaggttttatgttatttacgttgttggcggcgttttctggttttgctcaggctgatgacgcggcaatt

SEQ ID NO: 209534 - DNA, 75 bp, synthetic construct
  source 1..75: mol_type = other DNA
tataaagcgccgcaggaaaaacacgtcatcaccgtgtttactgatattacctgtggttactgccacaaactgcat

SEQ ID NO: 209535 - DNA, 75 bp, synthetic construct
  source 1..75: mol_type = other DNA
tgctggtgaataaaaacatcgctgatagcttcctgcccgcattaagcaagcaaatggcggaaagcggcgtgacat

SEQ ID NO: 209536 - DNA, 75 bp, synthetic construct
  source 1..75: mol_type = other DNA
acgaagacggttttgaaaacaacccgtatcttgaccaggtgcgtgaaatcgcggcgaaagaaggttctgttgtag

SEQ ID NO: 209537 - DNA, 75 bp, synthetic construct
  source 1..75: mol_type = other DNA
gtggcacagttagaacaatatgatgccatcgttattagtgatattggtagtaatactttcctgctacaaaatgat

SEQ ID NO: 209538 - DNA, 75 bp, synthetic construct
  source 1..75: mol_type = other DNA
agtacttggaagaaaaagggttttatagacgagctgcagatcgctgggcagagataatggtgcttttatctagtg

SEQ ID NO: 209539 - DNA, 75 bp, synthetic construct
  source 1..75: mol_type = other DNA
aatgaagagcttgccctctttcttggcataagccatgtgtcagtctttaaacgtattcaggcggcgcgtattgac

SEQ ID NO: 209540 - DNA, 75 bp, synthetic construct
  source 1..75: mol_type = other DNA
actgacggaaagcaatgtttatattggtgatattttccgctggggtgaggcattaattcaggtcacccagccgcg

SEQ ID NO: 209541 - DNA, 75 bp, synthetic construct
  source 1..75: mol_type = other DNA
gcagatttgtttgttgcgcctgcgtttggtgaaaacctctcaaccgacggactgacggaaagcaatgtttatatt

SEQ ID NO: 209542 - DNA, 75 bp, synthetic construct
  source 1..75: mol_type = other DNA
ctccgccgccgggttatcgaaaagctggacgcgaacgatgcaaaagcgccgactgagcggcaagatcgaagattt

SEQ ID NO: 209543 - DNA, 75 bp, synthetic construct
  source 1..75: mol_type = other DNA
gaggcggaacacatcattgttccggcggaaaaggtggaactggaaaccacagtacaccctctgaacccacgaaat

SEQ ID NO: 209544 - DNA, 75 bp, synthetic construct
  source 1..75: mol_type = other DNA
gttttacctcaagtaaatatgaagaaggtgcgacctggttactccagtgtctgaaaaatagtcaggtagatgtca

SEQ ID NO: 209545 - DNA, 75 bp, synthetic construct
  source 1..75: mol_type = other DNA
tctggcgcaccatggcaccgctaacccgtgatgccattagtgcaatgtgggacgagctggaagaggattctgaag

SEQ ID NO: 209546 - DNA, 75 bp, synthetic construct
  source 1..75: mol_type = other DNA
ttaacaaaactcgtgaagacattgcctcaaaacgaggcaaaactactgatttgacccgtctgaaagacggcaata

SEQ ID NO: 209547 - DNA, 75 bp, synthetic construct
  source 1..75: mol_type = other DNA
tgaaccaaccagtctggttgatgaagaaatcctccgtgccgttgaaactgaatttaaaccagaagcaagttccgc

SEQ ID NO: 209548 - DNA, 75 bp, synthetic construct
  source 1..75: mol_type = other DNA
ccgcgctcgtcacaagggtaacagagcaatggaagagcgcatcggtcaaatgcgcgcccctcttcgctacctagt

SEQ ID NO: 209549 - DNA, 75 bp, synthetic construct
  source 1..75: mol_type = other DNA
gctctggtaacggtgtttaccggcatgggtgtggcgcaggctgctgacgtaacagctcaggctgtagcgacctag

SEQ ID NO: 209550 - DNA, 75 bp, synthetic construct
  source 1..75: mol_type = other DNA
agccgcaccagcggcaccaccgccgcaaatggatattctggagaaactcgccacactccaggcggccaccaaacg

SEQ ID NO: 209551 - DNA, 75 bp, synthetic construct
  source 1..75: mol_type = other DNA
agctgatttcggcaaaacccaatggctacatgacgccgcaggaattctgggaactggttatcgtctgcctgtgtc

SEQ ID NO: 209552 - DNA, 75 bp, synthetic construct
  source 1..75: mol_type = other DNA
cgcgaaaaataatcgcatgttttacgccttgctgattgcaatttcggtacaaagtgtgtgggtttttgcgttaat

SEQ ID NO: 209553 - DNA, 75 bp, synthetic construct
  source 1..75: mol_type = other DNA
ggtggtatttgtccgcgtgctgaatcagcagcgtgtactggtggcaatcaaccgtggcgaagcctgtgaagtggt

SEQ ID NO: 209554 - DNA, 75 bp, synthetic construct
  source 1..75: mol_type = other DNA
atatctcttacgatccgcagcaaattgacgcccaaacctgtatggcctggatggataattaccgcgcagggcttt

SEQ ID NO: 209555 - DNA, 75 bp, synthetic construct
  source 1..75: mol_type = other DNA
ggattttgatccggtgattgataacgctctggatgcaggaaatccaatcccggaggctctgcaatctcgtgccga

SEQ ID NO: 209556 - DNA, 75 bp, synthetic construct
  source 1..75: mol_type = other DNA
ttccaaacgtggcaataacattgatttgacccgtctgaaagatggcaataactatctgcgcatttttccgaacaa

SEQ ID NO: 209557 - DNA, 75 bp, synthetic construct
  source 1..75: mol_type = other DNA
gacttggtgatttaacaaagtggtcatcaggtggaacacctaataaatcggaggattcatattggaatggtacta

SEQ ID NO: 209558 - DNA, 75 bp, synthetic construct
  source 1..75: mol_type = other DNA
tggcgctttctgaacataccggttttaccgtggcatggataatcgccagtctgattggggcgataatgaacggta

SEQ ID NO: 209559 - DNA, 75 bp, synthetic construct
  source 1..75: mol_type = other DNA
cagtcactggaagaaatgtgggatattccggggctgcaggaacgtctgaagaacgatttcgacctcgatttgcca

SEQ ID NO: 209560 - DNA, 75 bp, synthetic construct
  source 1..75: mol_type = other DNA
ggtgaaggcgctgggagaagtggtggagcttcttccgatagatccgggttgtgtggagccgaagctgaactgtca

SEQ ID NO: 209561 - DNA, 75 bp, synthetic construct
  source 1..75: mol_type = other DNA
aacagcagaagagaagggatatttaaagtcttatatagttgatggcgctaattctcttatgtgtggacctgatga

SEQ ID NO: 209562 - DNA, 75 bp, synthetic construct
  source 1..75: mol_type = other DNA
tttgctaaacctcgttatgttaaaccggccgggacgttacgccgcacggaaaaagccagggcaaccaaaaaatga

SEQ ID NO: 209563 - DNA, 75 bp, synthetic construct
  source 1..75: mol_type = other DNA
caaagagaagctgaactggctggggaaaatggacgcaacgtcgctgaaaaacaaagtagcagcgtcgattgtggc

SEQ ID NO: 209564 - DNA, 75 bp, synthetic construct
  source 1..75: mol_type = other DNA
gccacgctggaaggcaaagtgcgtctgcaaagcgcaggcggcaaggtcttcctgctggcgaacacggcgttcccg

SEQ ID NO: 209565 - DNA, 75 bp, synthetic construct
  source 1..75: mol_type = other DNA
ccgcgtttagcgtcgcagtgacgacgccagccgatcaataccaattaactgaccgggcgactaagtacgctattc

SEQ ID NO: 209566 - DNA, 75 bp, synthetic construct
  source 1..75: mol_type = other DNA
ctgattggggcgttaatgaacggtatttatttgcaggcggtattgaaaggctggcgcaacagcatgttgtttacc

SEQ ID NO: 209567 - DNA, 75 bp, synthetic construct
  source 1..75: mol_type = other DNA
aactggtggtgctctgcgccctgctgttttttccgctgggctacctgacgcgccactatcagcgccggatccgca

SEQ ID NO: 209568 - DNA, 75 bp, synthetic construct
  source 1..75: mol_type = other DNA
tcagatttgatcctcgtgttgctgtcgctggtggatatgacgctggttggcggtttgctggtgatggtgatgttt

SEQ ID NO: 209569 - DNA, 75 bp, synthetic construct
  source 1..75: mol_type = other DNA
ttctacagtccgttaccatcaacggaaacaaagtacccagggagtggatattcactgccgtatatgtggaaaagg

SEQ ID NO: 209570 - DNA, 75 bp, synthetic construct
  source 1..75: mol_type = other DNA
tttccagcagtgtcttaaagcgtgcggttacatatcacctgaacgcaggcgacaaaccgtcaaaaatgctctcgc

SEQ ID NO: 209571 - DNA, 75 bp, synthetic construct
  source 1..75: mol_type = other DNA
cgctgactaccacgacccggaaaaacgcgccatcgccaatgccattacccttgagttcaccgacggtacacgatt

SEQ ID NO: 209572 - DNA, 75 bp, synthetic construct
  source 1..75: mol_type = other DNA
gcaggtgctgaccgcaatgatcaaagcccatgaaattcagggctgcatcgcgctggaaaactcctttaaccgcgt

SEQ ID NO: 209573 - DNA, 75 bp, synthetic construct
  source 1..75: mol_type = other DNA
acgtctcctttaaaggtgaatcgttccgcttccagcgcccgtacggttcttacgtgatggaaaatgtgctgttca

SEQ ID NO: 209574 - DNA, 75 bp, synthetic construct
  source 1..75: mol_type = other DNA
atgaagcgcggatttaccttgctggaagtgatgctcgcactggcgatttttgcgctggctgccacggcggtgtta

SEQ ID NO: 209575 - DNA, 75 bp, synthetic construct
  source 1..75: mol_type = other DNA
ggtagcgggctgggtagctgaaaaccagactgcgctgctttacctgatgacccgtgaacaacgagcggtcaggca

SEQ ID NO: 209576 - DNA, 75 bp, synthetic construct
  source 1..75: mol_type = other DNA
caaatccacggtggcgaaacctcgtgcagcgatcagcgaagcatgttcacacactggtcaagttaaaaatgcctt

SEQ ID NO: 209577 - DNA, 75 bp, synthetic construct
  source 1..75: mol_type = other DNA
gtcatgggagtaccgctacaccctgaacgtggtgattgaggatttcagcggcgatcagaatctgctgatggcccc

SEQ ID NO: 209578 - DNA, 75 bp, synthetic construct
  source 1..75: mol_type = other DNA
gcgaattggcagcctggacgtgcgagacaatattgagcgtcgggcttatgaaattgctctggcatcgctggaagc

SEQ ID NO: 209579 - DNA, 75 bp, synthetic construct
  source 1..75: mol_type = other DNA
gtctgtgatatcagccttaacctgcagctgacggagcgtgtggtggtcagcactgacggcagtgtgtcgggcgtt

SEQ ID NO: 209580 - DNA, 75 bp, synthetic construct
  source 1..75: mol_type = other DNA
aaaagcagtggatattgacgttagtcgccagaaagacttttccagtgtagttaagtctggacgcgcatggtttag

SEQ ID NO: 209581 - DNA, 75 bp, synthetic construct
  source 1..75: mol_type = other DNA
gtctgtgatatcagccttaacctgcaactcacggagcgggtgctggtcagtactgacggcagtgtgtcgagcgtt

SEQ ID NO: 209582 - DNA, 75 bp, synthetic construct
  source 1..75: mol_type = other DNA
tgaggtggatattctgcgcaacgatgtctgtgatatcagcctcaaccataacccggcgttacgggaaaagctatt

SEQ ID NO: 209583 - DNA, 75 bp, synthetic construct
  source 1..75: mol_type = other DNA
agcgccgcagtcaggcgattccccgtggtgttgggcaaattcacccgattttcgctgaccgcgcggaaaactgcc

SEQ ID NO: 209584 - DNA, 75 bp, synthetic construct
  source 1..75: mol_type = other DNA
ttttatcagatcttccctgatcgtttcgcccgtagtcttcctcgtgaagctgaacaggatcatgtctattaccat

SEQ ID NO: 209585 - DNA, 75 bp, synthetic construct
  source 1..75: mol_type = other DNA
gggtggggcgcgcaataatatgcagcacgttgctgggatcaccgaagcggcgaaagaaacccagccggaagcgta

SEQ ID NO: 209586 - DNA, 75 bp, synthetic construct
  source 1..75: mol_type = other DNA
ttgcagcacgtcgccgggatcaccgaagcggcgaaagaaaccctgccggaagcctatattgttggcgagcatttt

SEQ ID NO: 209587 - DNA, 75 bp, synthetic construct
  source 1..75: mol_type = other DNA
aatgattgcgctacgtaagaaaagccatgcgctgcgtcgtggtggctgccaggtggtatatgcggaagatcacgt

SEQ ID NO: 209588 - DNA, 75 bp, synthetic construct
  source 1..75: mol_type = other DNA
gaactaccgtggctttacattcccgttgtggggatttctggccaacaccgatatctcttacgatccccagcagat

SEQ ID NO: 209589 - DNA, 75 bp, synthetic construct
  source 1..75: mol_type = other DNA
ttgcccgaagtcagtcacgtgaagcaacgcaggatcatgtctattatcatcacgcagccggacgggagatcatac

SEQ ID NO: 209590 - DNA, 75 bp, synthetic construct
  source 1..75: mol_type = other DNA
ggcgcaggcgggcggatcaacgttctatggcggcgatctggacggtatcagcgaaaaactgccgtatctgaaaaa

SEQ ID NO: 209591 - DNA, 75 bp, synthetic construct
  source 1..75: mol_type = other DNA
ttagatatacagtggagtctcatgaacaaataaagtcatatgtaaggaaacgtaacccgtttaatcacatgacaa

SEQ ID NO: 209592 - DNA, 75 bp, synthetic construct
  source 1..75: mol_type = other DNA
caacaaatcgttgccgataatattcacggtgaaaccggactggatggcccggtattcgagccgctgacccgctag

SEQ ID NO: 209593 - DNA, 75 bp, synthetic construct
  source 1..75: mol_type = other DNA
gatggcacggcgctcgactggctgggctatgccagcttgccgaaactggattatcagtcggaaagtctggtgaat

SEQ ID NO: 209594 - DNA, 75 bp, synthetic construct
  source 1..75: mol_type = other DNA
gccgtgcaatggcaatgcaaagaagggcatgggcaactgactgacgggattctggctttgcctgccatttcggct

SEQ ID NO: 209595 - DNA, 75 bp, synthetic construct
  source 1..75: mol_type = other DNA
tggcgtgacggcgctgtatctcaatccggtgtttaaagctcccagcgtacataaatacgataccgaggattatcg

SEQ ID NO: 209596 - DNA, 75 bp, synthetic construct
  source 1..75: mol_type = other DNA
tacttttgaagcctacaaaaaagcggcgctggatgctgaatttgcatccctgtttgacaccctggactccaccaa

SEQ ID NO: 209597 - DNA, 75 bp, synthetic construct
  source 1..75: mol_type = other DNA
gaaaaattaaccggcaaaaccgtgcttgacagtatggacggctttttcactcgctacggcaaacacaccattctg

SEQ ID NO: 209598 - DNA, 75 bp, synthetic construct
  source 1..75: mol_type = other DNA
tctggtactaccgtataaccctcatcatcctgttgttcgctatgctgctggcatgggcgctgcttcccggcgtcc

SEQ ID NO: 209599 - DNA, 75 bp, synthetic construct
  source 1..75: mol_type = other DNA
tgtctgtattgcaggcaacctctcttcaacggcaaatgtactacgtgccggattacgcgttatcggcttgcagcc

SEQ ID NO: 209600 - DNA, 75 bp, synthetic construct
  source 1..75: mol_type = other DNA
aggcgattaccctggaactggagcgcaacacgcgtaccggtaaacacgcccgttttctgccaacggttcacagcg

SEQ ID NO: 209601 - DNA, 75 bp, synthetic construct
  source 1..75: mol_type = other DNA
acagtacgcggcatccgaaacatgatatgcagcatctgcttaaagaagtggacaaaatgttgcaactgaacgtcg

SEQ ID NO: 209602 - DNA, 75 bp, synthetic construct
  source 1..75: mol_type = other DNA
catcctgttgttcgctgtgctgctggcatgggcgctgcttcccggcgtccatgagtttatcaatcgcagcgttgc

SEQ ID NO: 209603 - DNA, 75 bp, synthetic construct
  source 1..75: mol_type = other DNA
gacgccgcaatatcgccctgatatcggcgcttacctcggcaatcagtggatggtgcgtaacctgcaaatgcagac

SEQ ID NO: 209604 - DNA, 75 bp, synthetic construct
  source 1..75: mol_type = other DNA
gcagttatgtgggtaaggtggtaaaagaagatgccaacaccattacggttgctcatgccaacacctacagcggcg

SEQ ID NO: 209605 - DNA, 75 bp, synthetic construct
  source 1..75: mol_type = other DNA
tttttttataaaacccgctttgtgactgcaagtaagggggggacggccaatattgatgttggcgctggtttcata

SEQ ID NO: 209606 - DNA, 75 bp, synthetic construct
  source 1..75: mol_type = other DNA
caccggagaagaaccgcgcgtggcgatgttgtcgttttccagcaacggtagtgcccgtcacccctgcgttgccaa

SEQ ID NO: 209607 - DNA, 75 bp, synthetic construct
  source 1..75: mol_type = other DNA
gcgcagttggcggatatcgcgcttgccagcgccgaaacctggcgcgccatcaccggagaagaaccgcgcgtggcg

SEQ ID NO: 209608 - DNA, 75 bp, synthetic construct
  source 1..75: mol_type = other DNA
tggctgtaaaacgctctcttccattttcctgatgctgccacagtacagtggccccgcattgggctttgccgattg

SEQ ID NO: 209609 - DNA, 75 bp, synthetic construct
  source 1..75: mol_type = other DNA
ggtaaagtggtgaaacagggcgctaacgccatcaccattgcgcatgccaacacttacagcggcggcacgctgatt

SEQ ID NO: 209610 - DNA, 75 bp, synthetic construct
  source 1..75: mol_type = other DNA
agcattattgacgctggaacgcgatcgcgttgaacagcagtcgctgctatcgcatccggcaaactggctgacgtt

SEQ ID NO: 209611 - DNA, 75 bp, synthetic construct
  source 1..75: mol_type = other DNA
tcagcgccccggcgaagctttcagtgctggacgccaacggcagtctgttgcaaaccatcaatgtcacgctggatg

SEQ ID NO: 209612 - DNA, 75 bp, synthetic construct
  source 1..75: mol_type = other DNA
cagttaacaacgaacaaactggcggccctgtatcgggtttctgccgaccaaattcatcatcacctctctgcaatt

SEQ ID NO: 209613 - DNA, 75 bp, synthetic construct
  source 1..75: mol_type = other DNA
gttggtaacgatttgcgttatgccggacgtttcccagtgtcgctggaaggcagtgaaacggtttccgacgataat

SEQ ID NO: 209614 - DNA, 75 bp, synthetic construct
  source 1..75: mol_type = other DNA
aggcgcatccagcaatttcatttcgccgcagccgggcaacatctatattcctctcggcaaacaagagccgggact

SEQ ID NO: 209615 - DNA, 75 bp, synthetic construct
  source 1..75: mol_type = other DNA
acgccttcctcacggcatgggcatggtacgccgactggcaggccagccaggcgctcggcgtaacgcaacaaccgg

SEQ ID NO: 209616 - DNA, 75 bp, synthetic construct
  source 1..75: mol_type = other DNA
ccatatggacgcggtggcctataccatggcagccaccagcacgcgcaatcttcaggaaggcgacgatcccgatcg

SEQ ID NO: 209617 - DNA, 75 bp, synthetic construct
  source 1..75: mol_type = other DNA
cttcctgcaaatgagtttgtttaccgatccgctcggcgatggttcgttcacccgcaactggaccgttttttactg

SEQ ID NO: 209618 - DNA, 75 bp, synthetic construct
  source 1..75: mol_type = other DNA
gtggactggctgatcgccgagcgtcccggcaaggtaaaaaccttgaagcagcatccgcgcaagaacaaaacggcc

SEQ ID NO: 209619 - DNA, 75 bp, synthetic construct
  source 1..75: mol_type = other DNA
gctaatgtcgactcatcatccgctccatgccaacgccattgccgacagcattatccaggtagagccagatggacg

SEQ ID NO: 209620 - DNA, 75 bp, synthetic construct
  source 1..75: mol_type = other DNA
cgtagttatccgtactccatattttcacggaggtatccaatactgcgtctcatacaggaagttattgatccagca

SEQ ID NO: 209621 - DNA, 75 bp, synthetic construct
  source 1..75: mol_type = other DNA
tccgccgtacaggtattagttttgctggcaatggggctggtaatttatttagccaccagcaaatacggcaatatt

SEQ ID NO: 209622 - DNA, 75 bp, synthetic construct
  source 1..75: mol_type = other DNA
gtattggtaaggcgctgatgcagtatgtgcagcagcgccatccccatctgatgctggaggtttatcaaaaaaatc

SEQ ID NO: 209623 - DNA, 75 bp, synthetic construct
  source 1..75: mol_type = other DNA
aactgcccgcaatccttgaactgtggctggaaagtacaacctggggacatccctttatagaagaaagttactggc

SEQ ID NO: 209624 - DNA, 75 bp, synthetic construct
  source 1..75: mol_type = other DNA
cgataaggtgtttgcggggaattaccgtagcgattatttgtggtacgcaatactgggtggaacaaacagtcgcgc

SEQ ID NO: 209625 - DNA, 75 bp, synthetic construct
  source 1..75: mol_type = other DNA
ggattactcgcagtcctggctgcaacggatagtggtacagcgcggttaagttcgacaggtaaactaactggcgta

SEQ ID NO: 209626 - DNA, 75 bp, synthetic construct
  source 1..75: mol_type = other DNA
gcgcagggttttcacattgtcgattgcgcatggcaggatgaaacccaactacccacctggattatgagctggccg

SEQ ID NO: 209627 - DNA, 75 bp, synthetic construct
  source 1..75: mol_type = other DNA
gctggaaagtacaacctggggccatccctttataaaagcgaattactggcgtgagtgcattccgctggtgcggga

SEQ ID NO: 209628 - DNA, 75 bp, synthetic construct
  source 1..75: mol_type = other DNA
tgtattgtctggtattaatgttcaggatacaggttccaactctgccgataatatagcgggcgtttattacagacc

SEQ ID NO: 209629 - DNA, 75 bp, synthetic construct
  source 1..75: mol_type = other DNA
gaacgagctggcggcggcgctgggaaacgacccgaattttgcgaccaccatgactaacgcgcttgcgggtaagca

SEQ ID NO: 209630 - DNA, 75 bp, synthetic construct
  source 1..75: mol_type = other DNA
tttgaggctgactggtcagagttttacaccacgacccgcaaaccctctgcgggagatgttggtgcatacacgcag

SEQ ID NO: 209631 - DNA, 75 bp, synthetic construct
  source 1..75: mol_type = other DNA
aataaattaccggatttacggggagaatttattcgtggctgggatgatggacgcggtgtggacatgggagagcat

SEQ ID NO: 209632 - DNA, 75 bp, synthetic construct
  source 1..75: mol_type = other DNA
gttatgcgctttgtctccggcagcattcaaagtaataaaaccataaatattacagggcgtgttaacccctcggat

SEQ ID NO: 209633 - DNA, 75 bp, synthetic construct
  source 1..75: mol_type = other DNA
ttaaacagcccggcgctgaccggaacaccaacaacaccaactgcgcgacagggaacgaataatacccaaatcgca

SEQ ID NO: 209634 - DNA, 75 bp, synthetic construct
  source 1..75: mol_type = other DNA
ggttccggtattaccgatcagattgcttttcgtattatcggagatggtgcaaccattaagacgaatattgcaccg

SEQ ID NO: 209635 - DNA, 75 bp, synthetic construct
  source 1..75: mol_type = other DNA
acaggtgaagcgactgcaggaaacggcaataacaatgtaacgcttaacggcaggacacatgttgaccaggtgatt

SEQ ID NO: 209636 - DNA, 75 bp, synthetic construct
  source 1..75: mol_type = other DNA
ccgcagccacaccccacgccggataaacctgtacagaaggtctatcgtccggaagcgggctcttatattgcgaac

SEQ ID NO: 209637 - DNA, 75 bp, synthetic construct
  source 1..75: mol_type = other DNA
tatcacctttaccggaaagaacacgaccggtatccgggtcgaggaaggcgctgctggcaccaacagtggaaatat

SEQ ID NO: 209638 - DNA, 75 bp, synthetic construct
  source 1..75: mol_type = other DNA
ggccggttacgggaatgagaagagctccacgacatcctcggtttcgggatataaatctaaaggctcgatcagcgg

SEQ ID NO: 209639 - DNA, 75 bp, synthetic construct
  source 1..75: mol_type = other DNA
ctatgcgggcttcagatgaaaaacacctgggcaccgggctgattgacagcgagggtgtcacctggcttactgcca

SEQ ID NO: 209640 - DNA, 75 bp, synthetic construct
  source 1..75: mol_type = other DNA
ggtcatttctcacagtcagacgttcgatgtgactcagggcggtgaagtggtggcccaggggaactatgactacaa

SEQ ID NO: 209641 - DNA, 75 bp, synthetic construct
  source 1..75: mol_type = other DNA
cggcactattaatgtagacggcagtggaattgcactggcgttccagaaagctgacggaagtgaaaccgataataa

SEQ ID NO: 209642 - DNA, 75 bp, synthetic construct
  source 1..75: mol_type = other DNA
gggttattaatgttaacggtctgaacagtaccggactgcaggcaatcaatgcaggacagttgaattctgacggta

SEQ ID NO: 209643 - DNA, 75 bp, synthetic construct
  source 1..75: mol_type = other DNA
atccggattgatttacgtcaataccggagaaaaaacaaaaaccattacagtgaaggatgaggttactggcgcttc

SEQ ID NO: 209644 - DNA, 75 bp, synthetic construct
  source 1..75: mol_type = other DNA
agggaaattatgactataagctgctgggaagctccgacggtattaaaggtgacggactgtacataggctatgggc

SEQ ID NO: 209645 - DNA, 75 bp, synthetic construct
  source 1..75: mol_type = other DNA
accaccacgcatacgtatgatgttgatcgtactgcagggggtaaaattgatcctgctatatatcaggctggtatc

SEQ ID NO: 209646 - DNA, 75 bp, synthetic construct
  source 1..75: mol_type = other DNA
atacgctggattctgttgtaaaactacagaattttgaacatgtcgggctgaagaacagttcgcttgtcactctga

SEQ ID NO: 209647 - DNA, 75 bp, synthetic construct
  source 1..75: mol_type = other DNA
atgcgcttaatgctataaatagtgttcatttttccgatgattcattctttcttaaggatgaagtagggggcgtat

SEQ ID NO: 209648 - DNA, 75 bp, synthetic construct
  source 1..75: mol_type = other DNA
gaaagcggtaatgaacaaatcttaaaacaaatatcaggtttaccaagaggtgatgctgttgcatttggttctgca

SEQ ID NO: 209649 - DNA, 75 bp, synthetic construct
  source 1..75: mol_type = other DNA
atcggtctgggtgatatttccgtactggttttctttggctggttgagcgtgatggggagctggtatttgcaggcg

SEQ ID NO: 209650 - DNA, 75 bp, synthetic construct
  source 1..75: mol_type = other DNA
attctatgagcgatcaacggatccgccatggcggttgttttccgattgaggattttatagatggtttctggcgac

SEQ ID NO: 209651 - DNA, 75 bp, synthetic construct
  source 1..75: mol_type = other DNA
ttagggagtactgggtatggaaaatcaaattttaatgcactgttgaccaggcgtatttccgagaagtatcctaat

SEQ ID NO: 209652 - DNA, 75 bp, synthetic construct
  source 1..75: mol_type = other DNA
ggggcaaaacaaagcttttccaaccgtgttacttcttgaagaggcgcaccactatttaagagatccttattctga

SEQ ID NO: 209653 - DNA, 75 bp, synthetic construct
  source 1..75: mol_type = other DNA
ccgcttgctgcactggccgggcagcgcctggccgctgaaatgacaccggatgttccccgtatcccgtcgccggaa

SEQ ID NO: 209654 - DNA, 75 bp, synthetic construct
  source 1..75: mol_type = other DNA
gctttcagctaacccggagatggtggcgaatatagccaaactactggccggatttattgcattcaaagcggcgac

SEQ ID NO: 209655 - DNA, 75 bp, synthetic construct
  source 1..75: mol_type = other DNA
gcccgctggcgaagctcgcaggtagcgatgaatgagatggcaatcagtatcggtagttctctacgcccggcactg

SEQ ID NO: 209656 - DNA, 75 bp, synthetic construct
  source 1..75: mol_type = other DNA
gtatgcaaaaaggggttattacccagcaagagatgaaacgggcgctcatcattaccgtcgtgctcatctgtctct

SEQ ID NO: 209657 - DNA, 75 bp, synthetic construct
  source 1..75: mol_type = other DNA
gctgcaattatcgtcgggacggcgctggcatggtggcaaggtcacttcgatccgctggtcgccctgctggcacta

SEQ ID NO: 209658 - DNA, 75 bp, synthetic construct
  source 1..75: mol_type = other DNA
gtatctgatttaccgctactgggggccgatttccgctttctttaagcggctgtgggcgcaggtcacggtagcgtt

SEQ ID NO: 209659 - DNA, 75 bp, synthetic construct
  source 1..75: mol_type = other DNA
actaacgctgcaacggtggcggtgattcaggacgccctgaaatcctgcggcttaccggcgggtgccgtgcaggcg

SEQ ID NO: 209660 - DNA, 75 bp, synthetic construct
  source 1..75: mol_type = other DNA
taccgtccgaagcaaaacaaccgacaccaacgcaggattgcttgccgacatgctcggagatattgcagcagaagc

SEQ ID NO: 209661 - DNA, 75 bp, synthetic construct
  source 1..75: mol_type = other DNA
catatttacgttgatgaaagcgcagagatcgctgaagcattaaaagtgatcgtcaacgcgaaaactcagcgaccg

SEQ ID NO: 209662 - DNA, 75 bp, synthetic construct
  source 1..75: mol_type = other DNA
cgcgcgcggcccaatggggctggaagcactgaccacttacaagtggatcggcattggtgattacaccattcgtgc

SEQ ID NO: 209663 - DNA, 75 bp, synthetic construct
  source 1..75: mol_type = other DNA
gctgctcgaataattgaacaggggcgaactatatcccgtgatgaggctgttaaagatgcacaacagaaatctgct

SEQ ID NO: 209664 - DNA, 75 bp, synthetic construct
  source 1..75: mol_type = other DNA
atgcacaacagaaatctgctgaaatttctgccaagggctgcttatctgtctgatagtgttaaccagttgcgcgcc

SEQ ID NO: 209665 - DNA, 75 bp, synthetic construct
  source 1..75: mol_type = other DNA
tgctcggaagtattgcagaagaagctagatactatgctgggcgagctgatgaaagttacttggctggaatgacat

SEQ ID NO: 209666 - DNA, 75 bp, synthetic construct
  source 1..75: mol_type = other DNA
ttcaggatgctctgaattcctgcggattaccggcgggtgccgtgcaggcgattgataatcctgaccgtgcgctgg

SEQ ID NO: 209667 - DNA, 75 bp, synthetic construct
  source 1..75: mol_type = other DNA
gctgacgcgcgtgccaatggtcttagtgacgcgatgcttgatcgtctggcgttgacgtccgcgcggctgaaaggc

SEQ ID NO: 209668 - DNA, 75 bp, synthetic construct
  source 1..75: mol_type = other DNA
ggtaatcgatggcggcgtactggacagcggcctgcgtcttgagcgtcgtcgcgtaccgctgggcgtgattggcgt

SEQ ID NO: 209669 - DNA, 75 bp, synthetic construct
  source 1..75: mol_type = other DNA
aacgcccagcgttttgttaacgaagtggattcgtccgctgtttacgttaacgcctctacgcgttttaccgatggc

SEQ ID NO: 209670 - DNA, 75 bp, synthetic construct
  source 1..75: mol_type = other DNA
cgaacgctaccgcgccggaatgacgtgtgagcggatttacgactcggtgagacagtcgaataacaacagggttac

SEQ ID NO: 209671 - DNA, 75 bp, synthetic construct
  source 1..75: mol_type = other DNA
cgaacgctaccgctcgggaatgacgtgtgagcgcatttacgactcggtgagagagtcagatcacaattatcggaa

SEQ ID NO: 209672 - DNA, 75 bp, synthetic construct
  source 1..75: mol_type = other DNA
gcgactcattcggctgtgggttctgttgcgattgaagtacaaaatggtgcaaacaaagtcgttaatgaaggtact

SEQ ID NO: 209673 - DNA, 75 bp, synthetic construct
  source 1..75: mol_type = other DNA
tcaggggaactacggaatcctggcaaaggatgccgggactgttgatgtggtaaataaagggactatcactattga

SEQ ID NO: 209674 - DNA, 75 bp, synthetic construct
  source 1..75: mol_type = other DNA
ccaacagcggaaatattaccgtacaggatggcggtgtgggattaattgccagtgcggtgcaggaaaccacgacaa

SEQ ID NO: 209675 - DNA, 75 bp, synthetic construct
  source 1..75: mol_type = other DNA
acaaatagcggtactatcactattgagggacatgacagtgatgcgccggcactgaatgttggcatgctggcaaat

SEQ ID NO: 209676 - DNA, 75 bp, synthetic construct
  source 1..75: mol_type = other DNA
tcgccgacggtagcggagtcagcagtaacctgagtaaatcgctttccggaaaaggttcagtgggcatactgaaca

SEQ ID NO: 209677 - DNA, 75 bp, synthetic construct
  source 1..75: mol_type = other DNA
cattgaaaacaatgtgctgaccggagacggtacgctggctgtcacgggcagcaatctgacggtacatggcaccaa

SEQ ID NO: 209678 - DNA, 75 bp, synthetic construct
  source 1..75: mol_type = other DNA
tgctccgttgacgcttacaaaagtaccacctatgcgcttattgctgtcgccgcgatcgcggcatttgccctcctg

SEQ ID NO: 209679 - DNA, 75 bp, synthetic construct
  source 1..75: mol_type = other DNA
gttaaccgtctccgccagtgacggcgcggcgtatcgagttaccaccaccaaagagatcctcattgaacgtggcct

SEQ ID NO: 209680 - DNA, 75 bp, synthetic construct
  source 1..75: mol_type = other DNA
cgatgaaattacgcttaccagcgagcaggatgccgttctgcgctatggtcaggtggaagtaccgctcccgccggg

SEQ ID NO: 209681 - DNA, 75 bp, synthetic construct
  source 1..75: mol_type = other DNA
agtaacgtctggaggaatgaccatcaacctgacgggtgagggggctacagcgactttaattgaagggggagcgca

SEQ ID NO: 209682 - DNA, 75 bp, synthetic construct
  source 1..75: mol_type = other DNA
tcatgctattcgctgaatatgttgatgaagcaaccaaatgacgaaaacgagcatacccgaaatatcaagaggcaa

SEQ ID NO: 209683 - DNA, 75 bp, synthetic construct
  source 1..75: mol_type = other DNA
gaacgagcaacaaaaggtggtgtcctgtgtgaagaacttcgtcctgatgttgactggtcatacttacgacgctcg

SEQ ID NO: 209684 - DNA, 75 bp, synthetic construct
  source 1..75: mol_type = other DNA
tgccattttgtggaacgacgggcgctgtgcgcaagagtgcgctttgctggaagcgcgagttccgcaatcgcgggt

SEQ ID NO: 209685 - DNA, 75 bp, synthetic construct
  source 1..75: mol_type = other DNA
cggcggtattcctcaatgcggatattaaaccgggtattgagattgtactgcgggcggtcaacctggagcaggcgg

SEQ ID NO: 209686 - DNA, 75 bp, synthetic construct
  source 1..75: mol_type = other DNA
aatactggggagaagaacacgtatggtgggatggcagggctacttttcatggtgaggttgtcagacctgcctgta

SEQ ID NO: 209687 - DNA, 75 bp, synthetic construct
  source 1..75: mol_type = other DNA
atgttacgacgcatgatcctttcggtactgtttctctggtgtgcagtggctcaagccctgccatcagcttctttt

SEQ ID NO: 209688 - DNA, 75 bp, synthetic construct
  source 1..75: mol_type = other DNA
caactggtagccgatggtatgaacccggagaaagcggcgggaatggtggatttgcttggtaaaaccgccacggcc

SEQ ID NO: 209689 - DNA, 75 bp, synthetic construct
  source 1..75: mol_type = other DNA
tagccaggcgatgcgttcgcagcggatggatctttacgcccagggtgcagagacctacgcgctggccagaacgat

SEQ ID NO: 209690 - DNA, 75 bp, synthetic construct
  source 1..75: mol_type = other DNA
catttccggctggtttaaagagacgctgggtattcactcccccagccaggtctttgccgggttcggcgataatat

SEQ ID NO: 209691 - DNA, 75 bp, synthetic construct
  source 1..75: mol_type = other DNA
ccgtgctaatcatcgctatcctggttgtaggctccatctggattatgtggaacctcaattacaacatgatgatgc

SEQ ID NO: 209692 - DNA, 75 bp, synthetic construct
  source 1..75: mol_type = other DNA
aaacgtcaagatcgcgtcaattggcatcctgttcgcgatgattggcgtctatgccgggctggctgaattcggcgg

SEQ ID NO: 209693 - DNA, 75 bp, synthetic construct
  source 1..75: mol_type = other DNA
ctggtagcgccgtggatcgccaacgcgccgcaggggctgtatagctggatgaaacagctcaacggcatttacaac

SEQ ID NO: 209694 - DNA, 75 bp, synthetic construct
  source 1..75: mol_type = other DNA
cccgcctgtacgctggcaatggaggatgcctggcaggaaattgatatgggaatcacgccactccgggatttgcag

SEQ ID NO: 209695 - DNA, 75 bp, synthetic construct
  source 1..75: mol_type = other DNA
ggttgtccgtaatggttatccgctgaaggcaggagattattacgccatattacgcttcaaggtggattatgaatg

SEQ ID NO: 209696 - DNA, 75 bp, synthetic construct
  source 1..75: mol_type = other DNA
agggcgtaagcttacaaatactggacaaacaaggttatccggctaagtctggaaaggtgatgtccccattattat

SEQ ID NO: 209697 - DNA, 75 bp, synthetic construct
  source 1..75: mol_type = other DNA
atgtatcttgataccagcaacgtacagagcctgaaagaaaagctgctgttatgcgcggttaatgaatttgccgaa

SEQ ID NO: 209698 - DNA, 75 bp, synthetic construct
  source 1..75: mol_type = other DNA
attagcatggtttcacctgaggctttggaagccagacgcagagtgatcaaagagaccatcctgagctggcttttg

SEQ ID NO: 209699 - DNA, 75 bp, synthetic construct
  source 1..75: mol_type = other DNA
ccagaccgaagcgatgaccaccgtggacatcaataccggagcgtttgtcggtcatcgcaatctggacgacaccat

SEQ ID NO: 209700 - DNA, 75 bp, synthetic construct
  source 1..75: mol_type = other DNA
ggtaaagagttggggttggctgctgcggtagtcagtgcgctggcctcactgtcaccgacgctagggccaactctg

SEQ ID NO: 209701 - DNA, 75 bp, synthetic construct
  source 1..75: mol_type = other DNA
tactcaacagagcgcgagcaatcctcgccagagaaacggcacatgtaaaattccagccgtggctggatgataagt

SEQ ID NO: 209702 - DNA, 75 bp, synthetic construct
  source 1..75: mol_type = other DNA
atgcgcggttaatgaatttgccgaatatggttatgaaggggccagggtcgataatattgttaaggctgcggggtg

SEQ ID NO: 209703 - DNA, 75 bp, synthetic construct
  source 1..75: mol_type = other DNA
atgaacagaaaacaaaaacaagagttgaaatacttcttacgtaaagaaattgccaggcttgaagatgcagaatca

SEQ ID NO: 209704 - DNA, 75 bp, synthetic construct
  source 1..75: mol_type = other DNA
ccagtcgaaactggagtatggaaagacgctattgactgggtgaccaaagaggcttgccaagctgtagacattggc

SEQ ID NO: 209705 - DNA, 75 bp, synthetic construct
  source 1..75: mol_type = other DNA
ccagtcgaaaccggagcatggaaagacgctgttgactgggtgctcaaagaggcttgccagtctgtaaacattggc

SEQ ID NO: 209706 - DNA, 75 bp, synthetic construct
  source 1..75: mol_type = other DNA
cgctggcggaagtggaaatttttgttggcaagcaggtcaaagtgcaaattgaaccgctctataaccaggagcagt

SEQ ID NO: 209707 - DNA, 75 bp, synthetic construct
  source 1..75: mol_type = other DNA
ggggatattatttgatcaaccagcatacgggcctggtttatctggtgcgccgtaaaaccccgtccttcagggcgg

SEQ ID NO: 209708 - DNA, 75 bp, synthetic construct
  source 1..75: mol_type = other DNA
acgctgttgactgggtgctcaaagaggcttgccatgttgtaaatattggtatcaagggagggggatatggcaacc

SEQ ID NO: 209709 - DNA, 75 bp, synthetic construct
  source 1..75: mol_type = other DNA
gtgggcgaagcttaaaagagaaaacaataggctttacgcagcaaatgaaaaaattggcactgttgcaaatagtcg

SEQ ID NO: 209710 - DNA, 75 bp, synthetic construct
  source 1..75: mol_type = other DNA
ggcgcagatacattgcccaatcaagaatccggacaaaagctatcctcggatttgagtgagattgaacctaagttc

SEQ ID NO: 209711 - DNA, 75 bp, synthetic construct
  source 1..75: mol_type = other DNA
agcatcgcccacatgtcccgggcaagttttgcccagcttttccgtgatgtttccggaaccacgccgctggctgta

SEQ ID NO: 209712 - DNA, 75 bp, synthetic construct
  source 1..75: mol_type = other DNA
tgcgttaacgcaaggagcggcgaagctggaaatgccgacgggagagatttttacattacgcccgggaaatgtggt

SEQ ID NO: 209713 - DNA, 75 bp, synthetic construct
  source 1..75: mol_type = other DNA
gcgaactgcaggaaaagctgatcgcggtaaaccgcgtatctaaaaccgttaaaggtggtcgtattttctccttca

SEQ ID NO: 209714 - DNA, 75 bp, synthetic construct
  source 1..75: mol_type = other DNA
aatacaacttcttgacgtgatatgcctcagtgacggtagtgcagtcagaccattatcccgggaggtgctggatgc

SEQ ID NO: 209715 - DNA, 75 bp, synthetic construct
  source 1..75: mol_type = other DNA
aatccggacaaaagctatcctcggatttgagtgagattgaacctaagttcgttgcttccggtcatgggttttgca

SEQ ID NO: 209716 - DNA, 75 bp, synthetic construct
  source 1..75: mol_type = other DNA
ggagcaggtttagtcagagtgctgacccgcagcgaaaatattgcgccgctgctgaccgcacgtccggaattgatg

SEQ ID NO: 209717 - DNA, 75 bp, synthetic construct
  source 1..75: mol_type = other DNA
cgactggtgattatcggtggcgatcacggcacggcgggcgcgatccgtatggcgggcgaagcggcgctgcgtgct

SEQ ID NO: 209718 - DNA, 75 bp, synthetic construct
  source 1..75: mol_type = other DNA
cacacaccgtctggcacgccgacgatatccgacgtggtgaacgcgaagcggcagatgcgctggggctaacgctct

SEQ ID NO: 209719 - DNA, 75 bp, synthetic construct
  source 1..75: mol_type = other DNA
acagtatcccgactggcacatgctgagggggaaaccggaatgctttatcagcagtgatcttgccccgcgcgtgtt

SEQ ID NO: 209720 - DNA, 75 bp, synthetic construct
  source 1..75: mol_type = other DNA
gccggataccggaggcagtgtatgttctgacgcaggacgatgatacgccagttccactggaagaggcttatgtta

SEQ ID NO: 209721 - DNA, 75 bp, synthetic construct
  source 1..75: mol_type = other DNA
gtgcatgaactgactatggactctcttaccgaaagcctggaatgggccgatgtgctggtgattggtcccggactg

SEQ ID NO: 209722 - DNA, 75 bp, synthetic construct
  source 1..75: mol_type = other DNA
gaacgggaaatcgcgctcggttcctgtagctgattccgttgtgccgttaattaaaacccgccggaccggcctgtt

SEQ ID NO: 209723 - DNA, 75 bp, synthetic construct
  source 1..75: mol_type = other DNA
tttcgttgttaattgacgcggaggtttatcataacgaaaaccctgtgcgcggaatacgtaaactcaaggttcaga

SEQ ID NO: 209724 - DNA, 75 bp, synthetic construct
  source 1..75: mol_type = other DNA
taaatacagtggctgggtagaagcatctgataacgatgaacactatgacccaggaaaaagaatcacttatcgcag

SEQ ID NO: 209725 - DNA, 75 bp, synthetic construct
  source 1..75: mol_type = other DNA
atgtttagcgttgtttatcacccggaagccagggaagaagccacagcattacccttaaaaatcagggtgaagttt

SEQ ID NO: 209726 - DNA, 75 bp, synthetic construct
  source 1..75: mol_type = other DNA
tgggcaggccagcgaacagaccgccgcaccctgtcagaactattagaggcatggtggaagtatcacggccagaat

SEQ ID NO: 209727 - DNA, 75 bp, synthetic construct
  source 1..75: mol_type = other DNA
gtggcacatttaaatacagtggctgggtagaagcatctgataacgatgaacactatgcccgtgtaaaaagaatca

SEQ ID NO: 209728 - DNA, 75 bp, synthetic construct
  source 1..75: mol_type = other DNA
atggtttatgctcaccttgcacctgattacctgcaacacgcagtaactttaaaccctcttggcggcgggctgatg

SEQ ID NO: 209729 - DNA, 75 bp, synthetic construct
  source 1..75: mol_type = other DNA
ttcgggcgcggcagaaaatgctggcgggtcaggcgctggagatgagcggcatgttgatcctcgccatgccgggga

SEQ ID NO: 209730 - DNA, 75 bp, synthetic construct
  source 1..75: mol_type = other DNA
cgaaaaagagccagtcagttgcttaactgactggcattacgaccaatggtcggcgtttttacgtctcgttgaata

SEQ ID NO: 209731 - DNA, 75 bp, synthetic construct
  source 1..75: mol_type = other DNA
cgacaaacagaccgaacgccgccatattctgcgcaatgcctcgctgccgatgatcactgccgtggggatgcacat

SEQ ID NO: 209732 - DNA, 75 bp, synthetic construct
  source 1..75: mol_type = other DNA
tgtttactgttctgaaaagaataggcctttgggatgcagaacatccggtaagggggatctccattctttatgtat

SEQ ID NO: 209733 - DNA, 75 bp, synthetic construct
  source 1..75: mol_type = other DNA
tcagcacgttgataaagctggaagagttcagaaaggaaaactcctgtaagggtctggaaccactgaaagaagcgc

SEQ ID NO: 209734 - DNA, 75 bp, synthetic construct
  source 1..75: mol_type = other DNA
aacaattacgcaacataatcaatgaacttggtgctgatatgcaggcggtggatctggataagctgaaaatcattg

SEQ ID NO: 209735 - DNA, 75 bp, synthetic construct
  source 1..75: mol_type = other DNA
tgctttttcttcgacaaatagaatcaacagaagcacataaattattagcagcattatataataacgctgatgatg

SEQ ID NO: 209736 - DNA, 75 bp, synthetic construct
  source 1..75: mol_type = other DNA
atgcggcggaatatttcttcgatccatccgtgggtatcaacgtttacggcagtgataataacgtgacgctggatg

SEQ ID NO: 209737 - DNA, 75 bp, synthetic construct
  source 1..75: mol_type = other DNA
attaatgcttatcaggctgctcgtatagttgcttcaaaatcgaggctggcgttacctcccgtaattcaggcggtg

SEQ ID NO: 209738 - DNA, 75 bp, synthetic construct
  source 1..75: mol_type = other DNA
taaatattgtttccggtccaactggttcaggtaagtcaactacgttgaaagtaatgctcgagttactttataaag

SEQ ID NO: 209739 - DNA, 75 bp, synthetic construct
  source 1..75: mol_type = other DNA
attgtatgaaaattcagaaagagatttaagaaatagaggggaaaaatcatcactgccaatggaacgggtggttag

SEQ ID NO: 209740 - DNA, 75 bp, synthetic construct
  source 1..75: mol_type = other DNA
tttctcaaccttctgaggaggatattgaacgtttttttcgagataatagtaatataattactaaaaaaggtggtg

SEQ ID NO: 209741 - DNA, 75 bp, synthetic construct
  source 1..75: mol_type = other DNA
aacagttaaaaactgcagatgatcaagattttctaagattcaggaagaatatatctgatattgtaactgttaagg

SEQ ID NO: 209742 - DNA, 75 bp, synthetic construct
  source 1..75: mol_type = other DNA
ataccacaaaggcaataccatcatcatgctccgggttttcatcaagaagtcacagaaaacgccaccaaaagaaat

SEQ ID NO: 209743 - DNA, 75 bp, synthetic construct
  source 1..75: mol_type = other DNA
cggattatttgcaggatgcggtggctcttaatccgctgaaaggtggcgtaagtgtccactcggtgtccacgggag

SEQ ID NO: 209744 - DNA, 75 bp, synthetic construct
  source 1..75: mol_type = other DNA
tttcgccgctgttcgatgcagaacgcttcggtattaaagtcgttccgtccccgcgtcatgcggatattttactgt

SEQ ID NO: 209745 - DNA, 75 bp, synthetic construct
  source 1..75: mol_type = other DNA
atggtgatatggtgcagccgctgcgcgtgaaagtggatcgcgaagcacgtcgcctggcgggttatcgttacggtc

SEQ ID NO: 209746 - DNA, 75 bp, synthetic construct
  source 1..75: mol_type = other DNA
gtatctcctacggtgcctgcggtaacagcggcggcattttccacgatctctactgcgtgtggggcggtacggata

SEQ ID NO: 209747 - DNA, 75 bp, synthetic construct
  source 1..75: mol_type = other DNA
ctcttaatataaccaaaaacgggaacattaaaggcaaccgggaggggggtaatgaacccgaaaacggtaatgtta

SEQ ID NO: 209748 - DNA, 75 bp, synthetic construct
  source 1..75: mol_type = other DNA
ggatctgataatgatgagcattatgtaagacaaactacattccgaagcaaagtaaaaaaccagaattactattct

SEQ ID NO: 209749 - DNA, 75 bp, synthetic construct
  source 1..75: mol_type = other DNA
aaacagcttgccctgccggatttcagtccgttgtcacaggacaggctcgccattcagttgatccgcgaacgcggt

SEQ ID NO: 209750 - DNA, 75 bp, synthetic construct
  source 1..75: mol_type = other DNA
tgaacaaaaacagtttacatccttgcttctgcgggaagggattatcgggttattacaacgcttagggattcgcaa

SEQ ID NO: 209751 - DNA, 75 bp, synthetic construct
  source 1..75: mol_type = other DNA
gttaactgggggctaaatccatggttatctgttggtgcagctggctggagcacactcaatagtcggaggggaaat

SEQ ID NO: 209752 - DNA, 75 bp, synthetic construct
  source 1..75: mol_type = other DNA
cgacagatgtttttgttgcccccggcgtcacgattggcgagggcacaatcgtcggtgcccgcagcagcgttttta

SEQ ID NO: 209753 - DNA, 75 bp, synthetic construct
  source 1..75: mol_type = other DNA
agtggattgcacaggttaatactgagaaaaacattctcagtttgcttctgcatccacgtcttggtgcggtaatac

SEQ ID NO: 209754 - DNA, 75 bp, synthetic construct
  source 1..75: mol_type = other DNA
atgccggtaattaacacgcatcagaatatcgctgcctttctcgacatgctggcggtgtccgaagggacggcgaat

SEQ ID NO: 209755 - DNA, 75 bp, synthetic construct
  source 1..75: mol_type = other DNA
agaagatggccgccgtagcggcgcaccgctgacatcacgccgtctgattctgagcagcataaagccgatcgaagg

SEQ ID NO: 209756 - DNA, 75 bp, synthetic construct
  source 1..75: mol_type = other DNA
taccgttatgaagattttgagtttggtggcacatttaaatacagtggctgggtagaagcatctgataacgatgaa

SEQ ID NO: 209757 - DNA, 75 bp, synthetic construct
  source 1..75: mol_type = other DNA
agcatcgttcacatgtccagggcaagttttgcccaactttttcgtgatgtttctggaaccacaccactggctgta

SEQ ID NO: 209758 - DNA, 75 bp, synthetic construct
  source 1..75: mol_type = other DNA
ttctggaaccacgccactggctgtattaacaaaattgcggctacaaatagcggcccagatgttttccagggaaac

SEQ ID NO: 209759 - DNA, 75 bp, synthetic construct
  source 1..75: mol_type = other DNA
ttcctggctggttaattccaggtgtaagcgccgccacgctggtggtggtggttgcactggcggcgtttctcgcgc

SEQ ID NO: 209760 - DNA, 75 bp, synthetic construct
  source 1..75: mol_type = other DNA
tcgtcgaatggccgtggttacggcgacaaatcccgccggttgctgcgcttatctttatgctctgtttcgccagct

SEQ ID NO: 209761 - DNA, 75 bp, synthetic construct
  source 1..75: mol_type = other DNA
ttattactgccaccgttactggcggtgatcgtcgatggagtaaaccgccagttgccagaagttctgtcacaaccg

SEQ ID NO: 209762 - DNA, 75 bp, synthetic construct
  source 1..75: mol_type = other DNA
gggtaaaagtaccctgctgaatttgattgccggttttctgacgccagccagcggttcgctgactatcgatggcgt

SEQ ID NO: 209763 - DNA, 75 bp, synthetic construct
  source 1..75: mol_type = other DNA
tgattattcctgcctgtactgtacaaaatgctgaagttaactggggtgatattgaaattcagaagctggtaccga

SEQ ID NO: 209764 - DNA, 75 bp, synthetic construct
  source 1..75: mol_type = other DNA
gtggcggaaatcagaaagactttaccgtcgacatgaactgcccctatagcctgggaaccatgaaagttacaataa

SEQ ID NO: 209765 - DNA, 75 bp, synthetic construct
  source 1..75: mol_type = other DNA
accgcttctggtggtgggttacttgtttatctttataacagtaatgcaggaaatattgggactgcgataacttta

SEQ ID NO: 209766 - DNA, 75 bp, synthetic construct
  source 1..75: mol_type = other DNA
ccgcaatctgctgacggcattgtgattttcaccaatgcgttaatggcgatcccttatgcgctgaaggtgctggaa

SEQ ID NO: 209767 - DNA, 75 bp, synthetic construct
  source 1..75: mol_type = other DNA
ggggggcggtccgcaggcgaccactatcgagctggcaatctatcaggcgctgagttacgactacgatcctgcccg

SEQ ID NO: 209768 - DNA, 75 bp, synthetic construct
  source 1..75: mol_type = other DNA
cgttgcgtattgcgctggcggcaggcgtattgtgcgtagtgctgaccatgatgctgctatggagcagtcgcgaac

SEQ ID NO: 209769 - DNA, 75 bp, synthetic construct
  source 1..75: mol_type = other DNA
ctgccgatggcgagccgcttattactccaggcactggaaaacattcccggcgaacaacgtcaacttgccgcccag

SEQ ID NO: 209770 - DNA, 75 bp, synthetic construct
  source 1..75: mol_type = other DNA
tttcgccctacggcctgcaaggtattttgctggcgcacgtattttttaatctgccgatggcgagccgcttattac

SEQ ID NO: 209771 - DNA, 75 bp, synthetic construct
  source 1..75: mol_type = other DNA
tgcgggcgcggcaaaaaatactggcgggtcaggcgctggagatgagcggcatgttgatcctcgccatgccgggta

SEQ ID NO: 209772 - DNA, 75 bp, synthetic construct
  source 1..75: mol_type = other DNA
atgaaagcgatggaagaagccatgatcaaggtgccggaaaactggattgtgcaaggtgactttgagcctgaatca

SEQ ID NO: 209773 - DNA, 75 bp, synthetic construct
  source 1..75: mol_type = other DNA
ggtggtgatggactggggtgaagcaaaagcagactttaccgatgcggttatcgataacgcttttgaaggcggtta

SEQ ID NO: 209774 - DNA, 75 bp, synthetic construct
  source 1..75: mol_type = other DNA
ctgaatttctcaattcagttattgattataatcataaagaagaaacagaaagtctttgtttggatattgcttatg

SEQ ID NO: 209775 - DNA, 75 bp, synthetic construct
  source 1..75: mol_type = other DNA
ttcaacgccgattatcgtccgagctatcatgccgaatctgcgaaagacggctggcagcgaatgttggaatggttt

SEQ ID NO: 209776 - DNA, 75 bp, synthetic construct
  source 1..75: mol_type = other DNA
ccggtgattaaaaacacggcctttttcccggatgttgatccgaagcgcatgcgcgaagaaatgcgcctcgagcag

SEQ ID NO: 209777 - DNA, 75 bp, synthetic construct
  source 1..75: mol_type = other DNA
tgaatgatgcgattaaagccggtatggctgaaaccaatgcggagcttgccctgtggcgggttgagcagatggtcg

SEQ ID NO: 209778 - DNA, 75 bp, synthetic construct
  source 1..75: mol_type = other DNA
agattactttattaataaggcgcctaaagtcctttatctggatgcagatatcatttgtcaggggactattgagcc

SEQ ID NO: 209779 - DNA, 75 bp, synthetic construct
  source 1..75: mol_type = other DNA
ttcatgttttcacagattatatcagtgataaagacaaattatatttttctgatttagcaaaacaatataattcaa

SEQ ID NO: 209780 - DNA, 75 bp, synthetic construct
  source 1..75: mol_type = other DNA
tctggcgaaactcgcccgggaactgggttggcaagacattcaggtcgctgataacgctgacaacgatgcgctttt

SEQ ID NO: 209781 - DNA, 75 bp, synthetic construct
  source 1..75: mol_type = other DNA
gggattgctaaaggttactttaactccggttttttatttatcaatacagaacaatgggcagtcgagctggtttct

SEQ ID NO: 209782 - DNA, 75 bp, synthetic construct
  source 1..75: mol_type = other DNA
agattactttattaataaaacacctaaagttctatatctggatgcagatattatttgtcagggaactatagaacc

SEQ ID NO: 209783 - DNA, 75 bp, synthetic construct
  source 1..75: mol_type = other DNA
atgcagcaggtttttttccaggagactgagtttctcaattcagttattgattacaattataaagtagaaacagaa

SEQ ID NO: 209784 - DNA, 75 bp, synthetic construct
  source 1..75: mol_type = other DNA
tcgcccgagctatcatgccgaatctgcgaaagatggctggcagcgaatgctggagtggttcaggctgtatggtgg

SEQ ID NO: 209785 - DNA, 75 bp, synthetic construct
  source 1..75: mol_type = other DNA
gatgcgattgtggcagggttcacctctatcccttcacaaggggataacatgcctgcttatcatgcccgtccaaag

SEQ ID NO: 209786 - DNA, 75 bp, synthetic construct
  source 1..75: mol_type = other DNA
ctcacaggtgcttgccgatctcgatcacgtcgccagttgggcgtcacgcaatggcggtgatgtgcatcgcttaat

SEQ ID NO: 209787 - DNA, 75 bp, synthetic construct
  source 1..75: mol_type = other DNA
gcgtggccgtcaattttgtcgctgcctgggcgattctggcgacggttatctgtgtggttgccggtggtgtcggcg

SEQ ID NO: 209788 - DNA, 75 bp, synthetic construct
  source 1..75: mol_type = other DNA
agcttctggatatttcaatgctggttttttactgataaatattgatgagtggaatctaaataacatttcgtcaaa

SEQ ID NO: 209789 - DNA, 75 bp, synthetic construct
  source 1..75: mol_type = other DNA
tggaatccgaaaagatctggcggactatgattttgctattgtggacggagcaggttcgctctcagtaatcacctc

SEQ ID NO: 209790 - DNA, 75 bp, synthetic construct
  source 1..75: mol_type = other DNA
tgctatctttgctgaaagaatctattgcagaaacaagcataccagcattaaaaacaggaacgtcgtacaggcagt

SEQ ID NO: 209791 - DNA, 75 bp, synthetic construct
  source 1..75: mol_type = other DNA
aaggcgacaagaaggccgacagcattgacagcaccattgatgagctgtggcgggatatgcgctgggcggtggcgc

SEQ ID NO: 209792 - DNA, 75 bp, synthetic construct
  source 1..75: mol_type = other DNA
gagcagaccgtttccgcgctgcgcctgaatgatgcgattaaagccggtatggctgaaaccaatgcggagcttgcc

SEQ ID NO: 209793 - DNA, 75 bp, synthetic construct
  source 1..75: mol_type = other DNA
tcgcccgagctatcatgccgaatctgcgaaagatggctggcagcgtatgctggaatggtttacacagtatggtgt

SEQ ID NO: 209794 - DNA, 75 bp, synthetic construct
  source 1..75: mol_type = other DNA
acaagaaggccgacagcattgacagcaccattgatgaactgtggcgggatatgcgctgggcggtggcacgtatcc

SEQ ID NO: 209795 - DNA, 75 bp, synthetic construct
  source 1..75: mol_type = other DNA
caccattgatgaactgtggcgggatatgcgctgggcggtggcgcgtatccaggacaagtcgcgctgcatcgtgag

SEQ ID NO: 209796 - DNA, 75 bp, synthetic construct
  source 1..75: mol_type = other DNA
acaagaaggccgacagcattgacagcaccattgatgagctgtggcgggatatgcgctgggcggtggcgcgtatcc

SEQ ID NO: 209797 - DNA, 75 bp, synthetic construct
  source 1..75: mol_type = other DNA
ggtgatcaccgaaggggaatggctgaaaagcctcaaccgctatccgtttgaggtgcaaagcctgccgagcgcctc

SEQ ID NO: 209798 - DNA, 75 bp, synthetic construct
  source 1..75: mol_type = other DNA
gagcggtatatcccttgtgtgaatatctctgcagagccggaggcgtattttcgtattgcaccggaagactggctg

SEQ ID NO: 209799 - DNA, 75 bp, synthetic construct
  source 1..75: mol_type = other DNA
ggtggtgtggcccagatgctggccccgaaggcaaagacgccggagtacaaaagcacggataacggcagacagaac

SEQ ID NO: 209800 - DNA, 75 bp, synthetic construct
  source 1..75: mol_type = other DNA
agccagaactccccgcacacaggcaacagataacggcaaacagaacacctatttttcttcgctggataatatggt

SEQ ID NO: 209801 - DNA, 75 bp, synthetic construct
  source 1..75: mol_type = other DNA
ctgtgctcatcactggtccgagtggtgacgatggcctggaaggtgtcagctacataccatacgaagatatcgttg

SEQ ID NO: 209802 - DNA, 75 bp, synthetic construct
  source 1..75: mol_type = other DNA
tgcagggggagattgtggcactggtccacagtcatcccggtggactgccctggctgagcgaggctgaccggcggc

SEQ ID NO: 209803 - DNA, 75 bp, synthetic construct
  source 1..75: mol_type = other DNA
ccggattttcatcgcggggatgactggtggcgtcacggtcagaatctctatcttgacaatatggaggcaacgggt

SEQ ID NO: 209804 - DNA, 75 bp, synthetic construct
  source 1..75: mol_type = other DNA
ggtggtgtggctcagacgctggccccgaaggcaaagacgccggagtacaaaagtacggataacggtaaacagaac

SEQ ID NO: 209805 - DNA, 75 bp, synthetic construct
  source 1..75: mol_type = other DNA
tggtgacggcgaactgctgcatcacattcctgaacaactgagtaaacgggagaggtataccggaaaatggcagcg

SEQ ID NO: 209806 - DNA, 75 bp, synthetic construct
  source 1..75: mol_type = other DNA
cactgggggccagcatgatactgggcggtgtggcccagatgctggccccgaaggcaaaaacaccggagtacaaaa

SEQ ID NO: 209807 - DNA, 75 bp, synthetic construct
  source 1..75: mol_type = other DNA
gccggaggggtattttcgtatcgccccggaagactggctgcgggcagagatgcagggggagattgtggcgctggt

SEQ ID NO: 209808 - DNA, 75 bp, synthetic construct
  source 1..75: mol_type = other DNA
gccggaggcgtattttcgtatcgcgccggaagactggctgcgggcagagatgcagggggagattgtggcgctggt

SEQ ID NO: 209809 - DNA, 75 bp, synthetic construct
  source 1..75: mol_type = other DNA
gatgtgctgctgtgctgctttggttcatcggtgccgaatcatgccgccatttactgcggcgacggcgagctgctg

SEQ ID NO: 209810 - DNA, 75 bp, synthetic construct
  source 1..75: mol_type = other DNA
gtgccctgtcgttacaggtgccgggattccgccgtcagatgaacgaaggctggtaccagatacgtattcgcggtg

SEQ ID NO: 209811 - DNA, 75 bp, synthetic construct
  source 1..75: mol_type = other DNA
gccggaggagtattttcgtatcgccccggaagactggctgcgggcagagatgcagggggagattgtggcactggt

SEQ ID NO: 209812 - DNA, 75 bp, synthetic construct
  source 1..75: mol_type = other DNA
ctcgcttctcttttggtgttaaaggctcatggctgccttcactgctgctgggcggcacccaggttggctggtttg

SEQ ID NO: 209813 - DNA, 75 bp, synthetic construct
  source 1..75: mol_type = other DNA
ccggtcttagctatcatgatttcttcctcgcagttctcatcggtaatcttctcctcggtatttacacttcatttc

SEQ ID NO: 209814 - DNA, 75 bp, synthetic construct
  source 1..75: mol_type = other DNA
gccggaggcgtattttcgtatcgccccggaagactggctgcgggcagagatgcagggggagattgtggccctggt

SEQ ID NO: 209815 - DNA, 75 bp, synthetic construct
  source 1..75: mol_type = other DNA
gccggaggcgtattttcgtatcgctccggaagactggctgcgggcagagatgcagggggagattgtggctctggt

SEQ ID NO: 209816 - DNA, 75 bp, synthetic construct
  source 1..75: mol_type = other DNA
gccggaggtgtattttcgtatcgccccggaagactggctgcgggcagagatgcagggggagattgtggctctggt

SEQ ID NO: 209817 - DNA, 75 bp, synthetic construct
  source 1..75: mol_type = other DNA
gtggctggtcagccggggtgacattcacaaattccgctgcgttccgcacctgaccggacggcgctttgcgcacgg

SEQ ID NO: 209818 - DNA, 75 bp, synthetic construct
  source 1..75: mol_type = other DNA
gactggctgcgggcagagatgcagggggagattgtggcgctggtccacagtcatcccggtggtctgccctggctg

SEQ ID NO: 209819 - DNA, 75 bp, synthetic construct
  source 1..75: mol_type = other DNA
gtccacagtcatcccggtgggctgccctggctgagcgaggctgaccggcggctgcagataaaaagcgcactgccc

SEQ ID NO: 209820 - DNA, 75 bp, synthetic construct
  source 1..75: mol_type = other DNA
tttctgccaccacgatgctgttttcactgggtgccagcatgattctgggtggtgtggcccagatgctggcaccga

SEQ ID NO: 209821 - DNA, 75 bp, synthetic construct
  source 1..75: mol_type = other DNA
ggtacagccctgagtgccggtggtttttctgccaccacgatgctgttttcactgggtgccagcatgattctgggt

SEQ ID NO: 209822 - DNA, 75 bp, synthetic construct
  source 1..75: mol_type = other DNA
tttctgccaccacgatgctgttttcactgggggccagcatgattctgggtggtgtggctcagatgctggccccga

SEQ ID NO: 209823 - DNA, 75 bp, synthetic construct
  source 1..75: mol_type = other DNA
agtcgtgcggcttcgtggtgagaacgccggagggggagcggtatatcccttgtgtgaatatctctgcagagccgg

SEQ ID NO: 209824 - DNA, 75 bp, synthetic construct
  source 1..75: mol_type = other DNA
tgaaatgctggttggttcacgacggatatcccaggacatcagcacccgtgatgagggcggtgacgggaaagtggt

SEQ ID NO: 209825 - DNA, 75 bp, synthetic construct
  source 1..75: mol_type = other DNA
gaatgttctgcccgttctgtacggtgaaatgcgcgtggggtcgcgggtggtctctcaggagatcagcacggcaga

SEQ ID NO: 209826 - DNA, 75 bp, synthetic construct
  source 1..75: mol_type = other DNA
cgcacacactccctctggcgtcacccggcatggctcgcatctgcctttacggggatttgcaacgatttggccgcc

SEQ ID NO: 209827 - DNA, 75 bp, synthetic construct
  source 1..75: mol_type = other DNA
atctggcgggaattgatatgccggattttgagcgtgaggatgactggtggcgcaacggtcagaacctttacctgg

SEQ ID NO: 209828 - DNA, 75 bp, synthetic construct
  source 1..75: mol_type = other DNA
aatcatgccgccatttactgcggcaacggtgaactgcttcaccatctgcctgaacaactgagtaaacgggagagg

SEQ ID NO: 209829 - DNA, 75 bp, synthetic construct
  source 1..75: mol_type = other DNA
atcatgccgccatatactgcggcaacggtgagctgcttcaccatctgcctgaacaactgagtaaacgggagaggt

SEQ ID NO: 209830 - DNA, 75 bp, synthetic construct
  source 1..75: mol_type = other DNA
cataaattccgctgtgtgccgcacctgaccgggcgtcgttttgaacacggggtgacggactgttacacgctgttc

SEQ ID NO: 209831 - DNA, 75 bp, synthetic construct
  source 1..75: mol_type = other DNA
ccggaagactggctgcgggcagagatgcagggggagattgtggcactggtccacagtcatcctggtgggctgccc

SEQ ID NO: 209832 - DNA, 75 bp, synthetic construct
  source 1..75: mol_type = other DNA
ggtgtgaactgcgcaggaatgtcggcaattttggcggtttcctttccattaataaactttcgcagtaaatcccgg

SEQ ID NO: 209833 - DNA, 75 bp, synthetic construct
  source 1..75: mol_type = other DNA
gggtgacggactgttacacgctgttccgggacgcttaccatctggcgggaattgagatgccggattttcatcgcg

SEQ ID NO: 209834 - DNA, 75 bp, synthetic construct
  source 1..75: mol_type = other DNA
tgacgggacggcgctttgcgcacggggtgacggactgttacacgctgttccgggatgcataccatctggcaggca

SEQ ID NO: 209835 - DNA, 75 bp, synthetic construct
  source 1..75: mol_type = other DNA
atcaaaaatgagtccgataccgttgaggtggagctggacgacaccgatggccgctggctggataagtggtatccg

SEQ ID NO: 209836 - DNA, 75 bp, synthetic construct
  source 1..75: mol_type = other DNA
tcacaagagggaaaaaacaaaaaactcagaaactcacggtttatcacccggatggcagtacatcgacggtgatta

SEQ ID NO: 209837 - DNA, 75 bp, synthetic construct
  source 1..75: mol_type = other DNA
tgccgacacactgaaggtcaacagccgcgtcagcgacccggacaccgcacggattaaagcagattcggcgctggc

SEQ ID NO: 209838 - DNA, 75 bp, synthetic construct
  source 1..75: mol_type = other DNA
ctataacaaaaatgcagcaacaaattcacgtatttttaacattattgtagcaggagatttttttcaggtgattat

SEQ ID NO: 209839 - DNA, 75 bp, synthetic construct
  source 1..75: mol_type = other DNA
ctccccccaaaagagagtattttcttgatctgtgacacgcttttgtcattctataacaaaaacgcagcaacaaat

SEQ ID NO: 209840 - DNA, 75 bp, synthetic construct
  source 1..75: mol_type = other DNA
gaagagcttcctctcgccacgatcatgtggcaactgacaaccaaagaactctgcggtcagggcctgctgtgcgtg

SEQ ID NO: 209841 - DNA, 75 bp, synthetic construct
  source 1..75: mol_type = other DNA
ctgcttttccctgcgtgacaccatcaaccgggtctataaatctgcaaaggtaaaacaccagaaaagcagcagtaa

SEQ ID NO: 209842 - DNA, 75 bp, synthetic construct
  source 1..75: mol_type = other DNA
atcgcgattacactggatgacaccgatggacgctggataaaagagtggtatcccggcaaaggcgatacgctggcg

SEQ ID NO: 209843 - DNA, 75 bp, synthetic construct
  source 1..75: mol_type = other DNA
gtggctgattgataaatctactcacagttttgtgcgcagcggctataccactgaaatcgacgtgtcacgcgggcc

SEQ ID NO: 209844 - DNA, 75 bp, synthetic construct
  source 1..75: mol_type = other DNA
aagtcacatcagcgttaaccggcgtcagcgatgtgctgacaccggtgttcactctgtggtatctgcagaaaaaca

SEQ ID NO: 209845 - DNA, 75 bp, synthetic construct
  source 1..75: mol_type = other DNA
agaagcacggcctgaagctggttggccagatagagccaattactattgatcgggtgacgcaatacgcggagacag

SEQ ID NO: 209846 - DNA, 75 bp, synthetic construct
  source 1..75: mol_type = other DNA
cgcgtcagcgacccggacagtgcccggattaaagcggattcggcgctggccaggcataacgaataccagcagaac

SEQ ID NO: 209847 - DNA, 75 bp, synthetic construct
  source 1..75: mol_type = other DNA
gtgggttatttaccgcagcctatggggcgcaacgtcaagcgtaatgaatcccgcaccattctggtgattgtcccg

SEQ ID NO: 209848 - DNA, 75 bp, synthetic construct
  source 1..75: mol_type = other DNA
aagtaattaatacgaagaataatcccgataaaagtatcgatcaaaatccatcttcgcatagggtacattgcgtca

SEQ ID NO: 209849 - DNA, 75 bp, synthetic construct
  source 1..75: mol_type = other DNA
gacggtggatgaatccatcgccagtatgaaggcgtcgttactgaaaaaaatcaaacgttctgcctacgtttatcg

SEQ ID NO: 209850 - DNA, 75 bp, synthetic construct
  source 1..75: mol_type = other DNA
atggcgatatggtgcagccgctgcgcgtgaaagtggatcgcgaagcacgccgcctggcgggttatcgttacggtc

SEQ ID NO: 209851 - DNA, 75 bp, synthetic construct
  source 1..75: mol_type = other DNA
ttttgttccgctaccccggcgttaaggggaaatgaggtcagcatggatactatcgagcttggcaacagcgaatct

SEQ ID NO: 209852 - DNA, 75 bp, synthetic construct
  source 1..75: mol_type = other DNA
atgaatgtacctcctgtaaacatcgaaacatggaagactctgggtgagatcaatcagaagctaaaccgtatcgct

SEQ ID NO: 209853 - DNA, 75 bp, synthetic construct
  source 1..75: mol_type = other DNA
tcgacgaataaaagcgtatggcttcgtaaattagctttgaataaaatcatccctttaataccagagattaatatc

SEQ ID NO: 209854 - DNA, 75 bp, synthetic construct
  source 1..75: mol_type = other DNA
atgtacaatttgcgcatgtattcacggattgggcgtcgtaatccgctgtacagcaccgcgattggtaaggtactg

SEQ ID NO: 209855 - DNA, 75 bp, synthetic construct
  source 1..75: mol_type = other DNA
gcgtgttctgcgtgatttcgccgacgccgaactggaccgcattcgcgttgactcacgcctgacttacgaagcatt

SEQ ID NO: 209856 - DNA, 75 bp, synthetic construct
  source 1..75: mol_type = other DNA
atgctgataaatgcagaaaaaaagaaattcagcattgtaaaaaaaatgcaaatcctgttatggattcaaagagga

SEQ ID NO: 209857 - DNA, 75 bp, synthetic construct
  source 1..75: mol_type = other DNA
ggagaaatattctctgaccctgaaattgtttgagttgggggctcgtgccttacaaaacgtcgatctcattcgtag

SEQ ID NO: 209858 - DNA, 75 bp, synthetic construct
  source 1..75: mol_type = other DNA
caaaattgactctatgtacaatttgcgcatgtattcacggattgggcgtcgtaatccgctgtacagcaccgcgat

SEQ ID NO: 209859 - DNA, 75 bp, synthetic construct
  source 1..75: mol_type = other DNA
tcgcggttccggtatttgaccgctttggcgtcgttattgctggtctgagtatctctttcccgacactccgtttct

SEQ ID NO: 209860 - DNA, 75 bp, synthetic construct
  source 1..75: mol_type = other DNA
agggaacggtcatccacattgtgccgcgactggccggcgccggaaagggaggactgcagattgtgctgggggcag

SEQ ID NO: 209861 - DNA, 75 bp, synthetic construct
  source 1..75: mol_type = other DNA
agggaacggtcatccacattgtgccgcgactggccggagccggaaagggcggactgcagattgtgctgggggcag

SEQ ID NO: 209862 - DNA, 75 bp, synthetic construct
  source 1..75: mol_type = other DNA
agggaacggtcatccacattgtgccgcgactggccggagccggaaagggaggactgcagattgtgctgggggccg

SEQ ID NO: 209863 - DNA, 75 bp, synthetic construct
  source 1..75: mol_type = other DNA
tgccctgtcgctgcaggtaccgggattccgcggtcagatgaacgaaggctggtatcagatacgtattgccggtga

SEQ ID NO: 209864 - DNA, 75 bp, synthetic construct
  source 1..75: mol_type = other DNA
agatgctggccccgaaggcaaaaacaccggattaccgcgcaacggataacggcagacagaacacgtacttttcct

SEQ ID NO: 209865 - DNA, 75 bp, synthetic construct
  source 1..75: mol_type = other DNA
agggaacggtcatccacattgtgccgcgactggccggggccggaaaggggggactgcagattgtgctgggggcgg

SEQ ID NO: 209866 - DNA, 75 bp, synthetic construct
  source 1..75: mol_type = other DNA
gagccggaaagggcggactgcagattgtgctgggggcagcagccatcgtgggctctttcttcaccgccggcgcaa

SEQ ID NO: 209867 - DNA, 75 bp, synthetic construct
  source 1..75: mol_type = other DNA
cgatatgctgaacttcctgcccgcaacgctggagctggcgggtgcggcgctggtgttaattctcctcacctccgt

SEQ ID NO: 209868 - DNA, 75 bp, synthetic construct
  source 1..75: mol_type = other DNA
gcaacgacgaacgcattctgtctggcgtcaccgccactggcacgcatctgccttcacggggatttgcaacgattt

SEQ ID NO: 209869 - DNA, 75 bp, synthetic construct
  source 1..75: mol_type = other DNA
tgaccgggcgtcgttttgagcacggggtgacggactgttacaccctgttccgggatgcataccatctggcgggga

SEQ ID NO: 209870 - DNA, 75 bp, synthetic construct
  source 1..75: mol_type = other DNA
tggcgcatgcccggcggtgtgcgcctgcggagtcgtgcggcttcgtgataagaacgccggagggggagcggtata

SEQ ID NO: 209871 - DNA, 75 bp, synthetic construct
  source 1..75: mol_type = other DNA
atggcaacgacgaacgcattctgtctggcgtcaccgccactggcacacatctgccttcacggggatttacaacga

SEQ ID NO: 209872 - DNA, 75 bp, synthetic construct
  source 1..75: mol_type = other DNA
tctgccacgcagtatgcctggcgacagtgtattgctgacacaaacgctacaaacccgacaaccgaccttgacgca

SEQ ID NO: 209873 - DNA, 75 bp, synthetic construct
  source 1..75: mol_type = other DNA
gggcatcggtgacattatctatcaaagccaggcaatggaagacctactccagcaggtagatattgtggcgaagag

SEQ ID NO: 209874 - DNA, 75 bp, synthetic construct
  source 1..75: mol_type = other DNA
ttctcactgggtgccagcatgatactgggcggtgtggcccagatgctggcaccgaaggcaaaaacaccggagtac

SEQ ID NO: 209875 - DNA, 75 bp, synthetic construct
  source 1..75: mol_type = other DNA
aactgctcgattgtggtcaatatatcattgataaaattgatatttcagcaccaccttccacggtaaatattgatg

SEQ ID NO: 209876 - DNA, 75 bp, synthetic construct
  source 1..75: mol_type = other DNA
aaaaggctttagaggccattctgtacgtcgcctctaaagcaccgatcccagatatctatcatgtcggaaaaattc

SEQ ID NO: 209877 - DNA, 75 bp, synthetic construct
  source 1..75: mol_type = other DNA
acgccttcggttacagcgtcaacaccttaaccatgttcgcgatggtactggcgatcggtctgctggtggatgacg

SEQ ID NO: 209878 - DNA, 75 bp, synthetic construct
  source 1..75: mol_type = other DNA
gcggagtcgtgcggcttcgtgataagcacgccggagggggagtggtatatcccttgtgtgaatatttctgcagag

SEQ ID NO: 209879 - DNA, 75 bp, synthetic construct
  source 1..75: mol_type = other DNA
agggctgactgccaccacgatgctgttctcactgggtgccagcatgatactgggtggtgtggcccagatgctggc

SEQ ID NO: 209880 - DNA, 75 bp, synthetic construct
  source 1..75: mol_type = other DNA
tggtgtggcccagatgctggccccgaaggcaaaaacaccggattaccgcgcaacggataacggtaaacagaacac

SEQ ID NO: 209881 - DNA, 75 bp, synthetic construct
  source 1..75: mol_type = other DNA
gtgaacacggcagcggaggccatccgtgccctgtcgcagcaggtgccgggattccgctgtcagatgaacgaaggc

SEQ ID NO: 209882 - DNA, 75 bp, synthetic construct
  source 1..75: mol_type = other DNA
accgaagctcgatggctatcagtatcgactggtcgataccgcgacgctggaagttgaagtgctgcgtgagcaggg

SEQ ID NO: 209883 - DNA, 75 bp, synthetic construct
  source 1..75: mol_type = other DNA
atcagctctctggtaaataaaacctccgggcgggtcagcgtatttggttacgatctcgagaaagatgtcgtgaac

SEQ ID NO: 209884 - DNA, 75 bp, synthetic construct
  source 1..75: mol_type = other DNA
agtttcagaaggaagtagataatactaccgttctattggacgatattataagcattcttgcgcttcttgaggctg

SEQ ID NO: 209885 - DNA, 75 bp, synthetic construct
  source 1..75: mol_type = other DNA
gaaaataaataaccgcatcggcaacaacaccatgcgttttttcccccgacttaaccgcatttcaacgagtctacc

SEQ ID NO: 209886 - DNA, 75 bp, synthetic construct
  source 1..75: mol_type = other DNA
tcacccgtatcggcgcgagtgccactgacgccctcagcgaccagatgctcatcacctttcgtgaaggcgcgccag

SEQ ID NO: 209887 - DNA, 75 bp, synthetic construct
  source 1..75: mol_type = other DNA
gatcaacagcgtatttacgcagttaagtgagcagggcattcaggtattaagtatgcgtaacaaagctaaccgtct

SEQ ID NO: 209888 - DNA, 75 bp, synthetic construct
  source 1..75: mol_type = other DNA
gataatatagcgggcgtttattacagacccgttcaaaagtatataaatggcacctggtataatgtagcgagcgtt

SEQ ID NO: 209889 - DNA, 75 bp, synthetic construct
  source 1..75: mol_type = other DNA
tatacatcgtcgacggggcgagcagtggcggtgaacctcgggtagttgatttcacagcaaaagcggctccgatga

SEQ ID NO: 209890 - DNA, 75 bp, synthetic construct
  source 1..75: mol_type = other DNA
atcaaagaattgcgtacgggcagtggcggcgatcctgtaatcgagtggccggcagtggagccgtcgcttgatgca

SEQ ID NO: 209891 - DNA, 75 bp, synthetic construct
  source 1..75: mol_type = other DNA
ttgcggtcatcatcgcaatactgtcttgtattatttttattaatataattcttcgatatggatttcacacaagca

SEQ ID NO: 209892 - DNA, 75 bp, synthetic construct
  source 1..75: mol_type = other DNA
tttagtcgaaaaactctcacctgctaatcaacaacgtgtttcgctgctaacccatacgctcattttattgctgtg

SEQ ID NO: 209893 - DNA, 75 bp, synthetic construct
  source 1..75: mol_type = other DNA
ttattcatttttatatgggagaaggaagttgtcctgcagctcagtttcggattaattataaaaatggcggtattt

SEQ ID NO: 209894 - DNA, 75 bp, synthetic construct
  source 1..75: mol_type = other DNA
gatattgaaaaagcagctaaccgtcatgggtggacattatcacgggaatgtcgatataggattcaaaccacactg

SEQ ID NO: 209895 - DNA, 75 bp, synthetic construct
  source 1..75: mol_type = other DNA
acggatggacgttatcacgagaatgtgttaccgcatacagacgacacttgaaaatgaactggatttctttgacca

SEQ ID NO: 209896 - DNA, 75 bp, synthetic construct
  source 1..75: mol_type = other DNA
atgaagcaagttaatttcagactggaagaacaacagcatgatgaacttctggattgtcttaaaacgctttatcca

SEQ ID NO: 209897 - DNA, 75 bp, synthetic construct
  source 1..75: mol_type = other DNA
ctgcgccgaatattattgcggcgcgaaaatccggcacgacaacgcccgttcagctatcgcgggttatcagtgaca

SEQ ID NO: 209898 - DNA, 75 bp, synthetic construct
  source 1..75: mol_type = other DNA
atatcggaagaactggagaaagagatcaagaccagcgacaccgggccactgttcaaagttgactatgaaaacttc

SEQ ID NO: 209899 - DNA, 75 bp, synthetic construct
  source 1..75: mol_type = other DNA
atgtcactggagcttgaattaactttcagcctggacaggccaggtaaaccggagaaagccgtcgcgacgtatcag

SEQ ID NO: 209900 - DNA, 75 bp, synthetic construct
  source 1..75: mol_type = other DNA
acggatggacgttatcacgagaatgtcgttaccgcatacagacgacacttgaaaatgaactggatttctttgacc

SEQ ID NO: 209901 - DNA, 75 bp, synthetic construct
  source 1..75: mol_type = other DNA
gttccgtgtgtattgttctgtcgcccgagtttttggcgacaaaccagtcacgatccggactctggacattggtgg

SEQ ID NO: 209902 - DNA, 75 bp, synthetic construct
  source 1..75: mol_type = other DNA
tcacgccatcctcaactgcaggcgaggttattccagtaatatcaccagtcaatcattgcgatgaatggcaaactt

SEQ ID NO: 209903 - DNA, 75 bp, synthetic construct
  source 1..75: mol_type = other DNA
cgtaattttcattatatcattgttaatgatcagaccagggttcttgataaagatggtttctatcaggatgcggaa

SEQ ID NO: 209904 - DNA, 75 bp, synthetic construct
  source 1..75: mol_type = other DNA
aaaatccgccacaacaacgcctgcgcaggtatcgtgggtcattagtgacagtgcttcggcgcattcagtggtcat

SEQ ID NO: 209905 - DNA, 75 bp, synthetic construct
  source 1..75: mol_type = other DNA
tcagcgcaggtgagaagccagggatggtgaatgtgcagcgactggagtttggacggggtaaagtatcaggagatt

SEQ ID NO: 209906 - DNA, 75 bp, synthetic construct
  source 1..75: mol_type = other DNA
gtgcttcggcgcattcagtggtcattaagcggatagccgagcgcggggagaatatccaggtctggatagatcctg

SEQ ID NO: 209907 - DNA, 75 bp, synthetic construct
  source 1..75: mol_type = other DNA
gccgcgctcaagaactcattggattactactatggatcgtctgtaatcccccctcaaaaccacggaggctatttg

SEQ ID NO: 209908 - DNA, 75 bp, synthetic construct
  source 1..75: mol_type = other DNA
tgaaaaggcacgcccggctaatggcgatgaaccctatatcgaaattatttgtatggattcagaaactgaaattca

SEQ ID NO: 209909 - DNA, 75 bp, synthetic construct
  source 1..75: mol_type = other DNA
tttgacctctatgagacgacttacaggttctggggccagagtccatgtggaaacggaatgttagacatcaccgta

SEQ ID NO: 209910 - DNA, 75 bp, synthetic construct
  source 1..75: mol_type = other DNA
tatctattctgttcttaaaaaagaagctgaaaaaaactgtcgctcacttgagggagaagtaaggtttgctcttgg

SEQ ID NO: 209911 - DNA, 75 bp, synthetic construct
  source 1..75: mol_type = other DNA
tggactactctcggcagccgaggtggcaatatggtcgatcaggactggatggattccagtaaccccggaacctgg

SEQ ID NO: 209912 - DNA, 75 bp, synthetic construct
  source 1..75: mol_type = other DNA
tgaaagatgccattgaccagaaatatgtaaaactcccttttatttattcctatgcaacaacggtgattcaaaaat

SEQ ID NO: 209913 - DNA, 75 bp, synthetic construct
  source 1..75: mol_type = other DNA
gtatgcgtaacaaagctaaccgtctggaagagctgtttgtttcactggttaatgaaaaacaaggagatcgcgcat

SEQ ID NO: 209914 - DNA, 75 bp, synthetic construct
  source 1..75: mol_type = other DNA
gctccaaggattatttgatctttacatccgtggtcgtgacaacagagcacgcactacaaaaccggagaatgtgga

SEQ ID NO: 209915 - DNA, 75 bp, synthetic construct
  source 1..75: mol_type = other DNA
gtggaggcccatgcaaccacgcctttctggcgcaccatggcaccgctaacccgtgatgccattagtgcaatgtgg

SEQ ID NO: 209916 - DNA, 75 bp, synthetic construct
  source 1..75: mol_type = other DNA
aaagatgacgtagtggccggtggtgatattgctctatcctgcgctgcaggtgcatggttgggagttgatgaggta

SEQ ID NO: 209917 - DNA, 75 bp, synthetic construct
  source 1..75: mol_type = other DNA
tggtttttatatatgcggccacaattaccagttttatatggctcgctgtggaacgtcttccccatcagttaaaat

SEQ ID NO: 209918 - DNA, 75 bp, synthetic construct
  source 1..75: mol_type = other DNA
accgtggacgactgttaccgcgtggtcttcacaccacacggtctggccctgtacaccctgacaccacgcagcgac

SEQ ID NO: 209919 - DNA, 75 bp, synthetic construct
  source 1..75: mol_type = other DNA
gccggtatcagaggccggttcagcgacgcggatgcatactatctggaccaggcctttccgctgctgatgaaacaa

SEQ ID NO: 209920 - DNA, 75 bp, synthetic construct
  source 1..75: mol_type = other DNA
cgttggtcatcgcaaatgatcaataccttgcagatccagtttcatcggcttattaagcatcaggttgaatactaa

SEQ ID NO: 209921 - DNA, 75 bp, synthetic construct
  source 1..75: mol_type = other DNA
aaaaatcagcttctcctcggcaaccacctcttcagagaggaagcagacggaagaaatgcttaaatcaaactcacc

SEQ ID NO: 209922 - DNA, 75 bp, synthetic construct
  source 1..75: mol_type = other DNA
tgccgtcccaccagttgaagcctcattagttgcttcatatcctgacaatctgaaaaaactggaagagcagcttca

SEQ ID NO: 209923 - DNA, 75 bp, synthetic construct
  source 1..75: mol_type = other DNA
attcgggaccgaggaggaccgggactggactatcaacacgctgagcctgacgcttgctgaaaacggcttttcggt

SEQ ID NO: 209924 - DNA, 75 bp, synthetic construct
  source 1..75: mol_type = other DNA
atcaaggagctgcgcacaggcagtggtggtgatcctgtcattgaatggccggcagttgagccgtcgctcgacgca

SEQ ID NO: 209925 - DNA, 75 bp, synthetic construct
  source 1..75: mol_type = other DNA
agattcgatgcggtgagtaaacccgcgggcgggtactggatattcctgccgcgcggcgcgggcgaatctgttagc

SEQ ID NO: 209926 - DNA, 75 bp, synthetic construct
  source 1..75: mol_type = other DNA
caacatcaggtgatcattcaacttgcgagattaacctgcatagctgatacctgtgatagctgcggctacgtttac

SEQ ID NO: 209927 - DNA, 75 bp, synthetic construct
  source 1..75: mol_type = other DNA
cggacctcgaagagtattgcttcattcattgccacggcgagttgaaaggtgcactccatcccggtttgcaattta

SEQ ID NO: 209928 - DNA, 75 bp, synthetic construct
  source 1..75: mol_type = other DNA
cgtcacgctgtatgcaaaagggctgacctgtaaagccaataccctcggcagttgtggttacgtttatctggctgt

SEQ ID NO: 209929 - DNA, 75 bp, synthetic construct
  source 1..75: mol_type = other DNA
tcatgaaattgagctttaccctgtggtatctgtaattgctggcgaatggattgttagatacgatcaaggcttaga

SEQ ID NO: 209930 - DNA, 75 bp, synthetic construct
  source 1..75: mol_type = other DNA
atgtctaacgaatgtattcacgttcatgctggtatcctgtcgcgccaactacggcagaccgtccttaaggatgat

SEQ ID NO: 209931 - DNA, 75 bp, synthetic construct
  source 1..75: mol_type = other DNA
cgcgtgaaaaaggcatgttactggcagcggtagtgttcctgtttagcgccggatattacgttctcatctggcagc

SEQ ID NO: 209932 - DNA, 75 bp, synthetic construct
  source 1..75: mol_type = other DNA
tgtgataaaagctcgccttctttaaacattaaaattgctgataacgagaaaatcgtgatcaacggcatcgcttca

SEQ ID NO: 209933 - DNA, 75 bp, synthetic construct
  source 1..75: mol_type = other DNA
aaacgttggcatttaacccagcaggtgattatgccgcctcagccgattgatccatggttttatggcggtcgtggc

SEQ ID NO: 209934 - DNA, 75 bp, synthetic construct
  source 1..75: mol_type = other DNA
gtgccggacgccattaaaggcagcagtccaacaccacagcaagatctggtacgcgtgatgaatgcgccagattta

SEQ ID NO: 209935 - DNA, 75 bp, synthetic construct
  source 1..75: mol_type = other DNA
acattgcggtgcaggataaaaacggcaacgaagtgtatacccgcaacggcaacattcagcaggacgaccaggggc

SEQ ID NO: 209936 - DNA, 75 bp, synthetic construct
  source 1..75: mol_type = other DNA
atggaccgcctgatttataccgccctgagcggtgcttctcagaccctgtacgagcagcagattagcgccaacaac

SEQ ID NO: 209937 - DNA, 75 bp, synthetic construct
  source 1..75: mol_type = other DNA
agctggctgcggcgttgggcaacgacccgaattttgcgaccaccatgactagcgcgcttgcgggtaagcaaccga

SEQ ID NO: 209938 - DNA, 75 bp, synthetic construct
  source 1..75: mol_type = other DNA
gaaatcggtaaatatgtttttggctatcgtgggcaggaaggcgctgtggtgtggatgatgcggatagggccgaaa

SEQ ID NO: 209939 - DNA, 75 bp, synthetic construct
  source 1..75: mol_type = other DNA
ttcatctgttcagcacgcagccgcgaacgctgtacgatctgctcgacgttcgcgcattgctggagggcgaatcgg

SEQ ID NO: 209940 - DNA, 75 bp, synthetic construct
  source 1..75: mol_type = other DNA
gcgaagtggttgcagagagtatcgaacggttaattatcgacggcgtactgaaggtcggtcagccacttccctcgg

SEQ ID NO: 209941 - DNA, 75 bp, synthetic construct
  source 1..75: mol_type = other DNA
atggcggttcaaaagaatgttatcaaaggcatactggcaggtacgtttgcgctaatgctcagcggttgtgtcact

SEQ ID NO: 209942 - DNA, 75 bp, synthetic construct
  source 1..75: mol_type = other DNA
tacgttggtcaggaggcacgctttggtggcaaagtggttgcggtacaaaaccagcaagggaaaacccgcctggaa

SEQ ID NO: 209943 - DNA, 75 bp, synthetic construct
  source 1..75: mol_type = other DNA
gtgtacgggtctgcaagtcaaaaattcccgccttgtgcatacgagctcttacaccatgataatttcggaaggaaa

SEQ ID NO: 209944 - DNA, 75 bp, synthetic construct
  source 1..75: mol_type = other DNA
gaaccgccagttcgaagcgcagatcaagatgatgaaaaccgccgaagatatcagcgacgcgggcaaccgcttatt

SEQ ID NO: 209945 - DNA, 75 bp, synthetic construct
  source 1..75: mol_type = other DNA
aagatattctcgaaagcatgggtgatgacgagatcgatatcgatgaaattgaagctgtcctcaaacggatccagc

SEQ ID NO: 209946 - DNA, 75 bp, synthetic construct
  source 1..75: mol_type = other DNA
aaattaatcgcggcggaaaacccagcgaaaccgctaagcgacagcaagttaacctctttgctgtcagaacaaggt

SEQ ID NO: 209947 - DNA, 75 bp, synthetic construct
  source 1..75: mol_type = other DNA
acagctccaacaggcaattcgtctgttgcagttgtcgacgctggaacttcagcaggagctacagcaggcgctgga

SEQ ID NO: 209948 - DNA, 75 bp, synthetic construct
  source 1..75: mol_type = other DNA
ctctatcgtcgatgccgttgatgaaaccggttatctgactgtcccgctggaagatattctcgaaagtataggcga

SEQ ID NO: 209949 - DNA, 75 bp, synthetic construct
  source 1..75: mol_type = other DNA
ctgctggcaaatcacgacttccgcacactgatgcgcgtaacacgcctgaaagaagatgtgctgaaagaagccgtc

SEQ ID NO: 209950 - DNA, 75 bp, synthetic construct
  source 1..75: mol_type = other DNA
atccaactctcccagttcgacaaaaccacgccgtggctggaagaggccagactcattataagcgatcaccttgat

SEQ ID NO: 209951 - DNA, 75 bp, synthetic construct
  source 1..75: mol_type = other DNA
tgagcggggcttctcagacgttgtacgagcagcaaattagcgccaacaacctggcgaacgtcaacaccaacggtt

SEQ ID NO: 209952 - DNA, 75 bp, synthetic construct
  source 1..75: mol_type = other DNA
tgtcgtccatcgccatgaaccgccagtttgaagcgcagatcaagatgatgaaaaccgccgaagatatcagcgacg

SEQ ID NO: 209953 - DNA, 75 bp, synthetic construct
  source 1..75: mol_type = other DNA
cctggcgaaaaatcctgaagggatgctgataactgccgacggcgttccggcccagcgcgatgaaaatatcaaagt

SEQ ID NO: 209954 - DNA, 75 bp, synthetic construct
  source 1..75: mol_type = other DNA
cttttacgctaccatgctaataatcaacacaataatcagcccaaccacggagttgaccagctccagcagtcccca

SEQ ID NO: 209955 - DNA, 75 bp, synthetic construct
  source 1..75: mol_type = other DNA
cggaagaaaaagcataccggctggaactgggttacagggacgggatgacaactatccggtcatttaaggaactgg

SEQ ID NO: 209956 - DNA, 75 bp, synthetic construct
  source 1..75: mol_type = other DNA
atggctattgccgcaagttacacaatgcatctctattgtgactgccgccagtgtacggaaggtgtatatccagtg

SEQ ID NO: 209957 - DNA, 75 bp, synthetic construct
  source 1..75: mol_type = other DNA
tcgtggctggccctatggctacggtagatggggctggtataatcctggtcccgcgagagtacaaactgttgtaac

SEQ ID NO: 209958 - DNA, 75 bp, synthetic construct
  source 1..75: mol_type = other DNA
tgacgccctcagtgaccagatgctcatcacctttcgtgaaggcgcgccagcggacctcgaagagtattgcttcat

SEQ ID NO: 209959 - DNA, 75 bp, synthetic construct
  source 1..75: mol_type = other DNA
gccgtgctggtcctggtcgcgcttggatttccctatgtcgttccatttttttctattaacccaggagttcatcat

SEQ ID NO: 209960 - DNA, 75 bp, synthetic construct
  source 1..75: mol_type = other DNA
atgagcgtcatggaggggcgagagggaagcggaaacgccaacatccgccgttacatggccgcgaccagaagaaag

SEQ ID NO: 209961 - DNA, 75 bp, synthetic construct
  source 1..75: mol_type = other DNA
tacaagctgattttctggatcgtggccgtgctggtcctggtcgcgcttggatttccctatgtcgttccatttttc

SEQ ID NO: 209962 - DNA, 75 bp, synthetic construct
  source 1..75: mol_type = other DNA
cgcccgatcttcatcggcgcagcgctggtcgcgctgtttttcgcctggcggcgcatctaccgcccggcgcaagcc

SEQ ID NO: 209963 - DNA, 75 bp, synthetic construct
  source 1..75: mol_type = other DNA
ctggaaaacgtcattgagcgcgcggtattgctaacacgcggtaacgtgctgcagctgtcattcattgccagatat

SEQ ID NO: 209964 - DNA, 75 bp, synthetic construct
  source 1..75: mol_type = other DNA
cgtctggggctgaaacgcacgaccctgctgtcacggatgaagcgactgggaattgataaatcggcattgatttaa

SEQ ID NO: 209965 - DNA, 75 bp, synthetic construct
  source 1..75: mol_type = other DNA
gcgacaggacgccgagtttgtgtcctcggaatctcttctttctgaacttgtaggcaaaagggagctcatattacg

SEQ ID NO: 209966 - DNA, 75 bp, synthetic construct
  source 1..75: mol_type = other DNA
gtgctggaaccctatcgcccgatcttcatcggcgcagcgctggtcgcgctgtttttcgcctggcggcgcatctac

SEQ ID NO: 209967 - DNA, 75 bp, synthetic construct
  source 1..75: mol_type = other DNA
cgctgtcgataacgccctcgcctatcaggaaattcatcgtctgaaagaacgactggttgatgaaaacctcgccct

SEQ ID NO: 209968 - DNA, 75 bp, synthetic construct
  source 1..75: mol_type = other DNA
ctgcaacggtcgtcgctcaggaaggcgaagatgaatatcaactgattgttcgcgtattaaaagagacgaacggcg

SEQ ID NO: 209969 - DNA, 75 bp, synthetic construct
  source 1..75: mol_type = other DNA
ggagcaatccagcttgcgaaaggaaaaggcgctttgtatcaccgtatgatgcaaagaggtcaaacctaccaccag

SEQ ID NO: 209970 - DNA, 75 bp, synthetic construct
  source 1..75: mol_type = other DNA
cccattaccatcgaagtggtttccatggactggaaatggttcttcatctacccggaacagggctttgctaccgtg

SEQ ID NO: 209971 - DNA, 75 bp, synthetic construct
  source 1..75: mol_type = other DNA
catccgctggcggcaaaagaagtattaacaccggaagatttccacggtgagaactacatcagcctttcccgtagc

SEQ ID NO: 209972 - DNA, 75 bp, synthetic construct
  source 1..75: mol_type = other DNA
cacctgctacacacctcacagccaaccgtcagccgcgaactggcgcgctttgagaaggtgatcgggctgaaattg

SEQ ID NO: 209973 - DNA, 75 bp, synthetic construct
  source 1..75: mol_type = other DNA
atgcaaggccgcctacaattcgttatcatgcccgctaaatttaacgacaaggccgtggaaattatcatgctgtgg

SEQ ID NO: 209974 - DNA, 75 bp, synthetic construct
  source 1..75: mol_type = other DNA
acgctaaccgaatgggtgcgttccggtggcgcggcgcagagcttccagttactcgatgaagctgaactgaaatcg

SEQ ID NO: 209975 - DNA, 75 bp, synthetic construct
  source 1..75: mol_type = other DNA
gatgtgattaacaagtttatggctcacggtaagagcatgaacatgacccagccagaaggtgagcacagcgcacac

SEQ ID NO: 209976 - DNA, 75 bp, synthetic construct
  source 1..75: mol_type = other DNA
atgattacgcacaacttcaataccctggacttactcaccagtcctgtctggatcgtttcgccctttgaggaacag

SEQ ID NO: 209977 - DNA, 75 bp, synthetic construct
  source 1..75: mol_type = other DNA
atgagcgtcatggaagggcgagaggggagcggaaacgccaacattcgtcgttacatggccgcgaccagaaggaag

SEQ ID NO: 209978 - DNA, 75 bp, synthetic construct
  source 1..75: mol_type = other DNA
aggcgtttagtgagcatttacaagcggggttaccgaaactggtcacttctcttgacgcgattttgtcgtcagcta

SEQ ID NO: 209979 - DNA, 75 bp, synthetic construct
  source 1..75: mol_type = other DNA
gtaaaccaatgacaggaaaggattctaaagtttcatcactttgccatgaattaacacatttagtcagatatggcc

SEQ ID NO: 209980 - DNA, 75 bp, synthetic construct
  source 1..75: mol_type = other DNA
caaaagaaacaaaaagtgcgcgagcagttattcaagaagccgtggacagaatgaaatttatatgtgataaattat

SEQ ID NO: 209981 - DNA, 75 bp, synthetic construct
  source 1..75: mol_type = other DNA
tttttattatttcactaggggcttacttggggttgcattactttcttggctttcttatttttgtttaaacaattc

SEQ ID NO: 209982 - DNA, 75 bp, synthetic construct
  source 1..75: mol_type = other DNA
aaggcatcatttatagaaggtgacattagaaatagaacagtacttaatcaaatctttaatagttataatattgat

SEQ ID NO: 209983 - DNA, 75 bp, synthetic construct
  source 1..75: mol_type = other DNA
agatattttaatcctgttggtgctgatccttctggttgtataggtgaatccccaataggaactccaaataatatt

SEQ ID NO: 209984 - DNA, 75 bp, synthetic construct
  source 1..75: mol_type = other DNA
tcttggtcatctccgttgaaagccaataaatatttaaaatggcaagctaaacgaagtttagatcaaatgttagct

SEQ ID NO: 209985 - DNA, 75 bp, synthetic construct
  source 1..75: mol_type = other DNA
tctggcatattataataacaatgttattgggactttaacattaattgattgtgcgctgaattttaaaattaaaaa

SEQ ID NO: 209986 - DNA, 75 bp, synthetic construct
  source 1..75: mol_type = other DNA
acaatttaggtactggtcaaggatactctgtattagagttgattaagatatttgaagaagttacgggaatagcag

SEQ ID NO: 209987 - DNA, 75 bp, synthetic construct
  source 1..75: mol_type = other DNA
gatagtcgattttatagaggtgatatacttgacaaagagctcttacgcaaaatattcaaagaaaacactatttct

SEQ ID NO: 209988 - DNA, 75 bp, synthetic construct
  source 1..75: mol_type = other DNA
atcctagtggtcttattggggaggacccgaacggcattccaaataatcttgtcccttatatttctcaggttgcta

SEQ ID NO: 209989 - DNA, 75 bp, synthetic construct
  source 1..75: mol_type = other DNA
aaaattgtttcttatcaaggcgatatccgtgataaaagtttgcttagtgaaattttttatggacaccatattgat

SEQ ID NO: 209990 - DNA, 75 bp, synthetic construct
  source 1..75: mol_type = other DNA
gctgcttggcagcgtagcctgcggtggtttcgcgtcgctgaccgatgccgtcgctgccatgagccgccacggcca

SEQ ID NO: 209991 - DNA, 75 bp, synthetic construct
  source 1..75: mol_type = other DNA
aaacaattttttaaccaaaaaccagaacttaaagcatgtgccaatagatttaaacatgacgttattgcatattta

SEQ ID NO: 209992 - DNA, 75 bp, synthetic construct
  source 1..75: mol_type = other DNA
ctggatatatcggatctcatacggctattgaattactgaatgcaggtcatgagattatcgttctggacaatttca

SEQ ID NO: 209993 - DNA, 75 bp, synthetic construct
  source 1..75: mol_type = other DNA
gatggaacaggggtacgcgactttatccatgtagtagatcttgcctcaggccatgttagtgctttaaggcatatt

SEQ ID NO: 209994 - DNA, 75 bp, synthetic construct
  source 1..75: mol_type = other DNA
tgggcaaaccagacgctcagtaatgcccatcgcgggatcctgatgggattagtcagaacaccaccggaagagcgc

SEQ ID NO: 209995 - DNA, 75 bp, synthetic construct
  source 1..75: mol_type = other DNA
tttgccaattgaatattatagcaataatgtatatggcactatgaatcttgtaaaatgcatgctaaaaaatagagt

SEQ ID NO: 209996 - DNA, 75 bp, synthetic construct
  source 1..75: mol_type = other DNA
aaaaaaatatcttttttcaacgctgatattagagatgaaatagaattaaataaaatttttacaagatgtaatatt

SEQ ID NO: 209997 - DNA, 75 bp, synthetic construct
  source 1..75: mol_type = other DNA
caggctatattggctcgcatactagtttatgtcttctgaataaaggttacaatgttgtaatcattgacaacttaa

SEQ ID NO: 209998 - DNA, 75 bp, synthetic construct
  source 1..75: mol_type = other DNA
ataacctaggcacaggtaaaggatattcagtaaaagagattattgatgcctttcaaaaaataaccgaaataaaaa

SEQ ID NO: 209999 - DNA, 75 bp, synthetic construct
  source 1..75: mol_type = other DNA
cagaatatattggctcacatacagtattgcaacttttaaatcataactatgatgttattgttattgataatttta

SEQ ID NO: 210000 - DNA, 75 bp, synthetic construct
  source 1..75: mol_type = other DNA
tgagccgtgaccctgtgcacgccaacgacagtatcagcccgatatttgacaaggagaaagagcagaaccgcctga

SEQ ID NO: 210001 - DNA, 75 bp, synthetic construct
  source 1..75: mol_type = other DNA
gccaattgaatactatacaactaatgttgttggaacgttgaacatattacaggcgatgactgattgtgatgtgaa

SEQ ID NO: 210002 - DNA, 75 bp, synthetic construct
  source 1..75: mol_type = other DNA
cgttaggttggattgctcaacgtggtttgactgagatggtacaggatgcctggcgttggcaaagtctgaatccga

SEQ ID NO: 210003 - DNA, 75 bp, synthetic construct
  source 1..75: mol_type = other DNA
cgaatctgcaacgctggtatcagcaactcaccgaacgccccgctgtgcgcaaagtggtgatgatccccgttagct

SEQ ID NO: 210004 - DNA, 75 bp, synthetic construct
  source 1..75: mol_type = other DNA
tcatcacccgaaaaagcaaataagtatctcaattggaaagctaaaagggagttggaaacaatgcttggggatgcc

SEQ ID NO: 210005 - DNA, 75 bp, synthetic construct
  source 1..75: mol_type = other DNA
aaagttactttctatgagttgaacatcaacaatgaaaaagaagttaatcaaattctaaaaaaacacaaatttgat

SEQ ID NO: 210006 - DNA, 75 bp, synthetic construct
  source 1..75: mol_type = other DNA
aggtattttaatccagtgggagcacattcttctggattaataggagaagaccctaaaggtattccgtcaaatttg

SEQ ID NO: 210007 - DNA, 75 bp, synthetic construct
  source 1..75: mol_type = other DNA
ctacatcggcagcgacttataacaagggaattatagttaagggtacctcatcccggaccgatgatggattgctta

SEQ ID NO: 210008 - DNA, 75 bp, synthetic construct
  source 1..75: mol_type = other DNA
agtcagtttacgcccggaaaaatcacaggaacagcaccagccagaaagattactctttacgcaaaacttggatat

SEQ ID NO: 210009 - DNA, 75 bp, synthetic construct
  source 1..75: mol_type = other DNA
cccgtgggcagagcggattaatatccatacggcggatattcagcagtggataacccagcaggccgcgcgttttga

SEQ ID NO: 210010 - DNA, 75 bp, synthetic construct
  source 1..75: mol_type = other DNA
gggtgagcagattgtcaactcagcctctgtttgcctttgcagttgctgcacaggtgctgacgtggtgtgagacgc

SEQ ID NO: 210011 - DNA, 75 bp, synthetic construct
  source 1..75: mol_type = other DNA
tcaatttatataccctcggtgaaataaccattggtgcacattcggtgatatcgcaaaaaagttatttatgcaccg

SEQ ID NO: 210012 - DNA, 75 bp, synthetic construct
  source 1..75: mol_type = other DNA
cgtcacaatcggcgacggcaccgtcgtgggtgcacgaagcagtgtttttaaatcgcttccggcaaatgtggtttg

SEQ ID NO: 210013 - DNA, 75 bp, synthetic construct
  source 1..75: mol_type = other DNA
catacggcggatattcagcagtggatcacacagcagacagtacgcttcgatttaatcatcagtaacccaccttac

SEQ ID NO: 210014 - DNA, 75 bp, synthetic construct
  source 1..75: mol_type = other DNA
tagcgatcgcttagtgattcgtgggccagaccagaactattccgaagcgtatacggcgctgacccaggcttttta

SEQ ID NO: 210015 - DNA, 75 bp, synthetic construct
  source 1..75: mol_type = other DNA
gtcgtaatggatttacttttaaacagttttttgttgctcacgatcgctgtgcgatgaaagtgggaacggatggca

SEQ ID NO: 210016 - DNA, 75 bp, synthetic construct
  source 1..75: mol_type = other DNA
cccgtggttagagagaattaacgtccatacggcggatattcagcagtgggtaacacagcagaccgcgcgctttga

SEQ ID NO: 210017 - DNA, 75 bp, synthetic construct
  source 1..75: mol_type = other DNA
gagctggaaagtgaagctgccactcaggcgcaggaaaatgtcgcccagtccccgtggttagagagaattaacgtc

SEQ ID NO: 210018 - DNA, 75 bp, synthetic construct
  source 1..75: mol_type = other DNA
tttaatcatcagtaacccaccttactatcagcagggagtagagtgcgcgacacctcaacgggaacaggctcgcta

SEQ ID NO: 210019 - DNA, 75 bp, synthetic construct
  source 1..75: mol_type = other DNA
cctttgtccggcaccagttacggtattgccgggctgctgatgctggcagtcagtcaccggctgtaccgagcggaa

SEQ ID NO: 210020 - DNA, 75 bp, synthetic construct
  source 1..75: mol_type = other DNA
tccatcagcctgcagtgcgaaaagtgctgggggataatttgctaatggcgatgggggcgatgctggaagaagcgc

SEQ ID NO: 210021 - DNA, 75 bp, synthetic construct
  source 1..75: mol_type = other DNA
cgctgcgtcagtcgtgtctggtctggccgaactcgttctggtttggcattccggcgacgcgcggtgagcagggat

SEQ ID NO: 210022 - DNA, 75 bp, synthetic construct
  source 1..75: mol_type = other DNA
acggcggaaagcatcagtcatcagagttaccgtcgattgctttcccgcgcccgtgaatatgtgctggaaaacatg

SEQ ID NO: 210023 - DNA, 75 bp, synthetic construct
  source 1..75: mol_type = other DNA
ttagggctggattctgaggggccggataatggcaaacatgatgtgaattttaccagtgctgtttactcaccaccg

SEQ ID NO: 210024 - DNA, 75 bp, synthetic construct
  source 1..75: mol_type = other DNA
agtggaaacaggcgtcggtattaaccgaggatgttgtcatgcgtgatgctgaaaattctgcggtaaaacgtatac

SEQ ID NO: 210025 - DNA, 75 bp, synthetic construct
  source 1..75: mol_type = other DNA
cagtaatcgaattacccaatttttcagaactcctcccgaaggttgaatctgatgatgggcgattttcaaaaccaa

SEQ ID NO: 210026 - DNA, 75 bp, synthetic construct
  source 1..75: mol_type = other DNA
gctttagcgagctgaatgacgcggaagatcaggcgcaacgcttcctggatcaggttgccgcgaaagacgcaggtg

SEQ ID NO: 210027 - DNA, 75 bp, synthetic construct
  source 1..75: mol_type = other DNA
tttcaaaaagacggtaggtgattaccttgcatgggaggtctcgcaattactgaaaaaacaaggtgaaaacaattt

SEQ ID NO: 210028 - DNA, 75 bp, synthetic construct
  source 1..75: mol_type = other DNA
gctgccggtgacggcaaatacgccggtcggggaagaccccggctaccacgacgatttcctgcgtatccgcgacga

SEQ ID NO: 210029 - DNA, 75 bp, synthetic construct
  source 1..75: mol_type = other DNA
ggaaccgagtttgaattaagtacgccggacgattacacgatcctgggcgtagtgctttctgaagatgtcatcacc

SEQ ID NO: 210030 - DNA, 75 bp, synthetic construct
  source 1..75: mol_type = other DNA
cacgaagtatttatcaatggtagtgaacggatgtggtcttcatcccgactgattattgattttcagcccacaatt

SEQ ID NO: 210031 - DNA, 75 bp, synthetic construct
  source 1..75: mol_type = other DNA
aaacacaaatgggtggcgatgggtgaagaatacaaactcgatggtgttaaaccaccgaagaaagagaccatggaa

SEQ ID NO: 210032 - DNA, 75 bp, synthetic construct
  source 1..75: mol_type = other DNA
tgcgtttataccgaagggtaatctttcgaatacccctcccccttctgccgacctggtggctgctgtcctcgcgga

SEQ ID NO: 210033 - DNA, 75 bp, synthetic construct
  source 1..75: mol_type = other DNA
atgtctgttgttgaaaatcagcatattgcgctgtctttaactgatgatgataaatgtttatttgaagcagcggca

SEQ ID NO: 210034 - DNA, 75 bp, synthetic construct
  source 1..75: mol_type = other DNA
tcacccggcacagtatgccccgtttcttgaggtgctcgaaggcttcgctaaagagcttgaggataatttcagtta

SEQ ID NO: 210035 - DNA, 75 bp, synthetic construct
  source 1..75: mol_type = other DNA
gacccgcgatatgacccgcagggaagaggtcaacatcaaccatgcgacagataaatcgcgtgacgttgatgacga

SEQ ID NO: 210036 - DNA, 75 bp, synthetic construct
  source 1..75: mol_type = other DNA
acacgggttccactgctgttgcagcggaaggtggctccacctccaccggaggaactgagcgggatattgaacagg

SEQ ID NO: 210037 - DNA, 75 bp, synthetic construct
  source 1..75: mol_type = other DNA
cgttaattcaggctgttccgggcggtgcgtatattccgcagggtaatctgtcgaatacgccccctccttctgccg

SEQ ID NO: 210038 - DNA, 75 bp, synthetic construct
  source 1..75: mol_type = other DNA
ctatgcgacgctggcggcggacgctatgaaaagcgcgctttccggtatcagcagcaatatcgtcgacatgctcaa

SEQ ID NO: 210039 - DNA, 75 bp, synthetic construct
  source 1..75: mol_type = other DNA
atctgggaaattaacaggaattaatgcagctcagaaagagcgacttgagcaacttgctactgagatagatcgcct

SEQ ID NO: 210040 - DNA, 75 bp, synthetic construct
  source 1..75: mol_type = other DNA
tcatgaaagccggtaataatcttcctctcagtcaggccactgtaggtgcgccttcttcttccagcaaaaattatt

SEQ ID NO: 210041 - DNA, 75 bp, synthetic construct
  source 1..75: mol_type = other DNA
cccccgccccggaatgtcgccggctggttgagctggctgatgtccgggaaaccgatcgcattctggaacccagcg

SEQ ID NO: 210042 - DNA, 75 bp, synthetic construct
  source 1..75: mol_type = other DNA
ggcaccattaagtcaggcagaaacgggatggcagccgattcaggaaaccatccgtaaaagtgataaagataaccg

SEQ ID NO: 210043 - DNA, 75 bp, synthetic construct
  source 1..75: mol_type = other DNA
gtgaaaggctgagggaaaggctgagtatagagcgcagttatctcgatcagctgcgcgatctgcaaaagcagtatc

SEQ ID NO: 210044 - DNA, 75 bp, synthetic construct
  source 1..75: mol_type = other DNA
attcctgcgcaccctgctggctattcagctcgatcaactgagaacgtttcttgccggcacgcctgcctccacgct

SEQ ID NO: 210045 - DNA, 75 bp, synthetic construct
  source 1..75: mol_type = other DNA
tatctgaatgggtaatgcatagccagacagagcacccagccatcgatgctttcctggctgaagtacgggcgcagg

SEQ ID NO: 210046 - DNA, 75 bp, synthetic construct
  source 1..75: mol_type = other DNA
atacagcgcccacaggatagttgcgaaagcattctgtacagggttctgtgatggcttggtagttaatcacaaaaa

SEQ ID NO: 210047 - DNA, 75 bp, synthetic construct
  source 1..75: mol_type = other DNA
gaacatgtaaataatccatatatcaaaagcaatctggaaatgctgctaccaatgaaagatattggaaaaccaact

SEQ ID NO: 210048 - DNA, 75 bp, synthetic construct
  source 1..75: mol_type = other DNA
aaaacgatgagctaaagcttcaaaaccaagaactttcaagcaaaatccaacaaaataaaattgacgaaaaagttc

SEQ ID NO: 210049 - DNA, 75 bp, synthetic construct
  source 1..75: mol_type = other DNA
agtgcgtgaattgcaaaaaatccataactctcattcggagcaaatggaaaagttgaatgaaaaattattaaatga

SEQ ID NO: 210050 - DNA, 75 bp, synthetic construct
  source 1..75: mol_type = other DNA
gatgctattgatgtgtttaaagattggaacatgtctgctaattctgcattcgcagataaaatgcagccacctcca

SEQ ID NO: 210051 - DNA, 75 bp, synthetic construct
  source 1..75: mol_type = other DNA
ggtatcgaagctgtgccagccattgatggcatataacagggctattatttctgtatgcctcatgattcttgatga

SEQ ID NO: 210052 - DNA, 75 bp, synthetic construct
  source 1..75: mol_type = other DNA
tttgtgctgggttttcagaacatcgcccagatggaagaaatttatggtcctaaagctgctgcggggctgtttgac

SEQ ID NO: 210053 - DNA, 75 bp, synthetic construct
  source 1..75: mol_type = other DNA
caggcaggtgttgagcgacagttacaccctgtactgcggtcaactgctgaagcaggaactggttattgcaggatg

SEQ ID NO: 210054 - DNA, 75 bp, synthetic construct
  source 1..75: mol_type = other DNA
ggtgaaaaggacagcagaatgctgatgaatgtggggatgaatgcggaaattaaggataatatgcgttttggcttg

SEQ ID NO: 210055 - DNA, 75 bp, synthetic construct
  source 1..75: mol_type = other DNA
gctggcaactggtgagaaagaacatctgccagcatggacatactctgatatccgtacgcgcctctatcccgcagc

SEQ ID NO: 210056 - DNA, 75 bp, synthetic construct
  source 1..75: mol_type = other DNA
ccgacattcgaacacgattgtatccggctgctctggcaaaagcttttccggataagcctttatcatacgagatta

SEQ ID NO: 210057 - DNA, 75 bp, synthetic construct
  source 1..75: mol_type = other DNA
ttgtcgataatacgattcgccagagtgcttactgtttcccacggttaacggagctggaagtgctgacatcagcgt

SEQ ID NO: 210058 - DNA, 75 bp, synthetic construct
  source 1..75: mol_type = other DNA
ttggtgatttactggctaatctgcgcagttcgcagggattcagtagcgcgttttatggtgaagagattagcgaga

SEQ ID NO: 210059 - DNA, 75 bp, synthetic construct
  source 1..75: mol_type = other DNA
ttttactgataggtatttcttctattcacagtgacagggtcattctggctatgaaggactatctggtaggtgggc

SEQ ID NO: 210060 - DNA, 75 bp, synthetic construct
  source 1..75: mol_type = other DNA
ttgcagaaaagctgtgatatgacacaaatttctgccgattataacgcgttgtttatcggtgatgaatgcgcagta

SEQ ID NO: 210061 - DNA, 75 bp, synthetic construct
  source 1..75: mol_type = other DNA
ttaacccgcgaaggcgtgctggggaagtggatctggcaactggcggaagaagatgctttaccgctaaaggaaatt

SEQ ID NO: 210062 - DNA, 75 bp, synthetic construct
  source 1..75: mol_type = other DNA
gagttggaggtgttgacgtcagcgtcgttaaaatatgcaattgccgagcgtggttatcggttaggcagttacctt

SEQ ID NO: 210063 - DNA, 75 bp, synthetic construct
  source 1..75: mol_type = other DNA
tcggttatgaaaccaaagacctggttgatgtcgtaaccggtgagatcaccactatccagtcgttacgccatacct

SEQ ID NO: 210064 - DNA, 75 bp, synthetic construct
  source 1..75: mol_type = other DNA
atgactcttccagtagacggcatcaagctccatcgcggcaacttcgcggccatcggccagcagattcagccattg

SEQ ID NO: 210065 - DNA, 75 bp, synthetic construct
  source 1..75: mol_type = other DNA
aactattactctgtctcactacatgctggttattatattacacctgcagctaaagtttatgtcgaaggaacatgg

SEQ ID NO: 210066 - DNA, 75 bp, synthetic construct
  source 1..75: mol_type = other DNA
cccgtgctaccggaatcagactaccagaaggcaaacagaagaccacgcagtcgggcagcgtcatcgtgttaatgc

SEQ ID NO: 210067 - DNA, 75 bp, synthetic construct
  source 1..75: mol_type = other DNA
gtgttacagacggcattggctttacgcttacaatgctttcgcatggtgcttaaaccgtggtgcgagagacgcagt

SEQ ID NO: 210068 - DNA, 75 bp, synthetic construct
  source 1..75: mol_type = other DNA
tcggttatgaaaccaaggacctggttgatgtcgtaaccggtgaaatcaccactatccagtcgttacgccatacct

SEQ ID NO: 210069 - DNA, 75 bp, synthetic construct
  source 1..75: mol_type = other DNA
atgctggtggagtggggaccggttatcccggaagggaaggtcgagatcactataagtaagtacgagaaaacggcg

SEQ ID NO: 210070 - DNA, 75 bp, synthetic construct
  source 1..75: mol_type = other DNA
acatctgcttttttacaaaaaaaaacaaccccgccagtgtcagggaacgttttaacctgaaccaggggagaatgt

SEQ ID NO: 210071 - DNA, 75 bp, synthetic construct
  source 1..75: mol_type = other DNA
atcgcaggccatgcccgcagccaggggctgatagttgtgactaacaacatccgggaatttgaacgtatggacggt

SEQ ID NO: 210072 - DNA, 75 bp, synthetic construct
  source 1..75: mol_type = other DNA
ttatcgaaggatttatttcgcgccttgacgtgctggattacgactgcgctgctgccacacataccggtcagatcc

SEQ ID NO: 210073 - DNA, 75 bp, synthetic construct
  source 1..75: mol_type = other DNA
gagtagaaatagatggcgatagtaccggactgtctaaatcactacagcaggcagaaaataaaattgatgcctttg

SEQ ID NO: 210074 - DNA, 75 bp, synthetic construct
  source 1..75: mol_type = other DNA
gcgaattcgtgatgttcgcactggacccgacggttatttatacgttctcaccgacgagtccagtggggaattact

SEQ ID NO: 210075 - DNA, 75 bp, synthetic construct
  source 1..75: mol_type = other DNA
ccctgtcgggccatttgatcaaatgatcgcaggtcatgcccgcagtcggggactgattattgtgactaataacac

SEQ ID NO: 210076 - DNA, 75 bp, synthetic construct
  source 1..75: mol_type = other DNA
atgaagctgatcctgcctttcccacccagcgtgaacacgtactggcgacaccccaacaaaggggagtttgctggt

SEQ ID NO: 210077 - DNA, 75 bp, synthetic construct
  source 1..75: mol_type = other DNA
atgaagctgatcatgcctttcccccccagcgtgaacacgtactggcgacaccccaacaaaggggagtttgctggt

SEQ ID NO: 210078 - DNA, 75 bp, synthetic construct
  source 1..75: mol_type = other DNA
atgaagctgatcatgcctttcccacccagcgtgaacacgtactggcgacaccccaacaaaggggcgtttgctggt

SEQ ID NO: 210079 - DNA, 75 bp, synthetic construct
  source 1..75: mol_type = other DNA
ggtagtgcttgattatgatagtgctgctgcgacgcataccgggcaaatcagggccgagcttgcccggcagggaag

SEQ ID NO: 210080 - DNA, 75 bp, synthetic construct
  source 1..75: mol_type = other DNA
aagagcctgataagcgcggcggggcgaaaatttcagagcgcggcgtgcgcagcaatagttgagcagttacgtcgt

SEQ ID NO: 210081 - DNA, 75 bp, synthetic construct
  source 1..75: mol_type = other DNA
atgaagctgatcgtgcctttcccgcccagcgtgaacacgtactggcgacaccccaacaaaggggggtttgctggt

SEQ ID NO: 210082 - DNA, 75 bp, synthetic construct
  source 1..75: mol_type = other DNA
aaattattatcgtttgtgcgctgatatttttccctctgggctatctggcgcgacactcaatgcgacgtattcgtg

SEQ ID NO: 210083 - DNA, 75 bp, synthetic construct
  source 1..75: mol_type = other DNA
atgagtaaattattttgggcgatgctctctttcattacgcgtctgcctgtaccgcgtcgttggtcccaggggctg

SEQ ID NO: 210084 - DNA, 75 bp, synthetic construct
  source 1..75: mol_type = other DNA
tcagccggtgagcgtcaggaagaccaggcgcatgctgccctgctggcgcttgaaaccgagctccggacgctggaa

SEQ ID NO: 210085 - DNA, 75 bp, synthetic construct
  source 1..75: mol_type = other DNA
cagaaacgcctgaatgaacttgcacagcaggctgcacggtttgaagagcaacagagcgcgaagcaggccgccatc

SEQ ID NO: 210086 - DNA, 75 bp, synthetic construct
  source 1..75: mol_type = other DNA
gttctggatggacagaagaaatcgctaagtatcgaggaaaaatctcttcttgctcatgaaaaagagacgctggag

SEQ ID NO: 210087 - DNA, 75 bp, synthetic construct
  source 1..75: mol_type = other DNA
agcgtcaggcggtacagccattcaggcagctgctgcgaaattccattttgcgaccgggggatttacgggaaccgg

SEQ ID NO: 210088 - DNA, 75 bp, synthetic construct
  source 1..75: mol_type = other DNA
gccattgtgttatatagcggtgaatttttctgccggataacaaccagagatggctggcacataatgattattccg

SEQ ID NO: 210089 - DNA, 75 bp, synthetic construct
  source 1..75: mol_type = other DNA
tgtgggcgcggtgcctgcctttgccgcgttaatatggtcaatcatcattttccgccgctggccagtgacactcga

SEQ ID NO: 210090 - DNA, 75 bp, synthetic construct
  source 1..75: mol_type = other DNA
ctggccagatatcataagggggaatgctactcaagaataaaaactgatgatggttttaatatttttgtgattcct

SEQ ID NO: 210091 - DNA, 75 bp, synthetic construct
  source 1..75: mol_type = other DNA
tagcgtacttgtgctggcgctgatgaccgggggattccacctggacggcctcgccgatacctgtgatggcgtatt

SEQ ID NO: 210092 - DNA, 75 bp, synthetic construct
  source 1..75: mol_type = other DNA
ggacggggggtaaatatgaacctgcggggattgttcatcgcggggagtttgtcttcacgaaggaggcgaccagcc

SEQ ID NO: 210093 - DNA, 75 bp, synthetic construct
  source 1..75: mol_type = other DNA
gggaaaatgcccgtctggggctggcagcggccacgctgcagtcagatatggaaaaagccggtgaactggctacca

SEQ ID NO: 210094 - DNA, 75 bp, synthetic construct
  source 1..75: mol_type = other DNA
gataatccggatgcgctggcgaaggccacatctgcactgaagaacacctggtctgcggaggagcagcttcgtgga

SEQ ID NO: 210095 - DNA, 75 bp, synthetic construct
  source 1..75: mol_type = other DNA
ctgctggcccatgagaaagagacgctggagtacaaacgccagctggctgagcttggcgacaaggttgaacaccag

SEQ ID NO: 210096 - DNA, 75 bp, synthetic construct
  source 1..75: mol_type = other DNA
caccgacccgacgtcgggactgatggcgatggcgcgccagttccgtaacgtgacggcggagcagattgcgtatgt

SEQ ID NO: 210097 - DNA, 75 bp, synthetic construct
  source 1..75: mol_type = other DNA
gttttatctttgccctgaacatattatctcagacattgttaacgactggcaggatgcagatacactggaaaaaat

SEQ ID NO: 210098 - DNA, 75 bp, synthetic construct
  source 1..75: mol_type = other DNA
ggcgcaggatttactgatatcggtcggcgaccttatcgatcgcggtactgaaaatgtcgaatgtctggaactatt

SEQ ID NO: 210099 - DNA, 75 bp, synthetic construct
  source 1..75: mol_type = other DNA
ccgcaccaagcgcctccgcatcgtttgcatagacataccgaccaccctcgccgtcctgcagggaggccagccagt

SEQ ID NO: 210100 - DNA, 75 bp, synthetic construct
  source 1..75: mol_type = other DNA
aaaagccgggatgtccgtcgggcagtataaagcggccatgcgtatgctacccatgcagttcaccgacgtggccac

SEQ ID NO: 210101 - DNA, 75 bp, synthetic construct
  source 1..75: mol_type = other DNA
ctgatatcggttggcgaccttatcgatcgcggcaccgaaaatgttgaatgcctggagctattgcagatgccctgg

SEQ ID NO: 210102 - DNA, 75 bp, synthetic construct
  source 1..75: mol_type = other DNA
aactccatcgtgtggattttgacccggcgcaggatttactgatatcggtcggcgacattatcgatcgcggcaccg

SEQ ID NO: 210103 - DNA, 75 bp, synthetic construct
  source 1..75: mol_type = other DNA
ctgagctccggacgctggagaagcacagcggtgcgaatgagaaaatcagccagcagcgccgtgatttatggaagg

SEQ ID NO: 210104 - DNA, 75 bp, synthetic construct
  source 1..75: mol_type = other DNA
aaaaaaaaggcccgcaaaagcgagccagggaaaataagtgtggcgcgttgtactggattcgaaccagtgaccgat

SEQ ID NO: 210105 - DNA, 75 bp, synthetic construct
  source 1..75: mol_type = other DNA
agtttttcgcaggttaaaagcgcggccacgcagacctttgacggtattgcacagaatatggcagcgatgctgacc

SEQ ID NO: 210106 - DNA, 75 bp, synthetic construct
  source 1..75: mol_type = other DNA
atgattaatcctgttactaatactcagggcgtgtcccctataaatactaaatatgctgaacatgtggtgaaaaat

SEQ ID NO: 210107 - DNA, 75 bp, synthetic construct
  source 1..75: mol_type = other DNA
agggcgtgtcccctataaatactaaatatgctgaacatgtggtgaaaaatatttacccggaaattaaacatgatt

SEQ ID NO: 210108 - DNA, 75 bp, synthetic construct
  source 1..75: mol_type = other DNA
gaaaaaaaacctccaaagccaacttgaaaataataatctaaacaaactacaattaaaacacgtaaaatacgtcaa

SEQ ID NO: 210109 - DNA, 75 bp, synthetic construct
  source 1..75: mol_type = other DNA
tttgtctccggcagtattcaaagtaataaaaccataaatattacaggtcgtgttaatccctcagattacggtaac

SEQ ID NO: 210110 - DNA, 75 bp, synthetic construct
  source 1..75: mol_type = other DNA
cgccagtcagattcagcgtggctatggtggttgggtattgacgatgcgttgtctgggacatgaaaaggtcgcaca

SEQ ID NO: 210111 - DNA, 75 bp, synthetic construct
  source 1..75: mol_type = other DNA
ccagtacctgcacgactacctcaaaagctatttacccgaaaccaggttctcgatccccgaagggacatatctggc

SEQ ID NO: 210112 - DNA, 75 bp, synthetic construct
  source 1..75: mol_type = other DNA
caatgtctggcctggtatgataatgagcaatggctatgggcgacgcggtatagctgggggagaaaacgggcggta

SEQ ID NO: 210113 - DNA, 75 bp, synthetic construct
  source 1..75: mol_type = other DNA
ggattttgacccggcgcaggatttactgatatcggttggcgaccttatcgatcgcggtactgaaaatgtcgaatg

SEQ ID NO: 210114 - DNA, 75 bp, synthetic construct
  source 1..75: mol_type = other DNA
cgtggctgccgcgggttaatcttatcgccagccagatccagcgtggctatggcggctgggtattgacgatgcgtt

SEQ ID NO: 210115 - DNA, 75 bp, synthetic construct
  source 1..75: mol_type = other DNA
actggaacgcaaaatcggcacaccgctgcggctgtacagtggctatagcgacagtaatcaggacaatccgctact

SEQ ID NO: 210116 - DNA, 75 bp, synthetic construct
  source 1..75: mol_type = other DNA
atgcctactgatctgcgggctgcgcatgatcgcaatgatgaagtactggagcgcatctacatcggccgtcgcttt

SEQ ID NO: 210117 - DNA, 75 bp, synthetic construct
  source 1..75: mol_type = other DNA
gccctccgtccggaattggcgtgaagttgcaggcagataacctctttgagacgcctctcggtcaagcagagattg

SEQ ID NO: 210118 - DNA, 75 bp, synthetic construct
  source 1..75: mol_type = other DNA
tttcttcgctgaggacactgacatcttcgtgggcaaggggcgctttactgaaactgttgcgcagatgagcaccag

SEQ ID NO: 210119 - DNA, 75 bp, synthetic construct
  source 1..75: mol_type = other DNA
cgtttctgttcgtcagccgccgctaccgccgccaggtggagactttgccatcgcgctggggctggcgcttgggaa

SEQ ID NO: 210120 - DNA, 75 bp, synthetic construct
  source 1..75: mol_type = other DNA
gttatgctacgatacattaaagatggcgggttataaatcacctcgcattgcagttgcggcactaaatcctcatgc

SEQ ID NO: 210121 - DNA, 75 bp, synthetic construct
  source 1..75: mol_type = other DNA
ttccaaatgcagacatctttataaacaagaaatctgatcctcctcctggctgcgccccgatggtacttggtaatc

SEQ ID NO: 210122 - DNA, 75 bp, synthetic construct
  source 1..75: mol_type = other DNA
gcagatagtcgataaccaggacatgacgatatcggtctgggtttttcccgagactgatatttctgatgtgtcact

SEQ ID NO: 210123 - DNA, 75 bp, synthetic construct
  source 1..75: mol_type = other DNA
ggctctaaattctttgggtttgatatggataacgaatacatcggtgggttcgatgttggagcatgggggacaata

SEQ ID NO: 210124 - DNA, 75 bp, synthetic construct
  source 1..75: mol_type = other DNA
tcgccaccttcaatctcgccgatactgccatctgtgtcggcgcggcgttgatcgtgctggaagggtttttgcctt

SEQ ID NO: 210125 - DNA, 75 bp, synthetic construct
  source 1..75: mol_type = other DNA
ggttctaaattttttggttttgatatggataacgaattcatcagtggttttgatgttggagcatgggggacttta

SEQ ID NO: 210126 - DNA, 75 bp, synthetic construct
  source 1..75: mol_type = other DNA
gcgtatgggctggggatgttgaaacgccttcggtagaaacaccttccgagggttctaaattttttggttttgata

SEQ ID NO: 210127 - DNA, 75 bp, synthetic construct
  source 1..75: mol_type = other DNA
atggtggacgaacgcgcttctggttatgccactaatcctatggtcagtccattaattgaaccgccccgggtttcc

SEQ ID NO: 210128 - DNA, 75 bp, synthetic construct
  source 1..75: mol_type = other DNA
gatcttgtgctttgcgatgtgcgaatggcagagatggatggcatcgccacgctgaaagagatcaaaacattaaac

SEQ ID NO: 210129 - DNA, 75 bp, synthetic construct
  source 1..75: mol_type = other DNA
ggagcaggtgcgggaacaggtttttgatcttgtgctttgcgatgtgcgaatggcagagatggatggcatcgccac

SEQ ID NO: 210130 - DNA, 75 bp, synthetic construct
  source 1..75: mol_type = other DNA
gggtatctcacagtaaaagccgccggggtatgggcggggggcattgaaacaccttcggtggaaactccatcggaa

SEQ ID NO: 210131 - DNA, 75 bp, synthetic construct
  source 1..75: mol_type = other DNA
gggcggcaacaaaaccgaagccgcccgtcagttaggaattacgcgtaaaacgctgttggcaaaactgtcgcgtta

SEQ ID NO: 210132 - DNA, 75 bp, synthetic construct
  source 1..75: mol_type = other DNA
tttctgcagcgctttgccgaacgcaatcgcaaggcggtaaaagggtttactccccaggcgatggatctgctgatt

SEQ ID NO: 210133 - DNA, 75 bp, synthetic construct
  source 1..75: mol_type = other DNA
ccgcgtactccagcgtcgagacggcggtagaggcgttgaaaaccggggcgctggattatctcatcaagccgctgg

SEQ ID NO: 210134 - DNA, 75 bp, synthetic construct
  source 1..75: mol_type = other DNA
cgaactatcacgtcactaaaccactcttccagcaacacattgacctgataacccgacctttcactgacatctccg

SEQ ID NO: 210135 - DNA, 75 bp, synthetic construct
  source 1..75: mol_type = other DNA
tgaacaccagaaacggctgaatgagctggcacagcaggcggcgcggtttgagcagcagcagggcgcgaagcaggc

SEQ ID NO: 210136 - DNA, 75 bp, synthetic construct
  source 1..75: mol_type = other DNA
cgtttcgatgagcagatgagccgggtaaggcgtcatttttccggactggagactgacgccagaaaaaccgccagt

SEQ ID NO: 210137 - DNA, 75 bp, synthetic construct
  source 1..75: mol_type = other DNA
gaactggcgcagctttacccgctctgtgctgtccatgatgacggaaattctgcttaagcaggccatggtggggat

SEQ ID NO: 210138 - DNA, 75 bp, synthetic construct
  source 1..75: mol_type = other DNA
atactttgatcacatagacctgagcacccggccgctgattgacatcacatcagccacccgggggctggttagcgc

SEQ ID NO: 210139 - DNA, 75 bp, synthetic construct
  source 1..75: mol_type = other DNA
atgagcaaatacaccgaactaatcacaaaccatcacgccaccaaacctaaatttcttgcgcatgttgatctgatg

SEQ ID NO: 210140 - DNA, 75 bp, synthetic construct
  source 1..75: mol_type = other DNA
tatttgaagggaccggaattgagatgcaaataatcgacaacatggatatgtcgataagcattaacgcaattgcat

SEQ ID NO: 210141 - DNA, 75 bp, synthetic construct
  source 1..75: mol_type = other DNA
aagtccggcgcaaatgcggcgttcagagggtatcaggtttgagcagaacaacaacgtggtgattcagaacgacgg

SEQ ID NO: 210142 - DNA, 75 bp, synthetic construct
  source 1..75: mol_type = other DNA
aaaaggaccatggaagttagatgcaagattcaacaaaaaagagttaattaaaaggattgaactaattggtgcata

SEQ ID NO: 210143 - DNA, 75 bp, synthetic construct
  source 1..75: mol_type = other DNA
caggctctggctgcacaaaaagccgggatttccgtcgggcagtataaacaggccatgcgtacgctacccatgcag

SEQ ID NO: 210144 - DNA, 75 bp, synthetic construct
  source 1..75: mol_type = other DNA
gacgctggagacctgggcggataaaacagggaaggcgttcaaatcgatgtgggatgccattctggatatcggtcg

SEQ ID NO: 210145 - DNA, 75 bp, synthetic construct
  source 1..75: mol_type = other DNA
cggattacaacacgctgatggcgtcggcgaaaaaggattatgaatcgacgctgaaaaaaccgaagtcgtcaggtg

SEQ ID NO: 210146 - DNA, 75 bp, synthetic construct
  source 1..75: mol_type = other DNA
cgcaggcgctggcgaaggcaacaggtgcgctgaaacagacatgggcttcggaagaccagctgaatggcagctgga

SEQ ID NO: 210147 - DNA, 75 bp, synthetic construct
  source 1..75: mol_type = other DNA
gcggtgtatgacatggcccgcaagggggcgcgggatgagattcaggcacagatgcgtgacggtggcgtattttcc

SEQ ID NO: 210148 - DNA, 75 bp, synthetic construct
  source 1..75: mol_type = other DNA
tctgctgcaacagggcggtcaggtgaaagactcgttcggtggtctgatcccgatgttccggggacttgctggtgc

SEQ ID NO: 210149 - DNA, 75 bp, synthetic construct
  source 1..75: mol_type = other DNA
gccacgaaaggctttgatgagcagacccgccgcctgaaagagaacatggggacgctggagacctgggcggataaa

SEQ ID NO: 210150 - DNA, 75 bp, synthetic construct
  source 1..75: mol_type = other DNA
gaaacgacagttatccgggcaggaaaaatccctgctgacccatgagaaagagacgctggagtacaaacgccagtt

SEQ ID NO: 210151 - DNA, 75 bp, synthetic construct
  source 1..75: mol_type = other DNA
acgatttcggtctgggttttccctgaaactgatatttctgatgtgtctctcgaactgatcgccgctatcaaacag

SEQ ID NO: 210152 - DNA, 75 bp, synthetic construct
  source 1..75: mol_type = other DNA
ctaccgcaggctctggactgaagatgcagatcgtcgataaccaggacatgacgatatcggtctgggtattccctg

SEQ ID NO: 210153 - DNA, 75 bp, synthetic construct
  source 1..75: mol_type = other DNA
cgatggtacaccgctgtgggttactggcagcggcaccagcaaaacggtactgacccgttatgcgacggcgctgaa

SEQ ID NO: 210154 - DNA, 75 bp, synthetic construct
  source 1..75: mol_type = other DNA
gcaggatctcatctatgcgggcgatccggttcattatcacggcagtcgcgctaccgaagggacgctttcctggcg

SEQ ID NO: 210155 - DNA, 75 bp, synthetic construct
  source 1..75: mol_type = other DNA
acctgccagttattgccaaaagcgaaagcctggctggcggaaaaaatgccgcagtggcggcaaatcttacaaagt

SEQ ID NO: 210156 - DNA, 75 bp, synthetic construct
  source 1..75: mol_type = other DNA
caggcgctggctgcacagaaagcgggtatctctgtagggcagtataaagctgccatgcgtatgctgcctgcgcag

SEQ ID NO: 210157 - DNA, 75 bp, synthetic construct
  source 1..75: mol_type = other DNA
actggctggccgggtttaagtctggctggggtgagtgggtggaaagtgcgacggacagtttttcgcaggttaaaa

SEQ ID NO: 210158 - DNA, 75 bp, synthetic construct
  source 1..75: mol_type = other DNA
catgcagccatgctggcgcttgaaaccgagctcaggacgctggaaaaacacagcggtgtgaatgagaaaatcagc

SEQ ID NO: 210159 - DNA, 75 bp, synthetic construct
  source 1..75: mol_type = other DNA
tccggaatcctcagcggatatgctcgccagtgcgcagaaggcatttgatgaggcggataaaaaatggcagtggta

SEQ ID NO: 210160 - DNA, 75 bp, synthetic construct
  source 1..75: mol_type = other DNA
tcgggctgagtctgaggcgtcacggctgaaatataccgaagaggcgcagaaagcttacgaacggctgcagacgcc

SEQ ID NO: 210161 - DNA, 75 bp, synthetic construct
  source 1..75: mol_type = other DNA
aaagcgaggtgctttcccgtgcagagctgaacgcgaagcttggcgatcagatagtggcgcaggagcggcttaacc

SEQ ID NO: 210162 - DNA, 75 bp, synthetic construct
  source 1..75: mol_type = other DNA
ggcagtcagtacagctacatggtggtgctggatgccgactcagtgatgaccggtgattgcttgtgtggtctggtg

SEQ ID NO: 210163 - DNA, 75 bp, synthetic construct
  source 1..75: mol_type = other DNA
tcacggaaaaaagtctatcccacaaaatgaaacggaagaaaaatgactgtcaccaaaagaaagagtccagcaaag

SEQ ID NO: 210164 - DNA, 75 bp, synthetic construct
  source 1..75: mol_type = other DNA
agacaatcgcatacaacagctcaggcaaatattttaaggaaatcaattccgcacgaatttgctgaaattctcctc

SEQ ID NO: 210165 - DNA, 75 bp, synthetic construct
  source 1..75: mol_type = other DNA
ctgcatttccgcgtctggaattcccctgagagatattcttcatgggtgagttattacgaagggataaagctcaat

SEQ ID NO: 210166 - DNA, 75 bp, synthetic construct
  source 1..75: mol_type = other DNA
gcgccagtaaggtgctggaaatcgcccgtgaccgccacgttgaacaggcgctgaacgagacgccagagaagctga

SEQ ID NO: 210167 - DNA, 75 bp, synthetic construct
  source 1..75: mol_type = other DNA
tatcgatgacttctgccgtcgctggggcagccagtacagctacatggtggtgctggatgctgactcggtaatgac

SEQ ID NO: 210168 - DNA, 75 bp, synthetic construct
  source 1..75: mol_type = other DNA
aaaagataaaaatagccgtagtgccacgttctacaacacgcttccactgcatgacggcaaccattatccgggggt

SEQ ID NO: 210169 - DNA, 75 bp, synthetic construct
  source 1..75: mol_type = other DNA
agcagcttcctggctatctccgatctggtggttcgcgttcttgatggcaagattttcaccgaagacaatgttgac

SEQ ID NO: 210170 - DNA, 75 bp, synthetic construct
  source 1..75: mol_type = other DNA
gttttttgaaagaagttcgcgaaaatggcggcatgcagagcgaattgatggatcaaacaaatctgccggttattt

SEQ ID NO: 210171 - DNA, 75 bp, synthetic construct
  source 1..75: mol_type = other DNA
aaagatatcgtcgcccggataagataatttcatatcgagaaagacgtttgccgcttttccccggttatcttttta

SEQ ID NO: 210172 - DNA, 75 bp, synthetic construct
  source 1..75: mol_type = other DNA
cccctggacaaatcagttcatcgtgcgtgggaatggggtacttttcctggccaacaaagtcaataaaacctggca

SEQ ID NO: 210173 - DNA, 75 bp, synthetic construct
  source 1..75: mol_type = other DNA
tccgatctggtgattcgcgttcttgatggcaagattttcaccgaagacaatgttgactggaaaaaactcaccagt

SEQ ID NO: 210174 - DNA, 75 bp, synthetic construct
  source 1..75: mol_type = other DNA
cgaaagaatatggcggcttctggcgcgttacgttatcgctgctgctggaagtgttgttctcagtgctgttggcgc

SEQ ID NO: 210175 - DNA, 75 bp, synthetic construct
  source 1..75: mol_type = other DNA
aaacacttgatgagttacggcgcaaggatgcttctactgttcatcatgagttgcacaataagtggttgcgtgatt

SEQ ID NO: 210176 - DNA, 75 bp, synthetic construct
  source 1..75: mol_type = other DNA
taaaagttgctttgattacgctggctgccgttcttttcgttcttgtcggcgcttacacgatgggcggaaatgcgg

SEQ ID NO: 210177 - DNA, 75 bp, synthetic construct
  source 1..75: mol_type = other DNA
gccagaagtgaaactgcggccggcagccggatgttcaggccactctgggagcacggacgggccattgtttttgct

SEQ ID NO: 210178 - DNA, 75 bp, synthetic construct
  source 1..75: mol_type = other DNA
cagaagtggtggaggcggggcagcctgcaccggcatccgttatgtcacgctgggttgccggagcagggtatgcgg

SEQ ID NO: 210179 - DNA, 75 bp, synthetic construct
  source 1..75: mol_type = other DNA
ctgctcacttccctgcccgcacaccatttccagattgtgctggaaattaccgagcgcgatatgctgaaagagcaa

SEQ ID NO: 210180 - DNA, 75 bp, synthetic construct
  source 1..75: mol_type = other DNA
caaagcacagtggaagtggtgaatgagacgaacagtgaaatacgtcagaaagatgcttctgccattcatcgtgag

SEQ ID NO: 210181 - DNA, 75 bp, synthetic construct
  source 1..75: mol_type = other DNA
agcaaagcgatcctgcgcggcgaacaacggggtggctgcgaatgttgaaacgtctgcgcaaagcgcgggaaccac

SEQ ID NO: 210182 - DNA, 75 bp, synthetic construct
  source 1..75: mol_type = other DNA
tgagctccggacgctggagaagcacagcggtgcgaatgagaaaatcagccggcagcgccgtgatttatggaaggc

SEQ ID NO: 210183 - DNA, 75 bp, synthetic construct
  source 1..75: mol_type = other DNA
cgattatccgcgtgaaaccgtttatcgagcactgcgcactggctccgctgccggcgaaggttcctttgccggttc

SEQ ID NO: 210184 - DNA, 75 bp, synthetic construct
  source 1..75: mol_type = other DNA
agaggccgccacgaaacggcagttatccgggcaggaaaaatccctgctggcccatgagaaagagacgctggagta

SEQ ID NO: 210185 - DNA, 75 bp, synthetic construct
  source 1..75: mol_type = other DNA
aaaatgagaatggtttctctggtgttaaccggcgggtcctgatgttgctgtcggcgtttcatgtgtcgaccccga

SEQ ID NO: 210186 - DNA, 75 bp, synthetic construct
  source 1..75: mol_type = other DNA
ctaccttgataacgccctgttgcccgccatcaatgtggatgagagttggcacaaggtgattacatccaaacttcg

SEQ ID NO: 210187 - DNA, 75 bp, synthetic construct
  source 1..75: mol_type = other DNA
acggtaccgatgccctgcgcttcaccctggcggcgctggcgtctaccggtcgtgacatcaactgggatatgaagc

SEQ ID NO: 210188 - DNA, 75 bp, synthetic construct
  source 1..75: mol_type = other DNA
aactggagcgttttgccgcacgtaaagcagtcgttgctgcggttgacgcactcggcctgctggaagaaattaaac

SEQ ID NO: 210189 - DNA, 75 bp, synthetic construct
  source 1..75: mol_type = other DNA
aaagagcgtgagaagctggaaggctatgcggaagcgaaagcgaaactgattgaacagcaggctgttatcgccgcg

SEQ ID NO: 210190 - DNA, 75 bp, synthetic construct
  source 1..75: mol_type = other DNA
tctctaccctaggctggccggaaaacaccgacgcccttcgtcagttccacccaaccagcgtgatggtatccggct

SEQ ID NO: 210191 - DNA, 75 bp, synthetic construct
  source 1..75: mol_type = other DNA
acggcaccgatgctctgcgctttaccctggccgcactcgcttctaccggtcgcgatatcaactgggatatgaagc

SEQ ID NO: 210192 - DNA, 75 bp, synthetic construct
  source 1..75: mol_type = other DNA
tttgtgctgatgaacacagaaggtcaggattgcggcttcaacgacggcgaaatgacgctgtcgctggcggaccgc

SEQ ID NO: 210193 - DNA, 75 bp, synthetic construct
  source 1..75: mol_type = other DNA
tatttaaaaaactcttctccccaaaatctttatttgatgtgtattctgataaatttagtaagtcggcagcaaaag

SEQ ID NO: 210194 - DNA, 75 bp, synthetic construct
  source 1..75: mol_type = other DNA
atcagttatctggcgaaggagtacaccaaaaaccacgatgacggtgaacgtaactttggttgtagtcagggataa

SEQ ID NO: 210195 - DNA, 75 bp, synthetic construct
  source 1..75: mol_type = other DNA
atcgggaagtattcagaaacaccatgctgaatacggagaattcagcgcaacctcgcggattgctggtgggaatgg

SEQ ID NO: 210196 - DNA, 75 bp, synthetic construct
  source 1..75: mol_type = other DNA
aatgacgctgtcgctggcggaccgctggattctggcggagttcaaccagaccatcaaagcgtaccgcgaagcgct

SEQ ID NO: 210197 - DNA, 75 bp, synthetic construct
  source 1..75: mol_type = other DNA
tctcgtcagctgtggtggggtcaccgtatccctgcatggtacgacgaagcaggtaacgtttatgttggccgcaac

SEQ ID NO: 210198 - DNA, 75 bp, synthetic construct
  source 1..75: mol_type = other DNA
acaccaacaacaagtgatagtgttaataaaaaaatgaggaagtttttttttgataatgaaaagggagttcctcaa

SEQ ID NO: 210199 - DNA, 75 bp, synthetic construct
  source 1..75: mol_type = other DNA
tcaggacgaagacgttctcgacacctggttctcctccgcgttgtggaccttctccacgctcggctggccggaaaa

SEQ ID NO: 210200 - DNA, 75 bp, synthetic construct
  source 1..75: mol_type = other DNA
gaagaaaatcacagcggaaaagagtacgacggcagtaaaacccggcgtacttaatgggcgctatcgtgtgacgtt

SEQ ID NO: 210201 - DNA, 75 bp, synthetic construct
  source 1..75: mol_type = other DNA
tcaatgggcgctatcgtgtgacgtttgccaatggtaaccacatgacatttgtcagccacgtgattagacttgaga

SEQ ID NO: 210202 - DNA, 75 bp, synthetic construct
  source 1..75: mol_type = other DNA
acgggtgaaaacctggagctggtttgccgatgataagcaggaaatccgtcagggtggttttgctggctggttaac

SEQ ID NO: 210203 - DNA, 75 bp, synthetic construct
  source 1..75: mol_type = other DNA
cttcggcgaatcagaatggattcatttcacaggtagcggatatctgttacgtaccgatgcgtggtcatacccggt

SEQ ID NO: 210204 - DNA, 75 bp, synthetic construct
  source 1..75: mol_type = other DNA
tgacgccggataatgtagcgcaatatatgaatgccggttattcgtacgtgattgatgctattgatagtgtacggc

SEQ ID NO: 210205 - DNA, 75 bp, synthetic construct
  source 1..75: mol_type = other DNA
cgcacgtttttacagcaaaacgccgatcgggaaggcgattgcctgaccatcccggatagtagcgccacgcagcgt

SEQ ID NO: 210206 - DNA, 75 bp, synthetic construct
  source 1..75: mol_type = other DNA
ctgttaacccggaagatccgcgttacaaagatctgattggcaaatatgtcattctgccgctggttaaccgtcgta

SEQ ID NO: 210207 - DNA, 75 bp, synthetic construct
  source 1..75: mol_type = other DNA
ggagctgaccaagccggtaatgaacggtggcaccgaagccgaactgcgcggtactcgccatacgctggtgaccgt

SEQ ID NO: 210208 - DNA, 75 bp, synthetic construct
  source 1..75: mol_type = other DNA
cctggcggcgctggcttctactggtcgtgacatcaactgggatatgaagcgtcttgaaggttaccgtaacttctg

SEQ ID NO: 210209 - DNA, 75 bp, synthetic construct
  source 1..75: mol_type = other DNA
ggctttggtaaagtcgatggcttcaattttggcagcttcgtggttgccgttattggtgcgattgttgtgctgttt

SEQ ID NO: 210210 - DNA, 75 bp, synthetic construct
  source 1..75: mol_type = other DNA
aatcagtcgcattggaagaccgcataatccttttgagccgcgccgcaatcgctacgcacaaaaatacttaacgtt

SEQ ID NO: 210211 - DNA, 75 bp, synthetic construct
  source 1..75: mol_type = other DNA
tggtgattactcctggcgctccggttctggcaaaaaagagtcttactcttcgggcggctttaccaccaaaaaagc

SEQ ID NO: 210212 - DNA, 75 bp, synthetic construct
  source 1..75: mol_type = other DNA
gcaacagatgcctcggtgaatgacatcgcgaaagcactggatgcgggttacaccaacaacgaactgtttaccagc

SEQ ID NO: 210213 - DNA, 75 bp, synthetic construct
  source 1..75: mol_type = other DNA
tggtgctgatagttcgttagtgaacaacaccggaaccatcaataaaatcgtgcagaacgcgggggtattcaataa

SEQ ID NO: 210214 - DNA, 75 bp, synthetic construct
  source 1..75: mol_type = other DNA
ggcgatcagaatgccttcttctggaaccaggataacggggtcatcaacttcgatcacgacagcgccagtgccgtg

SEQ ID NO: 210215 - DNA, 75 bp, synthetic construct
  source 1..75: mol_type = other DNA
tcaacgtgattggtaacgtgcaggccagcggcacattgcaggacagcggtggcaactccaaccaccattcacact

SEQ ID NO: 210216 - DNA, 75 bp, synthetic construct
  source 1..75: mol_type = other DNA
cagagaagcggcgaaaggaaaagcacgtgcagcagccggacaacaccgcgccggacggggccaccgtatcggcgg

SEQ ID NO: 210217 - DNA, 75 bp, synthetic construct
  source 1..75: mol_type = other DNA
tgtgttgtgagctggttctgccggccggaactctcaggcttaaaggtaaactgacgccggcgttattacagacac

SEQ ID NO: 210218 - DNA, 75 bp, synthetic construct
  source 1..75: mol_type = other DNA
ttccgccagattacacgcccggcatgttacgtctcgatgcgaagctggtttacgacgataaaggtttttgtgccg

SEQ ID NO: 210219 - DNA, 75 bp, synthetic construct
  source 1..75: mol_type = other DNA
tctgaaagacgtgcggccacagatgacgcgccagcgggacagcggtcatctgttcgtgacgaaatacggcagcgg

SEQ ID NO: 210220 - DNA, 75 bp, synthetic construct
  source 1..75: mol_type = other DNA
cagtggtcaggtgggccggagcagcgcgataaaaatcttttaccgctggctgctgaagcggcatgtgatcctgta

SEQ ID NO: 210221 - DNA, 75 bp, synthetic construct
  source 1..75: mol_type = other DNA
ctgctgcctggctggtaaaacggttgggatttgccccgaaacgcactggcgttaacggtctgaaaattagcgcca

SEQ ID NO: 210222 - DNA, 75 bp, synthetic construct
  source 1..75: mol_type = other DNA
accatctacctgcccaaaggcatggtcttcatgacatcggcgcgggactacaaaatctggcaggagtgtgatgga

SEQ ID NO: 210223 - DNA, 75 bp, synthetic construct
  source 1..75: mol_type = other DNA
ctacaaagtagtgaaaaagatccagcgttctgaaagcgcccgccgacaactcccattattctctatcactgatga

SEQ ID NO: 210224 - DNA, 75 bp, synthetic construct
  source 1..75: mol_type = other DNA
gaagaagttgagcaaaaatacccggttatgttcatcactgaatacgaccagcatgaggcattgttaaaaatccgg

SEQ ID NO: 210225 - DNA, 75 bp, synthetic construct
  source 1..75: mol_type = other DNA
acccttaaaaagccgaagaagaccccggcaatcagaacccccgcaggtgcccgtgccaccgatacggccagtgcc

SEQ ID NO: 210226 - DNA, 75 bp, synthetic construct
  source 1..75: mol_type = other DNA
tcgcgctttgatgaaatgagccaggcggtggcgcggtttactgatgcctccggcgtgccggtggagaaagtcgct

SEQ ID NO: 210227 - DNA, 75 bp, synthetic construct
  source 1..75: mol_type = other DNA
gtgaagagggtcagaaaagaagaattagatcggatgcagggcaaactgtttgatgctgatggcgaaattgagccg

SEQ ID NO: 210228 - DNA, 75 bp, synthetic construct
  source 1..75: mol_type = other DNA
acttcgctggcagttgccaccggagcgctggcgtatgcctggtatcagggggattcaaccctgtccagtttcaat

SEQ ID NO: 210229 - DNA, 75 bp, synthetic construct
  source 1..75: mol_type = other DNA
acgttttaccacacttaccttattaacctttgctctcaaacgcttatatgctgcaggcaaagtgactgtcgatat

SEQ ID NO: 210230 - DNA, 75 bp, synthetic construct
  source 1..75: mol_type = other DNA
gcggacaaaaaatggcagtggtatcagagccgaagccaccggcgcggtaaaacctcagcatttcttgccaatctc

SEQ ID NO: 210231 - DNA, 75 bp, synthetic construct
  source 1..75: mol_type = other DNA
agcagtttgccaaatacgttaacccggattatcgccaccgcatcgcgtttctcgaagaaccgtgcaaaacccgcg

SEQ ID NO: 210232 - DNA, 75 bp, synthetic construct
  source 1..75: mol_type = other DNA
gcagccaattaccgtgcggcaccgctgtgtaatggcgatcctgacgatctgatcctcaaacttgccgatatgcca

SEQ ID NO: 210233 - DNA, 75 bp, synthetic construct
  source 1..75: mol_type = other DNA
tgcgtgagggcgagcgcgaagggtggggggagatctccccactgccgggcttcagccaggaaacctgggaagagg

SEQ ID NO: 210234 - DNA, 75 bp, synthetic construct
  source 1..75: mol_type = other DNA
gtaaacaagcacctgaagcgtttttccgtgaagctatgaccaatagctattcactcgaaaaactggtttatctgg

SEQ ID NO: 210235 - DNA, 75 bp, synthetic construct
  source 1..75: mol_type = other DNA
atggctaacattatcatttctaaaaagtccatcattgaagctgcatctattgtatccgacgagctgcgcgaaaaa

SEQ ID NO: 210236 - DNA, 75 bp, synthetic construct
  source 1..75: mol_type = other DNA
tatcctcaaacttgctgatatgccgggcgagaaagtggcgaaggtcaaagtgggattatatgaggcggtgcgtga

SEQ ID NO: 210237 - DNA, 75 bp, synthetic construct
  source 1..75: mol_type = other DNA
ctggataaacgcatacacaggattgccccgttgtttgcggatgaactgatcgcgcgggaactggctgaacgaccg

SEQ ID NO: 210238 - DNA, 75 bp, synthetic construct
  source 1..75: mol_type = other DNA
cggagcagggtatgcggtctgtctggattttatttctgaccgcccggtgcgccgctggagcgaagaacgtaaggc

SEQ ID NO: 210239 - DNA, 75 bp, synthetic construct
  source 1..75: mol_type = other DNA
catgcaccactgtttgcggatgaactgattgcccgtgaactggctgaacgaccggattattttcagggaaagtga

SEQ ID NO: 210240 - DNA, 75 bp, synthetic construct
  source 1..75: mol_type = other DNA
gctgagctgggagacaaagttgaacaccagaaacggctgaatgagctggcacagcaggctgcgcggtttgagcag

SEQ ID NO: 210241 - DNA, 75 bp, synthetic construct
  source 1..75: mol_type = other DNA
cgaacgggccatcagcgcacctgtcaccagtgtggttccccgtatcagctccctcacggtaaatctgtcacccgg

SEQ ID NO: 210242 - DNA, 75 bp, synthetic construct
  source 1..75: mol_type = other DNA
taggctgggcaggaatgagtctggtgggcgatatgtttattatgatctgctggcttcttccttttttattttgtt

SEQ ID NO: 210243 - DNA, 75 bp, synthetic construct
  source 1..75: mol_type = other DNA
ggatggttatatctctggaagcgcaggccgcaatttacgccggtagatgtgattgaaaccgatgtcattccgcca

SEQ ID NO: 210244 - DNA, 75 bp, synthetic construct
  source 1..75: mol_type = other DNA
acacggaaactggattacgcgttgctaggttgggcagtctcagcaaaccttggaagagaatgcacgtatcacccc

SEQ ID NO: 210245 - DNA, 75 bp, synthetic construct
  source 1..75: mol_type = other DNA
tgcggggcctataccagtttgttggggcggagctattccggtggtggtgctggcgctggtggcggtgcgggtggc

SEQ ID NO: 210246 - DNA, 75 bp, synthetic construct
  source 1..75: mol_type = other DNA
attgaaaccgatgtcattccgccagattacacgcccggcatgttacgtctcgatgcgaagctggtttacgacgat

SEQ ID NO: 210247 - DNA, 75 bp, synthetic construct
  source 1..75: mol_type = other DNA
actctaccgttggcctcatgccttgctggataattccccggcacaacacacgacgaatatttttagccatctttt

SEQ ID NO: 210248 - DNA, 75 bp, synthetic construct
  source 1..75: mol_type = other DNA
ggcatcaggcaacgtgactgtacttctgaaagggctggaagtgccggtcatcatcagtctgaccagcggcgatcc

SEQ ID NO: 210249 - DNA, 75 bp, synthetic construct
  source 1..75: mol_type = other DNA
ctgaaagggctggaagtgccggtcatcatcagtctgaccagctgcgatcccgacagcaatatatcgtcacgtgaa

SEQ ID NO: 210250 - DNA, 75 bp, synthetic construct
  source 1..75: mol_type = other DNA
gaaaaacagcaaaggtaagctcggcgtggattgcgtgttctctaccgaagcgctggtgtacccgcagtcagatgg

SEQ ID NO: 210251 - DNA, 75 bp, synthetic construct
  source 1..75: mol_type = other DNA
tgagggagattctgacctgctaatctggaacgtgaccggtagcaactggccgtttgaaatctataagacccgatt

SEQ ID NO: 210252 - DNA, 75 bp, synthetic construct
  source 1..75: mol_type = other DNA
cggattttatcgtgatttaccacgactatggatgcagcctgatggggacgctgcactgctgaactatcatattgt

SEQ ID NO: 210253 - DNA, 75 bp, synthetic construct
  source 1..75: mol_type = other DNA
ttctggacgggacaccacctgatggtgcccgccgtctgaaagtcaacggagggccggacaatctgcgggtgtggc

SEQ ID NO: 210254 - DNA, 75 bp, synthetic construct
  source 1..75: mol_type = other DNA
agctcggtattccatctcctaacctggctgatgcgctgatgatgtgtatgcattgcccggcattggtccgcgaag

SEQ ID NO: 210255 - DNA, 75 bp, synthetic construct
  source 1..75: mol_type = other DNA
atattttactaccagccacatcctgcgagtccccattttaccttgcaacccaaaaagcaattgttgaacagggag

SEQ ID NO: 210256 - DNA, 75 bp, synthetic construct
  source 1..75: mol_type = other DNA
gtgcttccgcgggagagccgatcccgatggcggggatcccctaccatgcggtggaaaactatctcgccaaactgg

SEQ ID NO: 210257 - DNA, 75 bp, synthetic construct
  source 1..75: mol_type = other DNA
ggttggcgtggaagactatgggctcagatgcaatgtgtcgtggagtgattagcccgacacttccaaaaacacaat

SEQ ID NO: 210258 - DNA, 75 bp, synthetic construct
  source 1..75: mol_type = other DNA
ccgttagcgcggtcttttgggttggttcggtatcggctgaccctgggtgccagaatgcggaagtgatcggcggaa

SEQ ID NO: 210259 - DNA, 75 bp, synthetic construct
  source 1..75: mol_type = other DNA
ggctgatgcgctgatgatgtgtatgcattgcccggcattggtccgcgaagaaacagaaatatacgttccctcatc

SEQ ID NO: 210260 - DNA, 75 bp, synthetic construct
  source 1..75: mol_type = other DNA
ggtgatgtggaaaaggccagcaaagtctttgtccgaaacgagctaattccgctacagaagcggctgcaagaactt

SEQ ID NO: 210261 - DNA, 75 bp, synthetic construct
  source 1..75: mol_type = other DNA
gtgtcttcgttcgcaatgaactgatgccactgcaaaagcgactgcaggagctgaacgactggctgggtgaagaag

SEQ ID NO: 210262 - DNA, 75 bp, synthetic construct
  source 1..75: mol_type = other DNA
ggcctgccatgctatctttctgccattccatccgccctgctcaacgagtctgccacgctgttccgccgtaagtat

SEQ ID NO: 210263 - DNA, 75 bp, synthetic construct
  source 1..75: mol_type = other DNA
ttatcatgtacatgaccgatgccgcgcaaaaccaggaggatgtaaacaacctccgcaacgcaatgaaaagcgcca

SEQ ID NO: 210264 - DNA, 75 bp, synthetic construct
  source 1..75: mol_type = other DNA
gctcagccagcaagctttttcgcgttttgtgcaggactatctggtatttggcaacgcctatctggagaaacgcac

SEQ ID NO: 210265 - DNA, 75 bp, synthetic construct
  source 1..75: mol_type = other DNA
ggggatgtggagaaggccagccgcgtttttgttcgaaatgaactgatccctctacagaagcgttttgaggaactg

SEQ ID NO: 210266 - DNA, 75 bp, synthetic construct
  source 1..75: mol_type = other DNA
agcatccttttcccttcttcggtgaatgcgctgaaaacggtttattccagccgtttcagggtacgcctgataatt

SEQ ID NO: 210267 - DNA, 75 bp, synthetic construct
  source 1..75: mol_type = other DNA
aacgtagccgagtccggaacccatcaggaattgctggctagccctgacggcatttaccactaccttcatcagttg

SEQ ID NO: 210268 - DNA, 75 bp, synthetic construct
  source 1..75: mol_type = other DNA
cttaaccgctgcatccgagaaaacattgcgctggcctgtccgggcatcgcaatggagagaatcattgcagcctcc

SEQ ID NO: 210269 - DNA, 75 bp, synthetic construct
  source 1..75: mol_type = other DNA
tggcgggatgacggtaagcattatatattatctcgtgttactaaagattcatcacgctatcttgtttatgatcca

SEQ ID NO: 210270 - DNA, 75 bp, synthetic construct
  source 1..75: mol_type = other DNA
ttttccatgttattcattacatcattatcatcaataatcatatctatttcaccattgatccttgcaaagattaca

SEQ ID NO: 210271 - DNA, 75 bp, synthetic construct
  source 1..75: mol_type = other DNA
gtcggctatgcgaccagcaccccgaccacggttaccaccggtgtggttaacagctacgcgacttacgaaattact

SEQ ID NO: 210272 - DNA, 75 bp, synthetic construct
  source 1..75: mol_type = other DNA
ggatggcgcgcgcttcacttactacgtcggctatgcgaccagcaccccgaccacggttaccaccggtgtggttaa

SEQ ID NO: 210273 - DNA, 75 bp, synthetic construct
  source 1..75: mol_type = other DNA
aactggcaaaatttgactttacctggtttatccctgccattataaaatacagaaaaatatttattgaaacccttg

SEQ ID NO: 210274 - DNA, 75 bp, synthetic construct
  source 1..75: mol_type = other DNA
gacaatgtgctgcttaatcgcagtattattgataatatctcactggctaatcctggtatgtccgtcgaaaaagtt

SEQ ID NO: 210275 - DNA, 75 bp, synthetic construct
  source 1..75: mol_type = other DNA
atgcgctgaaaacggtttattccagccgtttcagggtacgcctgataatttgcattttaaataccatttattggt

SEQ ID NO: 210276 - DNA, 75 bp, synthetic construct
  source 1..75: mol_type = other DNA
aaatgcaaacagaataattgttatggataatggttttatttctgaagatggcacacataaagagcttatctccaa

SEQ ID NO: 210277 - DNA, 75 bp, synthetic construct
  source 1..75: mol_type = other DNA
accagatccgtaattttctgacaggacaggcattaacatctgttctggacttattattttcattcatattttttg

SEQ ID NO: 210278 - DNA, 75 bp, synthetic construct
  source 1..75: mol_type = other DNA
acatagtacaagtcggattgatgttgagttgggtgccaaactcttccggcatttactggcgctaccgatctctta

SEQ ID NO: 210279 - DNA, 75 bp, synthetic construct
  source 1..75: mol_type = other DNA
ctatgtggaatgcgtacagacggatcgctggtatgagccacccgtaagttttgacggactggcgcgcaccttccg

SEQ ID NO: 210280 - DNA, 75 bp, synthetic construct
  source 1..75: mol_type = other DNA
cctacctggagaaacgcacgaaccgctttggtgaagttatttcgctggagcctgcactggcaaaatacacccgac

SEQ ID NO: 210281 - DNA, 75 bp, synthetic construct
  source 1..75: mol_type = other DNA
ataatgttgggggatttggggatgtagaaaaagctagtaaggtatttgtgaaaaatgaattattaccattacaaa

SEQ ID NO: 210282 - DNA, 75 bp, synthetic construct
  source 1..75: mol_type = other DNA
gcagaaccaggaggatgtgaacaaccttcgcaacgcaatgaaaagcgccaaagggccaggcaacttccgcaatct

SEQ ID NO: 210283 - DNA, 75 bp, synthetic construct
  source 1..75: mol_type = other DNA
gctgcagaagcgcctagaagagctaaatgactggctgggagaggaagtgatcagctttgagatttataccttagg

SEQ ID NO: 210284 - DNA, 75 bp, synthetic construct
  source 1..75: mol_type = other DNA
ggcctgcccggctatctttctgccattccatccgccctactcaacgagtccgcaacgctgttccgccgtaagtat

SEQ ID NO: 210285 - DNA, 75 bp, synthetic construct
  source 1..75: mol_type = other DNA
tcgacgccctagcgcgcatcttccgcgccgccgtacatcacaactcacccattgcggtgaaatgcaacattctga

SEQ ID NO: 210286 - DNA, 75 bp, synthetic construct
  source 1..75: mol_type = other DNA
gaaccgattcggtgaagttatcgcccttgagcctgcgctggcaaaatacacccgacgcgggttagacctggatac

SEQ ID NO: 210287 - DNA, 75 bp, synthetic construct
  source 1..75: mol_type = other DNA
cggctggagcgagtggaaagagagtgccacggacagtatgtcgcaggttaaaagtgctgccacgcagacctttga

SEQ ID NO: 210288 - DNA, 75 bp, synthetic construct
  source 1..75: mol_type = other DNA
ggggatgtggagaaggcgagtcgagtgtttgttcgaaatgaattaatgcctttacaaaaacgattacaggaattt

SEQ ID NO: 210289 - DNA, 75 bp, synthetic construct
  source 1..75: mol_type = other DNA
ttcagcttcggcgatcccgttccagttctggaccgccgagaattactggactatatggaatgcgtacagatggac

SEQ ID NO: 210290 - DNA, 75 bp, synthetic construct
  source 1..75: mol_type = other DNA
tttacaaaaaagaatatcagagattaatgattggttaggtgaggacattatcaattttttttcgtatcatttcga

SEQ ID NO: 210291 - DNA, 75 bp, synthetic construct
  source 1..75: mol_type = other DNA
ctactggtttgtgcaatacggtatggccacgcagccgtatcagttcacgaaaggcagcatttttcatctgatgga

SEQ ID NO: 210292 - DNA, 75 bp, synthetic construct
  source 1..75: mol_type = other DNA
gaaccgattcggtgaagttatcgctcttgagcctgcgctggcaaaatacacccgacgtggattagacctagatac

SEQ ID NO: 210293 - DNA, 75 bp, synthetic construct
  source 1..75: mol_type = other DNA
atgggaaagagtaagaagaagcgcgctgcggcgacgacccagattcagcataaaagccagactacagccgaagca

SEQ ID NO: 210294 - DNA, 75 bp, synthetic construct
  source 1..75: mol_type = other DNA
ggagatgtagagaaggcgagtcgagtgtttgttcgaaatgaattaatgcctttacaaaaacgattacaggaattt

SEQ ID NO: 210295 - DNA, 75 bp, synthetic construct
  source 1..75: mol_type = other DNA
tatgcctaataatgtcggggggtttggggatgtggagaaggctagcaaggtattcgtaagaaacgaattgatgcc

SEQ ID NO: 210296 - DNA, 75 bp, synthetic construct
  source 1..75: mol_type = other DNA
gtgtgccgccgcaaatgatgggtatcattcccaacaataccggcggttttggggatgtggaaaaggccagtcgta

SEQ ID NO: 210297 - DNA, 75 bp, synthetic construct
  source 1..75: mol_type = other DNA
ttctggaccgccgagagctgctggattatgtggaatgcgtacagatggaccgctggtatgagccgcccgtcagct

SEQ ID NO: 210298 - DNA, 75 bp, synthetic construct
  source 1..75: mol_type = other DNA
ctactggtttgtgcaatacggcatgactacacagccgtatcagttcacgaaaggcaacatttttcatctgatgga

SEQ ID NO: 210299 - DNA, 75 bp, synthetic construct
  source 1..75: mol_type = other DNA
tcttcagaaaagaataacagagctaaatatttggttaaacataacagtaattaactttgaggattaccgttttta

SEQ ID NO: 210300 - DNA, 75 bp, synthetic construct
  source 1..75: mol_type = other DNA
cggcacgtcttcacaaacccgctttgccatgaaatccgcattcttcatcgtgcggttaaataccttccaccagca

SEQ ID NO: 210301 - DNA, 75 bp, synthetic construct
  source 1..75: mol_type = other DNA
gcgtgccgcctcagatgatggggattatgcctagcaatgttggggggtttggtgatgtggaaaaagcaagcaaag

SEQ ID NO: 210302 - DNA, 75 bp, synthetic construct
  source 1..75: mol_type = other DNA
aaggacggacttcagattatcccattgtcagaagtcgcggcgaaggatgaatttcttaatatcaagaacgtgagt

SEQ ID NO: 210303 - DNA, 75 bp, synthetic construct
  source 1..75: mol_type = other DNA
attgcagtaaagtgcaacattctgaccagcacctatatccctcacccactgctcagccagcaggctttttcacgt

SEQ ID NO: 210304 - DNA, 75 bp, synthetic construct
  source 1..75: mol_type = other DNA
gttgacggctgggataacgccgaagccgctaaagctgaaatcgttgcttccttcgagcgcgcaaagaataaataa

SEQ ID NO: 210305 - DNA, 75 bp, synthetic construct
  source 1..75: mol_type = other DNA
tgacccggttgacgtactggtcccaactccgtacccgctgcagccgggttctgtgatccgttgccgtccggttgg

SEQ ID NO: 210306 - DNA, 75 bp, synthetic construct
  source 1..75: mol_type = other DNA
tcaaccacaccctgtctctggacggtgacccggttgacgtactggtcccgactccgtacccgctgcagcctggtt

SEQ ID NO: 210307 - DNA, 75 bp, synthetic construct
  source 1..75: mol_type = other DNA
tggtggccttcgctgccgccttcggcatgtacttgctgcgcgaatacctgcgctcgcggggctatgggccgcaac

SEQ ID NO: 210308 - DNA, 75 bp, synthetic construct
  source 1..75: mol_type = other DNA
tcgtcaaagttatatcaaaagacatgaatatggtcggaaacgatctcaggcggtcagaaagccgtgtttatgctg

SEQ ID NO: 210309 - DNA, 75 bp, synthetic construct
  source 1..75: mol_type = other DNA
cccggcagaacgtcgccggctgataccgggtgtgcggaaatgcgtggggtgccaggaggtacaggagattcaggc

SEQ ID NO: 210310 - DNA, 75 bp, synthetic construct
  source 1..75: mol_type = other DNA
aatgtgcgctgacccaacggtgaaattgatgattgccgaagggattaattacagcataacgattaaagatacacg

SEQ ID NO: 210311 - DNA, 75 bp, synthetic construct
  source 1..75: mol_type = other DNA
tctgcgggatataccttagtgctggcgcaaagtagcggcacgacggtaaaaatgaccattatcagcgaagcgggt

SEQ ID NO: 210312 - DNA, 75 bp, synthetic construct
  source 1..75: mol_type = other DNA
ggcatccgcatgtccatgtgtcagtaacctgcggggggctgaataagcacggtcagtggaaaaagctgagcttcc

SEQ ID NO: 210313 - DNA, 75 bp, synthetic construct
  source 1..75: mol_type = other DNA
gtagaagatacagaacttggattgaaattaactcttgaaaacggcaacaacatttgtgtcaacaactatgaccat

SEQ ID NO: 210314 - DNA, 75 bp, synthetic construct
  source 1..75: mol_type = other DNA
gatggagagcttgaggtttcaattccacagctacgctttaagtgttttacagaaagtaagctttcacttcacgaa

SEQ ID NO: 210315 - DNA, 75 bp, synthetic construct
  source 1..75: mol_type = other DNA
acaggagtttcataaaatttttcttgattggaacaattgcatgcattttggggcgcttgactcaacagctccaat

SEQ ID NO: 210316 - DNA, 75 bp, synthetic construct
  source 1..75: mol_type = other DNA
taagcaaggaccttgcggcgcaaacagcaggaagctgccataaagagtggcggataagctgtagtccggcactga

SEQ ID NO: 210317 - DNA, 75 bp, synthetic construct
  source 1..75: mol_type = other DNA
tttcgcgaaaagtgccgcgctggtagtaaagaatccctacctgacttatgcgcgcatggcgcaaattttagatac

SEQ ID NO: 210318 - DNA, 75 bp, synthetic construct
  source 1..75: mol_type = other DNA
atgatcagaccgtttttgaagtgggcaggcggaaaaactcgcgctttgcctgagctgctgccgcacttgccaaag

SEQ ID NO: 210319 - DNA, 75 bp, synthetic construct
  source 1..75: mol_type = other DNA
gggcagcggtaaaagttacgtactggcgcggatagaagagatggtgaaacaggaactcggaaacagcgtcattgt

SEQ ID NO: 210320 - DNA, 75 bp, synthetic construct
  source 1..75: mol_type = other DNA
ttaatatgaaatatactgtggtaggtaatgcagtaccgcctccattgtttgaggcggttgctagaaaccttccag

SEQ ID NO: 210321 - DNA, 75 bp, synthetic construct
  source 1..75: mol_type = other DNA
atttcgccgggcagcaaagtgcagtggtggcgatgatattaccgactgttttaaatctgattcttggatttatca

SEQ ID NO: 210322 - DNA, 75 bp, synthetic construct
  source 1..75: mol_type = other DNA
aattggcgctaacgcggtgattgagtccggcgttgaactgggcgataacgtgattatcggtgccggttgcttcgt

SEQ ID NO: 210323 - DNA, 75 bp, synthetic construct
  source 1..75: mol_type = other DNA
aaacgtctttattgttacagatgaccgagcgcctggtgctttccgacgttcattttcggcggataagccaattga

SEQ ID NO: 210324 - DNA, 75 bp, synthetic construct
  source 1..75: mol_type = other DNA
gggataaggattttgcagacgatctcaacgtcgtcgccagcgtttttttacagcacaccccaaccttatggccca

SEQ ID NO: 210325 - DNA, 75 bp, synthetic construct
  source 1..75: mol_type = other DNA
cggataagctgtagtccggcactgagcatagcacttcccaatcgcctgttcgtcagactgggcctaccggagtta

SEQ ID NO: 210326 - DNA, 75 bp, synthetic construct
  source 1..75: mol_type = other DNA
acagtacaccgtaccggggccgtttgatgcgatcttctgccgtaacgtcatgatctactttgataaaacgaccca

SEQ ID NO: 210327 - DNA, 75 bp, synthetic construct
  source 1..75: mol_type = other DNA
tttccccgctgaatttgttggcgaaacagtacaccgtaccggggccgtttgatgcgatcttctgccgtaacgtca

SEQ ID NO: 210328 - DNA, 75 bp, synthetic construct
  source 1..75: mol_type = other DNA
agtatcgcgtatggagcgcggcggcttcaaccggcgaagagccgtacagcattgcgatgacgctggctgacacat

SEQ ID NO: 210329 - DNA, 75 bp, synthetic construct
  source 1..75: mol_type = other DNA
acccgcactgggactggatttcagcgcaacaatattcggcccgctccggtggttccgtgttggtgatgtgattta

SEQ ID NO: 210330 - DNA, 75 bp, synthetic construct
  source 1..75: mol_type = other DNA
ttctgggttgtggttgccggtcagtattcagcacaggtattggtgggcgtcattttcatggcgtgaattttccgg

SEQ ID NO: 210331 - DNA, 75 bp, synthetic construct
  source 1..75: mol_type = other DNA
tgttattactgtcgcattatctgttgtggtggtgtttgagattatactcagcggtttaagaacttacatttttgc

SEQ ID NO: 210332 - DNA, 75 bp, synthetic construct
  source 1..75: mol_type = other DNA
taaaaacaatggcgcatcaggggccgatatcaataactatgccgggcagattaaatctgctatcgaaagtaagtt

SEQ ID NO: 210333 - DNA, 75 bp, synthetic construct
  source 1..75: mol_type = other DNA
gtgctcttgattatgagtcggaaaatataataatgaaaaatatgtcaagaatatgtaagaacagaaccgtaatta

SEQ ID NO: 210334 - DNA, 75 bp, synthetic construct
  source 1..75: mol_type = other DNA
agaaactttgattatctggaaggaaaagcatttgcagataaagtcgtctcagtccgggcagcagctatgcgaaag

SEQ ID NO: 210335 - DNA, 75 bp, synthetic construct
  source 1..75: mol_type = other DNA
aggttactataaaaattactctggagacatttatctgaatgatatatccttatgtgatatcagtgacgaggattt

SEQ ID NO: 210336 - DNA, 75 bp, synthetic construct
  source 1..75: mol_type = other DNA
acttgcctgtttatacatgttttgcgttatatctaataaagcaagtatttttttatttatgatactgcaaagtag

SEQ ID NO: 210337 - DNA, 75 bp, synthetic construct
  source 1..75: mol_type = other DNA
ggatgcaagaggtaaatttttattcttttccatgttattcattacatcattatcatcgataatcatatctatttc

SEQ ID NO: 210338 - DNA, 75 bp, synthetic construct
  source 1..75: mol_type = other DNA
gatctgggctactggctggcggaaaaatccagtacggttatgcaagcattgggtaaggggctattgattatcgcc

SEQ ID NO: 210339 - DNA, 75 bp, synthetic construct
  source 1..75: mol_type = other DNA
gatctgggttactggctggcggaaaaatccagtacggttatacaggcgctgggcaaggggttattgattatcgcg

SEQ ID NO: 210340 - DNA, 75 bp, synthetic construct
  source 1..75: mol_type = other DNA
gctcaatgcgcaacaagtttcaggcgtgcgggccaaccgggaacttcccgtggtctggggcgtggcgaaaggatc

SEQ ID NO: 210341 - DNA, 75 bp, synthetic construct
  source 1..75: mol_type = other DNA
aaagcggcagcagagaaagcggcagccgacaaaaaagcagcagaaaaagcggctgctgaaaaggctgcagctgat

SEQ ID NO: 210342 - DNA, 75 bp, synthetic construct
  source 1..75: mol_type = other DNA
cgaaagcaaccgttggctgctgaatgacgtgtgccgtctggcggtggagaatctgctgtatgccgcccgaaaacg

SEQ ID NO: 210343 - DNA, 75 bp, synthetic construct
  source 1..75: mol_type = other DNA
gtgtgtggagagaagctgccgcaggtgtaccgtgctccggggatggataagccggaaccagtggcgaaagtgtgc

SEQ ID NO: 210344 - DNA, 75 bp, synthetic construct
  source 1..75: mol_type = other DNA
atatcgaggttgaggcagtcaccaaaatgctggcctgcggcacgcggatactgggcgtgaaggaatacaactgcg

SEQ ID NO: 210345 - DNA, 75 bp, synthetic construct
  source 1..75: mol_type = other DNA
tgagtcgtgacccgttcgaatgcgtgctgtgtggcggccggatggtataccgccgggccattgcggggctgaatg

SEQ ID NO: 210346 - DNA, 75 bp, synthetic construct
  source 1..75: mol_type = other DNA
ctgaaacagcacatcccggagaagttttttaagatggtgaggtacttcgggttccttgccaaccgtgtgtgtgga

SEQ ID NO: 210347 - DNA, 75 bp, synthetic construct
  source 1..75: mol_type = other DNA
ggaaacgctgacacagcgggagctggtcgcgaggctgaaacagcacatcccggagaagttttttaagatggtgag

SEQ ID NO: 210348 - DNA, 75 bp, synthetic construct
  source 1..75: mol_type = other DNA
ggatggcgatgccggagtcgttatcacatatcacgacggagtcacagtggagaagcctggtgctgaatgtcaacg

SEQ ID NO: 210349 - DNA, 75 bp, synthetic construct
  source 1..75: mol_type = other DNA
gcgccggaacaaacacaaacgacacaaacgcaatatgaacctgccatttccggcgaaatcagtcgtccgctgtca

SEQ ID NO: 210350 - DNA, 75 bp, synthetic construct
  source 1..75: mol_type = other DNA
tgccgccgaatatttctgtaaaggcaaaagataataaagcgggggtagctgctgcatatcttcagaatgttgtta

SEQ ID NO: 210351 - DNA, 75 bp, synthetic construct
  source 1..75: mol_type = other DNA
accacaatacaggagagacggcgacggaaacgctgatgcagcgggagctggtcgcgaggctgaaacagcacatcc

SEQ ID NO: 210352 - DNA, 75 bp, synthetic construct
  source 1..75: mol_type = other DNA
cgggccattgcggggctgaatgtatcagggctgaagaaaaacgcgcgggatatcagtctgctgaggtatatgccg

SEQ ID NO: 210353 - DNA, 75 bp, synthetic construct
  source 1..75: mol_type = other DNA
tcaactggcatccgcatgtacatgtgtctgtaacctgtggaggtctgaataagcatggtcagtggaaaaagctga

SEQ ID NO: 210354 - DNA, 75 bp, synthetic construct
  source 1..75: mol_type = other DNA
ggaagtccggcgcaaatgcggcgttcagagggtatcagatttgagcagaacaacaacgtggtgattcagaacgac

SEQ ID NO: 210355 - DNA, 75 bp, synthetic construct
  source 1..75: mol_type = other DNA
atttttctgaagcaggcgatggtggggatagtcgggagtatcggcagcgccattggcggtgctttcggtggtggt

SEQ ID NO: 210356 - DNA, 75 bp, synthetic construct
  source 1..75: mol_type = other DNA
cccggacactgcccgggaaatgctggagaaagcagaaaaggcttttgatgaggcggacaaaaaatggcagtggta

SEQ ID NO: 210357 - DNA, 75 bp, synthetic construct
  source 1..75: mol_type = other DNA
attttaatatcacgcccaatgtcgttacgcctgccggttctgcggttgatgctaacggcctgatgttgaccgata

SEQ ID NO: 210358 - DNA, 75 bp, synthetic construct
  source 1..75: mol_type = other DNA
ggcggtgccggaagtccggcgcagatgcggcgggccgaaggcattaattttaatcagaacaatcacgtggtgatt

SEQ ID NO: 210359 - DNA, 75 bp, synthetic construct
  source 1..75: mol_type = other DNA
tatcaggagcacctgaacgcgctggcacagcaggcggataaattcgcacagcaacaacgggcaaaacgggccgcc

SEQ ID NO: 210360 - DNA, 75 bp, synthetic construct
  source 1..75: mol_type = other DNA
aaatccccacccggggatttgtgatgtctgtcagtctgctttagggggactctttccatccggtagtttccttcc

SEQ ID NO: 210361 - DNA, 75 bp, synthetic construct
  source 1..75: mol_type = other DNA
ctgaccactgacccgacgtcggggctgattgcgatggcgaagcagttccataacgtgacggcggagcagattgcg

SEQ ID NO: 210362 - DNA, 75 bp, synthetic construct
  source 1..75: mol_type = other DNA
aatgaccgggaaaatgcccgtctggggctggcagcggccacgctgcagtcggatatggaaaaagccggtgaactg

SEQ ID NO: 210363 - DNA, 75 bp, synthetic construct
  source 1..75: mol_type = other DNA
aagtccggcgcagatgcggcgggcggaaggtatccggtttgagcagaacaacagcgtggtgattcagaacgacgg

SEQ ID NO: 210364 - DNA, 75 bp, synthetic construct
  source 1..75: mol_type = other DNA
tctgatgcgcgggtatgcggaaggtggttatgtgggcggtgccggaagtccggcgcagatgcggcgggcggaagg

SEQ ID NO: 210365 - DNA, 75 bp, synthetic construct
  source 1..75: mol_type = other DNA
gctgatgaaagcggtgtatgagatggcccgtaaaggtgcgcaggatgagctccggctgcagttgcgtgatggcgg

SEQ ID NO: 210366 - DNA, 75 bp, synthetic construct
  source 1..75: mol_type = other DNA
gaaaaagccgaagtcgtcaggcgtaaaagtgtcagccggtgagcgtcaggaagaccagtcgcatgccgcactgct

SEQ ID NO: 210367 - DNA, 75 bp, synthetic construct
  source 1..75: mol_type = other DNA
cgcctggtaccagggagattccacgctttcagcgtttaataaaaccctggttctttccggtaatcagtccggact

SEQ ID NO: 210368 - DNA, 75 bp, synthetic construct
  source 1..75: mol_type = other DNA
gaaaaagccgaagtcgtcaggcgtgaaagtgtcagccggtgagcgtcaggaagaccagtcgcatgccgcgctgct

SEQ ID NO: 210369 - DNA, 75 bp, synthetic construct
  source 1..75: mol_type = other DNA
gaaaaagccgaagtcgtcaggcgtcaaagtgtcagccggtgagcgtcaggaagaccagtcgcatgccgccctgct

SEQ ID NO: 210370 - DNA, 75 bp, synthetic construct
  source 1..75: mol_type = other DNA
gaaaaagccgaagtcgtcaggcgttaaagtgtcagccggtgagcgtcaggaagaccagtcgcatgccgctctgct

SEQ ID NO: 210371 - DNA, 75 bp, synthetic construct
  source 1..75: mol_type = other DNA
tcaatgcctggagccgtagaaggatgaacgcgttatatcgctttgcgcgggaaatgtcgcctgcgccaggtgcgt

SEQ ID NO: 210372 - DNA, 75 bp, synthetic construct
  source 1..75: mol_type = other DNA
gttgatggtggttaatatacacgccgtcaacttcagtctgggcgtggatgtctatagtaagcagttacttcctat

SEQ ID NO: 210373 - DNA, 75 bp, synthetic construct
  source 1..75: mol_type = other DNA
tacgatttcgaaagaacctttcctttacggtcaggtggtggacaacaccgggcagccgattcgctgggaaggtcg

SEQ ID NO: 210374 - DNA, 75 bp, synthetic construct
  source 1..75: mol_type = other DNA
gcggcagggctgacgtttaaccaggcgagtgagtcactggcagccctggtgaatgcaggtgtgcgtggtggtgaa

SEQ ID NO: 210375 - DNA, 75 bp, synthetic construct
  source 1..75: mol_type = other DNA
atcggtcgtccggaatcctcagcggatatgctcgccagtgcgcagaaggcatttgatgaggcggataaaaatggc

SEQ ID NO: 210376 - DNA, 75 bp, synthetic construct
  source 1..75: mol_type = other DNA
ggtgcgtctgcctccacggggacggccattcaggctgcggcggcgaacttccatttcgcgaccgggggatttacg

SEQ ID NO: 210377 - DNA, 75 bp, synthetic construct
  source 1..75: mol_type = other DNA
aagttgaacaccagaaacggctgaatcagctggcacagcaggctgcgcggtttgagcagcagcagggcgcgaagc

SEQ ID NO: 210378 - DNA, 75 bp, synthetic construct
  source 1..75: mol_type = other DNA
ggttcagatgaggcgcttacaaaagaggttgagagagcaacggaggccttaaacggaagttatgatgttcgtttt

SEQ ID NO: 210379 - DNA, 75 bp, synthetic construct
  source 1..75: mol_type = other DNA
atgctgaacaatgtttatcttggcggcattgataacccaacgtcgcggcgttatgccgtcatcaccgcttataac

SEQ ID NO: 210380 - DNA, 75 bp, synthetic construct
  source 1..75: mol_type = other DNA
acaacgtggtgattcagaacgacggtacgaatggtctgccaggtccacagatgctgaaggcagtgtatgacatgg

SEQ ID NO: 210381 - DNA, 75 bp, synthetic construct
  source 1..75: mol_type = other DNA
agactgacgccagaaaaaccgccggtgttgttgagcagaacctgagtcgtccaggcgctggctgcacaaaaagcc

SEQ ID NO: 210382 - DNA, 75 bp, synthetic construct
  source 1..75: mol_type = other DNA
aggcggataaaaaatggcagtggtaccagagccggagtcagcgccggggaaagacctcctctttccgtgccaacc

SEQ ID NO: 210383 - DNA, 75 bp, synthetic construct
  source 1..75: mol_type = other DNA
cgacgtctgggttgacggcgatggcgcgccagttccataacgtgacggcggaacagattgcgtatgttgctcagt

SEQ ID NO: 210384 - DNA, 75 bp, synthetic construct
  source 1..75: mol_type = other DNA
tcaccgcggtgaattcgtcttcacgaaggaggcaaccagacggattggcgtggggaatctctaccggctgatgcg

SEQ ID NO: 210385 - DNA, 75 bp, synthetic construct
  source 1..75: mol_type = other DNA
gcagcttgccggtggtcagaatccctggctgatcctgctgcaacagggcggtcaggtgaaggactccttcggcgg

SEQ ID NO: 210386 - DNA, 75 bp, synthetic construct
  source 1..75: mol_type = other DNA
ttggcggtgctttcggtggtggtgcatctgcttcctcggggacggccattcaggctgcggcggcgaacttccatt

SEQ ID NO: 210387 - DNA, 75 bp, synthetic construct
  source 1..75: mol_type = other DNA
ggttgccaatcgctaaccgattcatcattcgctctgccactactggcgcagagagtgaagtgtcttatgcctctg

SEQ ID NO: 210388 - DNA, 75 bp, synthetic construct
  source 1..75: mol_type = other DNA
cgcattccacggaagcgcactttgtacaccgtatggaaatccccgtggtatggggtgaaatcttcctgctggtgg

SEQ ID NO: 210389 - DNA, 75 bp, synthetic construct
  source 1..75: mol_type = other DNA
atggcgatacgccaacgcagtaatccgcattccacggaagcgcactttgttcaccgtatggaaatccctgtggta

SEQ ID NO: 210390 - DNA, 75 bp, synthetic construct
  source 1..75: mol_type = other DNA
tgcaaaaggttctgagcctgctgacgcccgttcaccgcggactggaaacgctgatgctggtgctggcggtgttgc

SEQ ID NO: 210391 - DNA, 75 bp, synthetic construct
  source 1..75: mol_type = other DNA
cgaagcaggccgccatcagcgcaaaagcccgcggtctcactgaccgtcaggcgcagcgggagtctgaagcgcagc

SEQ ID NO: 210392 - DNA, 75 bp, synthetic construct
  source 1..75: mol_type = other DNA
cgagtgggcggaaagtgcgacggacagtttttcgcaggttaaaaacgcggccacgcagacctttgacggtattgc

SEQ ID NO: 210393 - DNA, 75 bp, synthetic construct
  source 1..75: mol_type = other DNA
gaccggcagcgaacagagctggcgtggtttcacccgttctgtgctctccatgctgacagagatttttctgaagca

SEQ ID NO: 210394 - DNA, 75 bp, synthetic construct
  source 1..75: mol_type = other DNA
ctactggtttgtgcaatacggtatgactacgcagtcgtatcagttcacgaaaggcaacatttttcatctgatgga

SEQ ID NO: 210395 - DNA, 75 bp, synthetic construct
  source 1..75: mol_type = other DNA
gtgtcactgccactcataacggaacagttcatcatgcagtaagcactcaaaattggggacaaagctcatataaat

SEQ ID NO: 210396 - DNA, 75 bp, synthetic construct
  source 1..75: mol_type = other DNA
aaagtgatgcgaaaaaaacagcggcagtcgttgaacagtcaatgaaccggcaggcgctggctgcacagaaagcgg

SEQ ID NO: 210397 - DNA, 75 bp, synthetic construct
  source 1..75: mol_type = other DNA
cagggaaggcattcaaatcgatgtgggatgccattctggatatcggtcgtcctgagtcctcagcggatatgctcg

SEQ ID NO: 210398 - DNA, 75 bp, synthetic construct
  source 1..75: mol_type = other DNA
gccggaagtccggcgcagatgcggcgggccgaaggtattaattttaatcagaacaatcacgtggtgattcagaac

SEQ ID NO: 210399 - DNA, 75 bp, synthetic construct
  source 1..75: mol_type = other DNA
agggattcgctttgcggattccggctccagcagggaaacacagtgcttgtggcaacgttagcctacgaagttaaa

SEQ ID NO: 210400 - DNA, 75 bp, synthetic construct
  source 1..75: mol_type = other DNA
atgtacagagcttaggcgtgatttatatcaatcataacttcgccactgaaagcgaagcgcgtcaggcactgaacg

SEQ ID NO: 210401 - DNA, 75 bp, synthetic construct
  source 1..75: mol_type = other DNA
ttcctttggtgaggcgatccacgatcacccggaactggtgcgtaaatatctcggcaccgtggtgccggggaatga

SEQ ID NO: 210402 - DNA, 75 bp, synthetic construct
  source 1..75: mol_type = other DNA
aataatgttggggaatgtgtttttttgattgatgaagttatggaagatttaaaatactcttatagagagttcaaa

SEQ ID NO: 210403 - DNA, 75 bp, synthetic construct
  source 1..75: mol_type = other DNA
tgtgggtgcagttccggcactcgccgcattgatatggtcaatcatcatattccgccgctggccagtgacactcga

SEQ ID NO: 210404 - DNA, 75 bp, synthetic construct
  source 1..75: mol_type = other DNA
ctttcatatgcaaaccgcacaagtcggtatcatgttgaccatttatgcgtgggtagtggcgctattgtcactgcc

SEQ ID NO: 210405 - DNA, 75 bp, synthetic construct
  source 1..75: mol_type = other DNA
atgtcaattgagcatattttaatcgggaaacatcatgggggttctgattactggaggaccccattccttatattc

SEQ ID NO: 210406 - DNA, 75 bp, synthetic construct
  source 1..75: mol_type = other DNA
aggaacttacaccgagaatttagtttttcgatggatggtgctgcaactaagcatgacacgctgttaccacggttc

SEQ ID NO: 210407 - DNA, 75 bp, synthetic construct
  source 1..75: mol_type = other DNA
tgaaggcccggagggtaagagaatgtattatggcatatacaattgtgaggagggatatgttgaatatgcgaatga

SEQ ID NO: 210408 - DNA, 75 bp, synthetic construct
  source 1..75: mol_type = other DNA
caccaaccgggtcggcggcgttctctcgctggagccagcactggcgaagtacacacggcgcggcgtggatctcga

SEQ ID NO: 210409 - DNA, 75 bp, synthetic construct
  source 1..75: mol_type = other DNA
tgctggaaaaagccagaagcggtatttatcgccatgaagagttgaaaaacctgacgccgcagcaactgcaacggt

SEQ ID NO: 210410 - DNA, 75 bp, synthetic construct
  source 1..75: mol_type = other DNA
ttggtgaagatcaactgttttactgcctgcaacgcgggatcagcgaagaagacgccatctcgatgattgttaacg

SEQ ID NO: 210411 - DNA, 75 bp, synthetic construct
  source 1..75: mol_type = other DNA
cgatggcgctattctccggcatatttaatattggaatcggggcgggtgcgttggtaggtaatcaggtgagtttgc

SEQ ID NO: 210412 - DNA, 75 bp, synthetic construct
  source 1..75: mol_type = other DNA
atgtcaattgagcatattttaatcgggaaacatcatgggggttctgattactggagaactccatttttgttattt

SEQ ID NO: 210413 - DNA, 75 bp, synthetic construct
  source 1..75: mol_type = other DNA
tacttgtccgccatcccttccgccctgctgaatgagtctgccacgctgttccgccgcaagtattacatcaacggc

SEQ ID NO: 210414 - DNA, 75 bp, synthetic construct
  source 1..75: mol_type = other DNA
attacatgcgtgaatggctggcagagcaggggatggtaaagtcgggtgaatgcccgccgccggacaccgtttatg

SEQ ID NO: 210415 - DNA, 75 bp, synthetic construct
  source 1..75: mol_type = other DNA
aacgcacgccgattggcggcaaaatcgttttccagcgttggcatgacaagcaaagccaatcgcgacctgatgaaa

SEQ ID NO: 210416 - DNA, 75 bp, synthetic construct
  source 1..75: mol_type = other DNA
ggttgcccgatagacgctgatggtttctgcccgatggataagtttgatagcgtgttgaatgaagcggtgaaataa

SEQ ID NO: 210417 - DNA, 75 bp, synthetic construct
  source 1..75: mol_type = other DNA
agcgcgccgaaaatcaccgttctggtgggccatgactctaacattgcctcattattgactgcgctggattttaaa

SEQ ID NO: 210418 - DNA, 75 bp, synthetic construct
  source 1..75: mol_type = other DNA
cgtttactttgcaatactacgaaggtttcccgatggatcaggtggcctggggagagatcaaatcagatcagcagt

SEQ ID NO: 210419 - DNA, 75 bp, synthetic construct
  source 1..75: mol_type = other DNA
tgcccgccgccggacaccgtttatgcctatgccaacagcctgcaacgtaccgtcgcaaccgcgcagttctttatt

SEQ ID NO: 210420 - DNA, 75 bp, synthetic construct
  source 1..75: mol_type = other DNA
acagcttcagccggtgcggatcaccacccgtgaagagtgcaaaatacctggcctgcttgacggcgaccggcaggg

SEQ ID NO: 210421 - DNA, 75 bp, synthetic construct
  source 1..75: mol_type = other DNA
ctgggcgacaaggttgaataccagaaacgcctgaatgagctggcacagcaggcggtgcggtttacggtggaacat

SEQ ID NO: 210422 - DNA, 75 bp, synthetic construct
  source 1..75: mol_type = other DNA
tgacgctggaattaagcggttgcccgatagatgctaatggtttttgtccgatggataagtttgatagcgtgttga

SEQ ID NO: 210423 - DNA, 75 bp, synthetic construct
  source 1..75: mol_type = other DNA
tgacgctggaattaagcggttgcccgatagatgccaacggtttctgcccaatggataagtttgatagcgtgttga

SEQ ID NO: 210424 - DNA, 75 bp, synthetic construct
  source 1..75: mol_type = other DNA
gctactcactgcgctggatttcaaaccgtatcaactgcatgaccagaatgaacgtacgcccattggtggcaagat

SEQ ID NO: 210425 - DNA, 75 bp, synthetic construct
  source 1..75: mol_type = other DNA
gctgactctctccagagccgggcaggccgcagggctgacgtttaaccagcgagtgagtcactggcagcctggtga

SEQ ID NO: 210426 - DNA, 75 bp, synthetic construct
  source 1..75: mol_type = other DNA
acgatttatgtcggtggcccgtgtggcggcaggtggcggggttgccgtactggccgcgcttgctgccgccgcctg

SEQ ID NO: 210427 - DNA, 75 bp, synthetic construct
  source 1..75: mol_type = other DNA
acagccagtacacgctggcgcgtactttcgcgactcaaaaagtgtcactggaagagagtgtgcttagccaggtga

SEQ ID NO: 210428 - DNA, 75 bp, synthetic construct
  source 1..75: mol_type = other DNA
gcagcaaacggcattgcaggcatcgtataaagcatttaccgatatgcagggattgtcgctcttccagctcaacaa

SEQ ID NO: 210429 - DNA, 75 bp, synthetic construct
  source 1..75: mol_type = other DNA
tgattcagaacgacggcaccaacggacaggcggggccgcagctgatgaaggcggtgtatgacatggcccgcaagg

SEQ ID NO: 210430 - DNA, 75 bp, synthetic construct
  source 1..75: mol_type = other DNA
tgaaggcggtgtatgacatggcccgcaagggggcgcaggatgaactccggctgcagttgcgtgatggcggtatgt

SEQ ID NO: 210431 - DNA, 75 bp, synthetic construct
  source 1..75: mol_type = other DNA
agcgctatgagtgtgaagtcgctgacttgccagattttggttattaccccgttccttcagcagaaggcggtaaaa

SEQ ID NO: 210432 - DNA, 75 bp, synthetic construct
  source 1..75: mol_type = other DNA
gccattctccgtgctgcagaacgcgactggaagtggctggaaaaagcgcctgtcatcaagataccagcggtcaga

SEQ ID NO: 210433 - DNA, 75 bp, synthetic construct
  source 1..75: mol_type = other DNA
cctgggagcaacttttgcagagaactgaacaatactggcagcaactgccgggtacaggagcacggcgtgccagca

SEQ ID NO: 210434 - DNA, 75 bp, synthetic construct
  source 1..75: mol_type = other DNA
actggatcggggcgcgccagacaggttattgaatggaaggaaaatgcgcaaatcaagaagctgggcagttggctg

SEQ ID NO: 210435 - DNA, 75 bp, synthetic construct
  source 1..75: mol_type = other DNA
ccgcaggaactggcttatggcgagcgtggcgctggcgcgtctattcctccgttcagcaccctggtgtttgaagtc

SEQ ID NO: 210436 - DNA, 75 bp, synthetic construct
  source 1..75: mol_type = other DNA
tcgtcgtgcaggaattgaagatttccgtttccatgacctcagacacacctgggcaagctggctgattcagtcagg

SEQ ID NO: 210437 - DNA, 75 bp, synthetic construct
  source 1..75: mol_type = other DNA
taggcaagcatcacaaatgggtgtttgtacataccaaggcggctaagcgagcagatggaacatcaacgcctgcgg

SEQ ID NO: 210438 - DNA, 75 bp, synthetic construct
  source 1..75: mol_type = other DNA
catggcactgcgatttcgtcgcgccagatggatcaagagttagacgctctcttgaaacatcggacaagaggcaag

SEQ ID NO: 210439 - DNA, 75 bp, synthetic construct
  source 1..75: mol_type = other DNA
tatcgaaatggttcgtcgatatgctcacctcgcacctaatcaccttaccgaacacgcacggcaaatagactcgat

SEQ ID NO: 210440 - DNA, 75 bp, synthetic construct
  source 1..75: mol_type = other DNA
ttcacgcagcatccgccggtggcgcggtgcagatgccggatgcgacgcttgtcgcgtcttatccagcctacggga

SEQ ID NO: 210441 - DNA, 75 bp, synthetic construct
  source 1..75: mol_type = other DNA
catcagtttaatctggctcgtaagcagccttttacccgctgggtgatggcaatgggaataccgttaacccggggg

SEQ ID NO: 210442 - DNA, 75 bp, synthetic construct
  source 1..75: mol_type = other DNA
cgatctttgggtgcagccaaaagttgatggcgttgcggtaaccctggtttatcgggacgggaaactgaacaaagc

SEQ ID NO: 210443 - DNA, 75 bp, synthetic construct
  source 1..75: mol_type = other DNA
gttttggggctggatggcattggcgaagctggctggcgcgcactgcatcagacgcatcgctttgagcatatcttt

SEQ ID NO: 210444 - DNA, 75 bp, synthetic construct
  source 1..75: mol_type = other DNA
tgccagaagcactggttgcaggcattgccgatgcgctggaaggcaaacatccggctgttccggttgatgtggtgc

SEQ ID NO: 210445 - DNA, 75 bp, synthetic construct
  source 1..75: mol_type = other DNA
tgtaacaatagaagggaaacctgttgcttatcatggttcagttgttgggattaataaccacaactgccttggtaa

SEQ ID NO: 210446 - DNA, 75 bp, synthetic construct
  source 1..75: mol_type = other DNA
tatgtcgacgataaggttattgaggtgaaagcctatgccgataatctgctggccgcacacctcgccgccgcgaat

SEQ ID NO: 210447 - DNA, 75 bp, synthetic construct
  source 1..75: mol_type = other DNA
tatgaggaaaccgatgaatgggatattggtgtcatttatcgttctacatacgtgcagggacgcgggcttgatgca

SEQ ID NO: 210448 - DNA, 75 bp, synthetic construct
  source 1..75: mol_type = other DNA
ccgcacacgcagtacctcaaaacagcggatattgataaatatattccggttggctttccgctgccgtggccgcag

SEQ ID NO: 210449 - DNA, 75 bp, synthetic construct
  source 1..75: mol_type = other DNA
cggcattacccgttggtgtgcctgttccgtggccttccgccactccgccaacaggctggctgaaatgcaacggtg

SEQ ID NO: 210450 - DNA, 75 bp, synthetic construct
  source 1..75: mol_type = other DNA
ggatgtcaggtttaatacctacccttctgattctggcgtttttacaaccagcgtcatcggagatgcttcatctga

SEQ ID NO: 210451 - DNA, 75 bp, synthetic construct
  source 1..75: mol_type = other DNA
atgcttcacgagttgttaatacagcacaggaaactcgcccaagaaacattgcatttaactacatagtgagggcgg

SEQ ID NO: 210452 - DNA, 75 bp, synthetic construct
  source 1..75: mol_type = other DNA
tattaccgatccggcaaccggtgcggttatcgtcaagaaaggccaacaacttagttcgttcgcccaattgcgcga

SEQ ID NO: 210453 - DNA, 75 bp, synthetic construct
  source 1..75: mol_type = other DNA
tcgaagatccagaccgaagtgttccgtctgccatcgacctgcttcgcagaagagaacggttcaatcgttaactca

SEQ ID NO: 210454 - DNA, 75 bp, synthetic construct
  source 1..75: mol_type = other DNA
agtttattcgtggctgggatgacgggcgtggtgtggatgcgggacgtgccttgctaagtcttcaggatgactctt

SEQ ID NO: 210455 - DNA, 75 bp, synthetic construct
  source 1..75: mol_type = other DNA
gttcagacgagatgctgactttaagttctacaactaatgccttgtccccggacggtattgatgccactaattcgt

SEQ ID NO: 210456 - DNA, 75 bp, synthetic construct
  source 1..75: mol_type = other DNA
caagccggagtcccgttgtcagtgttacaggaaatgggaggctgggagtctatcgaaatggttcgtcgatatgct

SEQ ID NO: 210457 - DNA, 75 bp, synthetic construct
  source 1..75: mol_type = other DNA
ttgtttacatccagctgtacgcattttgcggcgggctgatggtggtcgcgggcgtctggttgattacgcgtcggg

SEQ ID NO: 210458 - DNA, 75 bp, synthetic construct
  source 1..75: mol_type = other DNA
tcgcaaagaaacgaaaatgttcagatggtactgtcagaaaagaacttcaaactgcactaggatttttggacggga

SEQ ID NO: 210459 - DNA, 75 bp, synthetic construct
  source 1..75: mol_type = other DNA
agtgccgagcaatagaaaataataaagacagactttcttgttacgataagtcaatacaaccgactcgaacgaaag

SEQ ID NO: 210460 - DNA, 75 bp, synthetic construct
  source 1..75: mol_type = other DNA
gattcaggataaccgtctgcggctgatgcaactggcggggcccggagcgcgctttacctggtggggtgaagatgg

SEQ ID NO: 210461 - DNA, 75 bp, synthetic construct
  source 1..75: mol_type = other DNA
cgatgcgctgtatctcgatgaaatcacgcttaccagcgagcaggatgcagttctgcgctacggtcaggtggaagt

SEQ ID NO: 210462 - DNA, 75 bp, synthetic construct
  source 1..75: mol_type = other DNA
gtcttctggcaaatccgcgtaccgcgcattcttgctgcgctgttactgggcgctgcgctggcgggggcaggaacc

SEQ ID NO: 210463 - DNA, 75 bp, synthetic construct
  source 1..75: mol_type = other DNA
gtgagggtgagggtttatatcgccggtccgatgaccgggtataaaaatttcaaccgtgaggcgttccacaaggcg

SEQ ID NO: 210464 - DNA, 75 bp, synthetic construct
  source 1..75: mol_type = other DNA
aaactggtaccagtcagcgggtgcgagagcggaactggcgctggcggagaagctgggttgtgcggtgattttcca

SEQ ID NO: 210465 - DNA, 75 bp, synthetic construct
  source 1..75: mol_type = other DNA
tacatggatatttgtacggcgatgctccgctgtgtggatacgatttacatgctgaaaggctggcatcggtcggca

SEQ ID NO: 210466 - DNA, 75 bp, synthetic construct
  source 1..75: mol_type = other DNA
tttactcagatcacgccttacaatgaaagtcccgtgagtgcgacatttgatgttgctggtctgtcagaggcattg

SEQ ID NO: 210467 - DNA, 75 bp, synthetic construct
  source 1..75: mol_type = other DNA
tgaccgggtataaaaatttcaaccgtgaggcatttcacaaggcggaagaggagctgaagcgggaagggtatacag

SEQ ID NO: 210468 - DNA, 75 bp, synthetic construct
  source 1..75: mol_type = other DNA
gaagaggcactgaaacgggaagggcataccgtcttaaacccggcagtacttccggacgggctgacacagccgcac

SEQ ID NO: 210469 - DNA, 75 bp, synthetic construct
  source 1..75: mol_type = other DNA
ggactgacggtcttggcgtgatgacccgcggtgtgaccgatgacagcggtaccttgcagttacaacatatatcgc

SEQ ID NO: 210470 - DNA, 75 bp, synthetic construct
  source 1..75: mol_type = other DNA
ttcttaactcttcgtgaactggatgaagcaatgtttaactacggtaaagaaaccgctcaggaagccccagaacaa

SEQ ID NO: 210471 - DNA, 75 bp, synthetic construct
  source 1..75: mol_type = other DNA
atgtacaagaatactgttaagactactactcctttcatcctgttaggttttgatgctgacagcttccacaatgac

SEQ ID NO: 210472 - DNA, 75 bp, synthetic construct
  source 1..75: mol_type = other DNA
agcgttgggggggatgggctgctagtgataattcaggcgttgactattctccaatcgcagcaggatttaaagggc

SEQ ID NO: 210473 - DNA, 75 bp, synthetic construct
  source 1..75: mol_type = other DNA
gataaggcgtccacgccgcatccgccagtggcgcggtgcaattgccggatgcgacgcttgccgtgtcttatccgg

SEQ ID NO: 210474 - DNA, 75 bp, synthetic construct
  source 1..75: mol_type = other DNA
aaacgaaatggtcgtcctactgtgatcatcgactgttttactgatgagggtcgtcttcaatacaacgatattcca

SEQ ID NO: 210475 - DNA, 75 bp, synthetic construct
  source 1..75: mol_type = other DNA
tccggtgacattgatctgggtagcttcgttactgtctatgaactggatgaagcaatgtttaactacggcaaataa

SEQ ID NO: 210476 - DNA, 75 bp, synthetic construct
  source 1..75: mol_type = other DNA
gaaatatatggcgacgatgcctccggttgtgttacctgctcctgcgggcgcatgggccaaacataagttaaccgg

SEQ ID NO: 210477 - DNA, 75 bp, synthetic construct
  source 1..75: mol_type = other DNA
acgattcgcttccttccagcaactatgcgccgcccgccgggggaacgttctttttgctcgctgacagcagtttta

SEQ ID NO: 210478 - DNA, 75 bp, synthetic construct
  source 1..75: mol_type = other DNA
attactctttaagtaccgccgcacaatacagtaatagcggcgagtcggttgtgttccgttatgccgcgctggaat

SEQ ID NO: 210479 - DNA, 75 bp, synthetic construct
  source 1..75: mol_type = other DNA
tgcacattacactctaagcaccgccgcacaatacagcaaaagtggcgagccggtggtgttccgttatgccgcact

SEQ ID NO: 210480 - DNA, 75 bp, synthetic construct
  source 1..75: mol_type = other DNA
gcgctgagatgcgtcagacgctgacgctgcacaaaggggcgaactatatttcgctggagcagaacattctgcaat

SEQ ID NO: 210481 - DNA, 75 bp, synthetic construct
  source 1..75: mol_type = other DNA
ttgatgcgttagtcgatgaaccgtggggtggcgtgatcaacaccggtagccgtctgatcccgctcagtctcgcct

SEQ ID NO: 210482 - DNA, 75 bp, synthetic construct
  source 1..75: mol_type = other DNA
ttccccgatgcaccttacattgctcgcccgggaaatattaacgcctgggataacgaagattttgtaaaagcagtc

SEQ ID NO: 210483 - DNA, 75 bp, synthetic construct
  source 1..75: mol_type = other DNA
actcgcatcacctggatgcggggcggtttagcgtgaaaacgggcgaggcgggcaatggtcatgcttttacgcagg

SEQ ID NO: 210484 - DNA, 75 bp, synthetic construct
  source 1..75: mol_type = other DNA
aggcccgcaggtcgcgtaactatattaatgatacggaaatccaggtgcagcgccggcagacggcggcatggcgac

SEQ ID NO: 210485 - DNA, 75 bp, synthetic construct
  source 1..75: mol_type = other DNA
ttcaaaaaatattgatggttttgcgctggatggtgagcaggacgaagaaaccggcgaaaacctgcgtgatatggc

SEQ ID NO: 210486 - DNA, 75 bp, synthetic construct
  source 1..75: mol_type = other DNA
tatctgcctgcgctgatcgccattttgctgaacagattacttgatggtctggatggcgcgctggcgcggcgtaga

SEQ ID NO: 210487 - DNA, 75 bp, synthetic construct
  source 1..75: mol_type = other DNA
aatttacccactatccttaccaccagttttgaaagcggacctaacggcccactagtccctgagctgaaagcacta

SEQ ID NO: 210488 - DNA, 75 bp, synthetic construct
  source 1..75: mol_type = other DNA
aataccatgccttttgacgcagtatcaatcggcaatcatgagtttgaccatggctgggataatgccctgcgacaa

SEQ ID NO: 210489 - DNA, 75 bp, synthetic construct
  source 1..75: mol_type = other DNA
gtcgcggtgcgatgaccaaccactgggtggatatcaaaaacgctaacgtcgtaatggtgatgggcggtaacgctg

SEQ ID NO: 210490 - DNA, 75 bp, synthetic construct
  source 1..75: mol_type = other DNA
caaaatcaacgccgaatacgttaagcattacaccaacgctagcctgctggtgcgtgatgattttgctttcgaaga

SEQ ID NO: 210491 - DNA, 75 bp, synthetic construct
  source 1..75: mol_type = other DNA
ttttctcaattagctatcgaaacagttagaggattgagaattccaggtcgaccacacgagtattttgtcgagcat

SEQ ID NO: 210492 - DNA, 75 bp, synthetic construct
  source 1..75: mol_type = other DNA
catgcggtgtatatcatccttacaagtacttaggggaacgaaatcctcgttgtgacgacatctctaggctcatga

SEQ ID NO: 210493 - DNA, 75 bp, synthetic construct
  source 1..75: mol_type = other DNA
tattgggcaatgtttatcataaagagagtgagaaacccttctggaacaagccctacaccatcctggaaaaagatg

SEQ ID NO: 210494 - DNA, 75 bp, synthetic construct
  source 1..75: mol_type = other DNA
ctggcgtgagctgcgtcggttgcgggatcaggtactgacagatcgcagaatggatgcggttctggccgctgctga

SEQ ID NO: 210495 - DNA, 75 bp, synthetic construct
  source 1..75: mol_type = other DNA
catgcagagatgttgacgattacccatccggcatatggcaatagtatgacgtttaaggcgcctgcggatttttaa

SEQ ID NO: 210496 - DNA, 75 bp, synthetic construct
  source 1..75: mol_type = other DNA
cgcaggaaccctggttggttatcctgtatcaggatgaccacattatggtggtcaacaagccgagcggtttgttgt

SEQ ID NO: 210497 - DNA, 75 bp, synthetic construct
  source 1..75: mol_type = other DNA
ccctgccgaccgccgtgcggcatatccgtcggcgacacgctgtgtctactgtcagtcagcgcttgagtcaaaagc

SEQ ID NO: 210498 - DNA, 75 bp, synthetic construct
  source 1..75: mol_type = other DNA
accattttctgcgccagactcaatattagttgatacaaacgccatcaaagctgcattacaaagtgctcatgttaa

SEQ ID NO: 210499 - DNA, 75 bp, synthetic construct
  source 1..75: mol_type = other DNA
taatgggattttctatgcgcgtgcggtctatccactaaaaagactgaatccttcttctctgctgtttagaagagc

SEQ ID NO: 210500 - DNA, 75 bp, synthetic construct
  source 1..75: mol_type = other DNA
gctggcgcggcgcagagggcttaccgacgcgggcggctttcttgatatttctctcgattttcttttttacgcgct

SEQ ID NO: 210501 - DNA, 75 bp, synthetic construct
  source 1..75: mol_type = other DNA
tgaaatcacagaacagggtaacgagtacgcggaggacgtgcagcgcgttcagggtgtctattctcccttagttcc

SEQ ID NO: 210502 - DNA, 75 bp, synthetic construct
  source 1..75: mol_type = other DNA
cgcaatgggatggaagtacgccgcaggatacccagcgctatttatgcggcgtatgggcaaaagcacgcgcagcga

SEQ ID NO: 210503 - DNA, 75 bp, synthetic construct
  source 1..75: mol_type = other DNA
tttgagatttggtcagggcgctctgatttaccgcaacgggcggcttaaagagactcaaaacgagccattgcagga

SEQ ID NO: 210504 - DNA, 75 bp, synthetic construct
  source 1..75: mol_type = other DNA
catgaaatacccgactggttagccgggtattttggcaaccgctacgaaaaacttctggctggtcgtgatggccgt

SEQ ID NO: 210505 - DNA, 75 bp, synthetic construct
  source 1..75: mol_type = other DNA
gggcttaccgacgcgggcggctttctcgatatttctctcgattttcttttttacgcgctggtgccttttgggttt

SEQ ID NO: 210506 - DNA, 75 bp, synthetic construct
  source 1..75: mol_type = other DNA
tatctggttggatttcccagtcactttatgacttcaccgaacagtttgactctggcactgacgacgccagagagc

SEQ ID NO: 210507 - DNA, 75 bp, synthetic construct
  source 1..75: mol_type = other DNA
tgctgatccagtggaacggcagcaagtggacgggtaacgatattccggacttcggcaatgccgcaccaggtacgc

SEQ ID NO: 210508 - DNA, 75 bp, synthetic construct
  source 1..75: mol_type = other DNA
gctgccggtgcagcaggcgcagcaacgggagagctggcagccagagcgattgccggaatgctgtatcctggcgtg

SEQ ID NO: 210509 - DNA, 75 bp, synthetic construct
  source 1..75: mol_type = other DNA
tttggcgttggtgcagtggggctttctacgggtaaagatggtgttagtttcacttttggttttggcccaagttgg

SEQ ID NO: 210510 - DNA, 75 bp, synthetic construct
  source 1..75: mol_type = other DNA
ctgtcggcagtaaaaacaccggatgaattactgcgccagttacgccgcgcagtcagattattaaacggttccgtc

SEQ ID NO: 210511 - DNA, 75 bp, synthetic construct
  source 1..75: mol_type = other DNA
gctgaatgccggaatggaccgtcagacggtgctgcagatgaccgggctttcaaatgaccagctgaatatgctgaa

SEQ ID NO: 210512 - DNA, 75 bp, synthetic construct
  source 1..75: mol_type = other DNA
aaaacgctaacgtcgtaatggtgatgggtggtaacgctgctgaagcacatcccgtcggtttccgctgggcgatgg

SEQ ID NO: 210513 - DNA, 75 bp, synthetic construct
  source 1..75: mol_type = other DNA
ggcacggaaacagtatgcttcgacagtgataacgaagatatgggtaaacgcacccgcgatgtaaccatgaaactc

SEQ ID NO: 210514 - DNA, 75 bp, synthetic construct
  source 1..75: mol_type = other DNA
ggcgaaatatccaaagctggccgtcgcttatccttctggcaatctgcctgatttacgcggtgagtttttgcgtgg

SEQ ID NO: 210515 - DNA, 75 bp, synthetic construct
  source 1..75: mol_type = other DNA
ggtgaaatatccggggctcgccgcagtatttccgtcggggaatctgcctgatttacgcggtgagtttatccgtgg

SEQ ID NO: 210516 - DNA, 75 bp, synthetic construct
  source 1..75: mol_type = other DNA
tcggttcaggataaaaccactctgcaaattaagccggaaaacaccatcaagaaccacaaacgctttattatcggc

SEQ ID NO: 210517 - DNA, 75 bp, synthetic construct
  source 1..75: mol_type = other DNA
agataaaagccctgcaaaaaaccgccgcagaaaaacagccgcagcgccgcccggtggatattgtcgcttaccacc

SEQ ID NO: 210518 - DNA, 75 bp, synthetic construct
  source 1..75: mol_type = other DNA
tgcaaaaagaacaagcagcaaaacatgagaaacaaccggtaggtgttgtagcagccactcagcccatcaaattag

SEQ ID NO: 210519 - DNA, 75 bp, synthetic construct
  source 1..75: mol_type = other DNA
atatacccttgatggtaaagagctcactgcgccaattagcgcccatcagcgggtaggggaaattgaactttacga

SEQ ID NO: 210520 - DNA, 75 bp, synthetic construct
  source 1..75: mol_type = other DNA
tgcctcactgcatcatggagtggggggaactgcccgccagatggtgccggggctgatgatacgggaggtgtcatg

SEQ ID NO: 210521 - DNA, 75 bp, synthetic construct
  source 1..75: mol_type = other DNA
atcaactgattaaacggataagaaaactgctggcgctgagccggaataacagtaacccccatgaggcaggccagg

SEQ ID NO: 210522 - DNA, 75 bp, synthetic construct
  source 1..75: mol_type = other DNA
aaggactgccatggcggtgaccatgcacgctggcagggatacaacgaggggaaaaaggcaacgctgaatcacggt

SEQ ID NO: 210523 - DNA, 75 bp, synthetic construct
  source 1..75: mol_type = other DNA
tcgcgacaacccgactgcgctttttcaccagttgtgtggggatcgtccggcaacgctgctgctggaatccgcaga

SEQ ID NO: 210524 - DNA, 75 bp, synthetic construct
  source 1..75: mol_type = other DNA
gacgaaacccgtaataaagcccgcgctgtactgcgcgctattgccaccgcgcatcatgcacaggagacgttctaa

SEQ ID NO: 210525 - DNA, 75 bp, synthetic construct
  source 1..75: mol_type = other DNA
atgattaacgatattaaatgggtacaggcacaacgtgaagccaccgactggcgtcaggccgtggaaatcgccacc

SEQ ID NO: 210526 - DNA, 75 bp, synthetic construct
  source 1..75: mol_type = other DNA
catcggtgtgatggggatcttaattcgaattctcggcggtatcttccagaaagcattaaatatcagcaagatcga

SEQ ID NO: 210527 - DNA, 75 bp, synthetic construct
  source 1..75: mol_type = other DNA
gaaatcgcccagcttggtttacgggcgctggcagcagcaacgctttccaacctgatgagtgcgaccattgccggg

SEQ ID NO: 210528 - DNA, 75 bp, synthetic construct
  source 1..75: mol_type = other DNA
ttgtcgtgactgacgcgtcagggacctttaatgaaattacccggcattcggcgtgggatcgcatgtcgcaagctg

SEQ ID NO: 210529 - DNA, 75 bp, synthetic construct
  source 1..75: mol_type = other DNA
aaaaccaccgcaattatttcttttgcactgtgtggttttgccaactttggctccattggtgtggtggtgggtgcc

SEQ ID NO: 210530 - DNA, 75 bp, synthetic construct
  source 1..75: mol_type = other DNA
gaatcaaaagtcacttttgaaaatctttctttcactgatactcctcccaaaagtgttattgaagcagtggccagc

SEQ ID NO: 210531 - DNA, 75 bp, synthetic construct
  source 1..75: mol_type = other DNA
aagctggcgatcaatgaatttgtcgcttatctcaatttctcgccatatctgcaaacgggtggcactctggatgct

SEQ ID NO: 210532 - DNA, 75 bp, synthetic construct
  source 1..75: mol_type = other DNA
aaggcagaactggcactggcggagaaactgggacatgcggttattttccaggaggcaaccagtgagcgaaattaa

SEQ ID NO: 210533 - DNA, 75 bp, synthetic construct
  source 1..75: mol_type = other DNA
cgcagtttaaccagccggatcatgaaattgtcgatcacttcacctatgtgtttatgggcgacggctgcctgatgg

SEQ ID NO: 210534 - DNA, 75 bp, synthetic construct
  source 1..75: mol_type = other DNA
atgtcccgaaaagaccttgccaatgcgattcgcgcgctcagtatggatgcggtacaaaaagccaattctggtcat

SEQ ID NO: 210535 - DNA, 75 bp, synthetic construct
  source 1..75: mol_type = other DNA
tatatcacaacgctttataacccgcagccccataccgtggtgggttactattacaacgtcgacccgggttacctg

SEQ ID NO: 210536 - DNA, 75 bp, synthetic construct
  source 1..75: mol_type = other DNA
ccgaataaagcaggtaaagaagaagcgcatggtgcaccgttgggtgaagaagaagttgtgctggcacggcaaaaa

SEQ ID NO: 210537 - DNA, 75 bp, synthetic construct
  source 1..75: mol_type = other DNA
aaagcgcagcagagctggaatgagaagtttgccgcgtataaaaaggctcatccgcaactggcagaagagtttacc

SEQ ID NO: 210538 - DNA, 75 bp, synthetic construct
  source 1..75: mol_type = other DNA
tgtgtcgctgaaggaagatccggcgggcaactacattcactacggggtgcgtgaatttggcatgaccgctatcgc

SEQ ID NO: 210539 - DNA, 75 bp, synthetic construct
  source 1..75: mol_type = other DNA
gtctgaaatatattacagccgcaggactggtctgaatgaattatcagaaatatcagaggaaacttatgatgacag

SEQ ID NO: 210540 - DNA, 75 bp, synthetic construct
  source 1..75: mol_type = other DNA
gtctgaaatatattacagccgcaggactggtctgaatgaatcatcagaaacatcagagggaacttatgatgacag

SEQ ID NO: 210541 - DNA, 75 bp, synthetic construct
  source 1..75: mol_type = other DNA
tttaactcatatgaaccattgtcgtcatcttttttatattataacaaagaaaaaaacaaaatatatttaacatca

SEQ ID NO: 210542 - DNA, 75 bp, synthetic construct
  source 1..75: mol_type = other DNA
tggacgggatgttcggtaaagatggtgtgatggatggtcctggcagtgatgttattcctgtgaaaatcaacggca

SEQ ID NO: 210543 - DNA, 75 bp, synthetic construct
  source 1..75: mol_type = other DNA
tccggtaggcctgaaagacatgtttggtgccgacggttacatggatggtcctggcggaggtgtaacaccagtaac

SEQ ID NO: 210544 - DNA, 75 bp, synthetic construct
  source 1..75: mol_type = other DNA
gacgggaataatcgtcagcctgaatatcccctttatccgtcaggggcttttttatcccgccagccctgtagaaat

SEQ ID NO: 210545 - DNA, 75 bp, synthetic construct
  source 1..75: mol_type = other DNA
gggaactatattcactacggggtgcgtgaatttggcatgaccgctattgctaacggtatcgcactccacggtgga

SEQ ID NO: 210546 - DNA, 75 bp, synthetic construct
  source 1..75: mol_type = other DNA
gcgacaatggcgttacaaaacggttttatcaccgactcacaccagttcctgcaaaccctgctgctgcgcgaaaaa

SEQ ID NO: 210547 - DNA, 75 bp, synthetic construct
  source 1..75: mol_type = other DNA
aagcgcctgcgttaaacaaccgttcgtattattcgcccgcaaagcgcaggctattgactggaaagccagcgatgg

SEQ ID NO: 210548 - DNA, 75 bp, synthetic construct
  source 1..75: mol_type = other DNA
cagcacgtagtaaaaaggggcgcatcaaacgtcagatgtttacaaagcttcgcaccacaaaatacctgaaaactg

SEQ ID NO: 210549 - DNA, 75 bp, synthetic construct
  source 1..75: mol_type = other DNA
agcagttatgaacctcgacgggtaacagcacgcagtaaaaaggggcgcatcaaacgtcagatgtttgcaaagctg

SEQ ID NO: 210550 - DNA, 75 bp, synthetic construct
  source 1..75: mol_type = other DNA
cgcctgcgttaaacaaccgttcgtgttattcgcccgcaaagcgcaggctattgactggaaagccagcgatggcga

SEQ ID NO: 210551 - DNA, 75 bp, synthetic construct
  source 1..75: mol_type = other DNA
ttgacctgaatattcagggcaatggcacttattccgttctgaagcagttggcgacaatggcgttacaaaacggtt

SEQ ID NO: 210552 - DNA, 75 bp, synthetic construct
  source 1..75: mol_type = other DNA
gacttcaaccagctcgccagcacgctggagaaaaaccagcaaatgcggcgcgattttatggccgatatttctcac

SEQ ID NO: 210553 - DNA, 75 bp, synthetic construct
  source 1..75: mol_type = other DNA
acaccacattaaaagcatttgttgcaactttgggatactctagagcaacctttgttaagttttatgatcatgaac

SEQ ID NO: 210554 - DNA, 75 bp, synthetic construct
  source 1..75: mol_type = other DNA
tatttctggcggttctgtttactggctttaacgtggaagcagcgagcgtgaaacaagcgctcagctgcgacccaa

SEQ ID NO: 210555 - DNA, 75 bp, synthetic construct
  source 1..75: mol_type = other DNA
cgcgatcgtttaatgcagttgttcaataacttactggaaaacagcctgcgctacactgacagcggcggcagcctg

SEQ ID NO: 210556 - DNA, 75 bp, synthetic construct
  source 1..75: mol_type = other DNA
ctacccgcgtgacgcccaccagtgaagatgaactgggcaaactggcgcaagacttcaaccagctcgccagcacgc

SEQ ID NO: 210557 - DNA, 75 bp, synthetic construct
  source 1..75: mol_type = other DNA
tgcgcggcgaactggaagccatccaggatggtgtacgtaaattcacgccagagacagtggcttctttacaggcgg

SEQ ID NO: 210558 - DNA, 75 bp, synthetic construct
  source 1..75: mol_type = other DNA
aagaccgtaaaaaagtcgaagacgcagcagagtttatgcgcaaggcgatcaacaacctgggctttactgcacgta

SEQ ID NO: 210559 - DNA, 75 bp, synthetic construct
  source 1..75: mol_type = other DNA
gtggtcaggagttttatcccggcatcgttccgcgtatcgggaaaaacttcgttcaggtggtcgctatcgaaggct

SEQ ID NO: 210560 - DNA, 75 bp, synthetic construct
  source 1..75: mol_type = other DNA
atatcaatatggggcttaatcgccgtcagattgaaatcatcgcgtctgccgtaccaaaacgcgattactactacg

SEQ ID NO: 210561 - DNA, 75 bp, synthetic construct
  source 1..75: mol_type = other DNA
ctactttggttccttaccgggccatggcgttgaaaacgtgcggcgaccgctggtaaatacccttaaccttgccga

SEQ ID NO: 210562 - DNA, 75 bp, synthetic construct
  source 1..75: mol_type = other DNA
agaaatacgcactacctgtgctgctctatctctttcgtcgcattgaagaatctctggatggtaatcctacactca

SEQ ID NO: 210563 - DNA, 75 bp, synthetic construct
  source 1..75: mol_type = other DNA
aagtctacccacctggcgttaaccgctatgcagtggcgtcgttactctaattcgcgaattttcactttcgataaa

SEQ ID NO: 210564 - DNA, 75 bp, synthetic construct
  source 1..75: mol_type = other DNA
gaggtcaggagcttattcctggcattacgccgcgtatcgggaaaaactttattcaggttgtggcgattgaaggct

SEQ ID NO: 210565 - DNA, 75 bp, synthetic construct
  source 1..75: mol_type = other DNA
tgtatgacgaccttaatgcgaatggtctgcccggtgaaagtgctgccatgaagacctctgatattccgggtgttc

SEQ ID NO: 210566 - DNA, 75 bp, synthetic construct
  source 1..75: mol_type = other DNA
gattgaaggtgcgtatggtgcacagacggtggcaggcagtggtgaattacgtctgaacggcgcaattccggaacg

SEQ ID NO: 210567 - DNA, 75 bp, synthetic construct
  source 1..75: mol_type = other DNA
tatggcaactcaacaggttagtgatgcggccaactccggcattctcgatgtcattattgagtctactgcctgccg

SEQ ID NO: 210568 - DNA, 75 bp, synthetic construct
  source 1..75: mol_type = other DNA
cacgccacgtatcgggaaaaacttcattcaggttgtggcgattgaaggctacccctctgaatcttatccaggcat

SEQ ID NO: 210569 - DNA, 75 bp, synthetic construct
  source 1..75: mol_type = other DNA
gttttatgtctcagctgttcaataccaataacggctacgttgatgaagacgcactgtctatggtcaacgatgcgt

SEQ ID NO: 210570 - DNA, 75 bp, synthetic construct
  source 1..75: mol_type = other DNA
gtgccccaggcgcaatcggcccttatgttcaaggcgttgatttaggcagcatggtcttcacctccgggcaaattc

SEQ ID NO: 210571 - DNA, 75 bp, synthetic construct
  source 1..75: mol_type = other DNA
atgacgacacaatccagtcctgttattactgatatgaaagtcattccggccgccggacatgacagcatgttgctc

SEQ ID NO: 210572 - DNA, 75 bp, synthetic construct
  source 1..75: mol_type = other DNA
ttgcagacatttgatttgcgtaccactattcatgtagttaccgggatagaagcggcaatgctggatctgttgggg

SEQ ID NO: 210573 - DNA, 75 bp, synthetic construct
  source 1..75: mol_type = other DNA
ataactggttcttttacagccacagttatcttttatatgttttattttttgaattattccttttgtcggatgggg

SEQ ID NO: 210574 - DNA, 75 bp, synthetic construct
  source 1..75: mol_type = other DNA
tgctttattgatagtgaacagagagataatacattactaatgattggtaaagtcatcgattacaaggaggaaatt

SEQ ID NO: 210575 - DNA, 75 bp, synthetic construct
  source 1..75: mol_type = other DNA
aagggggaaattgttgcgctaatatcttctttattgcaatctaagtttgttaagattgaattaaaaaagaaatat

SEQ ID NO: 210576 - DNA, 75 bp, synthetic construct
  source 1..75: mol_type = other DNA
acttcgttttcttatgttattatttccgctattatggaaaacgccggttaatataacacataatcctctgaacat

SEQ ID NO: 210577 - DNA, 75 bp, synthetic construct
  source 1..75: mol_type = other DNA
atgcgtgggccgatcaggcattgctggaagtggtcaatcgctttctgtgaaaaactcaaaccggatcagtatctc

SEQ ID NO: 210578 - DNA, 75 bp, synthetic construct
  source 1..75: mol_type = other DNA
tttcctgttcgggtcaatcgtggttatcgttctgccggatacaatgaaaatgatgaaatcctaaaaggtctgtct

SEQ ID NO: 210579 - DNA, 75 bp, synthetic construct
  source 1..75: mol_type = other DNA
catgccccctacgacggttacgaacactttgaaactggcgagctgtatggcaagggccagtttatcgtaatgccc

SEQ ID NO: 210580 - DNA, 75 bp, synthetic construct
  source 1..75: mol_type = other DNA
cattgacgcaaaaaccaaacagcccatgtttacaccgtatttaattaaagacaccgaagtggtcgataaagacgg

SEQ ID NO: 210581 - DNA, 75 bp, synthetic construct
  source 1..75: mol_type = other DNA
ccgagcgcgatattaatgtcgagactattatgcgcgttgccttcggcgatagtcagcgtcaggaggcgtcatgct

SEQ ID NO: 210582 - DNA, 75 bp, synthetic construct
  source 1..75: mol_type = other DNA
gtggtgtatctcatcggtgttgaccatattcaggatgtgattgatagccttggctatgcgtgggccgatcaggca

SEQ ID NO: 210583 - DNA, 75 bp, synthetic construct
  source 1..75: mol_type = other DNA
gggcgaaatcagccgtgaacaattcaacgaactgatcgcgccactggtaaaacgaaccttactggcttgtcgtcg

SEQ ID NO: 210584 - DNA, 75 bp, synthetic construct
  source 1..75: mol_type = other DNA
aaagatcgcagcttgtctgcacaatatgagcatactattgtggtgaccgataacggctgcgaaattctgacgcta

SEQ ID NO: 210585 - DNA, 75 bp, synthetic construct
  source 1..75: mol_type = other DNA
gaaatgatcgaaccgtatgttaaaccgggcgtcagcaccggcgagctggatcgcatctgtaatgattacattgtt

SEQ ID NO: 210586 - DNA, 75 bp, synthetic construct
  source 1..75: mol_type = other DNA
aacgaaaaaaacctgaaccccatgttgtttcaaattggcttgacaaaaaaacggatggctaaatgggatcgagaa

SEQ ID NO: 210587 - DNA, 75 bp, synthetic construct
  source 1..75: mol_type = other DNA
acgtcagaaaaactcggtctggcgaagtcctacggtgttggcatcgaaaaatacgctgcgtgggaaaatattggt

SEQ ID NO: 210588 - DNA, 75 bp, synthetic construct
  source 1..75: mol_type = other DNA
ccggtgaccagataccacagttgaacgagaaacagaaacctgctgataaaacaccgtggcgacatgacaaaacgc

SEQ ID NO: 210589 - DNA, 75 bp, synthetic construct
  source 1..75: mol_type = other DNA
cctgtggatgcccgttaacacttcagcggggcaatgacggacaaccaccgtggtttgaacatgaccagatgactg

SEQ ID NO: 210590 - DNA, 75 bp, synthetic construct
  source 1..75: mol_type = other DNA
aagtgctgcccgcgttgtggtaccggggtatacagcagggagaggggggctgcaggagggcaactggaaggatag

SEQ ID NO: 210591 - DNA, 75 bp, synthetic construct
  source 1..75: mol_type = other DNA
tttaaagatggtcagacggcgatgtctatccatgtaatgcagggtgagcgcgaactggtgcaggactgccgctcg

SEQ ID NO: 210592 - DNA, 75 bp, synthetic construct
  source 1..75: mol_type = other DNA
attattagcatttttataggattatctacaataacgatatattcatcctatttaatgttcatacaagcttcagct

SEQ ID NO: 210593 - DNA, 75 bp, synthetic construct
  source 1..75: mol_type = other DNA
aaactatatattgttcggattgttaatggtttggctcgggttattacttttttaatacaaatagttgtgcttaaa

SEQ ID NO: 210594 - DNA, 75 bp, synthetic construct
  source 1..75: mol_type = other DNA
attgtaaggcagtgtattattaattcgtttggtgaaaatttaacaggttattatttgttaataaaccaattagtc

SEQ ID NO: 210595 - DNA, 75 bp, synthetic construct
  source 1..75: mol_type = other DNA
tatttcaaattggcctgacgaaaaaacgaatggctggctgggatcgggaaaaacagtttaatgaggttatgcgtc

SEQ ID NO: 210596 - DNA, 75 bp, synthetic construct
  source 1..75: mol_type = other DNA
tccggacgggctgactcagccacattacatggatatttgcatggcaatgattcgttgtgtggatgcgatttacat

SEQ ID NO: 210597 - DNA, 75 bp, synthetic construct
  source 1..75: mol_type = other DNA
gtatgattcccctgatgatattttatttaacgttgtcgtaccagaactcgaaaaaagagatctcatttccagtga

SEQ ID NO: 210598 - DNA, 75 bp, synthetic construct
  source 1..75: mol_type = other DNA
acgaatacatcgaaagccttctcaatatcagatatggcgaaggtcgttgccgcgcactattgcatcttctgttcc

SEQ ID NO: 210599 - DNA, 75 bp, synthetic construct
  source 1..75: mol_type = other DNA
gaagaggaactgaaacgggaagggcataccgtcttaaacccggcagtacttccggacggactgactcagtcgcag

SEQ ID NO: 210600 - DNA, 75 bp, synthetic construct
  source 1..75: mol_type = other DNA
gtccgatgacgggatatgaaaatttcaaccgcgaggcgtttcacagggcggaagaagcactgaaacgggaagggc

SEQ ID NO: 210601 - DNA, 75 bp, synthetic construct
  source 1..75: mol_type = other DNA
gggctggcagggcgaaatcagccgtgaacaattcaatgaactgatcgcgccactggtaaaacgaaccttactggc

SEQ ID NO: 210602 - DNA, 75 bp, synthetic construct
  source 1..75: mol_type = other DNA
gcgtatcctgacgcccgccattggctggtgctgtgcggtcatggtaataacggcggcgatggctacgtggtcgcg

SEQ ID NO: 210603 - DNA, 75 bp, synthetic construct
  source 1..75: mol_type = other DNA
gagctgatgcttcgtgctggcgaagccgcattccaggtgtgtcgttcggcttatcctgacgcccgccactggctg

SEQ ID NO: 210604 - DNA, 75 bp, synthetic construct
  source 1..75: mol_type = other DNA
gattagcgatattcgccgtgcagacagtaactactatcgcgccgttacagcaggcaaaacaggcactttgcgccc

SEQ ID NO: 210605 - DNA, 75 bp, synthetic construct
  source 1..75: mol_type = other DNA
catcattatatattggattgtgtggaacgtatgcgtataaacagccccgggtgtggtggccttcggcacaggatg

SEQ ID NO: 210606 - DNA, 75 bp, synthetic construct
  source 1..75: mol_type = other DNA
tgcacgaaatattcaaatacgagcagtatgattcccctgatgatattttatttaacgttgtcgtaccagaacttg

SEQ ID NO: 210607 - DNA, 75 bp, synthetic construct
  source 1..75: mol_type = other DNA
ctgatgcgaaacaggagcttcttgagcgtcttttgtccggaaaaagaatgaccgggcgggatgaaatggatatca

SEQ ID NO: 210608 - DNA, 75 bp, synthetic construct
  source 1..75: mol_type = other DNA
gagcggcagttacttggcatagattctaaaataaccgccgttattcgtaataagctatttgagtttattaaataa

SEQ ID NO: 210609 - DNA, 75 bp, synthetic construct
  source 1..75: mol_type = other DNA
tgcgtgatcgcgtcagtcgcaaaggaccagaggtccgttacgcagagcgtcgccttctgggtgtaaatgatgatg

SEQ ID NO: 210610 - DNA, 75 bp, synthetic construct
  source 1..75: mol_type = other DNA
tggcgaatctggaaccagccgcaagaagccgaatgatgcgccagctggcgcaggaactgcgccggacacagcagc

SEQ ID NO: 210611 - DNA, 75 bp, synthetic construct
  source 1..75: mol_type = other DNA
actggctgagtgtcttgctgacgaatctggagccagccgcaagaagccgcatgatgcgtcagctggcgcaggaac

SEQ ID NO: 210612 - DNA, 75 bp, synthetic construct
  source 1..75: mol_type = other DNA
agcagctatgaacctcgacgggtaacagcacgcagtaaaaaggggtgcatcaaacgtcagatgtttgcaaagctg

SEQ ID NO: 210613 - DNA, 75 bp, synthetic construct
  source 1..75: mol_type = other DNA
tctggagccagccgcaagaattcgcatgatgcgtcagctggcgcaggaaatgcgccggacacagcagcaaaatat

SEQ ID NO: 210614 - DNA, 75 bp, synthetic construct
  source 1..75: mol_type = other DNA
ccgccagcaccgactctgccagcgtgcagtttgaaggcaaggtgcagcgcattgcccgcgttcaccattacggcc

SEQ ID NO: 210615 - DNA, 75 bp, synthetic construct
  source 1..75: mol_type = other DNA
agcagctatgaaccgcgacgggtaacaacacgcagtaaaaaaggccgcatcaaacggcagatgtttacaaaactt

SEQ ID NO: 210616 - DNA, 75 bp, synthetic construct
  source 1..75: mol_type = other DNA
caggagacatccgctaccccggcgataacagcagacaaaaatactctggtcgctgaagcccgccgtaatctggcc

SEQ ID NO: 210617 - DNA, 75 bp, synthetic construct
  source 1..75: mol_type = other DNA
agcagttatgaaccgcgacgggtaacagcacgcagtaaaaaaggccgtatcaaacgtcagatgtttgcaaagctg

SEQ ID NO: 210618 - DNA, 75 bp, synthetic construct
  source 1..75: mol_type = other DNA
atgaacctgaagaaatgtggacggttaaacgtggctgaactacagaaggtggacgactggcttagtgccttactg

SEQ ID NO: 210619 - DNA, 75 bp, synthetic construct
  source 1..75: mol_type = other DNA
caaacgtcagatgtttacaaagctgcgcaccacaaaatacctgagaactgccgccagctctgattctgccagcgt

SEQ ID NO: 210620 - DNA, 75 bp, synthetic construct
  source 1..75: mol_type = other DNA
cgcctgctgggtgtaaatgatgatgttgaagcaaatattcgtgatattttgctacgttggctaagccaatattaa

SEQ ID NO: 210621 - DNA, 75 bp, synthetic construct
  source 1..75: mol_type = other DNA
cgctgatgaagctgagttgcttcgaccagttgagcgaaagcctgaccatgaagagctggaggatttttactttta

SEQ ID NO: 210622 - DNA, 75 bp, synthetic construct
  source 1..75: mol_type = other DNA
gaaacggatattcacggcgcgaaacaggacgaagacggcgtttaccgcgtacgagtcctaaaaatggcgggataa

SEQ ID NO: 210623 - DNA, 75 bp, synthetic construct
  source 1..75: mol_type = other DNA
tatttcggtcaccgagcttggttcgttgctcgaccacaccgggccacacctggaagcggaagagtacatcgcgcg

SEQ ID NO: 210624 - DNA, 75 bp, synthetic construct
  source 1..75: mol_type = other DNA
tgggactttatcgtaacactctataacccaaaaacccatgaagtcgttggctaccgttactttggtttagatgac

SEQ ID NO: 210625 - DNA, 75 bp, synthetic construct
  source 1..75: mol_type = other DNA
tatttctggcggttctgtttactggctttaacgcagaagcggctaccgtgaaacaagcccttagctgtaacccgg

SEQ ID NO: 210626 - DNA, 75 bp, synthetic construct
  source 1..75: mol_type = other DNA
cgaaggtgacgctacctacagagctgctatcgacaaagcattaacccctgttgggttaaacggaatgtttgggga

SEQ ID NO: 210627 - DNA, 75 bp, synthetic construct
  source 1..75: mol_type = other DNA
accggcagtacgccaaaacaccggagctgttcaagctggaggccgaagccaaagccgataagcgaggtctctggg

SEQ ID NO: 210628 - DNA, 75 bp, synthetic construct
  source 1..75: mol_type = other DNA
gaacgcaatgctcagaaagaacgagagtgaaatgaatcgtagcatcatgttgctccataatttttacgttcaaga

SEQ ID NO: 210629 - DNA, 75 bp, synthetic construct
  source 1..75: mol_type = other DNA
tccgcgagtacactatgcagagagacggctgttagggataaatgctgaagtaattaagctcattcaagatatgat

SEQ ID NO: 210630 - DNA, 75 bp, synthetic construct
  source 1..75: mol_type = other DNA
tgcgtattcaggatctggcgcaagggatccataagctgattcgtaaacacgatcttcccggtttgatgttgcggg

SEQ ID NO: 210631 - DNA, 75 bp, synthetic construct
  source 1..75: mol_type = other DNA
tgttcctcgatccggttaaagtcactattctgacgccggggatggacgagcagggcaatatgagcgaggagggga

SEQ ID NO: 210632 - DNA, 75 bp, synthetic construct
  source 1..75: mol_type = other DNA
tatctcccgctttatgccttcatcaacacccactcgacgatggatgtcagcgtgcaggatatgcggatggcgctc

SEQ ID NO: 210633 - DNA, 75 bp, synthetic construct
  source 1..75: mol_type = other DNA
gctacacggctgaaaaacttgaaaaggattatctggctgaagtggctaattacagtaacgaccgctgggaagcac

SEQ ID NO: 210634 - DNA, 75 bp, synthetic construct
  source 1..75: mol_type = other DNA
aaagcagaatgacccggttaaagcggtacagaatttcatctttgcacttatcaaatgcaaatatctttttgatca

SEQ ID NO: 210635 - DNA, 75 bp, synthetic construct
  source 1..75: mol_type = other DNA
tgcgtatgtttctcggtggcagatgttacaccgctgaaaatcttgaaagggatttcctttcagaactgaccagat

SEQ ID NO: 210636 - DNA, 75 bp, synthetic construct
  source 1..75: mol_type = other DNA
ttaaccccgctgactgtgagacgtttgtgcaaggcattgttcacgtataggaaattgaaaaaccagtcgatacca

SEQ ID NO: 210637 - DNA, 75 bp, synthetic construct
  source 1..75: mol_type = other DNA
atcgccgacgcacggatgacggcaggggcggtaaaataacatctggaactgctgcaggaacaggcacggctgaaa

SEQ ID NO: 210638 - DNA, 75 bp, synthetic construct
  source 1..75: mol_type = other DNA
gcttcaggtgtacctgtcgtttgctcaaatagttcatctctcccagaagttgttggtgattgtgcgttaatgtgt

SEQ ID NO: 210639 - DNA, 75 bp, synthetic construct
  source 1..75: mol_type = other DNA
ccacagcagtggacgctggagcattacgtcgacatttttaacccggtgattttcccgtttgtcgactacttccgt

SEQ ID NO: 210640 - DNA, 75 bp, synthetic construct
  source 1..75: mol_type = other DNA
ctgtcacgcacggacaccaagaagataagttctgtcgagattgaagccccggagtggatttatcgagaagtcacc

SEQ ID NO: 210641 - DNA, 75 bp, synthetic construct
  source 1..75: mol_type = other DNA
atgagtagccgaaacagcggtcttaagcccataggcgcaataggcgactctggcgggctactggaacgccttgaa

SEQ ID NO: 210642 - DNA, 75 bp, synthetic construct
  source 1..75: mol_type = other DNA
ctactgagatgccctgggctggttaccccggtaaatgaagaacatctcagagaaaatatgcagtactgggagtta

SEQ ID NO: 210643 - DNA, 75 bp, synthetic construct
  source 1..75: mol_type = other DNA
ctgaccgttcacccggactacttcctgatcgagccggggcttggccggttcgtctaccgcctcgctcgccgagct

SEQ ID NO: 210644 - DNA, 75 bp, synthetic construct
  source 1..75: mol_type = other DNA
acattgtggggggcaatctgctggcaagactggagcagacgcaccagaggtatcgtgaaaaagtggaggccgcag

SEQ ID NO: 210645 - DNA, 75 bp, synthetic construct
  source 1..75: mol_type = other DNA
acgcgtgacgtactgcgtgagcatatccacattgatgggatgccgctgcatatcatcgataccgccgggttacgc

SEQ ID NO: 210646 - DNA, 75 bp, synthetic construct
  source 1..75: mol_type = other DNA
tcatgggatggttatctggctgcggttaccgctgatgcctgcgtgaagtctcaggaaacagggaataccgagatt

SEQ ID NO: 210647 - DNA, 75 bp, synthetic construct
  source 1..75: mol_type = other DNA
ttatcataatcgtgatgccgcgctggcctttgtcgacaagatcgacccacgcgattgtcgtctgaaagtcggcaa

SEQ ID NO: 210648 - DNA, 75 bp, synthetic construct
  source 1..75: mol_type = other DNA
tatggtgattggtcgcccggtaacgcaatcggcggccccggcgcaaacgctgaaagcgatcaacacctcgttaca

SEQ ID NO: 210649 - DNA, 75 bp, synthetic construct
  source 1..75: mol_type = other DNA
gacaaacaatatgatcgttgttttattaccgccggaaaacgttattccattgatccaggattactcaaaattatt

SEQ ID NO: 210650 - DNA, 75 bp, synthetic construct
  source 1..75: mol_type = other DNA
atgaaactttccctgatgctggaagccgacagaattaatgtgcaggcactgaatatggggcgaattgtcgttgac

SEQ ID NO: 210651 - DNA, 75 bp, synthetic construct
  source 1..75: mol_type = other DNA
tgatgtgttggtactgacctctggtcaaactgacaataagatccacggcacggcaaatatttataagaagaagta

SEQ ID NO: 210652 - DNA, 75 bp, synthetic construct
  source 1..75: mol_type = other DNA
cagcggttatcgcggatgggaagacgatgtgctgtggcagttagtcgagcgcggtacgcgtgaagggtggatccg

SEQ ID NO: 210653 - DNA, 75 bp, synthetic construct
  source 1..75: mol_type = other DNA
aactgttgggagcctgggcaggtgaactgctggcggaagagttgcgcctggcgcagcagaacttaagcgaaatca

SEQ ID NO: 210654 - DNA, 75 bp, synthetic construct
  source 1..75: mol_type = other DNA
gcaataaagccgatatcaccggcgaaacgctggggatgagtgaagtgaacggtcacgcgttaattcgtctctcgg

SEQ ID NO: 210655 - DNA, 75 bp, synthetic construct
  source 1..75: mol_type = other DNA
attaatgcagcgcaggatttgaaatgggccaatgaagccagggctaagcaggctgaaaatctgtccgctctggag

SEQ ID NO: 210656 - DNA, 66 bp, synthetic construct
  source 1..66: mol_type = other DNA
atgcagaaacgagaacccgtcatcatcgcgccagactataccgatgatgaactttatgagtggatg

SEQ ID NO: 210657 - DNA, 75 bp, synthetic construct
  source 1..75: mol_type = other DNA
ttacctggactacttactttggtgtcgtgacagaaataaagctgaggtagtgaaacgttttgaatttaccttccg

SEQ ID NO: 210658 - DNA, 75 bp, synthetic construct
  source 1..75: mol_type = other DNA
tatcttgatgagttcagtaatataagcgagctgaaggatgctgttacggaatatattgaatactacaacagcaga

SEQ ID NO: 210659 - DNA, 75 bp, synthetic construct
  source 1..75: mol_type = other DNA
aatatattgaatactacaacagcagaagaattagcctgaaattaaaaggtctgactccaattgaatatcggaatc

SEQ ID NO: 210660 - DNA, 75 bp, synthetic construct
  source 1..75: mol_type = other DNA
tatattgaatactacaacagcagaagaattagcctgaaattaaaaggtctgactccaattgaatatcggaatcag

SEQ ID NO: 210661 - DNA, 75 bp, synthetic construct
  source 1..75: mol_type = other DNA
cgggggctgaatgcgccctttacactgcggcaaatcgacgaggctgaatttgaacagcggctgaatgcggtctgg

SEQ ID NO: 210662 - DNA, 75 bp, synthetic construct
  source 1..75: mol_type = other DNA
aactttctggcgggaaaggtacgctctctaacgatggtgtcttatataaatctgttgttgtgaaaaaagcagatg

SEQ ID NO: 210663 - DNA, 75 bp, synthetic construct
  source 1..75: mol_type = other DNA
cacatggccgctaaccagacagtgtgctggccgatggtgaaacttggtgacaatatttaccatcactcaacccat

SEQ ID NO: 210664 - DNA, 75 bp, synthetic construct
  source 1..75: mol_type = other DNA
gatgagtcgaaacgtgcgggggaaattcacccggcggcagataacaactggcgtttagcaccgatagctgccgat

SEQ ID NO: 210665 - DNA, 75 bp, synthetic construct
  source 1..75: mol_type = other DNA
gtgaatattgaagagctaaaaaaacaagccgaaacggaaatctccgactttattgcgcaaaaaatcgccgaattg

SEQ ID NO: 210666 - DNA, 75 bp, synthetic construct
  source 1..75: mol_type = other DNA
gctgcaggttcaggcagcacctgaagcccctaaaaaactgactgataacgacttgctgtcactgaaagatgccgt

SEQ ID NO: 210667 - DNA, 75 bp, synthetic construct
  source 1..75: mol_type = other DNA
ttaaacaaagcatgtccagaaaaggcaattgtctggataatgctgtggtggagtgtttctttggaaccttaaagt

SEQ ID NO: 210668 - DNA, 75 bp, synthetic construct
  source 1..75: mol_type = other DNA
atggcagtatcgtatgagaagatatcaaaatatccttaaagaacatggtattaaacaaagcatgtccagaaaagg

SEQ ID NO: 210669 - DNA, 75 bp, synthetic construct
  source 1..75: mol_type = other DNA
gatgatgttgacgccatcgaacaagcgattaaaaacgtagacaaacaaacccaggatttcgccgctcgccgcatg

SEQ ID NO: 210670 - DNA, 75 bp, synthetic construct
  source 1..75: mol_type = other DNA
actgaccggacacctggtactttccacgctgcataccaacacagcggtgggggcgatcacgcgtttgcaggatat

SEQ ID NO: 210671 - DNA, 75 bp, synthetic construct
  source 1..75: mol_type = other DNA
cagtgcaccgggcgaaagcgagctgtacaacattttttgtcaggcgctggaatccgccaacggacgcagcattat

SEQ ID NO: 210672 - DNA, 75 bp, synthetic construct
  source 1..75: mol_type = other DNA
tggaaaacggcctgacgctggtgatgaaaaacattgagtttcgtctgctggatagcgacggtgccaccagcgcga

SEQ ID NO: 210673 - DNA, 75 bp, synthetic construct
  source 1..75: mol_type = other DNA
gataaacccgttgattatctgaatattcccgcagaagccaacccattccttggttatcgcgcggtgcgtatttat

SEQ ID NO: 210674 - DNA, 75 bp, synthetic construct
  source 1..75: mol_type = other DNA
cgagccgggcataggacgctttatctaccgactggctcgccgtgccgcaggcagggatagcgctaaatgggcttt

SEQ ID NO: 210675 - DNA, 75 bp, synthetic construct
  source 1..75: mol_type = other DNA
acgcagcattattgtgcgcactatggacattggcggcgacaaacccgttgattatctgaacattccggcagaagc

SEQ ID NO: 210676 - DNA, 75 bp, synthetic construct
  source 1..75: mol_type = other DNA
aagagatcttatgggtgaaagaaaaactggcggaagctaaacagcaactgcgtaacgaacacattccgtttgatg

SEQ ID NO: 210677 - DNA, 75 bp, synthetic construct
  source 1..75: mol_type = other DNA
aagagatcttatgggtgaaagaaaaactggcggaagccaaacagcaactgcgtaacgaacatattccgtttgatg

SEQ ID NO: 210678 - DNA, 75 bp, synthetic construct
  source 1..75: mol_type = other DNA
tgcggtaggtttgccaataactctcgctcaactggatattaaagaagatgtcccggcgaaaatgcgaattgtggc

SEQ ID NO: 210679 - DNA, 75 bp, synthetic construct
  source 1..75: mol_type = other DNA
cgaccggttccggcaaaagcaccacgctgtacgctggattgcaggagctgaacaaccactcgcgtaacattctca

SEQ ID NO: 210680 - DNA, 75 bp, synthetic construct
  source 1..75: mol_type = other DNA
ttcccgcagaggcaaacccgttcctcggttatcgcgccgtgcgtatttatgaagagtacgcgtcgttgtttacca

SEQ ID NO: 210681 - DNA, 75 bp, synthetic construct
  source 1..75: mol_type = other DNA
aactcagcatgagcgcaccatcaattccggcggcgaaagctcggatggcgcagcaaagaagaagtgctcaaaggc

SEQ ID NO: 210682 - DNA, 75 bp, synthetic construct
  source 1..75: mol_type = other DNA
aaactggaagccgacttatgggcgcgcgaggccgttttctctaccggtctgggctttagttttgccattccacac

SEQ ID NO: 210683 - DNA, 75 bp, synthetic construct
  source 1..75: mol_type = other DNA
tcacgctcagtgttattgattttcgcactcagctcctgcccgacaaactcaccttaccgctgctctggcttggct

SEQ ID NO: 210684 - DNA, 75 bp, synthetic construct
  source 1..75: mol_type = other DNA
aaaagaaataatattctttatctgcgtaggggggttggtaggcggtgtcatttctagggtgctttttaatttgta

SEQ ID NO: 210685 - DNA, 75 bp, synthetic construct
  source 1..75: mol_type = other DNA
aggatcatgacgcctgcaaatctcttgtaagtctccttcttcgcaacagtgaaaataatgaagttagacaaaaac

SEQ ID NO: 210686 - DNA, 75 bp, synthetic construct
  source 1..75: mol_type = other DNA
gaagtgcctggcggtgggcggttaattccgccgctgaaagtacaacgtaatgaagtgattgtgaattatcgctga

SEQ ID NO: 210687 - DNA, 75 bp, synthetic construct
  source 1..75: mol_type = other DNA
cagagaaaagaacttaatgccctagtagcacttgtttctgattcctacggcaatgaagcatatgagatctggcaa

SEQ ID NO: 210688 - DNA, 75 bp, synthetic construct
  source 1..75: mol_type = other DNA
aaaagaaataatattctttatctgcgtagggggtttggtaggtggtgccatttctaggatgttttttaatttata

SEQ ID NO: 210689 - DNA, 75 bp, synthetic construct
  source 1..75: mol_type = other DNA
ccagttcttcaccaacccgcgcgacgattctcaccggacagtattctatccaccacggcattttgatgccgccga

SEQ ID NO: 210690 - DNA, 75 bp, synthetic construct
  source 1..75: mol_type = other DNA
cctgcacaaagtgataagtggagacacctcctgggatgaagtgatgcgcgtcgccagcgtcacgctggagagtga

SEQ ID NO: 210691 - DNA, 75 bp, synthetic construct
  source 1..75: mol_type = other DNA
tccatccgtcggcgtattaatcatcccgatcgcttgaattacccaatgaaacgcgtgggcaaacgcggcgaaggc

SEQ ID NO: 210692 - DNA, 75 bp, synthetic construct
  source 1..75: mol_type = other DNA
ctcgggtacggtaatgcaaactgcggggtctgcggtatttaatttgtataccgatccgcaggaaagcgactccat

SEQ ID NO: 210693 - DNA, 75 bp, synthetic construct
  source 1..75: mol_type = other DNA
acgctaaatatgcgggtagctctccggcacgcacctcgtatggcgactgcatggtggagatgaacgatgtgttcg

SEQ ID NO: 210694 - DNA, 75 bp, synthetic construct
  source 1..75: mol_type = other DNA
taacacgctgattgtctttacctccgataacggaccggaagccgaagtaccgccgcacggacgcacaccgttccg

SEQ ID NO: 210695 - DNA, 75 bp, synthetic construct
  source 1..75: mol_type = other DNA
aggggcagagcggaaccaccgtggccttttccggtatagcggcagcagaaccgttgcgatttatctgggaagtgc

SEQ ID NO: 210696 - DNA, 75 bp, synthetic construct
  source 1..75: mol_type = other DNA
ttttgttaagccgagttattcgtaaagatcgcgatgagccgttcgtctataacagcggcggatcctcatttgctt

SEQ ID NO: 210697 - DNA, 75 bp, synthetic construct
  source 1..75: mol_type = other DNA
ttcaacggaagctgggatacacttttaatcatcaggaactgttgcagcaggcattaactcatcgtagtgccagca

SEQ ID NO: 210698 - DNA, 75 bp, synthetic construct
  source 1..75: mol_type = other DNA
ccgtctggacgaaattagcccaggcgataaacaaaaagatccgaaaacgcgcttgcaagaatatttgcagggtcg

SEQ ID NO: 210699 - DNA, 75 bp, synthetic construct
  source 1..75: mol_type = other DNA
acggcaaagagatcaatgacgagacctacgcgatttgtaaatcggacatgatgatcaaaggtaacaaccctgaga

SEQ ID NO: 210700 - DNA, 75 bp, synthetic construct
  source 1..75: mol_type = other DNA
tgctagatgccatcgttcagttaccaaataacctgttctacaacaccggcattaccacttacatttgggtgttga

SEQ ID NO: 210701 - DNA, 75 bp, synthetic construct
  source 1..75: mol_type = other DNA
aatccttttgagccgcgccgcaatcgctacgcacaaaaatacttaacgttggcgctaatgggcggtgccgctttt

SEQ ID NO: 210702 - DNA, 75 bp, synthetic construct
  source 1..75: mol_type = other DNA
atgtgttcagcatggattgagcctcagattaatgttaagcgtcttgcaggacgcgtaatgttaactggggctttt

SEQ ID NO: 210703 - DNA, 75 bp, synthetic construct
  source 1..75: mol_type = other DNA
tattgtttccgatgctggtacaagctgccggggaggggatgtggcaggcaagcagcgtaggaattacgctaaatc

SEQ ID NO: 210704 - DNA, 75 bp, synthetic construct
  source 1..75: mol_type = other DNA
ggattgatgacgctggtggcgtggcgttatcagcttatcggcccgacaccatcggggctgcgggtacgcttgtgt

SEQ ID NO: 210705 - DNA, 75 bp, synthetic construct
  source 1..75: mol_type = other DNA
gtggttggcacaggttcaagccgtcgtaaggctgaacaggctgccgccgaacaggcgttgaaaaaactggagctg

SEQ ID NO: 210706 - DNA, 75 bp, synthetic construct
  source 1..75: mol_type = other DNA
ccatctgccgctgccgacttatctggtggtccaggtccgtggcgaagcgcatgatcaggaatttactatccactg

SEQ ID NO: 210707 - DNA, 75 bp, synthetic construct
  source 1..75: mol_type = other DNA
agcattaattggtggcgtattcctcgacagtgatattcaaaccgtcgagaaattaatcctcaactggtatcaaac

SEQ ID NO: 210708 - DNA, 75 bp, synthetic construct
  source 1..75: mol_type = other DNA
ggtcgagtggctacgggagattctgccgggcaaaactaccgcagaactgtatatggctatcggttgccagaagca

SEQ ID NO: 210709 - DNA, 75 bp, synthetic construct
  source 1..75: mol_type = other DNA
tgtccagcaggcgatgaaaaaccgtatccatctttacgatcatcacgttggtctggtcgtggagcaactgcgctg

SEQ ID NO: 210710 - DNA, 75 bp, synthetic construct
  source 1..75: mol_type = other DNA
cgtgttttatcctctgtaagggatgctgccgttcattctgataatggggcgcaagtaaaggttggcaacagaaca

SEQ ID NO: 210711 - DNA, 75 bp, synthetic construct
  source 1..75: mol_type = other DNA
gctcacgtccgcgcctgctaccaactggtgaaagagcacgatcgtgtaggccgaatggcggacacccaggaattt

SEQ ID NO: 210712 - DNA, 75 bp, synthetic construct
  source 1..75: mol_type = other DNA
gcggatggtgccgctcaatatctggctggaacaagtggaaggtcagcagctgcgcgacgccattgaagagtacgg

SEQ ID NO: 210713 - DNA, 75 bp, synthetic construct
  source 1..75: mol_type = other DNA
tcccgagcggctttttatctttagctcccagccagagcgccgttttcgtaccattccgcgcccgctggcgaaaga

SEQ ID NO: 210714 - DNA, 75 bp, synthetic construct
  source 1..75: mol_type = other DNA
ctcgattctgtcccgtgctttcctcgacagatcgtactggttaaaaatggtttacaaagagatgaacaacattgt

SEQ ID NO: 210715 - DNA, 75 bp, synthetic construct
  source 1..75: mol_type = other DNA
atggaacataagcctaccatccgggtgttagagatactggaagcactggcagcggagaatcagggtgtttcatta

SEQ ID NO: 210716 - DNA, 75 bp, synthetic construct
  source 1..75: mol_type = other DNA
tcggtgcgttagcgtttgccgttaccaacgtttatgccgcagaattaatgaccaaagcagaatttgaaaaagttg

SEQ ID NO: 210717 - DNA, 75 bp, synthetic construct
  source 1..75: mol_type = other DNA
acaagtcaaaaccccagcaatagaagcatgggagattagcgaactcattggtggatacataatcggggtaatgct

SEQ ID NO: 210718 - DNA, 75 bp, synthetic construct
  source 1..75: mol_type = other DNA
acaagtcaaaaccccagcaatagaagcatgggttattagcgaaatcatttggtgggcgcataaccgggataatgc

SEQ ID NO: 210719 - DNA, 75 bp, synthetic construct
  source 1..75: mol_type = other DNA
cgtaaaaatgtgccgttccagcagtacatcaacgcggggtatttcacggtgaaagaagtggtgctggatgatgaa

SEQ ID NO: 210720 - DNA, 75 bp, synthetic construct
  source 1..75: mol_type = other DNA
attattcgccatctgacggaaacgttggggccagaaaacctctccgaaagccatttacaggtggcgaacgaactg

SEQ ID NO: 210721 - DNA, 75 bp, synthetic construct
  source 1..75: mol_type = other DNA
ttccgggagtgcagagaaaatatataatgataatggaaatgttattggtattagaatgaataaaataaatgggga

SEQ ID NO: 210722 - DNA, 75 bp, synthetic construct
  source 1..75: mol_type = other DNA
gaacgctatcttacctggtttaagaaagtattcgaggcggcaaaggatgaagagcattacacatcaatgatggaa

SEQ ID NO: 210723 - DNA, 75 bp, synthetic construct
  source 1..75: mol_type = other DNA
gaacgctatcttgcctggtttaagaaagtattcgaggcggcgaaagatgaagaacattacacatcaatgatggaa

SEQ ID NO: 210724 - DNA, 75 bp, synthetic construct
  source 1..75: mol_type = other DNA
gcgaccgatccccgggattatttgcagtcggctaaatccgcaatgcgcgatgtggtgagcaaagtgattgccgat

SEQ ID NO: 210725 - DNA, 75 bp, synthetic construct
  source 1..75: mol_type = other DNA
ttatgatatgtttgagagactgaaaaaaaaggaattctttttgttgatacaacagaaacaaatgttttatatgat

SEQ ID NO: 210726 - DNA, 75 bp, synthetic construct
  source 1..75: mol_type = other DNA
gaattctttttatcgatacaacagagacaaatgtcttatatgatcgcacgagaaatgaatttaatccaatagata

SEQ ID NO: 210727 - DNA, 75 bp, synthetic construct
  source 1..75: mol_type = other DNA
tgccgctgctaacatttttcctggcgacatgctgtttaaaaacttcggtgtcacccgtcacgggcgtgtggtttt

SEQ ID NO: 210728 - DNA, 75 bp, synthetic construct
  source 1..75: mol_type = other DNA
gtctggtggtggagcaactgcgctgcattaccaacggccaaagcacggacgcggcatttttactgcgcgtcaaag

SEQ ID NO: 210729 - DNA, 75 bp, synthetic construct
  source 1..75: mol_type = other DNA
ctgcgcctgcgctggcagaataaaagccgtgacatccattacattattcgccatctgacggaaacgctggggaca

SEQ ID NO: 210730 - DNA, 75 bp, synthetic construct
  source 1..75: mol_type = other DNA
tgctgggtaatgttattggcaagggggggaacgctgtagtgtatgaagatgcagaggatgcaacaaaagtcctga

SEQ ID NO: 210731 - DNA, 75 bp, synthetic construct
  source 1..75: mol_type = other DNA
agatgcacgccgatttgtttcacgccgactactggcgtgcgctacaaaagcgcatccgtgaagggcatgtggaag

SEQ ID NO: 210732 - DNA, 75 bp, synthetic construct
  source 1..75: mol_type = other DNA
ccgggcaaaacgaccgcagaactgtatatggctatcggctgccagaagcacgccaaaaccgaaagctaccgtgaa

SEQ ID NO: 210733 - DNA, 75 bp, synthetic construct
  source 1..75: mol_type = other DNA
gcgctgggctttatcgtctccatcaacggcgcgttgatgaatatgcatcagccggcacagccactgcaggcaaac

SEQ ID NO: 210734 - DNA, 75 bp, synthetic construct
  source 1..75: mol_type = other DNA
gaatccgttaaccgcgtaatgccgcaatttaaagttgacggcaaaatggtcttcgaacgtgatatggaaatgctg

SEQ ID NO: 210735 - DNA, 75 bp, synthetic construct
  source 1..75: mol_type = other DNA
cgcaatttaaagttgacggtaaaatggtcttcgaacgtgatatgaatctgctggcaccgggctttacccaaacgc

SEQ ID NO: 210736 - DNA, 75 bp, synthetic construct
  source 1..75: mol_type = other DNA
taaccgcgtaatgccgcaattcaaagttgacggcaaaatggtctttgaacgcgatatggaaatgctggctccggg

SEQ ID NO: 210737 - DNA, 75 bp, synthetic construct
  source 1..75: mol_type = other DNA
ccgatgccctgcgcttcaccctggcggcgctggcgtctaccggtcgtgacatcaactgggatatgaagcgcctgg

SEQ ID NO: 210738 - DNA, 75 bp, synthetic construct
  source 1..75: mol_type = other DNA
agcgttttgctgcacgtaaagcagtcgttgctgcggttgacgcactcggcctgctggaagaaattaaaccgcacg

SEQ ID NO: 210739 - DNA, 75 bp, synthetic construct
  source 1..75: mol_type = other DNA
cggctttaacatcgaacttcgcggcctgagctccaactacggtctgggtacgcaagagatgctgcgttcgaacat

SEQ ID NO: 210740 - DNA, 75 bp, synthetic construct
  source 1..75: mol_type = other DNA
aagcccggctacggaatcttcgcaggtttcctttaataacctctctttcaccgaaacaccgccaaaaagcattat

SEQ ID NO: 210741 - DNA, 75 bp, synthetic construct
  source 1..75: mol_type = other DNA
ctaaaaccgtggcgattatttctttcgcgttgtgcggtttcgctaactttggttctatcggggtggtggtggggg

SEQ ID NO: 210742 - DNA, 75 bp, synthetic construct
  source 1..75: mol_type = other DNA
acgcgcgctggcggcggcgacactttctaacctgatgagtgccaccattgccgggttctttattggtttagcgta

SEQ ID NO: 210743 - DNA, 75 bp, synthetic construct
  source 1..75: mol_type = other DNA
agaggcaccaggacaaccggagccggtacgtaccgttgatgcgctcggtaatgtccattacgacgataaccaggt

SEQ ID NO: 210744 - DNA, 75 bp, synthetic construct
  source 1..75: mol_type = other DNA
gacctcgcctcacagtgcatgttgggcgtgccaagctatgaccgtcctctggtacagggcgataccaatgactta

SEQ ID NO: 210745 - DNA, 75 bp, synthetic construct
  source 1..75: mol_type = other DNA
ttgctggttcgacaatgattggttacgccgcactgggcgtacctgtggaatatttgctggcggcatcgttaatgg

SEQ ID NO: 210746 - DNA, 75 bp, synthetic construct
  source 1..75: mol_type = other DNA
ttaacgactatgaagtcggtaaacgtcacgccctgtcgatgatcaacatcctgacctttgacggcgatatccgtg

SEQ ID NO: 210747 - DNA, 75 bp, synthetic construct
  source 1..75: mol_type = other DNA
acactgggaagtggtgcgttttgtgcgtgacttctacctggaatttaatacgtctccggcgattcgtatgctggt

SEQ ID NO: 210748 - DNA, 75 bp, synthetic construct
  source 1..75: mol_type = other DNA
tgctgatttccagtgttaactggatggcaatgggcgcgatgatctggctgctgctggggcagaacgtgaactatt

SEQ ID NO: 210749 - DNA, 75 bp, synthetic construct
  source 1..75: mol_type = other DNA
ctgctcgcttatcgcgtcctgtattactttatcccgctgctgctggcgctgatctgttacctgctactggaaagc

SEQ ID NO: 210750 - DNA, 75 bp, synthetic construct
  source 1..75: mol_type = other DNA
ttcctcgggcaaaatgagatcccggcgatcgttaaaccgtttatcgatcgcatgaatcgcaacgagctgtttacc

SEQ ID NO: 210751 - DNA, 75 bp, synthetic construct
  source 1..75: mol_type = other DNA
cgccggaaatcgcccagcttggattacgtgcgctggcagcggctacgctctccaacctgatgagtgcgaccattg

SEQ ID NO: 210752 - DNA, 75 bp, synthetic construct
  source 1..75: mol_type = other DNA
cggcattaggcgttcataaagtgatgtcttacagtgatgccggtagcgccttcatttttggttcgctggttgggc

SEQ ID NO: 210753 - DNA, 75 bp, synthetic construct
  source 1..75: mol_type = other DNA
gggccggtggtgttccttgcctccagcgcttcagattatgtgaatggttataccattgccgtggatggcggttgg

SEQ ID NO: 210754 - DNA, 75 bp, synthetic construct
  source 1..75: mol_type = other DNA
cgtgacgcgattgatggcgaacgaatgggctaaacacaacattaatgttaatgcgatagctccgggttacatggc

SEQ ID NO: 210755 - DNA, 75 bp, synthetic construct
  source 1..75: mol_type = other DNA
cgtgagaagctggaaggctatgcagaagcgaaagcgaagctgattgaacagcaggctgttatcgccgcactgtaa

SEQ ID NO: 210756 - DNA, 75 bp, synthetic construct
  source 1..75: mol_type = other DNA
tttgcgctttcgcgaagcaccgccatatgaccatcaaagggcaaaagctggtgctgccttcatggaaattcgccc

SEQ ID NO: 210757 - DNA, 75 bp, synthetic construct
  source 1..75: mol_type = other DNA
tctttgtactgggcgtgttgctggttagtagtattgctggcgtcatcgtgcatattccggcgggaattggtgtgc

SEQ ID NO: 210758 - DNA, 75 bp, synthetic construct
  source 1..75: mol_type = other DNA
atgagtaaatcacacccgcgctggcgcttagcaaagaagatcctcacctggctgttttttatcgcggtgattgtg

SEQ ID NO: 210759 - DNA, 75 bp, synthetic construct
  source 1..75: mol_type = other DNA
tacctgaaggaagccgaggtaaacaacgaagggctgatgctggttcaaattaatctggcagaaacatcacccgaa

SEQ ID NO: 210760 - DNA, 75 bp, synthetic construct
  source 1..75: mol_type = other DNA
tgctgcattagtattgtatattgcaagtgatgtaatagctaatttgttgaagatcagctctgagttacatttgag

SEQ ID NO: 210761 - DNA, 75 bp, synthetic construct
  source 1..75: mol_type = other DNA
gcgcgtacgggcagctgtcgaagcagaaacactgaaaatgacccgtcaacaatggtttcgtatccgtaaagcggc

SEQ ID NO: 210762 - DNA, 75 bp, synthetic construct
  source 1..75: mol_type = other DNA
ttgcacaaaccattttgcaaggtttcgacgctcagtatggtcgattcctcgaagtgacttccggggcgcagcagc

SEQ ID NO: 210763 - DNA, 75 bp, synthetic construct
  source 1..75: mol_type = other DNA
tttaagtctacaatgtttaaagattttgttcttggtaggttttttaaaatcgttgaatttgtttccccaccgaca

SEQ ID NO: 210764 - DNA, 75 bp, synthetic construct
  source 1..75: mol_type = other DNA
acttgggcgagaaaatgaaatagtggatcctgatgatagtttcattgggtgggtacccccggtagccagccttcc

SEQ ID NO: 210765 - DNA, 75 bp, synthetic construct
  source 1..75: mol_type = other DNA
atcgatctcggcccgttctggcgtctgctgagtcgcaacgaaggtcggacatggcttcttctcagccacgaacgc

SEQ ID NO: 210766 - DNA, 75 bp, synthetic construct
  source 1..75: mol_type = other DNA
tgatcgtccgggtaaaaaatgtatctcttttacgctacgcatcaacggcaaagatcacgatttgttagcggtgga

SEQ ID NO: 210767 - DNA, 75 bp, synthetic construct
  source 1..75: mol_type = other DNA
attaaaggactcactgtatttattaaaaaatacagaggagattcaacgtgccgtgattctgaaaatggaaatgat

SEQ ID NO: 210768 - DNA, 75 bp, synthetic construct
  source 1..75: mol_type = other DNA
gtttaatgatgattatttccagccgctgcgtgatgaactaactggctgtggtggcagaggagttaaacgcgggct

SEQ ID NO: 210769 - DNA, 75 bp, synthetic construct
  source 1..75: mol_type = other DNA
ccgacgacattattcaggccatcacgccagtggtacgggaaaaatcgctctctgccagccaaaaattatggctgg

SEQ ID NO: 210770 - DNA, 75 bp, synthetic construct
  source 1..75: mol_type = other DNA
acgccaattttctgcgcgaactggccgagagcttgccccgtattctgccagatggcggcgcggataaggccgctc

SEQ ID NO: 210771 - DNA, 75 bp, synthetic construct
  source 1..75: mol_type = other DNA
ttcacgttgccgggctttgatcgggtattcaaagtgattaaagacaagttcgcgccgcagaaagagatgtctgcc

SEQ ID NO: 210772 - DNA, 75 bp, synthetic construct
  source 1..75: mol_type = other DNA
agggcaaccagatggccaaccgcgataactccgacccgtccggtctggggaatacgctgggatgggcctgggcgt

SEQ ID NO: 210773 - DNA, 75 bp, synthetic construct
  source 1..75: mol_type = other DNA
gtattcctattcactggggctatgaaggtgttgcgaaaaaaggctttattgccaatacgttgacgccattcgtcg

SEQ ID NO: 210774 - DNA, 75 bp, synthetic construct
  source 1..75: mol_type = other DNA
attcttatttttcagttactgctctgttctttatggatagggtgacgctctgtattaaatgggataaaaattcag

SEQ ID NO: 210775 - DNA, 75 bp, synthetic construct
  source 1..75: mol_type = other DNA
aaatcagcgaaacactggcagcggcgaaaggtattgccaatggcgatcgtgtcactgtctccagcaagcgtggtt

SEQ ID NO: 210776 - DNA, 75 bp, synthetic construct
  source 1..75: mol_type = other DNA
aagcgcatcccgtcggtttccgctgggcgatggaagcgaaaaacaacaacgatgcaaccttgatcgttgtcgatc

SEQ ID NO: 210777 - DNA, 75 bp, synthetic construct
  source 1..75: mol_type = other DNA
gtctggtggtggagcaactgcgctgcattactaacggccaaagcacggacgcggcatttttactgcgcgttaaag

SEQ ID NO: 210778 - DNA, 75 bp, synthetic construct
  source 1..75: mol_type = other DNA
cgctaaaaccgaaagctaccgcgaatatctcgtttatctacagggctgtaatgagcagttcattgaagcgccggg

SEQ ID NO: 210779 - DNA, 75 bp, synthetic construct
  source 1..75: mol_type = other DNA
ttcacgctgccgggctttgaccgggtatttaaagtgatcaaagacaagttcgcgccgcagaaagagatgtctgcc

SEQ ID NO: 210780 - DNA, 75 bp, synthetic construct
  source 1..75: mol_type = other DNA
tcaggtgaactactggagcaactatccgaagttcttcgttagcctgatgaaatctttctatggcgatgccgcgca

SEQ ID NO: 210781 - DNA, 75 bp, synthetic construct
  source 1..75: mol_type = other DNA
gcggtttagcgttcgattcgtatcaatcagaggcgaaaaagtcagcgcattccaccgtacgccagcgtcacttcc

SEQ ID NO: 210782 - DNA, 75 bp, synthetic construct
  source 1..75: mol_type = other DNA
atcaccgatctcggcgaacaaattgtgattcgccatctttatattgagcggcggatggtgccgctcaatatctgg

SEQ ID NO: 210783 - DNA, 75 bp, synthetic construct
  source 1..75: mol_type = other DNA
ctggtttgagtgctgcgccgcatcagcgtcgtctggcggccggtattgacctgggcacaaccaactcgctggtgg

SEQ ID NO: 210784 - DNA, 75 bp, synthetic construct
  source 1..75: mol_type = other DNA
cacctggatccgcacgctggtgacggaaatgaccgatccaggcgatgaacttcaggcttcgcatccactgcgcga

SEQ ID NO: 210785 - DNA, 75 bp, synthetic construct
  source 1..75: mol_type = other DNA
gaatgcagcagtaaaacgtgctggtattcgccgccgtaatccgtaccatacgcggcatacttttgcctgctggct

SEQ ID NO: 210786 - DNA, 75 bp, synthetic construct
  source 1..75: mol_type = other DNA
agagcggcctttatctgcagacctatgtggctgagtatgacacgccgggtggtgagcccattgccgccctggttt

SEQ ID NO: 210787 - DNA, 75 bp, synthetic construct
  source 1..75: mol_type = other DNA
tgacgcgaaagtggtggtggaagatatcgaagacaacccgggcttcttccgcgtccgactgttcgctattccgca

SEQ ID NO: 210788 - DNA, 75 bp, synthetic construct
  source 1..75: mol_type = other DNA
atggaagaggtggctgccatcaaggatattggcagccattttgagcgcgccgagtacatcaagtggaacgctttc

SEQ ID NO: 210789 - DNA, 75 bp, synthetic construct
  source 1..75: mol_type = other DNA
cacgctgatatttatggcggctatcagtgcgaagcggcgtttggcgaggcgctgaaactggcacctcatttgcgt

SEQ ID NO: 210790 - DNA, 75 bp, synthetic construct
  source 1..75: mol_type = other DNA
ttttagatatggaaatggcagcaattttcatagccaacaattaaatttatcttttcatgaaaaaataaatatggt

SEQ ID NO: 210791 - DNA, 75 bp, synthetic construct
  source 1..75: mol_type = other DNA
gtgaatgcactgatattttatttgcagaaatgaaagaactagcaaaaatgctttccttttttggacaatataaaa

SEQ ID NO: 210792 - DNA, 75 bp, synthetic construct
  source 1..75: mol_type = other DNA
atgtttcgaggaaaacgatgtcgggaaacattgaaaggctgggaggttactaacagtaacattaaaaaagccggg

SEQ ID NO: 210793 - DNA, 75 bp, synthetic construct
  source 1..75: mol_type = other DNA
tcgagtatttaagacgttttccccagtccagcactggggcaaaaatggtgacaacgagggtcataaaaacattcg

SEQ ID NO: 210794 - DNA, 75 bp, synthetic construct
  source 1..75: mol_type = other DNA
atgcaaacacaaaaaccgactctcgaactgttaacctgcgaaggtgcttatcgcgacaatccaaccgcacttttt

SEQ ID NO: 210795 - DNA, 75 bp, synthetic construct
  source 1..75: mol_type = other DNA
atattggcaatcactttgagcgtgccgagtacatcaagtggaacgctttccgtgaaacggatgatgcccgctata

SEQ ID NO: 210796 - DNA, 75 bp, synthetic construct
  source 1..75: mol_type = other DNA
atgaaatctaaaaaatcgctttttattgaaggacatatcctgtcgaacagctgtcacgggcaggctggccaacct

SEQ ID NO: 210797 - DNA, 75 bp, synthetic construct
  source 1..75: mol_type = other DNA
ctgtcacggacaggctggccaacctttctgtattcaccgggtcaggtttagtaatggtaaatatgcgattattcg

SEQ ID NO: 210798 - DNA, 75 bp, synthetic construct
  source 1..75: mol_type = other DNA
gctctcgagttcagcgaaaaggactgggacgatgtcatgaacctgaatatcaagagcgtattcttcatgtctcag

SEQ ID NO: 210799 - DNA, 75 bp, synthetic construct
  source 1..75: mol_type = other DNA
gggaccaggaagagacgctggcgaaactccgggaaaaaacatggggtgtgacgtatcacgagggcaggaacggga

SEQ ID NO: 210800 - DNA, 75 bp, synthetic construct
  source 1..75: mol_type = other DNA
atgggtggcctggtggagaaagtgatcccgcgtaacaccacaattccggtggcgcgcgcccaggatttcaccacc

SEQ ID NO: 210801 - DNA, 75 bp, synthetic construct
  source 1..75: mol_type = other DNA
gaggacgtggttaagctcgacaagagcctgctggattttcatatcgacgatctggatcagaaaatcagtaaacag

SEQ ID NO: 210802 - DNA, 75 bp, synthetic construct
  source 1..75: mol_type = other DNA
caaactcagcacctggctgttctggttcaatataggtctggtctttatttcaatttttctgggctggctgaccac

SEQ ID NO: 210803 - DNA, 75 bp, synthetic construct
  source 1..75: mol_type = other DNA
accagtgacatgctttttctggcacgttcagagcatggtctgctgcggctggataaacatgatgtggatctggca

SEQ ID NO: 210804 - DNA, 75 bp, synthetic construct
  source 1..75: mol_type = other DNA
acgccagttcggaacaggcggcccgttcggcacttaactcgctgcaaggcgcattctccgcacgggtcaaccatc

SEQ ID NO: 210805 - DNA, 75 bp, synthetic construct
  source 1..75: mol_type = other DNA
ctggatcgcgcggtagcggagtttggtcatattgatatcctggtgaataacgccggattgattcgccgcgaagac

SEQ ID NO: 210806 - DNA, 75 bp, synthetic construct
  source 1..75: mol_type = other DNA
aattacaaggtcgatcattcatgctcacggcggcgagctgtcagcagaacagcaggggcgggaaattgtgttcag

SEQ ID NO: 210807 - DNA, 75 bp, synthetic construct
  source 1..75: mol_type = other DNA
acggtactcagacgacgcttacgttctggttcaatatcggtctggtctttatttctgtttttctgggctggctga

SEQ ID NO: 210808 - DNA, 75 bp, synthetic construct
  source 1..75: mol_type = other DNA
cgacgacgacccgcaggcatccaacgaaaaaatcctcgaagcgattttgttagtctggctggacgaagccgagtg

SEQ ID NO: 210809 - DNA, 75 bp, synthetic construct
  source 1..75: mol_type = other DNA
cgacgacgacccgcaggcatccaacgagaaaatcctcgaagcgattttgttagtctggctggacgaggccgaata

SEQ ID NO: 210810 - DNA, 75 bp, synthetic construct
  source 1..75: mol_type = other DNA
cgggaaaagccatccgtgacccgctcacgatgaaattactggctccggagggagaagaaaagccccgtaacagtt

SEQ ID NO: 210811 - DNA, 75 bp, synthetic construct
  source 1..75: mol_type = other DNA
tctgcaaacatgtctaccccagaataggccattatccgttatcacggtgcgatactcgccattgggtaaaatgtt

SEQ ID NO: 210812 - DNA, 75 bp, synthetic construct
  source 1..75: mol_type = other DNA
aacacatttatccttatatagggaaaatggcgctcgctgactgtgaaacacgatactggcttgactgctttgaca

SEQ ID NO: 210813 - DNA, 75 bp, synthetic construct
  source 1..75: mol_type = other DNA
tccggccttttgcttgggtcggttaaaggcagtgaagcggtaagtcagtggggccgcggcgtttataaaaagcta

SEQ ID NO: 210814 - DNA, 75 bp, synthetic construct
  source 1..75: mol_type = other DNA
aagaccattgccattatctcgttcgcactctgcggttttgcaaacttcgggtctattggcgtcgtggtgggggca

SEQ ID NO: 210815 - DNA, 75 bp, synthetic construct
  source 1..75: mol_type = other DNA
cgaaaatggatgtcctgtttgatggcgcaggctttatcttcgcctttcgcgtacttccggcgattatcttcgtta

SEQ ID NO: 210816 - DNA, 75 bp, synthetic construct
  source 1..75: mol_type = other DNA
acgtattcttagtccggcgacggaaccttcgcaagttacgtttgaaaatctgtcgtttagcgaaacaccgccaaa

SEQ ID NO: 210817 - DNA, 75 bp, synthetic construct
  source 1..75: mol_type = other DNA
tcttcgcaggtgacatttgaaaacctgtcattcagcgagacgccgccaaaaagctttatcgaagcggcggcgaac

SEQ ID NO: 210818 - DNA, 75 bp, synthetic construct
  source 1..75: mol_type = other DNA
gcggctggtttggttttgccaatgcctctctggaaagtatttttggctatgtgctggcaccgctggcgtggatca

SEQ ID NO: 210819 - DNA, 75 bp, synthetic construct
  source 1..75: mol_type = other DNA
atggatataatgagaagtgttgtggggatggtggtattgctggcaattgcctttgtgttgtcggtaaataaaaag

SEQ ID NO: 210820 - DNA, 75 bp, synthetic construct
  source 1..75: mol_type = other DNA
cgaactgtcagatttatggaattttgcgaatgaagagcataacgatgtttatttttccagcttattaaagctgct

SEQ ID NO: 210821 - DNA, 75 bp, synthetic construct
  source 1..75: mol_type = other DNA
ctctatcaatcacaaccgaatgacagcagctcgcgcagtattgggtcttacattatgtggatggggattgttgcc

SEQ ID NO: 210822 - DNA, 75 bp, synthetic construct
  source 1..75: mol_type = other DNA
cctttatgtttggcactggctatgaaaaaaccggtcttggacgccgtatcgcgctgattctggtgaaaaagatgg

SEQ ID NO: 210823 - DNA, 75 bp, synthetic construct
  source 1..75: mol_type = other DNA
cttttttgccagcgccacggcgtatacctccgctctcgcgccgatgatgattgccgccgcgctggcgatgccgga

SEQ ID NO: 210824 - DNA, 75 bp, synthetic construct
  source 1..75: mol_type = other DNA
ccaccaaagagatagcggaacgtttgggaattgctccaaattggatggatagcatcgactccagccaacttatct

SEQ ID NO: 210825 - DNA, 75 bp, synthetic construct
  source 1..75: mol_type = other DNA
gggtgtcgctgtttaataatgaaaggtgtcaatattgcaaatgggtgtgtaatttccgctggtactaaattacac

SEQ ID NO: 210826 - DNA, 75 bp, synthetic construct
  source 1..75: mol_type = other DNA
ttaaatattccagaatatcagttctcatcatcaagaatgccagcgctttactttataggtgacgagcgctcctga

SEQ ID NO: 210827 - DNA, 75 bp, synthetic construct
  source 1..75: mol_type = other DNA
cgatttaggcgttgatccgcatgtcgtggagcagcttacaggccaccagatgccaggaatgcagcgagtttataa

SEQ ID NO: 210828 - DNA, 75 bp, synthetic construct
  source 1..75: mol_type = other DNA
acaaaaagctaaaagcgctgcagggttctgagcgtgaagcaccgatcatgattgccgatggtgaaggactgagca

SEQ ID NO: 210829 - DNA, 75 bp, synthetic construct
  source 1..75: mol_type = other DNA
aatgggattttaatgaatgggtttggattgttccaagaaataacagtaaaagtaacaaaaagattattcggccaa

SEQ ID NO: 210830 - DNA, 75 bp, synthetic construct
  source 1..75: mol_type = other DNA
gactgcgtgaccagcgccattttcctgacggcgatggcaccaaacttgctgttaattggactgatgaaaagcgca

SEQ ID NO: 210831 - DNA, 75 bp, synthetic construct
  source 1..75: mol_type = other DNA
cttttttgccagcgccacagcgtatacctccgctctcgcaccgatgatgattgccgccgcgctggcgatgccgga

SEQ ID NO: 210832 - DNA, 75 bp, synthetic construct
  source 1..75: mol_type = other DNA
aaaaaccgggcttggacgtcgcatcgcgctgattctggtgaaaaaaatggggcatcgcacgctgtttctcggcta

SEQ ID NO: 210833 - DNA, 75 bp, synthetic construct
  source 1..75: mol_type = other DNA
tcccggcgaatctcccaggacatcagtacccgtgatgaaggcggtgacgggaaggtggtggttatcgggcggcag

SEQ ID NO: 210834 - DNA, 75 bp, synthetic construct
  source 1..75: mol_type = other DNA
cgcctctggctggaactactgggtactgtacgttttagttgccatggcagagcttactgccgtcggcaaatacat

SEQ ID NO: 210835 - DNA, 75 bp, synthetic construct
  source 1..75: mol_type = other DNA
taccagtccgtttgtgctgatcttccacgagttaggcgatacctttgtggcaaatgcgctgaacatcgtggtact

SEQ ID NO: 210836 - DNA, 75 bp, synthetic construct
  source 1..75: mol_type = other DNA
ccgcatcctgattttctatattggttcgttagccgttctgctctcactgatgccgtggacccgcgttactgccga

SEQ ID NO: 210837 - DNA, 75 bp, synthetic construct
  source 1..75: mol_type = other DNA
ctgggtgtagatgcaggttataccttcacctacagcgaagaccaggctctgactccgtacttcaaactggcttac

SEQ ID NO: 210838 - DNA, 75 bp, synthetic construct
  source 1..75: mol_type = other DNA
tgcaaccggtaactacaaagttcgtatcgacaacgctactggtgctggttctatcgctgactacaacggcaacga

SEQ ID NO: 210839 - DNA, 75 bp, synthetic construct
  source 1..75: mol_type = other DNA
ctgtgctgtttgatatggttattgccatcagtgtggggatcgtgttggcatcgctgctgtttatgcgtcgtatcg

SEQ ID NO: 210840 - DNA, 75 bp, synthetic construct
  source 1..75: mol_type = other DNA
ggcaaggcggatgcagaggaagcggcagcagcggtggcggcggccacggagaaagtggaagcggcagaagcggcg

SEQ ID NO: 210841 - DNA, 75 bp, synthetic construct
  source 1..75: mol_type = other DNA
acgccaataaaggtgacaccgtggatgtcacctttgaagatgaaaacggtgataaacacaccgtgacgctggaga

SEQ ID NO: 210842 - DNA, 75 bp, synthetic construct
  source 1..75: mol_type = other DNA
actggcgataaagcgaccattccggcagataacgtgaaggataacagtgaagttaccggggttgccaaagatccg

SEQ ID NO: 210843 - DNA, 75 bp, synthetic construct
  source 1..75: mol_type = other DNA
cctgttcggcggctggctgttgttcagcggtaacggcggcccgcaggcaaccgtgcgcaacctgtgggaacaggg

SEQ ID NO: 210844 - DNA, 75 bp, synthetic construct
  source 1..75: mol_type = other DNA
ttggtggtggtctggcgggtattgcgctggcggccggtggtggtggaagcagtcatcataaacacagtacaggaa

SEQ ID NO: 210845 - DNA, 75 bp, synthetic construct
  source 1..75: mol_type = other DNA
agttaccggggttgccaaagatccgagcggtaatgaaagtgacccgtcaaccgtaacctcaaaaactgatgaaag

SEQ ID NO: 210846 - DNA, 75 bp, synthetic construct
  source 1..75: mol_type = other DNA
gatgctaactacctcggtggtggtgacgtagatcaagactggtccgcgaacgtgggtgttaaatatacctggtaa

SEQ ID NO: 210847 - DNA, 75 bp, synthetic construct
  source 1..75: mol_type = other DNA
ccgttgttctgcaacagatggagctgaccgactacgctaacatggcactgagcatcccgtctgcgaacaccaata

SEQ ID NO: 210848 - DNA, 75 bp, synthetic construct
  source 1..75: mol_type = other DNA
gttgataattcaacgatcgacgacaactacgaacactacacatataacggcacctacaataatgccgctgacact

SEQ ID NO: 210849 - DNA, 75 bp, synthetic construct
  source 1..75: mol_type = other DNA
tggtgatgtagatactaacggttgggatggtactgatcgcctggatctgaccctgaacaatggcagcaagtgggt

SEQ ID NO: 210850 - DNA, 75 bp, synthetic construct
  source 1..75: mol_type = other DNA
atggctatcaaactcattgctatcgatatggatggcacccttctgctgcccgatcacaccatttcacccgccgtt

SEQ ID NO: 210851 - DNA, 75 bp, synthetic construct
  source 1..75: mol_type = other DNA
ccatgttggtgtagcgccggcagatgccgctaacgcgctgggttcgtttattaacgctcgtcgccgtctggaatt

SEQ ID NO: 210852 - DNA, 75 bp, synthetic construct
  source 1..75: mol_type = other DNA
ggcagcacaaagcgggcaaaacaaatgggatttatgccgtttgttccgcacatccgctggtgctggaagctgcaa

SEQ ID NO: 210853 - DNA, 75 bp, synthetic construct
  source 1..75: mol_type = other DNA
tgccgcaatcgcaaatccgtatgctgataatgcgatgcagactacagtaactttagacaactcaacactgatggg

SEQ ID NO: 210854 - DNA, 75 bp, synthetic construct
  source 1..75: mol_type = other DNA
attactgttaaagattctactgtgacctctggttcatggactgatgaaggtactactggttggtttggccatact

SEQ ID NO: 210855 - DNA, 75 bp, synthetic construct
  source 1..75: mol_type = other DNA
gctacttcggtggtaacttcaacggcgacaacggcaccatcaactatgatcaggatgttaacggcatcatggtcg

SEQ ID NO: 210856 - DNA, 75 bp, synthetic construct
  source 1..75: mol_type = other DNA
atgtctgcgcacttaactgttgataccaatgatgatggtgtgccagatgcttacggtcctgtttacaatgacaac

SEQ ID NO: 210857 - DNA, 75 bp, synthetic construct
  source 1..75: mol_type = other DNA
ttgtctggagattcagggggccagtctactgacggtgatgtagatactaacggttgggatggtactgatcgcctg

SEQ ID NO: 210858 - DNA, 75 bp, synthetic construct
  source 1..75: mol_type = other DNA
agctgttattgcacatccatatgctgataacgccatgcaaaccactgcaacattcgacaattccacattgatggg

SEQ ID NO: 210859 - DNA, 75 bp, synthetic construct
  source 1..75: mol_type = other DNA
aacgaaaggtgaagtggtgagccacattgcttctgataacgtactgggtggcaaaatcgccggtgattacatcgc

SEQ ID NO: 210860 - DNA, 75 bp, synthetic construct
  source 1..75: mol_type = other DNA
cttcagcatgaattattagcatcccattatattccttataatttcaaccaaaaatatagccaaaaaaaaggggag

SEQ ID NO: 210861 - DNA, 75 bp, synthetic construct
  source 1..75: mol_type = other DNA
atcatttttgtgactttattgagtttaaccaccctaatataatcatgaacacaagtcagtatacatgcagttcat

SEQ ID NO: 210862 - DNA, 75 bp, synthetic construct
  source 1..75: mol_type = other DNA
cccgtggaaaagctgacacaacatacaacctctataagggccacgcgggacatagtgacttgaagaatgaggtgt

SEQ ID NO: 210863 - DNA, 75 bp, synthetic construct
  source 1..75: mol_type = other DNA
gggacgtgttgatggcagctggctgaaatatctgaaacagttgcaaaaaatacaggttctaatcctggacgatct

SEQ ID NO: 210864 - DNA, 75 bp, synthetic construct
  source 1..75: mol_type = other DNA
gaaagagctggcgaacgtgcaggacttaaccgttcgcggcaccaaaattctgctgattaacccgaccgactccga

SEQ ID NO: 210865 - DNA, 75 bp, synthetic construct
  source 1..75: mol_type = other DNA
cgacaaacgctccaaatttgtccattactgcccgcgcacgctgatcctcaacaaccttgagttcgatcatgccga

SEQ ID NO: 210866 - DNA, 75 bp, synthetic construct
  source 1..75: mol_type = other DNA
gacgaacagggctggcaggagtattgcgaatacctgcatcacggactttcggcgattaagcgtcggctggggcta

SEQ ID NO: 210867 - DNA, 75 bp, synthetic construct
  source 1..75: mol_type = other DNA
gggaagtcttgctggatggcgaaaaagtgggcgaagtgaaatggtcgctggtgggcgaacataatatgcacaatg

SEQ ID NO: 210868 - DNA, 75 bp, synthetic construct
  source 1..75: mol_type = other DNA
ggttcaaaaaccgagaacacccgcgtttcttatccgatctatcacatcgataacatcgttaagccggtttccaaa

SEQ ID NO: 210869 - DNA, 75 bp, synthetic construct
  source 1..75: mol_type = other DNA
aacctgggtgctgttgccgtcgataccgggatcttcaccggccgctcaccaaaagataagtatatcgtccgtgac

SEQ ID NO: 210870 - DNA, 75 bp, synthetic construct
  source 1..75: mol_type = other DNA
ggcaccggtaaaaccaccctttccaccgacccgaaacgtcgcctgattggcgatgacgagcacggctgggacgat

SEQ ID NO: 210871 - DNA, 75 bp, synthetic construct
  source 1..75: mol_type = other DNA
gcatttacgccatgggtgtctgccggaattggttacgccagaattcatcaggaatcaacaggtagcggtagttgg

SEQ ID NO: 210872 - DNA, 75 bp, synthetic construct
  source 1..75: mol_type = other DNA
agggccaggtggtggccaccggtgatgtcacactgaaactgattgctgccctcacgaatcatggtaccctggccg

SEQ ID NO: 210873 - DNA, 75 bp, synthetic construct
  source 1..75: mol_type = other DNA
tgaacgccacagaccgtttgcagaacgacggcaaaatcctctccggcagtaacctcacgctgacggcgcaggtgc

SEQ ID NO: 210874 - DNA, 75 bp, synthetic construct
  source 1..75: mol_type = other DNA
ggattgcaaaaaatctgaccctgaaggcgaactcactgaccagtgcgggcgacatcaccggagtggatgctctca

SEQ ID NO: 210875 - DNA, 75 bp, synthetic construct
  source 1..75: mol_type = other DNA
tgacccgacgctgatcccggacagcaatggcgataaagtgaccattccggcagataatgtgaaggataacagtga

SEQ ID NO: 210876 - DNA, 75 bp, synthetic construct
  source 1..75: mol_type = other DNA
tatattaattctactgaatttgtcgcgaataaggattcttatatgaaaaagacaattgtgtctctagcggttgtt

SEQ ID NO: 210877 - DNA, 75 bp, synthetic construct
  source 1..75: mol_type = other DNA
taagattacctataccatccgcgatggtaatggtctgcctgggcaagatgcacatacatcggattatctgattcc

SEQ ID NO: 210878 - DNA, 75 bp, synthetic construct
  source 1..75: mol_type = other DNA
gtcagctccggcagcctgaacaacggagggacactggatgccgggcgcgatgccacggtgaaaaccgggacattc

SEQ ID NO: 210879 - DNA, 75 bp, synthetic construct
  source 1..75: mol_type = other DNA
ctgtttcagtcagagtgggcgatttaggtgaagatggatggggatattatgtgaagtcctggagcggtactgccg

SEQ ID NO: 210880 - DNA, 75 bp, synthetic construct
  source 1..75: mol_type = other DNA
tgccacggtgaaaaccgggacattcagtaataccggtgccgtccaggggaacggcctgaaagtcaccgccactga

SEQ ID NO: 210881 - DNA, 75 bp, synthetic construct
  source 1..75: mol_type = other DNA
gcactggcgcttgctggcgacaccctctcacagggtagtcacggacgctggctgacggcggacgacctctccctc

SEQ ID NO: 210882 - DNA, 75 bp, synthetic construct
  source 1..75: mol_type = other DNA
aggacggaatattgctggcgaaaagtcatgcgggactcgatgccggcacgctgaataacagtggtgctgttcagg

SEQ ID NO: 210883 - DNA, 75 bp, synthetic construct
  source 1..75: mol_type = other DNA
cgatggcctgttgcagggcgccgctgcactggcgcttgcaggcgacaccctctcacagggtagtcacggacgctg

SEQ ID NO: 210884 - DNA, 75 bp, synthetic construct
  source 1..75: mol_type = other DNA
tcgatgacgccgctgcgggaaaaccgttcgataccagcctgctggaaactctggaaggtctggcgcatcgtggct

SEQ ID NO: 210885 - DNA, 75 bp, synthetic construct
  source 1..75: mol_type = other DNA
gatcttgagctcaattacgcgctgctgatgcgtaatttctccggggaaaccacgcgtaacccccacggtaagtga

SEQ ID NO: 210886 - DNA, 75 bp, synthetic construct
  source 1..75: mol_type = other DNA
attgcccgtatgttttcggaaaaatggtggcgtggccgtctgcgtcgcattgcggctgcgtggcgcgaacacctg

SEQ ID NO: 210887 - DNA, 75 bp, synthetic construct
  source 1..75: mol_type = other DNA
ccggtgccgcaggatctcgaactgaattacgcgctgctgatgcgtaatttctccggggaaaccacgcgtaacccc

SEQ ID NO: 210888 - DNA, 75 bp, synthetic construct
  source 1..75: mol_type = other DNA
acccttgagcacatggaaaacgccaaaggtgaagcgatgccggtcgcgcctggcgatggctataccgtgtggctc

SEQ ID NO: 210889 - DNA, 75 bp, synthetic construct
  source 1..75: mol_type = other DNA
gttcgataccagcctgctggaaactctggaaggtctggcgcatcgtggctataccgaaggtttcctgcgtcgtca

SEQ ID NO: 210890 - DNA, 75 bp, synthetic construct
  source 1..75: mol_type = other DNA
aactgcgtgaccgactggcgtgagcagaagcgccgcacgcgtgaatttctcaaggggctggatctcgaagatgaa

SEQ ID NO: 210891 - DNA, 75 bp, synthetic construct
  source 1..75: mol_type = other DNA
agaaatccgcattttcggcatccgtgttgctgagcctcatcacgacggaacgccgcactggcacatgcttatgtt

SEQ ID NO: 210892 - DNA, 75 bp, synthetic construct
  source 1..75: mol_type = other DNA
cggtcgatctgatgtcctgccagcatggcggtgaagtgatcccgtccatagctattgagcgcattatctcgttgc

SEQ ID NO: 210893 - DNA, 75 bp, synthetic construct
  source 1..75: mol_type = other DNA
tcgggaagaaatccgcattttcggcatccgtgttgccgaacctcatcacgacggaacgccacactggcacatgct

SEQ ID NO: 210894 - DNA, 75 bp, synthetic construct
  source 1..75: mol_type = other DNA
tcgggttgcaaaaaaatatgtcggcgcggatgaaatcgcaccggctatcgccaagatgtttaacgatgggtggtg

SEQ ID NO: 210895 - DNA, 75 bp, synthetic construct
  source 1..75: mol_type = other DNA
atgcatagctctatggttgcttatgcttatccgtggaatgctccacggtcggcaatagccagcccatatctcacc

SEQ ID NO: 210896 - DNA, 75 bp, synthetic construct
  source 1..75: mol_type = other DNA
attcgctgaaaatcgaaggccgtaccaaatctttctactattgcgcacgcaccgcgcaggtttatcgtaaagcta

SEQ ID NO: 210897 - DNA, 75 bp, synthetic construct
  source 1..75: mol_type = other DNA
tgcttttgtggtggatgagtttggctcggtggaagggattgtgacattaagtgacgtcactgaaaccattgccgg

SEQ ID NO: 210898 - DNA, 75 bp, synthetic construct
  source 1..75: mol_type = other DNA
ttggctatctttaaccggcgacgttttctttccgctaaccagacgctgcgccagcggactaccgaagcggtaatg

SEQ ID NO: 210899 - DNA, 75 bp, synthetic construct
  source 1..75: mol_type = other DNA
tggggggtggtgacacaaattgtggtactggacgccatcttctcactcgactcagtgattaccgccgtcgggatg

SEQ ID NO: 210900 - DNA, 75 bp, synthetic construct
  source 1..75: mol_type = other DNA
catatgccgctggaagatctggtgcaatatgtaccgctgccgctggatgaaaaacgtgaatatcacaccattgcc

SEQ ID NO: 210901 - DNA, 75 bp, synthetic construct
  source 1..75: mol_type = other DNA
acgttgcaggtggaaagccatcgcgtgcagaaggtgcagattattccactgcgtaaggatggcgagatggagtac

SEQ ID NO: 210902 - DNA, 75 bp, synthetic construct
  source 1..75: mol_type = other DNA
gccacgatggagctgaacgaacggctggaagggaaagacagcaataaccccacgcaacgcaaaggtgcgaagttc

SEQ ID NO: 210903 - DNA, 75 bp, synthetic construct
  source 1..75: mol_type = other DNA
atgagaacccaggtacaggctttgcggaagaaacaaaaaaatacattggatcaaatatttaaatctcctgttcct

SEQ ID NO: 210904 - DNA, 75 bp, synthetic construct
  source 1..75: mol_type = other DNA
tgcagaccgactatccaggtatcgcgcgtctgtttttgtttgcgaattcagtcaatgcgcatggtatttataccc

SEQ ID NO: 210905 - DNA, 75 bp, synthetic construct
  source 1..75: mol_type = other DNA
gcctgacccgcgtgatcctctctcgcgaactgtcgctggaagagattgaagagatccgcaatcaggtgccggata

SEQ ID NO: 210906 - DNA, 75 bp, synthetic construct
  source 1..75: mol_type = other DNA
atcaagggggccatggataaagccttagaaaaaataagaattaatgctttatctgatttagaaataaaaaatcca

SEQ ID NO: 210907 - DNA, 75 bp, synthetic construct
  source 1..75: mol_type = other DNA
aatgggctgataatgaatttgaaattattgagattcacatgatgccaacatatgtagccaatagttatcaaggat

SEQ ID NO: 210908 - DNA, 75 bp, synthetic construct
  source 1..75: mol_type = other DNA
tgacagggaataatgagaatgcggtggaaaagatttttccttcagcacagacaatctgtcaggatgaaatgacgc

SEQ ID NO: 210909 - DNA, 75 bp, synthetic construct
  source 1..75: mol_type = other DNA
gtatcgacaacgcaactggcgctggcgcaatcgctgattacaaagataaagaaattatctacgtaaacgacgtca

SEQ ID NO: 210910 - DNA, 75 bp, synthetic construct
  source 1..75: mol_type = other DNA
ttgctaacactaccattgatgatgattatgaagcgttttacttcactgattcttataaagatggtgatgtaacca

SEQ ID NO: 210911 - DNA, 75 bp, synthetic construct
  source 1..75: mol_type = other DNA
cccggcgaagttcacgccattatggggccaaacggttcgggcaaaagtaccttatcggcaacgcttgccgggcga

SEQ ID NO: 210912 - DNA, 75 bp, synthetic construct
  source 1..75: mol_type = other DNA
gtgataacaggtgtctggaaatataggggcaaatccagttatgttggaactgatcatctgacagttgatagctac

SEQ ID NO: 210913 - DNA, 75 bp, synthetic construct
  source 1..75: mol_type = other DNA
ttgtctggagattcaggggggcagtctagcaactatgtaaactatagtggttttgtctattacaacaacaccaat

SEQ ID NO: 210914 - DNA, 75 bp, synthetic construct
  source 1..75: mol_type = other DNA
aactgggtgatgctggttacgtgactccttacggcagcatttctggtctgttccagtctggtgatgactaccagc

SEQ ID NO: 210915 - DNA, 75 bp, synthetic construct
  source 1..75: mol_type = other DNA
aacccgccatcctcgaccaggccatcgcgcgtattccgcaggaagtgaaagagaaatataccgtactgaaaagcg

SEQ ID NO: 210916 - DNA, 75 bp, synthetic construct
  source 1..75: mol_type = other DNA
tggaacagccgggcgactactgcattacttataacggcgcgctggtacagaaggccgccgatggtagcaccgtgg

SEQ ID NO: 210917 - DNA, 75 bp, synthetic construct
  source 1..75: mol_type = other DNA
cccccgccgttaaaaatgcgattgccgcagctcgcgcccgtggcgtgaatgtcgtgctaacgacgggtcgccctt

SEQ ID NO: 210918 - DNA, 75 bp, synthetic construct
  source 1..75: mol_type = other DNA
catcatctggatgctgcaggggtcactctgcgaaatccggatgagcttttggggagcggagtttgcggcgttctt

SEQ ID NO: 210919 - DNA, 75 bp, synthetic construct
  source 1..75: mol_type = other DNA
gtgaaatcactggccgacgtgttaggtattaagccggaagaaatcatggcgattggcgatcaggaaaacgacatc

SEQ ID NO: 210920 - DNA, 75 bp, synthetic construct
  source 1..75: mol_type = other DNA
gcaatgattgaatatgcaggcgtcggtgtggcgatggataatgctattccttcggtgaaagaagtggcgaacttt

SEQ ID NO: 210921 - DNA, 75 bp, synthetic construct
  source 1..75: mol_type = other DNA
ttgtctggagattcagggggccagtctaatggtcattatgtatatcagttctctgaatacggtactgatcgcgta

SEQ ID NO: 210922 - DNA, 75 bp, synthetic construct
  source 1..75: mol_type = other DNA
acatttaatgcgcagtctggattaattgatttacatgatgcggtttatggcgcggtcgctggctatggggtgctg

SEQ ID NO: 210923 - DNA, 75 bp, synthetic construct
  source 1..75: mol_type = other DNA
gtcgtaatgtcgttgttaatcattgccaatgtgcatgtggctgtagggttatcagttctcaaccagaaaatagta

SEQ ID NO: 210924 - DNA, 75 bp, synthetic construct
  source 1..75: mol_type = other DNA
attttcgatgcctgtattgattcgtggatagctgacccgaaattgcagaattttcaatatatgtggaatgtactg

SEQ ID NO: 210925 - DNA, 75 bp, synthetic construct
  source 1..75: mol_type = other DNA
gagtttctaagacctggagagtgggttttctttcagcgcagcaaggacgtaggaggcgggtactggcttggccgt

SEQ ID NO: 210926 - DNA, 75 bp, synthetic construct
  source 1..75: mol_type = other DNA
atgtacagttatgccggggtggttatgggcggtaaagatgcaaactatcagattgtttataggggcgaagtgctg

SEQ ID NO: 210927 - DNA, 75 bp, synthetic construct
  source 1..75: mol_type = other DNA
tggcatgatacagtgcccctgatactttgcgttgctgctgctatcgcctgcgccctggcacctttcacgcccatc

SEQ ID NO: 210928 - DNA, 75 bp, synthetic construct
  source 1..75: mol_type = other DNA
cagaatatgcaggttaatgtcaccccgcaggacgctaaagtagtgattaactcgcgcaccggttcggtggtgatg

SEQ ID NO: 210929 - DNA, 75 bp, synthetic construct
  source 1..75: mol_type = other DNA
gtgattaaatttctctctgcattaattcttttactggttaccacggcagctcaggctgagcgtattcgcgatctc

SEQ ID NO: 210930 - DNA, 75 bp, synthetic construct
  source 1..75: mol_type = other DNA
gcacaggggaatctctcggttacggtaaatcgtcaggttaacgtgagccaaccagacacaccgtttggtggcggg

SEQ ID NO: 210931 - DNA, 75 bp, synthetic construct
  source 1..75: mol_type = other DNA
atgatgaaagaaaaaataaatgatacagaaccgggaatcaaacaaattgaaagggagattgaacgtggttgtgat

SEQ ID NO: 210932 - DNA, 75 bp, synthetic construct
  source 1..75: mol_type = other DNA
atgtatgccattccgtatacgttatatgcgcttgcagccgggtttcttgttacatcttttctgtccccaatgtac

SEQ ID NO: 210933 - DNA, 75 bp, synthetic construct
  source 1..75: mol_type = other DNA
ttgtggttttctttgttgccggattgcttttatggcacggtatgcatgctattttcagcgccggtattgattcgt

SEQ ID NO: 210934 - DNA, 75 bp, synthetic construct
  source 1..75: mol_type = other DNA
ctataccggtggtcacgattatgcctggtggcgcggagcaattattgatgaattagcaaattataattgcaggaa

SEQ ID NO: 210935 - DNA, 75 bp, synthetic construct
  source 1..75: mol_type = other DNA
ggtgtggaacttcctatagtcaaaactgaaaatggatggaagcttgttggagaaactcctcttactcctgatggc

SEQ ID NO: 210936 - DNA, 75 bp, synthetic construct
  source 1..75: mol_type = other DNA
tcaatgtcgagggcattaattcacaacatcataatccattaaatcatgttgatatcgttgatatcatccaagaaa

SEQ ID NO: 210937 - DNA, 75 bp, synthetic construct
  source 1..75: mol_type = other DNA
catgccatacagtataatacccctggattaaagccagacactattttatggtgggctggtgcgacactgggggct

SEQ ID NO: 210938 - DNA, 75 bp, synthetic construct
  source 1..75: mol_type = other DNA
gaattggcagcacgtgacgctgaaagacctcatgacgcgaatcgatgcctatatccactggtacaacgagcgccg

SEQ ID NO: 210939 - DNA, 75 bp, synthetic construct
  source 1..75: mol_type = other DNA
cactatttttatatgatttttgatattgaacgctatataaatgactgcagttactttgttttttctgggctttgt

SEQ ID NO: 210940 - DNA, 75 bp, synthetic construct
  source 1..75: mol_type = other DNA
cggaatatccggatatcggctctaacttcttcccggcagtactgtccgtcattatggtgttctggattggcgcga

SEQ ID NO: 210941 - DNA, 75 bp, synthetic construct
  source 1..75: mol_type = other DNA
cagcaacagtctcttacagaacgtttgcaggcgttgctgaatctgcagaaatccctggcccgccttcagtatcgt

SEQ ID NO: 210942 - DNA, 75 bp, synthetic construct
  source 1..75: mol_type = other DNA
caagagaaggagccattttccccaataaagaagatattgcccgtgcaacaggggctgatatacgagcgatggaag

SEQ ID NO: 210943 - DNA, 75 bp, synthetic construct
  source 1..75: mol_type = other DNA
cagcaggacatgccatacagtataataccccaggattaaagccagacactattttatggtgggctggtgcgactc

SEQ ID NO: 210944 - DNA, 75 bp, synthetic construct
  source 1..75: mol_type = other DNA
aagagaaggagccattttccccaataaagaagatattgcccgtgcaacaggggctgatatacgagcgatggaaga

SEQ ID NO: 210945 - DNA, 75 bp, synthetic construct
  source 1..75: mol_type = other DNA
tatcagaccagcggaagctgatttaaaatatggaacatccccattccaggcgactctgggactggagtttggcgc

SEQ ID NO: 210946 - DNA, 75 bp, synthetic construct
  source 1..75: mol_type = other DNA
gggaaggcagtcgctgggtaccggataccattaatacccggggactgacattcaaccctgcgtttctgaaagcca

SEQ ID NO: 210947 - DNA, 75 bp, synthetic construct
  source 1..75: mol_type = other DNA
tgatgggccatatggggcacggcaatatgaatcatatgaaccacggcgggaagttcgatttccaccatgccaaca

SEQ ID NO: 210948 - DNA, 75 bp, synthetic construct
  source 1..75: mol_type = other DNA
ttgcagtacaccagcgaagtgctggggctgaaatacgacaagccgcaggcagcagatagtacgccgaaaccgcag

SEQ ID NO: 210949 - DNA, 75 bp, synthetic construct
  source 1..75: mol_type = other DNA
gaatctgctggaaaaagtatttggcgatcgcgtttcaagcccacaatggcaggccacgctgaaagcgattgttcc

SEQ ID NO: 210950 - DNA, 75 bp, synthetic construct
  source 1..75: mol_type = other DNA
aactcagcagcgaagtccgcgccctaaagcgtaatgacgataacacctggaccgttaccgttgccgatctgaaaa

SEQ ID NO: 210951 - DNA, 75 bp, synthetic construct
  source 1..75: mol_type = other DNA
ccgacttgatgcagttcgtaagctacttgattttgcgtctacattaggtacggataaatcatgtgcatcctctga

SEQ ID NO: 210952 - DNA, 75 bp, synthetic construct
  source 1..75: mol_type = other DNA
actctggtccttatgggagggtaattttatggattacctgtctatggggatttaccgggtaacggtaaatgtgga

SEQ ID NO: 210953 - DNA, 75 bp, synthetic construct
  source 1..75: mol_type = other DNA
gccttttgctactttctcaacgaaattcctcaaaaacggttcactgtgggatttgatgagttctaccaccgcttc

SEQ ID NO: 210954 - DNA, 75 bp, synthetic construct
  source 1..75: mol_type = other DNA
gcgactgtttaatccggcagaatcgacaacctgtgaggcaactgttgcgttcagtcgtgaggtgatttcatgtac

SEQ ID NO: 210955 - DNA, 75 bp, synthetic construct
  source 1..75: mol_type = other DNA
gatgcgatgaagttaaataaagccggattcaatgtgccggaaagctatagcttgctgaaaatgccacctgtggga

SEQ ID NO: 210956 - DNA, 75 bp, synthetic construct
  source 1..75: mol_type = other DNA
caatgcgagattactcatgaggcctggcagagtagggctgttattcgctatgacatggcggtgccgcgtaatctg

SEQ ID NO: 210957 - DNA, 75 bp, synthetic construct
  source 1..75: mol_type = other DNA
gactggggaatattatcgctccgttctttggtggcattaccgctacagctgccatcgcgcgttctgccgctaacg

SEQ ID NO: 210958 - DNA, 75 bp, synthetic construct
  source 1..75: mol_type = other DNA
ctgaagaccgacaagaagtgattttacggctgtttaatccggctgaatcagcaacctgtgatgcgactgttgctt

SEQ ID NO: 210959 - DNA, 75 bp, synthetic construct
  source 1..75: mol_type = other DNA
aaaatgccagtcacggacgttcagttaccggcttgcctgaatagcaatcaaaccgaagccacatatgcgcggcca

SEQ ID NO: 210960 - DNA, 75 bp, synthetic construct
  source 1..75: mol_type = other DNA
gctgtaccatccgcagggctgccccgcctgtaatcacaaaggttttcgcggacgtactgccatccatgaactgat

SEQ ID NO: 210961 - DNA, 75 bp, synthetic construct
  source 1..75: mol_type = other DNA
caactcccagttactgggcgatgttgtatttgacagcacctggaacgcaaactttgatgcgacggggcacttggt

SEQ ID NO: 210962 - DNA, 75 bp, synthetic construct
  source 1..75: mol_type = other DNA
atcgatgatgagacctctgattatcgtatggtcaacaacgttactttcaacaactcccagttactgggcgatgtt

SEQ ID NO: 210963 - DNA, 75 bp, synthetic construct
  source 1..75: mol_type = other DNA
agagaaagctgtatccgctccgtccaaaaaaacacgcacgtcacgcggcctgaagggcagatcactcacagccga

SEQ ID NO: 210964 - DNA, 75 bp, synthetic construct
  source 1..75: mol_type = other DNA
cctgctgacttttgttggcttcagtttgagctatttcacgccacatgcgccgttacaaggcgcttcactggggaa

SEQ ID NO: 210965 - DNA, 75 bp, synthetic construct
  source 1..75: mol_type = other DNA
tgcctcaggaagcgcagcgtgaaaaacagcgcattaagcgacaggaatcggcacagaaaccacgtacaacactta

SEQ ID NO: 210966 - DNA, 75 bp, synthetic construct
  source 1..75: mol_type = other DNA
attctggcgtctgctcagtatggaccaggggcaaagctggaagctgatgagccatgaacgttataacaagatgat

SEQ ID NO: 210967 - DNA, 75 bp, synthetic construct
  source 1..75: mol_type = other DNA
ccggtgatattgtatggatagactttgatccgcaagccggtcatgaacaagcgggccacagaccagcattagtgt

SEQ ID NO: 210968 - DNA, 75 bp, synthetic construct
  source 1..75: mol_type = other DNA
atgaagcagagatgttaatggaggatgatgcattcatggatagtatttataaggattgtatcaaaaatgcaagcg

SEQ ID NO: 210969 - DNA, 75 bp, synthetic construct
  source 1..75: mol_type = other DNA
tgcatacacctatcaggctgaacagcgcggtaacaccgttgttctgcaacagatggagctgaccgactacgctaa

SEQ ID NO: 210970 - DNA, 75 bp, synthetic construct
  source 1..75: mol_type = other DNA
agaacgtcgatcacctgaacctgactctgaacaacaccaaatgggttggttcagcgaatattgattatgacgttg

SEQ ID NO: 210971 - DNA, 75 bp, synthetic construct
  source 1..75: mol_type = other DNA
gcgtgaaacgccggaatacaaaaaagagcaggaaaagttcggtactggtagtgatatccagcgtggcattcaggc

SEQ ID NO: 210972 - DNA, 75 bp, synthetic construct
  source 1..75: mol_type = other DNA
agacatcgctggcgaatggataaccgctgggaggcgttgccggagacagtacagcaattacctgtccggctacag

SEQ ID NO: 210973 - DNA, 75 bp, synthetic construct
  source 1..75: mol_type = other DNA
atgttgtagtcaatattgaggataacaatatacctcaccataacccttcgaattatatcgatattatcgatataa

SEQ ID NO: 210974 - DNA, 75 bp, synthetic construct
  source 1..75: mol_type = other DNA
tgatatcggaggcgcatggaaggcaggaacccccacacgctctctttaccattatgaactgctgctaatgctttg

SEQ ID NO: 210975 - DNA, 75 bp, synthetic construct
  source 1..75: mol_type = other DNA
gtgtctgaagcccttggccgccactgggcttgcgtagaaatgaattcagcataccttgagggcgcaatgtcccga

SEQ ID NO: 210976 - DNA, 75 bp, synthetic construct
  source 1..75: mol_type = other DNA
acattttaagtgggatttagataatcctcgaaccaaatatgccattcttaccaatgcggcagcgaatgcggttgg

SEQ ID NO: 210977 - DNA, 75 bp, synthetic construct
  source 1..75: mol_type = other DNA
attgtaaaaccagatattcatcctacatcaggtaattattttttacagattttccctttgcatgatgaaataggt

SEQ ID NO: 210978 - DNA, 75 bp, synthetic construct
  source 1..75: mol_type = other DNA
acccccggattaaagccagacactattttatggtgggctggtacgactctggggctagcagatttaaacaaagcc

SEQ ID NO: 210979 - DNA, 75 bp, synthetic construct
  source 1..75: mol_type = other DNA
ctgaagctttccgtactgataaactggaactgaccagcggcaacattgctgaccataatggcaacgtaatttctg

SEQ ID NO: 210980 - DNA, 75 bp, synthetic construct
  source 1..75: mol_type = other DNA
ttaacccattacaagcccactgccgcagatattcccgtggcgagcgataacccagcgcactatgcggatgccatt

SEQ ID NO: 210981 - DNA, 75 bp, synthetic construct
  source 1..75: mol_type = other DNA
tatggaagcgatttacctggccggctgatacggaagcacctggcaccagtttaagctgggtaagcactcaggccg

SEQ ID NO: 210982 - DNA, 75 bp, synthetic construct
  source 1..75: mol_type = other DNA
ggcgtggaggagcttcacctggcctgcggacacagaagcgcctggcgtgagcctgagctggataagtacccaggc

SEQ ID NO: 210983 - DNA, 75 bp, synthetic construct
  source 1..75: mol_type = other DNA
accccacaacgtcactgtcgacaccatccgtctcgccatgcgtaatctctacggtcgtcgctggggacgtaaaac

SEQ ID NO: 210984 - DNA, 75 bp, synthetic construct
  source 1..75: mol_type = other DNA
ggccgtattattgacaacaaagtattccagagcggcgtatttaacgtagcactgaacaatagttcagaatggaat

SEQ ID NO: 210985 - DNA, 75 bp, synthetic construct
  source 1..75: mol_type = other DNA
cgatctacaactgatgcaggagattctcatgactttccagcatgaaacgcataaagatctacccgctgcgtttca

SEQ ID NO: 210986 - DNA, 75 bp, synthetic construct
  source 1..75: mol_type = other DNA
taattggtgaaatccttgatgtcgacaaaattgaatcgggtaactatcaacttcaaccacaatgggtcgatatcc

SEQ ID NO: 210987 - DNA, 75 bp, synthetic construct
  source 1..75: mol_type = other DNA
atgggcttcctggaacttctgtcgggttctggtcttagcaaggagcaacgggtggaggcgatttcacttgcctac

SEQ ID NO: 210988 - DNA, 75 bp, synthetic construct
  source 1..75: mol_type = other DNA
aaaatagtcttgagcaactatctcgtatctcgtcagagttcgaaccatcaagccaaaagagcaggaaaatgtcta

SEQ ID NO: 210989 - DNA, 75 bp, synthetic construct
  source 1..75: mol_type = other DNA
actcgaaaaatttattgaagaactcaaccctgtaagtcacgcatcagcccttgcatcaagaaagcttgaaaaagt

SEQ ID NO: 210990 - DNA, 75 bp, synthetic construct
  source 1..75: mol_type = other DNA
tgccgtggacacgcgttactgctgataccagtccgtttgtactgatcttccacgaattgggcgatacctttgtgg

SEQ ID NO: 210991 - DNA, 75 bp, synthetic construct
  source 1..75: mol_type = other DNA
cagaagtcctcttaactcaaccaataatggttgtagtgggtgatagagtgggcgcttttggtgcataccgtgacg

SEQ ID NO: 210992 - DNA, 75 bp, synthetic construct
  source 1..75: mol_type = other DNA
aaataaacgcactcatcaatattacattgatctcattaaggggaaagaaaactcagacgtgccatactactttaa

SEQ ID NO: 210993 - DNA, 75 bp, synthetic construct
  source 1..75: mol_type = other DNA
atggagagtaataaaaccgataattacagtgcagcaatgcgattcagtaatgacggcgccagcgtttttattaag

SEQ ID NO: 210994 - DNA, 75 bp, synthetic construct
  source 1..75: mol_type = other DNA
actacagggagattgattatctccctgattttcaacccactgctataagatgcaaaaacactgacattagaacca

SEQ ID NO: 210995 - DNA, 75 bp, synthetic construct
  source 1..75: mol_type = other DNA
gttgaaggttattcacattacgacctgtatgataagccagaacctgtgaaacaggcgctcgataaattaattcct

SEQ ID NO: 210996 - DNA, 75 bp, synthetic construct
  source 1..75: mol_type = other DNA
cctactgggatatagcggctgatatctatttccctgatgatttcgatagcgaaaaaaaatatcccgcaataatca

SEQ ID NO: 210997 - DNA, 75 bp, synthetic construct
  source 1..75: mol_type = other DNA
tcatcactcaaaccttccttttgccaaagttggcgatgagctgattatttttggcagtgagcgcgcatttggtga

SEQ ID NO: 210998 - DNA, 75 bp, synthetic construct
  source 1..75: mol_type = other DNA
atgaaaacaattggtttgctgggaggaatgagctgggaatccactattccttactatcgtctgataaatgaaggc

SEQ ID NO: 210999 - DNA, 75 bp, synthetic construct
  source 1..75: mol_type = other DNA
cgctacaccatggaacaggatttttatcgtgggcgactggcggagcaatttgccatcgactgtctgatccctgaa

SEQ ID NO: 211000 - DNA, 75 bp, synthetic construct
  source 1..75: mol_type = other DNA
atccctgaaaataatagattggctattgaaaatattaaagatgatattgagaatggatacactgctttcattatc

SEQ ID NO: 211001 - DNA, 75 bp, synthetic construct
  source 1..75: mol_type = other DNA
tgaaacatggtttgaccggatagatattacccgggcattagatatggccatcaccactggtcgtatcacgccaat

SEQ ID NO: 211002 - DNA, 75 bp, synthetic construct
  source 1..75: mol_type = other DNA
atcgcggacggctggcggagcaattttctattaactgcctggtgccggctgcggatgaacgggagaaaattaatc

SEQ ID NO: 211003 - DNA, 75 bp, synthetic construct
  source 1..75: mol_type = other DNA
ggcgcttggcttacagcgggcgggcgcagaaggtattgtgttatgtaccaatacgatgcataaagtggcggatgc

SEQ ID NO: 211004 - DNA, 75 bp, synthetic construct
  source 1..75: mol_type = other DNA
cagcgttctgttgaacagagtcttgagcaactttcagatatatcttctgattttaatgcatcagcaacaaagcgc

SEQ ID NO: 211005 - DNA, 75 bp, synthetic construct
  source 1..75: mol_type = other DNA
gtgatttaatcgaatatgtaaatacagttaaagaactaaaaaatcacattccaatagaagaatacagaaatgaat

SEQ ID NO: 211006 - DNA, 75 bp, synthetic construct
  source 1..75: mol_type = other DNA
catttatgaccagagttaacgtcaatgagtggagtctggataatgtagagtgggttaatgttactgatcagattt

SEQ ID NO: 211007 - DNA, 75 bp, synthetic construct
  source 1..75: mol_type = other DNA
tagatgagtttgataaaggagagtgtacgactctagcatcaaaagatgcaacgaaaattagtctactctatcgag

SEQ ID NO: 211008 - DNA, 75 bp, synthetic construct
  source 1..75: mol_type = other DNA
agcaggcgcaaagcgtcagcgagatgctgaaatactctcccagtacgcaaatgcaggcgcgcggtggaatggatg

SEQ ID NO: 211009 - DNA, 75 bp, synthetic construct
  source 1..75: mol_type = other DNA
tctacttctgaagatgaaatgattgtcacgggcaacaccgccgccgacaccaccgattctgccgccggtgccggt

SEQ ID NO: 211010 - DNA, 75 bp, synthetic construct
  source 1..75: mol_type = other DNA
tggctgcaggataccaattacgaaggcgctaaagcccagttcgaacgctcccttaatcggctgcaacttgattac

SEQ ID NO: 211011 - DNA, 75 bp, synthetic construct
  source 1..75: mol_type = other DNA
gaaattttaggaattttaaagcaacatctctatcctttaaaaaagaatgtgttaatactattgttggtgaaaact

SEQ ID NO: 211012 - DNA, 75 bp, synthetic construct
  source 1..75: mol_type = other DNA
gtaaaggttttacaattaaaggcaggagactcactttctgaaggatatgtctccgaactttcagagatgagtctt

SEQ ID NO: 211013 - DNA, 75 bp, synthetic construct
  source 1..75: mol_type = other DNA
acggtcattactttaccttgcgtaccacgttcaaccagccgggacatctggcaacggtcgtggcttttgatctgc

SEQ ID NO: 211014 - DNA, 75 bp, synthetic construct
  source 1..75: mol_type = other DNA
aaaaacttatccaatcaaataaaaatccgttattttctggaaatgttgacgctagaaaaattagagaagtcgctg

SEQ ID NO: 211015 - DNA, 75 bp, synthetic construct
  source 1..75: mol_type = other DNA
gcaaccagcgcgttcttctctcaccgcgacccggcgatggtggaatggctgactggccgcaaacttgatgtttaa

SEQ ID NO: 211016 - DNA, 75 bp, synthetic construct
  source 1..75: mol_type = other DNA
caccgctgctctcctggctaccgctttccgccatggctgccctgctattgatggtggcgtggaacatgagtgaag

SEQ ID NO: 211017 - DNA, 75 bp, synthetic construct
  source 1..75: mol_type = other DNA
ctattccgctggcgatggcgttagcaattggcagtggcgtagctccacagtacggtttatacaccgctgctgttg

SEQ ID NO: 211018 - DNA, 75 bp, synthetic construct
  source 1..75: mol_type = other DNA
ctcggcggtgattcactctattctggttattctcgccctgctggtactggctccgctgctctcctggctaccact

SEQ ID NO: 211019 - DNA, 75 bp, synthetic construct
  source 1..75: mol_type = other DNA
ccgtgggatctgcctaattcagaattcacgctaacctgggattctattcgcacactgctgcctgcggcattctca

SEQ ID NO: 211020 - DNA, 75 bp, synthetic construct
  source 1..75: mol_type = other DNA
catcagtgtgggtatcgtactggcatcgctgctgtttatgcgtcgcatcgcccgtatgactcgtctggcacctgt

SEQ ID NO: 211021 - DNA, 75 bp, synthetic construct
  source 1..75: mol_type = other DNA
caccgctgctctcctggctgccgctttccgccatggctgccctgctgttgatggtggcgtggaacatgagtgaag

SEQ ID NO: 211022 - DNA, 75 bp, synthetic construct
  source 1..75: mol_type = other DNA
aaattgggcctggtcaattgtgcgtcaacttcaatatgagcaacgctatgcaggaagcggtcttacaattaattg

SEQ ID NO: 211023 - DNA, 75 bp, synthetic construct
  source 1..75: mol_type = other DNA
ataaacattactgggcttctatcttcccatcgggtaccgatggcgataacggttccccaagtgcgtttatcggcg

SEQ ID NO: 211024 - DNA, 75 bp, synthetic construct
  source 1..75: mol_type = other DNA
gggaatgtgtggcaggggctgaatatttacagcggcgtgaccttcctcgacccgaaactgaaagatacggcgaat

SEQ ID NO: 211025 - DNA, 75 bp, synthetic construct
  source 1..75: mol_type = other DNA
ggtccatgaacgctggcgtgggctggcagcaggctgaccgcgcgatgcgtagtgtttccagtaaaatactcaaca

SEQ ID NO: 211026 - DNA, 75 bp, synthetic construct
  source 1..75: mol_type = other DNA
cggaaacagataccacaccagtacttatatttgcccgcgcctgtgacattaatgccatgtcgcgactggattata

SEQ ID NO: 211027 - DNA, 75 bp, synthetic construct
  source 1..75: mol_type = other DNA
ggtctgggcgggcgtgaccggcgataacgcacgggggcgtgcagtgggctttccgtggctacgcgccgcgctgat

SEQ ID NO: 211028 - DNA, 75 bp, synthetic construct
  source 1..75: mol_type = other DNA
tcggcgatacggtgacatttacgccgcagtggtcggcaatgttctatctcagccagagctggctgcagactaaaa

SEQ ID NO: 211029 - DNA, 75 bp, synthetic construct
  source 1..75: mol_type = other DNA
gacagaatcgcctatgggtggagatgaaaatgcacaactccatgccagcggctattatgcgctctttgtagacac

SEQ ID NO: 211030 - DNA, 75 bp, synthetic construct
  source 1..75: mol_type = other DNA
acatgcttgcggacgatagctggaaaagtgagacggtgctgttctccgtgcaggatttaattgatgaagttgtgc

SEQ ID NO: 211031 - DNA, 75 bp, synthetic construct
  source 1..75: mol_type = other DNA
tatgtgaaacgctggaacatctcattcgcgagaaggatgtcccaggaatagaaaaatacatcagcgacattgaca

SEQ ID NO: 211032 - DNA, 75 bp, synthetic construct
  source 1..75: mol_type = other DNA
gcagctatttgatggtggcgggctttgtctctgataacccaggcaccacacaggacgatatctcggactatgtgg

SEQ ID NO: 211033 - DNA, 75 bp, synthetic construct
  source 1..75: mol_type = other DNA
cagcttttcggcgcacagtatgcgatgcgtatctggctggacgccgatctgctaaacaaatataaactgacaccg

SEQ ID NO: 211034 - DNA, 75 bp, synthetic construct
  source 1..75: mol_type = other DNA
cgatagctggaaaagtgagacggagctgttctccgtgcaggatttaattgatgaagtagtgccttcagtgtgctg

SEQ ID NO: 211035 - DNA, 75 bp, synthetic construct
  source 1..75: mol_type = other DNA
agcgggaatggcgacctggattctggaacagtgcggttacaaacccggatttgtgatcggcggtgtgccggggaa

SEQ ID NO: 211036 - DNA, 75 bp, synthetic construct
  source 1..75: mol_type = other DNA
ggcctgaccctgctggccattgatggtgtgttctggcgcacaccggatacaccagagaacgatgcagccttcccc

SEQ ID NO: 211037 - DNA, 75 bp, synthetic construct
  source 1..75: mol_type = other DNA
tgcctggagcctggcgggagaacaccgccactggatgatccctctcagaaagggagcgcaatatgaagagatcag

SEQ ID NO: 211038 - DNA, 75 bp, synthetic construct
  source 1..75: mol_type = other DNA
agacattcttcaagctaggaaagcgtgcgggctgatgagccggtgttcttacagggaggtaagtaatattgttct

SEQ ID NO: 211039 - DNA, 75 bp, synthetic construct
  source 1..75: mol_type = other DNA
cttacacggctactggaaaaacactatggtctgaccctgaacgatacgccgttctgggatcaaaccgttatacag

SEQ ID NO: 211040 - DNA, 75 bp, synthetic construct
  source 1..75: mol_type = other DNA
gaattgttatcagtaaaatacctgttatgcaagcagggttaaaagaggtcatgaggactcacttccctgaatatg

SEQ ID NO: 211041 - DNA, 75 bp, synthetic construct
  source 1..75: mol_type = other DNA
caaatatcatggttgaaggttcgattatcggttatgaaagcaacgttaaatcgggcggggttggggcaagatatt

SEQ ID NO: 211042 - DNA, 75 bp, synthetic construct
  source 1..75: mol_type = other DNA
acatcgcgcgcttaagcggcgtggggaaatctacggtttcccgggtgctgaataacgaaagcggcgtgagccagc

SEQ ID NO: 211043 - DNA, 75 bp, synthetic construct
  source 1..75: mol_type = other DNA
ctgcaagagcaacgcatcgacaccttgcaactggcgagcgtcggtaatacgccgttaatgaaattcctccatccg

SEQ ID NO: 211044 - DNA, 75 bp, synthetic construct
  source 1..75: mol_type = other DNA
tgctgagcaacttatagaacaaaccggcgataacactctgacgttaatggataaaggttattactcactgggact

SEQ ID NO: 211045 - DNA, 75 bp, synthetic construct
  source 1..75: mol_type = other DNA
gttttccgctttattgactaccagcgcttgctggaaggggaagtgggttacacctcgaacgaacccgttatgctg

SEQ ID NO: 211046 - DNA, 75 bp, synthetic construct
  source 1..75: mol_type = other DNA
ttgggatcggtgccgacacgcaataccagctcgatcagattgccgtgaacctgcgtgtcgtcaatgtgagtaccg

SEQ ID NO: 211047 - DNA, 75 bp, synthetic construct
  source 1..75: mol_type = other DNA
ggcacccgcaaccacctcataaccccgaagctctcacctttagcactaccagttacagagaacttaagatgaaaa

SEQ ID NO: 211048 - DNA, 75 bp, synthetic construct
  source 1..75: mol_type = other DNA
cttataatctggtgagatatcagatgattaaaatggcggaacatctgaaaggttactggccgaatcaactgagtt

SEQ ID NO: 211049 - DNA, 75 bp, synthetic construct
  source 1..75: mol_type = other DNA
tccggaagttgaattcagccgtgaagacctggtaaatgaaatcaaagcgggtatcgcgaaaggtaaaaaacacgc

SEQ ID NO: 211050 - DNA, 75 bp, synthetic construct
  source 1..75: mol_type = other DNA
tgcgctgagcaccgttgtagaagcgatcgaccgtctgcgtgacacctcttcttctcaccagcgtatttccgtggt

SEQ ID NO: 211051 - DNA, 75 bp, synthetic construct
  source 1..75: mol_type = other DNA
cctggtggccctcaccaactacggtacggcgatgtgcgcttttgaagatgcggcgcgttacgccaaccaacgcgt

SEQ ID NO: 211052 - DNA, 75 bp, synthetic construct
  source 1..75: mol_type = other DNA
cgggtttaacaccttcctgcgtgaaggtacgcaagagcagatcgacaagatcatggctttccgcggcaccggtaa

SEQ ID NO: 211053 - DNA, 75 bp, synthetic construct
  source 1..75: mol_type = other DNA
cgggttcaacaccttcctgcgcgaaggcacacaagagcagatcgacaagattatggctttccgcggcaccggtaa

SEQ ID NO: 211054 - DNA, 75 bp, synthetic construct
  source 1..75: mol_type = other DNA
gttggcgactggcgtagatgtcttcctggacattgactggcaaggtgcgcagcaaatccgccagaaaatgcccca

SEQ ID NO: 211055 - DNA, 75 bp, synthetic construct
  source 1..75: mol_type = other DNA
ctgagcaggctgacgctgagaagtaaaaagccggagcttgtggagcaagagctgtggggtgtcttactggcttat

SEQ ID NO: 211056 - DNA, 75 bp, synthetic construct
  source 1..75: mol_type = other DNA
tgcgggtggtgaagccctgcctgtcacccgtggctgtctggaaaatgttactgacacgcctgctggaacagcact

SEQ ID NO: 211057 - DNA, 75 bp, synthetic construct
  source 1..75: mol_type = other DNA
agacgagtattattctgagagtgaattaaaagatattttatttaaagagttacagggttgtgattatatacaata

SEQ ID NO: 211058 - DNA, 75 bp, synthetic construct
  source 1..75: mol_type = other DNA
cagagatgcattccttgagcacgcggaagtgttcggtaattactacggcacttcgcgcgaggccattgagcaagt

SEQ ID NO: 211059 - DNA, 75 bp, synthetic construct
  source 1..75: mol_type = other DNA
aggtttctgtttcacacaccacgcgcgcaccgcgtcctggtgaagtacacggtgagcattacttttttgttaatc

SEQ ID NO: 211060 - DNA, 75 bp, synthetic construct
  source 1..75: mol_type = other DNA
gggcatacgagcagaaacagcatgaaaaagagctggctgaaacccgttcccggcagcggagctataacggtccga

SEQ ID NO: 211061 - DNA, 75 bp, synthetic construct
  source 1..75: mol_type = other DNA
gccgcggcggtggcggcggtccggtggattatctgctggggaaagaccggcagcgcgacggcgccagcgttctgc

SEQ ID NO: 211062 - DNA, 75 bp, synthetic construct
  source 1..75: mol_type = other DNA
acgcggcgctgagcgagcgcgtcacgggcttgagcaggcaggtgcagagtttgagcgatcagctgcgccggttgt

SEQ ID NO: 211063 - DNA, 75 bp, synthetic construct
  source 1..75: mol_type = other DNA
actggcaaagtgcgagttatatcgttccggcctgcgtggccatcgtttttgcggtaattgtgctgattctcggta

SEQ ID NO: 211064 - DNA, 75 bp, synthetic construct
  source 1..75: mol_type = other DNA
cgctgattttcatttgcctgattggctactggaaaagtgaatcactgtttatggtgacaatttttgctgccattg

SEQ ID NO: 211065 - DNA, 75 bp, synthetic construct
  source 1..75: mol_type = other DNA
cacgacaggaagctgtccgctgccatgagccagcgcacgaaaggtatgctgcggatggtcagccagacgtggctg

SEQ ID NO: 211066 - DNA, 75 bp, synthetic construct
  source 1..75: mol_type = other DNA
attctggtactgggcagccagaaagcgctggcgttacaggctgcggttgaaggttgtgttaaccatatgtggacc

SEQ ID NO: 211067 - DNA, 75 bp, synthetic construct
  source 1..75: mol_type = other DNA
aagcgatcatggtgtgcgatgaaccttccaccatggagctgaaagttaagactttaagatatttcaatgaattag

SEQ ID NO: 211068 - DNA, 75 bp, synthetic construct
  source 1..75: mol_type = other DNA
gtgagttccatccttgagatttttttcccgctttgcgactccgacaccgtccgctggcagcgccgtacacccgat

SEQ ID NO: 211069 - DNA, 75 bp, synthetic construct
  source 1..75: mol_type = other DNA
gcactggcgcaaactgaagaagcactaaatcgtcgccagattaatcaggcgttattgagcacgggcgatttggcg

SEQ ID NO: 211070 - DNA, 75 bp, synthetic construct
  source 1..75: mol_type = other DNA
gcactgattcaaactgaagaagcactaaatcgtcgccagataaaccaggcgttaagtacgggcgatttggcgcat

SEQ ID NO: 211071 - DNA, 75 bp, synthetic construct
  source 1..75: mol_type = other DNA
gacgtgttaaagctggcagggaatacgggcatgatgttactggggatagtctttctcctgtttaccgcgagtggc

SEQ ID NO: 211072 - DNA, 75 bp, synthetic construct
  source 1..75: mol_type = other DNA
gctatcagcatgggctggcgcggacgccgaacgcctgacgatcacggctctgccagccattaccacatccggaga

SEQ ID NO: 211073 - DNA, 75 bp, synthetic construct
  source 1..75: mol_type = other DNA
ccctcgaatacgcaaaagagaagcgtgagaagctcttggcggagctcaaatcagatgaacactacagccagactg

SEQ ID NO: 211074 - DNA, 75 bp, synthetic construct
  source 1..75: mol_type = other DNA
cgctgccgagtattttggtaaaacatggactgctccaggcttgagccaagcagaagggtgcaaagcgatctcgga

SEQ ID NO: 211075 - DNA, 75 bp, synthetic construct
  source 1..75: mol_type = other DNA
tcccgctttgcgcctctgaccccattcgttggcagcgctgtaccgtcgatgcggagcacggcatctggcctgaca

SEQ ID NO: 211076 - DNA, 75 bp, synthetic construct
  source 1..75: mol_type = other DNA
ccgcgttgctgtgcgcaaccgacacgctggcacttggcgcaagtaaatacctgcaagagaaacgcattgacactc

SEQ ID NO: 211077 - DNA, 75 bp, synthetic construct
  source 1..75: mol_type = other DNA
acgcagaagccggacgccaggcggcctgccagttgattgagcagataaccgggcgcagcgaaccgcaacaaatca

SEQ ID NO: 211078 - DNA, 75 bp, synthetic construct
  source 1..75: mol_type = other DNA
caacgcccaccagggaaagagtaccagcaacgactggaagcatatctgcaatgggccatgctggcgctgaggttg

SEQ ID NO: 211079 - DNA, 75 bp, synthetic construct
  source 1..75: mol_type = other DNA
gctgcaaactgatgcgattcgactctacattcccggcgaatggatcagcatctggcaggttgaactgcctgatgt

SEQ ID NO: 211080 - DNA, 75 bp, synthetic construct
  source 1..75: mol_type = other DNA
acaaactgcgtagtgcactggcaaccgattatgttgtgcaacaggacgcgttacagaaagagggtgatgcggttt

SEQ ID NO: 211081 - DNA, 75 bp, synthetic construct
  source 1..75: mol_type = other DNA
ggagcgtcgggcggacgctggccccggtcatgttccgcgcccagctcaatgagcaggcgtcaccgatttcgctgg

SEQ ID NO: 211082 - DNA, 75 bp, synthetic construct
  source 1..75: mol_type = other DNA
gttcccggagcagaagcggattgtgaatttacgctctcaggtgacgatggcgctgaaaaaatatcgcccacaggc

SEQ ID NO: 211083 - DNA, 75 bp, synthetic construct
  source 1..75: mol_type = other DNA
cgcccgcaagcagataccgactattctgcccgccttactggaagaagaactgaaccaggatatcgatgaactgca

SEQ ID NO: 211084 - DNA, 75 bp, synthetic construct
  source 1..75: mol_type = other DNA
aagctatcagcatgggctggcgcagacgctgaacgcctgaccgttacagctctgcccgccattaccacttatggc

SEQ ID NO: 211085 - DNA, 75 bp, synthetic construct
  source 1..75: mol_type = other DNA
taacttagccactatttgcatgaaagttatcgagacaatcaatcatcatgttgaggttggcaatatcagccttac

SEQ ID NO: 211086 - DNA, 75 bp, synthetic construct
  source 1..75: mol_type = other DNA
ttgaggttggcaatatcagccttacgaccagtgagccagactttgagtttgacccgtatattttggaggaatttt

SEQ ID NO: 211087 - DNA, 75 bp, synthetic construct
  source 1..75: mol_type = other DNA
atgaacgacagagaatttagagcgatgcttcaggcatcgagacaacgtaacagacacaactcctacgcttacaca

SEQ ID NO: 211088 - DNA, 75 bp, synthetic construct
  source 1..75: mol_type = other DNA
taacctaaacaccgtttgcatgaaagttattgaggcaatcaatcatcatgcggaaatgggaaatatcagccttac

SEQ ID NO: 211089 - DNA, 75 bp, synthetic construct
  source 1..75: mol_type = other DNA
gaatgtttccctgcacagcgagtgacactggcgcagttgctggacccgatggttgaggcgaaatatatcctgacg

SEQ ID NO: 211090 - DNA, 75 bp, synthetic construct
  source 1..75: mol_type = other DNA
tccgtcgcgatcttaatttgaaagccggttttactctgcgtgatatcaaccagtgttttccaacgcagcgagtga

SEQ ID NO: 211091 - DNA, 75 bp, synthetic construct
  source 1..75: mol_type = other DNA
gtgcgtcagggtgcggtgaatgataatttattcattattgtgttttttctttctttattaatttgcggaaaagtt

SEQ ID NO: 211092 - DNA, 75 bp, synthetic construct
  source 1..75: mol_type = other DNA
ttgtactgccactgaatgttaccggagactctcagacgacaggcactctggcggcagaggttcaggctttcggag

SEQ ID NO: 211093 - DNA, 75 bp, synthetic construct
  source 1..75: mol_type = other DNA
cccgcagtttgcccaatttctgttaaatcaggtggtggcaagtctgtctgattcggagcatcgtatgacctggat

SEQ ID NO: 211094 - DNA, 75 bp, synthetic construct
  source 1..75: mol_type = other DNA
atgccaaccagaaagagcacccagaacactattaaaaattatctggctaactttgacagctacgaacaattacca

SEQ ID NO: 211095 - DNA, 75 bp, synthetic construct
  source 1..75: mol_type = other DNA
tttcccggatgacggaaggtgaagtgtccgcagaaagtatctggacacagctgaaacagggcgttccgggagtgt

SEQ ID NO: 211096 - DNA, 75 bp, synthetic construct
  source 1..75: mol_type = other DNA
gtgcgccttatgaccttctgctgcttgccggtaaatcagcccgtgcttttgagggtagtgagacatccggcgctg

SEQ ID NO: 211097 - DNA, 75 bp, synthetic construct
  source 1..75: mol_type = other DNA
cttgctgtaatgtgtgcaaagctaattggtattgttgaacatcatattgccgttgggaatattgagccaatggaa

SEQ ID NO: 211098 - DNA, 75 bp, synthetic construct
  source 1..75: mol_type = other DNA
tagcggagatgaagcatttatcattcagcagcagcgtcaggaagcccttgagcaacaactgatgccttcagcccc

SEQ ID NO: 211099 - DNA, 75 bp, synthetic construct
  source 1..75: mol_type = other DNA
cgctggataaatatgtattcccgttcatcggcaacacgccaatagataccctcaccgcccgaaggttcgttgaag

SEQ ID NO: 211100 - DNA, 75 bp, synthetic construct
  source 1..75: mol_type = other DNA
accaggggaaaaggaatacaccctgcaggatggcggaggattatttcttctggtgaagccctccggatcaaaaat

SEQ ID NO: 211101 - DNA, 75 bp, synthetic construct
  source 1..75: mol_type = other DNA
actcctcggtttcaagatcacttattaatgattagaattctttctaatacttctaaagtggggcatttatctgag

SEQ ID NO: 211102 - DNA, 75 bp, synthetic construct
  source 1..75: mol_type = other DNA
tcagatgtgaaccagagattttgaaggtagcaggggcattgattgaaaaaaatgtttacagatacgctaaagatc

SEQ ID NO: 211103 - DNA, 75 bp, synthetic construct
  source 1..75: mol_type = other DNA
gggatgacccgtttactttattcgccggaatggctggaaacccagcagcaatttaaaaaaagaatggcagcaagc

SEQ ID NO: 211104 - DNA, 75 bp, synthetic construct
  source 1..75: mol_type = other DNA
caaccagaaagagcacccagaacactattaaaaattatctggctaactttgattcttacgagcaactaccaagta

SEQ ID NO: 211105 - DNA, 75 bp, synthetic construct
  source 1..75: mol_type = other DNA
ttgccgttgggaatattgagccaatggaaaacgagcaaccagactttgaatttgacccgtatattttggaggaat

SEQ ID NO: 211106 - DNA, 75 bp, synthetic construct
  source 1..75: mol_type = other DNA
atgccaaccagaaagagcacccagaacactattaataattatcttgctaactttgattcttacgcacaactaccg

SEQ ID NO: 211107 - DNA, 75 bp, synthetic construct
  source 1..75: mol_type = other DNA
tgcttacacccatcaaggagcgcggcaacctggaaacactcaagcgggttttacagcgcgttaatgaggtaatgg

SEQ ID NO: 211108 - DNA, 75 bp, synthetic construct
  source 1..75: mol_type = other DNA
gagcagccagaccgctaacgccgcattgcgccggatgggttacgctggtgtgctggtgtctcacggattacgcgc

SEQ ID NO: 211109 - DNA, 75 bp, synthetic construct
  source 1..75: mol_type = other DNA
attacgccacgagacagatttatgccaaccagaaagagcacgaagaacactattaaaaattatctggctaacttt

SEQ ID NO: 211110 - DNA, 75 bp, synthetic construct
  source 1..75: mol_type = other DNA
aatcgccccttcgttgcccccagtgccgttattcaggcccgccagcgcctgggaagtgaggctgtccgccgcgtg

SEQ ID NO: 211111 - DNA, 75 bp, synthetic construct
  source 1..75: mol_type = other DNA
ctgctgaccgtgacgcgcaaaggaaaagtctgccatctgctgacgtcgatgacggacgccatgcgcttccccggg

SEQ ID NO: 211112 - DNA, 75 bp, synthetic construct
  source 1..75: mol_type = other DNA
tttggtatcccgttacgattctctgcgtaacccactgacttctctgggggattacctcgcccccgaactcatctc

SEQ ID NO: 211113 - DNA, 75 bp, synthetic construct
  source 1..75: mol_type = other DNA
tttgagtggttggtggtagatgacaacgaacgttcggtgctggctttcgtgcgtcgtgacaaggtcggcaatgaa

SEQ ID NO: 211114 - DNA, 75 bp, synthetic construct
  source 1..75: mol_type = other DNA
ttttttctgtgcagtacttccccgccgtaaaaatttctttcgctatcagttggccgttgtctggcatggacagca

SEQ ID NO: 211115 - DNA, 75 bp, synthetic construct
  source 1..75: mol_type = other DNA
ctgctgacgactgcagccttcggcacgatgaagaacagcggaaatgagcttgctgagcaacttatagaacaaacc

SEQ ID NO: 211116 - DNA, 75 bp, synthetic construct
  source 1..75: mol_type = other DNA
accagcccgcaggcacgaaaaaagtggccgggactgggaaatgaggtgacagcccgcctgctgaccgtgacgcgc

SEQ ID NO: 211117 - DNA, 75 bp, synthetic construct
  source 1..75: mol_type = other DNA
tattcaggcccgccagcgcctgggaagtgaggctgtccgccgcgtgttcacgaaaacagcacagctctggcataa

SEQ ID NO: 211118 - DNA, 75 bp, synthetic construct
  source 1..75: mol_type = other DNA
ggacaacttgtgaaattaccgacgagaagggaaagggccttcccgagagtggtaaaggagaggccctggaaatac

SEQ ID NO: 211119 - DNA, 75 bp, synthetic construct
  source 1..75: mol_type = other DNA
tgttctggcgcacaccggatacaccagagaacgatgcagccttcccccgccagacacatgccgggaacccggcgc

SEQ ID NO: 211120 - DNA, 75 bp, synthetic construct
  source 1..75: mol_type = other DNA
gttaaatgcctggagcctggcgggagaacaccgccactggatgatccctctcagaaagctgtctcttgatcagat

SEQ ID NO: 211121 - DNA, 75 bp, synthetic construct
  source 1..75: mol_type = other DNA
agtggccgggactgggaaatgaggtgacagcccgcctgctgaccgtgacgcgcaaaggaaaagtctgccatctgc

SEQ ID NO: 211122 - DNA, 75 bp, synthetic construct
  source 1..75: mol_type = other DNA
gagattgccagccacggtcgtcagcattcactaagcctgacgctaccacctctggccactatctggctggttcgg

SEQ ID NO: 211123 - DNA, 75 bp, synthetic construct
  source 1..75: mol_type = other DNA
gttttattcatgttgctacaaaacaaactgctaatgggagtgaacaagtcttagtaagagagatgaataaaaatc

SEQ ID NO: 211124 - DNA, 75 bp, synthetic construct
  source 1..75: mol_type = other DNA
caagtaaaagttgagttgacccctaacatgtcagtctcaatgagcccggatcaagctgttgcattagtaaaatca

SEQ ID NO: 211125 - DNA, 75 bp, synthetic construct
  source 1..75: mol_type = other DNA
ctgacgtcgatgacggacgccatgcgcttccccggaggagaaatggcggatctatgtagtggtcaagtaatattg

SEQ ID NO: 211126 - DNA, 75 bp, synthetic construct
  source 1..75: mol_type = other DNA
atgattttaacgtgtcacggatctgatcttgattgtttcgaagacggttgtcagtacgaagcggaaaagccaggc

SEQ ID NO: 211127 - DNA, 75 bp, synthetic construct
  source 1..75: mol_type = other DNA
cttatggtatgcagagccgcgccggggagctggtcgctatgttgtccgtagttcggatggggcgatgaaggttac

SEQ ID NO: 211128 - DNA, 75 bp, synthetic construct
  source 1..75: mol_type = other DNA
caaaataaaattgatggttttttgtatctaaaaacagaagtaggtatcattgaagatacaaaaccaaatattcct

SEQ ID NO: 211129 - DNA, 75 bp, synthetic construct
  source 1..75: mol_type = other DNA
aagcgcaaatgcgcccggaaaccgcgtctcttatttgcgggctgccggaaaaggttgtgcagactgaagagcgca

SEQ ID NO: 211130 - DNA, 75 bp, synthetic construct
  source 1..75: mol_type = other DNA
tctgcgtaaagaaagcggtatctgggaactgtttatccctggcgcgcataacggtcagctctataaatacgagat

SEQ ID NO: 211131 - DNA, 75 bp, synthetic construct
  source 1..75: mol_type = other DNA
gccaaatggatgggctttacccacctcgaactgctgccaattaatgagcatcctttcgatggcagttggggttat

SEQ ID NO: 211132 - DNA, 75 bp, synthetic construct
  source 1..75: mol_type = other DNA
attcagacccgctagcgtctgggaattgaggctgtccgccgcgtgttcacgaaaacagcgcagctctggcataac

SEQ ID NO: 211133 - DNA, 75 bp, synthetic construct
  source 1..75: mol_type = other DNA
agcaacttatagaacaaaccggcgataacactctgacgttaatggataaaggttattactcactgggactgttaa

SEQ ID NO: 211134 - DNA, 75 bp, synthetic construct
  source 1..75: mol_type = other DNA
atgtccgatcgtatcgatagagacgtgattaacgcgctaattgcaggccattttgcggaccctttttccgtactg

SEQ ID NO: 211135 - DNA, 75 bp, synthetic construct
  source 1..75: mol_type = other DNA
gctatcagcatgggctggcgcagacgctgaacgcctgaccgttacagctctgcccgccattaccacttatggcga

SEQ ID NO: 211136 - DNA, 75 bp, synthetic construct
  source 1..75: mol_type = other DNA
tcgacgctcaggaacacccgatcaacgtcgtctggtcagcaaaattttatgaagtgcagaagtacctttctctga

SEQ ID NO: 211137 - DNA, 75 bp, synthetic construct
  source 1..75: mol_type = other DNA
tcatgttggcgtagcgccagcagatgctgctaacgcgctgggttcgtttattaacgctcgtcgtcgtctggagtt

SEQ ID NO: 211138 - DNA, 75 bp, synthetic construct
  source 1..75: mol_type = other DNA
ttgcaagagaaaaccaaaggtgagctgaaattaaaactgttcccggacagtaccctcggcaatgcacaggcgatg

SEQ ID NO: 211139 - DNA, 75 bp, synthetic construct
  source 1..75: mol_type = other DNA
tgaggccatcaataaaacctatacccgccggaatggtgcagaaatgtcgatatgtagtggcacagtaaatttggc

SEQ ID NO: 211140 - DNA, 75 bp, synthetic construct
  source 1..75: mol_type = other DNA
ggactccaagccagggtcgatagtaacgatattctgtttgtagctcgtttacaaggtgaatgggcgtcaagatat

SEQ ID NO: 211141 - DNA, 75 bp, synthetic construct
  source 1..75: mol_type = other DNA
tgtgtaaggcgatgaaccgttcctttatcagcgtcattgcgggtggtttcggcacagatggttcttccaccggtg

SEQ ID NO: 211142 - DNA, 75 bp, synthetic construct
  source 1..75: mol_type = other DNA
catacattgttgccgcgatcctgtttatcttcagtctggccgggctttcgaagcatgaaacctctcgccagggga

SEQ ID NO: 211143 - DNA, 75 bp, synthetic construct
  source 1..75: mol_type = other DNA
cttggtacggcaaaaaacaccgggacaatacgcttagcatgaagcgtttctcaaatggtcgtggtttctggtgcc

SEQ ID NO: 211144 - DNA, 75 bp, synthetic construct
  source 1..75: mol_type = other DNA
gcgctaacccgatcccgatgccgtttgccgaagtgtataccgggctggaaacccgcactatcgacgctcaggaac

SEQ ID NO: 211145 - DNA, 75 bp, synthetic construct
  source 1..75: mol_type = other DNA
tacggttaacccggcggcgcaggacgatccgaaaagcccaattgccggtatgcctgtgctggaagtgtggaaagc

SEQ ID NO: 211146 - DNA, 75 bp, synthetic construct
  source 1..75: mol_type = other DNA
tacggttaacccggcagcgcaggatgatccgaagagcccgattgcgggtatgcctgttctggaagtatggaaagc

SEQ ID NO: 211147 - DNA, 75 bp, synthetic construct
  source 1..75: mol_type = other DNA
ttgccggtgatgagcacgccgcacgcctttctctcgttcgcgattacgtcctctcgtttgctggtcgtctgccgg

SEQ ID NO: 211148 - DNA, 75 bp, synthetic construct
  source 1..75: mol_type = other DNA
ctactctcgtcatgtacgaaatcagtcgactatcggcggcgaaatagcggcccgacaggaagagtccgttcttct

SEQ ID NO: 211149 - DNA, 75 bp, synthetic construct
  source 1..75: mol_type = other DNA
ctgcccatgcgatcgtctgctgacggaaatcatcattaaagatccgtatcgcacctgcgcgactcgcaaaattag

SEQ ID NO: 211150 - DNA, 75 bp, synthetic construct
  source 1..75: mol_type = other DNA
cgaactctggattacgtgctgatgtttattcccgttgaacccgcttttttactggcgcttgaccgccagccggag

SEQ ID NO: 211151 - DNA, 75 bp, synthetic construct
  source 1..75: mol_type = other DNA
tgttaacgcgcgtgctggaggcatctggtttgcgtgaagggtatgaatatgaaacccaggtcagcatagaaaacg

SEQ ID NO: 211152 - DNA, 75 bp, synthetic construct
  source 1..75: mol_type = other DNA
tattgacgcgggtgctggaggcttccggtctgcgtgaagggtatgaatatgaaacccaggtcagcatcgaaaatg

SEQ ID NO: 211153 - DNA, 75 bp, synthetic construct
  source 1..75: mol_type = other DNA
tgaacccgcttttttactggcgctggaccgccagccggagctgatcaccgaagcgttgaaaaacaatatcatgct

SEQ ID NO: 211154 - DNA, 75 bp, synthetic construct
  source 1..75: mol_type = other DNA
ggttacgatgaactggcggcgttcgatgaagatattgagaaagagggatccccgacgttcctgggtgataaacgt

SEQ ID NO: 211155 - DNA, 75 bp, synthetic construct
  source 1..75: mol_type = other DNA
tcgaccattggtggtgaaatcgccgcccggcaggaagagtcagtgctgcttcccgtcctgctggcactggatgct

SEQ ID NO: 211156 - DNA, 75 bp, synthetic construct
  source 1..75: mol_type = other DNA
gaatggaataacgcggcggttattgcagtcatcattatggtcacggcggcgatctgcacactgttaattgccaca

SEQ ID NO: 211157 - DNA, 75 bp, synthetic construct
  source 1..75: mol_type = other DNA
tcgcctggctgctgatgctcagcgggctgggcacgatcctactactgatgggatcgacgttttatgtggtgatcg

SEQ ID NO: 211158 - DNA, 75 bp, synthetic construct
  source 1..75: mol_type = other DNA
atcttatcgcatggattgacgagcatattgaccagccgcttaacattgatgtcgtcgcaaaaaaatcaggctatt

SEQ ID NO: 211159 - DNA, 75 bp, synthetic construct
  source 1..75: mol_type = other DNA
acgatttcgcccatcacccgacggcgattctggcaacgctggcggcgctgcgtggcaaagttggcggtacggcgc

SEQ ID NO: 211160 - DNA, 75 bp, synthetic construct
  source 1..75: mol_type = other DNA
tggactcgtgacggtctgacatttttcagcgccgcggataatgaaattccgccgccgcgctccatcacattccat

SEQ ID NO: 211161 - DNA, 75 bp, synthetic construct
  source 1..75: mol_type = other DNA
accattaaacctcacagaagaaattccgcccccttttccgacaaaggcgaattatcttatccatcctgtgcgata

SEQ ID NO: 211162 - DNA, 75 bp, synthetic construct
  source 1..75: mol_type = other DNA
ggcgctgcgtggcaaagttggtggtacggcgcgcattattgctgtgctggaaccgcgctcgaataccatgaaaat

SEQ ID NO: 211163 - DNA, 75 bp, synthetic construct
  source 1..75: mol_type = other DNA
atggggacacgttttattttttctctgttattggggtttatgttgttttattcacaatttgttgcagcgtgggaa

SEQ ID NO: 211164 - DNA, 75 bp, synthetic construct
  source 1..75: mol_type = other DNA
atggagacgcgttttattttttctctgttattgggttatatattgttttatccacaatatgttgcagcgtgggaa

SEQ ID NO: 211165 - DNA, 75 bp, synthetic construct
  source 1..75: mol_type = other DNA
acgttgcaggtagaaagccatcgcgtgcagaaggtgcagattattccgctgcgtaaggatggcgagatggagtac

SEQ ID NO: 211166 - DNA, 75 bp, synthetic construct
  source 1..75: mol_type = other DNA
tttatgaagtctcacgtggaggcgacgattcggaacgtgccatgcctgaaagacctttccccatggctgggtcgt

SEQ ID NO: 211167 - DNA, 75 bp, synthetic construct
  source 1..75: mol_type = other DNA
tttcctatcggttttattatcacaattaaaaatgaaggaatataccctgcacactcaacaaaattagaacttaaa

SEQ ID NO: 211168 - DNA, 75 bp, synthetic construct
  source 1..75: mol_type = other DNA
gtggcaatcggtaatgctacctttgtgaattaccgctacagccagccaataccgccgttcctgttgacgctgaac

SEQ ID NO: 211169 - DNA, 75 bp, synthetic construct
  source 1..75: mol_type = other DNA
gctataaagagactgaaaaaacatcagcgatgacaaccacacactctacaaaacttcagccatcacaggcgattt

SEQ ID NO: 211170 - DNA, 75 bp, synthetic construct
  source 1..75: mol_type = other DNA
tactgatggataaggtggtgcgttacacggcggcggtgcctgcccgggtggtttatctgacggcgggcattgact

SEQ ID NO: 211171 - DNA, 75 bp, synthetic construct
  source 1..75: mol_type = other DNA
agtgttttctacctctgtgaacatcatggctgcgtgatccatcagtctgaactggaccagagcaacgggcggtgg

SEQ ID NO: 211172 - DNA, 75 bp, synthetic construct
  source 1..75: mol_type = other DNA
aaatcggcgcgcgttggttacaccaaaatgctgttgggggtggaggcttattttattgagcataaatcccgtaac

SEQ ID NO: 211173 - DNA, 75 bp, synthetic construct
  source 1..75: mol_type = other DNA
accattaaacctcacagaagacatcacgcccccttttccgacaaaggcgaattatcttattcatcctgtgcgata

SEQ ID NO: 211174 - DNA, 75 bp, synthetic construct
  source 1..75: mol_type = other DNA
ggcatgcaatgtttttgcattttccatttctggtggtggaagtgagacgagctataaagagacggaaaaaacgtc

SEQ ID NO: 211175 - DNA, 75 bp, synthetic construct
  source 1..75: mol_type = other DNA
atcatcattatggggcgtcctgatgagaaagagacgctgttacgtgtggatgcggcgatcaacaaaaaatactgc

SEQ ID NO: 211176 - DNA, 75 bp, synthetic construct
  source 1..75: mol_type = other DNA
ctgtggggaggagcagtatctgaaatttggcgatgagtccacgccttttgggcttaaatgggagaaggacagccc

SEQ ID NO: 211177 - DNA, 75 bp, synthetic construct
  source 1..75: mol_type = other DNA
ccacctgggtacagattgtttatgactggctggatgcgctgaaggatccgaacggcgtcaagacgtttattaaca

SEQ ID NO: 211178 - DNA, 75 bp, synthetic construct
  source 1..75: mol_type = other DNA
gtggctgtggtgaacaatcccttaccggccctgattgccggggcgagcatggcggcgctgggggtgatgagcgtg

SEQ ID NO: 211179 - DNA, 75 bp, synthetic construct
  source 1..75: mol_type = other DNA
gtcaaaggcgatgcggcaaataccggtgtacatgcgctgctcgggttgcacaacgacagtttttacggcctgcgt

SEQ ID NO: 211180 - DNA, 75 bp, synthetic construct
  source 1..75: mol_type = other DNA
aagcgggtttgagttccacggctacgcccgctccggcgtgataatgaatgactccggcgccagcaccaaatccgg

SEQ ID NO: 211181 - DNA, 75 bp, synthetic construct
  source 1..75: mol_type = other DNA
ctcatttcacaaatcagtgaggcggccacgaatgaaaaacaacagaacattcagcacagcgaggggcagcagagc

SEQ ID NO: 211182 - DNA, 75 bp, synthetic construct
  source 1..75: mol_type = other DNA
accggccctgattgccggggcgtgcatggcggcgctggggattatcgctgtactggttgccgcgatatggggaat

SEQ ID NO: 211183 - DNA, 75 bp, synthetic construct
  source 1..75: mol_type = other DNA
tgcctgcggcctctgtccctgttcctgatgatgtggctgatcgggtgcgccgggccgtctgtgaaatacgtgcct

SEQ ID NO: 211184 - DNA, 75 bp, synthetic construct
  source 1..75: mol_type = other DNA
aatctgattgcgaaggctaactcaggggtagcggtattcgctgcggggttgactctggctgcacataaattcgag

SEQ ID NO: 211185 - DNA, 75 bp, synthetic construct
  source 1..75: mol_type = other DNA
gctgagcgcatgaccttcatatcaacggcggagcatcctgctctgccgtttttctccactccaataaatttgcgc

SEQ ID NO: 211186 - DNA, 75 bp, synthetic construct
  source 1..75: mol_type = other DNA
ggggggagaaatcctctctggcggtgttgtatctgccgcgcacacaggaagagaccgatgcactcggcaagccgt

SEQ ID NO: 211187 - DNA, 75 bp, synthetic construct
  source 1..75: mol_type = other DNA
gaacgatgcctttgaacggatcaagaaattctttggcgaagaggattcaacagcgatagctcttgtgaatagact

SEQ ID NO: 211188 - DNA, 75 bp, synthetic construct
  source 1..75: mol_type = other DNA
gctttctgctacttcatggccaagttggaagagcctgaaagcaaaggtaaggatctgatcatttatatagatgac

SEQ ID NO: 211189 - DNA, 75 bp, synthetic construct
  source 1..75: mol_type = other DNA
ttggttgctacaaatttttttaaacgtacccatgcagaagcagctgtatgtgcattaattgcgggttcacctacc

SEQ ID NO: 211190 - DNA, 75 bp, synthetic construct
  source 1..75: mol_type = other DNA
gctctgggtaatcaggttcgcgacatgggtaatgactccaacttattgatagtgttttatgttcagataatgccc

SEQ ID NO: 211191 - DNA, 75 bp, synthetic construct
  source 1..75: mol_type = other DNA
atggaaattagtctgttgcaggcattcgcgttaggcattctcgcctttatcgctggtctggatatgtttaacggt

SEQ ID NO: 211192 - DNA, 75 bp, synthetic construct
  source 1..75: mol_type = other DNA
ttgcgttgggcattatcgcctttatcgctggcctggatatgtttaacggcttaacccatatgcaccgcccggtgg

SEQ ID NO: 211193 - DNA, 75 bp, synthetic construct
  source 1..75: mol_type = other DNA
cgatgtcgcggtcggtgtcgccgtacctttcgctgtcgcagtacagatggggattaccttcctgttctcggtgat

SEQ ID NO: 211194 - DNA, 75 bp, synthetic construct
  source 1..75: mol_type = other DNA
gccagtaccctgaaatcagcgtcactttccgacatcgaaatgcgtggtttcacctttgatcaaaaacgccagacg

SEQ ID NO: 211195 - DNA, 75 bp, synthetic construct
  source 1..75: mol_type = other DNA
caggtgcgattgaggatataacggcgttgtttgaatatctggtcgagaatgcatctctttgggatgcaaggaacg

SEQ ID NO: 211196 - DNA, 75 bp, synthetic construct
  source 1..75: mol_type = other DNA
atatcctggcggtgagaggtatatacgggggggatcggcacgcccgacgcagtgcctgtattacatgtccttcac

SEQ ID NO: 211197 - DNA, 75 bp, synthetic construct
  source 1..75: mol_type = other DNA
ttttacgtcgttgaaaatcgaccagcaacgggcaaccgtggcagtgattcaccagcatcatatacgcaacattgc

SEQ ID NO: 211198 - DNA, 75 bp, synthetic construct
  source 1..75: mol_type = other DNA
acgccagacgcttcacctccagttgcgggcagcaaactttgccagtttcgacaaactgcgtagtgcactggcaac

SEQ ID NO: 211199 - DNA, 75 bp, synthetic construct
  source 1..75: mol_type = other DNA
atgaaattacgctctgtaacctacgcattattcattgctggcctggctgcattcagtacatcttcactggcggcg

SEQ ID NO: 211200 - DNA, 75 bp, synthetic construct
  source 1..75: mol_type = other DNA
tcaacctgaagggaatttgctgaccggaccatggcaaccccgggtcagttatcaaaaacagtggatacgttggcg

SEQ ID NO: 211201 - DNA, 75 bp, synthetic construct
  source 1..75: mol_type = other DNA
ctctatattcccggtgaatggctcagcgtctggcaagttgaaataccagacgtccctcacaaccaggtgcagaat

SEQ ID NO: 211202 - DNA, 75 bp, synthetic construct
  source 1..75: mol_type = other DNA
ggatgtccattccttgtgggtttatggctggcgatgcgcaacgggttatctgccgcatcaatgagtgccggggat

SEQ ID NO: 211203 - DNA, 75 bp, synthetic construct
  source 1..75: mol_type = other DNA
ctgaaccttgcgccggttaacttcgatgcgctgttcatgaactatttgcagcagcaggctggcgaaggtactgaa

SEQ ID NO: 211204 - DNA, 75 bp, synthetic construct
  source 1..75: mol_type = other DNA
tgactttccagatccaacgtatttataccaaggatatttctttcgaagcgccgaacgcgccgcacgttttccaga

SEQ ID NO: 211205 - DNA, 75 bp, synthetic construct
  source 1..75: mol_type = other DNA
tggttttcgccgcgacctacgtctgaaagacggttttactctgagagacattaaagacttttatccggacaagcg

SEQ ID NO: 211206 - DNA, 75 bp, synthetic construct
  source 1..75: mol_type = other DNA
aaatatcaaaattaccagagattgcagatattaacatggggcaatcgccatcaagctcagatgtcaatgaacatg

SEQ ID NO: 211207 - DNA, 75 bp, synthetic construct
  source 1..75: mol_type = other DNA
gaaaaaataactgatggggaacatataacacctaagacagttgaagccggtatacctttactgtcagcaaaagac

SEQ ID NO: 211208 - DNA, 75 bp, synthetic construct
  source 1..75: mol_type = other DNA
atgattgaaaagtcgaagcttttacaaacctaccctacagcggcagaggttaaggccgctcgtgagagtaccggc

SEQ ID NO: 211209 - DNA, 75 bp, synthetic construct
  source 1..75: mol_type = other DNA
aaaaatgagtggagtcgggaaacacttaaccgctgggtaaatggcaaaagtaaaccaaaaacactcactcaggcg

SEQ ID NO: 211210 - DNA, 75 bp, synthetic construct
  source 1..75: mol_type = other DNA
gcagattatcaaagcctactattgcgcaaaaccttattcacgacagcttgaacttttaagcaaggtaaaaggcat

SEQ ID NO: 211211 - DNA, 75 bp, synthetic construct
  source 1..75: mol_type = other DNA
gcagatccttaaagcctattatcgtgccaagccttactccaaacagctggagttaaaatgcaaagtgctcggtat

SEQ ID NO: 211212 - DNA, 75 bp, synthetic construct
  source 1..75: mol_type = other DNA
gcgacactcagggtacgctcttctttgatgtggccaggatcatccgggcaaaacaacctgcaatttttgttctgg

SEQ ID NO: 211213 - DNA, 75 bp, synthetic construct
  source 1..75: mol_type = other DNA
ttctgtcgctgactaccttttctgcttttgcaaaacagaactcggctaatagtcagaaaacaggagcaagtaatg

SEQ ID NO: 211214 - DNA, 75 bp, synthetic construct
  source 1..75: mol_type = other DNA
taactacgccaaaaaacatgcagcgaaaggcaatggttttggatttgggttggttgatccaaataatgcaaatag

SEQ ID NO: 211215 - DNA, 75 bp, synthetic construct
  source 1..75: mol_type = other DNA
cttggctgcaattagtgcttatcatggattaatggagtccaagtaccttctttactttttcaaatgtattgaacc

SEQ ID NO: 211216 - DNA, 75 bp, synthetic construct
  source 1..75: mol_type = other DNA
aaccaaaaagtgaggagcagcaacaccatgacgcatctcaacaagtttgccccttatctcgcgaagctcttctgc

SEQ ID NO: 211217 - DNA, 75 bp, synthetic construct
  source 1..75: mol_type = other DNA
acttggcgatctacataccggtattttaaccggcggtacgctggaactggtatggatggggctggctccgctggc

SEQ ID NO: 211218 - DNA, 75 bp, synthetic construct
  source 1..75: mol_type = other DNA
tatctggccggaaaacgatatcaacctgaaacagaccatggcgatgggctgttggagcgagcaggagctggtggg

SEQ ID NO: 211219 - DNA, 75 bp, synthetic construct
  source 1..75: mol_type = other DNA
ctacgtaactcccgaggaagctgacaaaaaatatttgcagataagtaaaaacttatctgaaattcccgcaaatgg

SEQ ID NO: 211220 - DNA, 75 bp, synthetic construct
  source 1..75: mol_type = other DNA
atgaagccgccattcacgcccgagccgatcgtctggccgatctcgcggttcaggtctggcaagcgccttctcttc

SEQ ID NO: 211221 - DNA, 75 bp, synthetic construct
  source 1..75: mol_type = other DNA
ccggcgcatttcatcggctcggtggtgtatatcgaacagggcctatatcaggtttcggggatctcgccattactg

SEQ ID NO: 211222 - DNA, 75 bp, synthetic construct
  source 1..75: mol_type = other DNA
acatgatgttttattggccggttttccttgccagccgttttcactggctggcgtatcgaaaaagaactcacttgg

SEQ ID NO: 211223 - DNA, 75 bp, synthetic construct
  source 1..75: mol_type = other DNA
ttccaccatggagctgaaagttaagactttaagatatttcaatgaattagaagcagaaaatatcaagggtctgta

SEQ ID NO: 211224 - DNA, 75 bp, synthetic construct
  source 1..75: mol_type = other DNA
aagtttcttttttagaacgacaattatccccgagggagaaaagtatctttgtatataccaaggaaggaaaagata

SEQ ID NO: 211225 - DNA, 75 bp, synthetic construct
  source 1..75: mol_type = other DNA
cggttaacgcctcgtgaatgtgcgcgcttaatgggttttgaagcgccgggagaagcgaaattccgcattccggtt

SEQ ID NO: 211226 - DNA, 75 bp, synthetic construct
  source 1..75: mol_type = other DNA
gtcaaaaacctgaaaagtcacgataagggaaaaacgttccgcatcatcatgcagacgctggacgaactgggctat

SEQ ID NO: 211227 - DNA, 75 bp, synthetic construct
  source 1..75: mol_type = other DNA
agcttgcgttatgaacgcttaagaatgacgtcaaaccgttattcctccattcgagtaaactctaagtatcgatta

SEQ ID NO: 211228 - DNA, 75 bp, synthetic construct
  source 1..75: mol_type = other DNA
cggtatcggtctggcgctggtggtggcagatattgtggcgttaatctggcttttgaccaatcgacgcttacgtgc

SEQ ID NO: 211229 - DNA, 75 bp, synthetic construct
  source 1..75: mol_type = other DNA
ctaaatctgttttatcccgatcacgataatttctggctggggctgattccaggcattccggcggtgctggcgttt

SEQ ID NO: 211230 - DNA, 75 bp, synthetic construct
  source 1..75: mol_type = other DNA
gcgtttacccttgctcttctggcttgtgctattgcttcaggcgcgaacctgggtgctgtttgtcattgccggtgc

SEQ ID NO: 211231 - DNA, 75 bp, synthetic construct
  source 1..75: mol_type = other DNA
tgtggctaaatggtgaatccgtcagcggtatcggtctggcgctggttatcgcggatattgtggcgttaatctggc

SEQ ID NO: 211232 - DNA, 75 bp, synthetic construct
  source 1..75: mol_type = other DNA
atgaagagtactgagtttcatcctgtccattatgatgcacacggtcgcctgcgtttacccttgctcttctggttt

SEQ ID NO: 211233 - DNA, 75 bp, synthetic construct
  source 1..75: mol_type = other DNA
ataatttctggctggggttgattcccggcattccggcggtgctggcgtttttgctgagtggtcggcgggcttcat

SEQ ID NO: 211234 - DNA, 75 bp, synthetic construct
  source 1..75: mol_type = other DNA
gcaaaaccaggaagatgtaaacaacctccgcaacgcgatgaaaagtgccaaaggtccaggcaacttccgcaattt

SEQ ID NO: 211235 - DNA, 75 bp, synthetic construct
  source 1..75: mol_type = other DNA
ccagcgccgctgacctgctggacgcgcaccgcatcccctttcagttgatgggtggcaagccggagaacgtcgggt

SEQ ID NO: 211236 - DNA, 75 bp, synthetic construct
  source 1..75: mol_type = other DNA
atttcagccgctttgtgctggattttctggtgttcggtaatgcgtttctggaaaagcgttacagcaccaccggta

SEQ ID NO: 211237 - DNA, 75 bp, synthetic construct
  source 1..75: mol_type = other DNA
ctcgttgctttactcccttgataaacatcactgtacagccgaactgattccaccagatccagaaaacaccgcaca

SEQ ID NO: 211238 - DNA, 75 bp, synthetic construct
  source 1..75: mol_type = other DNA
ggcattaaaattatcccgctcagtgaagtggcaacgaaggacgatttttttaatatcaaaaaagcaagtgctgaa

SEQ ID NO: 211239 - DNA, 75 bp, synthetic construct
  source 1..75: mol_type = other DNA
cgcaacctgcggcaaaaacaatgaccgccagcgccccgaaaatggaggcattcacctttggcgagccggtgccgg

SEQ ID NO: 211240 - DNA, 75 bp, synthetic construct
  source 1..75: mol_type = other DNA
agggcggcggcaccatcgatttccctgatgatgtcagccgtgcacgccagaagctgttccgctttctcgataaca

SEQ ID NO: 211241 - DNA, 75 bp, synthetic construct
  source 1..75: mol_type = other DNA
aaaccctttgcgtttgccgaactgctagcccgggtgagaacccttttgaggcggggaagcacgatgatcacggaa

SEQ ID NO: 211242 - DNA, 75 bp, synthetic construct
  source 1..75: mol_type = other DNA
gctgggtgcggacgattatctggtgaagccctttgcgtttgctgaactgctcgcccgggtaagaaccctcctcag

SEQ ID NO: 211243 - DNA, 75 bp, synthetic construct
  source 1..75: mol_type = other DNA
cgcacgccatttaagcttcacacgtgcagcagaagagctttttgtgactcaggccgcagtaagtcatcaaatcaa

SEQ ID NO: 211244 - DNA, 75 bp, synthetic construct
  source 1..75: mol_type = other DNA
atgaccctaccaaaaatcaaacaggttcgcgcctggtttactggcggtgcgacagcagaaaaaggtgctggcggc

SEQ ID NO: 211245 - DNA, 75 bp, synthetic construct
  source 1..75: mol_type = other DNA
ctgttgcttaccgcgcttggcaccattgaacatcgcgtcaaggggctggagttgggggccgatgactatctggtg

SEQ ID NO: 211246 - DNA, 75 bp, synthetic construct
  source 1..75: mol_type = other DNA
aaacctttcgcgtttgctgagcttctcgcccgggtacgaaccctgctgcgacggggtaatacggtgatcacggag

SEQ ID NO: 211247 - DNA, 75 bp, synthetic construct
  source 1..75: mol_type = other DNA
cgcagtgaaatgggtgtgacatgctcaggccgccagaagcaacgcggaaaatcaattccagcttattacgattga

SEQ ID NO: 211248 - DNA, 75 bp, synthetic construct
  source 1..75: mol_type = other DNA
cgcagtgaaatgggtgtgacttgtgttggtcgccagaaaatgaaattaggcagcaaaccactgtatgaggggtga

SEQ ID NO: 211249 - DNA, 75 bp, synthetic construct
  source 1..75: mol_type = other DNA
aaattagtgaaggtattgtgtcgatgtttcgtgtggacccagatctggctggtccattgatggcgatggttacta

SEQ ID NO: 211250 - DNA, 75 bp, synthetic construct
  source 1..75: mol_type = other DNA
acatgatgcgtcacgccgtgactggcagacatatactcgccaattggggttaaatcatatcaacgttcagcaagg

SEQ ID NO: 211251 - DNA, 75 bp, synthetic construct
  source 1..75: mol_type = other DNA
ttctttcagcaacgcttgttacttcatctggtgcgctggcggctactgcgctagccccatttgaaggggtatctt

SEQ ID NO: 211252 - DNA, 75 bp, synthetic construct
  source 1..75: mol_type = other DNA
gcaagaaggtagatgaatgcagtggaagtatttgcctgccaaacgtagccatttacgcggcaggctaccggaaat

SEQ ID NO: 211253 - DNA, 75 bp, synthetic construct
  source 1..75: mol_type = other DNA
atgaccaccacaacgccacaacgtattggaggctggttgcttggcccgttggcctggcttttagtcgctctgtta

SEQ ID NO: 211254 - DNA, 75 bp, synthetic construct
  source 1..75: mol_type = other DNA
tcgcaacgatatcgaaatgcttcgcgaaaacatggtgaagtcgaaaggccgcaataactttaaaaatctgtttct

SEQ ID NO: 211255 - DNA, 75 bp, synthetic construct
  source 1..75: mol_type = other DNA
tatgccaaataatgttggaggttttggggatgtggaaaaggccagccgcgtttttgtgcgaaatgagttaattcc

SEQ ID NO: 211256 - DNA, 75 bp, synthetic construct
  source 1..75: mol_type = other DNA
aaaccccggtttgctgctgtatggatgttggcaccattatggacaactccgactgcaccgcgtcttacagccgtg

SEQ ID NO: 211257 - DNA, 75 bp, synthetic construct
  source 1..75: mol_type = other DNA
tgtcagaagtcgcagcgaaggatgaatttctgaacatcaagaacgtgagccgggacgacatgatggctgcacacc

SEQ ID NO: 211258 - DNA, 75 bp, synthetic construct
  source 1..75: mol_type = other DNA
tggcaccattatggacaactccgactgcaccgcgtcttacagccgcgtgtttgcaagccgcgcagaagcagaaca

SEQ ID NO: 211259 - DNA, 75 bp, synthetic construct
  source 1..75: mol_type = other DNA
gacaatctcaaatccacgcagatgatgagtgtgattgatgcgattggtgagggaccgatagaaggcccggtgaag

SEQ ID NO: 211260 - DNA, 75 bp, synthetic construct
  source 1..75: mol_type = other DNA
gggtaggtgcggctaatttacagacaacaccttctgataaatggtgtattgtcggacgtttttctgatggccgga

SEQ ID NO: 211261 - DNA, 75 bp, synthetic construct
  source 1..75: mol_type = other DNA
acatgaatcatgagacgtttattgttcagcgcgaaatccccgtagaggactactgggatttctgcaagacagcat

SEQ ID NO: 211262 - DNA, 75 bp, synthetic construct
  source 1..75: mol_type = other DNA
ttccatccgccctgctcaacgagtctgccacgctgttccgccgtaagtattacatcaacggcagccatgcaggct

SEQ ID NO: 211263 - DNA, 75 bp, synthetic construct
  source 1..75: mol_type = other DNA
ttccgtcagccctgctcaacgagtccgccacgctgttccgtcgcaagtattacattaacggcagccatgcgggct

SEQ ID NO: 211264 - DNA, 75 bp, synthetic construct
  source 1..75: mol_type = other DNA
aagtggcaacgaaggacgatttttttaatatcaaaaaagccagcgccgcagacctgctggacgcacaccgcgtcc

SEQ ID NO: 211265 - DNA, 75 bp, synthetic construct
  source 1..75: mol_type = other DNA
tcgacctgccaggtgctcaccatccgcagcgggccagactgtcacgccagaaactggatgccatagaaaaactcg

SEQ ID NO: 211266 - DNA, 75 bp, synthetic construct
  source 1..75: mol_type = other DNA
gttgcaaaaacgattaatagaaattaactcgtgggtaaatatggaaattataaaatataccgcatacaaattata

SEQ ID NO: 211267 - DNA, 75 bp, synthetic construct
  source 1..75: mol_type = other DNA
ggcaagccggagaacgtcgggtcgctgggtgatattgagaaagtggcaaaggtctttgtccgcaatgagcttatc

SEQ ID NO: 211268 - DNA, 75 bp, synthetic construct
  source 1..75: mol_type = other DNA
cattaaaattatcccgctcagtgaagtggcaacgaaggacgatttttttaatatcaaaaaagcaagtgctgaaga

SEQ ID NO: 211269 - DNA, 75 bp, synthetic construct
  source 1..75: mol_type = other DNA
gagccgacagccttcgcgcccggctccgtgtttcatctgctggagccggatattaatcaggagctgtacggcctg

SEQ ID NO: 211270 - DNA, 75 bp, synthetic construct
  source 1..75: mol_type = other DNA
atttacgtcaaacgcaatattctggcctcgacatttatcccgcatccgtggctttcccagcaggatttcagccgc

SEQ ID NO: 211271 - DNA, 75 bp, synthetic construct
  source 1..75: mol_type = other DNA
ccaacgcacaaaaggccagcaaaccacaacaactgaccgccagcacaccgccaaaaacgacagcgttcaccttcg

SEQ ID NO: 211272 - DNA, 75 bp, synthetic construct
  source 1..75: mol_type = other DNA
aaagccgacggcattaaaattatcccgctcagtgaagtggcaacgaaggacgatttttttaatatcaaaaaagcc

SEQ ID NO: 211273 - DNA, 75 bp, synthetic construct
  source 1..75: mol_type = other DNA
caccgcgatcgtttgccggatttcgccgtgcgctttatcgcgtttcttggcgtgtcgatgcctaacttctggctg

SEQ ID NO: 211274 - DNA, 75 bp, synthetic construct
  source 1..75: mol_type = other DNA
atgggaaagattaagaaaaaccgcgctgcggcgacgaatcagctcaagcataaaagccagacttcagccgaagca

SEQ ID NO: 211275 - DNA, 75 bp, synthetic construct
  source 1..75: mol_type = other DNA
ctggcctctacccgcaccatgctgggactggatcagccgctgtacgtccagtacggcacctggttgtggaaggcg

SEQ ID NO: 211276 - DNA, 75 bp, synthetic construct
  source 1..75: mol_type = other DNA
agccagcgccgctgacctgctggacgcgcaccgcatcccctttcagttgatgggcggcaagccggagaacgtcgg

SEQ ID NO: 211277 - DNA, 75 bp, synthetic construct
  source 1..75: mol_type = other DNA
ccgtggctttctcagcaggatttcagccgctttgtgctggattttctggtgttcggtaatgcgtttctggaaaag

SEQ ID NO: 211278 - DNA, 75 bp, synthetic construct
  source 1..75: mol_type = other DNA
taaaaataatgtctggtatgtcaataattatgcgtggggtaattatgagtcaggtggaacgatatctgttacgtg

SEQ ID NO: 211279 - DNA, 75 bp, synthetic construct
  source 1..75: mol_type = other DNA
tgctgcttcagcagatgtgtgtttttctggttattgcgtggttgatgagtaaaaccccgctcttcatccctttaa

SEQ ID NO: 211280 - DNA, 75 bp, synthetic construct
  source 1..75: mol_type = other DNA
gtttgttcagctcaatcaaccgcacgctgggggaagggattgcgcaattgctttcggcgcagatcctcgccgggc

SEQ ID NO: 211281 - DNA, 75 bp, synthetic construct
  source 1..75: mol_type = other DNA
ggcatggggctgcgagtgtgcggcctgcgccagagcgcggcgctcgccgcagtatcgccgccaaccgtgcagcgg

SEQ ID NO: 211282 - DNA, 75 bp, synthetic construct
  source 1..75: mol_type = other DNA
accctgatcgacgccgggctgcacgatctcgccgatcgctggtcgcccggatcgttccagcagtttttactgacg

SEQ ID NO: 211283 - DNA, 75 bp, synthetic construct
  source 1..75: mol_type = other DNA
taacctgcaggtgttggggcgcgtgctgggtaaactcaaccaggtgccggatgttatcgacgcacgtcggttgca

SEQ ID NO: 211284 - DNA, 75 bp, synthetic construct
  source 1..75: mol_type = other DNA
ggatttaatgaagtgaacagcatgaaagtggcgcaggtgctttatcaggagctggatattggcgcagtagcgatt

SEQ ID NO: 211285 - DNA, 75 bp, synthetic construct
  source 1..75: mol_type = other DNA
ggtacagagggccagcaagaagctccgttcctggaaaaggatgattacccctggctgacgcatgtcacgaaatcc

SEQ ID NO: 211286 - DNA, 75 bp, synthetic construct
  source 1..75: mol_type = other DNA
gacggtgtggtgaagccttatgccaccggtgctcacgcatgggaaatgagcgttgtcagagtgcgccgaagctga

SEQ ID NO: 211287 - DNA, 75 bp, synthetic construct
  source 1..75: mol_type = other DNA
cacccagtcagagatcaaactgcttcacgcccaggtgaacccccatttttgtttaatgcgcttaacaccattaaa

SEQ ID NO: 211288 - DNA, 75 bp, synthetic construct
  source 1..75: mol_type = other DNA
tgatctcgaccatcgttgaaggattgctcggcggcctggtacacagcatcctgatccgtcgcgggcgcactgata

SEQ ID NO: 211289 - DNA, 75 bp, synthetic construct
  source 1..75: mol_type = other DNA
cccagcagcaattgcccgcgtttaccctgcaaccgatagtggaaaacgccattaaacatgggacatcacaactgc

SEQ ID NO: 211290 - DNA, 75 bp, synthetic construct
  source 1..75: mol_type = other DNA
accctgatcgacgccgggcggcacgatctcaccgatcgctggtcgcctggatcgttccagcagtttttgctgacg

SEQ ID NO: 211291 - DNA, 75 bp, synthetic construct
  source 1..75: mol_type = other DNA
atacaaaaagattattcacctttcagcggaaacatatactctgtaattatcaggtcagggatatctgtaattaca

SEQ ID NO: 211292 - DNA, 75 bp, synthetic construct
  source 1..75: mol_type = other DNA
cgctgttgttaatggtcctgcttcgttttcgcttcataaataacagtctctttttcagagttctgagaagaccat

SEQ ID NO: 211293 - DNA, 75 bp, synthetic construct
  source 1..75: mol_type = other DNA
acagaatagctaataacctaaaaaaaaaggtatactatataaagaaatggcaaggaagacgccactctgtgaaac

SEQ ID NO: 211294 - DNA, 75 bp, synthetic construct
  source 1..75: mol_type = other DNA
aaaatcgacaacgactttgagccgaagctaattcagaccgtgcgcggcgtgggctacatgcttgaggtgccggat

SEQ ID NO: 211295 - DNA, 75 bp, synthetic construct
  source 1..75: mol_type = other DNA
ctgtaaacttcttggtatgtatgaggagaacggaaaggtattttcttctcaactgtcattctataattatctttt

SEQ ID NO: 211296 - DNA, 75 bp, synthetic construct
  source 1..75: mol_type = other DNA
ttataacacgatcacattacagtctcacatcctgcgccacggaatccgaaacagaatagctaataacctgaaaaa

SEQ ID NO: 211297 - DNA, 75 bp, synthetic construct
  source 1..75: mol_type = other DNA
tgggagtatctacaggccagtaatggcgcattttttatcgaagcgccccactctctttggctctcgttgcctaac

SEQ ID NO: 211298 - DNA, 75 bp, synthetic construct
  source 1..75: mol_type = other DNA
ccgccggatgaacagggctgcgacgatctgtttaaacatccgggcctgcttgatttcagccacacggtggagccg

SEQ ID NO: 211299 - DNA, 75 bp, synthetic construct
  source 1..75: mol_type = other DNA
ctggcgctgttggatggcgaggttgtcggcatgatcggcctgcatttgcagtttcatctgcatcatgtcaactgg

SEQ ID NO: 211300 - DNA, 75 bp, synthetic construct
  source 1..75: mol_type = other DNA
ataatctggaaatatttgattcaatatataaaccaggaatgaagccggaagactggatcaatacatatctttccc

SEQ ID NO: 211301 - DNA, 75 bp, synthetic construct
  source 1..75: mol_type = other DNA
caaacgagatcagcaatgcacttaacaatatcgggataacccctgttcctgctgaaatctcattgtctgcggcct

SEQ ID NO: 211302 - DNA, 75 bp, synthetic construct
  source 1..75: mol_type = other DNA
ctggcatatgaagaaggcaaagccgagctgaacgaaacgatggctaaccggtaccacctgttgcgtgagtacgtg

SEQ ID NO: 211303 - DNA, 75 bp, synthetic construct
  source 1..75: mol_type = other DNA
tttttttggaacgggtacgaacaggttgaatcaacaacaggcacgggaaaatctggtcagaacatataacgatgg

SEQ ID NO: 211304 - DNA, 75 bp, synthetic construct
  source 1..75: mol_type = other DNA
gatacgctccagaaagccagcgatattatctacaaggcatatacggcggatatgaaaaaagccgtagccaaaaat

SEQ ID NO: 211305 - DNA, 75 bp, synthetic construct
  source 1..75: mol_type = other DNA
cggtaaaagtcttgcagcaatttaaagacgatatcaccagcggaccaaatgacctgcgtctggcgagggaaaaca

SEQ ID NO: 211306 - DNA, 75 bp, synthetic construct
  source 1..75: mol_type = other DNA
catcgtagtcagtttgccgaggcccaacgcctgaccgcgcgttacgaagctgcacgggaaaaagtggcgcaatta

SEQ ID NO: 211307 - DNA, 75 bp, synthetic construct
  source 1..75: mol_type = other DNA
tggctgatggtcgcccaacaaactggagccaaagtggtgaaattgccgcttaatgcgcagcgactgccggatgtc

SEQ ID NO: 211308 - DNA, 75 bp, synthetic construct
  source 1..75: mol_type = other DNA
cagtgggcagagctggaacggtgcttggtgccataggaaaatcagcagctacagatttagcactacagggagcca

SEQ ID NO: 211309 - DNA, 75 bp, synthetic construct
  source 1..75: mol_type = other DNA
gacattaagtatggacattgacacgctgcgggctgcgctgctgttccctctggccgatgccaacgtcgtcagcga

SEQ ID NO: 211310 - DNA, 75 bp, synthetic construct
  source 1..75: mol_type = other DNA
gagtgccgaagagcaggacgccgccgcgctgaagcagcttcagcaaaaaagctatacgccgcaaaaccgcagtaa

SEQ ID NO: 211311 - DNA, 75 bp, synthetic construct
  source 1..75: mol_type = other DNA
cacaaatcagtacttgataaaccgggtttcggcgtcgaactcaatcgtgactgcaatctgaaacgcccttacagc

SEQ ID NO: 211312 - DNA, 75 bp, synthetic construct
  source 1..75: mol_type = other DNA
cggcattattaaatacctcaacgataccagacaggcggcaaaggttgacggtcagaaattaaacagccagaaact

SEQ ID NO: 211313 - DNA, 75 bp, synthetic construct
  source 1..75: mol_type = other DNA
ggtcgaccgaaacacatctacagcatctggcgcaaaatgcagaaaaagaacctcgccttcgatgagctgtttgat

SEQ ID NO: 211314 - DNA, 75 bp, synthetic construct
  source 1..75: mol_type = other DNA
gtgtgcgcgatatggcggcaatccgccaactgaaagcaacgcacaccgattctgtttcctccgaacaggtcgata

SEQ ID NO: 211315 - DNA, 75 bp, synthetic construct
  source 1..75: mol_type = other DNA
gttgcacaggcaatggatattaaagattactggcagaaggctttagttcaggctcaaaacgccttaaccgtcttt

SEQ ID NO: 211316 - DNA, 75 bp, synthetic construct
  source 1..75: mol_type = other DNA
cgcaaaagtccccgactgtccctctggcaggcgcgaaaagtgatctccattattcatcaatccggtttattacaa

SEQ ID NO: 211317 - DNA, 75 bp, synthetic construct
  source 1..75: mol_type = other DNA
ctacgtaatgcgatgatggaacaggcactggaaaccggaaagcagcaagatgtgctggagctggcgcaactggcc

SEQ ID NO: 211318 - DNA, 75 bp, synthetic construct
  source 1..75: mol_type = other DNA
gtttagccagttaatggaagatgcaacgctgacgccgctgttcaattatcactatcgcattagcgccccgcctgg

SEQ ID NO: 211319 - DNA, 75 bp, synthetic construct
  source 1..75: mol_type = other DNA
ctgtggcatcattatttaagtgaatgcgaagaattgcttcctgcctcttcactctctactcgcaaacttaaacgt

SEQ ID NO: 211320 - DNA, 75 bp, synthetic construct
  source 1..75: mol_type = other DNA
tgctttctgccacgttatctcaacagcagcgcgacaaacttgttaccgcctttgcgcgtggcacagagggccagc

SEQ ID NO: 211321 - DNA, 75 bp, synthetic construct
  source 1..75: mol_type = other DNA
tggagcaatggctacgttgcgatccactgtggccacatgttttcgacgctccagcatatgcacatctgcaatcga

SEQ ID NO: 211322 - DNA, 75 bp, synthetic construct
  source 1..75: mol_type = other DNA
aaatggcaaacgtgattttagtcactgatgacgaaagttgcgggtattcggccagggagggattgactggcaagc

SEQ ID NO: 211323 - DNA, 75 bp, synthetic construct
  source 1..75: mol_type = other DNA
gcacaatttttcgcctggttgctgtgctggcacgatactggaaaatttgcccgctcttttcagcaactttacctg

SEQ ID NO: 211324 - DNA, 75 bp, synthetic construct
  source 1..75: mol_type = other DNA
gttggcttcatagcgaacaagaatgtattgcacatatcgaatcggcggtaagtcaggggaaatgcatcgcctgga

SEQ ID NO: 211325 - DNA, 75 bp, synthetic construct
  source 1..75: mol_type = other DNA
atgcgattgctcaaccgtcttaaccagtatcaacgtctgtggcaaccttccgccggaaagccgcaaaccgtcacc

SEQ ID NO: 211326 - DNA, 75 bp, synthetic construct
  source 1..75: mol_type = other DNA
acgctttctggtcacgccagaatcgctacgcaatgcgatgatggaacaggcactggaaaccggaaagcagcaaga

SEQ ID NO: 211327 - DNA, 75 bp, synthetic construct
  source 1..75: mol_type = other DNA
gcagggcgattacagcgacatatccgcgatattaatggtcagttaaagcgtgacggtaaagacgagcgtcaccct

SEQ ID NO: 211328 - DNA, 75 bp, synthetic construct
  source 1..75: mol_type = other DNA
cttctgacggcgatatccgggactggcaaccggtgctggactatgtcagtaaggcattcccttatcttatcctga

SEQ ID NO: 211329 - DNA, 75 bp, synthetic construct
  source 1..75: mol_type = other DNA
ggagcacctcaaaaacaccatcatacactaaatcagtaagttggcagcatcaccataacgccacgccgaacgata

SEQ ID NO: 211330 - DNA, 75 bp, synthetic construct
  source 1..75: mol_type = other DNA
ggctgccgaagcggcgggattacttgccggacaccttggcgtggaagccgacgatacccatcatcacggcatgat

SEQ ID NO: 211331 - DNA, 75 bp, synthetic construct
  source 1..75: mol_type = other DNA
agaccccgcatatccctttcgggaacatttgttgatgcagctctgtattcgcacaaataaaagaatgcaggataa

SEQ ID NO: 211332 - DNA, 75 bp, synthetic construct
  source 1..75: mol_type = other DNA
tgcagattactttattgatcaacaagataagatcctttacctggatgctgatatcgcctgtcaggggaaacttaa

SEQ ID NO: 211333 - DNA, 75 bp, synthetic construct
  source 1..75: mol_type = other DNA
ggtaaattgtgaacggcttaaggcattaccgacgaccaaaaattggtctattgccatgtatttccgttttgtaat

SEQ ID NO: 211334 - DNA, 75 bp, synthetic construct
  source 1..75: mol_type = other DNA
cggagaaatataatacccgatatagtattaactatgaattaaaagacaaagttgataatccagtcaatgatgaca

SEQ ID NO: 211335 - DNA, 75 bp, synthetic construct
  source 1..75: mol_type = other DNA
ggcgtttgggggcggaaaaaggtgtggcagggttcctacacccggaagggatttatgatgatccaaaaggtgggc

SEQ ID NO: 211336 - DNA, 75 bp, synthetic construct
  source 1..75: mol_type = other DNA
acaattgagcgacatacacagttcccggaagaagcatcacaatgggttttgtctggccctcatttttttgttggc

SEQ ID NO: 211337 - DNA, 75 bp, synthetic construct
  source 1..75: mol_type = other DNA
acgccgttctacaagactccacgccaaaattgtacgttgaacagcgattatgactgcctggacctgctaactttg

SEQ ID NO: 211338 - DNA, 75 bp, synthetic construct
  source 1..75: mol_type = other DNA
cacaagcagaaaaaatggctacggactggaaaactctggctggttcgctggcaacactatttccagatcgtaaca

SEQ ID NO: 211339 - DNA, 75 bp, synthetic construct
  source 1..75: mol_type = other DNA
ctcgtgaaggcttcaaaattgcccacgacatcagctcctacagcttcgttgcaatggcaaaagcttgccgctcca

SEQ ID NO: 211340 - DNA, 75 bp, synthetic construct
  source 1..75: mol_type = other DNA
cgtagccgaacgctgggggctgacgccttcggtggtggtagctggcggcggaggggataacgcggttagcgccat

SEQ ID NO: 211341 - DNA, 75 bp, synthetic construct
  source 1..75: mol_type = other DNA
aataacgttgctgctgttgttactgaacgcgatgctaactggtggtcgttacggggtcaaagtctgcagtgtaat

SEQ ID NO: 211342 - DNA, 75 bp, synthetic construct
  source 1..75: mol_type = other DNA
caactgaaacaggatgcagacaaccgtcagcaacaacaaaccttaatgcagcaaattactcaaacgacacagcag

SEQ ID NO: 211343 - DNA, 75 bp, synthetic construct
  source 1..75: mol_type = other DNA
tggctggatgcacaagatgagcacgaacgccagctgcggttactcagccaacggcatgaattacaagggcagatt

SEQ ID NO: 211344 - DNA, 75 bp, synthetic construct
  source 1..75: mol_type = other DNA
tgcctcgcgttacaaagccagcaacagacgttgcagcaacaggaagttctggcggcgcaaagtctgcaaaatgtc

SEQ ID NO: 211345 - DNA, 75 bp, synthetic construct
  source 1..75: mol_type = other DNA
gccagaacgaattaaccgcgctgcaaaaccgtattcagcagctgacgccgattctggaaacgttgccgcaaagtg

SEQ ID NO: 211346 - DNA, 75 bp, synthetic construct
  source 1..75: mol_type = other DNA
ccagcgttataaagaaaaaacgcaacaacttgccgatgtgaaaaccatttgcgagcaggaagcgcgcatcaaaac

SEQ ID NO: 211347 - DNA, 75 bp, synthetic construct
  source 1..75: mol_type = other DNA
caaagagggcgataaattccgcaagtttgcccaggggctgacgctggataatttagtccatctcgctaatcagca

SEQ ID NO: 211348 - DNA, 75 bp, synthetic construct
  source 1..75: mol_type = other DNA
agattgttccccaacaaaaacgtctggcgcaattacaggtcgctatccagaatgtcacgcaagaacagacgcaac

SEQ ID NO: 211349 - DNA, 75 bp, synthetic construct
  source 1..75: mol_type = other DNA
acatgccgagcaacgcccactgcgtcagcgcctggtcgcgctgcatgggcagattgttccccaacaaaaacgtct

SEQ ID NO: 211350 - DNA, 75 bp, synthetic construct
  source 1..75: mol_type = other DNA
gcaactgacgccgattctggaaacgttgccgcaaagtgatgaactcccgcacagcgaagaaactgtggtgctgga

SEQ ID NO: 211351 - DNA, 75 bp, synthetic construct
  source 1..75: mol_type = other DNA
gcgggttatgcactgacattgccacaggaagatgaagaagagagctggttggcgacgcgtcagcaagaagcgcag

SEQ ID NO: 211352 - DNA, 75 bp, synthetic construct
  source 1..75: mol_type = other DNA
actggcgttgaccgaagaagaaaaagcgcaacctcaactggcggcgcttagtctggcacaacccgcacgaaatct

SEQ ID NO: 211353 - DNA, 75 bp, synthetic construct
  source 1..75: mol_type = other DNA
tcgcgcgttctggagccagaatcgggcgcgtaaccagcccgacggtaatttgcaggtgccacgcgtagagctggc

SEQ ID NO: 211354 - DNA, 75 bp, synthetic construct
  source 1..75: mol_type = other DNA
gcagaatgggctaagcgtgatgatattcaggcggcatttcctctgattaaggttaatttgaaagagaaacaggaa

SEQ ID NO: 211355 - DNA, 75 bp, synthetic construct
  source 1..75: mol_type = other DNA
acggtgcgaaaagtgtctggattcgactggctcgcggaggaatcgaagaggctcgcgtacctgtgcacgacgcgc

SEQ ID NO: 211356 - DNA, 75 bp, synthetic construct
  source 1..75: mol_type = other DNA
tactattatcaggatctgttcggctttgcacatcgcttctatattcgtgatgaagaatccagaaggacgtttgca

SEQ ID NO: 211357 - DNA, 75 bp, synthetic construct
  source 1..75: mol_type = other DNA
cagtaccgggaaaaccacctatatgaaaacgttgatagggtatattccggtacatcttcggatatcaaccattga

SEQ ID NO: 211358 - DNA, 75 bp, synthetic construct
  source 1..75: mol_type = other DNA
atgaaaaatatatcacttggccgctataaacagcgtttctttggcgactttctggaacttcccggcctgacggaa

SEQ ID NO: 211359 - DNA, 75 bp, synthetic construct
  source 1..75: mol_type = other DNA
ctatgggaatgaagatcacgcaggtgaattacacattcagtcccaccagtatcgctgaatgggcgaaacgcgatg

SEQ ID NO: 211360 - DNA, 75 bp, synthetic construct
  source 1..75: mol_type = other DNA
tctcaacttcccgttatatggcgtgctttttgggattcatctacgttaagaaataccgaaaaattcaggcccgaa

SEQ ID NO: 211361 - DNA, 75 bp, synthetic construct
  source 1..75: mol_type = other DNA
taaaagcgcacttagcaaggttggtggtttccgtgcaaaagcaattacatctctttcatatcttgggtgtgagga

SEQ ID NO: 211362 - DNA, 75 bp, synthetic construct
  source 1..75: mol_type = other DNA
cttgaagagtttaaaagcgcacttagcaaggtttgtggtttccatgcaacagcagtcacatctctttcatatctt

SEQ ID NO: 211363 - DNA, 75 bp, synthetic construct
  source 1..75: mol_type = other DNA
atggagctaacacagatttcattgcgaacgtcgcgagatcaagtcgagcggatcaaaacctacgcaaaagcaagt

SEQ ID NO: 211364 - DNA, 75 bp, synthetic construct
  source 1..75: mol_type = other DNA
tggctaacgcactggccaaaaacctcaaaatccctgaaggcaccagtcagtttgaccgtctactgaaaaagagca

SEQ ID NO: 211365 - DNA, 75 bp, synthetic construct
  source 1..75: mol_type = other DNA
ttgttcttctcaagccaaagcgacgcgtttactgaaaaataatatcaaaaacgatctttcctcatggaaaggata

SEQ ID NO: 211366 - DNA, 75 bp, synthetic construct
  source 1..75: mol_type = other DNA
gtgtggtttctcaatgtgattacttccgtaccgcccaccaccgccagggcgttgattcaggggctgaaacacgat

SEQ ID NO: 211367 - DNA, 75 bp, synthetic construct
  source 1..75: mol_type = other DNA
ggcgcttaggggcgcagaaaggtgtcgtagggttcctgcatccggaaggaatttatgaagacccgaaagggggaa

SEQ ID NO: 211368 - DNA, 75 bp, synthetic construct
  source 1..75: mol_type = other DNA
acaattttacggcagactcaattccctcaagattcatcacaatgggtactgtctggccctcatttctttgttggg

SEQ ID NO: 211369 - DNA, 75 bp, synthetic construct
  source 1..75: mol_type = other DNA
agttgtatggaacacatctggccaccgttctcgattaataagtatcgccactcatgagctagaattatttgctcg

SEQ ID NO: 211370 - DNA, 75 bp, synthetic construct
  source 1..75: mol_type = other DNA
tgaaacatatgcgcagagggatgggacaatcttgcggcagactcaattccctcaagattcatcacaatgggtttt

SEQ ID NO: 211371 - DNA, 75 bp, synthetic construct
  source 1..75: mol_type = other DNA
ttcatcatgcaacgatgttcagtatcaatgtctatggaccgcaaaatacaacgccgtcttttattaacatgtcaa

SEQ ID NO: 211372 - DNA, 75 bp, synthetic construct
  source 1..75: mol_type = other DNA
tgcaaggccagtatttttctctggaaatgtggcatgaaacaaatcagcaaattgatggcactatcgagcgtaaaa

SEQ ID NO: 211373 - DNA, 75 bp, synthetic construct
  source 1..75: mol_type = other DNA
atgcgtccaagtaaattactcattattccttccatatttttcttctctggtttttcatttgccacaacacaacct

SEQ ID NO: 211374 - DNA, 75 bp, synthetic construct
  source 1..75: mol_type = other DNA
attacttccgtaccgcccaccaccgccagggcgttgattcaggggctgaaacacgatctgctggcggatgatacc

SEQ ID NO: 211375 - DNA, 75 bp, synthetic construct
  source 1..75: mol_type = other DNA
actccagcgactggggctacgacgctcaggcctttgcccgctggcgaccggagtacggttattttgccaaacagg

SEQ ID NO: 211376 - DNA, 75 bp, synthetic construct
  source 1..75: mol_type = other DNA
ctggaccggcggcgattgcaccgatcaagccatcggctgggatgatgtcaagcatctgcaaaccggcactgtcag

SEQ ID NO: 211377 - DNA, 75 bp, synthetic construct
  source 1..75: mol_type = other DNA
ttgggtgcggtgtatgaggcgctgctctcctatcgcggattcttcgccagcgaagatctctacgaggtgaagaaa

SEQ ID NO: 211378 - DNA, 75 bp, synthetic construct
  source 1..75: mol_type = other DNA
acgtaatcgctggcagccattgttaaaggcgctgggctacgaaattacgccacagatccaaatgctggatgacga

SEQ ID NO: 211379 - DNA, 75 bp, synthetic construct
  source 1..75: mol_type = other DNA
agatgaacaatattgagcaatgggcgcagaaaaacggcgttgattcaatgatgggggatcaaggtcgtaggaagt

SEQ ID NO: 211380 - DNA, 75 bp, synthetic construct
  source 1..75: mol_type = other DNA
ttatccacttcaatccagaattacaagtaaatgcagaagtgccgctaactatcgaatcagacaccggacgattga

SEQ ID NO: 211381 - DNA, 75 bp, synthetic construct
  source 1..75: mol_type = other DNA
atgagaagacggcagctattcagaaaaatttaggtgatgcacctcctttgtctgctgggggaatgaagaagaatt

SEQ ID NO: 211382 - DNA, 75 bp, synthetic construct
  source 1..75: mol_type = other DNA
aagtagacaagattgctcaacagaaagctaaaacagaaaaacagaatcaaagagcacaagctgccgcagcaagag

SEQ ID NO: 211383 - DNA, 75 bp, synthetic construct
  source 1..75: mol_type = other DNA
tgaagctattatgaagattgtaaactggtttaatcgtaatgatgataagacagatgctattcagaaaaatatggg

SEQ ID NO: 211384 - DNA, 75 bp, synthetic construct
  source 1..75: mol_type = other DNA
aaaggctataagaaagcacaaagtgaagtagacaagattgctcaacagaaagctaaaacagaaaagcagaatcaa

SEQ ID NO: 211385 - DNA, 75 bp, synthetic construct
  source 1..75: mol_type = other DNA
aaagcagaagtagaaaaacttcgtaaacaaatggcggctgtgaaagatatagaattgcgtgttaagacacataaa

SEQ ID NO: 211386 - DNA, 75 bp, synthetic construct
  source 1..75: mol_type = other DNA
gagctggccatcgccaacctggctgactggtggctgggcagaacccgcgcaattgccaaaggcatgctctacctg

SEQ ID NO: 211387 - DNA, 75 bp, synthetic construct
  source 1..75: mol_type = other DNA
ccactcgtgaatcagccgaacaatttaagatcgatgaacgccagcgctactctgttacagatggtgatgaacgtc

SEQ ID NO: 211388 - DNA, 75 bp, synthetic construct
  source 1..75: mol_type = other DNA
gactcacaagggatcgcctttgttgatggttttatgaaatctctcgatcctgctgtgattgaagaatttaaaaag

SEQ ID NO: 211389 - DNA, 75 bp, synthetic construct
  source 1..75: mol_type = other DNA
gtaaacgtaatgcagaagaaaggctattctgatgcgcagataggctcaaggctggaggatattgctgatgatttg

SEQ ID NO: 211390 - DNA, 75 bp, synthetic construct
  source 1..75: mol_type = other DNA
gcattagtgcaatgcaccgtctttctgtagcggaacaatataaagctattgcacaggctagagaaattgccctcc

SEQ ID NO: 211391 - DNA, 75 bp, synthetic construct
  source 1..75: mol_type = other DNA
tatttggaggcgctacggctgctgctggcgtgatggctgttagcaaagcgtcggagtttgttagtagcagtttcg

SEQ ID NO: 211392 - DNA, 75 bp, synthetic construct
  source 1..75: mol_type = other DNA
acctatcgtctgatgccggaacttgccgaaagctgggaagtgctcgacaacggcgcgacctatcgcttccacctg

SEQ ID NO: 211393 - DNA, 75 bp, synthetic construct
  source 1..75: mol_type = other DNA
aaagaagatcgccaggagcaactcgaccgtcagccggtcggcactggaccgtatcagttgtcggaataccgcgcc

SEQ ID NO: 211394 - DNA, 75 bp, synthetic construct
  source 1..75: mol_type = other DNA
gaaagctgggaagtactcgacaacggcgcgacctatcgcttccacctgcgtcgcgatgttccgtttcaaaaaacc

SEQ ID NO: 211395 - DNA, 75 bp, synthetic construct
  source 1..75: mol_type = other DNA
accagagtttacgcgtgccgccatcgcgatttattcgtacgctgcgcgtcgcggcaggtttcgacgttgccgata

SEQ ID NO: 211396 - DNA, 75 bp, synthetic construct
  source 1..75: mol_type = other DNA
ccaagaagaaactagccaaagtgggcaactcgctgattggtctgatgtttgttggttttgccgcacgactggcga

SEQ ID NO: 211397 - DNA, 75 bp, synthetic construct
  source 1..75: mol_type = other DNA
tttgatgccacaagtggtggtggatttaggttccggtggtacaggacgattgtcgaaactcttgaccggggaatg

SEQ ID NO: 211398 - DNA, 75 bp, synthetic construct
  source 1..75: mol_type = other DNA
tctctttgaagctattatgaagattgtaaactggtttaatcgtaatgatgataagacagatgctattcagaaaaa

SEQ ID NO: 211399 - DNA, 75 bp, synthetic construct
  source 1..75: mol_type = other DNA
gctaattcaacgggccaagctgggcggtgtagacgttaaccagatgtataatattacagaatgggcctatagaca

SEQ ID NO: 211400 - DNA, 75 bp, synthetic construct
  source 1..75: mol_type = other DNA
acgtcaaaatattggcaacgttccgttaaagatgtacaagaaagtattaatcagcaaaaagcctctggaaaatgg

SEQ ID NO: 211401 - DNA, 75 bp, synthetic construct
  source 1..75: mol_type = other DNA
cagcaggtactacgactacatggagtgtagcttttaatggtatgcgtccgactggatggttagcaattgcccgta

SEQ ID NO: 211402 - DNA, 75 bp, synthetic construct
  source 1..75: mol_type = other DNA
ctaggctattatcttttagtatatcgtaaaaaaatgcgcaattttatgcggcgtttgaaagggaaaccagctcgc

SEQ ID NO: 211403 - DNA, 75 bp, synthetic construct
  source 1..75: mol_type = other DNA
aaaataaaattcaacaatcaattaatgccttgcataaacatggcatggtttctggcgaccctcatcgtggtaact

SEQ ID NO: 211404 - DNA, 75 bp, synthetic construct
  source 1..75: mol_type = other DNA
cgctggaactggtgagtttctgctatttgagcttcctgattatttctggtgcttttgtcacacagtacatacgta

SEQ ID NO: 211405 - DNA, 75 bp, synthetic construct
  source 1..75: mol_type = other DNA
actgtccatcgcctacggtatcgctcaggcgatgcaccgcgaaggagctaaactggcattcacctaccagaacga

SEQ ID NO: 211406 - DNA, 75 bp, synthetic construct
  source 1..75: mol_type = other DNA
tgttgcttctggtgatgttgagcgtgcaaggatcgcggttcgcagggaccaatgtatcacaaaaggtaacggcct

SEQ ID NO: 211407 - DNA, 75 bp, synthetic construct
  source 1..75: mol_type = other DNA
gccgctggccggctggcaggcggcggagtaccgggtggtggcggtgaaactgaccaatcagtccgctcagaaagt

SEQ ID NO: 211408 - DNA, 75 bp, synthetic construct
  source 1..75: mol_type = other DNA
gcaaagcgaagccccgttacccggccccgttaccggtcttactgacccgttatgccgcccagagtctgtatgcgc

SEQ ID NO: 211409 - DNA, 75 bp, synthetic construct
  source 1..75: mol_type = other DNA
accatcaacgccattgtggggcaggaaattctgcctaaccgtaaccgccccatgacctctgtaccgacgctcatc

SEQ ID NO: 211410 - DNA, 75 bp, synthetic construct
  source 1..75: mol_type = other DNA
agaccccgcatatccctttcgggagcatttgttgatgcaactctgtattcgcacaaataaaagaatgcaggataa

SEQ ID NO: 211411 - DNA, 75 bp, synthetic construct
  source 1..75: mol_type = other DNA
ccaacgttataaagaaaagacgcaacagcttgccgatgtcaaaaccatttgcgagcaggaagcacgcatcaaaac

SEQ ID NO: 211412 - DNA, 75 bp, synthetic construct
  source 1..75: mol_type = other DNA
gcggttccaccagccacccggcggtcgaggcctatcaggcgctggaactgggggttaatcaggcccgcttactga

SEQ ID NO: 211413 - DNA, 75 bp, synthetic construct
  source 1..75: mol_type = other DNA
cactactatttaatgataccgcacgagtgttgccattccataccagagactcttggattgagtctctggtagcct

SEQ ID NO: 211414 - DNA, 75 bp, synthetic construct
  source 1..75: mol_type = other DNA
gagtttaaacaatgagcccaatagagaagcgtcaactaagacaaataagttttttgccgcggtatcaggagccgt

SEQ ID NO: 211415 - DNA, 75 bp, synthetic construct
  source 1..75: mol_type = other DNA
tatctgaaagaaatctgggattatctgactcatgatgaacaggaactgtttgaagtcattaataaaaaattactg

SEQ ID NO: 211416 - DNA, 75 bp, synthetic construct
  source 1..75: mol_type = other DNA
cggagccccgttatgctgagctcctgccggtgctgttgacccggtatgcggcacagtccctgtatgcaccactgc

SEQ ID NO: 211417 - DNA, 75 bp, synthetic construct
  source 1..75: mol_type = other DNA
ggatacagggtctaactctgccgataatatagcgggcgtttattacagacccgttcaaaagtatataaatggcac

SEQ ID NO: 211418 - DNA, 75 bp, synthetic construct
  source 1..75: mol_type = other DNA
agttgtcctgcagctcagtttcggattaattataaaaatggcggtattttttatcgttcagcccgtgatggttat

SEQ ID NO: 211419 - DNA, 75 bp, synthetic construct
  source 1..75: mol_type = other DNA
acaaaagttgggcgggatattcttgcgaaatcgaccgttgccgccgttatcgaatacctcggtttacgagaactc

SEQ ID NO: 211420 - DNA, 75 bp, synthetic construct
  source 1..75: mol_type = other DNA
tacaccaaccgcagacaatatgatcgccagttggttacgccagcattcagattatgatggcggtttctggaacta

SEQ ID NO: 211421 - DNA, 75 bp, synthetic construct
  source 1..75: mol_type = other DNA
attataaaaatggcggtattttttatcgttcagcccgtgatggttatggttttgaagccgactggtccgaatttt

SEQ ID NO: 211422 - DNA, 75 bp, synthetic construct
  source 1..75: mol_type = other DNA
ttacaggtattcgccttggcggtctgtcatctgttcagacatggaatggtcccggctggtctgacaggtcaggtt

SEQ ID NO: 211423 - DNA, 75 bp, synthetic construct
  source 1..75: mol_type = other DNA
aaatgtccaatacgctgaatttattaataaatgctcgttcagatatgcagtcgttgcaatttcgaactatgcagt

SEQ ID NO: 211424 - DNA, 75 bp, synthetic construct
  source 1..75: mol_type = other DNA
aacacctgaaaggtggggagcgcttaaaggcgtggtggggccgtgaatttacagctactgctttcagattcaggc

SEQ ID NO: 211425 - DNA, 75 bp, synthetic construct
  source 1..75: mol_type = other DNA
gccagtccgccgtaaagtcaccacagcccgtaagacagggggcagcgcccgcggggaggtgaatcgtgcagatta

SEQ ID NO: 211426 - DNA, 75 bp, synthetic construct
  source 1..75: mol_type = other DNA
atgaaagcatcagaggcagctggtagtgtgacggcggcagctcagagcaaaagtacggcggaatccgcggcaacg

SEQ ID NO: 211427 - DNA, 75 bp, synthetic construct
  source 1..75: mol_type = other DNA
ttcatttttatatgggagaaggaagttgtcctgcagttcagtttcggattaattataaaaatggcggtatttttt

SEQ ID NO: 211428 - DNA, 75 bp, synthetic construct
  source 1..75: mol_type = other DNA
ttgctagtgcgagcgcgagttcttcgacatcggcagtctatgacttagggagtatgtcgaaggatgaggtagtta

SEQ ID NO: 211429 - DNA, 75 bp, synthetic construct
  source 1..75: mol_type = other DNA
ttctattatatttctttactaggtattaaatccttatcagatttcaaagctaaaattatagattgttactacctg

SEQ ID NO: 211430 - DNA, 75 bp, synthetic construct
  source 1..75: mol_type = other DNA
ttataaaaataatacatctactttcacaaaaaagagatggtctgattttgcttgatgggagctggggcacaggaa

SEQ ID NO: 211431 - DNA, 75 bp, synthetic construct
  source 1..75: mol_type = other DNA
aaggcggatgccagccggcaacgtggggtggcgggagatgaggtcgattggaacgatccaaagctcagcagccgc

SEQ ID NO: 211432 - DNA, 75 bp, synthetic construct
  source 1..75: mol_type = other DNA
ccgggcgtgtgttttcgttcacgctgaccgtcattgagtcaggggaaaaagcgttttcactggtgacggggacaa

SEQ ID NO: 211433 - DNA, 75 bp, synthetic construct
  source 1..75: mol_type = other DNA
ctgcgtattgaggagggcgtggagtccgggcgtgtgttttcgttcacgctgaccgtcattgagtcaggggaaaaa

SEQ ID NO: 211434 - DNA, 75 bp, synthetic construct
  source 1..75: mol_type = other DNA
agtattccccccgtggtcacgacgacgcggtgttggtgatgcggaaagcccgcacggtgacggaaaccgtcctgc

SEQ ID NO: 211435 - DNA, 75 bp, synthetic construct
  source 1..75: mol_type = other DNA
ggtgaatgtggtctcgactttaaccgcaacttttcgacgccggaagagcaggaacgcgcttttgttgcccagcta

SEQ ID NO: 211436 - DNA, 75 bp, synthetic construct
  source 1..75: mol_type = other DNA
gggtagtgcaggagattcacccagaaccagtcactcttttgaaccagtcaaagaaccaatagctgttggtgcatc

SEQ ID NO: 211437 - DNA, 75 bp, synthetic construct
  source 1..75: mol_type = other DNA
tgttggtgcatcagttgatgagtctgtgcgagttcgttcaaaccgaccggaatactctccggagtttgagcaggc

SEQ ID NO: 211438 - DNA, 75 bp, synthetic construct
  source 1..75: mol_type = other DNA
acctggcaaagaacgtttttcagcttcatggtgtcgatcatgaaggccatactattttgcgtaaaaagctcaccc

SEQ ID NO: 211439 - DNA, 75 bp, synthetic construct
  source 1..75: mol_type = other DNA
ccagcaggcgcaaaaactggcgcgtcagtattcgtcctgttggtcaacggcgggcgtacatcctcacgacagcag

SEQ ID NO: 211440 - DNA, 75 bp, synthetic construct
  source 1..75: mol_type = other DNA
gtgcttgtggagctggcctcgcagccagaagtggtggcgatgggtgagtgtggcctcgactttaaccgcaacttt

SEQ ID NO: 211441 - DNA, 75 bp, synthetic construct
  source 1..75: mol_type = other DNA
aaaacgaaatactctatcgggtggcgaaactcaacgacgtcaaccgcgacgtggtggatgagctggacagactta

SEQ ID NO: 211442 - DNA, 75 bp, synthetic construct
  source 1..75: mol_type = other DNA
gaagaatgggtgtcatgcgggaaaattcatgcggatatccgtggcaggagcagccgggagcggatgcagtccggt

SEQ ID NO: 211443 - DNA, 75 bp, synthetic construct
  source 1..75: mol_type = other DNA
cggaaatccgcatctgggtgcgcggtcagtccggtcgggaaatcacggcagcgtcacgacttcatgtgctgagtg

SEQ ID NO: 211444 - DNA, 75 bp, synthetic construct
  source 1..75: mol_type = other DNA
tgttgtcggggggccggtgccggatgcgaccggcgggcgtctggaaattctctgtcggctgggaggggaaaaatg

SEQ ID NO: 211445 - DNA, 75 bp, synthetic construct
  source 1..75: mol_type = other DNA
tatcggtgccatcaaagacggttatgtcacgatttcaccgttaacgccatacgataaatgggatggtgagaaatg

SEQ ID NO: 211446 - DNA, 75 bp, synthetic construct
  source 1..75: mol_type = other DNA
gacccgggcgaaaacattccggggaaagtggcagtatttacgggtaaggaatggagccatgaagaagaccatcgc

SEQ ID NO: 211447 - DNA, 75 bp, synthetic construct
  source 1..75: mol_type = other DNA
ggtgccgcagtagaagcggcagaagcacagcgccagtcactgattgatgctgcaatggcctccatcagtctgatt

SEQ ID NO: 211448 - DNA, 75 bp, synthetic construct
  source 1..75: mol_type = other DNA
cctcagccgccagaacgaagaggtacgtcgacgtctgctcgacgaagtgccgatggaagactgggcggtggcgct

SEQ ID NO: 211449 - DNA, 75 bp, synthetic construct
  source 1..75: mol_type = other DNA
aacggcgcatcgcgatccatgttgcagggtattctcaacaaagccctcggcaccgagatcgccagcagcgtgatc

SEQ ID NO: 211450 - DNA, 75 bp, synthetic construct
  source 1..75: mol_type = other DNA
aaaacgaaattctctaccgggtggcgaaactcaacgatgttaaccgcgacgtggtggatgaactggatcgcctga

SEQ ID NO: 211451 - DNA, 75 bp, synthetic construct
  source 1..75: mol_type = other DNA
gcccgtggcgtgaccgaattctgaatgttgtcggggggccggtgccggatgcgaccggcgggcgtctggaaattc

SEQ ID NO: 211452 - DNA, 75 bp, synthetic construct
  source 1..75: mol_type = other DNA
cagggctggggatgggtaaggtgaaatctatcaatcagtaccggcttacgccgggcttcgtcggttttactccgg

SEQ ID NO: 211453 - DNA, 75 bp, synthetic construct
  source 1..75: mol_type = other DNA
tgcaggcggtgttcctcgcgtttctgacgccggaaatctcggcggcggtgctctcgtatctcaacgaatcggtgc

SEQ ID NO: 211454 - DNA, 75 bp, synthetic construct
  source 1..75: mol_type = other DNA
aaaggcgtccatatattaatggcgcaccagtcaattgccgacctgcgcgactgtccggcggatttaaacggcgac

SEQ ID NO: 211455 - DNA, 75 bp, synthetic construct
  source 1..75: mol_type = other DNA
cagcattaacgcgccaggcggttttgcgctgaaggagattttcgacaagggcggctgctgctatatcatcggttc

SEQ ID NO: 211456 - DNA, 75 bp, synthetic construct
  source 1..75: mol_type = other DNA
tgacagtaacatgatcctgaacctgcacgattttgtcagctttatctttacgacaaaaacgctaccttctgcctc

SEQ ID NO: 211457 - DNA, 75 bp, synthetic construct
  source 1..75: mol_type = other DNA
taatgccacaaatggattttcattaaaggaggtttttgatgaaggtggttgttgctacattattggttcaacacg

SEQ ID NO: 211458 - DNA, 75 bp, synthetic construct
  source 1..75: mol_type = other DNA
ccgaactaccaagagctacaaagatgtttcaggttcaggtcaaaaaagaaaacatcgaacttctttcatttgagt

SEQ ID NO: 211459 - DNA, 75 bp, synthetic construct
  source 1..75: mol_type = other DNA
acttcaggatccagacaccgccgaatggattgcgcgcatgtcgggcacgattttagtcgatgatgaaagccggaa

SEQ ID NO: 211460 - DNA, 75 bp, synthetic construct
  source 1..75: mol_type = other DNA
tggatagcgagaatgtcaggaacgattctggtggatgacgaactccgtaaggctaagacggataatatgctcact

SEQ ID NO: 211461 - DNA, 75 bp, synthetic construct
  source 1..75: mol_type = other DNA
cgatgtccgcaccgtaaagtccctgctgccggaaacactgcattatgatccgctggattatattgacctgaataa

SEQ ID NO: 211462 - DNA, 75 bp, synthetic construct
  source 1..75: mol_type = other DNA
ttttctctctggcacactggccccgatagttatcggatccttccagtggctgtataaaaccagactcaccagtga

SEQ ID NO: 211463 - DNA, 75 bp, synthetic construct
  source 1..75: mol_type = other DNA
catgcgaaacagcaaaattattacaacccagcgcatgttactggttcgcctgtaccagttagcagaaaggcgcga

SEQ ID NO: 211464 - DNA, 75 bp, synthetic construct
  source 1..75: mol_type = other DNA
ggctcttttcttcgacgaaagcgaagtaaaaccggcaaagtcccaatctgatgatgaagaacacttctccccact

SEQ ID NO: 211465 - DNA, 75 bp, synthetic construct
  source 1..75: mol_type = other DNA
tttcccctgatattgccgcagcggcagccccggtgaagatcatgctggattttggcgaggatgataaaccagcca

SEQ ID NO: 211466 - DNA, 75 bp, synthetic construct
  source 1..75: mol_type = other DNA
acttagcctgaagcgaatcgccatcaattctgcgcagtggcgaggagataaaagcgcggaagtcattcatcaact

SEQ ID NO: 211467 - DNA, 75 bp, synthetic construct
  source 1..75: mol_type = other DNA
aaacaggctgtcacgttctttggtccggatcgtcatttcgaagaatcctgggaagttcctgcggtatctgcagcc

SEQ ID NO: 211468 - DNA, 75 bp, synthetic construct
  source 1..75: mol_type = other DNA
agcgtatcttcgtcaacgcccgccgccaccccgactccaaccggctccacagtcaagtctatcccgctcatgacc

SEQ ID NO: 211469 - DNA, 75 bp, synthetic construct
  source 1..75: mol_type = other DNA
ggcatggcataaccggcgacggcaatatgcaagatgggatgctatgggcagaaagccgtactttgttgattttta

SEQ ID NO: 211470 - DNA, 75 bp, synthetic construct
  source 1..75: mol_type = other DNA
caacctgcaagtgctgggccgcgtgctgggtaaactcaaccaggtgccggatgttatcgacgcgcgtcggttgca

SEQ ID NO: 211471 - DNA, 75 bp, synthetic construct
  source 1..75: mol_type = other DNA
tgcaatcgcaatttaataagccgagtgccgaagagcaggacgccgccgcgctgaagcaacttcagcaaaaaagct

SEQ ID NO: 211472 - DNA, 75 bp, synthetic construct
  source 1..75: mol_type = other DNA
acaacttcaatgatgtcgacgagttgctggcggcgattggtggcggggatatccgtctcaatcagatggtgaact

SEQ ID NO: 211473 - DNA, 75 bp, synthetic construct
  source 1..75: mol_type = other DNA
tacgattctggcgctgacacaaagtgcaggcattacttttttgcagggcgtagagagcgtcagagaaacaatgcg

SEQ ID NO: 211474 - DNA, 75 bp, synthetic construct
  source 1..75: mol_type = other DNA
acgcaggggatcatgacgctggcagactttagtggcgaatggggctggctgctggtgttgttcggctttctgctg

SEQ ID NO: 211475 - DNA, 75 bp, synthetic construct
  source 1..75: mol_type = other DNA
acgctttctgaagggctggcactgctggcggaacagcatcccagtaagcaatggcaagcgttgctgcaatcactg

SEQ ID NO: 211476 - DNA, 75 bp, synthetic construct
  source 1..75: mol_type = other DNA
acgcatcccgattatgggttcactgatgcggggacaaaaactcacgcagatctttacgattctggcgctgacaca

SEQ ID NO: 211477 - DNA, 75 bp, synthetic construct
  source 1..75: mol_type = other DNA
attatgggttcactgatgcggggacaaaaactcacgcagatctttacgattctggcgctgacacaaagtgcaggc

SEQ ID NO: 211478 - DNA, 75 bp, synthetic construct
  source 1..75: mol_type = other DNA
cggataacctcgcagccttactggaaccggcgttgctgatcataacgggaggaattatcggtacgctggtggtgg

SEQ ID NO: 211479 - DNA, 75 bp, synthetic construct
  source 1..75: mol_type = other DNA
gattatttattcgctgtaaaaggaaaccaggggcggctaaataaagccttcgaggaaaaatttccgctgaaagaa

SEQ ID NO: 211480 - DNA, 75 bp, synthetic construct
  source 1..75: mol_type = other DNA
ttgttcatcgataaaacgctccccactgtagatgttgtcattctgtcacttgtcgtgggtattaatgtcaataaa

SEQ ID NO: 211481 - DNA, 75 bp, synthetic construct
  source 1..75: mol_type = other DNA
ctatgcttactggcattgtcgtcacctatgccgtgttacttcttggttgcttgttcatcgataaaacgctcccca

SEQ ID NO: 211482 - DNA, 75 bp, synthetic construct
  source 1..75: mol_type = other DNA
ttgttgaccacttcatacggtgtttccggctcatcggggtcgaaccgtattgtggcccaggctgcggttggcgca

SEQ ID NO: 211483 - DNA, 75 bp, synthetic construct
  source 1..75: mol_type = other DNA
gacccgttttctcgatgaccgtcgcattgaaattgcccgtactggtgactacaccgtgctgatcctgttctccgt

SEQ ID NO: 211484 - DNA, 75 bp, synthetic construct
  source 1..75: mol_type = other DNA
ctacgccgtggtaaccaactgcacctatgatggcttctgttataacgtgaacgatgtagtcagacacctgggtga

SEQ ID NO: 211485 - DNA, 75 bp, synthetic construct
  source 1..75: mol_type = other DNA
tgtatttttgccctcagtaagctggcaatggcgttatccagtacgcttgattccatccctttatccatgcagcga

SEQ ID NO: 211486 - DNA, 75 bp, synthetic construct
  source 1..75: mol_type = other DNA
agcagctaaaaaatgaggtgtcaaaaggaaaactgattgacaccggattctgtatttttgccctcagtaagctgg

SEQ ID NO: 211487 - DNA, 75 bp, synthetic construct
  source 1..75: mol_type = other DNA
gaaattgcttattgccagatgggaactgacagcagaacaggctgttacacagcagctaaaaaatgaggtgtcaaa

SEQ ID NO: 211488 - DNA, 75 bp, synthetic construct
  source 1..75: mol_type = other DNA
atccccgtctgacataccttctcgctgtgaaaccagtgttaacgagagatactgggaaattgttcagtccaaaaa

SEQ ID NO: 211489 - DNA, 75 bp, synthetic construct
  source 1..75: mol_type = other DNA
ggaacgagtacgagtttgatcgtgatgccacctacgcggcaggtaatggcggcaaagaaggtctgaacggtgccg

SEQ ID NO: 211490 - DNA, 75 bp, synthetic construct
  source 1..75: mol_type = other DNA
tacgcgacattgttaataaggccagagttaccgccatttgtaaaagtccggcctggaaatatactctgcgaatac

SEQ ID NO: 211491 - DNA, 75 bp, synthetic construct
  source 1..75: mol_type = other DNA
gcagatcgcagagttggcgggtgtttcaaaaaccaatctgctgtattactttccgtcaaaagaggcgctgtatat

SEQ ID NO: 211492 - DNA, 75 bp, synthetic construct
  source 1..75: mol_type = other DNA
gtgctggccccgggtgggcggctttcgatcatcagcttccactcgctggaagaccgtattgtgaaacgttttatg

SEQ ID NO: 211493 - DNA, 75 bp, synthetic construct
  source 1..75: mol_type = other DNA
ttattgatgcactattggttcataagatggccagggctttattgccgctggtggctgaaaagcatgaggcggacc

SEQ ID NO: 211494 - DNA, 75 bp, synthetic construct
  source 1..75: mol_type = other DNA
gcagatcgcagagttggctggcgtgtcaaagaccaatctgctgtattacttcccgtcgaaagaggcactgtatat

SEQ ID NO: 211495 - DNA, 75 bp, synthetic construct
  source 1..75: mol_type = other DNA
atgacgcaaggcgcagtgaaaacaacgggtaaacgttcgcgtgcagtaagcgcgaagaaaaaagcgattcttagc

SEQ ID NO: 211496 - DNA, 75 bp, synthetic construct
  source 1..75: mol_type = other DNA
tcccgtcaaaagaggcgctgtatattgccgtgctgcggcagattctcgatatctggctggcaccgttaaaagcgt

SEQ ID NO: 211497 - DNA, 75 bp, synthetic construct
  source 1..75: mol_type = other DNA
tgataaaatatattttgattatcatcttgaatctcatatatttttcgaattaaagagagtttcatctcaatttac

SEQ ID NO: 211498 - DNA, 75 bp, synthetic construct
  source 1..75: mol_type = other DNA
ctgtattttttattcttttcgctttttttgcttttccgctctcagggcaggccaatgattcagttgttgttacat

SEQ ID NO: 211499 - DNA, 75 bp, synthetic construct
  source 1..75: mol_type = other DNA
catttgaagacgcgtcggttcaggctgatattcacgtgatgctagtggatcacaaagagtttaaagtgcaaagcg

SEQ ID NO: 211500 - DNA, 75 bp, synthetic construct
  source 1..75: mol_type = other DNA
ggaaagggcgtcaccggtgaacgtatccgaattaagccgcatgtttatcgcgaactggttaaccgtctccacgat

SEQ ID NO: 211501 - DNA, 75 bp, synthetic construct
  source 1..75: mol_type = other DNA
acaagaattcgtcaaccaataattttcgggaaatcgcggaaacgtcaaccaactatccggtaattcctagtgagg

SEQ ID NO: 211502 - DNA, 75 bp, synthetic construct
  source 1..75: mol_type = other DNA
tttattacagttctcttcacaactaaatattaaagacaattcaaaagctgctttggaagcttcaaaagaattaat

SEQ ID NO: 211503 - DNA, 75 bp, synthetic construct
  source 1..75: mol_type = other DNA
agcgccgcagtagaagcggcagaagcacagcgccagtcgctgattgatactgcaatggcttccatcagtctgatt

SEQ ID NO: 211504 - DNA, 75 bp, synthetic construct
  source 1..75: mol_type = other DNA
gaaaagtggctgtatttacaggtaagggatggagccatgaagaggaccatcgcaatgagactgtttactcaatcg

SEQ ID NO: 211505 - DNA, 75 bp, synthetic construct
  source 1..75: mol_type = other DNA
acttaacgccgtgctggattacattgacgcggtgacagcaacagataccagcacagcgccggacgtcatctggcc

SEQ ID NO: 211506 - DNA, 75 bp, synthetic construct
  source 1..75: mol_type = other DNA
cgacgcgggctacaagaacagcgcggtcaagatcaacgttgagcagattttcaagctctcgtcgcctgccaccga

SEQ ID NO: 211507 - DNA, 75 bp, synthetic construct
  source 1..75: mol_type = other DNA
accattgtatgaaactgtctaaaaaaatccatagagaaaaaactatacaaccaacagtaaatctcaatggtagtg

SEQ ID NO: 211508 - DNA, 75 bp, synthetic construct
  source 1..75: mol_type = other DNA
gatacactgaaacaaataaaaacaatcccccaatcatattcgttcatggatttttcatgaataatgaaatgttta

SEQ ID NO: 211509 - DNA, 75 bp, synthetic construct
  source 1..75: mol_type = other DNA
tatgcccgcctgttccactggtattgacccgggcgaaaacattccggggaaagtggcagtatttacgggtaagga

SEQ ID NO: 211510 - DNA, 75 bp, synthetic construct
  source 1..75: mol_type = other DNA
gatggtgagaaatgggtgacagacactgaggcacaacacagtgccgcagtagacgcggcagaagcacagcgccaa

SEQ ID NO: 211511 - DNA, 75 bp, synthetic construct
  source 1..75: mol_type = other DNA
atgaaaattatatgcgtagtatgccgcctgcatggtattgaccctggcgaaaacattccgggaagagttgcagta

SEQ ID NO: 211512 - DNA, 75 bp, synthetic construct
  source 1..75: mol_type = other DNA
cattgctgacttcaagcatttcaaacccggcgatactgtaccagagatgtaccgcaccgatgagtacaacattaa

SEQ ID NO: 211513 - DNA, 75 bp, synthetic construct
  source 1..75: mol_type = other DNA
cattgctgactttaagcatttcaaaccaggcgataccgtcccagagatgtaccgcaccgatgagtacaacattaa

SEQ ID NO: 211514 - DNA, 75 bp, synthetic construct
  source 1..75: mol_type = other DNA
atggcaatatctgcaggtcgtctgacacagatgataagtgttctgaatccggtgttaacccgtaacgctgccgga

SEQ ID NO: 211515 - DNA, 75 bp, synthetic construct
  source 1..75: mol_type = other DNA
gattggtgttccatgatgtattcgcgcctccgtcttgctagaaatcttctcgatgaaaacggcgtaatcttcata

SEQ ID NO: 211516 - DNA, 75 bp, synthetic construct
  source 1..75: mol_type = other DNA
cacgagaagacattccgcgcgccgaaagcgtacccagagcagtcgatggcggttgcggcgacacacgacctgcct

SEQ ID NO: 211517 - DNA, 75 bp, synthetic construct
  source 1..75: mol_type = other DNA
gtgaaagcccttgtggaagacgccctgcaaagcgggcagacgttcagcgagttccgggaggcgctgcaaccgctg

SEQ ID NO: 211518 - DNA, 75 bp, synthetic construct
  source 1..75: mol_type = other DNA
ccgggctggaactacaatcccggtataaaccgtgagcaggagctggcgcgccagctggcgacaaaacaggcccgt

SEQ ID NO: 211519 - DNA, 75 bp, synthetic construct
  source 1..75: mol_type = other DNA
gtggctacgcagactgaagttgccaggcatttaagtctgaccgatcgccagcttcgcagattgcagaaattaccg

SEQ ID NO: 211520 - DNA, 75 bp, synthetic construct
  source 1..75: mol_type = other DNA
ggcgacgcaagctttccgcaacgcttgagtcgatgtttgccgatgatggcgtgaacaagttgctgaaggatttgg

SEQ ID NO: 211521 - DNA, 75 bp, synthetic construct
  source 1..75: mol_type = other DNA
ggctacagccggaagactggctggatatggcagatccggtaaatattcccggcaccagttaccagtataaaaact

SEQ ID NO: 211522 - DNA, 75 bp, synthetic construct
  source 1..75: mol_type = other DNA
gatttaaccttaccaatcaaaaaagaaacgatacaaggtaaatcggtattctttgtcgatgatgatgcactggtg

SEQ ID NO: 211523 - DNA, 75 bp, synthetic construct
  source 1..75: mol_type = other DNA
tgcacaacgcccttccgccggtgatcccgcgtctgggtttacagttttccaccatgctgacgctggcgatgatca

SEQ ID NO: 211524 - DNA, 75 bp, synthetic construct
  source 1..75: mol_type = other DNA
cgggaagccattcctggcgtgcgcttatgcattcattgccaacaggagaaagatttacaaaaaaccagcttatac

SEQ ID NO: 211525 - DNA, 75 bp, synthetic construct
  source 1..75: mol_type = other DNA
aagctttgctgcactaccttcttttccagttaaatcttacagagactcagtcacatcaggcgccggaagcattac

SEQ ID NO: 211526 - DNA, 75 bp, synthetic construct
  source 1..75: mol_type = other DNA
cctgcatccaatccaatttcatcaagtaaacattatagctggatggacgagcgcggtgtatatttcccagataat

SEQ ID NO: 211527 - DNA, 75 bp, synthetic construct
  source 1..75: mol_type = other DNA
caagttactcagggttcgttagacttattggtagataatattaaagcagaccgcactgatgaagatttacttttc

SEQ ID NO: 211528 - DNA, 75 bp, synthetic construct
  source 1..75: mol_type = other DNA
cgacaaaaacgctaccttctgcttcactgatctcgccgataaaggtcagaaagcgccagctaaaaactttttcgg

SEQ ID NO: 211529 - DNA, 75 bp, synthetic construct
  source 1..75: mol_type = other DNA
gtgtcttaccaacactcacccacaacagaagacccgatgaacatatggtatatcgttggcaccatatgcctgctc

SEQ ID NO: 211530 - DNA, 75 bp, synthetic construct
  source 1..75: mol_type = other DNA
aatatgaaggatgctgtttacttcaatgactttatttatcttgacgtaaattcatctgtattcaatatttcctat

SEQ ID NO: 211531 - DNA, 75 bp, synthetic construct
  source 1..75: mol_type = other DNA
cgtctggatgctgcgttacaagatgaagttgctgccagcgaaggtttccttaagcaacccgccggtaaagatttc

SEQ ID NO: 211532 - DNA, 75 bp, synthetic construct
  source 1..75: mol_type = other DNA
cctgcttcctcctgaactaccagagtttttgtacaaactcgaaaactacaccggcagtattgtaacccgtgaagc

SEQ ID NO: 211533 - DNA, 75 bp, synthetic construct
  source 1..75: mol_type = other DNA
gttatacccggtgacggatggtgatatgcactggtcgctgatttcaagcatgaacctgaactacctctcgctgct

SEQ ID NO: 211534 - DNA, 75 bp, synthetic construct
  source 1..75: mol_type = other DNA
tttataatcaagcaagcacaaaaatataatccggtcacattgaaaaacttagaatcggcatctccggcagataag

SEQ ID NO: 211535 - DNA, 75 bp, synthetic construct
  source 1..75: mol_type = other DNA
accccgccgccatgataacgatgaaggctcagatactggtgaaaccaccgaaaccaccgaaaccaccgaaaaacg

SEQ ID NO: 211536 - DNA, 75 bp, synthetic construct
  source 1..75: mol_type = other DNA
caaggcaaaagctggctgaaatcatcacgcttgtccgtgaaatggcactgttgcaaatagtcggtggtgataaac

SEQ ID NO: 211537 - DNA, 75 bp, synthetic construct
  source 1..75: mol_type = other DNA
gatgcattggacgttctggacgccatgctggccgttatcatccgccacgccagaaggatgagccgggctgaatga

SEQ ID NO: 211538 - DNA, 75 bp, synthetic construct
  source 1..75: mol_type = other DNA
acgcctttatccgggtcataaaaacagaagatgcacaacagtggctcaggcagcaccgttaccgccgtatcaacg

SEQ ID NO: 211539 - DNA, 75 bp, synthetic construct
  source 1..75: mol_type = other DNA
atccgcaacatgcagctcgatgttgcggccacgcgccagcgctttatggcgcagctgggccagcctctgaccacc

SEQ ID NO: 211540 - DNA, 75 bp, synthetic construct
  source 1..75: mol_type = other DNA
cagtccatgctgccccagaacgttcagggaggagaatggcagtcacgggcgatagccatgaacaaagccctggtc

SEQ ID NO: 211541 - DNA, 75 bp, synthetic construct
  source 1..75: mol_type = other DNA
attatgaaatatgaactgtggcatatccctcctgccctgctgggtctggcaggagggttgtcatgggcgctgctg

SEQ ID NO: 211542 - DNA, 75 bp, synthetic construct
  source 1..75: mol_type = other DNA
tcactggcaaaaaagccgctgcatttaaagaagcctacattgctgagttcgatcgcatggaggccgaactgcgcc

SEQ ID NO: 211543 - DNA, 75 bp, synthetic construct
  source 1..75: mol_type = other DNA
tccgggtgatggtcgcactctggttgttcacttcgacaaattcggcaatgtcgaattcaccgaaaccgttcctga

SEQ ID NO: 211544 - DNA, 75 bp, synthetic construct
  source 1..75: mol_type = other DNA
ctcgcaaagaagccatcgttaaacagcgcggcggcagcgcctggcaaatcgtcagcgtagacagcacctatcaat

SEQ ID NO: 211545 - DNA, 75 bp, synthetic construct
  source 1..75: mol_type = other DNA
caccacgtctgttgcagttgcagagttcttccacaaactgcataaaaacgtcattcaaaaaattgaagctctgga

SEQ ID NO: 211546 - DNA, 75 bp, synthetic construct
  source 1..75: mol_type = other DNA
agaacgggtggaattatagtgcacctgcacctcataaaacgggtgccgggatttgcaccccgatgatcactagag

SEQ ID NO: 211547 - DNA, 75 bp, synthetic construct
  source 1..75: mol_type = other DNA
ctggttatccgtctcgacgaacacggcaatatcaaattcactgaaaccgttcctgacggcgcaatggtctgcacc

SEQ ID NO: 211548 - DNA, 75 bp, synthetic construct
  source 1..75: mol_type = other DNA
gcttctgcgcttgccgagcgtctggaaggtgggcgctatatcaacgttgagattaaccgtgaaaaagccgcgcgt

SEQ ID NO: 211549 - DNA, 75 bp, synthetic construct
  source 1..75: mol_type = other DNA
gcctcagtgttttctggtgcaggaatgattatattctactggttactccagccatcagaaaccataatgaaataa

SEQ ID NO: 211550 - DNA, 75 bp, synthetic construct
  source 1..75: mol_type = other DNA
atgaattttatttctttatggcctttattgctggcccaggtgacagtgatgtcactgacagtgattttccttgct

SEQ ID NO: 211551 - DNA, 75 bp, synthetic construct
  source 1..75: mol_type = other DNA
ataatccgcaaacattcagcgagcagaagctggatgaggcgttgtatcacggcgcggtactgcgcgtgcgcccga

SEQ ID NO: 211552 - DNA, 75 bp, synthetic construct
  source 1..75: mol_type = other DNA
gtggccgacgttaaagtctctaccggaccgtcgatgctgaaaaccgagaatgcgcgcccgacgagctggatttat

SEQ ID NO: 211553 - DNA, 75 bp, synthetic construct
  source 1..75: mol_type = other DNA
cggggcgatggttggcgaaacggtggaagggattgcccgttatcccattaatctgcgttatccgcaaagctggcg

SEQ ID NO: 211554 - DNA, 75 bp, synthetic construct
  source 1..75: mol_type = other DNA
cagtttgatgcatggctaatggagaacgcgctgccatcagggtttgaggcggggtttgatgggatagagattggg

SEQ ID NO: 211555 - DNA, 75 bp, synthetic construct
  source 1..75: mol_type = other DNA
ttactggaaacggcgcacagccgggtggcgtggctgtctgacaccgctggcttgccggaaaaaacgctgaaattt

SEQ ID NO: 211556 - DNA, 75 bp, synthetic construct
  source 1..75: mol_type = other DNA
atgagcctgaccctcacgctcaccggcaccggcggcgcacagggcgttccggcatggggctgcgagtgcgcggcc

SEQ ID NO: 211557 - DNA, 75 bp, synthetic construct
  source 1..75: mol_type = other DNA
gtatctgctaaaggtatgcgtgtaatcgataaaaaaggcatcgatacagttctggctgaactgcgtgcccgtggc

SEQ ID NO: 211558 - DNA, 75 bp, synthetic construct
  source 1..75: mol_type = other DNA
agatgaagaccttaatgttgcttttgctggtcatgatattactgctgaatcaacggcagacaaaaaattcgttga

SEQ ID NO: 211559 - DNA, 75 bp, synthetic construct
  source 1..75: mol_type = other DNA
cgtgattctgacgcatatcagccaccagtttgatgcgtggctgatggagaacgtactgccgtcggggtttgaggc

SEQ ID NO: 211560 - DNA, 75 bp, synthetic construct
  source 1..75: mol_type = other DNA
tgtgatttaaataccgtgcttgcgctgaatcaggttatccgctcgccacaggtgattctgacccatatcagccac

SEQ ID NO: 211561 - DNA, 75 bp, synthetic construct
  source 1..75: mol_type = other DNA
aagttgatctacagtccgacgagattatgtctcacattgaggcggggaaagtagctacgaccgttgcaattaact

SEQ ID NO: 211562 - DNA, 75 bp, synthetic construct
  source 1..75: mol_type = other DNA
aacgactttgagccgaagctgattcagaccgtgcgcggcgtgggttacatgcttgaggtgccggatggtcagtaa

SEQ ID NO: 211563 - DNA, 75 bp, synthetic construct
  source 1..75: mol_type = other DNA
tgatttcagccacacggtggagccatttgtgatgtttgatttgcagggattacaggtcacgccgctgccgctcaa

SEQ ID NO: 211564 - DNA, 75 bp, synthetic construct
  source 1..75: mol_type = other DNA
tttgtggtgtttgatttgcaggggttacaggtcacacccctgccgctcaaccactcaaaactgaccttcggttat

SEQ ID NO: 211565 - DNA, 75 bp, synthetic construct
  source 1..75: mol_type = other DNA
cagtttgatgcgtggctgatggaaaacgcactgccgtcagggtttgaggcggggtttgatgggatggagattggg

SEQ ID NO: 211566 - DNA, 75 bp, synthetic construct
  source 1..75: mol_type = other DNA
cgtgcatttttaattgatggtattggaggcatgttttctgagcaactgagtatgatcagctctaacgatgtagtc

SEQ ID NO: 211567 - DNA, 75 bp, synthetic construct
  source 1..75: mol_type = other DNA
atgaacggtctaaaaacggggctggggatcacgccgggtgagcacattatcagtgccgactctgcgctcagcaga

SEQ ID NO: 211568 - DNA, 75 bp, synthetic construct
  source 1..75: mol_type = other DNA
tgcttatccataagcgcgaaaacagtgacacctacgctgttgcgattaccagtggcagccaggactatcacgacg

SEQ ID NO: 211569 - DNA, 75 bp, synthetic construct
  source 1..75: mol_type = other DNA
cggggcagcaatcgaatcttcagcaacaaaacaaacaggcatggaatatgttgtcgaaactgagaatgggaattt

SEQ ID NO: 211570 - DNA, 75 bp, synthetic construct
  source 1..75: mol_type = other DNA
gcgaaatcgaaggcgtgacggaaatcgcgctgatgcccgtcgatacgctgggcgagttttaccagcgcgtcgaag

SEQ ID NO: 211571 - DNA, 75 bp, synthetic construct
  source 1..75: mol_type = other DNA
aaattctgtgaggcctgtggtacggggatttattgcagagcggtatgtacgaagtctgtttacaggtaccagcca

SEQ ID NO: 211572 - DNA, 75 bp, synthetic construct
  source 1..75: mol_type = other DNA
gcctttcctgccatggccggttgattctgcagacagatgctcagggggcatggtttgagcatgatttacatgccc

SEQ ID NO: 211573 - DNA, 75 bp, synthetic construct
  source 1..75: mol_type = other DNA
taaaaaggaagataaaatctctgatgtgaatatcgatagtgaccataaaaacacacagtgccccgccactgatga

SEQ ID NO: 211574 - DNA, 75 bp, synthetic construct
  source 1..75: mol_type = other DNA
cgctgcttatctcacctatgctttaagccacctggagtgccgcccaattctgctcgacggcatgggcggcatgct

SEQ ID NO: 211575 - DNA, 75 bp, synthetic construct
  source 1..75: mol_type = other DNA
agctgtttcgtatgaacctggtggaggagaccgccagctacagcgatcgtgcgcggctgttccgcgaaatggaga

SEQ ID NO: 211576 - DNA, 75 bp, synthetic construct
  source 1..75: mol_type = other DNA
caatgatgtcaatgtttctaaagaaatggacaaaagtggaaatgtgacgatcagtgtggaaaaagaggactttgt

SEQ ID NO: 211577 - DNA, 75 bp, synthetic construct
  source 1..75: mol_type = other DNA
gatgaccttgatagtgaagctgctaaagaggtcgttaaaaaggaagataaaatctctgatgtgattgctagtagt

SEQ ID NO: 211578 - DNA, 75 bp, synthetic construct
  source 1..75: mol_type = other DNA
aagaagaaagtagttagtgaaaataagaagcaaaggattaagcctaaaatgtactatgcaggtggaggtatccaa

SEQ ID NO: 211579 - DNA, 75 bp, synthetic construct
  source 1..75: mol_type = other DNA
gtttgttatgcctggcggttggtctgatcgcggttcatatgcggctggttttttctcaatatattctactgctga

SEQ ID NO: 211580 - DNA, 75 bp, synthetic construct
  source 1..75: mol_type = other DNA
tacagggtccaattctgccgataatatagcgggcatttattacagacccgttcaaaagtatataaatggcacttg

SEQ ID NO: 211581 - DNA, 75 bp, synthetic construct
  source 1..75: mol_type = other DNA
tgctaataacgtccatgttatgcgctttgtctccggcagtattcaaagtaataaaaccataaatattacaggtcg

SEQ ID NO: 211582 - DNA, 75 bp, synthetic construct
  source 1..75: mol_type = other DNA
atatggataaaggacagaaacacaaagcctttaacgccagtaaaattgaggcacatcatgccattgttccgacca

SEQ ID NO: 211583 - DNA, 75 bp, synthetic construct
  source 1..75: mol_type = other DNA
gggaaaaagtttgatgctgcaattgttttgcaggacaaatctacgggtaaacttgggtttaaattcaagaaaaaa

SEQ ID NO: 211584 - DNA, 75 bp, synthetic construct
  source 1..75: mol_type = other DNA
ccactacgtccctttacacttaatctcagaactggccgtataactatggggcatggtctggatgttacaggagat

SEQ ID NO: 211585 - DNA, 75 bp, synthetic construct
  source 1..75: mol_type = other DNA
gcagtgggaacgcctacaacgcggcgttgcgtcattttctctacaactggcagaagggcgggcagatctctacac

SEQ ID NO: 211586 - DNA, 75 bp, synthetic construct
  source 1..75: mol_type = other DNA
gtggctttaaacaaccgatagatgatgcggaatggaccattacgactctgacgcataccgtcagccccgataacg

SEQ ID NO: 211587 - DNA, 75 bp, synthetic construct
  source 1..75: mol_type = other DNA
tttaaacagccgatagatgatgcggagtggactattaccaccctgacgcatactgtcagcccggataacggtttt

SEQ ID NO: 211588 - DNA, 75 bp, synthetic construct
  source 1..75: mol_type = other DNA
acacttgatgccgaagatgttgtccctacaacctccccccggtcacaacctgtagcagctgcgacacctgaatca

SEQ ID NO: 211589 - DNA, 75 bp, synthetic construct
  source 1..75: mol_type = other DNA
cgccagtactggcgcgaaggaaaactacgccctccttcaacaacagaaaacagcgtgcctgagctgctccccata

SEQ ID NO: 211590 - DNA, 75 bp, synthetic construct
  source 1..75: mol_type = other DNA
accattggggaagtggtgaaggagatagccgcgcggcacaagctgaagatggtactgggtaaagacctgtcggat

SEQ ID NO: 211591 - DNA, 75 bp, synthetic construct
  source 1..75: mol_type = other DNA
cccgtccagcggctgcttgttgccgacctcaaccttgctccagtgcaaaaatcgctggcgaatttacagcctaac

SEQ ID NO: 211592 - DNA, 75 bp, synthetic construct
  source 1..75: mol_type = other DNA
tcaactggaacaagattactgacgataaagatctggaagtatggaatcgcctgaccagcaatttctggctaccgg

SEQ ID NO: 211593 - DNA, 75 bp, synthetic construct
  source 1..75: mol_type = other DNA
tttttactggcctgacgctgctcgacacgctgcaaaatgttatcggcgcgccctcgctgatgcccgatgcactca

SEQ ID NO: 211594 - DNA, 75 bp, synthetic construct
  source 1..75: mol_type = other DNA
aaatcacgatttcttttccggttcaggctcctcttatgtgatggggaaagcggttgaaacagaagatgaagactg

SEQ ID NO: 211595 - DNA, 75 bp, synthetic construct
  source 1..75: mol_type = other DNA
ggagggattaggggcagcgcgtgataaaggcgtgcatattattatggaccaccagtccattgccgatttaaaaga

SEQ ID NO: 211596 - DNA, 75 bp, synthetic construct
  source 1..75: mol_type = other DNA
tctcctgaaaattaatgacagtttacccaaagacaaagaatcactgttttgggtcaacgtccaggaaatccctaa

SEQ ID NO: 211597 - DNA, 75 bp, synthetic construct
  source 1..75: mol_type = other DNA
ggtaagctgactaataccgccgacctgatccgtctgattatccgcgatgaagcagtacacggttattacatcggt

SEQ ID NO: 211598 - DNA, 75 bp, synthetic construct
  source 1..75: mol_type = other DNA
ggaatttcaatttcttcaaatgccactccatgccccgtctgtaacaaaggctatcttcgcaagcgcaaaggtcag

SEQ ID NO: 211599 - DNA, 75 bp, synthetic construct
  source 1..75: mol_type = other DNA
tcgcggtgatgatccgctgaaaaagaaaatcgccagtgtgtttcttgaatcttttttgttctattccggtttctg

SEQ ID NO: 211600 - DNA, 75 bp, synthetic construct
  source 1..75: mol_type = other DNA
ttccctgcttccgttcttatttgcctgatgcactgcgtttaagatttgaagataaactgaccatccgggccatcg

SEQ ID NO: 211601 - DNA, 75 bp, synthetic construct
  source 1..75: mol_type = other DNA
agcttcaaaccgccgccccgagaaatcttgttaaccaaccaactccgttagggcgagttcaagacggtaaaaccg

SEQ ID NO: 211602 - DNA, 75 bp, synthetic construct
  source 1..75: mol_type = other DNA
actaagattgaggtttgcggtcatggcttcaggaccatggcatgtagctcgttgattgaatcagggctgtggtct

SEQ ID NO: 211603 - DNA, 75 bp, synthetic construct
  source 1..75: mol_type = other DNA
cgatgagtgagaatacggtgaacaaggctttgcgcgtaatggggtatgacacgaaggtcgaggtttgtgggcatg

SEQ ID NO: 211604 - DNA, 75 bp, synthetic construct
  source 1..75: mol_type = other DNA
gctataaaagacctttttttgagatgataaaatcatcctcaccaatcacctttattaatttaaatgatatatatt

SEQ ID NO: 211605 - DNA, 75 bp, synthetic construct
  source 1..75: mol_type = other DNA
gcttgccatacggcaccgccagcggcacgcacggcctgtacttctgcgcttactgcgcacgtctgcacaacattg

SEQ ID NO: 211606 - DNA, 75 bp, synthetic construct
  source 1..75: mol_type = other DNA
gttgttcacttcgacaaattcggcaatgtcgaattcaccgaaaccgttcctgatggcgcactggtctgtaccctg

SEQ ID NO: 211607 - DNA, 75 bp, synthetic construct
  source 1..75: mol_type = other DNA
atcatgttgtccaaaaaatagaatccctcgaatgctctgaatattttttaaccagcaacttttcgcgggttaaat

SEQ ID NO: 211608 - DNA, 75 bp, synthetic construct
  source 1..75: mol_type = other DNA
ataacaccccgtccgctgacaagatgattcctggcgatggccgtactctggttgttcacttcgacgaacacggca

SEQ ID NO: 211609 - DNA, 75 bp, synthetic construct
  source 1..75: mol_type = other DNA
tttctctcgggcggtttgcgacaaaagctggaggatgaattcccggaatttacgcatagcctgattaatatgttg

SEQ ID NO: 211610 - DNA, 75 bp, synthetic construct
  source 1..75: mol_type = other DNA
cccccccccgcgccggcgcggggggggggggacttccaggaagaagtggcgaaactcatcgacgttaccacctgt

SEQ ID NO: 211611 - DNA, 75 bp, synthetic construct
  source 1..75: mol_type = other DNA
ttttgaataccaccacggcttgctggagaaattgtggaaagaaattttaaaaaaccacgcccatgacagcatcgg

SEQ ID NO: 211612 - DNA, 75 bp, synthetic construct
  source 1..75: mol_type = other DNA
tacgtcctccttcaacaacagaaaacaacgtgcctgagctgctcccgataacacttgatgccgaagatgttgtcc

SEQ ID NO: 211613 - DNA, 75 bp, synthetic construct
  source 1..75: mol_type = other DNA
cggttaccgaagatgttccagcttccgtattgcagttgcacccttcgctgatagtcatcgctgataaagccgctg

SEQ ID NO: 211614 - DNA, 75 bp, synthetic construct
  source 1..75: mol_type = other DNA
atgaaattgatcattaccgaagattaccaggaaatgagccgtgtcgcggcacatcatctgcttggttatatgtcg

SEQ ID NO: 211615 - DNA, 75 bp, synthetic construct
  source 1..75: mol_type = other DNA
ggcactgggtaaagacctgtcgaataaacccgtggatcatatagaccagaccaatgaaagtgacggcagtttttt

SEQ ID NO: 211616 - DNA, 75 bp, synthetic construct
  source 1..75: mol_type = other DNA
gggcaaaagcgccactggtaaacctctgccagtgatcactatcacacgtaaggacggcgacagtcaccgctttac

SEQ ID NO: 211617 - DNA, 75 bp, synthetic construct
  source 1..75: mol_type = other DNA
ctgccggtgatcactatcacacgcaaggacgtcgacagtcaccgatttaccctggctgatcgcggtgcctacacg

SEQ ID NO: 211618 - DNA, 75 bp, synthetic construct
  source 1..75: mol_type = other DNA
cttgccgctcgccctatgcgtatgctggtaaaaccagggatgggctttgacgaaggcctcgatatcgtcttcaac

SEQ ID NO: 211619 - DNA, 75 bp, synthetic construct
  source 1..75: mol_type = other DNA
caaattgcgtattgacggcaacttgctgcataccgccgtgcgctacggattatcacaggcgctgcttgatgctac

SEQ ID NO: 211620 - DNA, 75 bp, synthetic construct
  source 1..75: mol_type = other DNA
gattcaatgtgccggaaagctatagcttgctgaaaatgccccctgtgggatgcctgattagcgctcttaaaaaag

SEQ ID NO: 211621 - DNA, 75 bp, synthetic construct
  source 1..75: mol_type = other DNA
atgaaattgatcattaccgaagattaccaggaaatgagccgtgtcgcggcgcatcatctgcttggttatatgtca

SEQ ID NO: 211622 - DNA, 75 bp, synthetic construct
  source 1..75: mol_type = other DNA
ctgccggttatcactattgaacgtaaagccggtgacggtcatcgttttaccctggctgatcgtggcacctatacg

SEQ ID NO: 211623 - DNA, 75 bp, synthetic construct
  source 1..75: mol_type = other DNA
tcgcaaagcgcaacaaactgacggccagcattgcggaatcgctgaaaaaaatcccggtaccgcatatcgaccagt

SEQ ID NO: 211624 - DNA, 75 bp, synthetic construct
  source 1..75: mol_type = other DNA
catgattcgctggccgggaaagatgttgatagggccagcacagagatctgtcattcaccgggctttgaaagaatc

SEQ ID NO: 211625 - DNA, 75 bp, synthetic construct
  source 1..75: mol_type = other DNA
ttacctgtgacagcgcgggcaatatctcctatacccgcgctggatcgtttgaaaccgacaaaaacggctatatcg

SEQ ID NO: 211626 - DNA, 75 bp, synthetic construct
  source 1..75: mol_type = other DNA
ctccaccggtaacgcgctcgatttagcgattaacaacgatggcttttttgttacctgtgacagcgcgggcaatat

SEQ ID NO: 211627 - DNA, 75 bp, synthetic construct
  source 1..75: mol_type = other DNA
gccgccgcgcccatcgacttaaccgtcgattactcgacctgtacgcaatacggctctgaattttcggtcaccacc

SEQ ID NO: 211628 - DNA, 75 bp, synthetic construct
  source 1..75: mol_type = other DNA
ccggggaatccggcaccccgctgattggcgttcctggctccggcacttgcggcacgctctcatcgggcgtgctcg

SEQ ID NO: 211629 - DNA, 75 bp, synthetic construct
  source 1..75: mol_type = other DNA
aacgccggaacggtgggctataagtcgatgaccacccagttttcagccatgtatgccggaagccaggcgatgggc

SEQ ID NO: 211630 - DNA, 75 bp, synthetic construct
  source 1..75: mol_type = other DNA
gtgagcggcaccgcgtgggtacaaaccggcgaatccggcaccccgctgattggcgttcccggctccggcacctgc

SEQ ID NO: 211631 - DNA, 75 bp, synthetic construct
  source 1..75: mol_type = other DNA
cagctggctgagcaaaacgcgaagattaaaaccttgacggtggaaattccgagcctggaatcggtgctggcgcaa

SEQ ID NO: 211632 - DNA, 75 bp, synthetic construct
  source 1..75: mol_type = other DNA
aggcgctggcatgggtggagaaaaacatcaaagtgccattgaccgaaccacagaaagcggggattgcgtcattct

SEQ ID NO: 211633 - DNA, 75 bp, synthetic construct
  source 1..75: mol_type = other DNA
gaaaacgtgactctggacgttgaagaacagcatcagggttctgtaatgcaggcgctgggcgaacgtaaaggcgag

SEQ ID NO: 211634 - DNA, 75 bp, synthetic construct
  source 1..75: mol_type = other DNA
atctgccgcggtgccatcttggtggatggcaaacctgtcgttccgggcatgaagttgtcgaaggaaaaatgcgac

SEQ ID NO: 211635 - DNA, 75 bp, synthetic construct
  source 1..75: mol_type = other DNA
tgatgatgattacatgcgagaacacttatacaacatgaagttacaatgtctgcatgcggcgcttattcagaatgg

SEQ ID NO: 211636 - DNA, 75 bp, synthetic construct
  source 1..75: mol_type = other DNA
acgcaacagcgcacttgctttgccacagttgaattttgtgccgtaacgatgtgcaagcatgtaagcataaggagt

SEQ ID NO: 211637 - DNA, 75 bp, synthetic construct
  source 1..75: mol_type = other DNA
tgtcggctgccgttctggcgctgattgccgcaggtggttctgcgcctgaaatcctcgaccagtttctggatgaaa

SEQ ID NO: 211638 - DNA, 75 bp, synthetic construct
  source 1..75: mol_type = other DNA
gaagatgccgatacagacgccgccgatcaggttgatcgccagaatcatcatcccggcgatggcgtccccgcgcac

SEQ ID NO: 211639 - DNA, 75 bp, synthetic construct
  source 1..75: mol_type = other DNA
ctgcgccaccagcccatcgccgatggtcatcagcacatattgctggaaggcggcgtcggcgctcaggttgtattt

SEQ ID NO: 211640 - DNA, 75 bp, synthetic construct
  source 1..75: mol_type = other DNA
atactcgaccagtttctggacgaaaaagaaggtaaccacacagcggcataccgcgatggttccggcatatggacc

SEQ ID NO: 211641 - DNA, 75 bp, synthetic construct
  source 1..75: mol_type = other DNA
ccacccgggtggatggtaagcctgttattcctggcatgaagctgtcgaaggggaaatgcgaccaggttaacgcca

SEQ ID NO: 211642 - DNA, 75 bp, synthetic construct
  source 1..75: mol_type = other DNA
cctctggagttaacgcaaactcactgggtgacgttgcataacattcatcagttacctccagaccagtcgcaaatt

SEQ ID NO: 211643 - DNA, 75 bp, synthetic construct
  source 1..75: mol_type = other DNA
ttaaaatctgcgcgggcggtatggctggaacaacggtagcggcattgggctttgccccgaagcaagcactggctc

SEQ ID NO: 211644 - DNA, 75 bp, synthetic construct
  source 1..75: mol_type = other DNA
attcgctggtggattaaggacggtggcagagactgccgtatccgttcaaataattgctacggtcaggtctcacgg

SEQ ID NO: 211645 - DNA, 75 bp, synthetic construct
  source 1..75: mol_type = other DNA
ggatctggaccatctgccgtggtgccattctggtggatggtaagcctgttattcctggcatgaagctgtcaaagg

SEQ ID NO: 211646 - DNA, 75 bp, synthetic construct
  source 1..75: mol_type = other DNA
tggcgaaaaacatcaaagtgccactgactgaaccccagaaagcgggtattgcgtcattctgtccttacaacattg

SEQ ID NO: 211647 - DNA, 75 bp, synthetic construct
  source 1..75: mol_type = other DNA
gtgttttccgtcgacgttttataagcggctgaatgctggtgatcgtaaaggtgcatgcgaggcgattcgctggtg

SEQ ID NO: 211648 - DNA, 75 bp, synthetic construct
  source 1..75: mol_type = other DNA
ttagaaactattgataaaatagagtttagatattacccaaacgtaaacaacatggagttgttaacagctatcgcg

SEQ ID NO: 211649 - DNA, 75 bp, synthetic construct
  source 1..75: mol_type = other DNA
ttaactcttagcgaagaccatggtactagcgttacgttccatgactggataacagcacaacgttctgaaatggaa

SEQ ID NO: 211650 - DNA, 75 bp, synthetic construct
  source 1..75: mol_type = other DNA
gcgaggcaatccgctggtggattaaagacggtggccgtgattgtcgtctaaccaaaggccagaagaatggctgct

SEQ ID NO: 211651 - DNA, 75 bp, synthetic construct
  source 1..75: mol_type = other DNA
tagcagtgctggcgctaatcgcgtcaggggcttctgctccactcatttttgaccaattcatcagcgagaaagaag

SEQ ID NO: 211652 - DNA, 75 bp, synthetic construct
  source 1..75: mol_type = other DNA
gattgtcgtctgaccaaaggtcagaagaatggctgctatgggcaggtagagcgacgagatcaggaaagcgcgctg

SEQ ID NO: 211653 - DNA, 75 bp, synthetic construct
  source 1..75: mol_type = other DNA
cgaattaatgcaggtgatcgaaaaggtgcctgcgaggcgattcgctggtggattaaggacggtggcagagactgc

SEQ ID NO: 211654 - DNA, 75 bp, synthetic construct
  source 1..75: mol_type = other DNA
aagcaagaatttgacagttaagttaccaactgtctctgctaattcattagcttcaagcggaaaagtggtgggact

SEQ ID NO: 211655 - DNA, 75 bp, synthetic construct
  source 1..75: mol_type = other DNA
gacaaattaacccgtacatcaaagtcgatataccggaaacaacgcgtggtgctctttactcgttcgtttacaacg

SEQ ID NO: 211656 - DNA, 75 bp, synthetic construct
  source 1..75: mol_type = other DNA
gttatgacgggcatcgcgggtctgcttattatcttggcgtgcatccagagtttcgtgggcgtgggattgccaatg

SEQ ID NO: 211657 - DNA, 75 bp, synthetic construct
  source 1..75: mol_type = other DNA
gtgcctgcgaagcgattcgctggtggataaaggacggtggcagagactgccgtatccgctcaaataactgctacg

SEQ ID NO: 211658 - DNA, 75 bp, synthetic construct
  source 1..75: mol_type = other DNA
catccgggtaccgctgaccgaaccgcagaaagtggggatcgcgtcattctgtccgtacaacattggtcccggtaa

SEQ ID NO: 211659 - DNA, 75 bp, synthetic construct
  source 1..75: mol_type = other DNA
ccgtattcgctcaaataactgttatggtcaggtatcccgtcgtgaccaggagagcgctctggcgtgctggggaat

SEQ ID NO: 211660 - DNA, 75 bp, synthetic construct
  source 1..75: mol_type = other DNA
aacggcgaagtggttggcacagtgatgggcggttatgatgggcatcgcggttctgcttattatcttggtgtacat

SEQ ID NO: 211661 - DNA, 75 bp, synthetic construct
  source 1..75: mol_type = other DNA
tgggcggttatgacgggcatcgcgggtctgcttattatcttggcgtgcatccagagtttcgtgggcgtggaattg

SEQ ID NO: 211662 - DNA, 75 bp, synthetic construct
  source 1..75: mol_type = other DNA
tttgtgacgaataatcttaaaaatattgcttctgataatgccgctggtgatgtacagatccaactattgaacagt

SEQ ID NO: 211663 - DNA, 75 bp, synthetic construct
  source 1..75: mol_type = other DNA
gtgatcgaaaaattgcgtaatatcgccatcatcgcgcacgtcgaccatggtaaaaccaccctggtagacaagctg

SEQ ID NO: 211664 - DNA, 75 bp, synthetic construct
  source 1..75: mol_type = other DNA
tctccagcgcctcaccttcggccgatgcctatgtcggcggcaaaaacagcgcctccggatttatcgccagcgtgc

SEQ ID NO: 211665 - DNA, 75 bp, synthetic construct
  source 1..75: mol_type = other DNA
atctgccgtggtgccacccgggtggatggtaagcctgtcgtccctggcatgaagctgtcgaaggaaaaatgcgac

SEQ ID NO: 211666 - DNA, 75 bp, synthetic construct
  source 1..75: mol_type = other DNA
gaaggtttcgaactggcggtatcccgtccgaaagttatcttccgtgaaattgacggtcgtaaacaagagccgtat

SEQ ID NO: 211667 - DNA, 75 bp, synthetic construct
  source 1..75: mol_type = other DNA
caccttcagccactacgacgacgtacgtccgggtgaagtgggtcagcgtcagaacggtgtactgatctctaacgg

SEQ ID NO: 211668 - DNA, 75 bp, synthetic construct
  source 1..75: mol_type = other DNA
aaacgttgaagcgctgccggcactctccgttgatgagccgaccgtttctatgttcttctgcgttaacacctcgcc

SEQ ID NO: 211669 - DNA, 75 bp, synthetic construct
  source 1..75: mol_type = other DNA
atgtgatcgtggtcgccagcctagatcgtaaccgctgggcgctggataaagccgaggagaagatcaaattcctca

SEQ ID NO: 211670 - DNA, 75 bp, synthetic construct
  source 1..75: mol_type = other DNA
cgttgggcgtaaatgcgaatttacctggtgacatcgccgtgcgttgggttaaagctgtacccgatgattttcatg

SEQ ID NO: 211671 - DNA, 75 bp, synthetic construct
  source 1..75: mol_type = other DNA
tggcaacggcagaacgaagtacgcagtgtgcaggagaaactggaaaaggcactctctcaggtggcgaacgaaccg

SEQ ID NO: 211672 - DNA, 75 bp, synthetic construct
  source 1..75: mol_type = other DNA
cggctgaatgctggtgatcgtaaaggtgcatgcgaagcgattcgctggtggattaaggatggcggacgcgattgc

SEQ ID NO: 211673 - DNA, 75 bp, synthetic construct
  source 1..75: mol_type = other DNA
gtgaataatgcctccatcattacgaaaagccgttgctgctgctattggtggtgggctgttgccatagcgtctgtg

SEQ ID NO: 211674 - DNA, 75 bp, synthetic construct
  source 1..75: mol_type = other DNA
gacaaattaacccgtacatcaaagtcgatataccggaaacaacgcgcggcgctctttactcattcgtttacaacg

SEQ ID NO: 211675 - DNA, 75 bp, synthetic construct
  source 1..75: mol_type = other DNA
atacttgaccagtttctggacgaaaaagagggtaaccacacaacggcataccgcgatggtttcggcatctggacc

SEQ ID NO: 211676 - DNA, 75 bp, synthetic construct
  source 1..75: mol_type = other DNA
ctgataaatatccatgaacgcaaaatcagatacggcctgtcggctgccgttctggcgctgattggtgcaggggcg

SEQ ID NO: 211677 - DNA, 75 bp, synthetic construct
  source 1..75: mol_type = other DNA
caaagatatcgttggcgtatggactgtatgtcacggacacaccggaaaagcatcatgcccggtaaaacgtatacc

SEQ ID NO: 211678 - DNA, 75 bp, synthetic construct
  source 1..75: mol_type = other DNA
acggcaccgttattttagaaaacgaagctcgcgttgtggatatcgccgttaaaggcggaaaaattgctgctatcg

SEQ ID NO: 211679 - DNA, 75 bp, synthetic construct
  source 1..75: mol_type = other DNA
aggcgctggcatgggtggagaaaaacatcaaagtgccactgactgaaccccagaaagcggggattgcgtcattct

SEQ ID NO: 211680 - DNA, 75 bp, synthetic construct
  source 1..75: mol_type = other DNA
gcgctgattgctgcaggtgcttctgcgcctgaaatcctcgaccagtttcttgacgaaaaagaaggtaaccacacc

SEQ ID NO: 211681 - DNA, 75 bp, synthetic construct
  source 1..75: mol_type = other DNA
ggtcccggtaagtgtttcccgtctacgttttacagacgaattaatgcaggtgatcgaaaaggtgcctgcgaagcg

SEQ ID NO: 211682 - DNA, 75 bp, synthetic construct
  source 1..75: mol_type = other DNA
accgagccacaaaaagcaggtatcgcgtcattttgcccctataacattggccccggtaagtgtttcccgtcgacg

SEQ ID NO: 211683 - DNA, 75 bp, synthetic construct
  source 1..75: mol_type = other DNA
atccgttcaaataattgctacggtcaggtctcacggcgtgaccaggagagcgcgctggcgtgctgggacatcgac

SEQ ID NO: 211684 - DNA, 75 bp, synthetic construct
  source 1..75: mol_type = other DNA
actggtccaggtggtaacgatggtctggaaggtgtcagctacataccatacaaagatatcgttggcgtatggact

SEQ ID NO: 211685 - DNA, 75 bp, synthetic construct
  source 1..75: mol_type = other DNA
cagaaggcgggtatcgcgtcattttgtccttataacattggccccggtaagtgtttcccgtcgacgttttacaga

SEQ ID NO: 211686 - DNA, 75 bp, synthetic construct
  source 1..75: mol_type = other DNA
atgaacgcaaaaatcaaatacggcctgtcagctgcagctctggcgctgattggagcaggcgcatcagctccacag

SEQ ID NO: 211687 - DNA, 75 bp, synthetic construct
  source 1..75: mol_type = other DNA
atgtcttttgatttaattattaaaaacggcaccgtcattttagaaaacgaagctcgcgttgtagatattgccgtt

SEQ ID NO: 211688 - DNA, 75 bp, synthetic construct
  source 1..75: mol_type = other DNA
tgcagaagcaactggatccgcaaaaccgtgctcatcgtccgattatcgacgagctgcaggaacgtatggcggaca

SEQ ID NO: 211689 - DNA, 75 bp, synthetic construct
  source 1..75: mol_type = other DNA
aatcgggtcgtgcggtgactgcgcatcacaccgtgctggtgtctaatatcatcggcgtggaacgtaacgaataca

SEQ ID NO: 211690 - DNA, 75 bp, synthetic construct
  source 1..75: mol_type = other DNA
atcatcggcgtggaacgtaacgaatatacggtgccgaccgcgcccgcagaagatgcgccgcgcgcgctgcaaagc

SEQ ID NO: 211691 - DNA, 75 bp, synthetic construct
  source 1..75: mol_type = other DNA
cagatggcgaatattcgcgatatcgccactggcgttcgtgaatctgcacgcttctatgttgagttgcacaaactg

SEQ ID NO: 211692 - DNA, 75 bp, synthetic construct
  source 1..75: mol_type = other DNA
agtcttccggcggcgagaagtcgaaattcggtctggcggcgacgcaggttctgcaactggttgaaacgttgcgtg

SEQ ID NO: 211693 - DNA, 75 bp, synthetic construct
  source 1..75: mol_type = other DNA
agatgcgccgcgcgcactgcaaagcatgtgggaaacctggcaggagatgcacgaaccgggaactcgccgttctct

SEQ ID NO: 211694 - DNA, 75 bp, synthetic construct
  source 1..75: mol_type = other DNA
ggtaacatcatgaaagcgtggggcggtatcgctggtctgcaaagctgcatggacgtgatgttcgatgaagcggta

SEQ ID NO: 211695 - DNA, 75 bp, synthetic construct
  source 1..75: mol_type = other DNA
gatgtgatttacgacattgaacagggcttccctgttgcgccgaaaggtcaatttatccttaaacatcagcagtaa

SEQ ID NO: 211696 - DNA, 75 bp, synthetic construct
  source 1..75: mol_type = other DNA
gatcagttcgaagaaatcggcactctggcgaagtgttcaccgccgatccgcgatctggaaaaccagaaaggcatg

SEQ ID NO: 211697 - DNA, 75 bp, synthetic construct
  source 1..75: mol_type = other DNA
gttaacgagctgggccacatcagcgtgtgcccggacccggacgtcccggaagctcgcgtcgatctcgcgcagtta

SEQ ID NO: 211698 - DNA, 75 bp, synthetic construct
  source 1..75: mol_type = other DNA
gatattgttggtgtatggactgtatgtcacgggcatacaggaaaagacatcatgctcggtaaaacgtataccaaa

SEQ ID NO: 211699 - DNA, 75 bp, synthetic construct
  source 1..75: mol_type = other DNA
tggaaggtgtcagctacataccatacaaagatatcgttggcgtatggactgaaccgccccggaaatcctggagac

SEQ ID NO: 211700 - DNA, 75 bp, synthetic construct
  source 1..75: mol_type = other DNA
acggtcccaccgaaacaaccatttggtcgctgaaatcgcagataacccaagcggaaaacatcaccctcggcgctc

SEQ ID NO: 211701 - DNA, 75 bp, synthetic construct
  source 1..75: mol_type = other DNA
tggaaggtgtgagacataatccttacaaagacatagttggtgtatggactgtatgttacgggcatacaggaaaag

SEQ ID NO: 211702 - DNA, 75 bp, synthetic construct
  source 1..75: mol_type = other DNA
tattgctatagcatctgtgttaatcactggcccaagtggtaacgatggtctggaaggtgtgagacataatcctta

SEQ ID NO: 211703 - DNA, 75 bp, synthetic construct
  source 1..75: mol_type = other DNA
tacggcctgtcggctgccgttctggcgctgattgccgctggtgcgcctgcgcctgacattctcgaccagtttctg

SEQ ID NO: 211704 - DNA, 75 bp, synthetic construct
  source 1..75: mol_type = other DNA
agctacggcgctggacatacgctggcggtaagcaatggaaaggtctcatgactcgtcgtgagattgagcgtgaag

SEQ ID NO: 211705 - DNA, 75 bp, synthetic construct
  source 1..75: mol_type = other DNA
tgccgcaggggcttctgcgcctgaaatcctggatcagtttctggatgaaaaagaaggtaaccacaccacggcata

SEQ ID NO: 211706 - DNA, 75 bp, synthetic construct
  source 1..75: mol_type = other DNA
atggcaaacctgtcgtcccgggcatgaagttgtcgaaggaaaaatgcgctcaggttaatgccattgaacgtgata

SEQ ID NO: 211707 - DNA, 75 bp, synthetic construct
  source 1..75: mol_type = other DNA
gattaaggacggtggcagagactgccgtattcgctcaaacaactgctacggtcaggtatcacgtcgtgaccagga

SEQ ID NO: 211708 - DNA, 75 bp, synthetic construct
  source 1..75: mol_type = other DNA
gtggcagagactgccgtattcgctcaaacaactgttacggtcaggtatcccgtcgcgaccaggagagtgcgctgg

SEQ ID NO: 211709 - DNA, 75 bp, synthetic construct
  source 1..75: mol_type = other DNA
atagcgttatcgctgccatcggcggtggcgccatagccattgcttctgcgctcatcaccggcccaactggtaacg

SEQ ID NO: 211710 - DNA, 75 bp, synthetic construct
  source 1..75: mol_type = other DNA
atctgccgtggagccacccgggtggatggtaagcccgtcgcccccggcatgaagctgtcgaagggaaaatgcgac

SEQ ID NO: 211711 - DNA, 75 bp, synthetic construct
  source 1..75: mol_type = other DNA
cgtattcgctcaaataactgttatggtcaggtaccccgtcgtgaccaggagagcgcgctggcgtgctggggaatc

SEQ ID NO: 211712 - DNA, 75 bp, synthetic construct
  source 1..75: mol_type = other DNA
agggactgccgtattcgctcaaataactgttatggtcaggtatcccgtcgtgaccaggagagcgcgctggcgtgc

SEQ ID NO: 211713 - DNA, 75 bp, synthetic construct
  source 1..75: mol_type = other DNA
tacggcctgtcggctgccgttctggcgctgattgccgcaggtgcgcctgcgcctgaaatcctcgaccagtttctg

SEQ ID NO: 211714 - DNA, 75 bp, synthetic construct
  source 1..75: mol_type = other DNA
actgccgtattcgttcaaacaactgttacggtcaggtatcccgtcgtgaccaggagagcgcgctggcgtgctggg

SEQ ID NO: 211715 - DNA, 75 bp, synthetic construct
  source 1..75: mol_type = other DNA
ccgcatacgttcaaataactgctatggacaggttattcgtcgtgaccaggaaagcgcattagcctgttgggggat

SEQ ID NO: 211716 - DNA, 75 bp, synthetic construct
  source 1..75: mol_type = other DNA
ccgtgatggtactggtatctggactatctgccgtggtgccattatggtggatggtaagcctgttgtccccggcat

SEQ ID NO: 211717 - DNA, 75 bp, synthetic construct
  source 1..75: mol_type = other DNA
aggcgctggcatgggtggagaaaaacatcagagtgccactgaccgaaccccagaaagcggggatcgcgtcattct

SEQ ID NO: 211718 - DNA, 75 bp, synthetic construct
  source 1..75: mol_type = other DNA
gtgcatgcgaggcgattcgttggtggataaaagatggtgggcgcgattgccgcatacgttcaaataactgctatg

SEQ ID NO: 211719 - DNA, 75 bp, synthetic construct
  source 1..75: mol_type = other DNA
atgaacaccaaaatcaaatacggcctgtcggctgccgttctggcgctgattgccgcaggtgcttctgcgcctgaa

SEQ ID NO: 211720 - DNA, 75 bp, synthetic construct
  source 1..75: mol_type = other DNA
atcctcgaccagtttctggatgaaaaggaaggtaaccacaccacagcataccgtgatggtacgggtatctggacc

SEQ ID NO: 211721 - DNA, 75 bp, synthetic construct
  source 1..75: mol_type = other DNA
acgcgcggcgctctttactcattcgtttacaacgtgggtgctggcaatttcagaacatcgacgcttcttcgcaaa

SEQ ID NO: 211722 - DNA, 75 bp, synthetic construct
  source 1..75: mol_type = other DNA
ggcgatatcaaaggcgcatgtgatcagctacgtcgctggacatatgctggcggtaagcaatggaaaggcctgatg

SEQ ID NO: 211723 - DNA, 75 bp, synthetic construct
  source 1..75: mol_type = other DNA
gggactgccgtattcgctcaaataactgttacggtcaggtatcccgtcgtgaccaggagagcgcgctggcgtgct

SEQ ID NO: 211724 - DNA, 75 bp, synthetic construct
  source 1..75: mol_type = other DNA
gattaaggacggtggcagagactgccgtatccgctcaaataattgctacggtcaggtatcaagacgtgaccagga

SEQ ID NO: 211725 - DNA, 75 bp, synthetic construct
  source 1..75: mol_type = other DNA
ttacccagtgattgtacccagcgttataaagtggtgccggagtcggcggactatgcctgcatccgttgcagtgaa

SEQ ID NO: 211726 - DNA, 75 bp, synthetic construct
  source 1..75: mol_type = other DNA
gccgcaaacagacagcactacatgggcagtggatttggatattggtgcaatgattacggggattggcggttacaa

SEQ ID NO: 211727 - DNA, 75 bp, synthetic construct
  source 1..75: mol_type = other DNA
tacagcacaaaaaacaaaccggatacggtcagccagcgcgatgccagcacgacgcagaaaggtgtggtgcagtta

SEQ ID NO: 211728 - DNA, 75 bp, synthetic construct
  source 1..75: mol_type = other DNA
gggccctcaagggcccgcagggccgaaaggtgagcgtggtgacgttggtgctcagggggctgtagggcccgctgg

SEQ ID NO: 211729 - DNA, 75 bp, synthetic construct
  source 1..75: mol_type = other DNA
gcgggggcctaaaggggaccagggggatatggggccaaaaggcgagaaaggtgatccgggaggtcctgcaggccc

SEQ ID NO: 211730 - DNA, 75 bp, synthetic construct
  source 1..75: mol_type = other DNA
cgtctgcgtcttaactacaacggcataattgcattgttagtcgaaggctttaaaacacttcgtcatgagattaaa

SEQ ID NO: 211731 - DNA, 75 bp, synthetic construct
  source 1..75: mol_type = other DNA
ctgtcgaatccgtcattagtgtctgtgactctgataacagtcaggggatgctacggcaagttttcatgggaagcg

SEQ ID NO: 211732 - DNA, 75 bp, synthetic construct
  source 1..75: mol_type = other DNA
acggtatttccactggcgggtggattacagcacaaaaaacaaccggatacggtcagccagcgggatgccagcacg

SEQ ID NO: 211733 - DNA, 75 bp, synthetic construct
  source 1..75: mol_type = other DNA
agcaccgatggtgtcctgcgcgtgccgatcgcctgctcaagtgcaggcgcggtcggtaacgctgacgacggtacg

SEQ ID NO: 211734 - DNA, 75 bp, synthetic construct
  source 1..75: mol_type = other DNA
ggcgtgtttgccggatgtaccagtgttacgacgttctaccgggcgttttacggctgtacggggctgacatccata

SEQ ID NO: 211735 - DNA, 75 bp, synthetic construct
  source 1..75: mol_type = other DNA
agtggggcccgcaggcccacggggaccggctggtgcagctggtcccaaaggtgatgcaggccccgcaggaaagga

SEQ ID NO: 211736 - DNA, 75 bp, synthetic construct
  source 1..75: mol_type = other DNA
cagctaagcagcgcaacggacagtgacagtgaagtgctggctgccacaccaaaagctgtgaagacggccatgacg

SEQ ID NO: 211737 - DNA, 75 bp, synthetic construct
  source 1..75: mol_type = other DNA
ccggggccggttggtccggcaggtcctgcgggtaaaacggggccacgaggtttgcagggagaaacaggaagacag

SEQ ID NO: 211738 - DNA, 75 bp, synthetic construct
  source 1..75: mol_type = other DNA
agcagcccataaagctaaattcccggccttcaacaatccggaagtttatagagattttcaaaaatccggctttga

SEQ ID NO: 211739 - DNA, 75 bp, synthetic construct
  source 1..75: mol_type = other DNA
gagaaatgcagaaaacaagccccatacaaaaaacaaaaaaatgttccttgtatctgttcgcgcatttaaaacaaa

SEQ ID NO: 211740 - DNA, 75 bp, synthetic construct
  source 1..75: mol_type = other DNA
aaaaatgcgaacttaaatattcgaaatctcaaatagaaaaagcagccagaaaaattagacatggttgtgagggcg

SEQ ID NO: 211741 - DNA, 75 bp, synthetic construct
  source 1..75: mol_type = other DNA
gatgaactgctttatgctctgttatctgaatcctccagaataggggccaatgccatagtaaactttcaatatatt

SEQ ID NO: 211742 - DNA, 75 bp, synthetic construct
  source 1..75: mol_type = other DNA
caaccagattggctaattcaggaataaatattaaaggatatgatgacaatggtgatataatcaaaggtagcaatg

SEQ ID NO: 211743 - DNA, 75 bp, synthetic construct
  source 1..75: mol_type = other DNA
ggccagccatctggcattaagtgcttctgaaacggcgcaacggggcggcaaagtggtagataacgtggtgcagac

SEQ ID NO: 211744 - DNA, 75 bp, synthetic construct
  source 1..75: mol_type = other DNA
gccgggcggcttattgaagtgttgcctggctaccgtgccgagccgctgtccctttcactggtttatccgcagcgt

SEQ ID NO: 211745 - DNA, 75 bp, synthetic construct
  source 1..75: mol_type = other DNA
gatctcatttggacgaaccgcaaaatttgattacctaactatgctcaagaaaacgggacttctggatgtagagcc

SEQ ID NO: 211746 - DNA, 75 bp, synthetic construct
  source 1..75: mol_type = other DNA
ggcctgaaggtgaccgccgggagtgttattcagcgcgatgacctggttcagtacacggcaactgccgatgcaatc

SEQ ID NO: 211747 - DNA, 75 bp, synthetic construct
  source 1..75: mol_type = other DNA
caccggaaatacgagccgccattactgcggagttgcgttcgttcctgctgcgtgatggttatccgcagggagaac

SEQ ID NO: 211748 - DNA, 75 bp, synthetic construct
  source 1..75: mol_type = other DNA
atgatccggaccgctggctccctgaagctgggcaaagtacaggtttcagtgctggtccgttcattgctgaaaagt

SEQ ID NO: 211749 - DNA, 75 bp, synthetic construct
  source 1..75: mol_type = other DNA
gtccactattctctcaggaatttcaggatctgccagacggtgctgagacgacgcttactccgaaagcactaaaag

SEQ ID NO: 211750 - DNA, 75 bp, synthetic construct
  source 1..75: mol_type = other DNA
gggtattaagaatgaataaattttataaaggctctttctatccgaaagcactaaaagaggtatatatcagcgccg

SEQ ID NO: 211751 - DNA, 75 bp, synthetic construct
  source 1..75: mol_type = other DNA
ataccgcactacgctcaccgacctgacgcacagtctgaaaacaccgctggcggtgctgcaaagtacgctacgttc

SEQ ID NO: 211752 - DNA, 75 bp, synthetic construct
  source 1..75: mol_type = other DNA
aaagtgaacgcgaacgttacgacaaataccgtacgacgctcaccgacctgacccatagtctgaaaacgccactgg

SEQ ID NO: 211753 - DNA, 75 bp, synthetic construct
  source 1..75: mol_type = other DNA
aggaactaagcgatatctttggatgctctccagattggttaaagtttggcgaaaatgtaccttatccaaaaagtt

SEQ ID NO: 211754 - DNA, 75 bp, synthetic construct
  source 1..75: mol_type = other DNA
atgaaagtgagcatgggtggtaaaacctggcggctgggtttcattggagagaaaagtattgcgaagatgtacgcc

SEQ ID NO: 211755 - DNA, 75 bp, synthetic construct
  source 1..75: mol_type = other DNA
acattgataatgggagtcagcctgttttcgttatgagaccgactaacaatgatgggcaaactgctgtctatacgc

SEQ ID NO: 211756 - DNA, 75 bp, synthetic construct
  source 1..75: mol_type = other DNA
gccagaaatcagctttgtgggtgagcagaatgattttgtcgaagtgatgggcaacgtactggataacgcctgtaa

SEQ ID NO: 211757 - DNA, 75 bp, synthetic construct
  source 1..75: mol_type = other DNA
ccgccacaccgccagcaggctggttaaagtgcgacgggcgcgcctttacaaaagaacaatatcctgttctggcca

SEQ ID NO: 211758 - DNA, 75 bp, synthetic construct
  source 1..75: mol_type = other DNA
ggaatgattgaaaaacaccgtcatattgttgttgccaatgatggttacgacacaaaagatgaatgggaactggct

SEQ ID NO: 211759 - DNA, 75 bp, synthetic construct
  source 1..75: mol_type = other DNA
gcacctctgaaacgctggccgccacaccaaaagccgtcaaggctgcatacgaccttgcagccggcaaggcgcctg

SEQ ID NO: 211760 - DNA, 75 bp, synthetic construct
  source 1..75: mol_type = other DNA
caggcgctgctccgaatggaaaaaggtgcagaaaagaataaatggttaaaggagagaattcaggcaatacgaaaa

SEQ ID NO: 211761 - DNA, 75 bp, synthetic construct
  source 1..75: mol_type = other DNA
tctgcctctatccgctcatcctgctgacgctctgtgtggtgaatatgtataacgttcatacccgggttattccga

SEQ ID NO: 211762 - DNA, 75 bp, synthetic construct
  source 1..75: mol_type = other DNA
ctgactttggcacccggaaaggaacatccggcatgtactttctggccagagaatgtattgcctccctgaaagcca

SEQ ID NO: 211763 - DNA, 75 bp, synthetic construct
  source 1..75: mol_type = other DNA
cctggcggcttggtttcataggggagaaaagtattgcgaagatgtacgccactccagacggtggaatagctgtca

SEQ ID NO: 211764 - DNA, 75 bp, synthetic construct
  source 1..75: mol_type = other DNA
tgaggccattcagggtatcttcacccagctcgcagatcattcaaaaaccggaaatcgtcgtgggttgcggtcgtt

SEQ ID NO: 211765 - DNA, 75 bp, synthetic construct
  source 1..75: mol_type = other DNA
ctgatctttgccgagatgcgccagatgttccgcgacaacaagccagtcgatggtctgacattgttcgacgcgctt

SEQ ID NO: 211766 - DNA, 75 bp, synthetic construct
  source 1..75: mol_type = other DNA
gtggaagcagtaagtatcgtatttttagtggtgctcttcgtcgttatcatgaccgcagtagatatacagaagaaa

SEQ ID NO: 211767 - DNA, 75 bp, synthetic construct
  source 1..75: mol_type = other DNA
agccatcagttgcttgcaccggcggacaatatctccattgcaaaaaatgaactggcggtactggggacgatttca

SEQ ID NO: 211768 - DNA, 75 bp, synthetic construct
  source 1..75: mol_type = other DNA
gttatctgggcgaaagaagttcagggtattaaccgtgcatggactttcagacactggaaaggcattggaacggtt

SEQ ID NO: 211769 - DNA, 75 bp, synthetic construct
  source 1..75: mol_type = other DNA
actgggttggtatccaccgggaaggtgctttcgatgacagcgtgccgccgggcgaaaccgagttaatcctgcgac

SEQ ID NO: 211770 - DNA, 75 bp, synthetic construct
  source 1..75: mol_type = other DNA
gcattatgcacctgttcagcacgcgaacttcttccggtattttgtacgaagtggatgcacggctgcgtccgtccg

SEQ ID NO: 211771 - DNA, 75 bp, synthetic construct
  source 1..75: mol_type = other DNA
tgcaaccacatttacctgtaaggcgatccaggaagggcagatcgattctggtagccaaaaatcctcagtcgagac

SEQ ID NO: 211772 - DNA, 75 bp, synthetic construct
  source 1..75: mol_type = other DNA
tgttttcgttatgcgaccgactaacaacgatggtcaaacggcactctacacgctgagcctgtgttctgagatgta

SEQ ID NO: 211773 - DNA, 75 bp, synthetic construct
  source 1..75: mol_type = other DNA
cgtaatgacctggcctacgggatgatcaccaaagggttgaagaacctcgccaaagagcttggctgcgtcgtcgtg

SEQ ID NO: 211774 - DNA, 75 bp, synthetic construct
  source 1..75: mol_type = other DNA
ggaattaccgatatcgaatttattactcaatatctggtgttgcgctacgctcatgaaaaaccgaagttaacgcgc

SEQ ID NO: 211775 - DNA, 75 bp, synthetic construct
  source 1..75: mol_type = other DNA
tgctaagtgatgtctgtgcgcgtgaagacgctgctgtcacgctgtcgcgcattaccgccttgctggtggggattg

SEQ ID NO: 211776 - DNA, 75 bp, synthetic construct
  source 1..75: mol_type = other DNA
ggatcaaatcatggccccatctactactgctgccacaacctctgttgccacggatgacgtacatcctgaagtgac

SEQ ID NO: 211777 - DNA, 75 bp, synthetic construct
  source 1..75: mol_type = other DNA
aatgaaagcctggcaggaagcgcgggcgagtggtgcgctgaagaaagctgttaatgaacgaatggcgcgtgagcg

SEQ ID NO: 211778 - DNA, 75 bp, synthetic construct
  source 1..75: mol_type = other DNA
ggcgcgagccgtgaagcgatgcttggcgtgctggttgaaccgatgctgctgcttggtctgtgggtcgccgcacag

SEQ ID NO: 211779 - DNA, 75 bp, synthetic construct
  source 1..75: mol_type = other DNA
atggcaacaggggacgctttccaacggtttacagtggcaagtgctgaccacccccagcgtcccagcgatcgtgtt

SEQ ID NO: 211780 - DNA, 75 bp, synthetic construct
  source 1..75: mol_type = other DNA
agtttgcccaataaccgtaacgatttgctgaaagaggcgctctcttatctggcaaatgccactggcaaactgact

SEQ ID NO: 211781 - DNA, 75 bp, synthetic construct
  source 1..75: mol_type = other DNA
ggaagcggcgcaggcgcgctcattatggcaacagggaattgaccctaagcgtccgatgccgccggtgatcgtctc

SEQ ID NO: 211782 - DNA, 75 bp, synthetic construct
  source 1..75: mol_type = other DNA
caccggtacttctggtgcaggtagcgacgtagagaaagttcgcgaagcaactcgtctggcgcaggaaaaacgtcc

SEQ ID NO: 211783 - DNA, 75 bp, synthetic construct
  source 1..75: mol_type = other DNA
ccgcgttgcagcatctcagggcgtagaactgggtgctggcattgaaattgtcgatccagaagtggttcgcgaaag

SEQ ID NO: 211784 - DNA, 75 bp, synthetic construct
  source 1..75: mol_type = other DNA
cggatccgaccgcagaacaactggctgaaatcgcaattcagtctgctgattccgccgctgctttcggtatcgaac

SEQ ID NO: 211785 - DNA, 75 bp, synthetic construct
  source 1..75: mol_type = other DNA
tggcgtcatgaaatggggtatcagcctgaaacagctggtggtgttgcagatgttcgtcggggtgtttattccgtg

SEQ ID NO: 211786 - DNA, 75 bp, synthetic construct
  source 1..75: mol_type = other DNA
ctgaaacagctggtggtgttgcagatgttcgtcggggtgtttattccgtggggacaaatggaaaccttcaccgtc

SEQ ID NO: 211787 - DNA, 75 bp, synthetic construct
  source 1..75: mol_type = other DNA
ccggttgacgatcatgagcgtatcgagaaagttcaggaatatgttgctaactacatcaacgctgactggatcgat

SEQ ID NO: 211788 - DNA, 75 bp, synthetic construct
  source 1..75: mol_type = other DNA
caggttgatggtctgcaacaaagcgatgatattttacgccttctgccgccggaactggctacgtttgggataact

SEQ ID NO: 211789 - DNA, 75 bp, synthetic construct
  source 1..75: mol_type = other DNA
atgcctccatcattacgaaaagctgttgcagctgctattggtggcggggctattgctatagcatctgtgttaatt

SEQ ID NO: 211790 - DNA, 75 bp, synthetic construct
  source 1..75: mol_type = other DNA
ttacataattttgtaccgggtgacaacttcaggtattgaaattgtaaacgtggttcacgcccgtcgacaattccc

SEQ ID NO: 211791 - DNA, 75 bp, synthetic construct
  source 1..75: mol_type = other DNA
aggcaccacggcagccgcactgggttttgcacccagcgtagcactcgcagaaacaaggcagtataaactgctgcg

SEQ ID NO: 211792 - DNA, 75 bp, synthetic construct
  source 1..75: mol_type = other DNA
tggcattcgataaagtgccttttgatttccttggcgaagttgccctacgcagtctctatacctttgtgttggtct

SEQ ID NO: 211793 - DNA, 75 bp, synthetic construct
  source 1..75: mol_type = other DNA
atttccgctgggttgcccaggttgtcagtaaggtggtgtttgccgatccaaacaaccaggctgcaaggaatctgg

SEQ ID NO: 211794 - DNA, 75 bp, synthetic construct
  source 1..75: mol_type = other DNA
ggctggatggcgaacgcctggaacagccatacctcttcggtaggcgggtcggataacagcagcgcctatctgggc

SEQ ID NO: 211795 - DNA, 75 bp, synthetic construct
  source 1..75: mol_type = other DNA
tcagcatcgctttcatgccgtggcgatgtcggcacatggcaaacccggcatcatgcgcatattcgatcatatctg

SEQ ID NO: 211796 - DNA, 75 bp, synthetic construct
  source 1..75: mol_type = other DNA
gtggatacttccggctcaatgggcggctttaatcgagtaggcagcctggcggctgcggcttgtcatggtctggaa

SEQ ID NO: 211797 - DNA, 75 bp, synthetic construct
  source 1..75: mol_type = other DNA
atccgttttttaagccagcagtttcgtggcggcaccgatcttgccagttgttttcgcgccattatggaacgcttg

SEQ ID NO: 211798 - DNA, 75 bp, synthetic construct
  source 1..75: mol_type = other DNA
aggcaccacggcagcggcactgggttttgcacccagcgtagcactcgcggagacaaggcagtataaactgctgcg

SEQ ID NO: 211799 - DNA, 75 bp, synthetic construct
  source 1..75: mol_type = other DNA
agaaaaagatgatgttgaatcacgtattgaaaaactggagtgctgtgttactgaattgaaaaaaagcaccccaac

SEQ ID NO: 211800 - DNA, 75 bp, synthetic construct
  source 1..75: mol_type = other DNA
agaaaaagatgatattgaatcacgtattgaacaactggagtgctatatctctgaattgaaaaaagcaccccaaca

SEQ ID NO: 211801 - DNA, 75 bp, synthetic construct
  source 1..75: mol_type = other DNA
cggacgaagaactgatgcatcttggggaaggtatttccggatgtcacgaacggtgcaatagtgatccacacccaa

SEQ ID NO: 211802 - DNA, 75 bp, synthetic construct
  source 1..75: mol_type = other DNA
gaagaactgatgcatcttggggaaggtatttccggaggtgtgcgttatggaccagatagccaacctggtcattga

SEQ ID NO: 211803 - DNA, 75 bp, synthetic construct
  source 1..75: mol_type = other DNA
gcgcaggtctgccgtatgtacaacaacgcgtttgtggggccggagcgtaacaatcacggacatgccgttattctg

SEQ ID NO: 211804 - DNA, 75 bp, synthetic construct
  source 1..75: mol_type = other DNA
gaaatcaaaaaacaatttgataatcgtttctggcgcgtcatagctgaatgtgatcgccgccgcctcattggtcgt

SEQ ID NO: 211805 - DNA, 75 bp, synthetic construct
  source 1..75: mol_type = other DNA
aaacccggataatgaaaactatggcctgccaacgtggtgggaatacaaagaacgcattaacagtaagaccattgc

SEQ ID NO: 211806 - DNA, 75 bp, synthetic construct
  source 1..75: mol_type = other DNA
aaaccaggataaagaaaactatggccttccgacatggtgggaatacaaggagcggatcaacagtaaaaccatagc

SEQ ID NO: 211807 - DNA, 75 bp, synthetic construct
  source 1..75: mol_type = other DNA
tgaacagcgtgaggaaatgaagcaggagtttccctcaacgccacaggaggcgtttctgacgtcaggacgacgggt

SEQ ID NO: 211808 - DNA, 75 bp, synthetic construct
  source 1..75: mol_type = other DNA
cggtggctatatcctgtttgggcacggctcgagtatccaggtggcaacctcattccgttcaggtacggtgcagcg

SEQ ID NO: 211809 - DNA, 75 bp, synthetic construct
  source 1..75: mol_type = other DNA
gaagagaacgggataccggagcgaacggacgaagaactgatgcatcttggggaaggtatttccggaggtgtgcgt

SEQ ID NO: 211810 - DNA, 75 bp, synthetic construct
  source 1..75: mol_type = other DNA
gcccgagtgccggaaagcgggctgaagctgtcacgggaaaaaatgacgtatttttctgcggttgagaaggcaatg

SEQ ID NO: 211811 - DNA, 75 bp, synthetic construct
  source 1..75: mol_type = other DNA
tggctcactggttcgggcatctcgatgctgaactttttgctcatctcattgcgcaggtctgtcgtatgtacaaca

SEQ ID NO: 211812 - DNA, 75 bp, synthetic construct
  source 1..75: mol_type = other DNA
gatgtgatgaacctgcagaaatgactgagaccgaacaacgtctgttcattatgacaaaactgagcaatccctggt

SEQ ID NO: 211813 - DNA, 75 bp, synthetic construct
  source 1..75: mol_type = other DNA
tcaacctgcaaaccgccgccgctggtatcgacattccaacgcgtatcctggttgggaatcagcagggtgagcgtg

SEQ ID NO: 211814 - DNA, 75 bp, synthetic construct
  source 1..75: mol_type = other DNA
gcaaaccggttaacgacctgtcccgtggcgctctggtagacgatatcgtctacaccatcgctctgaccgcgattc

SEQ ID NO: 211815 - DNA, 75 bp, synthetic construct
  source 1..75: mol_type = other DNA
tctgcgcacgtagcattccgcacatgctggaacacttccgtgctggctctctgctggtaacttccgcagaccgtc

SEQ ID NO: 211816 - DNA, 75 bp, synthetic construct
  source 1..75: mol_type = other DNA
ctacatcaacgctgactggatcgaatctctgactgccacttctgagcgcagccgtcgtctgtctccgccagcgtt

SEQ ID NO: 211817 - DNA, 75 bp, synthetic construct
  source 1..75: mol_type = other DNA
tcggcggtgcaaaaaacaccaatatcactggcgttatcgttaacaaactgaatgctccggttgatgagcagggtc

SEQ ID NO: 211818 - DNA, 75 bp, synthetic construct
  source 1..75: mol_type = other DNA
gcaagccggttaacgacctgtcccgtggcgctctggttgacgacatcgtctacaccatcgcgctgactgcgattc

SEQ ID NO: 211819 - DNA, 75 bp, synthetic construct
  source 1..75: mol_type = other DNA
acgttgcgaaatccaaagcgccgaactctccggttgcaggtcgcgctaccgtgttcatattcccggatctgaaca

SEQ ID NO: 211820 - DNA, 75 bp, synthetic construct
  source 1..75: mol_type = other DNA
agtcatcgtacagcgccgccctgagcattgcgtgggacaacatcacacacgttctttccggtgcgctcacggcag

SEQ ID NO: 211821 - DNA, 75 bp, synthetic construct
  source 1..75: mol_type = other DNA
gagtttccctcaacgccacaggaggcgtttctgacgtccggacgacgtgtgttcagtgccgaaagtacattgcag

SEQ ID NO: 211822 - DNA, 75 bp, synthetic construct
  source 1..75: mol_type = other DNA
gactggctgagagcctcattcaccatcgttgaacgtcgtagcggtggctatatcctgtttggtcacggctcgagt

SEQ ID NO: 211823 - DNA, 75 bp, synthetic construct
  source 1..75: mol_type = other DNA
ctgggctatggctcggtatttaacagtcgttcagaacctctgtggggatttcgtgaaatcatcaagccgggggct

SEQ ID NO: 211824 - DNA, 75 bp, synthetic construct
  source 1..75: mol_type = other DNA
cgcgaaaaacgccagagaagcgatttatcacattgaaggtgacccggatcatccggtaagccgtggtgcgttatg

SEQ ID NO: 211825 - DNA, 75 bp, synthetic construct
  source 1..75: mol_type = other DNA
gtgaaagggcgtttgcaggctgcagcagtgcatcgacgttcgaaggcacattttacgactgcacgaagctgacaa

SEQ ID NO: 211826 - DNA, 75 bp, synthetic construct
  source 1..75: mol_type = other DNA
tggcacttacagagaatgtttaaagatgtcactggccatgctattggcgcgtatattcgtgctcgtcgtttgtcg

SEQ ID NO: 211827 - DNA, 75 bp, synthetic construct
  source 1..75: mol_type = other DNA
tggtacattatttagctcaattataaattatcatatagctccgtttgtcttgtttgatgaaaatataatatcaaa

SEQ ID NO: 211828 - DNA, 75 bp, synthetic construct
  source 1..75: mol_type = other DNA
tatatattatttcaataaggttgatctatcatcttatagacaagcattttttgatggttcaagagataatgttaa

SEQ ID NO: 211829 - DNA, 75 bp, synthetic construct
  source 1..75: mol_type = other DNA
atgagcctgccttttttacgcacgctgcaaggcgatcgcttttttcagttattaattcttgttggcatcggatta

SEQ ID NO: 211830 - DNA, 75 bp, synthetic construct
  source 1..75: mol_type = other DNA
gagtaaagtgatgaagaaaaaatacgaactggttgttaaagggataaataattacccggataagattactgttac

SEQ ID NO: 211831 - DNA, 75 bp, synthetic construct
  source 1..75: mol_type = other DNA
ggcatcaggggcgatgattggctctgtggtgccaggaataggcacggctgttggcgctattggtggcggcattat

SEQ ID NO: 211832 - DNA, 75 bp, synthetic construct
  source 1..75: mol_type = other DNA
agcacctcagcaaagctgtttactgcaaaggcggcagtgatggcggttcaaaagcccaggcacgcgcaactgaaa

SEQ ID NO: 211833 - DNA, 75 bp, synthetic construct
  source 1..75: mol_type = other DNA
atgaatatgggtcttttttacggttccagcacctgttacaccgaaatggcggcagaaaaaatccgcgatattatc

SEQ ID NO: 211834 - DNA, 75 bp, synthetic construct
  source 1..75: mol_type = other DNA
gctggagcacaacttggcagcattgttcctggtattggtactggtattggtgccgctgttggtggcggtcttggt

SEQ ID NO: 211835 - DNA, 75 bp, synthetic construct
  source 1..75: mol_type = other DNA
cggggctgcctctggagcaattgctggagcacagcttggcagcattgttcccggtattggtactggtattggtgc

SEQ ID NO: 211836 - DNA, 75 bp, synthetic construct
  source 1..75: mol_type = other DNA
gaatctggcaaatattggtcttggcgcgcttcagggacaggcaaacgccgggcagacatatgccaacaacatgag

SEQ ID NO: 211837 - DNA, 75 bp, synthetic construct
  source 1..75: mol_type = other DNA
tggctgagcgaggccgaccggcggctgcagataaaaagtgcactgccctggtggctggtctgccggggggaaatt

SEQ ID NO: 211838 - DNA, 75 bp, synthetic construct
  source 1..75: mol_type = other DNA
ccggaggactggctggaggcggagcgggaaggtgaaatcctcgcgctcattcacagtcatcccggtggtctgccc

SEQ ID NO: 211839 - DNA, 75 bp, synthetic construct
  source 1..75: mol_type = other DNA
tggcgcatgcccggcggtgtgcgccgatggagtcgtgcggcttcgtgataaccacgccggagggtgaacggtacc

SEQ ID NO: 211840 - DNA, 75 bp, synthetic construct
  source 1..75: mol_type = other DNA
aatcgtcctcggtcgctacgacgaggaggacacgctgcagcgcgtcgacggagtgattcgcaaacaataccggcg

SEQ ID NO: 211841 - DNA, 75 bp, synthetic construct
  source 1..75: mol_type = other DNA
aaggggcagcgtacccgaaggcgatttttggttcgacgccgaccgttaccggcaaaagtcatatcgaaatgctcg

SEQ ID NO: 211842 - DNA, 75 bp, synthetic construct
  source 1..75: mol_type = other DNA
ttgagataccggattttcatcgtgaggatgagtggtggcgcaacggtcagaacctgtatctggacaatatggagg

SEQ ID NO: 211843 - DNA, 75 bp, synthetic construct
  source 1..75: mol_type = other DNA
aaggcgctgaataagattttcggctcgttgtttatgctggtgggagcgctgttagcatcggcgaggcatgcgtga

SEQ ID NO: 211844 - DNA, 75 bp, synthetic construct
  source 1..75: mol_type = other DNA
gtcctctgcactggcgggcgatattctgctgtgctgctttggtgcttcggtggccaatcatgccgccatatactg

SEQ ID NO: 211845 - DNA, 75 bp, synthetic construct
  source 1..75: mol_type = other DNA
agaacgtcggaaggggaaagatattttccctgcgtgaatatctccggtgagccggaggattatttccagatggct

SEQ ID NO: 211846 - DNA, 75 bp, synthetic construct
  source 1..75: mol_type = other DNA
ataaaagggccgaaacagatgaaggcattgaataagattttcggctcgttgtttatgctggtgggagcgctgtta

SEQ ID NO: 211847 - DNA, 75 bp, synthetic construct
  source 1..75: mol_type = other DNA
ctcagtgattgcgtttgaagtgttgaagtgggcgggcgcagcttatctgatttggcttgggattcagcagtggcg

SEQ ID NO: 211848 - DNA, 75 bp, synthetic construct
  source 1..75: mol_type = other DNA
ctagccgaagaaggaggccgaaaagtcagtcaacttgactggaaattcaataacgctgcaattattaaaggtgca

SEQ ID NO: 211849 - DNA, 75 bp, synthetic construct
  source 1..75: mol_type = other DNA
agttttttcgtgccctttgcaccgaaatcctggcctgctgctatcgactggcacaccatcatcaccttaagcggc

SEQ ID NO: 211850 - DNA, 75 bp, synthetic construct
  source 1..75: mol_type = other DNA
ccgggcagacatacgccaacaacatgagcagcattgcgcagcaaagcgcaactcttgccgctgctaacgccaaca

SEQ ID NO: 211851 - DNA, 75 bp, synthetic construct
  source 1..75: mol_type = other DNA
ggtgccgctcttggttctattgttcccggtcttggtactggattaggcgccgcaatcggtggcggacttggcctg

SEQ ID NO: 211852 - DNA, 75 bp, synthetic construct
  source 1..75: mol_type = other DNA
aaccttgcaccgttcacgccactcgctcagcagtacgtatcacagttgcaaaatctttcctctcttcaggggcaa

SEQ ID NO: 211853 - DNA, 75 bp, synthetic construct
  source 1..75: mol_type = other DNA
tcgatttgccggatttttaccgacatgatgactggtggaaatcaggtcagaatctctatctggataatctggagg

SEQ ID NO: 211854 - DNA, 75 bp, synthetic construct
  source 1..75: mol_type = other DNA
ccaccagcagtggtgttattatttccagcatgaatgaaccgtactggaagaagcgttacaacgaagcacgccggg

SEQ ID NO: 211855 - DNA, 75 bp, synthetic construct
  source 1..75: mol_type = other DNA
attgcccagggcaacccgatgccggtgccttacggggaaatgctggttggctcccgccgtatatcccaggacatc

SEQ ID NO: 211856 - DNA, 75 bp, synthetic construct
  source 1..75: mol_type = other DNA
gtaacaggattttttctgaggcatacgtggagggagacaaaatcttttatataaaattaagaaagagaatgaata

SEQ ID NO: 211857 - DNA, 75 bp, synthetic construct
  source 1..75: mol_type = other DNA
atgtctgttgactgatttgtctttttttaaaataggcagtgtctggacaagaggaaggtgtattgctgaaattct

SEQ ID NO: 211858 - DNA, 75 bp, synthetic construct
  source 1..75: mol_type = other DNA
gaagttgttgatgaacaaaatagcataagcacaggatatatgtcattagctgataaaaatgaacctgaaagattg

SEQ ID NO: 211859 - DNA, 75 bp, synthetic construct
  source 1..75: mol_type = other DNA
ttgggtggtggcatagccagtgctctcgagctatcaactccgtggggggctgcgatcggcggcggtcttggtctg

SEQ ID NO: 211860 - DNA, 75 bp, synthetic construct
  source 1..75: mol_type = other DNA
tcaccccagaggcaaaagtgtacatcgagggtgtatggagtcgtctcacaaataaaaaaggggatacatctcttt

SEQ ID NO: 211861 - DNA, 75 bp, synthetic construct
  source 1..75: mol_type = other DNA
tcttggcgctcttcaggggcaggcaaacgccgggcaaacatatgccaacaacatgagtcagatttcacagcaaag

SEQ ID NO: 211862 - DNA, 75 bp, synthetic construct
  source 1..75: mol_type = other DNA
ggcagttctgataaaagcgcaaagtatgccgcagaagctcagaagtatgccgcagacctgcaaaatcagcagttc

SEQ ID NO: 211863 - DNA, 75 bp, synthetic construct
  source 1..75: mol_type = other DNA
ggtccagaactggtgaccttacataacctcaaggacgactccccgaaattaatggagcagtacgatgtgctcatt

SEQ ID NO: 211864 - DNA, 75 bp, synthetic construct
  source 1..75: mol_type = other DNA
accgatgcgcagtatcagcaactggcagccgttacgcgcgcgctgattaatcactatccggctattgccagtaat

SEQ ID NO: 211865 - DNA, 75 bp, synthetic construct
  source 1..75: mol_type = other DNA
atgttatatgcatttaagctgggcagaaaactgcgcggcgaggaaccttggtgccatgaaaaaggcgggaaaggt

SEQ ID NO: 211866 - DNA, 75 bp, synthetic construct
  source 1..75: mol_type = other DNA
cagacgatcatgaaaaaccttgctccgttcacgccgcttgcggagcagtatgttaaccagttgcagaatctttcc

SEQ ID NO: 211867 - DNA, 75 bp, synthetic construct
  source 1..75: mol_type = other DNA
tcatctgataacgatgaacactatgacccgggaaaaagaatcacttatcgcagtgaggtcaaagaccaaaattac

SEQ ID NO: 211868 - DNA, 75 bp, synthetic construct
  source 1..75: mol_type = other DNA
aagcaacaggtggattgggttccactgcaaccagtaatcagttagcaacaatcgcaccaacgcttggtcagcaat

SEQ ID NO: 211869 - DNA, 75 bp, synthetic construct
  source 1..75: mol_type = other DNA
ggtggtggcatagccagtgctctcgagctatcaactccgtggggtgctggtatcggtgctggtcttggtctgctt

SEQ ID NO: 211870 - DNA, 75 bp, synthetic construct
  source 1..75: mol_type = other DNA
gctggagcacagcttggcagcattgttcccggtattggtactggtattggtgccgctgttggcggcggtcttggt

SEQ ID NO: 211871 - DNA, 75 bp, synthetic construct
  source 1..75: mol_type = other DNA
ggcgctcttcaggggcaggcaaacgccgggcaaacatatgccaacaacatgagccagatttcacagcaaagcgcg

SEQ ID NO: 211872 - DNA, 75 bp, synthetic construct
  source 1..75: mol_type = other DNA
ctggttggctcccgccgtatatcccaggacatcagcacccgtgatgaaggcgggggcggaaaggtcgtggttatc

SEQ ID NO: 211873 - DNA, 75 bp, synthetic construct
  source 1..75: mol_type = other DNA
atgtcgccggatgactggctgcaggcaacactgcacggtgagattgtggcgctggtccacagtcaccccggtggt

SEQ ID NO: 211874 - DNA, 75 bp, synthetic construct
  source 1..75: mol_type = other DNA
gtgcaaatcatctgcgccagtgatgatctgctggtgcatcagcatgttccagtgaacttcatgccgccctgcccg

SEQ ID NO: 211875 - DNA, 75 bp, synthetic construct
  source 1..75: mol_type = other DNA
cagtgaactccatgccgccctgcccgagagccaaaaaatggtgatgcgctatggcggacacgcctgcaacgtgac

SEQ ID NO: 211876 - DNA, 75 bp, synthetic construct
  source 1..75: mol_type = other DNA
ctcccggcgaatctcccaggacatcagcacccgtgatgaaggcgggggcggaaaggtcgtggttatcgggcggca

SEQ ID NO: 211877 - DNA, 75 bp, synthetic construct
  source 1..75: mol_type = other DNA
cggctggtgtggagttgtctgggactgtatatcgtcttccttacggcgctggagttgaaacaagagctgtggggg

SEQ ID NO: 211878 - DNA, 75 bp, synthetic construct
  source 1..75: mol_type = other DNA
ggtgacggactgttacaccctgttccgggatgcataccatctggcggggattgagatgccggattttcaccgtga

SEQ ID NO: 211879 - DNA, 75 bp, synthetic construct
  source 1..75: mol_type = other DNA
gggcgctgttgttacaggtgccgggattccgccgtcagatgaacgaaggctggtaccagatacgtattcgcggtg

SEQ ID NO: 211880 - DNA, 75 bp, synthetic construct
  source 1..75: mol_type = other DNA
cggagggggaaagatattttccctgcgtgaatatttccggtgagccggaggattatttccggatggctccggagg

SEQ ID NO: 211881 - DNA, 75 bp, synthetic construct
  source 1..75: mol_type = other DNA
attttgctgctgaactatgtgccgccgtcgttgctgctggcatgggcggttaacgtaggtggttttggcttgtta

SEQ ID NO: 211882 - DNA, 75 bp, synthetic construct
  source 1..75: mol_type = other DNA
tccggtgagccggaagattatttccggatgtcgccggaggactggctgcgggcagaaatgcagggggagattgtg

SEQ ID NO: 211883 - DNA, 75 bp, synthetic construct
  source 1..75: mol_type = other DNA
tgcagataaagagtgccctgccctggtggctggtctgccgggggaaattcacaaattccgctgtgtgccgcacct

SEQ ID NO: 211884 - DNA, 75 bp, synthetic construct
  source 1..75: mol_type = other DNA
ttccgccgtcagatgaacgaaggctggtaccagatacgtattgccggtgaggacacggcaccggaggcggtgtac

SEQ ID NO: 211885 - DNA, 75 bp, synthetic construct
  source 1..75: mol_type = other DNA
aaaagtgccctgtcctggtggctggtctgccggggggacattcataaattccgctgtgtgccgcacctgaccggg

SEQ ID NO: 211886 - DNA, 75 bp, synthetic construct
  source 1..75: mol_type = other DNA
gctgcgggcagagatgcagggggagattgtggcactggtccacagtcatcccggtgggctgccctggctgagcga

SEQ ID NO: 211887 - DNA, 75 bp, synthetic construct
  source 1..75: mol_type = other DNA
tgtggcactggtccacagtcatcccggtggactgccctggctgagcgaggctgaccggcggctgcagataaaaag

SEQ ID NO: 211888 - DNA, 75 bp, synthetic construct
  source 1..75: mol_type = other DNA
gtggctggtctgccggggggcgattcacaagttccgctgtgttccgcacctgaccggacggcgctttgaacatgg

SEQ ID NO: 211889 - DNA, 75 bp, synthetic construct
  source 1..75: mol_type = other DNA
ggctaacggcaattggtttatcgcaggtgatcagtaatgtgccgggcacaattttgctgctgaactatgtgccgc

SEQ ID NO: 211890 - DNA, 75 bp, synthetic construct
  source 1..75: mol_type = other DNA
ttttctgccaccacgatgctgttttcacttggagccagcatgatactgggtggtgtggcacagatgctggccccg

SEQ ID NO: 211891 - DNA, 75 bp, synthetic construct
  source 1..75: mol_type = other DNA
tacgcaaacgccggagtggaagccgcgactggtgtggagttgtctgggactgtatatcgtttttcttacggcgct

SEQ ID NO: 211892 - DNA, 75 bp, synthetic construct
  source 1..75: mol_type = other DNA
ccgccggcgcaacgatggcgttatggggttcagccctggcagccggcggtttttctgccaccacgatgctgtttt

SEQ ID NO: 211893 - DNA, 75 bp, synthetic construct
  source 1..75: mol_type = other DNA
tcactgggtgccagcatgatactgggcggtgtggcccagatgctggcaccgaaggcaaaaacaccggagtacagg

SEQ ID NO: 211894 - DNA, 75 bp, synthetic construct
  source 1..75: mol_type = other DNA
gccagccaggttcctgacggtgttgtttatctgaccggtggcatcgactctcagacgtccgggcgctacgagtgt

SEQ ID NO: 211895 - DNA, 75 bp, synthetic construct
  source 1..75: mol_type = other DNA
aatgaggcgctcgactgctgggtgtacggactggcagcgctgcgtatcagtaaaattcgtttccagctcaatctc

SEQ ID NO: 211896 - DNA, 75 bp, synthetic construct
  source 1..75: mol_type = other DNA
aatgcgcctgcagctggaacccgactccaaatcggcgacaccaggtgcgattcattttcccaacgacgacgaaat

SEQ ID NO: 211897 - DNA, 75 bp, synthetic construct
  source 1..75: mol_type = other DNA
aaggcaaaaacaccggattaccgcgcaacggataacggcagacagaacacgtatttttcgtcactggataacatg

SEQ ID NO: 211898 - DNA, 75 bp, synthetic construct
  source 1..75: mol_type = other DNA
tggctgagcgaggctgaccggcggctgcagataaaaagcgcactgccctggtggctggtctgccggggggaaatt

SEQ ID NO: 211899 - DNA, 75 bp, synthetic construct
  source 1..75: mol_type = other DNA
tgaccggacggcgctttgagcacggggtgacggactgttacaccctgttccgggatgcataccatctggcgggga

SEQ ID NO: 211900 - DNA, 75 bp, synthetic construct
  source 1..75: mol_type = other DNA
gccgcgtctggcgggagctaaaagtggcggtgtgtttcaggtggtgctgggggcggcgctgattgcggtggcatg

SEQ ID NO: 211901 - DNA, 75 bp, synthetic construct
  source 1..75: mol_type = other DNA
gtgaaaatggtcggcaccaccgatgacccgatcgattctctggagcatcacgcagagatcgccaaagacggctct

SEQ ID NO: 211902 - DNA, 75 bp, synthetic construct
  source 1..75: mol_type = other DNA
tcttcttcacggccggagcatcgatggcagcctggggtgcagcgctgagtgccggcggtttttctgccaccacga

SEQ ID NO: 211903 - DNA, 75 bp, synthetic construct
  source 1..75: mol_type = other DNA
gaacctctgggtgagggggcggtcatccatattgtgccgcgactggccggagccggaaagggcggactgcagatt

SEQ ID NO: 211904 - DNA, 75 bp, synthetic construct
  source 1..75: mol_type = other DNA
taacgctgccggattttgtgcgtgaggatgactggtggcgcaacggtcagaacctgtacctggacaatatggagg

SEQ ID NO: 211905 - DNA, 75 bp, synthetic construct
  source 1..75: mol_type = other DNA
cgcgccgtctggctggcgaaaccctgagcgagcacgaagtggcacagttcaaaactgcggtactggtgttccttg

SEQ ID NO: 211906 - DNA, 75 bp, synthetic construct
  source 1..75: mol_type = other DNA
accggtgatgcgactgaccgtgaaaaatttgacgcctgggcagcaaccgttccacacactatcggtaacccgtta

SEQ ID NO: 211907 - DNA, 75 bp, synthetic construct
  source 1..75: mol_type = other DNA
atctgccagagtattacagttaagaggtgggcaagacgctgttagattggcaattgagttctgctctgataaaaa

SEQ ID NO: 211908 - DNA, 75 bp, synthetic construct
  source 1..75: mol_type = other DNA
gagtgtggactggacgctgctgctggtgtttatggcgatgtttatcgacgtccatttactgacccagcttccagc

SEQ ID NO: 211909 - DNA, 75 bp, synthetic construct
  source 1..75: mol_type = other DNA
gcaatgttctgcccgttctgtacggtgaaatgcgcgtggggtcacgtgtggcatctcaggaaatcagtacagctg

SEQ ID NO: 211910 - DNA, 75 bp, synthetic construct
  source 1..75: mol_type = other DNA
tatatattgctcgtgagcttctacgtgaagatggtgtgatatttatttcgattgacgaaaatgaattaaatcaac

SEQ ID NO: 211911 - DNA, 75 bp, synthetic construct
  source 1..75: mol_type = other DNA
atgtattattccgtgcaagatcctgacggtaatgaggttttcccaatagcctctgctggctatgaaagttgttgg

SEQ ID NO: 211912 - DNA, 75 bp, synthetic construct
  source 1..75: mol_type = other DNA
gctggtcagtcagactgccggaggggtggagaattctattacgaaaggcctagcggggttgagtgccggtggggg

SEQ ID NO: 211913 - DNA, 75 bp, synthetic construct
  source 1..75: mol_type = other DNA
gcggagaatgcagggcttaaggcgatatgtgatgaccgtcgcaggttcatcatgaatggggtgcagacgggttat

SEQ ID NO: 211914 - DNA, 75 bp, synthetic construct
  source 1..75: mol_type = other DNA
acaggcaacacaaggcgaatgggtcgcatttatttcgtcgggtactggtacatatgcggtgcatacacccggtga

SEQ ID NO: 211915 - DNA, 75 bp, synthetic construct
  source 1..75: mol_type = other DNA
gtggtgtccacctataccgcaccgggcggtaatccctggcgggaaatggctctggtcagtcaggcatccggcggt

SEQ ID NO: 211916 - DNA, 75 bp, synthetic construct
  source 1..75: mol_type = other DNA
agcacgctggactcgattgcctggcgaacgggtgtgccggaatcgctttatcccgaggctctggtccccggccga

SEQ ID NO: 211917 - DNA, 75 bp, synthetic construct
  source 1..75: mol_type = other DNA
aaaaatctgcctcctgtgcaatattcccggatggctccgccaccgactcttacgccgacaaactggcagaagatg

SEQ ID NO: 211918 - DNA, 75 bp, synthetic construct
  source 1..75: mol_type = other DNA
atgtgggtttctatgttgagcatgtggggttgccgggttgtcgtcggttatgtgctgggaatcatgcttggctgg

SEQ ID NO: 211919 - DNA, 75 bp, synthetic construct
  source 1..75: mol_type = other DNA
taacggccatcgcctggctaacggctccctttgccggggttatggcatcgttttacacccaggatccacaggtta

SEQ ID NO: 211920 - DNA, 75 bp, synthetic construct
  source 1..75: mol_type = other DNA
ggaattgatcactctcggcgctcgtttgcagatgctggaaagtgaaacacaattaagtcgcggacgcctgatcaa

SEQ ID NO: 211921 - DNA, 75 bp, synthetic construct
  source 1..75: mol_type = other DNA
ggatggagcgaagaggtcgaaagcatttgctggggggtaattattcagcaggcaaccaaggtcggtgaacgcaag

SEQ ID NO: 211922 - DNA, 75 bp, synthetic construct
  source 1..75: mol_type = other DNA
tgaaggccggggctatgtatttctcatatggctctgaatttagtttcgagtgtcacaaaactgctgaggaggcta

SEQ ID NO: 211923 - DNA, 75 bp, synthetic construct
  source 1..75: mol_type = other DNA
cgtgctgttttactggcgaatggttactggacgttggctgtggaaatatcctcgacctgagccgcaaaagtgtga

SEQ ID NO: 211924 - DNA, 75 bp, synthetic construct
  source 1..75: mol_type = other DNA
ggtgttgcgatctctcacccggttgccaatacctacttacttttcgcttatccattcaactggatttatgatcgc

SEQ ID NO: 211925 - DNA, 75 bp, synthetic construct
  source 1..75: mol_type = other DNA
caggcgatatttggcaccacacttaccgggttcagccagcgcagtcgcaccgcctacagtggacaacagatgctg

SEQ ID NO: 211926 - DNA, 75 bp, synthetic construct
  source 1..75: mol_type = other DNA
cgggcaattcggcgcgctggcggcgtggctggcaattgactggctgaaaacgcaatacggcgcgccgttacgtac

SEQ ID NO: 211927 - DNA, 75 bp, synthetic construct
  source 1..75: mol_type = other DNA
aaaactgcgtgtcacgttcgcactggactgttgcgatcgtgaagccatagactgggccgcaagcacggggggtta

SEQ ID NO: 211928 - DNA, 75 bp, synthetic construct
  source 1..75: mol_type = other DNA
tgtaatgttaagcatggaagattcagagaagccaaaagcctcaaaactgaagaaagggcagaagatagttgttac

SEQ ID NO: 211929 - DNA, 75 bp, synthetic construct
  source 1..75: mol_type = other DNA
cgccagtgagttctggcctaaggccggagagccgcctttgagctatgatactgttgttagtttgcttcgtagctg

SEQ ID NO: 211930 - DNA, 75 bp, synthetic construct
  source 1..75: mol_type = other DNA
aggttaagaagagagagcccagcagcgatagctgattatctttttcaacacgccagtgagttctggcctaaggcc

SEQ ID NO: 211931 - DNA, 75 bp, synthetic construct
  source 1..75: mol_type = other DNA
cctcagtaccctggacagcatcgtctggcgaacgggattacctgaatccctgtatccagaggcacaggttcccgg

SEQ ID NO: 211932 - DNA, 75 bp, synthetic construct
  source 1..75: mol_type = other DNA
tcgttttatccggaagcgatgacgcccggactgcgtgaagtgggttctacaatgggcgcgaatatgtgggggaac

SEQ ID NO: 211933 - DNA, 75 bp, synthetic construct
  source 1..75: mol_type = other DNA
gcggtggtctcggcctaccatgccccgggcgaaaacccgtggcaggaaatgtcactggtcagcggggcgtccggc

SEQ ID NO: 211934 - DNA, 75 bp, synthetic construct
  source 1..75: mol_type = other DNA
ggctgccggaggcggtggtggaagcagtcggcacaagcatgatgcggtcgtggcagcgagaccccggccgaggct

SEQ ID NO: 211935 - DNA, 75 bp, synthetic construct
  source 1..75: mol_type = other DNA
atgacacagagatctgtcagacgggtggctgcggccacctgtctgcttcttttgcctttattcgccaccccggct

SEQ ID NO: 211936 - DNA, 75 bp, synthetic construct
  source 1..75: mol_type = other DNA
cgtaatgcggacatgtggggaaatatctacccccgttccggttttgtcagccagaccgatgatgacaaagcggct

SEQ ID NO: 211937 - DNA, 75 bp, synthetic construct
  source 1..75: mol_type = other DNA
gccatagcgtctgtgctcatcactggtccgagtggtgacgatggcctggaaggtgtcagctacataccatattaa

SEQ ID NO: 211938 - DNA, 75 bp, synthetic construct
  source 1..75: mol_type = other DNA
cggtaagtgtttcccgtcgacgttttacagacggattaatgcaggagatcgaaaaggtgcctgcgaagctattcg

SEQ ID NO: 211939 - DNA, 75 bp, synthetic construct
  source 1..75: mol_type = other DNA
cataagcagaaaagcgcgctggtgaaaaaagagatgcgcgtgtttcagtcgctggtggggccggatcttgatgcc

SEQ ID NO: 211940 - DNA, 75 bp, synthetic construct
  source 1..75: mol_type = other DNA
aaatagctaatctgttcaacaaagattatgagactggttatggctatcaggcagcaggacgggaatatatattgt

SEQ ID NO: 211941 - DNA, 75 bp, synthetic construct
  source 1..75: mol_type = other DNA
tctccagtggacaaatagcgtcacagtcggccacggtaatgttggcgctggtatcgactggcaaaaacaatccac

SEQ ID NO: 211942 - DNA, 75 bp, synthetic construct
  source 1..75: mol_type = other DNA
tggactgtctgttatggccacactggcaaagacatcatgctcggcaagaagtacaccgaggctgaatgccgtgcg

SEQ ID NO: 211943 - DNA, 75 bp, synthetic construct
  source 1..75: mol_type = other DNA
tgtcggctactgtactagcgctgattggtgcaggcgcgtctgctcctcaaatacttaaccagtttctggacgaaa

SEQ ID NO: 211944 - DNA, 75 bp, synthetic construct
  source 1..75: mol_type = other DNA
ccgcacacgttcaaataactgctacggacaggttattcgtcgtgaccaggaaagcgcattagcctgttgggggat

SEQ ID NO: 211945 - DNA, 75 bp, synthetic construct
  source 1..75: mol_type = other DNA
atgtctgacgacatgtctatgggtttgccttcgtcagcgggcgaacacggcgtactacgctccatgcaggaggtt

SEQ ID NO: 211946 - DNA, 75 bp, synthetic construct
  source 1..75: mol_type = other DNA
tcgcaaatttggcggcggacgcggtgaggcggtagcaaaagcggtgggcattaaaggcgattatctgccggatgt

SEQ ID NO: 211947 - DNA, 75 bp, synthetic construct
  source 1..75: mol_type = other DNA
ctggcgaatgtcgccacgccaaacgcggtagtcactaaagggcatcgctttgatatttacgccggaacgccggtg

SEQ ID NO: 211948 - DNA, 75 bp, synthetic construct
  source 1..75: mol_type = other DNA
ataaacttagtgccgccatgctggcgctattggctgccggggcttcagcaccggtactgttcgatcagtttatcg

SEQ ID NO: 211949 - DNA, 75 bp, synthetic construct
  source 1..75: mol_type = other DNA
cattggcggagtgataaatattattacatcccgtgagaatactggcactgaaatttccgcaggatggggaagtaa

SEQ ID NO: 211950 - DNA, 75 bp, synthetic construct
  source 1..75: mol_type = other DNA
tggacggaaaagttaagagtcatggaactgtaacaattgttaatgaccatgacccgggcggtatggaaaaatata

SEQ ID NO: 211951 - DNA, 75 bp, synthetic construct
  source 1..75: mol_type = other DNA
atgagaaatttagtggtgacattggcttgtatattctttattagtgcatgtaaaccatcagataattatgttatt

SEQ ID NO: 211952 - DNA, 75 bp, synthetic construct
  source 1..75: mol_type = other DNA
gaaactgtcgaaggaaaaatgcgaccaggttaacgctattgaacgtgataaggcgctggcatgggtggagcgcaa

SEQ ID NO: 211953 - DNA, 75 bp, synthetic construct
  source 1..75: mol_type = other DNA
ataaattactttctgatgaagaatgggactatctgactaaaaataatgatcaaaaaacaaacactagacaacaaa

SEQ ID NO: 211954 - DNA, 75 bp, synthetic construct
  source 1..75: mol_type = other DNA
aattgattcgcggtaaacaatacgaaaattacagcaaaactttgctcgaacaggaaaaagagagcgtccgcttag

SEQ ID NO: 211955 - DNA, 75 bp, synthetic construct
  source 1..75: mol_type = other DNA
ccgacaaattaaaaggatactgggcgtcgaatgactatagaaaacaaaaagaacaatggcagaatcatcttgcac

SEQ ID NO: 211956 - DNA, 75 bp, synthetic construct
  source 1..75: mol_type = other DNA
atccagtgcgggatgggagtttattgagggttatcgcttcctatggaactgctttcaaagcgccaaatctggggc

SEQ ID NO: 211957 - DNA, 75 bp, synthetic construct
  source 1..75: mol_type = other DNA
cgagaagatatagatcgctggcaagtttcttctgtaaatgatgttctgcgtcgtttgcctggcgttgcaatttct

SEQ ID NO: 211958 - DNA, 75 bp, synthetic construct
  source 1..75: mol_type = other DNA
ccgcagcaacaatatccttcgccaggcttccgcttattttgcgaaggcggagttcgaccgcctctggaaaaagtg

SEQ ID NO: 211959 - DNA, 75 bp, synthetic construct
  source 1..75: mol_type = other DNA
aacgtaaaccaaccacaaccggagcaagtggccgtaccgcatcaggtcacaccgtctgcaccactggcaacgcct

SEQ ID NO: 211960 - DNA, 75 bp, synthetic construct
  source 1..75: mol_type = other DNA
aaagctggggcgacaggtgacaaactttgacgagcaatgctggcaagcttgctgctttgatctggtctgcgaagg

SEQ ID NO: 211961 - DNA, 75 bp, synthetic construct
  source 1..75: mol_type = other DNA
tctggtgagtgcaccgaagatattgtcaacgatttcgtcatcgaactgcgaggactcatcttcagttacaaggtg

SEQ ID NO: 211962 - DNA, 75 bp, synthetic construct
  source 1..75: mol_type = other DNA
cgcgactgggagcgttacgcgatggtcaaggcgcggattatgggcgatagcgaaggcgtctatgctaacgagttg

SEQ ID NO: 211963 - DNA, 75 bp, synthetic construct
  source 1..75: mol_type = other DNA
catggcgtggtggatatgccgatgctcacggaggcattgcgccatgtgcaagcacgccacgccatcttgcgtacc

SEQ ID NO: 211964 - DNA, 75 bp, synthetic construct
  source 1..75: mol_type = other DNA
cgtatgggccagcggctgattaaagtgctggatcagcccacacaagatggttttgtctatcgcgtggatatgcgg

SEQ ID NO: 211965 - DNA, 75 bp, synthetic construct
  source 1..75: mol_type = other DNA
ctggatgaattgctcgatccaaacactctttaccagccgacggcgaccgatgcctaccgcgatgagttgcgccag

SEQ ID NO: 211966 - DNA, 75 bp, synthetic construct
  source 1..75: mol_type = other DNA
acttggcgcgggtggcattcgtgaaattgaatttatcgtccaggtattccagctcattcgcggcgggcgcgaacc

SEQ ID NO: 211967 - DNA, 75 bp, synthetic construct
  source 1..75: mol_type = other DNA
aacaggatgatctatccggatgaactggtccgggatgatttattacgttggcgacgacatgaactgaatgtaaaa

SEQ ID NO: 211968 - DNA, 75 bp, synthetic construct
  source 1..75: mol_type = other DNA
agattattcaacccgatcaaggttgtcatttggtgttttgcgcgcaccatatcatcatcgacggtatctcgttac

SEQ ID NO: 211969 - DNA, 75 bp, synthetic construct
  source 1..75: mol_type = other DNA
gtgcgggtacaagtaacgcagccgggtctcacgcaattggagccgtcgctgcccgtgctgatcatcgacgacgga

SEQ ID NO: 211970 - DNA, 75 bp, synthetic construct
  source 1..75: mol_type = other DNA
aatgagcattactatatagaaagcattgaaaaaatagcgctttcagatatagaaaaaatcttactggaaaactga

SEQ ID NO: 211971 - DNA, 75 bp, synthetic construct
  source 1..75: mol_type = other DNA
acagtcaggatcttggagaatgagttaggtgagtttttaacaatgggattaggtggtgaacttacaaggctagca

SEQ ID NO: 211972 - DNA, 75 bp, synthetic construct
  source 1..75: mol_type = other DNA
cggatgaagtgacacatgagcatgtgctgagatggcgaagaaatgagctgaatattcagaaagtccgggaacgga

SEQ ID NO: 211973 - DNA, 75 bp, synthetic construct
  source 1..75: mol_type = other DNA
gggatgattgcccgcgaagtgcgtcgacgtggtttgaccgacaacatcaaacttggcgcgggtggcattcgcgaa

SEQ ID NO: 211974 - DNA, 75 bp, synthetic construct
  source 1..75: mol_type = other DNA
aactgctggcgcaaaacgacattatggaagagcgggaagcgatggcgctaacccgtgcttacactacgcttcgcg

SEQ ID NO: 211975 - DNA, 75 bp, synthetic construct
  source 1..75: mol_type = other DNA
agtgaacgcgaaggccgcggttttgcggtggtcggctacggtaagctggggggctgggagttaggctacagttct

SEQ ID NO: 211976 - DNA, 75 bp, synthetic construct
  source 1..75: mol_type = other DNA
gaggcgatgatcgatgctgtggtacagcaagcatggggacaaatggttgcccgctatggtaaaccgaatcacctg

SEQ ID NO: 211977 - DNA, 75 bp, synthetic construct
  source 1..75: mol_type = other DNA
agaagcatttgccgattatcagaaaaacgaggcctggacgtgggaacatcaggcgctggtgcgtgcgcgtgtagt

SEQ ID NO: 211978 - DNA, 75 bp, synthetic construct
  source 1..75: mol_type = other DNA
tgcagaagcgtttgccgattatcagaaaaacgaggcctggacgtgggaacatcaggcgctggtgcgtgcgcgtgt

SEQ ID NO: 211979 - DNA, 75 bp, synthetic construct
  source 1..75: mol_type = other DNA
taaaaccttgcaaacagaagtgcgggagatgcgcgagaaaatgcgcgctcaccttggtaataaacatcgcgatcg

SEQ ID NO: 211980 - DNA, 75 bp, synthetic construct
  source 1..75: mol_type = other DNA
ggaagactattaccaggagcaggggcgcgactgggagcgatacgccatggtcaaggcgcggattatgggcgatag

SEQ ID NO: 211981 - DNA, 75 bp, synthetic construct
  source 1..75: mol_type = other DNA
tcgcgtattaccgccttgttggtggggattgtcactcgtaccacttatcttgagttgctcagtgaattcccggcg

SEQ ID NO: 211982 - DNA, 75 bp, synthetic construct
  source 1..75: mol_type = other DNA
ttgccgatttccgtaaagagttagacaaacgtaccatcgggccgcgcggacgtcaggtactcgactatctgatgc

SEQ ID NO: 211983 - DNA, 75 bp, synthetic construct
  source 1..75: mol_type = other DNA
gggcggcgggaatgctggttacctccacagaagcatttgccgattatcagaaaaacgaggcctggacgtgggagc

SEQ ID NO: 211984 - DNA, 75 bp, synthetic construct
  source 1..75: mol_type = other DNA
ctaaagaggctttagataagtttcagggatttgccagcgaagaactacgtcgtgagaaagctgcaattgatgtaa

SEQ ID NO: 211985 - DNA, 75 bp, synthetic construct
  source 1..75: mol_type = other DNA
ttatagtttttttgttaaatccatcatttggctgttttttgtttttattaacattgtttaatcatgagaaattat

SEQ ID NO: 211986 - DNA, 75 bp, synthetic construct
  source 1..75: mol_type = other DNA
agcattggttattatgccagcactgcggttatctacaccgattttaatggggttgaggtagggcgcgaggcgctc

SEQ ID NO: 211987 - DNA, 75 bp, synthetic construct
  source 1..75: mol_type = other DNA
cacaaatcttcggtgctatctcgatggaaccggccctgcaaaacgcgctccgccagggtatgcctgtgctgattg

SEQ ID NO: 211988 - DNA, 75 bp, synthetic construct
  source 1..75: mol_type = other DNA
ctgaacaggggttatggcgaatcgcccacgctgccgggctactctccaccaacgccagggaatgtactcatgcca

SEQ ID NO: 211989 - DNA, 75 bp, synthetic construct
  source 1..75: mol_type = other DNA
attgagatgccggattttcatcgcgaggatgactggtggcgtcacggtcagaatctctatctggataatctggag

SEQ ID NO: 211990 - DNA, 75 bp, synthetic construct
  source 1..75: mol_type = other DNA
ccagattagcgcgaggccttacacaaaaggcgcttggggatttggtcggggttagccaagcagctattcagaaaa

SEQ ID NO: 211991 - DNA, 75 bp, synthetic construct
  source 1..75: mol_type = other DNA
tggtcagcgccgtgctggcgttagtggtaggtgccggagcaggatggggagtctggcatcactatgccggaaaag

SEQ ID NO: 211992 - DNA, 75 bp, synthetic construct
  source 1..75: mol_type = other DNA
agaagatgcgccgcgctacggattggggctgtgccaacttgggatggcagacttttccgctgtggcatcgcattt

SEQ ID NO: 211993 - DNA, 75 bp, synthetic construct
  source 1..75: mol_type = other DNA
gacccgatcgagaaagacgagatgaaccgggtattcatattcggtaaggttattgggagcatgccgcagacgtac

SEQ ID NO: 211994 - DNA, 75 bp, synthetic construct
  source 1..75: mol_type = other DNA
atgagaaatgacggtcaacaatcaggaaagcctgctgtcaaccattccaaatacttcaagattgacgttcttgat

SEQ ID NO: 211995 - DNA, 75 bp, synthetic construct
  source 1..75: mol_type = other DNA
aagcagattgccgaggcgctgcgtcagcactgcttatcgttgacatcatcactggagaccccgataggggcgatc

SEQ ID NO: 211996 - DNA, 75 bp, synthetic construct
  source 1..75: mol_type = other DNA
ggcacaagagcatcatcagaccggattattatcgacgctgttttcgacccgttcgcgcctgctgaccagtaatct

SEQ ID NO: 211997 - DNA, 75 bp, synthetic construct
  source 1..75: mol_type = other DNA
aggcattaaaagatcatttagctgcctatgaactatcgaaagcgtctgagactgtaagctttaagccaacccgtc

SEQ ID NO: 211998 - DNA, 75 bp, synthetic construct
  source 1..75: mol_type = other DNA
agatggcgacttcatttactcctactcgcccggcaccaccgccaccgacaagtggacaggcatccgggtctgccg

SEQ ID NO: 211999 - DNA, 75 bp, synthetic construct
  source 1..75: mol_type = other DNA
ggacaggcatccgggtctgccggactaccgcccattgcacaggcattaaaaaatcatttagctgcctatgagcaa

SEQ ID NO: 212000 - DNA, 75 bp, synthetic construct
  source 1..75: mol_type = other DNA
tgttctttctcacgttagaagcatatttcggggtgttttcctttaaaagaaaaggaaaagtaaattatggcaaaa

SEQ ID NO: 212001 - DNA, 75 bp, synthetic construct
  source 1..75: mol_type = other DNA
acggatgcgggttttgaaattgtggcagtggtaacaaatgaaagtcaggatgaaatgaaactcaccactggctcg

SEQ ID NO: 212002 - DNA, 75 bp, synthetic construct
  source 1..75: mol_type = other DNA
tcagcaattggtgaactaacagagaagcagcagaaacgaattattgacatggtagtttcagctacaaaagttgaa

SEQ ID NO: 212003 - DNA, 75 bp, synthetic construct
  source 1..75: mol_type = other DNA
cgatcgagaaagacgagatgaaccgcgtgttcatcttcgggaaagtcatcgggagcatgccgcagacatatagaa

SEQ ID NO: 212004 - DNA, 75 bp, synthetic construct
  source 1..75: mol_type = other DNA
atgcttaatggaattagtaacgctgtttctacactagggcggcatcttactggggtcgcaagtcgagtgagttct

SEQ ID NO: 212005 - DNA, 75 bp, synthetic construct
  source 1..75: mol_type = other DNA
acgggacatcttataaggcaccaaatctggggcaactgtatggcttctacggaaatccgaatctggacccggaga

SEQ ID NO: 212006 - DNA, 75 bp, synthetic construct
  source 1..75: mol_type = other DNA
atgagaaatgacggtcaacaatcagggaagcctgctgtcagccattccaaatacttcaagattgacgttcttgat

SEQ ID NO: 212007 - DNA, 75 bp, synthetic construct
  source 1..75: mol_type = other DNA
gtttgacgatgctcgtcacatgttcgatggcaggaaggcggaaaatatccgcatcattaacgtacgcggtgacag

SEQ ID NO: 212008 - DNA, 75 bp, synthetic construct
  source 1..75: mol_type = other DNA
cgatcgagaaagacgagatgaaccgggtattcatattcggtaaggttattgggagcatgccgcagacgtacagaa

SEQ ID NO: 212009 - DNA, 75 bp, synthetic construct
  source 1..75: mol_type = other DNA
actggccgccacaccgaaagcggtcaaggctgcatacgacctggcagccggcaaggcgcctgccagccacactca

SEQ ID NO: 212010 - DNA, 75 bp, synthetic construct
  source 1..75: mol_type = other DNA
aactagtaaatcttttcatgataatccagctatatctgtatcagatagtcaagcaacagtgacttggagttttga

SEQ ID NO: 212011 - DNA, 75 bp, synthetic construct
  source 1..75: mol_type = other DNA
taatgtgagcgaaggttccgtctgtgcagcatgtacgcctgatggtgacatttggattgccttcgcaatagaccg

SEQ ID NO: 212012 - DNA, 75 bp, synthetic construct
  source 1..75: mol_type = other DNA
gccagcttggtcacaatgtaattgaatctttgctgcaaaccgtttctgccagccaaatagtggctatcgcacgta

SEQ ID NO: 212013 - DNA, 75 bp, synthetic construct
  source 1..75: mol_type = other DNA
cattcactacttttttgacaagcaatcatgcgtcatggaataagttgacccgaactcttcatatatcgaatgacg

SEQ ID NO: 212014 - DNA, 75 bp, synthetic construct
  source 1..75: mol_type = other DNA
ttaaatcaacggctgctggacgctaccagattctttcccggtggtgggatgcttactgtaaacagcttggtttga

SEQ ID NO: 212015 - DNA, 75 bp, synthetic construct
  source 1..75: mol_type = other DNA
agaacggatgtaccgacgcgatatacaactcgcgctaaaacaggagaaggacagaacaaacgaaacagcaatgag

SEQ ID NO: 212016 - DNA, 75 bp, synthetic construct
  source 1..75: mol_type = other DNA
gcgcaaaactggttccgtggtaacgatatgggcagctatgcagccaatgtggaagtcatgagccgcgtgtatggt

SEQ ID NO: 212017 - DNA, 75 bp, synthetic construct
  source 1..75: mol_type = other DNA
tgtttgcctgggtcagcaacctaattgagctgaacaatcttcacacctttgcggcaaaccacagccaccaaaatg

SEQ ID NO: 212018 - DNA, 75 bp, synthetic construct
  source 1..75: mol_type = other DNA
tacctatcaaaatctgagcgaagccgatttcgctgcggcgctgaaaagcgtcggactgcctgatggactggcgga

SEQ ID NO: 212019 - DNA, 75 bp, synthetic construct
  source 1..75: mol_type = other DNA
accattccgcaaagccacatatacccacttccctgaaattgacccgcgcctgcgtaattatagatcacgctatgg

SEQ ID NO: 212020 - DNA, 75 bp, synthetic construct
  source 1..75: mol_type = other DNA
tggcttgcagagaaagaagaacgcgagcgaatttaccagacatcaatccgaccattccgtaaagccacatatacc

SEQ ID NO: 212021 - DNA, 75 bp, synthetic construct
  source 1..75: mol_type = other DNA
atgatatttgatgctagtttaaagaagttgaggaaattatttgtaaatccaattgggtttttccgtgactcatgg

SEQ ID NO: 212022 - DNA, 75 bp, synthetic construct
  source 1..75: mol_type = other DNA
tctgccgtggttcgagcgcttgtggtatgcgctggcaaaccatccgattctgctggcggtgctggcggcaatcag

SEQ ID NO: 212023 - DNA, 75 bp, synthetic construct
  source 1..75: mol_type = other DNA
accgcctgctgctgcgtattccggtattacaaggtttgctggatggcaaaacggatgtctctattccggcgctga

SEQ ID NO: 212024 - DNA, 75 bp, synthetic construct
  source 1..75: mol_type = other DNA
tgctggcggtactggcggcaatcagtgtggtattgctggcctgggtactgtggcgtctgctgcgaattatcagcc

SEQ ID NO: 212025 - DNA, 75 bp, synthetic construct
  source 1..75: mol_type = other DNA
acgatagcggcaaacgcgccaccatgttcggctcggtagccgtgatccgtgaatctggcgttaacagtttgcgtg

SEQ ID NO: 212026 - DNA, 75 bp, synthetic construct
  source 1..75: mol_type = other DNA
ctgcaatccttcaatctgagtagcaaacaggaggcaaatcgcctgctgctgcgtatacctgtgttacaaggcttg

SEQ ID NO: 212027 - DNA, 75 bp, synthetic construct
  source 1..75: mol_type = other DNA
ggcgacgactctaccatcgacttctcgaagtattaccacttcatcccgatgccggatctgcgcgcgtttgccaat

SEQ ID NO: 212028 - DNA, 75 bp, synthetic construct
  source 1..75: mol_type = other DNA
gaagggatgtttgacagctgcactgccgtgaccacgttcagtaatgccttttatggctgcacggctctgacagca

SEQ ID NO: 212029 - DNA, 75 bp, synthetic construct
  source 1..75: mol_type = other DNA
tcaacttctttcacgctggtgggatgcttaccgcaagcagcttgggctgaaagactttgaagtggtcaacaaaaa

SEQ ID NO: 212030 - DNA, 75 bp, synthetic construct
  source 1..75: mol_type = other DNA
tggttgtggatgacttttccaccatgcgacgcattgtgcgtaacctgctgaaagagctgggtttcaacaatgttg

SEQ ID NO: 212031 - DNA, 75 bp, synthetic construct
  source 1..75: mol_type = other DNA
ttcagggcaaagatgccgacatcatgatcatcggtggtatcccggacaaactgaaagacgataagcagatcgacc

SEQ ID NO: 212032 - DNA, 75 bp, synthetic construct
  source 1..75: mol_type = other DNA
ttaaatcaacagccgctggacgctatcagcttctttcacgctggtgggatgcttatcgtaagcagcttgggctga

SEQ ID NO: 212033 - DNA, 75 bp, synthetic construct
  source 1..75: mol_type = other DNA
acggataaagggcactgttgcaaagttagcgatgaggcagccttttgtcttattcaaaggccttacatttcaaaa

SEQ ID NO: 212034 - DNA, 75 bp, synthetic construct
  source 1..75: mol_type = other DNA
ggcaacacgggactggttaaacgtaacgcccgcccagcgagctggcgtgttggcactcaatatccagcgattacg

SEQ ID NO: 212035 - DNA, 75 bp, synthetic construct
  source 1..75: mol_type = other DNA
gcagcaactggcggaagtggcgattgccggttttcagccgcagtttaataaatgggtagagttactgactgatcc

SEQ ID NO: 212036 - DNA, 75 bp, synthetic construct
  source 1..75: mol_type = other DNA
gttcagcgttatgcgcctgaaatggaaaaacggctgcgggccgtcgacagccggggccgcactgtcgatttttat

SEQ ID NO: 212037 - DNA, 75 bp, synthetic construct
  source 1..75: mol_type = other DNA
cagcgatgtctttgcactgatagacgcaggcgcagacggctatctgctaaaagacagcgacccggaagtattgct

SEQ ID NO: 212038 - DNA, 75 bp, synthetic construct
  source 1..75: mol_type = other DNA
ctggatatcgacgtgatcttgctggatctcaatatgaaaggtatgagtggcctggataccctcaatgccttgcgc

SEQ ID NO: 212039 - DNA, 75 bp, synthetic construct
  source 1..75: mol_type = other DNA
gtctgcccgcaggcggcacttctgccactgatctggcggtggagctgaacggcatgacgtatcaggcctgccgtg

SEQ ID NO: 212040 - DNA, 75 bp, synthetic construct
  source 1..75: mol_type = other DNA
gctggcagaacaggaccgcctccgggcaaaacagcgcgcggcagaagtcgtcgtactgccgctggtcccggcatc

SEQ ID NO: 212041 - DNA, 75 bp, synthetic construct
  source 1..75: mol_type = other DNA
gcagaacaggaccgcctccgggcagaagagcgcgcggcggaagttgtcgtaatgccgctgatcccgttgtcagtt

SEQ ID NO: 212042 - DNA, 75 bp, synthetic construct
  source 1..75: mol_type = other DNA
cgtcggatttggcaaatatgctgctgcaggatgctggctggaatgataagcgtatctccgatgctctgaagcggg

SEQ ID NO: 212043 - DNA, 75 bp, synthetic construct
  source 1..75: mol_type = other DNA
ggtgctgcacggtatcgatctggaggtcaacaccggcgaagtggtggcaattatcggcccgagtggttccggcaa

SEQ ID NO: 212044 - DNA, 75 bp, synthetic construct
  source 1..75: mol_type = other DNA
gtttgatgagccaacgtcagcgctggatccagagctggtgggcgaagtcctgaacaccattcgtcaactggcgca

SEQ ID NO: 212045 - DNA, 75 bp, synthetic construct
  source 1..75: mol_type = other DNA
ttcatcaacacggataaagcgcccgcctatggtcgcgcgcttgctctgctcaaacgcgaaggccggtgcccgtct

SEQ ID NO: 212046 - DNA, 75 bp, synthetic construct
  source 1..75: mol_type = other DNA
accattccgcaaatccacatatacccacttccctgaatatatcgacccgcgcctgcgtaattaccgctcacgcta

SEQ ID NO: 212047 - DNA, 75 bp, synthetic construct
  source 1..75: mol_type = other DNA
atgcaaacagaagctgaagtcttaaccgatcataacgagctaatttgctcgaccagtattgagcgcatcgtcaca

SEQ ID NO: 212048 - DNA, 75 bp, synthetic construct
  source 1..75: mol_type = other DNA
cgatctcatgctgaagtccgggatgttgactctgatggatgccgaagcccgcagtcagtgggcaaagaacctgga

SEQ ID NO: 212049 - DNA, 75 bp, synthetic construct
  source 1..75: mol_type = other DNA
ataaagatgaatggtactaccctgcagtagatcaagcgctgaacttagatactttgctggataacctgcgtactt

SEQ ID NO: 212050 - DNA, 75 bp, synthetic construct
  source 1..75: mol_type = other DNA
ttataaggctttgagccaaaatcaggaacccgtgttaacacctgagcaacagaaaggacttgtagacaaaggcat

SEQ ID NO: 212051 - DNA, 75 bp, synthetic construct
  source 1..75: mol_type = other DNA
atgacgcgcgccgctgttccggcaattccgtatcggaggtgctggataaattcaggaaaaactacaaccggataa

SEQ ID NO: 212052 - DNA, 75 bp, synthetic construct
  source 1..75: mol_type = other DNA
ctcatttggctatctgcaaatcgccattggttttattccgatgctctatttcgtgttaggggcactctcctacat

SEQ ID NO: 212053 - DNA, 75 bp, synthetic construct
  source 1..75: mol_type = other DNA
cgatatggagcacctgaaacagtcagtcagggacatcctgaccaccccgctggccagccgggttatgcgacggga

SEQ ID NO: 212054 - DNA, 75 bp, synthetic construct
  source 1..75: mol_type = other DNA
tggccagccgggttatgcgacgggaatatggcagccttgtgcctgatttgattgacgaacccatgaataacacca

SEQ ID NO: 212055 - DNA, 75 bp, synthetic construct
  source 1..75: mol_type = other DNA
acgccagctcgaacatttcgatttacagtcggaaacgctgatgagcgcaatggctgctatttatgttgatgttat

SEQ ID NO: 212056 - DNA, 75 bp, synthetic construct
  source 1..75: mol_type = other DNA
atgtccttcctgatcgctctggcgctgacggtggtgatttatctgtgtgcttatttcatgctgtttattggctac

SEQ ID NO: 212057 - DNA, 75 bp, synthetic construct
  source 1..75: mol_type = other DNA
cgaagcatccgcgacacacgtcaatgaaatgagtaacccagggcgcgattacccgttagcgatgctgctattgat

SEQ ID NO: 212058 - DNA, 75 bp, synthetic construct
  source 1..75: mol_type = other DNA
actggcaccactggcgaaagccgggcgtatcgaactgccgtcgattccggatagctgcgtgcagaacgcgcatat

SEQ ID NO: 212059 - DNA, 75 bp, synthetic construct
  source 1..75: mol_type = other DNA
tggcgcgatatcggctccagctatttgatgtccgatctgcaagctgcatacctgtgggcgcaactggaagcagcg

SEQ ID NO: 212060 - DNA, 75 bp, synthetic construct
  source 1..75: mol_type = other DNA
cctgatcagcgacaacaatagggataagctctatgtcaatatacggcctatggataactccgcctggacgaccga

SEQ ID NO: 212061 - DNA, 75 bp, synthetic construct
  source 1..75: mol_type = other DNA
ggggtatccgtcatatcgttgttattagttaatatcattcctcaaaacttcaaacatattctggtcttttggcgg

SEQ ID NO: 212062 - DNA, 75 bp, synthetic construct
  source 1..75: mol_type = other DNA
tgcgggggaacgctttggtgagttccacggtgaagatcgctacaccaccaaagagagcgagcgcctgctgcgcct

SEQ ID NO: 212063 - DNA, 75 bp, synthetic construct
  source 1..75: mol_type = other DNA
gttctacattaagctgcgggataatgatgaccggagcgcattgattaacttcctgaaagaagcggaaattatggc

SEQ ID NO: 212064 - DNA, 75 bp, synthetic construct
  source 1..75: mol_type = other DNA
atgtcatcaatatcacatggcgcaccacaaaagcgtcgaattatccctaatcccggcctgtggttggcgatcatt

SEQ ID NO: 212065 - DNA, 75 bp, synthetic construct
  source 1..75: mol_type = other DNA
gggatttctatctgcgggtggggtttgagccgtcaccgatggatccgatgatgttgctggtgacgttgggggatt

SEQ ID NO: 212066 - DNA, 75 bp, synthetic construct
  source 1..75: mol_type = other DNA
tagtacttggtcgtctggcaatagataaatcattacagggtcagggcatcggtcgtgcgatggtcagagatgccg

SEQ ID NO: 212067 - DNA, 75 bp, synthetic construct
  source 1..75: mol_type = other DNA
tgtatcaccaaatctaccggacctggtattaagtgtggggcagatgaatactccggttctgtctaatcccgaaat

SEQ ID NO: 212068 - DNA, 75 bp, synthetic construct
  source 1..75: mol_type = other DNA
cgctgtggaaccgcgccagtcgttccgggacccgatggttaccgaatctgacgtcatcctggcgaacgacgttcg

SEQ ID NO: 212069 - DNA, 75 bp, synthetic construct
  source 1..75: mol_type = other DNA
gcatgaccattctgctcgccttcagtgtcagttttggcttcatcctgccgattaacgcgccacaaaatatggtgt

SEQ ID NO: 212070 - DNA, 75 bp, synthetic construct
  source 1..75: mol_type = other DNA
atttgcccggtcaaggggaaagaacagcgatgaccccaaacggggaaatgtattatcctgatgctgtttatagtt

SEQ ID NO: 212071 - DNA, 75 bp, synthetic construct
  source 1..75: mol_type = other DNA
atgaacccgttatttaacgatattcagatgcgtctttttcatcttaatcattctccgtattcctggcactggaat

SEQ ID NO: 212072 - DNA, 75 bp, synthetic construct
  source 1..75: mol_type = other DNA
tatcaccattacctgtaatcagtccggttttcatttaaccagggacggacaacggctgttcactgagcgttatat

SEQ ID NO: 212073 - DNA, 75 bp, synthetic construct
  source 1..75: mol_type = other DNA
ggtttgcccgcaaggatgagttcccggcaggaaaactcggtgagctaatgcaaatcacgctgctgattaaaaccg

SEQ ID NO: 212074 - DNA, 75 bp, synthetic construct
  source 1..75: mol_type = other DNA
ccgtatatattggcaacgatacctgtcatatcaccattacctgtaatcagtcaggttttcatttaaccagggacg

SEQ ID NO: 212075 - DNA, 75 bp, synthetic construct
  source 1..75: mol_type = other DNA
aatgtcagattcagaccccaggaagccgtatatattggcaacgatacctgtcatatcaccattacctgtaatcag

SEQ ID NO: 212076 - DNA, 75 bp, synthetic construct
  source 1..75: mol_type = other DNA
gtcagattcagacctcaggaagccgtatatattggcaacgatacctgtcatatcaccattacctgtaatcagtct

SEQ ID NO: 212077 - DNA, 75 bp, synthetic construct
  source 1..75: mol_type = other DNA
caaatgacggccatgaaaaaataattgatctaagtccagttaatgatttagctaaaattacaaaatcattgcgta

SEQ ID NO: 212078 - DNA, 75 bp, synthetic construct
  source 1..75: mol_type = other DNA
attacgcagcatggtactcaaaaaacggcaattgtagtgcagagacagtcgcaaatggctattcgcgtgacacaa

SEQ ID NO: 212079 - DNA, 75 bp, synthetic construct
  source 1..75: mol_type = other DNA
ttagctaattcagaatataacttcgcggtaaatgaattgagtaagtcttcatttaatcaggcagccataattggt

SEQ ID NO: 212080 - DNA, 75 bp, synthetic construct
  source 1..75: mol_type = other DNA
gagtctacggagcttggacctttaagctcgctggcgcatctcgaacgcgtcagcaaggcggtagaagaggcgaaa

SEQ ID NO: 212081 - DNA, 75 bp, synthetic construct
  source 1..75: mol_type = other DNA
attcattctggcgaaactgctgtcgacgggcgggcagagtgtggcgtatttcacggagcttgcggcgacgatggg

SEQ ID NO: 212082 - DNA, 75 bp, synthetic construct
  source 1..75: mol_type = other DNA
caatacccagaaattctgatttattatggtgttaaaggttcaggaataaatagagttgatgggtggtttttctca

SEQ ID NO: 212083 - DNA, 75 bp, synthetic construct
  source 1..75: mol_type = other DNA
atgcagatactaaattcccagcgtaaagctttcctcgatatggttgcctggtcagaaggaacggataacgggaga

SEQ ID NO: 212084 - DNA, 75 bp, synthetic construct
  source 1..75: mol_type = other DNA
tatcgagagcatttcagataaaataaagaaatatttagaaagctattatgatgttatattgctatgggaaacacc

SEQ ID NO: 212085 - DNA, 75 bp, synthetic construct
  source 1..75: mol_type = other DNA
tgctttcatgttatggctaggacgcaaagctaaacaagataatatttctcacttatatttcctgtcacgtgaagg

SEQ ID NO: 212086 - DNA, 75 bp, synthetic construct
  source 1..75: mol_type = other DNA
aacttctttcgcgctggtgggatgcttaccgcaagcagttagggctgacagacttctctcctaaaagccaggatg

SEQ ID NO: 212087 - DNA, 75 bp, synthetic construct
  source 1..75: mol_type = other DNA
caaccgacacgtaaccacggttatgacgttattgtcggtggcgaactcttcactgattactccgatcaccctcgc

SEQ ID NO: 212088 - DNA, 75 bp, synthetic construct
  source 1..75: mol_type = other DNA
cgaccgttgcagcaatatctgggcgtcgttaccaggtgcaggttacggtcagtatgaacataaaatcggcgacct

SEQ ID NO: 212089 - DNA, 75 bp, synthetic construct
  source 1..75: mol_type = other DNA
tgcaggcgaccgaaagctgggtgaaaacgccgatgcgccagaccccgttccccggcattgtgccggacgagagcg

SEQ ID NO: 212090 - DNA, 75 bp, synthetic construct
  source 1..75: mol_type = other DNA
cgctgtggcactgcaacagattaaagagcgtggcgctttaccgatgattgatcgcggtgatatccgtcaggctat

SEQ ID NO: 212091 - DNA, 75 bp, synthetic construct
  source 1..75: mol_type = other DNA
gagaataaagtggctgaaaaattcaagtttctggtagagtctgcaattgaagatcttcagcctttctctcgacat

SEQ ID NO: 212092 - DNA, 75 bp, synthetic construct
  source 1..75: mol_type = other DNA
ggtggacgccacggtccggcggcgatccgtcaggtttcgacgaatctggcctgggaacacaaccgcttcccgtgg

SEQ ID NO: 212093 - DNA, 75 bp, synthetic construct
  source 1..75: mol_type = other DNA
gactaccagcagcccgcacagcaactaccaggtcgttataacaaggctgcagcggatgcactggctgcagtatat

SEQ ID NO: 212094 - DNA, 75 bp, synthetic construct
  source 1..75: mol_type = other DNA
ctcaggttgaacgtgtagtttgctcaattactgcggctataaaatatcaggttccggctaacatcatgttagccg

SEQ ID NO: 212095 - DNA, 75 bp, synthetic construct
  source 1..75: mol_type = other DNA
gtggcaaagaattactatgacatcaccctcgccctggccggtatttgtcagtcggcacgcctggtgcaacaactc

SEQ ID NO: 212096 - DNA, 75 bp, synthetic construct
  source 1..75: mol_type = other DNA
taaaaacaatcaagcgaacaatgccagaactcataaataacaaacttatcgacgttaaggcggtggcgggcaaat

SEQ ID NO: 212097 - DNA, 75 bp, synthetic construct
  source 1..75: mol_type = other DNA
cactttgttacgctgccgctgctgcgtgctcatgcgaagcatttcggtaaaatggcgctggtacactttgacgcc

SEQ ID NO: 212098 - DNA, 75 bp, synthetic construct
  source 1..75: mol_type = other DNA
ttttattgttaacccgactcgcgaagatgccttattattaagaggtcatcaatttgaggatgcccttggcggagt

SEQ ID NO: 212099 - DNA, 75 bp, synthetic construct
  source 1..75: mol_type = other DNA
cgagtgttattagaatcaatccatcgaggtacaatgctttttgcgaaagattttatagaatctttcggtagctat

SEQ ID NO: 212100 - DNA, 75 bp, synthetic construct
  source 1..75: mol_type = other DNA
aaactatgggagatagcaaaaaaaacaaaaaaacctataattataatatcagatatgtatttgtcatctaatgat

SEQ ID NO: 212101 - DNA, 75 bp, synthetic construct
  source 1..75: mol_type = other DNA
ctttaatacgtttgacacaacgaaacctgcaggaacgactactccacagcctcaacaggcgacggttggagttac

SEQ ID NO: 212102 - DNA, 75 bp, synthetic construct
  source 1..75: mol_type = other DNA
gctggcaaaaagttatgggatatagcaaagaaaacaggaaagcctatatacataatttcagatatgtacctaccc

SEQ ID NO: 212103 - DNA, 75 bp, synthetic construct
  source 1..75: mol_type = other DNA
taacaaagaagtctctgatattgccacgcacttgtgcgattaccttgattcagaatacgacgtaataatgctttg

SEQ ID NO: 212104 - DNA, 75 bp, synthetic construct
  source 1..75: mol_type = other DNA
gcagaacagcgcgcggcggaagttgtcgtactgccgctggtcccggcatcagctctgcccgcagacggcacttct

SEQ ID NO: 212105 - DNA, 75 bp, synthetic construct
  source 1..75: mol_type = other DNA
atcagtggcgcacgccggacaacattttctggggaattaacaccctgtttggcccgtttgttctggatctgttca

SEQ ID NO: 212106 - DNA, 75 bp, synthetic construct
  source 1..75: mol_type = other DNA
tggaagtgcgagacaatcttgagcgccgggcttatgaaattgctctggcatcgctggaagcagtatcggatgaac

SEQ ID NO: 212107 - DNA, 75 bp, synthetic construct
  source 1..75: mol_type = other DNA
tggcaataaatgacatgacgattagtgaacatatttcagctgagtttttatcacagcatattgattttattcagg

SEQ ID NO: 212108 - DNA, 75 bp, synthetic construct
  source 1..75: mol_type = other DNA
tattcgcgggcgtattggttttgaactgcctgcctggtttatcccgaaggatgagaagcaggtgccgacaggagc

SEQ ID NO: 212109 - DNA, 75 bp, synthetic construct
  source 1..75: mol_type = other DNA
aagccagcagcctggccgagcacaagcttcaggacgtgcgcgaaaaaatgaccgacctggcgcgcatggaaaccg

SEQ ID NO: 212110 - DNA, 75 bp, synthetic construct
  source 1..75: mol_type = other DNA
gccagcaggttcgccattccctgttaggttatctcggagtggtcgtggatatcgacccggtttactcgctctctg

SEQ ID NO: 212111 - DNA, 75 bp, synthetic construct
  source 1..75: mol_type = other DNA
accgcttcggcgcggtgaatgagctgggtgtcttcgcaatgaccgagcaggggctgcgtgaagtcagcaaccctt

SEQ ID NO: 212112 - DNA, 75 bp, synthetic construct
  source 1..75: mol_type = other DNA
accgcttcggcgcggtgaatgagctgggcgtcttcgcgatgaccgaacaggggctgcgtgaagttagcaaccctt

SEQ ID NO: 212113 - DNA, 75 bp, synthetic construct
  source 1..75: mol_type = other DNA
caaactggcccagcagatgaaaacgctgtatgtcaccggcgaagagtcgctgcaacaggtggcaatgcgcgctca

SEQ ID NO: 212114 - DNA, 75 bp, synthetic construct
  source 1..75: mol_type = other DNA
caattggctctgccaatatagatatagccggatattcgtatgcttccttaaattacgccgactctaaccccggga

SEQ ID NO: 212115 - DNA, 75 bp, synthetic construct
  source 1..75: mol_type = other DNA
gacggtggtaacgccaaatgtgccgcgtattacacggcggaagacaatgcgctggcgcatgactggtcagaacgt

SEQ ID NO: 212116 - DNA, 75 bp, synthetic construct
  source 1..75: mol_type = other DNA
cgttctcaacaatgcacagtctggtcatcgggcagatcaagacggataagaaatccaatgagatcacagctatcc

SEQ ID NO: 212117 - DNA, 75 bp, synthetic construct
  source 1..75: mol_type = other DNA
ccatgaactgaaggaagtgggcgatcagtggcgcacgccggacaacattttctggggaattaacaccttgtttgg

SEQ ID NO: 212118 - DNA, 75 bp, synthetic construct
  source 1..75: mol_type = other DNA
aaaatgggatggttgtgaatgtcattgtctgggatggcgaggctgaattcactgtgccggataatctgcagctca

SEQ ID NO: 212119 - DNA, 75 bp, synthetic construct
  source 1..75: mol_type = other DNA
ccgtgctggattacattgacgcggtgacggcaacagataccagcactgcgccggatgtcatctggcctgaactgc

SEQ ID NO: 212120 - DNA, 75 bp, synthetic construct
  source 1..75: mol_type = other DNA
attcagtgacagaacaactgattatgacaggaataaaccggatacgccagaaaataaatgttcatggtattcctt

SEQ ID NO: 212121 - DNA, 75 bp, synthetic construct
  source 1..75: mol_type = other DNA
atctggctgttactaccattgccttcctctactgcatttgggccgtggtggggtccggggcgaaagaggttatgt

SEQ ID NO: 212122 - DNA, 75 bp, synthetic construct
  source 1..75: mol_type = other DNA
tccagctcagcagcatttcaccaaacgcgaccaaagagttcggtctggtttcttccgtctcggtcatctttacac

SEQ ID NO: 212123 - DNA, 75 bp, synthetic construct
  source 1..75: mol_type = other DNA
gaggctgtgacggcaacagataccagcattgcaccggatattgagtggccggatgaaccgtgcttcgctgaataa

SEQ ID NO: 212124 - DNA, 75 bp, synthetic construct
  source 1..75: mol_type = other DNA
acttgaggcatgtggtgaggcgtttctggcgcagattcgccagcaggcagaaaaacttgtcagggagatggcggc

SEQ ID NO: 212125 - DNA, 75 bp, synthetic construct
  source 1..75: mol_type = other DNA
atagcgccatcatccctctgatagcgctcgtttttatcatactttatgtggttaagttttacaccactaacagtg

SEQ ID NO: 212126 - DNA, 75 bp, synthetic construct
  source 1..75: mol_type = other DNA
acttgaggcatgtggtgaggcctttctggtgcaggttcgccagcaggcggaaaaactggtcagggagatggcggc

SEQ ID NO: 212127 - DNA, 75 bp, synthetic construct
  source 1..75: mol_type = other DNA
caagacccgacgttactgaacgctctggccagtgcaccaaaacctgtcactcaacaggaaagtgtcttatcaggt

SEQ ID NO: 212128 - DNA, 75 bp, synthetic construct
  source 1..75: mol_type = other DNA
tttcttcgctggtgctattgctgttttcgacaagacctggaagggatcggcaatcagctacatcgggcgcgatga

SEQ ID NO: 212129 - DNA, 75 bp, synthetic construct
  source 1..75: mol_type = other DNA
atgagtaataaatattgccaggcgctggttgaactgcggaacaaaccagcccatgaactgaaggaagtgggtgat

SEQ ID NO: 212130 - DNA, 75 bp, synthetic construct
  source 1..75: mol_type = other DNA
ggaggcctggcgggcgctgcaggtttttatgtcgcgctattcccttaaacgtattgatgtcggtctggctcaggt

SEQ ID NO: 212131 - DNA, 75 bp, synthetic construct
  source 1..75: mol_type = other DNA
gctgtgctgggaaatggcttgcgaattcgacgcgatgggtgcgctgtctactaaatacaacgacaccccggaaaa

SEQ ID NO: 212132 - DNA, 75 bp, synthetic construct
  source 1..75: mol_type = other DNA
cgatgcacggtgttgataccccaatcgactacctgaactctcacggtacttcgactccggttggcgacgtgaaag

SEQ ID NO: 212133 - DNA, 75 bp, synthetic construct
  source 1..75: mol_type = other DNA
gcgcgctggcgctgggcttactgatggcggtcgtccctgacggccatgctgaccagacggtgccggagggttatg

SEQ ID NO: 212134 - DNA, 75 bp, synthetic construct
  source 1..75: mol_type = other DNA
tggcaatgttcatcgcactgccggagtgtctggcggcgcaatctgttccggaaggatatcaccgggttgcgcagg

SEQ ID NO: 212135 - DNA, 75 bp, synthetic construct
  source 1..75: mol_type = other DNA
ggatgcggatttccgccttccgtccgttgcacgtccctggccgtggaccatcaatgtggcgggtaagggctaccg

SEQ ID NO: 212136 - DNA, 75 bp, synthetic construct
  source 1..75: mol_type = other DNA
tgtaggaatcttaacaagagaggtatttggtcttgaagtagttaaatccggttttcacgatttattagtccaatc

SEQ ID NO: 212137 - DNA, 75 bp, synthetic construct
  source 1..75: mol_type = other DNA
cgcctttctttataccaatcaacaaacgctttcagttgggattgtttgcccgctctcttcccttgcacaaagctg

SEQ ID NO: 212138 - DNA, 75 bp, synthetic construct
  source 1..75: mol_type = other DNA
cccaatatcacctgactgcacctcttgagcgacgtatcactcacgaaagcctttccctgttaacacccgatggcg

SEQ ID NO: 212139 - DNA, 75 bp, synthetic construct
  source 1..75: mol_type = other DNA
cagatgctggcctctccccggaagcttaccagaataacccgcgcgttggcctgattgcaggttctggcggcggtt

SEQ ID NO: 212140 - DNA, 75 bp, synthetic construct
  source 1..75: mol_type = other DNA
gaaacgaccgatcgcgaactgaccacagttatgtctaacagcttcggcttcggcggcaccaacgccacgctggta

SEQ ID NO: 212141 - DNA, 75 bp, synthetic construct
  source 1..75: mol_type = other DNA
ctgcttttattcgtgcgctgtctgatttgctacttgacagaaatggtctttctattattgctactcactcacctg

SEQ ID NO: 212142 - DNA, 75 bp, synthetic construct
  source 1..75: mol_type = other DNA
acggtaaattcatcaagcgtacgaccaaactgcacgtacatgacgaaaacaacgaatgcggtatcggtgacgtgg

SEQ ID NO: 212143 - DNA, 75 bp, synthetic construct
  source 1..75: mol_type = other DNA
ccatctcggtgatacagatagaagatcccaacaaaccaggcgaaaaaatgaacctggaaccatttattgaacgag

SEQ ID NO: 212144 - DNA, 75 bp, synthetic construct
  source 1..75: mol_type = other DNA
ccatttcggtgattcagattgatgatcctaacaatcccggcgaaaaaatgagtctggcaccgtttatagagcgag

SEQ ID NO: 212145 - DNA, 75 bp, synthetic construct
  source 1..75: mol_type = other DNA
gaaattgatttacttaatctaatcgaagttttatggcgggccaaaaaaacggtcatggcggtgatgctgccaact

SEQ ID NO: 212146 - DNA, 75 bp, synthetic construct
  source 1..75: mol_type = other DNA
cgtgctggagagtattgggtctatctccctgcctggaacaacggaatgaaacttgcatatgaaagccgtccgaaa

SEQ ID NO: 212147 - DNA, 75 bp, synthetic construct
  source 1..75: mol_type = other DNA
aagattcagaaattcaacattatgtacaagctgaaactaagacgtatgagcgacatcgtcaccctgggtatcaca

SEQ ID NO: 212148 - DNA, 75 bp, synthetic construct
  source 1..75: mol_type = other DNA
aagaatcattgttctggcaccttatcacatcagtaaactgaaaagtcagtcgcctatttattttatcagccgcaa

SEQ ID NO: 212149 - DNA, 75 bp, synthetic construct
  source 1..75: mol_type = other DNA
ccggccgtccgttacaccgccgtggtcagacgtcatctggaccggctgaatgcaaaaagtatgacgtcacagcag

SEQ ID NO: 212150 - DNA, 75 bp, synthetic construct
  source 1..75: mol_type = other DNA
tggccctggacactcaatgtggccgggaaggggtaccgttatgccagccgtctggaggcctggcaggcactgcag

SEQ ID NO: 212151 - DNA, 75 bp, synthetic construct
  source 1..75: mol_type = other DNA
ggctatgtgcaggtggcccgtgcacatgggattccggcagaagtgctgtatgccgtctccctgacagagaccgcc

SEQ ID NO: 212152 - DNA, 75 bp, synthetic construct
  source 1..75: mol_type = other DNA
taaaaacaactaatacaggtgaaccagcgataaacggacgtatagggctgaaacatactcttgtgatgggtcagg

SEQ ID NO: 212153 - DNA, 75 bp, synthetic construct
  source 1..75: mol_type = other DNA
atgtcaagagtgcggtccgtggatacaaccagagaccgactgacacactccggaaaccatcgttttggcctctcg

SEQ ID NO: 212154 - DNA, 75 bp, synthetic construct
  source 1..75: mol_type = other DNA
taaacaggcattacaaattttttcctcacctgtacttttcagaatatgaggaaagcttgtacctcgatggtaata

SEQ ID NO: 212155 - DNA, 75 bp, synthetic construct
  source 1..75: mol_type = other DNA
aacgatgagatttatcgccgtcagcgtgaaatgaaagaggagctgagtggtctggaggatttgggaacaattaga

SEQ ID NO: 212156 - DNA, 75 bp, synthetic construct
  source 1..75: mol_type = other DNA
ttttgaatggaacggtcatagctggaacgggggaccggattcaatggcccgtctttacccggtggtgatgtcagc

SEQ ID NO: 212157 - DNA, 75 bp, synthetic construct
  source 1..75: mol_type = other DNA
atgttacaggcaatggttgtgcatgggttcaggatccatgagcgacagcgacagatgaaagaagatatcgggccc

SEQ ID NO: 212158 - DNA, 75 bp, synthetic construct
  source 1..75: mol_type = other DNA
tcgctggctggccctaaagtgctggaacactgtatcgactgttcggtgcttttggatggcgatgccgactcccgt

SEQ ID NO: 212159 - DNA, 75 bp, synthetic construct
  source 1..75: mol_type = other DNA
ttgtttgtaatgaatgcggggcagattatccgcgctggcaagggcagtgcagcgcctgtcatgcctggaacacca

SEQ ID NO: 212160 - DNA, 75 bp, synthetic construct
  source 1..75: mol_type = other DNA
agatatgcaggctggaaaatggcgctgtggattgtgaggtgttgtttttcggtatggaagagtatttgccttaca

SEQ ID NO: 212161 - DNA, 75 bp, synthetic construct
  source 1..75: mol_type = other DNA
gcgcaagggttttaccgcacaggcgacaatgtcaggctggatgaggtggggaacctgcacgttgaggacgcataa

SEQ ID NO: 212162 - DNA, 75 bp, synthetic construct
  source 1..75: mol_type = other DNA
cgtgcggcaaaaggcggcgtctcaccgcagcaggtggcgcaggcgattgcttttgcgcaggcgcggttggggtaa

SEQ ID NO: 212163 - DNA, 75 bp, synthetic construct
  source 1..75: mol_type = other DNA
cggcgcagcaggggtatgcgaacgccactgaactggcggattacctggtggcgaaaggcgtgccgttccgcgagg

SEQ ID NO: 212164 - DNA, 75 bp, synthetic construct
  source 1..75: mol_type = other DNA
cacgccgtttgtggtgacagaggagatactggaaaaggccagaaatcagaaatacggtgaaatcagtcgctggcg

SEQ ID NO: 212165 - DNA, 75 bp, synthetic construct
  source 1..75: mol_type = other DNA
acgtgcgcaatgcccgttttaatgaagacggcagcattacctgtgaggtgttcatggcagaccgttctgatgaca

SEQ ID NO: 212166 - DNA, 75 bp, synthetic construct
  source 1..75: mol_type = other DNA
tcacggggaaaacctcgcagagctggcccgacagatggcgcacaaacacgcctgcttgcgtcatgttctggtcgc

SEQ ID NO: 212167 - DNA, 75 bp, synthetic construct
  source 1..75: mol_type = other DNA
tgaagtgacctctggcagttcagtgatggtggtatgggaagggacgcgcccgctgctggtggagattcaggcgct

SEQ ID NO: 212168 - DNA, 75 bp, synthetic construct
  source 1..75: mol_type = other DNA
aaggctctcaaagttcctggctatcaggaagcagagcaggccgtactcgaggaaatccccatcgagacacaaaac

SEQ ID NO: 212169 - DNA, 75 bp, synthetic construct
  source 1..75: mol_type = other DNA
agagcaggaccgcctccgggcagaacagcgcgcggcggaagttgtcgtactgccgctggtcccggcatcagctct

SEQ ID NO: 212170 - DNA, 75 bp, synthetic construct
  source 1..75: mol_type = other DNA
ggagggcgatccgctggaagtggcgcagtggctgcaggcatgtcacgatgcaggaatggaggttcgcgtacagat

SEQ ID NO: 212171 - DNA, 75 bp, synthetic construct
  source 1..75: mol_type = other DNA
tagaacgggtgctggagcgaagcggggaagccccggtctacgggccaaacctgcgcgcctcctgccgtcgtctgg

SEQ ID NO: 212172 - DNA, 75 bp, synthetic construct
  source 1..75: mol_type = other DNA
aaagaaggcagggtggtacgcctggagggcgatccgctggaagtggcgcagtggctgcaggcctgtcacgatgca

SEQ ID NO: 212173 - DNA, 75 bp, synthetic construct
  source 1..75: mol_type = other DNA
cgatccgctggaagtggcgcagtggctgcaggcctgtcatgatgcaggaatggaggttcgcgtacagataaatga

SEQ ID NO: 212174 - DNA, 75 bp, synthetic construct
  source 1..75: mol_type = other DNA
tgagatgaagcaaaaactgaatagtctggaggatttgcattcaatcaggaaactggtcgttagctcagaaaaacc

SEQ ID NO: 212175 - DNA, 75 bp, synthetic construct
  source 1..75: mol_type = other DNA
aatggctgcaaaatctgatacggcacgaaccgcccttgtgtggggcgacgctgataatcaacaggtgaaactgtc

SEQ ID NO: 212176 - DNA, 75 bp, synthetic construct
  source 1..75: mol_type = other DNA
cgcacctggaacgctggccccgactcaatggcccgtctttatccggtagtaatggcatcaaagtctgacacagcg

SEQ ID NO: 212177 - DNA, 75 bp, synthetic construct
  source 1..75: mol_type = other DNA
ccaatgactgcgctgccgacgcttattcgccatacgcccgggcaaaaagaaccggtactgcatttttcacatgtc

SEQ ID NO: 212178 - DNA, 75 bp, synthetic construct
  source 1..75: mol_type = other DNA
tcagaaacgcgcattatcttgaaaatggtgcggttgactgcgaggtgttatttgaaggtgaaacggaattcgtcc

SEQ ID NO: 212179 - DNA, 75 bp, synthetic construct
  source 1..75: mol_type = other DNA
cacgttcgaatggaacggtcgtacctggaatgctggtcccgattcgatggctcgcattgcgcccgtggcaatggc

SEQ ID NO: 212180 - DNA, 75 bp, synthetic construct
  source 1..75: mol_type = other DNA
aagctaagcagctcacattactcggattttttgccataacggcatcgatggtaatggctgtttatgaatacccta

SEQ ID NO: 212181 - DNA, 75 bp, synthetic construct
  source 1..75: mol_type = other DNA
ccggaagatgcggatcatattacttttattcgcgggcgtattggttttgaactgcctgactggtttatcccgaag

SEQ ID NO: 212182 - DNA, 75 bp, synthetic construct
  source 1..75: mol_type = other DNA
ccggaagatgctgaacatattacttttattcgcgggcgtattggttttgaactgcctgactggtttatcccgaag

SEQ ID NO: 212183 - DNA, 75 bp, synthetic construct
  source 1..75: mol_type = other DNA
tgatgtggttgacccatctcccgagaaaccgaccgttatgttgcacaacggcaccgcctatcttctcgatcatca

SEQ ID NO: 212184 - DNA, 75 bp, synthetic construct
  source 1..75: mol_type = other DNA
ttgcactggagatgctgttacctgttggactgtatgcgtcagttggcgtgatgctagggcaaatgtataccgact

SEQ ID NO: 212185 - DNA, 75 bp, synthetic construct
  source 1..75: mol_type = other DNA
aaagagctgacaggtaaagctctgtttatggcgcccaggagccagcgcccacctgccgggctaatccaccactct

SEQ ID NO: 212186 - DNA, 75 bp, synthetic construct
  source 1..75: mol_type = other DNA
tatgtcacttccaatctatctggtgcatacaatatgttttctgagttctggaatgttgctgtctcagctgcgcct

SEQ ID NO: 212187 - DNA, 75 bp, synthetic construct
  source 1..75: mol_type = other DNA
gaaaaactagattgacaaaacaaacaacagtctctttaaacaatactgttgatgaatatcaagttggtgctacga

SEQ ID NO: 212188 - DNA, 75 bp, synthetic construct
  source 1..75: mol_type = other DNA
ggtcatttgtcaccctgatggtcatcaccgccatgtatgcgctgaattacaaccggctgcataaaaacccgtatc

SEQ ID NO: 212189 - DNA, 75 bp, synthetic construct
  source 1..75: mol_type = other DNA
ccggaagatgcagaccatatttcttttattcgcgggcgtattggttttgaactgcctgactggtttatcccgaag

SEQ ID NO: 212190 - DNA, 75 bp, synthetic construct
  source 1..75: mol_type = other DNA
ggcgcattccacattgcagaacagcaagttgacggcacaagtgactacatcaaggatggggaatggcctattgat

SEQ ID NO: 212191 - DNA, 75 bp, synthetic construct
  source 1..75: mol_type = other DNA
agttcaggacgcagagccaaacttcgatgtaaatggcaactctccggtaattccggatggttgggttatggtgcc

SEQ ID NO: 212192 - DNA, 75 bp, synthetic construct
  source 1..75: mol_type = other DNA
cccggactcatgctaatgggcctgctgatgctggtcgcacgcgacttctctttgctgcagaaattttcccgatga

SEQ ID NO: 212193 - DNA, 75 bp, synthetic construct
  source 1..75: mol_type = other DNA
tgcaggatgcgcttaagcgtctggatgtcagcccgctaggctgtggcgcgctggcgggaacggcctatgaaatcg

SEQ ID NO: 212194 - DNA, 75 bp, synthetic construct
  source 1..75: mol_type = other DNA
accgcagaagagcaggcgcaactggaagaggcgctgaacgtgttgctggaagatgttcgcgccaggccacaacaa

SEQ ID NO: 212195 - DNA, 75 bp, synthetic construct
  source 1..75: mol_type = other DNA
ccagcgtgagatgaaggaagaactgaataatctggaggatttacgctcaatcagagcgatgacgattagcagtaa

SEQ ID NO: 212196 - DNA, 75 bp, synthetic construct
  source 1..75: mol_type = other DNA
ttgtcggctctgtagcctggtccaaagccctggtaacggtaggtgtgttgaccgcagaagagcaggtgcaactag

SEQ ID NO: 212197 - DNA, 75 bp, synthetic construct
  source 1..75: mol_type = other DNA
ctcaggcagcagatcaacggttcaaacaatttaatgactcattgcgctttgattaccgtctggcggagcaggata

SEQ ID NO: 212198 - DNA, 75 bp, synthetic construct
  source 1..75: mol_type = other DNA
atgccgggttacactcacctgcaacgcgcccagccggtgacgttcgcgcactggtgcctggcctacgttgagatg

SEQ ID NO: 212199 - DNA, 75 bp, synthetic construct
  source 1..75: mol_type = other DNA
atggaagacgactgcgacattattattattggtgccggtattgcaggcaccgcttgcgcgttacgctgcgcgcga

SEQ ID NO: 212200 - DNA, 75 bp, synthetic construct
  source 1..75: mol_type = other DNA
attcctggtttgtggttagtgcccggactcatgctaataggtctgttgatgctggttgctcgcgacttctctttg

SEQ ID NO: 212201 - DNA, 75 bp, synthetic construct
  source 1..75: mol_type = other DNA
cacgtattttccgcgcccgttcggtcgatgtggtcgacccatcacccgagaaacctaccgttatgttgcataacg

SEQ ID NO: 212202 - DNA, 75 bp, synthetic construct
  source 1..75: mol_type = other DNA
ttgccgaagccgaaaaagaaggtgtcgaatgcatccccggagcgacggtggatgcactgtatgaagaaaacggca

SEQ ID NO: 212203 - DNA, 75 bp, synthetic construct
  source 1..75: mol_type = other DNA
ttattggtgccggtatagcaggtaccgcttgtgctttacgctgcgcgcgggcaggtttgtccgttctgttactgg

SEQ ID NO: 212204 - DNA, 75 bp, synthetic construct
  source 1..75: mol_type = other DNA
ggcgcagcgttgttgttcagcggcgggatctgtgatgacttacccgcggcgcatttctttatactaatcaacaaa

SEQ ID NO: 212205 - DNA, 75 bp, synthetic construct
  source 1..75: mol_type = other DNA
tggccccggcgctggcggcagggaactgcgtagtgcttaagccatcagaaattaccccgctgaccgcgttgaaac

SEQ ID NO: 212206 - DNA, 75 bp, synthetic construct
  source 1..75: mol_type = other DNA
tggctccggcgctggcggcggggaactgcgtagtgcttaaaccatcagaaattacaccgctgactgcgttgaaac

SEQ ID NO: 212207 - DNA, 75 bp, synthetic construct
  source 1..75: mol_type = other DNA
gctgcatagtgcgttcaatgatgaaattccggcgattgtcgatgtctttcgctttttcgccggggcggcgcgctg

SEQ ID NO: 212208 - DNA, 75 bp, synthetic construct
  source 1..75: mol_type = other DNA
aataacattaaaaaatcaactgttatcgtcaaaaaccctacgcatattgcaatttgtctgtactataaactcggt

SEQ ID NO: 212209 - DNA, 75 bp, synthetic construct
  source 1..75: mol_type = other DNA
gttgctgtgccagccttttattcatggtcaatgagtgaggtgattgataaagacaccaggtcgtcagagcgcact

SEQ ID NO: 212210 - DNA, 75 bp, synthetic construct
  source 1..75: mol_type = other DNA
cggtagaagaggcgaaagcgacagggcacatcaaagtgatcaccggtggtgaaaagcgcaagggtaatggctatt

SEQ ID NO: 212211 - DNA, 75 bp, synthetic construct
  source 1..75: mol_type = other DNA
gctcaaccagctgcctgcaacggttgaccgcgcttcaattgaactgaagtttgatgccgccaaaggcaagctgac

SEQ ID NO: 212212 - DNA, 75 bp, synthetic construct
  source 1..75: mol_type = other DNA
gcaaacgcggcttgcatcgtaaagaagatgaaaaggaatataatgataaattaatggggatgctggtcaagctta

SEQ ID NO: 212213 - DNA, 75 bp, synthetic construct
  source 1..75: mol_type = other DNA
taaaactggattatccaaatcagcaatatatgataaaattcgcaaggcattaaattcgatttattatacggaatg

SEQ ID NO: 212214 - DNA, 75 bp, synthetic construct
  source 1..75: mol_type = other DNA
tttgtcagttccatcaacgccatcatgctggcgatgaatcgcggcgaatacaccattgccaaaaccgccgtttct

SEQ ID NO: 212215 - DNA, 75 bp, synthetic construct
  source 1..75: mol_type = other DNA
cagacagtttcgaccaaaacattgccatcaatacccgcgcgccgttcttcctcgctcaggcattcagtaaacgtc

SEQ ID NO: 212216 - DNA, 75 bp, synthetic construct
  source 1..75: mol_type = other DNA
tggcgatctctccctgcatgaagagatgctcgacgcggcgcaaaatcagtgggggcgtctggactgcctgctcaa

SEQ ID NO: 212217 - DNA, 75 bp, synthetic construct
  source 1..75: mol_type = other DNA
gcagatcatcaaactagcggagcgctatgatattccagtgattgaagatatccctcttgcaagaagcctctataa

SEQ ID NO: 212218 - DNA, 75 bp, synthetic construct
  source 1..75: mol_type = other DNA
aaaacaaacgttgccatttgtattcaagacaatctcgcttattacatgcggacaagtaattcactctctgctaat

SEQ ID NO: 212219 - DNA, 75 bp, synthetic construct
  source 1..75: mol_type = other DNA
tttcggtgagcgtaacggggcatgatgccagcaacgatagcaccagcgcgcccgttgccacggatgtttcctccg

SEQ ID NO: 212220 - DNA, 75 bp, synthetic construct
  source 1..75: mol_type = other DNA
ttcagtatgggcgacgacgccttttccgccaccggcaccttcgaactgacgatgggcgacagcaccatggatatc

SEQ ID NO: 212221 - DNA, 75 bp, synthetic construct
  source 1..75: mol_type = other DNA
tcgccagcgatgagcatcatgcacgtctttcactggtccatgaatatgtgctttgccttgctgctcgcctgcctg

SEQ ID NO: 212222 - DNA, 75 bp, synthetic construct
  source 1..75: mol_type = other DNA
gaacctggtcgtcagagcgtactgattatccgcattacgccagtcaagtcgcactggctgttgctggcggagagg

SEQ ID NO: 212223 - DNA, 75 bp, synthetic construct
  source 1..75: mol_type = other DNA
tgtttttttatgtatgcttttaatggggttattaaggagataatgcatttaccattgaaagccttaagaaaaaag

SEQ ID NO: 212224 - DNA, 75 bp, synthetic construct
  source 1..75: mol_type = other DNA
catgggggacagcacgatggatattgacctttcggcggcggatcagaacggtgacggcgacggttttatcgacgc

SEQ ID NO: 212225 - DNA, 75 bp, synthetic construct
  source 1..75: mol_type = other DNA
catatgcaaatgagtttgcaaatttcacaagactgaacgcatatcaaactcttgtcgttgttgccttttttgttt

SEQ ID NO: 212226 - DNA, 75 bp, synthetic construct
  source 1..75: mol_type = other DNA
aacctgaaaaatattttttctgtaaagagcatttttgagctacttaaatcagtatttaagttagtgataattgtt

SEQ ID NO: 212227 - DNA, 75 bp, synthetic construct
  source 1..75: mol_type = other DNA
agcaaattgcttatgccgacgtcgccacccaggcgacaaatttgcaggagaagcagagcgagctggatgccgaga

SEQ ID NO: 212228 - DNA, 75 bp, synthetic construct
  source 1..75: mol_type = other DNA
caccaccaccattatgctcacctcggatagcaccggggcgcaaagcgcgttttcagtgagcgtgacggggcatga

SEQ ID NO: 212229 - DNA, 75 bp, synthetic construct
  source 1..75: mol_type = other DNA
ctcaggacgcgattattcatctcggcagtgccacggggcccgccatcaccaatagcagcaacacctttgatgatg

SEQ ID NO: 212230 - DNA, 75 bp, synthetic construct
  source 1..75: mol_type = other DNA
tggcgagagacgttttaatcaatcacacacgagatgttgatattaatgagccagatggaccaacgaatctttccg

SEQ ID NO: 212231 - DNA, 75 bp, synthetic construct
  source 1..75: mol_type = other DNA
gaatatggttgctgctgatgggaagcttcgtaagctactctgccttcctttgaagaagttaaatggatggctgtt

SEQ ID NO: 212232 - DNA, 75 bp, synthetic construct
  source 1..75: mol_type = other DNA
gttgttcgaccggtggctgtcgcctggcgcgactatgttccgcaaccggctcgtaatgggctgagcaactttacc

SEQ ID NO: 212233 - DNA, 75 bp, synthetic construct
  source 1..75: mol_type = other DNA
cgcgaactgtatccggcgctaaaacaaattcaatcgaactattccggcagatgtcatgactgcggttatgagttc

SEQ ID NO: 212234 - DNA, 75 bp, synthetic construct
  source 1..75: mol_type = other DNA
actacggtcatgagttctcgtatgttatcggaatggcgagagacgttttaataaaccacacacgagatgttgata

SEQ ID NO: 212235 - DNA, 75 bp, synthetic construct
  source 1..75: mol_type = other DNA
ccagacggaccaacgaaccttctggcatgggaaaggcttaagaacaaagaattgccgccttcactgcatcactac

SEQ ID NO: 212236 - DNA, 75 bp, synthetic construct
  source 1..75: mol_type = other DNA
atgaatagtatagcaattttagaagcagtgaacacctcttacgtgcctttcaatggtcagcagattttaaccgct

SEQ ID NO: 212237 - DNA, 75 bp, synthetic construct
  source 1..75: mol_type = other DNA
atgaatagtatagcaattttagaagcagtgaacacctcttacgtacctttcaatggtcagcagattatcaccgcc

SEQ ID NO: 212238 - DNA, 75 bp, synthetic construct
  source 1..75: mol_type = other DNA
agttaaatggatggctgttcagcatcaaccctgagaaagttcgtgctgacatccgcgataaactgattcagtacc

SEQ ID NO: 212239 - DNA, 75 bp, synthetic construct
  source 1..75: mol_type = other DNA
gtgatgacggcggtgatatggcggatggtctttacccggtactttcctggctgacctggccgatgtccgtgggta

SEQ ID NO: 212240 - DNA, 75 bp, synthetic construct
  source 1..75: mol_type = other DNA
gtagtacgctcggtcactatggcgtgggctatgggccgtatgttcagttaccgttctacggtagctttacactgc

SEQ ID NO: 212241 - DNA, 75 bp, synthetic construct
  source 1..75: mol_type = other DNA
gattatgccaaccgctcacaggcattattccgcgaactgtatccggcattaaaacaaattcaatcgaactattcc

SEQ ID NO: 212242 - DNA, 75 bp, synthetic construct
  source 1..75: mol_type = other DNA
ttgaaataaagccgcatttttgctgcctggtacctgaaaagcgccaggaagtcacaaccgaaggtggcctggacg

SEQ ID NO: 212243 - DNA, 75 bp, synthetic construct
  source 1..75: mol_type = other DNA
ttcaattaatgccttcataattataaataaagaaaatcaaggggtgcttattacatttaatgaagtggagttacc

SEQ ID NO: 212244 - DNA, 75 bp, synthetic construct
  source 1..75: mol_type = other DNA
atgccatctgagtatgatgaacaacgggatgcgactgatgctctgcttcccggcgaatatgacctttttgattta

SEQ ID NO: 212245 - DNA, 75 bp, synthetic construct
  source 1..75: mol_type = other DNA
tgcgctcagtatttatcattatctctggcacactacacgcgggactcaagataataatgaggtatttctggatga

SEQ ID NO: 212246 - DNA, 75 bp, synthetic construct
  source 1..75: mol_type = other DNA
tgtaatgcagcgtaaaaataaggtagttatggcagtcgccggggcaacagttgcatcaccggcctttgcggatgg

SEQ ID NO: 212247 - DNA, 75 bp, synthetic construct
  source 1..75: mol_type = other DNA
ctaacctatgaagaggcaaagagagaagtgttaaatcatcacattgaacaatctaaaaataaaattaaaaaaggc

SEQ ID NO: 212248 - DNA, 75 bp, synthetic construct
  source 1..75: mol_type = other DNA
taacgttacagaaataccagccagaccctgaagatttatgctcactgtgtggcggaaatcatggcaaagccgcca

SEQ ID NO: 212249 - DNA, 75 bp, synthetic construct
  source 1..75: mol_type = other DNA
attgtgccgaatgatcaggttgatcaaccggattcccaggttgtcggacattgcgccaacgatacgcataaaatt

SEQ ID NO: 212250 - DNA, 75 bp, synthetic construct
  source 1..75: mol_type = other DNA
aagttaaaatgctaacaataatgccacgtgaaaatttatcaatgcaggtacattacaaacgcgccgagcattggg

SEQ ID NO: 212251 - DNA, 75 bp, synthetic construct
  source 1..75: mol_type = other DNA
gggacgttccggtcgcctgttaggcgatccacatctcgggcatgttaatcgctttaatgattatgttgatgatct

SEQ ID NO: 212252 - DNA, 75 bp, synthetic construct
  source 1..75: mol_type = other DNA
cgcggtgacctcctcgacctcgaaccagacagcttcgatcaaaacattgccattaacacccgcgcgccgttcttc

SEQ ID NO: 212253 - DNA, 75 bp, synthetic construct
  source 1..75: mol_type = other DNA
tcaacgtaaagacgccatagtaagccgcctgacaatgggcatcagcttgctgtttaagaaaaataaagtgaagca

SEQ ID NO: 212254 - DNA, 75 bp, synthetic construct
  source 1..75: mol_type = other DNA
ggatattgcctgtgcaatccatgcccacccgacattaagcgaagtcatccacgaagcggcaatggcattgaataa

SEQ ID NO: 212255 - DNA, 75 bp, synthetic construct
  source 1..75: mol_type = other DNA
aagccatcacgctgaaaatcgacccgtcggtggtactggcgacccgtaaatacgtggatgataaggtcctggaat

SEQ ID NO: 212256 - DNA, 75 bp, synthetic construct
  source 1..75: mol_type = other DNA
gactaacgcgcttgcgggtaagcaaccgaaggatgccaccctgacggcgctggcggagcttgctacatcagcaga

SEQ ID NO: 212257 - DNA, 75 bp, synthetic construct
  source 1..75: mol_type = other DNA
gaggattctggatccgtgagattggtctttatgatgatgaaggtgtactcattgcggtggcaaactgcccggaaa

SEQ ID NO: 212258 - DNA, 75 bp, synthetic construct
  source 1..75: mol_type = other DNA
gtactggtgccaaatgacaaaagaggggatagtctgttgtcgacagataacgccgtccggcaaggtgcaattaac

SEQ ID NO: 212259 - DNA, 75 bp, synthetic construct
  source 1..75: mol_type = other DNA
gcgaacagctggcggcgatcatcgaagaacaacttgccgtgtacaaaaccagacaagtgccgctggatcttggtc

SEQ ID NO: 212260 - DNA, 75 bp, synthetic construct
  source 1..75: mol_type = other DNA
ccatgacgatctgcattttgtcgatcgtctggtgttcgatctgcagagcaaactcgaccgtattatcagttgggg

SEQ ID NO: 212261 - DNA, 75 bp, synthetic construct
  source 1..75: mol_type = other DNA
aacgtctgctgaaccgctttaccagcgagcaggcggaagggaacgcaatttaccgtctgacgccgctcggcatcg

SEQ ID NO: 212262 - DNA, 75 bp, synthetic construct
  source 1..75: mol_type = other DNA
acggaaataatattgactatggcggcgataaggtgtttgcggggaattaccgtagcgattatttgtggtacgcaa

SEQ ID NO: 212263 - DNA, 75 bp, synthetic construct
  source 1..75: mol_type = other DNA
atgcgtgacgaagagatggcactgcgcgacgaagaagtgaccggggagcttccgccagatttagagtacgaagag

SEQ ID NO: 212264 - DNA, 75 bp, synthetic construct
  source 1..75: mol_type = other DNA
cggttgccacgctgaacggcgagcgtctggacggtgagatgagcgaaggcgagctggtggatgcgttccgccatg

SEQ ID NO: 212265 - DNA, 75 bp, synthetic construct
  source 1..75: mol_type = other DNA
atatgggaatcagtaggctcgtttaagggggcagtggtgcctttaaattcctcaacaaacaatagttatttctcc

SEQ ID NO: 212266 - DNA, 75 bp, synthetic construct
  source 1..75: mol_type = other DNA
acccttacagctattggtcgcgctattatcgctatgggcagtataaaagaagtcctcaattaccttggtttggga

SEQ ID NO: 212267 - DNA, 75 bp, synthetic construct
  source 1..75: mol_type = other DNA
gaaatggctgaagaagaaaacggaggaagccgcacagtcactggctgaacacgtacgttcccgtaaccacccgga

SEQ ID NO: 212268 - DNA, 75 bp, synthetic construct
  source 1..75: mol_type = other DNA
aggtttacccaacgttaaaattacctgatttacgcggtgagtttatccgtggctgggatgatgggcgcggggtgg

SEQ ID NO: 212269 - DNA, 75 bp, synthetic construct
  source 1..75: mol_type = other DNA
cgtacaactgagcagtgccatcaacagcacgtctgaaatactggccgccacaccgaaagcggtcaaggctgcata

SEQ ID NO: 212270 - DNA, 75 bp, synthetic construct
  source 1..75: mol_type = other DNA
aaggttgataccgggcgtgcgctactttcatttcaggaagggactatcgtatccggttttgatgataatgatacc

SEQ ID NO: 212271 - DNA, 75 bp, synthetic construct
  source 1..75: mol_type = other DNA
gatctggcccggggaaaatacacagcccaggatgcaacaacgacccgtaaagggatcgtacaactgagcagtgcc

SEQ ID NO: 212272 - DNA, 75 bp, synthetic construct
  source 1..75: mol_type = other DNA
gcactgataacgggcgccttcccggaaacggcggatgcgctcactgatgagtggtatgcctcgctggggctgaat

SEQ ID NO: 212273 - DNA, 75 bp, synthetic construct
  source 1..75: mol_type = other DNA
ttcacgctttctgtttcaggtactggatatcaaaaattaccatcaggttttattcttcagtggggatcaatcggc

SEQ ID NO: 212274 - DNA, 75 bp, synthetic construct
  source 1..75: mol_type = other DNA
ggaacccttattccggctccgaggttgcattcacgaggaagtattggtaacacgggcgggagcgaaacacgaccg

SEQ ID NO: 212275 - DNA, 75 bp, synthetic construct
  source 1..75: mol_type = other DNA
tttaggagaaggttctgcactgcccgttggtgtgcccgttccgtggccctcagcaacaccaccaacgggctggct

SEQ ID NO: 212276 - DNA, 75 bp, synthetic construct
  source 1..75: mol_type = other DNA
tgtcctcaattaccttggtttgggggaaggctctgcattgcctgttggtgtgccgagccttctcctaaaccaacg

SEQ ID NO: 212277 - DNA, 75 bp, synthetic construct
  source 1..75: mol_type = other DNA
gctcttcagagttagtgattatcgtacaaaagaaataccagcatcagaagttatgggaagaggatatattgcaag

SEQ ID NO: 212278 - DNA, 75 bp, synthetic construct
  source 1..75: mol_type = other DNA
ccccttcaaaggcagatgaactttatgttgaagcacgtaatcgctataaagaagtacaacgagtaaacgttccgc

SEQ ID NO: 212279 - DNA, 75 bp, synthetic construct
  source 1..75: mol_type = other DNA
tatgattcgtgttcaaacacagttaacgcgaaacatggccattgaacgtgatcgccatatcgctgaaaacacaaa

SEQ ID NO: 212280 - DNA, 75 bp, synthetic construct
  source 1..75: mol_type = other DNA
gggcgcatcaaccagtttatcgccgccaacctttccggtgttctgaaacgtgaaggccgctactgggtggctgac

SEQ ID NO: 212281 - DNA, 75 bp, synthetic construct
  source 1..75: mol_type = other DNA
catttttacactcggctctgatggtcaagaaggaggaagctatttccaatattcgtcaactttcaaatatatcgt

SEQ ID NO: 212282 - DNA, 75 bp, synthetic construct
  source 1..75: mol_type = other DNA
ggtaatgcgcagggacaaaaacctacaactgatctccctaccgtgcaactttccccagccagcaatgcttcgcct

SEQ ID NO: 212283 - DNA, 75 bp, synthetic construct
  source 1..75: mol_type = other DNA
taaccgacttgccagcattgattacgatgcaattaagctacagaaagagcttgagtcgcttgttctggacgatat

SEQ ID NO: 212284 - DNA, 75 bp, synthetic construct
  source 1..75: mol_type = other DNA
ccgttagcgggcgtgcatggggcggagcgccgtgacatcaatggtaaaacgcatatcgttcatctgccggatgcg

SEQ ID NO: 212285 - DNA, 75 bp, synthetic construct
  source 1..75: mol_type = other DNA
atgccgcagagtcaatggtagctcaggcggggcagcctccgggctggccggtatccgttagagccggtattctca

SEQ ID NO: 212286 - DNA, 75 bp, synthetic construct
  source 1..75: mol_type = other DNA
cccttttttctggcttgcttactgtcgtcatttccaggtatagtttttccgctgtcgcaaaatcggcagccggaa

SEQ ID NO: 212287 - DNA, 75 bp, synthetic construct
  source 1..75: mol_type = other DNA
atggctacaacccttaccccttcacaccctgaatttgtctttgtgtttgcggctgtccgtcgcgcagaccgtcat

SEQ ID NO: 212288 - DNA, 75 bp, synthetic construct
  source 1..75: mol_type = other DNA
gttccttatgtttgaatacggaattcactttgtcatatcagtgccatcattccggtgatgctgccaacttactga

SEQ ID NO: 212289 - DNA, 75 bp, synthetic construct
  source 1..75: mol_type = other DNA
gatcctgttcgcaatcgcatgttatgccactgagtcaatggtagctcaggcggggcagcctccgggctggccggt

SEQ ID NO: 212290 - DNA, 75 bp, synthetic construct
  source 1..75: mol_type = other DNA
tcaattattcccaaaccaacgttgcctctttacccggtaataccgacggcgtagcgctggttgtttcaacgacta

SEQ ID NO: 212291 - DNA, 75 bp, synthetic construct
  source 1..75: mol_type = other DNA
tccagcttgttggtgctttcactatccggctgtgcctggataccctccacgccgctggtgcagggggcgaccagt

SEQ ID NO: 212292 - DNA, 75 bp, synthetic construct
  source 1..75: mol_type = other DNA
tacctttagcggcacgttgacggtgacggttgaccaggtactggtcaacggcaacctgcatgtggtgggtgaaaa

SEQ ID NO: 212293 - DNA, 75 bp, synthetic construct
  source 1..75: mol_type = other DNA
tgagatcctttttgaaaaggacgcaatgcgctcagtcgcgctccacgccatcgttgattttttcaacaggcataa

SEQ ID NO: 212294 - DNA, 75 bp, synthetic construct
  source 1..75: mol_type = other DNA
tcttttctgctggcggttgccacgctgaacggcgagcgtctggatggtgagatgagtgaaggcgagctggtggat

SEQ ID NO: 212295 - DNA, 75 bp, synthetic construct
  source 1..75: mol_type = other DNA
tactcaggtggcggatgcgcgcattgaatacgtaggcaatggctacattaacgaagcgcaaaatatgggctggtt

SEQ ID NO: 212296 - DNA, 75 bp, synthetic construct
  source 1..75: mol_type = other DNA
atgtgtatccaccttaacttaatgatttttaccaaaatcattaggggattcatcagcgctgcgcatacttatgcc

SEQ ID NO: 212297 - DNA, 75 bp, synthetic construct
  source 1..75: mol_type = other DNA
cttcgtgagggcagctttaaaatgccggacgggacaacattcagcaatcctgtcatggcaatgtcagacaatggt

SEQ ID NO: 212298 - DNA, 75 bp, synthetic construct
  source 1..75: mol_type = other DNA
tgatattgatgatgttctgtcatggggatggctggcgtgttttgataatccgtaacttgtatgcccgcacagagc

SEQ ID NO: 212299 - DNA, 75 bp, synthetic construct
  source 1..75: mol_type = other DNA
ggtggttaatggcttgccaattattacagggattggcgaagagaaagtgctggcgcaaattatttctatccttaa

SEQ ID NO: 212300 - DNA, 75 bp, synthetic construct
  source 1..75: mol_type = other DNA
cttccgcacccagggccgtggcaccgccgatcacgtaggcgtgtatgtcggcaatggcaagtttattcagtctcc

SEQ ID NO: 212301 - DNA, 75 bp, synthetic construct
  source 1..75: mol_type = other DNA
ctgacgcacataaagccaaagtacagaaagccactaccgtggcaatgaataaactgatgcaacaaattggcaagc

SEQ ID NO: 212302 - DNA, 75 bp, synthetic construct
  source 1..75: mol_type = other DNA
acgcctctcgctcagttcgcacagcatctgaaacacgcccccataacattgcgtttaattacatcgtaagggcag

SEQ ID NO: 212303 - DNA, 75 bp, synthetic construct
  source 1..75: mol_type = other DNA
agtaagtgactaccaagcaagttgcgaacaacgctatccaaagcttagcgatatggctaattgccttgatgccag

SEQ ID NO: 212304 - DNA, 75 bp, synthetic construct
  source 1..75: mol_type = other DNA
gggtacgcagtgatggctaatggtggcttcctggtcgacccctggtttatcagcaaaattgaaaacgaccagggc

SEQ ID NO: 212305 - DNA, 75 bp, synthetic construct
  source 1..75: mol_type = other DNA
acgtcagggactgggtcagtcgaaaaacgtggtgatggtacgcgcaatgcgggcgatgggcgtcgactacgctgc

SEQ ID NO: 212306 - DNA, 75 bp, synthetic construct
  source 1..75: mol_type = other DNA
ttaaagatcagatctctggctacgaaggcggggcgaagagtgcccagccagcatgggatgcttatatgaaatccg

SEQ ID NO: 212307 - DNA, 75 bp, synthetic construct
  source 1..75: mol_type = other DNA
tcggcctcactaaaaacgatttacaaggggctacgcttgccatcgttcctggcgacccggatcgcgtggaaaaaa

SEQ ID NO: 212308 - DNA, 75 bp, synthetic construct
  source 1..75: mol_type = other DNA
aaacactcgaaaaaatgtcccaaaccctgttcaaatcatggtttgtggattttgatccggtgattgataacgcgc

SEQ ID NO: 212309 - DNA, 75 bp, synthetic construct
  source 1..75: mol_type = other DNA
atcttccgtgcggcaagcgtggcgctgttctccggtcacgcatcgcaaggggcgagcaccatcacccaacaactg

SEQ ID NO: 212310 - DNA, 75 bp, synthetic construct
  source 1..75: mol_type = other DNA
acggtgaatatcgatcgcagcaccgggcagttagctaatggtggcaacagccgcgaagagtatttcatcgaaggt

SEQ ID NO: 212311 - DNA, 75 bp, synthetic construct
  source 1..75: mol_type = other DNA
ttaaagatcagatctcaggttacgaaggcggtgccaagagtgcccagcctgcatgggacgcttatatgaaagccg

SEQ ID NO: 212312 - DNA, 75 bp, synthetic construct
  source 1..75: mol_type = other DNA
tccggtgatttacggtgatacgcagaaatcgaacgtgctggaaaataacgatgttgaagatgtcgctatctcccg

SEQ ID NO: 212313 - DNA, 75 bp, synthetic construct
  source 1..75: mol_type = other DNA
acgtcagggactggggcagtcgaaaaacgtcgtaatggtacgtgccatgcgggcaatgggtgtcgactacgccgc

SEQ ID NO: 212314 - DNA, 75 bp, synthetic construct
  source 1..75: mol_type = other DNA
cacaaaacggcgcggttatggcgctggtcggtggctttgatttcaaccagagcaagtttaaccgagcgacccagg

SEQ ID NO: 212315 - DNA, 75 bp, synthetic construct
  source 1..75: mol_type = other DNA
aactatcacgcgccagagattgcgttctctgcgccgtatctcaccgaaatggtgcgccaggagatgtataaccgt

SEQ ID NO: 212316 - DNA, 75 bp, synthetic construct
  source 1..75: mol_type = other DNA
attgctgttgaagagctggcacagctgggtatccgtactttcctgcgtattggtactacgggcgcaattcagccg

SEQ ID NO: 212317 - DNA, 75 bp, synthetic construct
  source 1..75: mol_type = other DNA
atagtaccctgctggttgaaaccgttaaacagttccaccgttccgggcgtatcgtcgcggctatttgcgccgcgc

SEQ ID NO: 212318 - DNA, 75 bp, synthetic construct
  source 1..75: mol_type = other DNA
caatggcgcgaagggtttgatgcgatggtcgataaaaccgcaatcaaagtgatcatgacttacgactttgattaa

SEQ ID NO: 212319 - DNA, 75 bp, synthetic construct
  source 1..75: mol_type = other DNA
cgggaagaccacgctgctgaaatcaatctccgcccgtctgacgccgcagcagggggagattcactatgaaaaccg

SEQ ID NO: 212320 - DNA, 75 bp, synthetic construct
  source 1..75: mol_type = other DNA
catcatcgatgaggttggtgtgcagttcggtacgccaacagagataaccatcttgcaggaaatcatcaatgcacg

SEQ ID NO: 212321 - DNA, 75 bp, synthetic construct
  source 1..75: mol_type = other DNA
gacgacaacggcattgttacccatacacaggaaatactggatacggacaccggacgtattgttcagggtatgatt

SEQ ID NO: 212322 - DNA, 75 bp, synthetic construct
  source 1..75: mol_type = other DNA
gataaggcgcgtcagtttttcgatacagcttctcaggtctgtgaaattgtcgacggtgtccggcagtgcatgcag

SEQ ID NO: 212323 - DNA, 75 bp, synthetic construct
  source 1..75: mol_type = other DNA
cactggtagcgatactggtgccttttttcctggtgggatgcgttagcctggataaggcgcgccagcttttcgata

SEQ ID NO: 212324 - DNA, 75 bp, synthetic construct
  source 1..75: mol_type = other DNA
aactgccatcgaatggggcggggactggaaaacactgaaagacgggcctcactttcagttgaaacgctgataacc

SEQ ID NO: 212325 - DNA, 75 bp, synthetic construct
  source 1..75: mol_type = other DNA
atgaacccggttgatcgtccactattagatattggcttaacgcgattagaattcttgcgtatatcaggaaagggt

SEQ ID NO: 212326 - DNA, 75 bp, synthetic construct
  source 1..75: mol_type = other DNA
gtagcgcctgtactacggcatgcccgtggatgatggccaccgtaaataccgaaagtaaaaaatcctcgaaatgtg

SEQ ID NO: 212327 - DNA, 75 bp, synthetic construct
  source 1..75: mol_type = other DNA
tgcagttcaacggcaatatggtctccgtcactcccctgcgcgcctgggctgcagggaatgtaacggtctacctca

SEQ ID NO: 212328 - DNA, 75 bp, synthetic construct
  source 1..75: mol_type = other DNA
gaagatcccggatgagttttcctcggtactggttattaacggttcgtccggtggcactgaagatgcaatgggtaa

SEQ ID NO: 212329 - DNA, 75 bp, synthetic construct
  source 1..75: mol_type = other DNA
ggtggccccggcgcgggagcggccaccgctgcgggttcccaaatgcagggtttcgcaaagggttcacggcgctaa

SEQ ID NO: 212330 - DNA, 75 bp, synthetic construct
  source 1..75: mol_type = other DNA
tgaaagctgagcttggtgctcgcctcgtaaaaatagccaaaaacaactataggctcaagatatttaatagaggga

SEQ ID NO: 212331 - DNA, 75 bp, synthetic construct
  source 1..75: mol_type = other DNA
atgtttgaattcatcgatctgttaatgttcttagtttgctcatgcgtgcttattgccgcgttactgttatgcgta

SEQ ID NO: 212332 - DNA, 75 bp, synthetic construct
  source 1..75: mol_type = other DNA
tattatcgcgttaatgctatgcgcatacgtgattgtaatgattggcgcgctcatttacagagaagcaaaacagag

SEQ ID NO: 212333 - DNA, 75 bp, synthetic construct
  source 1..75: mol_type = other DNA
atgaatccgaatgagcatctctttcagatcaactacatcccggactcaccggtattctccgtcctgccgcgtacc

SEQ ID NO: 212334 - DNA, 75 bp, synthetic construct
  source 1..75: mol_type = other DNA
atgaacccgttatttaacgatattcagatgcgtcttttttatctgaaccattcgccgtattcctggcactggaat

SEQ ID NO: 212335 - DNA, 75 bp, synthetic construct
  source 1..75: mol_type = other DNA
tttttgtgattttgattatgaaccagttatttaacgatattcagatgcgtcttttttatctgaaccactcgccgt

SEQ ID NO: 212336 - DNA, 75 bp, synthetic construct
  source 1..75: mol_type = other DNA
atatgccttcggcgatgcccgtgagatgagcgagaaattgcaggcgcacgccgagaaactgctggctgccggtaa

SEQ ID NO: 212337 - DNA, 75 bp, synthetic construct
  source 1..75: mol_type = other DNA
tctggtatatgccttcggcgatgcccgtgagatgagcgaaaaactgcaggcacacgccgagaagttgctggctgc

SEQ ID NO: 212338 - DNA, 75 bp, synthetic construct
  source 1..75: mol_type = other DNA
ttccagccgtatgacagcgatgctgactgggtgattactggcgtgccgttcgatatggccacttctggtcgtgcg

SEQ ID NO: 212339 - DNA, 75 bp, synthetic construct
  source 1..75: mol_type = other DNA
gtggtttgggtgtattaagttgccatcaccagtttcagggcgctaccttgtttaaggagctcagcggtaccagct

SEQ ID NO: 212340 - DNA, 75 bp, synthetic construct
  source 1..75: mol_type = other DNA
ccgagaaaaaactcactccgagtgatattcgtggcgtcttcctgcgttctaacctcttccagggttcatggaact

SEQ ID NO: 212341 - DNA, 75 bp, synthetic construct
  source 1..75: mol_type = other DNA
accgtacgtccggtatttgcagcgctgggtgccggtatcgcaatgagcggcagcctgttaggtccgctgctgttc

SEQ ID NO: 212342 - DNA, 75 bp, synthetic construct
  source 1..75: mol_type = other DNA
tggcaattttagatagtgattatccaagagagttatatcctgatggactttctgatgagcacatagaatatatgg

SEQ ID NO: 212343 - DNA, 75 bp, synthetic construct
  source 1..75: mol_type = other DNA
tatggcgaaagtgcctatgaagacggttatcgcatttacaccaccatcacccgcaaagtgcagcaggccgcacag

SEQ ID NO: 212344 - DNA, 75 bp, synthetic construct
  source 1..75: mol_type = other DNA
ctaccctgagaacaacgaagctcgtaaacaagctattcgccgtcacctggagttctttaacacccagccgttcgt

SEQ ID NO: 212345 - DNA, 75 bp, synthetic construct
  source 1..75: mol_type = other DNA
tcctgcaaaaactgacggaaggggcgtctatcctcggcctgtttgtcatgggggcgttggttaataagtggacac

SEQ ID NO: 212346 - DNA, 75 bp, synthetic construct
  source 1..75: mol_type = other DNA
gctttgagcacggcgacactggcgaaatgtatgtcgatattaccggggtgcgtaccgataccggtgcgtcagttt

SEQ ID NO: 212347 - DNA, 75 bp, synthetic construct
  source 1..75: mol_type = other DNA
ctcgctctatcggtccgactaccggcctgaatggctgggatttcgtatccgatgcagagcgcctgatgttctctc

SEQ ID NO: 212348 - DNA, 75 bp, synthetic construct
  source 1..75: mol_type = other DNA
tgatctgcgtgatgagcgatcttatcgtcgccgtatcaacgcatctgccaagaagttggcgaacaacatcgaaac

SEQ ID NO: 212349 - DNA, 75 bp, synthetic construct
  source 1..75: mol_type = other DNA
acacaacctttttatagccactcttgggtggaggttgggggacaagttatcaatgatgctcccaatatgcgggat

SEQ ID NO: 212350 - DNA, 75 bp, synthetic construct
  source 1..75: mol_type = other DNA
aataagggggtgcggacgatttcttggacggtttatacggacatcaatccgaccgcatgacgatactcgatggga

SEQ ID NO: 212351 - DNA, 75 bp, synthetic construct
  source 1..75: mol_type = other DNA
gctttgagaccggcgacgctggcgaaatgtatgtcgatattaccgggatgcgtaccgataccggtgcgtcagttt

SEQ ID NO: 212352 - DNA, 75 bp, synthetic construct
  source 1..75: mol_type = other DNA
gactacgggattgatggttttcgggtcgataccgccaaacatgttgagttgcccgcctggcagcaactgaaaacc

SEQ ID NO: 212353 - DNA, 75 bp, synthetic construct
  source 1..75: mol_type = other DNA
cgataaagacaacgaagggaagggaacgctggaacggatacgtaaagcgtcgttttactggtatcgggatctcat

SEQ ID NO: 212354 - DNA, 75 bp, synthetic construct
  source 1..75: mol_type = other DNA
gtcgattttaccgcacaattgctggcgactacttgtacaataacgattaaagaagatggaggccccgcggttaat

SEQ ID NO: 212355 - DNA, 75 bp, synthetic construct
  source 1..75: mol_type = other DNA
gactatgggattgatggttttcgggtcgacaccgccaaacatgttgagttgcccgcctggcagcaactgaaaacc

SEQ ID NO: 212356 - DNA, 75 bp, synthetic construct
  source 1..75: mol_type = other DNA
gattatcaggaacaggcggcgaaagcggtcgattgcctggcgcagatggataccacctggcagcaaatgaccgag

SEQ ID NO: 212357 - DNA, 75 bp, synthetic construct
  source 1..75: mol_type = other DNA
ccgaatcaacgaccgcttctggtctgccggtgttctataaaaacaaaacggatacccacgctaaagtcatcgacg

SEQ ID NO: 212358 - DNA, 75 bp, synthetic construct
  source 1..75: mol_type = other DNA
taatgccgcaatgcagtcactgaataacgaatggcaacgttttgctgaaggacaactggcaaagcccgttcagga

SEQ ID NO: 212359 - DNA, 75 bp, synthetic construct
  source 1..75: mol_type = other DNA
acagaattatcctttccttccgcagcaattgcagggggaaatccgtgtggtagtggaaggtgacgcccgcgtgaa

SEQ ID NO: 212360 - DNA, 75 bp, synthetic construct
  source 1..75: mol_type = other DNA
atctaatgatcgaccttgaaaccatgggaaaaaatcctgatgccccgatcatctcaataggtgcaatatttttcg

SEQ ID NO: 212361 - DNA, 75 bp, synthetic construct
  source 1..75: mol_type = other DNA
cgcgaaacaacggcgggagcaggacgcaccggtgcgtttcaggcaaaagccacctttaacttcacctacgaataa

SEQ ID NO: 212362 - DNA, 75 bp, synthetic construct
  source 1..75: mol_type = other DNA
ctattcctgacgttgggctggataaactggttaactttaacgccgccgcagaaaccacttttaagctcgtcgcat

SEQ ID NO: 212363 - DNA, 75 bp, synthetic construct
  source 1..75: mol_type = other DNA
gattctggaggtctgccggatatcccggatatcccggatattccggatctaccagatagttctcgcggttcacgt

SEQ ID NO: 212364 - DNA, 75 bp, synthetic construct
  source 1..75: mol_type = other DNA
aatccgtgattattacagccaacaaatcgcgacggtgaaaaacggtcaaataacgttacaacctgccgccaccag

SEQ ID NO: 212365 - DNA, 75 bp, synthetic construct
  source 1..75: mol_type = other DNA
gatcgcgttcatgtggtttttgggacaaaaggaggcagaccccgtgaagcattagtgccggataaagcccgtgta

SEQ ID NO: 212366 - DNA, 75 bp, synthetic construct
  source 1..75: mol_type = other DNA
ttacagctataaagaggcactggcgctcacatcgatggatttagggcacggcgatggacggggtacatatattga

SEQ ID NO: 212367 - DNA, 75 bp, synthetic construct
  source 1..75: mol_type = other DNA
agcggttaccactatcgacctgctggttcgcggcggcatcaacgtcaccactgccagcgtcgccagcgatggcaa

SEQ ID NO: 212368 - DNA, 75 bp, synthetic construct
  source 1..75: mol_type = other DNA
gttgacacttacacaaactgcaattcagggtttggaaatacagtcacatgcaacagtagcagtaacataagataa

SEQ ID NO: 212369 - DNA, 75 bp, synthetic construct
  source 1..75: mol_type = other DNA
gcgcaggtaaaagtgcgacatattgaattatatatgaacagcaggagtgacgtttcaaagcggaccagagaaaat

SEQ ID NO: 212370 - DNA, 75 bp, synthetic construct
  source 1..75: mol_type = other DNA
atcgtatttggtacaaaaggaggacggccaagagatacgacggttatagagcgcgataaaatgctaagtgctgtt

SEQ ID NO: 212371 - DNA, 75 bp, synthetic construct
  source 1..75: mol_type = other DNA
gctttacccctcgagattacttaacccattggttaagccagtgggtccgtgactacggaattgatggttttcggg

SEQ ID NO: 212372 - DNA, 75 bp, synthetic construct
  source 1..75: mol_type = other DNA
gccagtgttctataacaacaaaacggatacccacgctaaagccattgacggctttacccctcgagattacttaac

SEQ ID NO: 212373 - DNA, 75 bp, synthetic construct
  source 1..75: mol_type = other DNA
ggagatttacgtggcctgaccaatagactggattatctccagcaactgggcgtcaatgccctgtggatcagcgcc

SEQ ID NO: 212374 - DNA, 75 bp, synthetic construct
  source 1..75: mol_type = other DNA
aattatcgacctgctggttgggcgtgaaaaagcccatgaagtggcatcacaactggtgatggcggcagggattta

SEQ ID NO: 212375 - DNA, 75 bp, synthetic construct
  source 1..75: mol_type = other DNA
tatcttcccgattggcaatatgaccggcttcccgacgctgaaagacaaaattcccgctgaacaatggcaggacaa

SEQ ID NO: 212376 - DNA, 75 bp, synthetic construct
  source 1..75: mol_type = other DNA
tgacgtgatcgtactgcctggtggcattaaaggcgcagagtgttttcgcgatagtaccctgctggttgaaaccgt

SEQ ID NO: 212377 - DNA, 75 bp, synthetic construct
  source 1..75: mol_type = other DNA
atgccgtcagagatcggcgctaacctgtcgctgggcggttcatcactggcggtggcgtggaaaacgaaaaacccg

SEQ ID NO: 212378 - DNA, 75 bp, synthetic construct
  source 1..75: mol_type = other DNA
aggaagttggaagagctggggatagattagtttctcagtttggtacaggtgaaaaatataaagaggaagatgtac

SEQ ID NO: 212379 - DNA, 75 bp, synthetic construct
  source 1..75: mol_type = other DNA
ccgaaaactgggcggatgttctggagaacggcacaaatctcgtgctgactggcagttgtggcaccggtaaaaatc

SEQ ID NO: 212380 - DNA, 75 bp, synthetic construct
  source 1..75: mol_type = other DNA
agcggatggatgataccggcgagtggttctgctatcacccgctgtttggtaacttcctgcgccagcgctgccagt

SEQ ID NO: 212381 - DNA, 75 bp, synthetic construct
  source 1..75: mol_type = other DNA
cacaacgcgagaactgaccagtctggtacgaaacctgaaccgactgttaaaaagtgaacgcgaacgttacgacaa

SEQ ID NO: 212382 - DNA, 75 bp, synthetic construct
  source 1..75: mol_type = other DNA
gaaaatatcgacaagcaaagccccacgatgacactaatttatgatgagaacgggcagcttttatgggcgcaacgt

SEQ ID NO: 212383 - DNA, 75 bp, synthetic construct
  source 1..75: mol_type = other DNA
gctcgacggcctgcgccgccaggtgtcggcaggcggcaatatcggcgagcggctgatggcgaccggggcacgtca

SEQ ID NO: 212384 - DNA, 75 bp, synthetic construct
  source 1..75: mol_type = other DNA
tttgatttatggccgggggaagtgctgggcattgtcggggagtccggctccgggaagaccacgctgctgaaatca

SEQ ID NO: 212385 - DNA, 75 bp, synthetic construct
  source 1..75: mol_type = other DNA
cgcctgctggcggaccgtttgctggtgatgaagcaggggcaagtggtggagagtgggttaaccgaccgcgtgctc

SEQ ID NO: 212386 - DNA, 75 bp, synthetic construct
  source 1..75: mol_type = other DNA
agcttaaagaatccattggtgaacggattgtggatcgcgttactgatggtgggtgtaactgcctggtgtttggtt

SEQ ID NO: 212387 - DNA, 75 bp, synthetic construct
  source 1..75: mol_type = other DNA
ggcttcccgacgctgaaagacaaaattcccgccgaacaatggcaggacaagcgcgtcgtctgggatgcacgggta

SEQ ID NO: 212388 - DNA, 75 bp, synthetic construct
  source 1..75: mol_type = other DNA
caatggatttgctgatcatcgacgaagttggcgttcagtttggcagcgcggctgaaatggctattttgcaggaaa

SEQ ID NO: 212389 - DNA, 75 bp, synthetic construct
  source 1..75: mol_type = other DNA
tatcgctcatgaaaatggggcttatttcagataccggagagagaaagggggcgacgaaaagagtacgggttttct

SEQ ID NO: 212390 - DNA, 75 bp, synthetic construct
  source 1..75: mol_type = other DNA
atctggcgcatcttgccggcgggcaggtgtacccgtatgtggtccccctgctggatggcagaccctctgtatcgt

SEQ ID NO: 212391 - DNA, 75 bp, synthetic construct
  source 1..75: mol_type = other DNA
agaatgctggcagcgctcaggatcacgccagcgatagtgaaactggcgagacggcagatcccttaattacggtga

SEQ ID NO: 212392 - DNA, 75 bp, synthetic construct
  source 1..75: mol_type = other DNA
tgtgctccaattgtttctatcggggcagtgtttttttctccagaaagtgaggaattaggtcctactttttatgtg

SEQ ID NO: 212393 - DNA, 75 bp, synthetic construct
  source 1..75: mol_type = other DNA
ggatccgcaggccatgctcaccaacttaaccgactggctctcgcacgtcttcgcttcgcagtacgaacctcagcc

SEQ ID NO: 212394 - DNA, 75 bp, synthetic construct
  source 1..75: mol_type = other DNA
gttttgatcaagcgttcgctcaggagcaatatccctttgcgaccgaagtgatggatgttgccgacgctgcgcagg

SEQ ID NO: 212395 - DNA, 75 bp, synthetic construct
  source 1..75: mol_type = other DNA
caaagaggactggcagcagacttttgcagttaatgtcggtggcgcgtttaacctgttccagcaaaccatgaacca

SEQ ID NO: 212396 - DNA, 75 bp, synthetic construct
  source 1..75: mol_type = other DNA
acaacatcagcgcagcgatcggtacagcgtcgagattttcacatacctattgaccggcaggagctgcagtctggc

SEQ ID NO: 212397 - DNA, 75 bp, synthetic construct
  source 1..75: mol_type = other DNA
gatggtcaggctgaatccagaatcacagtgcagattgatatctgggcaacggctcctgatgacgcagatgatatc

SEQ ID NO: 212398 - DNA, 75 bp, synthetic construct
  source 1..75: mol_type = other DNA
acgaactgcaggataaatttgtctgctggtatccggggtttcaaagtgacggaaaggtatcagcggcggcagcat

SEQ ID NO: 212399 - DNA, 75 bp, synthetic construct
  source 1..75: mol_type = other DNA
taaggaagactggcagcagacttttgcggtcaatgtcggcggtgcgtttaacctgttccagcagaccatgaacca

SEQ ID NO: 212400 - DNA, 75 bp, synthetic construct
  source 1..75: mol_type = other DNA
gttgcaggaggagctctgcagcgtggtggaggcatccggtgccagcctggagaaggggcggcatgaccagctgct

SEQ ID NO: 212401 - DNA, 75 bp, synthetic construct
  source 1..75: mol_type = other DNA
agcttatggagcacctgcagtctatcgcaaagggtctgtcctctggcgatgatttgaaggtgggtttccttgagg

SEQ ID NO: 212402 - DNA, 75 bp, synthetic construct
  source 1..75: mol_type = other DNA
atctaagtgaagtttggcgactgtttagtgatatgcctgaggaggctgctcttaatgctgagctggcagcccttt

SEQ ID NO: 212403 - DNA, 75 bp, synthetic construct
  source 1..75: mol_type = other DNA
tacgatgccggttatagcggaaccagtatgacgggcgggaaaggcgctgcagggatttgtattatcgaggagttt

SEQ ID NO: 212404 - DNA, 75 bp, synthetic construct
  source 1..75: mol_type = other DNA
atcaggtacgtacaccccgacgccaggaacaaaacggatcagggtcacaataacgggtggcggtggtggtggggg

SEQ ID NO: 212405 - DNA, 75 bp, synthetic construct
  source 1..75: mol_type = other DNA
gatacaagcggatacgtgggacgccggctgagtacccgggctttcgcgtcatcaggtacgtataccccatcacca

SEQ ID NO: 212406 - DNA, 75 bp, synthetic construct
  source 1..75: mol_type = other DNA
ccgcaatgtcactagctgaaaacgaaacgctgaccgcaagtcaaccgccagctgggtcatggtgcacaccatctg

SEQ ID NO: 212407 - DNA, 75 bp, synthetic construct
  source 1..75: mol_type = other DNA
ggcgcgggggagagcaccatacgaacagccattgctgaacttgaatcagagaaatggcttcgacgtgagaatcgc

SEQ ID NO: 212408 - DNA, 75 bp, synthetic construct
  source 1..75: mol_type = other DNA
ccgctgattctacgactgtttttctgttccagaatccatcacttcttcactctgtgctgcgcattccgcagaata

SEQ ID NO: 212409 - DNA, 75 bp, synthetic construct
  source 1..75: mol_type = other DNA
taatcaatccagaacatctacggcaaacacttgagcgtaaatctcttactgctgatcagaaatcacaatgtgaaa

SEQ ID NO: 212410 - DNA, 75 bp, synthetic construct
  source 1..75: mol_type = other DNA
cagatacaactttccgagagctgaataaagcagcacagcgtagcattacagcgccagacaggataggagaaggaa

SEQ ID NO: 212411 - DNA, 75 bp, synthetic construct
  source 1..75: mol_type = other DNA
tggattgcgtttaggtatgggaggattaacggggagtggcgagagcgcagtaaatactgcaaatgccgcaccaac

SEQ ID NO: 212412 - DNA, 75 bp, synthetic construct
  source 1..75: mol_type = other DNA
ctataaccgcgattgctgcggaggtaaaaatcctgaacgtgttgcggggctgcatttttttaacccggcaccggt

SEQ ID NO: 212413 - DNA, 75 bp, synthetic construct
  source 1..75: mol_type = other DNA
aaacaccatcgagaaagacttatcaaggagatggactctagctattattgcagatgaatttaatgtatcagagat

SEQ ID NO: 212414 - DNA, 75 bp, synthetic construct
  source 1..75: mol_type = other DNA
cctctcgctagattcacataaaagaaccagtgaaaacaaggtgttaattagtaatgaagacagttcgtctagaga

SEQ ID NO: 212415 - DNA, 75 bp, synthetic construct
  source 1..75: mol_type = other DNA
aaagcgacctggatatcagggaacattacacagatacagcgggtttcaccgatcatgtttttgctctgatgcatc

SEQ ID NO: 212416 - DNA, 75 bp, synthetic construct
  source 1..75: mol_type = other DNA
tggaatatcgaatgtagatgctaatggttatagagatatatcaaagaagatagcgattcgtgacgtggatgaagc

SEQ ID NO: 212417 - DNA, 75 bp, synthetic construct
  source 1..75: mol_type = other DNA
cagatgcgtttaatgtatcagaaataaccatcagaaaaagactagaatctgagaatactaattttaaccagatct

SEQ ID NO: 212418 - DNA, 75 bp, synthetic construct
  source 1..75: mol_type = other DNA
accagatatctcagatatcaaatatgattggaatttccagtgcatcttattttattaggatttttaataaacatt

SEQ ID NO: 212419 - DNA, 75 bp, synthetic construct
  source 1..75: mol_type = other DNA
cgtcatcgttattgctactggtctgcctgcttacgccttctgggcgaagcgtagccgccagctcaacgctttgtc

SEQ ID NO: 212420 - DNA, 75 bp, synthetic construct
  source 1..75: mol_type = other DNA
ttaacgccctgacgtatggcgggtacgaaatgaagccagtgacggtgaccattaccgcggtggatgccgatacgg

SEQ ID NO: 212421 - DNA, 75 bp, synthetic construct
  source 1..75: mol_type = other DNA
gttgcccttacattaattatgttttctcctgtgctttgtgtatggattaaagcatcgataaaagaaataatgaaa

SEQ ID NO: 212422 - DNA, 75 bp, synthetic construct
  source 1..75: mol_type = other DNA
tgacgttatttcttatgaggttgtttttattattatcttattgattttatatgcattttgtcgttctgtgaagtt

SEQ ID NO: 212423 - DNA, 75 bp, synthetic construct
  source 1..75: mol_type = other DNA
tcggcaatatgttcgggatgagtattatgaaaaaatttcacaaatggattttaaaactgcaaggaaacatgtttt

SEQ ID NO: 212424 - DNA, 75 bp, synthetic construct
  source 1..75: mol_type = other DNA
cataaactacctatagtgtgcgaaacgtaccatgacgaatggcgaatcgtacctgccttttccagcattaagaag

SEQ ID NO: 212425 - DNA, 75 bp, synthetic construct
  source 1..75: mol_type = other DNA
cgggagtgctggtcgccacgcaaatcatcaacccgcagtcggggatgggggttaacgacacctcggcgctggtca

SEQ ID NO: 212426 - DNA, 75 bp, synthetic construct
  source 1..75: mol_type = other DNA
gatggcgacggcgatatggacctcttcctgcctgccagccagggaagagctaactacggctcgctgttattcaac

SEQ ID NO: 212427 - DNA, 75 bp, synthetic construct
  source 1..75: mol_type = other DNA
taaaaagctcggcgggaaacggcaataacgccaatattagtaacggcacggtgacggttaacgcagcgattgatt

SEQ ID NO: 212428 - DNA, 75 bp, synthetic construct
  source 1..75: mol_type = other DNA
cgccagcaatatcgaccagacggtcaacaccagctggggcggcttacaggccaccgatgccactcacgcttacga

SEQ ID NO: 212429 - DNA, 75 bp, synthetic construct
  source 1..75: mol_type = other DNA
tgcgggtgctggatctggcggggaatactggcccggtggtgtcgaaaacggtggtggtcgatacgattaacccca

SEQ ID NO: 212430 - DNA, 75 bp, synthetic construct
  source 1..75: mol_type = other DNA
caacagcggctccgccagtcataacgtgcaggtcaataccgcgctgccgggcgtcaccattaacgtggtggcaac

SEQ ID NO: 212431 - DNA, 75 bp, synthetic construct
  source 1..75: mol_type = other DNA
cagtttccgcgaccgcctataccgttactgcgcaggtaaaaagttcggcgggtaacggcaataacgccaatatta

SEQ ID NO: 212432 - DNA, 75 bp, synthetic construct
  source 1..75: mol_type = other DNA
gtggcgacggacgatattatcaacgccgctgaagcaggcagtgcgcaaaccatcagcggccaggtaaccggtgcg

SEQ ID NO: 212433 - DNA, 75 bp, synthetic construct
  source 1..75: mol_type = other DNA
acgccaactgtaaatttgcgaaatgttttcctcgaaaggaaagggaacgctgtaacatcccgggctgaactggtt

SEQ ID NO: 212434 - DNA, 75 bp, synthetic construct
  source 1..75: mol_type = other DNA
aaccaaacttacgccgccacggtgctggcaaacggcagctggagcgtcggcgttccggcggcggatgtcagcaac

SEQ ID NO: 212435 - DNA, 75 bp, synthetic construct
  source 1..75: mol_type = other DNA
gttacagggcagcggctacaccggcaacggcaaagccagctacgtcaacggcgtggcaacgctggatgcgcaggc

SEQ ID NO: 212436 - DNA, 75 bp, synthetic construct
  source 1..75: mol_type = other DNA
ccggcggctgggtgtacagctccggcaccggaacgtggctggcgaatggcggcatggacgtggttgatttccgcc

SEQ ID NO: 212437 - DNA, 75 bp, synthetic construct
  source 1..75: mol_type = other DNA
gcgatcaggccggaaaccccggcagcgccagccgtggcgtgacgctgaacggcgatgtgcccaccgtcaccatca

SEQ ID NO: 212438 - DNA, 75 bp, synthetic construct
  source 1..75: mol_type = other DNA
agcagcggccggtattgccaaatctattatagagcatttaggaatagaatatgagagtaactgcggcgaacttag

SEQ ID NO: 212439 - DNA, 75 bp, synthetic construct
  source 1..75: mol_type = other DNA
agcgttccagaacccagataatcaaaaagttaatatcgatgagctcggaaatgcgattccgtcaggggtattgaa

SEQ ID NO: 212440 - DNA, 75 bp, synthetic construct
  source 1..75: mol_type = other DNA
ggcggtcccactattgagcactatcatcaggccattgcgctggtagtggccgagaccttcgaacaggcgcgagcg

SEQ ID NO: 212441 - DNA, 75 bp, synthetic construct
  source 1..75: mol_type = other DNA
gtttccaaaataaaagtctaaccaagatctttaactggagtggaagattatacccagatagtagtgcttttgaac

SEQ ID NO: 212442 - DNA, 75 bp, synthetic construct
  source 1..75: mol_type = other DNA
ccatataagccacgcagaataacagttgcagaagcgcttgccattcagtctttgccgaaagagtttgaattgcca

SEQ ID NO: 212443 - DNA, 75 bp, synthetic construct
  source 1..75: mol_type = other DNA
aagcacttgccattcagtctttaccgaaagaatttgaattgccatcttacatgactctttcaaatatgtttaaaa

SEQ ID NO: 212444 - DNA, 75 bp, synthetic construct
  source 1..75: mol_type = other DNA
ttcttccatatctaatggggaagcagacgtacaacaaaatataaaaaatgctgcttcagaagtacgtgctgaaaa

SEQ ID NO: 212445 - DNA, 75 bp, synthetic construct
  source 1..75: mol_type = other DNA
atttcaaaagctatagaaaaagtaaaatctcaaatccgtgcaaaagagaataaaattaaagtagatgaggataac

SEQ ID NO: 212446 - DNA, 75 bp, synthetic construct
  source 1..75: mol_type = other DNA
atgatacaaaagaagctgctggccgttgtgacctcgttgaaaccgataatagttgtgtggagaactgtttaaaag

SEQ ID NO: 212447 - DNA, 75 bp, synthetic construct
  source 1..75: mol_type = other DNA
ttttatcagtatccgctgaatccggttcagtatatagattcaatgggactggcatcaaaatatggacacttaaat

SEQ ID NO: 212448 - DNA, 63 bp, synthetic construct
  source 1..63: mol_type = other DNA
atggatataagccccttacttcatgcactttgtgctgtggctgcgcagatactggttggtctt

SEQ ID NO: 212449 - DNA, 75 bp, synthetic construct
  source 1..75: mol_type = other DNA
aggcagattggctcttcggtatttcgagttgaaactcaggaagatggtaaacatattgctgtcggtcagaggaat

SEQ ID NO: 212450 - DNA, 75 bp, synthetic construct
  source 1..75: mol_type = other DNA
tttcagagagcacatcggtatttttaagtggattcacgcccaggacgcagcagagcaagctgttgaagctatcag

SEQ ID NO: 212451 - DNA, 75 bp, synthetic construct
  source 1..75: mol_type = other DNA
aagtgtgtgacaagtggtttcgtgagcaagaacctcctgaagatattgataaattcatgaattcactacaattag

SEQ ID NO: 212452 - DNA, 75 bp, synthetic construct
  source 1..75: mol_type = other DNA
ccagaggggaaagcctggcttgctaagaagcaggaagagcgagaggaaatcaagttggcgcgagctgcaaacttg

SEQ ID NO: 212453 - DNA, 75 bp, synthetic construct
  source 1..75: mol_type = other DNA
gcgctgaaacgcgacgacatgacagcagagttgctcaatttgtggcatctcacgggtcaggcagacaaagcggcg

SEQ ID NO: 212454 - DNA, 75 bp, synthetic construct
  source 1..75: mol_type = other DNA
gctggaagaagtgctacacgttgctggagcagatttttttgcgagggcttatggcactagggatcatagcagtcg

SEQ ID NO: 212455 - DNA, 75 bp, synthetic construct
  source 1..75: mol_type = other DNA
gaaaacattgcgcagcaacggctttgctggaagaagtgctacacgttgctggagcagatttttttgcgagggctt

SEQ ID NO: 212456 - DNA, 75 bp, synthetic construct
  source 1..75: mol_type = other DNA
tgcccggattcggttgtcggcagtggacggcgcatttacggcagatgtggaagacgctctggacgacgagtccgt

SEQ ID NO: 212457 - DNA, 75 bp, synthetic construct
  source 1..75: mol_type = other DNA
ggtgaagccagattcaaacactatccgggatgtacagacaataggaatgcagacatttgttgagtactatcagta

SEQ ID NO: 212458 - DNA, 75 bp, synthetic construct
  source 1..75: mol_type = other DNA
ttagctcctccgagcactaaagggtacgatgcaacaacttcagaaggtcgaaaaatacagattaaatccaggaaa

SEQ ID NO: 212459 - DNA, 75 bp, synthetic construct
  source 1..75: mol_type = other DNA
tgaaacctttcaatggacgacaattgctggcgtggtgtttgtcatcgtcggtgttgcattaattacgtcaaaagc

SEQ ID NO: 212460 - DNA, 75 bp, synthetic construct
  source 1..75: mol_type = other DNA
tacgcagccagagtcagaacaggataataccggtgctaaactggctgatgaagctggcagcgaacagccggaaga

SEQ ID NO: 212461 - DNA, 75 bp, synthetic construct
  source 1..75: mol_type = other DNA
ccactgcagaagatgtgaaaagcacaggagcaaatgcagccgcagccggacagagcgcacaggatgccgcgggct

SEQ ID NO: 212462 - DNA, 75 bp, synthetic construct
  source 1..75: mol_type = other DNA
cttaaagcaattgattgtgacccacgacaatggatggctgcattacttaccagcaccaactcaaaagtatttggt

SEQ ID NO: 212463 - DNA, 75 bp, synthetic construct
  source 1..75: mol_type = other DNA
ttgccgaagcacaatactggaatcaccgtgcatggttatatcgcagttatggctgggcaaatgataccacacatg

SEQ ID NO: 212464 - DNA, 75 bp, synthetic construct
  source 1..75: mol_type = other DNA
ggggaacccgggaggatttgacgtgtgcacagtggatctggggacgggttgttgcgttgtatgaacaggccgcca

SEQ ID NO: 212465 - DNA, 75 bp, synthetic construct
  source 1..75: mol_type = other DNA
atcagctgatgcaaaatggtgacatgctttacgtaccacgtaatgacgggcaaaaagtattcgtcatgggtgaag

SEQ ID NO: 212466 - DNA, 75 bp, synthetic construct
  source 1..75: mol_type = other DNA
aaaaaatagcgaccatgccgttctgcaagtcgccattcagagtcgtatcaaggtattctggcgaccggctgcatt

SEQ ID NO: 212467 - DNA, 75 bp, synthetic construct
  source 1..75: mol_type = other DNA
cttgacaatttatttctggctcatgaagctggacatgaaaaagcatgggggctttttttacttaatatctttgag

SEQ ID NO: 212468 - DNA, 75 bp, synthetic construct
  source 1..75: mol_type = other DNA
tggatttggtcaggcatttgccagtgccgacgctctggcgtttgagggactgtctgatttcgttgaatggctgaa

SEQ ID NO: 212469 - DNA, 75 bp, synthetic construct
  source 1..75: mol_type = other DNA
gccacaatggaaccacagaatgacactcacgacagaactccgggccgtctggcgattcctggcatgttcggattc

SEQ ID NO: 212470 - DNA, 75 bp, synthetic construct
  source 1..75: mol_type = other DNA
cgcaacaaattaagagcgactgcgagacgctggcggataacgtacagcagaacgcagaagccgttgctgaagata

SEQ ID NO: 212471 - DNA, 75 bp, synthetic construct
  source 1..75: mol_type = other DNA
gcaaaactccgggaaaaatgggatgaactggttatccgcctggggcgttcgcccgcgcagcgttgcgtgaatcac

SEQ ID NO: 212472 - DNA, 75 bp, synthetic construct
  source 1..75: mol_type = other DNA
aacaacaacaacaacaacaacaactactactactactacaggtgcaggtgcaggtgcaggtgcaggtgcaggtgc

SEQ ID NO: 212473 - DNA, 75 bp, synthetic construct
  source 1..75: mol_type = other DNA
tcgcagagaacgccttacggggtgtggccgtgggccggaagaactggttgtgtgtgtcacgaaggagaactgata

SEQ ID NO: 212474 - DNA, 75 bp, synthetic construct
  source 1..75: mol_type = other DNA
cagcgaggaagtcgggcctctccggcttcgtatgtgggtaatgcgcgaagatttccgatgtgcgcgccgcgcatc

SEQ ID NO: 212475 - DNA, 75 bp, synthetic construct
  source 1..75: mol_type = other DNA
cagaatgccgttgcagagttgagtctttctgatggttctgtatttaaaggggagcgtatcaacataggtaatggt

SEQ ID NO: 212476 - DNA, 75 bp, synthetic construct
  source 1..75: mol_type = other DNA
atttcactctgccgggaaactggcaggacagcagcatgaatattctgacgccagtactgagtgcgattgccgggg

SEQ ID NO: 212477 - DNA, 75 bp, synthetic construct
  source 1..75: mol_type = other DNA
gaagaggttgccgataccgctctgaaacagcttgccgccggtacctttgtggcgctggacagcctgctggccttt

SEQ ID NO: 212478 - DNA, 75 bp, synthetic construct
  source 1..75: mol_type = other DNA
cctggattggggaagctgttaccgctgacggtgtgacgttatctgtcccggtcacgccacatacgttccgccatt

SEQ ID NO: 212479 - DNA, 75 bp, synthetic construct
  source 1..75: mol_type = other DNA
cttcgtatgtgggtgacgcgcgaagatttccgatgtgcgcgccgcgcatccgaccattattacgcaggcgaatat

SEQ ID NO: 212480 - DNA, 75 bp, synthetic construct
  source 1..75: mol_type = other DNA
ggcgctgggcagttcgatagagctgatgcagacatttttcgggctttccagtacagatgtggcggcccgtcgcag

SEQ ID NO: 212481 - DNA, 75 bp, synthetic construct
  source 1..75: mol_type = other DNA
agggatattcctgctttgaaggagatggctgttatctccagcaaagaaattggcgaagctgaaggtgtcactcct

SEQ ID NO: 212482 - DNA, 75 bp, synthetic construct
  source 1..75: mol_type = other DNA
ccggatgcggcgtaaaacgccttatccggcctacggttctgtgctcggatcttgtaggcctgataaggcgcgtca

SEQ ID NO: 212483 - DNA, 75 bp, synthetic construct
  source 1..75: mol_type = other DNA
atgacaaatatccttttcatcgtgatttatggcgaaaaccaactgcgtcgaatggctggagctgcacaccgcgca

SEQ ID NO: 212484 - DNA, 75 bp, synthetic construct
  source 1..75: mol_type = other DNA
tcgagttaccaagcagtggtcaggggttaagtagccagcccgaggcgttagaacatgacggcagggttcaacttt

SEQ ID NO: 212485 - DNA, 75 bp, synthetic construct
  source 1..75: mol_type = other DNA
acccggcagatgacctggagccgctacgggcagttgctggcgttcaccgactgctcgggctaccagacccgttat

SEQ ID NO: 212486 - DNA, 75 bp, synthetic construct
  source 1..75: mol_type = other DNA
tctgcataaagcgattggcgctgtcctgagtgaaagcaacccggcttccgcccttaattatctcaaccatgcgtt

SEQ ID NO: 212487 - DNA, 75 bp, synthetic construct
  source 1..75: mol_type = other DNA
gtcagttgccggggctgggtggatttatcagcaaaaatggaacggcaacaggcgcattcggagcctggacagata

SEQ ID NO: 212488 - DNA, 75 bp, synthetic construct
  source 1..75: mol_type = other DNA
ggttaagacgtaagatgcgaaaagcagccatggacagaaactatctggcgtcagttcttgcggggagcgggcttt

SEQ ID NO: 212489 - DNA, 75 bp, synthetic construct
  source 1..75: mol_type = other DNA
gcattcaaattttttgaaagtcagcctaaacgagtctttactaatgataaacgttatgcctcaaagattttgggt

SEQ ID NO: 212490 - DNA, 75 bp, synthetic construct
  source 1..75: mol_type = other DNA
ttgctgataactatgctcttttgggtagtttttgcatacctggcgttcagggtaaattcgaagtacgttcaaata

SEQ ID NO: 212491 - DNA, 75 bp, synthetic construct
  source 1..75: mol_type = other DNA
catacggtagtgcagcagcagaccggagggaataccccagcacaaggtggcactgatgccacaagagcagaagac

SEQ ID NO: 212492 - DNA, 75 bp, synthetic construct
  source 1..75: mol_type = other DNA
ccgatcaatccggtgtctatcatgagcgtgggggatggctgaaagggcatcacagcggtatgccttactgggccc

SEQ ID NO: 212493 - DNA, 75 bp, synthetic construct
  source 1..75: mol_type = other DNA
cagccgggacgaaggctggagcgcagccgccgcacagacgccgcattcccgcagcaagctggactggaacgattt

SEQ ID NO: 212494 - DNA, 75 bp, synthetic construct
  source 1..75: mol_type = other DNA
ttctgctacgccagaacaccagtccacccttgacacggttagcgctgcgcttgcgcaaccgggtgtagggaagaa

SEQ ID NO: 212495 - DNA, 75 bp, synthetic construct
  source 1..75: mol_type = other DNA
agagcgcaatgcttgccgccatcggctttgatgctgatctgttgctgcagacgctggaactgacagacgatctgg

SEQ ID NO: 212496 - DNA, 75 bp, synthetic construct
  source 1..75: mol_type = other DNA
ccggaaagccattaccgcaggcgaccgcgtaaaccgtcagttcggggcagaacgtcctgaccagttgtgggtggc

SEQ ID NO: 212497 - DNA, 75 bp, synthetic construct
  source 1..75: mol_type = other DNA
gaccgaccggaagtgactttgacgcggcgctgaaagcctaccggctgatgtataccgactgcgccgcccgacata

SEQ ID NO: 212498 - DNA, 75 bp, synthetic construct
  source 1..75: mol_type = other DNA
atgaaattcatacggaacgggttatccgcacggaaaccattaaatcggtttttagcaatgtttgtgcttctgatg

SEQ ID NO: 212499 - DNA, 75 bp, synthetic construct
  source 1..75: mol_type = other DNA
accgaaacattcctgaaggcactgagtgacacactggcccggcacgaactaaaacagagcagtaaagtggcttta

SEQ ID NO: 212500 - DNA, 75 bp, synthetic construct
  source 1..75: mol_type = other DNA
acaacaatgccataaacaagttagtaaaaaaacatcgtaatgattacattcttttttcaggatgtgcgccttgtc

SEQ ID NO: 212501 - DNA, 75 bp, synthetic construct
  source 1..75: mol_type = other DNA
aatttacctgccgcgccgctggtgcgctatggctggacgccacgcggcgaactggcggtggtgtatgaccgtagt

SEQ ID NO: 212502 - DNA, 75 bp, synthetic construct
  source 1..75: mol_type = other DNA
cagtttccctttccagagatggatacgctggcttatccaggaaaaagggatggattcgtaactgattattatgca

SEQ ID NO: 212503 - DNA, 75 bp, synthetic construct
  source 1..75: mol_type = other DNA
gaagccgtctggatgtacgtctgcaactttgtgttgagcgttcactgttgccggatgtccggctcagttgccgac

SEQ ID NO: 212504 - DNA, 75 bp, synthetic construct
  source 1..75: mol_type = other DNA
gccactgaaaaaaacgctgaccatgagcgtgagtaatccctccactctgataaatcgcccagtgatgggcaacta

SEQ ID NO: 212505 - DNA, 75 bp, synthetic construct
  source 1..75: mol_type = other DNA
ctgatatcaccgtcactacagacgctatctctgactggatgtagcaatattatactgccggagaaactcccggag

SEQ ID NO: 212506 - DNA, 75 bp, synthetic construct
  source 1..75: mol_type = other DNA
gcgatttgcacgaacccgcgacggcacccgcgacgccctggtccaaaagcgagctggtccggcaattgcgcgacc

SEQ ID NO: 212507 - DNA, 75 bp, synthetic construct
  source 1..75: mol_type = other DNA
cgcgtaaaccggaggagacctggtacgggtgggacggtgacaggctgaccactgtacagacccaacagacaagaa

SEQ ID NO: 212508 - DNA, 75 bp, synthetic construct
  source 1..75: mol_type = other DNA
atccgttatgagtacagcgccgcaggcgacctgacagcaacgatatcaccggacggtaaacgcagcaccatcgaa

SEQ ID NO: 212509 - DNA, 75 bp, synthetic construct
  source 1..75: mol_type = other DNA
ttgccagtggaaaggaagggccatggtgggactttaaacaaacctaccaccaaaacaatgcagcccttgttcacg

SEQ ID NO: 212510 - DNA, 75 bp, synthetic construct
  source 1..75: mol_type = other DNA
ataatgcaagggatgtaattaatgccccggaagtaaaaacagcaattttgcaaagaagtctgtttcgccaggata

SEQ ID NO: 212511 - DNA, 75 bp, synthetic construct
  source 1..75: mol_type = other DNA
gattataaagtaatgccagctgcgtggtacggtgtaccacagacgcgagaaagattagtgctcattgcatccaag

SEQ ID NO: 212512 - DNA, 75 bp, synthetic construct
  source 1..75: mol_type = other DNA
atgggaaatgacccaatcattggtatagaagcctatcctggtaccgcggagatccatgcaaaaatgggatataaa

SEQ ID NO: 212513 - DNA, 75 bp, synthetic construct
  source 1..75: mol_type = other DNA
tgtgatttctgagttcatcaagtctaacaaactgctcgtggtgtatttaaacgttgagtttgggtgtgcgtgggt

SEQ ID NO: 212514 - DNA, 75 bp, synthetic construct
  source 1..75: mol_type = other DNA
tccacacacagataaatcaatacgttgtgatttctgagttcatcaagtctaacaaactgctcgtggtgtatttaa

SEQ ID NO: 212515 - DNA, 75 bp, synthetic construct
  source 1..75: mol_type = other DNA
ggataaccctcgcgataattagttttagcggtggcgttagtttcgacctggcttatttacgttatatttatcaaa

SEQ ID NO: 212516 - DNA, 75 bp, synthetic construct
  source 1..75: mol_type = other DNA
tccacaccgcatctagtctcgctttgattaaagaccttatagtaggttcgattaactttgaaggaaagttccagt

SEQ ID NO: 212517 - DNA, 75 bp, synthetic construct
  source 1..75: mol_type = other DNA
ctcgctttgattaaagaccttgtagaagattcgattaactttgatggagagttccagtatgacaaccaccagtaa

SEQ ID NO: 212518 - DNA, 75 bp, synthetic construct
  source 1..75: mol_type = other DNA
cagggttcagccggggtgcgcattggtgcccccaccggcgtggcctgttcggtgtgccccggcggagtgacgtcc

SEQ ID NO: 212519 - DNA, 75 bp, synthetic construct
  source 1..75: mol_type = other DNA
cgctcacaaaaacgttttgcccttgaagattttgtcgagaaatacccacggcggcttaaatccggcaaaaaccga

SEQ ID NO: 212520 - DNA, 75 bp, synthetic construct
  source 1..75: mol_type = other DNA
ttgatgtcggggcgaagtttgaaatttatcagttaattgccgaactggcgaagaaaggcaaggggattattatta

SEQ ID NO: 212521 - DNA, 75 bp, synthetic construct
  source 1..75: mol_type = other DNA
atgactctgcaaccgtcatctcttccagagctgtttgaattaaaaaatggtgaatggaattatatggtgatgctg

SEQ ID NO: 212522 - DNA, 75 bp, synthetic construct
  source 1..75: mol_type = other DNA
atgagtacctttggtattgcggctattattctttatgccccagcggcgttattgccgataaattttcacaccgca

SEQ ID NO: 212523 - DNA, 75 bp, synthetic construct
  source 1..75: mol_type = other DNA
attctggaacaaggcacgaataattgcatggaatcggtgctgtgtaacgaatcagactttggcataaacatgaac

SEQ ID NO: 212524 - DNA, 75 bp, synthetic construct
  source 1..75: mol_type = other DNA
atgggaaaatttgcggattttaatatcaaaaacaataccgaaaatactaatgtcagccaaagcaatagtggtggt

SEQ ID NO: 212525 - DNA, 75 bp, synthetic construct
  source 1..75: mol_type = other DNA
ttgttcttcggcggtaacagaggcaaaggccaaaggatattcccgggtgaatggttgctattggtgtgccaataa

SEQ ID NO: 212526 - DNA, 75 bp, synthetic construct
  source 1..75: mol_type = other DNA
tcgggcactttcatgtcggaccttttacggatgtgattgatgaaaaaacaatgagttatacacgagaagtaccga

SEQ ID NO: 212527 - DNA, 75 bp, synthetic construct
  source 1..75: mol_type = other DNA
gtggtgccgatctcctaccacttgacgatgaaaagaacttctggagaggcttgcctacaccgagaaattcatggt

SEQ ID NO: 212528 - DNA, 75 bp, synthetic construct
  source 1..75: mol_type = other DNA
aattccgttaactgacatcgtaaagaaccgcaaacaggcaagcttactggtagataaagttgggttcgatcaata

SEQ ID NO: 212529 - DNA, 75 bp, synthetic construct
  source 1..75: mol_type = other DNA
ggcagtgaaggccgcaaaaaatctgggttacacgagggtgaatggatgttactggtgctgcagagattgccatac

SEQ ID NO: 212530 - DNA, 75 bp, synthetic construct
  source 1..75: mol_type = other DNA
gtgaaaaaaagaaagacgggcaaccggtcaaaacgatgtcgggttagcgaagttgaccccgatctcattgcaaag

SEQ ID NO: 212531 - DNA, 75 bp, synthetic construct
  source 1..75: mol_type = other DNA
ttggctttacggataaccctcgatacattgcggagaaaaattatatggaagctttactcaaaaaagcatctcccc

SEQ ID NO: 212532 - DNA, 75 bp, synthetic construct
  source 1..75: mol_type = other DNA
ctgatcttctcgtccttttttggcctggggctgtttatggtgtcattgaacccgacatccgtgaacattcagacc

SEQ ID NO: 212533 - DNA, 75 bp, synthetic construct
  source 1..75: mol_type = other DNA
aagaaagccatccagtatttgatgatattataaaaaatagaatgttatcatatggtggtggttatggatattttt

SEQ ID NO: 212534 - DNA, 75 bp, synthetic construct
  source 1..75: mol_type = other DNA
gaccgggatacactacagaccccggcggggttgcaagtgatggcattggtgcggcagccattggatatcgaactc

SEQ ID NO: 212535 - DNA, 75 bp, synthetic construct
  source 1..75: mol_type = other DNA
aagttgatcccgcaggcaaaatctcagccaccgtcgatggaaagcgcgatggtactgcgcgacggtgcgaagttt

SEQ ID NO: 212536 - DNA, 75 bp, synthetic construct
  source 1..75: mol_type = other DNA
ccctcctcctggcaaataattctaatgaatatcccggtttgttttcagcgatacagcataaacaacaaaatgttg

SEQ ID NO: 212537 - DNA, 75 bp, synthetic construct
  source 1..75: mol_type = other DNA
cggcaggtaatcgtctcatcccggaaagtttcagtggtgaaatcatctggatgcatcccgaaaaccggccttatc

SEQ ID NO: 212538 - DNA, 75 bp, synthetic construct
  source 1..75: mol_type = other DNA
tccactgtggggtcagataacagcaatcctttcaatacagtagaaaggaaaaaagtggggatcatgctgaaggtg

SEQ ID NO: 212539 - DNA, 75 bp, synthetic construct
  source 1..75: mol_type = other DNA
cgttgcgcctcacatcccggcggccttttgccgggatgccaggagcacaggccacggcgcgacaagggtggcgcg

SEQ ID NO: 212540 - DNA, 75 bp, synthetic construct
  source 1..75: mol_type = other DNA
aggcaggagaagaacaaaacagacagtaatcagggcagcagtaatcagagtcagaacaggaggaaaaagagaata

SEQ ID NO: 212541 - DNA, 75 bp, synthetic construct
  source 1..75: mol_type = other DNA
gaccaacgagaacggcagccagtccacgttccggtatgacccggtcgacaggctgacggagcagcgcggctttga

SEQ ID NO: 212542 - DNA, 75 bp, synthetic construct
  source 1..75: mol_type = other DNA
tcctacccgataaaggaaattatcagccgtaaggccagatcggcgacgtttgccgatattgtcaaaaaggtagcg

SEQ ID NO: 212543 - DNA, 75 bp, synthetic construct
  source 1..75: mol_type = other DNA
agcgattcatgtcattagtgcgttctcaacaatgcacagtctggtcatcggacagatcaggacggatgagaaatc

SEQ ID NO: 212544 - DNA, 75 bp, synthetic construct
  source 1..75: mol_type = other DNA
attttcaattcattgtcagagccaggatatgaagggttactctcgaaaaaaaatctcatgcatattctggaggca

SEQ ID NO: 212545 - DNA, 75 bp, synthetic construct
  source 1..75: mol_type = other DNA
tgcaaaatggacatagcgatatcgtgaaagttattcttgaagcattgcccagcctagcccaggaattaacatttc

SEQ ID NO: 212546 - DNA, 75 bp, synthetic construct
  source 1..75: mol_type = other DNA
cgaattaccccaggcagcgagttacccactgctcactgatcaattctcttgttttatatcccctggcacacagca

SEQ ID NO: 212547 - DNA, 75 bp, synthetic construct
  source 1..75: mol_type = other DNA
gtggcccgcgcgaaatccaaaaggcgcttttgctgaccttggcccagtttggactagggaaagataaagagttgt

SEQ ID NO: 212548 - DNA, 75 bp, synthetic construct
  source 1..75: mol_type = other DNA
ggctccgttcacgacagcccgccccgcaagggggacgcccggaaaaggcactgccaggagaacaacaaaacagac

SEQ ID NO: 212549 - DNA, 75 bp, synthetic construct
  source 1..75: mol_type = other DNA
ggaacagtagcagtagcagtagcagtagcagtagcagtagcaggaacaacaacatcatcagtaacagacaaatga

SEQ ID NO: 212550 - DNA, 75 bp, synthetic construct
  source 1..75: mol_type = other DNA
tgaaaatggaaactatgaaactgctgagggattagccaagagaatcagagctaatccacgctataaaaagggaat

SEQ ID NO: 212551 - DNA, 75 bp, synthetic construct
  source 1..75: mol_type = other DNA
tgatcagcagatacgttgggctaaagccgacctggtacaacaagtcagtcgaaaccgattaaacagagcaaggac

SEQ ID NO: 212552 - DNA, 75 bp, synthetic construct
  source 1..75: mol_type = other DNA
gcctgcgggaacgctgaatattaccgttagcggcgcgaacagtgccggaacgcaaaccagcattacccatccgct

SEQ ID NO: 212553 - DNA, 75 bp, synthetic construct
  source 1..75: mol_type = other DNA
gtcgccgccaatggaagctggagcgtaacggttccggcggcggatctggcaaccttgccagacggcacggcgaac

SEQ ID NO: 212554 - DNA, 75 bp, synthetic construct
  source 1..75: mol_type = other DNA
agcatggctgattgttcccggaacagaatctgaatctggtacagtagatgttagcaaagtttcggaaaaaacaaa

SEQ ID NO: 212555 - DNA, 75 bp, synthetic construct
  source 1..75: mol_type = other DNA
tgcaaatgataaccgctcaatatacaataaaatgtttggttggttagcgaactacggtatacctcaagaaaaatg

SEQ ID NO: 212556 - DNA, 75 bp, synthetic construct
  source 1..75: mol_type = other DNA
cataaaaatattgcattgatagatgttggctggatggggaatatacaatccgttttcgctcgctcacttagcgat

SEQ ID NO: 212557 - DNA, 75 bp, synthetic construct
  source 1..75: mol_type = other DNA
tgcgacatcgcggccatcaggtcgataagcatgttattgatggcggttatcacggcgcgggtgattgggtcagcc

SEQ ID NO: 212558 - DNA, 75 bp, synthetic construct
  source 1..75: mol_type = other DNA
atgttatcaatgacctgcaattatttgatcagcagattcgttggccaaagccgacctggtacaacaagtcagtcg

SEQ ID NO: 212559 - DNA, 75 bp, synthetic construct
  source 1..75: mol_type = other DNA
atgttatcaatgacctgcaattctttgatcagcagattcgttgggccaaagccgacctggtacaacaagtcagtc

SEQ ID NO: 212560 - DNA, 75 bp, synthetic construct
  source 1..75: mol_type = other DNA
acaacacaggctccacaataggttataaaaagactgctgacggcattatccccgtaagagaaaaaaacagtgatt

SEQ ID NO: 212561 - DNA, 75 bp, synthetic construct
  source 1..75: mol_type = other DNA
tgatcagcggcaccaccaccgcgcccgtcgggcagacgctgaccctgaccttaaacggcaaaacctacaccacca

SEQ ID NO: 212562 - DNA, 75 bp, synthetic construct
  source 1..75: mol_type = other DNA
ggtacgcttggtgaagcgacttataccgtgaccgcctccgctactgacgccgatggcaacagcggttccgccagc

SEQ ID NO: 212563 - DNA, 75 bp, synthetic construct
  source 1..75: mol_type = other DNA
acgattggcagcaacacgtataccaccgtgctggacgccaatggcaactggagcatcggcgtgcctgccagcgtg

SEQ ID NO: 212564 - DNA, 75 bp, synthetic construct
  source 1..75: mol_type = other DNA
gcgcaacggtactcgccgatggcacctggagcgtcggtgttccggcggcagatgtcacaaactggcctgcgggga

SEQ ID NO: 212565 - DNA, 75 bp, synthetic construct
  source 1..75: mol_type = other DNA
ggcggctgggtgtacagctccggcaccggaacgtggctggcaaacggcggcatggacgtggttgatttccgcctc

SEQ ID NO: 212566 - DNA, 75 bp, synthetic construct
  source 1..75: mol_type = other DNA
agctggggcggcttacaggccaccgatgccactcacgcttacgacctcagcgccgaagcaggcaccgcgagcaac

SEQ ID NO: 212567 - DNA, 75 bp, synthetic construct
  source 1..75: mol_type = other DNA
ccattggcaacaccggcagcagcaatcacaccattaccgtcgacctcagcgccccggcgatgggcattaatatcg

SEQ ID NO: 212568 - DNA, 75 bp, synthetic construct
  source 1..75: mol_type = other DNA
accgcgaatttaagcgtcaccaccgcgcaggccaccggttttaacacctcgacatttaccaatatcgaaggcatt

SEQ ID NO: 212569 - DNA, 75 bp, synthetic construct
  source 1..75: mol_type = other DNA
tttccgcctctcgacggtgggcgtgaccgcgaatttaagcgtcaccaccgcgcaggccaccggttttaacacctc

SEQ ID NO: 212570 - DNA, 75 bp, synthetic construct
  source 1..75: mol_type = other DNA
ccatgctggcgcaaatcaccagccagaccacgcgcgatactacgccgattatcagcggggtgatcaccgccgcgc

SEQ ID NO: 212571 - DNA, 75 bp, synthetic construct
  source 1..75: mol_type = other DNA
taccgtggcaggcgatgatgtgattaacagcattgagcacgttcaggcactggtggtcaccggtagcagtaccgg

SEQ ID NO: 212572 - DNA, 75 bp, synthetic construct
  source 1..75: mol_type = other DNA
ctcgacggtgggcgtgacggctaacttaagcagcaccgccgcgcaggccaccggttttaacacctcgacatttac

SEQ ID NO: 212573 - DNA, 75 bp, synthetic construct
  source 1..75: mol_type = other DNA
accgtgcccgcctcggcggtcagtgcgctgggcgaagcgacctacagcgtgacggcgagcgtcaccaatgctcag

SEQ ID NO: 212574 - DNA, 75 bp, synthetic construct
  source 1..75: mol_type = other DNA
aggaacagccagcgccagaagaacagccggaagaaaccaccacggcgacagtagcgaaaatctcaaagtgcgatt

SEQ ID NO: 212575 - DNA, 75 bp, synthetic construct
  source 1..75: mol_type = other DNA
gaaggagccaggggatccaaatagtggcgagggaaaaatcattgaaattcatacctcaacctcaacttctagcct

SEQ ID NO: 212576 - DNA, 75 bp, synthetic construct
  source 1..75: mol_type = other DNA
tgctggatatccagcagaagaaagtggagagggcgaccggcgttgatttgccgagttatggcggtgtcgtagcga

SEQ ID NO: 212577 - DNA, 75 bp, synthetic construct
  source 1..75: mol_type = other DNA
tgagccaccaggagcgcaacagcgtgcgggcggcatatgtgcataaagcagagcatctggagggctttgttgaat

SEQ ID NO: 212578 - DNA, 75 bp, synthetic construct
  source 1..75: mol_type = other DNA
attgaggatgcaattgcttgtatagaccaggcactgttacttgaacctgatatgcataaagctgtggtaataaaa

SEQ ID NO: 212579 - DNA, 75 bp, synthetic construct
  source 1..75: mol_type = other DNA
atgaacgagcataaagatgcaactcaaaaagcattagcatttatagataaggtgtcagataaaactatttgtgat

SEQ ID NO: 212580 - DNA, 75 bp, synthetic construct
  source 1..75: mol_type = other DNA
acgcaatccgcgccgggatgggagctatataacacccctgatgattttgaccagcgcccaccattcgacgatgaa

SEQ ID NO: 212581 - DNA, 75 bp, synthetic construct
  source 1..75: mol_type = other DNA
caggggaattaatagatgatgttgttgcgcaaatagcagaacaagctaaagcggcgggggaacaggccagacagg

SEQ ID NO: 212582 - DNA, 75 bp, synthetic construct
  source 1..75: mol_type = other DNA
gacaacgcccgcaagtcgggcacacataccgcgtcaagccttgcgctgattcacacgttggttactgaccagatc

SEQ ID NO: 212583 - DNA, 75 bp, synthetic construct
  source 1..75: mol_type = other DNA
atttgaactatatgatgataactacagcgacatagtgaattcatttttaggcgtgtttaattcttttgaagaatt

SEQ ID NO: 212584 - DNA, 75 bp, synthetic construct
  source 1..75: mol_type = other DNA
aagctcgtaatcgtagttaccagcaactggcaaaacagaataatgtatccacagatgagatagcgaaactggcag

SEQ ID NO: 212585 - DNA, 75 bp, synthetic construct
  source 1..75: mol_type = other DNA
ggtgacgtggtacgggtgggacggcgaccggctgacgacggtacagaccgacaccacgcgtatccagacggtata

SEQ ID NO: 212586 - DNA, 75 bp, synthetic construct
  source 1..75: mol_type = other DNA
atgaagcctttagccgcctgactccgcaggccagcgaaatgctgttgcagcgcttacaacactgggcgtttgaac

SEQ ID NO: 212587 - DNA, 75 bp, synthetic construct
  source 1..75: mol_type = other DNA
gtgatcaagagtacgctcgcttgcagtccattgatcctgaaggtaaagacaaatttgtatttactggaggccgtg

SEQ ID NO: 212588 - DNA, 75 bp, synthetic construct
  source 1..75: mol_type = other DNA
agccgtggctgaaggctgctgtgcgcaaagaatttgtcgatgataaccgggtgaaagtgaataatgacggtaatt

SEQ ID NO: 212589 - DNA, 75 bp, synthetic construct
  source 1..75: mol_type = other DNA
ggcatctcggggtggggtatagccatggtgccggtgtggaatccccgtggaatgcggtagctggtgtgaactggt

SEQ ID NO: 212590 - DNA, 75 bp, synthetic construct
  source 1..75: mol_type = other DNA
gatgattttacggaaacactgaatgtaattgaaaatgatggggggtatattactatatctaagttgaaaacgatt

SEQ ID NO: 212591 - DNA, 75 bp, synthetic construct
  source 1..75: mol_type = other DNA
attttactgacagggatagtgtgtacagttgttttaaatgaaatcgatgctcaatgccatttatcagaaaattaa

SEQ ID NO: 212592 - DNA, 75 bp, synthetic construct
  source 1..75: mol_type = other DNA
ttttgcctgtcttagttttggccttccagtaattcttgtaggaggagcaattttacttacagggatagtgtgtac

SEQ ID NO: 212593 - DNA, 75 bp, synthetic construct
  source 1..75: mol_type = other DNA
aaatcacaagaaaaattgaagtgttattgaatcagtttccagtaaacccggtaaatgaaaatgatgcttctgttc

SEQ ID NO: 212594 - DNA, 75 bp, synthetic construct
  source 1..75: mol_type = other DNA
catagtgcgttcagccgtcaatttaaggcgatgacaggctcaactccgcgtgattttcggatgacgttgatgggg

SEQ ID NO: 212595 - DNA, 75 bp, synthetic construct
  source 1..75: mol_type = other DNA
acgtcatcgcacacctttcctgaactactgccagcaagcgtggcaattgcaaaacggagcgctccagccactatg

SEQ ID NO: 212596 - DNA, 75 bp, synthetic construct
  source 1..75: mol_type = other DNA
taaaaaactattatacatatacaggaagcgtaaaaaacaatattcctacatttgacggagtcgttacaaccgcaa

SEQ ID NO: 212597 - DNA, 75 bp, synthetic construct
  source 1..75: mol_type = other DNA
atccattcgctaaagaaaaactgatgccgcagttattttttttaaatctggttggtgatggatatggtggaagat

SEQ ID NO: 212598 - DNA, 75 bp, synthetic construct
  source 1..75: mol_type = other DNA
gatattaggggcacagaaatgtttttaaatggctatcataatgctaaagcaaaggatattgttcctgaatttgac

SEQ ID NO: 212599 - DNA, 75 bp, synthetic construct
  source 1..75: mol_type = other DNA
ataaaggtggcgttggtaaaacaacggttacttccaacttggctgccgagttagcatggcgtggaaaaaaagtat

SEQ ID NO: 212600 - DNA, 75 bp, synthetic construct
  source 1..75: mol_type = other DNA
acagggctgatgcggaaatgttgaaagaacaaaagtatgcagagtatcgtttacgtcagaaaaatgccaaaatac

SEQ ID NO: 212601 - DNA, 75 bp, synthetic construct
  source 1..75: mol_type = other DNA
ctttgaagaacttattaaaggacataaaaatcctcatactattactttggatcaagcaatatcgatagctacaca

SEQ ID NO: 212602 - DNA, 75 bp, synthetic construct
  source 1..75: mol_type = other DNA
ttaaagttcatggtaaacttagagaggaacttcaaatactagctgacgaaatgaattatgatgttgttttaattg

SEQ ID NO: 212603 - DNA, 75 bp, synthetic construct
  source 1..75: mol_type = other DNA
acgtttgaatggaacggtcgtatctggaatgctggccccgactcactgggccgcctgtccccggtagtcatgctg

SEQ ID NO: 212604 - DNA, 75 bp, synthetic construct
  source 1..75: mol_type = other DNA
acaaactctgtatttcgcctgtaacggggattatctgctctgttgctgaagatgtctctgctttatatccggcag

SEQ ID NO: 212605 - DNA, 75 bp, synthetic construct
  source 1..75: mol_type = other DNA
aagatatggatgacaaaaatataaatgacaacgatctaattaacgaagatattattaagttcatttatgtcctat

SEQ ID NO: 212606 - DNA, 75 bp, synthetic construct
  source 1..75: mol_type = other DNA
acactggcgaagtacctgacagatactgagggatgccatccgtgcatcatttttatggaagggaacgcaggcttt

SEQ ID NO: 212607 - DNA, 75 bp, synthetic construct
  source 1..75: mol_type = other DNA
atgcggcagcgtcacaacaatcagccgccacttctgcatccaccgcgaccacgaaagcgtcagaagctgccacct

SEQ ID NO: 212608 - DNA, 75 bp, synthetic construct
  source 1..75: mol_type = other DNA
ccaatgctttagatagttttaatgaagccatcaaaaaattccagcaaggagaaaatggagattataaagctttca

SEQ ID NO: 212609 - DNA, 75 bp, synthetic construct
  source 1..75: mol_type = other DNA
aaaaacagggctgatgcggaaatgttgaaagagcaaaagtatgctgagtatcgcctgcgtcagaaaaatgcaaag

SEQ ID NO: 212610 - DNA, 75 bp, synthetic construct
  source 1..75: mol_type = other DNA
ggttatcatggcagcaataaaaaatggtgatgatgacgaaactgtagataaaaaaaataaaattaatatcatatt

SEQ ID NO: 212611 - DNA, 75 bp, synthetic construct
  source 1..75: mol_type = other DNA
aagataagtatcttatcactcgcagaaaattactcttattatcattaccttttggttatgcaatagttaatgaga

SEQ ID NO: 212612 - DNA, 75 bp, synthetic construct
  source 1..75: mol_type = other DNA
atatggtgccgtttgcgctggtggcgcagaaaacccagaccgttacgccagagacagtggctctgcgtcttttcc

SEQ ID NO: 212613 - DNA, 75 bp, synthetic construct
  source 1..75: mol_type = other DNA
acttttaaagttgattatatcgctacggggaaagcgacttcaggtaatgtgaatgcggtaacaaatttccatatt

SEQ ID NO: 212614 - DNA, 75 bp, synthetic construct
  source 1..75: mol_type = other DNA
ggatattcgtcgggtaccgcggcgcgcaaccggcacacgttggcttggtgctgaaccgaaaagccattcatgcgc

SEQ ID NO: 212615 - DNA, 75 bp, synthetic construct
  source 1..75: mol_type = other DNA
gtggccgggcgagcaatgatgcggaagggtatctggactttttcagaggagaaatcgggaagacacatctggcac

SEQ ID NO: 212616 - DNA, 75 bp, synthetic construct
  source 1..75: mol_type = other DNA
ccagtcacattcgtggcggataaggacagcgcagttgtcgttctgcaaacatcgaaagcggaaatcattgggaat

SEQ ID NO: 212617 - DNA, 75 bp, synthetic construct
  source 1..75: mol_type = other DNA
tcaacaggtgaattttatcggtgatcaaagtactgctgccctgaccctcagtgtgcccccaggcgagatcaccgt

SEQ ID NO: 212618 - DNA, 75 bp, synthetic construct
  source 1..75: mol_type = other DNA
tttcttttgacgctcgggatctacatgcttttctggctactgaactctatcccacacataatcaatattttccga

SEQ ID NO: 212619 - DNA, 75 bp, synthetic construct
  source 1..75: mol_type = other DNA
gtattttgaaaacggcgtgcataaaaaatggtcaggcgtcggacgcgtgccggttgtaattcagcaagaacttga

SEQ ID NO: 212620 - DNA, 75 bp, synthetic construct
  source 1..75: mol_type = other DNA
aaaggatatgatgtaattattatcactctcaaaaattataatcaatatgttacgttacctcaagaaatcattgat

SEQ ID NO: 212621 - DNA, 75 bp, synthetic construct
  source 1..75: mol_type = other DNA
tggatgccagtacgctgacggcgttaaacccgaatcggttatgggtgcggaaattgttgaagggtaaagcggtta

SEQ ID NO: 212622 - DNA, 75 bp, synthetic construct
  source 1..75: mol_type = other DNA
cactacaaaaccgcatacgtgaagggcatgtggaagatgtttatgcgtatcggcgcaggcaaagatttagcgtac

SEQ ID NO: 212623 - DNA, 75 bp, synthetic construct
  source 1..75: mol_type = other DNA
ttgtatttaattcagcggaagcattttcgaaaaccattaatagtgttaagaaacaaacatactctaatgtcgaat

SEQ ID NO: 212624 - DNA, 75 bp, synthetic construct
  source 1..75: mol_type = other DNA
gattggtttggacttggctggtaatgaagatataaaccaccacctgagactgcaagtttatttagaagtgctaaa

SEQ ID NO: 212625 - DNA, 75 bp, synthetic construct
  source 1..75: mol_type = other DNA
atggatctttacgaagctcgaatgatggataaaggagaattacatgttcatttgaatggattggtaagcactcaa

SEQ ID NO: 212626 - DNA, 75 bp, synthetic construct
  source 1..75: mol_type = other DNA
agttagaaaggggtaaggttcaagataataaattcaatcaatatgttaaacgtatcacattaaaaaatgtcagag

SEQ ID NO: 212627 - DNA, 75 bp, synthetic construct
  source 1..75: mol_type = other DNA
ataaagcgatctggcgctgcattatccgatcggataaaggctggtcgcccgttgaaccgctgacgctgctgcgcc

SEQ ID NO: 212628 - DNA, 75 bp, synthetic construct
  source 1..75: mol_type = other DNA
atgctgaagtggctacaaagaccatcccagaaccagccacctgcgccagacactgcgctgccggagggctggttt

SEQ ID NO: 212629 - DNA, 75 bp, synthetic construct
  source 1..75: mol_type = other DNA
agaaatatttgcgatgagctaagtggtgtaagcagcgtaagattagctttgatgtgtatgaactaccagtatgag

SEQ ID NO: 212630 - DNA, 75 bp, synthetic construct
  source 1..75: mol_type = other DNA
tacccgtgagtagcgcggtcatgctggtttcttatctgcctttactcttttccgcgctggtgtttagccagcaaa

SEQ ID NO: 212631 - DNA, 75 bp, synthetic construct
  source 1..75: mol_type = other DNA
cggtaattccattttcaccgtttgtttcatccattggtttattaacccagacaggcgattacacgcggcgttcgt

SEQ ID NO: 212632 - DNA, 75 bp, synthetic construct
  source 1..75: mol_type = other DNA
ttcaaacgtgaattgactggcgtcatcgcacgtcttgaccttgctgaccagatcgacagcaaaaggaatgcagca

SEQ ID NO: 212633 - DNA, 75 bp, synthetic construct
  source 1..75: mol_type = other DNA
gtcaaactccggggaaaacactcgccgtcatatctaaaactaaatcaatttgcttatcatgtgattttaaaatag

SEQ ID NO: 212634 - DNA, 75 bp, synthetic construct
  source 1..75: mol_type = other DNA
cccgttaacctgatgcgtggtgccatgcagcaacttgcccggcgctggcagaaaaattttgacgaaatggccctg

SEQ ID NO: 212635 - DNA, 75 bp, synthetic construct
  source 1..75: mol_type = other DNA
gatcgcttcgtcgataagacgctgcgcaacactgatgtttcgcttcactctgcattaaaaactgctggctttacc

SEQ ID NO: 212636 - DNA, 75 bp, synthetic construct
  source 1..75: mol_type = other DNA
acggtgaatacccggaacggcaaggtacatgtggtggaaaaccatcttttcttgatttcgccggggatctttaag

SEQ ID NO: 212637 - DNA, 75 bp, synthetic construct
  source 1..75: mol_type = other DNA
ctggactcatggtatgaattcattaatgcgtgatgcttccgcgtttgatttcgaagaaaatattcgtttaaccaa

SEQ ID NO: 212638 - DNA, 75 bp, synthetic construct
  source 1..75: mol_type = other DNA
tataatagcagtgcatcgggtaatgtcggcaccgcctggggggggggatgtgcactcaacggttcagggcgtatc

SEQ ID NO: 212639 - DNA, 75 bp, synthetic construct
  source 1..75: mol_type = other DNA
ggctgctcggctggtgtgagcgggtgccggaagcggatgaggtgctgcctgcgccgctgccgtcgtaccgggtac

SEQ ID NO: 212640 - DNA, 75 bp, synthetic construct
  source 1..75: mol_type = other DNA
agtcaggcatttatgacagaacgcaggggcgggccgctgttgcaggaagtctgggattcgggcatatcttcacaa

SEQ ID NO: 212641 - DNA, 75 bp, synthetic construct
  source 1..75: mol_type = other DNA
tctgcagcaacacgtgcagagaatgcggccagacgggcagaggagattgcatctgctgtgagcctggaggatgcc

SEQ ID NO: 212642 - DNA, 75 bp, synthetic construct
  source 1..75: mol_type = other DNA
agagcgcatccgctgcggcgggctctgaaaaagcagctgcatcattggccggcgaggcatccggtaaggcggaag

SEQ ID NO: 212643 - DNA, 75 bp, synthetic construct
  source 1..75: mol_type = other DNA
agggccaacagcggtactgaagtcagtcagtaagctcgataacacgctgctgtctaacggtacgttgctgaacgt

SEQ ID NO: 212644 - DNA, 75 bp, synthetic construct
  source 1..75: mol_type = other DNA
gtttacaacgagccatgtgttcttgccggatgccgcgtaaacgccgtatccagccgacaaaactgtccagactca

SEQ ID NO: 212645 - DNA, 75 bp, synthetic construct
  source 1..75: mol_type = other DNA
ttgaaagggtttctgatggaggatcctgggctggtgcttggagagaaaataccggtgaataacccgtggctgaag

SEQ ID NO: 212646 - DNA, 75 bp, synthetic construct
  source 1..75: mol_type = other DNA
gaggtgctgcatacagaaggcggggccgggctgaaacgggtggtgaaaaaagaactggcggacggcagcgtcacg

SEQ ID NO: 212647 - DNA, 75 bp, synthetic construct
  source 1..75: mol_type = other DNA
ccccattgtccagggttcggcaggtgtaagaattggtgcgccaactggtgtggcgtgctcggtgtgtccgggcgg

SEQ ID NO: 212648 - DNA, 75 bp, synthetic construct
  source 1..75: mol_type = other DNA
atttaacgaatatattaaatggtgaatatgaaaaagaaattcatgattgggataaaataaaggcagtactattgc

SEQ ID NO: 212649 - DNA, 75 bp, synthetic construct
  source 1..75: mol_type = other DNA
aagattttcttgccgaacttgcggaactttccgccagtcttcgtcgcaccattgaagcggaagatgtgggctttg

SEQ ID NO: 212650 - DNA, 75 bp, synthetic construct
  source 1..75: mol_type = other DNA
cactgtctgtgctggtcgtttgagtccgttcagtttcaggagtttctgcgtaccgtgctggttgagcgttcggcg

SEQ ID NO: 212651 - DNA, 75 bp, synthetic construct
  source 1..75: mol_type = other DNA
aatttttaatgaccagggacgagcaaatcttaccatcgactttatgtataacaaaaaaataaaacaggaactgtt

SEQ ID NO: 212652 - DNA, 75 bp, synthetic construct
  source 1..75: mol_type = other DNA
cgatgatttcaacgcccgcgcccgtgacctactgtcattgcgcagtgtgtttgaagatgggccggacgcgggcaa

SEQ ID NO: 212653 - DNA, 75 bp, synthetic construct
  source 1..75: mol_type = other DNA
aaatcatccaggccacggggagccagaacgatgcaatagcggctccccgtggtgaagccaaatccaccatcgtga

SEQ ID NO: 212654 - DNA, 75 bp, synthetic construct
  source 1..75: mol_type = other DNA
agatggatgaaggagctgttgtttcatgggctgcgcgtccgctttatgcattgatgctcatccgcgcccgtgatg

SEQ ID NO: 212655 - DNA, 75 bp, synthetic construct
  source 1..75: mol_type = other DNA
tctatctgctaatgctcttcaatatgtgcaggaacaccattcatggactggtaagttagctccttttacagccaa

SEQ ID NO: 212656 - DNA, 75 bp, synthetic construct
  source 1..75: mol_type = other DNA
ataagttcgtcagcatgcagttcattactgaactgactgggttatccgataaatggttttataagcttgcacagg

SEQ ID NO: 212657 - DNA, 75 bp, synthetic construct
  source 1..75: mol_type = other DNA
gtggaacaatacaggacgccgtccggtaacggtgttgagcctcggttgtgtggtgattattgtcgccgctaacat

SEQ ID NO: 212658 - DNA, 75 bp, synthetic construct
  source 1..75: mol_type = other DNA
accattctaaataccccgctcgttggctccgtgcttaacggtggaataaatattatctccggagtgtttaattcg

SEQ ID NO: 212659 - DNA, 75 bp, synthetic construct
  source 1..75: mol_type = other DNA
gaagcgggtagaaatatgatggctcatattaagtcctcatcttatatcaaaaataatgatggtagtgagataatg

SEQ ID NO: 212660 - DNA, 75 bp, synthetic construct
  source 1..75: mol_type = other DNA
taatggaaaaaaactcgtgttcattggtaatatgtattctgcccaaaattttgatgctgcctactggtttgcaaa

SEQ ID NO: 212661 - DNA, 75 bp, synthetic construct
  source 1..75: mol_type = other DNA
cgttaaaaatcatgattggtagtgacgcggttatctattgcgatccgccatacctgccaacaagcgaaaccgcta

SEQ ID NO: 212662 - DNA, 75 bp, synthetic construct
  source 1..75: mol_type = other DNA
gtggggcaaacatgccgcgtgatgcgcaggccgtcagggtcgcccgtaaggtgacggatgaggtcaacgaatatg

SEQ ID NO: 212663 - DNA, 75 bp, synthetic construct
  source 1..75: mol_type = other DNA
gtgaccagtatgcgtgcctgccggatatgaatgacaaagagcttaagaaatttgcggccagaattgcttctcaac

SEQ ID NO: 212664 - DNA, 75 bp, synthetic construct
  source 1..75: mol_type = other DNA
cgcgacagaccccttacacgtgccgaactccgtcaggtgcaaggtgttttaaaccggattgatcgcctgccgttt

SEQ ID NO: 212665 - DNA, 75 bp, synthetic construct
  source 1..75: mol_type = other DNA
acccggtcggaacgaatgcaaattacccgtatccgcgttgaccttgctcagaacggtatcaggccgcagcgatgg

SEQ ID NO: 212666 - DNA, 75 bp, synthetic construct
  source 1..75: mol_type = other DNA
accgtctgagcaagccgcagcggtgttaaatctgattgagcgcggagttatcggatggaatgagccagacgtcat

SEQ ID NO: 212667 - DNA, 75 bp, synthetic construct
  source 1..75: mol_type = other DNA
accgtctgagcaagccgcagcggtgttaaatctgattgaggccggggttatcggctggaatgagccagacgtcat

SEQ ID NO: 212668 - DNA, 75 bp, synthetic construct
  source 1..75: mol_type = other DNA
gcggcgcttgaactgctgaaatccccggacctgaccgcgcgtatcaccgatgacctggccgcctgtggggtggtg

SEQ ID NO: 212669 - DNA, 75 bp, synthetic construct
  source 1..75: mol_type = other DNA
acctgccgtcaccgctgtgcggtgtgtggaatgaggcggcgatgcagaacgcctccgacctcatcctgtgtgaat

SEQ ID NO: 212670 - DNA, 75 bp, synthetic construct
  source 1..75: mol_type = other DNA
tcgccgtgccggtggtgggtgctgccctgactgcggcccttgtgctggttattccgtgtggggtggaacggctga

SEQ ID NO: 212671 - DNA, 75 bp, synthetic construct
  source 1..75: mol_type = other DNA
cattacaacaagcagtaaaacaaaattacccgcaagcatggcaatgtgcggaacggatcgccatttttattggtt

SEQ ID NO: 212672 - DNA, 75 bp, synthetic construct
  source 1..75: mol_type = other DNA
taccaggaagaaagcttgagttatcagcgactggttacacatctgaagtttttatcctggcgtattcttgaacat

SEQ ID NO: 212673 - DNA, 75 bp, synthetic construct
  source 1..75: mol_type = other DNA
cacaagtcagggtcaggtctgcccgttgtctggtgctgagccgacgacttcaggccatacagtacagggcccgga

SEQ ID NO: 212674 - DNA, 75 bp, synthetic construct
  source 1..75: mol_type = other DNA
gtattctctcaggaacaggacggcattaaatcgcaaacccacagcgccagcgcatccagtactgatttggggacg

SEQ ID NO: 212675 - DNA, 75 bp, synthetic construct
  source 1..75: mol_type = other DNA
gtattttctcaggaacaggacggcattaaatcgcagacccacagcgccagcgcatccagtacagatttggggacg

SEQ ID NO: 212676 - DNA, 75 bp, synthetic construct
  source 1..75: mol_type = other DNA
gggcaaccctgccagtggtcgggccgtattttctcaggaacaggacggcattaaatcgcagacccacagcgccag

SEQ ID NO: 212677 - DNA, 75 bp, synthetic construct
  source 1..75: mol_type = other DNA
gtaaccgtgacatacacacagacagaccgctacgggcgtattcctggacgggtatataccgaagacggcatggaa

SEQ ID NO: 212678 - DNA, 75 bp, synthetic construct
  source 1..75: mol_type = other DNA
gtattgtctcaggaacaggacggcattaaatcgcatacccacagcgccagcgcatccagtaccgatttggggacg

SEQ ID NO: 212679 - DNA, 75 bp, synthetic construct
  source 1..75: mol_type = other DNA
gtattctctcaggaacaggacggcattaaatcgcatacccacagcgccagcgcatccagtacggatttggggacg

SEQ ID NO: 212680 - DNA, 75 bp, synthetic construct
  source 1..75: mol_type = other DNA
tgactacatcagtatcatgcccaaaccagacgggttaacggcagcaaagaaccttacagaggcgttcgagcatta

SEQ ID NO: 212681 - DNA, 75 bp, synthetic construct
  source 1..75: mol_type = other DNA
tttcagggatccgtgaacggcagcttaatgagtttgtgaaacttaatcagcgtttaccgatgccatcaaacagcg

SEQ ID NO: 212682 - DNA, 75 bp, synthetic construct
  source 1..75: mol_type = other DNA
aacaggtaatttaaaggcttggatgctcggaattcttctcttatccgttgcaatgccagtcataactttgctcgt

SEQ ID NO: 212683 - DNA, 75 bp, synthetic construct
  source 1..75: mol_type = other DNA
gggcaatcctgccagtggtcgggccgtattctctcaggaacaggacggcattaaatcgcagacccacagcgccag

SEQ ID NO: 212684 - DNA, 75 bp, synthetic construct
  source 1..75: mol_type = other DNA
aaatgcattgatggcattacagctaattccgatcgaactgcagagatggtaatgcattcctgcggtattgtgact

SEQ ID NO: 212685 - DNA, 75 bp, synthetic construct
  source 1..75: mol_type = other DNA
agtagagtggctgacggataatggttcatgctaccgggttaatgaaacacgccagttcgcccggatgttgggact

SEQ ID NO: 212686 - DNA, 75 bp, synthetic construct
  source 1..75: mol_type = other DNA
tttgtggctgtggtgggattgtttaaccggccggatcagaaggacaatcgctggcgcctggtactgacccgtgat

SEQ ID NO: 212687 - DNA, 75 bp, synthetic construct
  source 1..75: mol_type = other DNA
atgacgattgcagaacgtcttgagcaaaaaggtcgccaggaaggagcgcttgaaaaagccctggctattgcgtgc

SEQ ID NO: 212688 - DNA, 75 bp, synthetic construct
  source 1..75: mol_type = other DNA
gaccacctgcaccagtttcatatttacggtaaagattacggtatcacttacgaggggagcattggttttccggat

SEQ ID NO: 212689 - DNA, 75 bp, synthetic construct
  source 1..75: mol_type = other DNA
cgaggggagcattggttttccggataagccggaaaccggatctgcgcggcggggaacgggcaggaaatatgatga

SEQ ID NO: 212690 - DNA, 75 bp, synthetic construct
  source 1..75: mol_type = other DNA
ccgcatgtggccgctatttttcgagttctgcttttctaccatgtgggcatttgcctatgcgatcagtatcgtgct

SEQ ID NO: 212691 - DNA, 75 bp, synthetic construct
  source 1..75: mol_type = other DNA
caatactggtgcatgaggatgttgatgtcggaagaaataagcgggtgctgtctgataaatttgatgaagatggcc

SEQ ID NO: 212692 - DNA, 75 bp, synthetic construct
  source 1..75: mol_type = other DNA
agcaaaaaggtcgccaggaaggagcgcttgaaaaagccctggctattgcgtgccagcttcagaaaatggggatga

SEQ ID NO: 212693 - DNA, 75 bp, synthetic construct
  source 1..75: mol_type = other DNA
tttgccaaccaggctaccaccgatgcagcgacgaatgcacctaaaaatcacatcagggtaatgctgccaacttac

SEQ ID NO: 212694 - DNA, 75 bp, synthetic construct
  source 1..75: mol_type = other DNA
gacgtttacctttagtggtacggctgacggcgtgcaacctacagcatttgccaaccaggctaccaccgatgcagc

SEQ ID NO: 212695 - DNA, 75 bp, synthetic construct
  source 1..75: mol_type = other DNA
tggtctctgcaacgttgctggcaatcttcttcgtaccggtgttctttgtggtgatccgccgttgctttaaaggat

SEQ ID NO: 212696 - DNA, 75 bp, synthetic construct
  source 1..75: mol_type = other DNA
acctggtgaaaaactccgccatcgcctcgactattggtctggtggatatggcggcgcaggcgggtaaattgcttg

SEQ ID NO: 212697 - DNA, 75 bp, synthetic construct
  source 1..75: mol_type = other DNA
caccgaatgcgccctgcaactggccgctgccgccttgcgggcaatcggtgaacacacccttgcagaaaatttact

SEQ ID NO: 212698 - DNA, 75 bp, synthetic construct
  source 1..75: mol_type = other DNA
cattatctatagtgtttgtcggggaaaagatcccattattggggaatctttttttaccatcgttcgtagctcatt

SEQ ID NO: 212699 - DNA, 75 bp, synthetic construct
  source 1..75: mol_type = other DNA
cgcgaagttcgctccgtcgcttatcaaatgagtgcagcccgcttcccggcgtaccgggacttgtacggttttaac

SEQ ID NO: 212700 - DNA, 75 bp, synthetic construct
  source 1..75: mol_type = other DNA
tgtgtcgacaccttcccaaaatccgttagaagaagtatgctatactgtaattttatacagcttattgagcaattt

SEQ ID NO: 212701 - DNA, 75 bp, synthetic construct
  source 1..75: mol_type = other DNA
aaaaacgtgcaaaggaatctggtgtcactttgctgtacaccccctttgcccgtgaagcattcgttttcatcgtca

SEQ ID NO: 212702 - DNA, 75 bp, synthetic construct
  source 1..75: mol_type = other DNA
aaaaccgacctcatcccggaaggggttatccgtacggatgatgagcggactcaccggtaccattacgacagccgg

SEQ ID NO: 212703 - DNA, 75 bp, synthetic construct
  source 1..75: mol_type = other DNA
cactttgggagaaaggcagtccgctgcataaatctacgcaacaggttagaacccaaggcccgatacggcatgcgg

SEQ ID NO: 212704 - DNA, 75 bp, synthetic construct
  source 1..75: mol_type = other DNA
caaagaatgtctacccaaaaatcactgccattccgtgtgagccctgtccggcaggtacaggagtcacacggatga

SEQ ID NO: 212705 - DNA, 75 bp, synthetic construct
  source 1..75: mol_type = other DNA
gtcacgccgctaaaaaaatcagcaataggcgatgatggcactattctttgctgtagttgtgtaccgaagactgcg

SEQ ID NO: 212706 - DNA, 75 bp, synthetic construct
  source 1..75: mol_type = other DNA
gtcttcttatgccgcgtgtactggtgtttttttactggctggctatggtgctgacactgataggcggtgtcttct

SEQ ID NO: 212707 - DNA, 75 bp, synthetic construct
  source 1..75: mol_type = other DNA
gagccagcacctgaacagcctggtgtatgaccgtgactacgggtggaatgacaacggcgacctggtgcgcatcag

SEQ ID NO: 212708 - DNA, 75 bp, synthetic construct
  source 1..75: mol_type = other DNA
ttatcatcagcggtgcctgcgggatgttccgtactgatgtattgcgtaagttcggtttctcggatcgtactaaag

SEQ ID NO: 212709 - DNA, 75 bp, synthetic construct
  source 1..75: mol_type = other DNA
cagcggcgagttattgattgacgatcatccactgcattttggcgattattcttccgcagtcagcgtattcgcatg

SEQ ID NO: 212710 - DNA, 75 bp, synthetic construct
  source 1..75: mol_type = other DNA
cttcctgccacctcaccactacgatcagatcttcaccgcgcacggcgtgattatgatcttcttcgtggcgatgcc

SEQ ID NO: 212711 - DNA, 75 bp, synthetic construct
  source 1..75: mol_type = other DNA
tgcgccatatccgtgatgaaatcagtgagcggctggactacatccccgcgcagttcgtggtgaagcgttatgtcc

SEQ ID NO: 212712 - DNA, 75 bp, synthetic construct
  source 1..75: mol_type = other DNA
taaaaatgaacaatccgaatccatgcatgacgtgtggtgcctgttgtgcatttttccgcgtctctttttactggg

SEQ ID NO: 212713 - DNA, 75 bp, synthetic construct
  source 1..75: mol_type = other DNA
cagtaatgccgcatataaactgaccagcacatacacccccgcaggccagttacagagccagcacctgaacagcct

SEQ ID NO: 212714 - DNA, 75 bp, synthetic construct
  source 1..75: mol_type = other DNA
atggaaaatatatttaagttttctcaaaatgaattcataaaatctcaacacacagacaggaatatatataatgga

SEQ ID NO: 212715 - DNA, 75 bp, synthetic construct
  source 1..75: mol_type = other DNA
atgacattagtcgaatccgatgttccccgcgttatgtgcctgaagcatggttgccagcacctgcctgtagcatgg

SEQ ID NO: 212716 - DNA, 75 bp, synthetic construct
  source 1..75: mol_type = other DNA
cgacgcctacagcaacaagcaaaaggtcgagctgaccggtaaagacggcggcccactgaatcaggtgacgtacac

SEQ ID NO: 212717 - DNA, 75 bp, synthetic construct
  source 1..75: mol_type = other DNA
aacacaggttatactatcgctgaacgtgctgtggtaacatttacagcaaaaggagattttcgtctgtgtggattt

SEQ ID NO: 212718 - DNA, 75 bp, synthetic construct
  source 1..75: mol_type = other DNA
taccactgcgaccaccggggcctgccgctggcgctcatcagcgaagacggcaatacggcgtggcgcggggagtat

SEQ ID NO: 212719 - DNA, 75 bp, synthetic construct
  source 1..75: mol_type = other DNA
tgcaacaaatgtaggtattcagatattggatcatacaggtactgcagttcaatttgacggagtgactgcatctac

SEQ ID NO: 212720 - DNA, 75 bp, synthetic construct
  source 1..75: mol_type = other DNA
ggaatttgcaatgtccggagaaaatggcatcgcgaatgaagcatgcaaccgcgcccgggcaaaatacggacttcc

SEQ ID NO: 212721 - DNA, 75 bp, synthetic construct
  source 1..75: mol_type = other DNA
acaaaaaccgtccgtccacatgccgggaatttgcaatgtccggagaaaatggcatcgcgaatgaagcatgcaacc

SEQ ID NO: 212722 - DNA, 75 bp, synthetic construct
  source 1..75: mol_type = other DNA
tggagtaaatccagattaaatatctcattgttgatgcttgatattgagcatctggcgcgcggtaaggggctgcgt

SEQ ID NO: 212723 - DNA, 75 bp, synthetic construct
  source 1..75: mol_type = other DNA
tccacgtacatttatggagatttgtaccaaaggttcgcgtaagcatttaacgagccgcgcatctgagccgagtta

SEQ ID NO: 212724 - DNA, 75 bp, synthetic construct
  source 1..75: mol_type = other DNA
atcgaccaagaagcgctgtcattagtcgcatcaattcttagcaatgcacaaaccatcctcaaaaagcccaaagtt

SEQ ID NO: 212725 - DNA, 75 bp, synthetic construct
  source 1..75: mol_type = other DNA
aggcggttaattcagtcgcaagcggtcagggtgatttgcataaggccttgatggggaaaactacctcggggagga

SEQ ID NO: 212726 - DNA, 75 bp, synthetic construct
  source 1..75: mol_type = other DNA
ctgaaaaaattatctgaagggcagaaggaacaacttcgaactgcggctaaaatccttgattccaagaaggaagag

SEQ ID NO: 212727 - DNA, 75 bp, synthetic construct
  source 1..75: mol_type = other DNA
tgcccgaaactggaacctggctcctgcagaaaggtgagcgcgttacgactgctaaaaccagcgccaaactggatg

SEQ ID NO: 212728 - DNA, 75 bp, synthetic construct
  source 1..75: mol_type = other DNA
aaactgacgtaccatgccagcggctacctgaaagccattcaccgcacggataacggcatacagacgctggcgacc

SEQ ID NO: 212729 - DNA, 75 bp, synthetic construct
  source 1..75: mol_type = other DNA
aaatgccagagggtgggcaagcaacaatattgcgcaacaaaatgtcaatcttcgtcgaatggaattagaggacaa

SEQ ID NO: 212730 - DNA, 75 bp, synthetic construct
  source 1..75: mol_type = other DNA
aagctgtcaactcggtgactactgggcaaggtgatctacacagggcacttatggtgaaaaccaactcggggagga

SEQ ID NO: 212731 - DNA, 75 bp, synthetic construct
  source 1..75: mol_type = other DNA
aagaatggatagtgatgatatatctagacctactcgcattgccaaacaaatagaatatttggaaagaaataagga

SEQ ID NO: 212732 - DNA, 75 bp, synthetic construct
  source 1..75: mol_type = other DNA
attacttgattgataaaattcttctagataagaatattaagtatattgctagaatggatagcgatgatatttcaa

SEQ ID NO: 212733 - DNA, 75 bp, synthetic construct
  source 1..75: mol_type = other DNA
ataaagatttagttgattactttaatctatgccgtggtacatctaagactaaattgacagttaccgatctattct

SEQ ID NO: 212734 - DNA, 75 bp, synthetic construct
  source 1..75: mol_type = other DNA
caggatgagatgcgtggtgattataacgctgggtttatatctgggtttgctgaacaagcaactgctgcaatggat

SEQ ID NO: 212735 - DNA, 75 bp, synthetic construct
  source 1..75: mol_type = other DNA
gggccggtaatgccaccgtcagcgatgttgtgacggcagtgaatggcgtggctggggtcggggtgagtgccaccg

SEQ ID NO: 212736 - DNA, 75 bp, synthetic construct
  source 1..75: mol_type = other DNA
gccggaaaactgcgtgcagtggcgtacgtggattgtactgcgggcgcgacactgcaggatgtggtgcagcgtcgc

SEQ ID NO: 212737 - DNA, 75 bp, synthetic construct
  source 1..75: mol_type = other DNA
tagcagaacaggctaaagccgcgggggaacaggcccgacaggaagctattgaaagtaattctcaggcgcaaaaaa

SEQ ID NO: 212738 - DNA, 75 bp, synthetic construct
  source 1..75: mol_type = other DNA
tattgaatcccaaaaaagatcgtgaattatataatatcagcaatgaaatgctaatggtgttgaataaatttctaa

SEQ ID NO: 212739 - DNA, 75 bp, synthetic construct
  source 1..75: mol_type = other DNA
aagtataaaaaatcatctggattcaaaaagagctatctttaagttgaagaaaaatgtggacgcattcgatgaagt

SEQ ID NO: 212740 - DNA, 75 bp, synthetic construct
  source 1..75: mol_type = other DNA
aaagaattggctttatacccaaagcgtacgctagtaaattagttgcttttctatttaaggaacaaaaagttttta

SEQ ID NO: 212741 - DNA, 75 bp, synthetic construct
  source 1..75: mol_type = other DNA
gccagatggacccggtatacacgccggcgcgaaaaatccacctgtaccactgcgaccatcgcggcctgccgctgg

SEQ ID NO: 212742 - DNA, 75 bp, synthetic construct
  source 1..75: mol_type = other DNA
catgacacagcgttatgcgacggagtcatcccgctggcgtgatgcgcctgaagggcatgtgatggtacaaaaatg

SEQ ID NO: 212743 - DNA, 75 bp, synthetic construct
  source 1..75: mol_type = other DNA
gttatataatattagcaatgatatgttaatggtgttaaataaatttttaactaaaaatcaaaataattataaaag

SEQ ID NO: 212744 - DNA, 75 bp, synthetic construct
  source 1..75: mol_type = other DNA
cgaaggatatggctcagcactattaatgaaagctggtgctaaacgagttgtgggggtggacatctctcaagagtc

SEQ ID NO: 212745 - DNA, 75 bp, synthetic construct
  source 1..75: mol_type = other DNA
cgcaggatacacacgatatctttcaggtacgtctggacaaccagaatgaggcgcgatttctctgccgctacgtta

SEQ ID NO: 212746 - DNA, 75 bp, synthetic construct
  source 1..75: mol_type = other DNA
tcggacagatcaagacggataagaaatccaatgagattacagctatcccagaacttcttaacatgctggatatta

SEQ ID NO: 212747 - DNA, 75 bp, synthetic construct
  source 1..75: mol_type = other DNA
cattattcagtgaaggtggtttacctttccggctactcaaagaatcagacagtcgctttctggctgttttctcca

SEQ ID NO: 212748 - DNA, 75 bp, synthetic construct
  source 1..75: mol_type = other DNA
gattttgggaaagaatgttcaatgggcatatggttgttctgcttttggattttgtacagtctcagcaaataatcg

SEQ ID NO: 212749 - DNA, 75 bp, synthetic construct
  source 1..75: mol_type = other DNA
aaagaaaatgcgattttctatataacttgccctaatgattattggtattatccaaatgatgaacaatccaatccg

SEQ ID NO: 212750 - DNA, 75 bp, synthetic construct
  source 1..75: mol_type = other DNA
ctcttacgcgataggcgtgggtgatttggtggcgacatcacttaacaccttctcggtaatgactccaacttactg

SEQ ID NO: 212751 - DNA, 75 bp, synthetic construct
  source 1..75: mol_type = other DNA
gtggccacaacgaatgcaggagacgctccagaaaattttgccgcatcgtggtgcgggtgatgctgccaacttact

SEQ ID NO: 212752 - DNA, 75 bp, synthetic construct
  source 1..75: mol_type = other DNA
tctgggattatggtgttaatgctggaaggttaaaatattacggaaactttaataaaaacacagataatacgttta

SEQ ID NO: 212753 - DNA, 75 bp, synthetic construct
  source 1..75: mol_type = other DNA
gcggggaagaaatacccccgccatacttaccgccgcgccatttcgcggattgccacaaccggaagcgcacggtcg

SEQ ID NO: 212754 - DNA, 75 bp, synthetic construct
  source 1..75: mol_type = other DNA
ggaaaaaatggttggaataactaaatcactaagtgatttgttttctattagagacaatttagaagagtatggcat

SEQ ID NO: 212755 - DNA, 75 bp, synthetic construct
  source 1..75: mol_type = other DNA
gatatcgaactggcggcaagcgacctggcaaagatcctcgatgccaaatttgctgatatcgcccgccgcgattaa

SEQ ID NO: 212756 - DNA, 75 bp, synthetic construct
  source 1..75: mol_type = other DNA
gaaattatagattttataaaggatggaaccaaaaagaacattgaggatcttatatgcaaatcagatccggctaat

SEQ ID NO: 212757 - DNA, 75 bp, synthetic construct
  source 1..75: mol_type = other DNA
cattcattatcgtcctgaaaggattgtggttacgccgcaaagcgaaagccgcgcaacaggagcttgtccatgaac

SEQ ID NO: 212758 - DNA, 75 bp, synthetic construct
  source 1..75: mol_type = other DNA
ctgaacgtgcactggctcacactatcaggaacaaatctgaagctgcctaccatcgtacagatttgttaaatgaac

SEQ ID NO: 212759 - DNA, 75 bp, synthetic construct
  source 1..75: mol_type = other DNA
gctgatgatagcaaggtgaaattgggttatcgcactacgcgttcggactggttaacatctaacatcgcatatcga

SEQ ID NO: 212760 - DNA, 75 bp, synthetic construct
  source 1..75: mol_type = other DNA
catatacatcatccagagaatgttactatgcagtctaatcgttatacgcagcaggagctattaagttcaattcaa

SEQ ID NO: 212761 - DNA, 75 bp, synthetic construct
  source 1..75: mol_type = other DNA
gcttttagaagctttaatgattatctccaaaagcagacaggtttttgtcacaacgcattcgcctttccttttatc

SEQ ID NO: 212762 - DNA, 75 bp, synthetic construct
  source 1..75: mol_type = other DNA
taattacattcctcctgacgataatgatggttactgccttacagtggattcttttcaaggtggtgaggcagatat

SEQ ID NO: 212763 - DNA, 75 bp, synthetic construct
  source 1..75: mol_type = other DNA
atactcgcctctattttgaaggtgagctgattgatgcagcgactaataaaccggttatcaaagtcgttcgtcagg

SEQ ID NO: 212764 - DNA, 75 bp, synthetic construct
  source 1..75: mol_type = other DNA
tggtcttcgtgcagtagcctttgtagaaagcgaagtagataactggattcatgaaacgattaattcttcgagaaa

SEQ ID NO: 212765 - DNA, 75 bp, synthetic construct
  source 1..75: mol_type = other DNA
tggccatgaatggcgtcggatgtcgcgccagtgcacgcattattggcgttggcctcaacacggttttacgtcact

SEQ ID NO: 212766 - DNA, 75 bp, synthetic construct
  source 1..75: mol_type = other DNA
aaacgacgttcacgtagtgggcgcatcctcactggctgccggtcataaaacgctgatcccggaactggtcgaagc

SEQ ID NO: 212767 - DNA, 75 bp, synthetic construct
  source 1..75: mol_type = other DNA
atgagcgccctgcacgccagctatgacgacgggcagtcaggcgaaaaatttttgcgggagctgtgcgaagtggat

SEQ ID NO: 212768 - DNA, 75 bp, synthetic construct
  source 1..75: mol_type = other DNA
aatcagtcgatacccgcagtatatatcgtgaactgggcgcaacgctgagttacaacatgcgtctggggaacggta

SEQ ID NO: 212769 - DNA, 75 bp, synthetic construct
  source 1..75: mol_type = other DNA
acgctggtgaaaacagggggaggggatgcttcgtttacgctgggcaataccggcggtttcgttgatcttgggacc

SEQ ID NO: 212770 - DNA, 75 bp, synthetic construct
  source 1..75: mol_type = other DNA
aaaaacaccaaccctacaaaaaaaatcaaattagccattctttcgccttattccaatcaagtgaaattaatttcc

SEQ ID NO: 212771 - DNA, 75 bp, synthetic construct
  source 1..75: mol_type = other DNA
gcgctctgttgctttcattgaaagtgaagtagacgaatggattcaattaactatcgaaaattcaagaaagcatgt

SEQ ID NO: 212772 - DNA, 75 bp, synthetic construct
  source 1..75: mol_type = other DNA
tttattatcctaccgacgattaatgatcggtgatcacaatcaattgccaccgtatcgttcaattgagttaagaaa

SEQ ID NO: 212773 - DNA, 75 bp, synthetic construct
  source 1..75: mol_type = other DNA
accacctttaatggtgacactgttaacggggctatctctacatattacctgaatcatgatttgatcttacccagc

SEQ ID NO: 212774 - DNA, 75 bp, synthetic construct
  source 1..75: mol_type = other DNA
gactgtctgctttaaaagccgatttccgggtcaccggctatacctcgaccgaccagccgggcaccccgcaggggt

SEQ ID NO: 212775 - DNA, 75 bp, synthetic construct
  source 1..75: mol_type = other DNA
tggcaaggttgaactaattactgaggataaccaacgctggagcacacgtctggtttatgccaaagtcaatcctaa

SEQ ID NO: 212776 - DNA, 75 bp, synthetic construct
  source 1..75: mol_type = other DNA
tgccgtaaactggtacctggaagcgcatgatacgcgcacaaatatgagccggaccaattatagttatacccatca

SEQ ID NO: 212777 - DNA, 75 bp, synthetic construct
  source 1..75: mol_type = other DNA
ggctgcgctgggtgggcccatggcagtatcagatttctgccagtcagatgaatcagtacgcagtaatccctcata

SEQ ID NO: 212778 - DNA, 75 bp, synthetic construct
  source 1..75: mol_type = other DNA
ttttggtcaggtaccacagtggtgggggcctggctatgaaggtagcctgatccgcggtgatgccatgcgaccgat

SEQ ID NO: 212779 - DNA, 75 bp, synthetic construct
  source 1..75: mol_type = other DNA
gcaaatatgttcctcggcggggtcgaagggcaccacggctggggtaaggatgcagtgaactggtatctggaagcg

SEQ ID NO: 212780 - DNA, 75 bp, synthetic construct
  source 1..75: mol_type = other DNA
cctcatgccaaaattatcggtggtcgtttcactttcacaccgttccagtctttagaattaggcgcgtcgcgcatt

SEQ ID NO: 212781 - DNA, 75 bp, synthetic construct
  source 1..75: mol_type = other DNA
gaatcagtcgatcaacaaagcgttccctcatgcggatactctaaaaggtgtacagctgggctggagcggagatgt

SEQ ID NO: 212782 - DNA, 75 bp, synthetic construct
  source 1..75: mol_type = other DNA
gtcgaacacaccagcccggacggcagtatgtcaccgagaccgacgacaattcgcctggtaggagttgacccagcc

SEQ ID NO: 212783 - DNA, 75 bp, synthetic construct
  source 1..75: mol_type = other DNA
gagccaaccctcggctggccagtgagtttctacggtcaaatgattggtgaggatgaatctggttatctaccatcg

SEQ ID NO: 212784 - DNA, 75 bp, synthetic construct
  source 1..75: mol_type = other DNA
gcggatcagtaacggctcgcgcttcaacgccaacggcgcctacggtgcggtgaaattctggaaccagtggctctc

SEQ ID NO: 212785 - DNA, 75 bp, synthetic construct
  source 1..75: mol_type = other DNA
atgagccgtattggttacagttatacccaccatatttatacggatggttactatcagcagggttatcctctggga

SEQ ID NO: 212786 - DNA, 75 bp, synthetic construct
  source 1..75: mol_type = other DNA
agtaatcagcgatggagcacccgtttggtttttgccaaagtcaacccagacaatttagtaatcaatggtgctttc

SEQ ID NO: 212787 - DNA, 75 bp, synthetic construct
  source 1..75: mol_type = other DNA
gagctgcctgacaatggctcatattgatgaagttattgaagcgaacaatctgtacaaaaggaaaaataaaaagaa

SEQ ID NO: 212788 - DNA, 75 bp, synthetic construct
  source 1..75: mol_type = other DNA
aagcgtttatcgttcaatcgcttgcatgcttcgacacgccgtcgcaagtggtcgatgccgtcaaaaaagaatttg

SEQ ID NO: 212789 - DNA, 75 bp, synthetic construct
  source 1..75: mol_type = other DNA
ccaaaattatcggcggacgctttaccttcacgccgttccagtcattagaattaggtgcgtcgcgtattatgcagt

SEQ ID NO: 212790 - DNA, 75 bp, synthetic construct
  source 1..75: mol_type = other DNA
taacatatttaagtgttatgtctatgacggggattgttttccttttgttattctacattgcgcttaaatcttttc

SEQ ID NO: 212791 - DNA, 75 bp, synthetic construct
  source 1..75: mol_type = other DNA
gtcttactgctgcgcatattgatgaggtgttagaagcaaatactcttcataaacagaagataaagaagaaacaaa

SEQ ID NO: 212792 - DNA, 75 bp, synthetic construct
  source 1..75: mol_type = other DNA
gaggataaaaaaccatgctcgggatacagcgccataacatcttctgtcagtcagccgtttgcattatacatccga

SEQ ID NO: 212793 - DNA, 75 bp, synthetic construct
  source 1..75: mol_type = other DNA
gcatcatatctataaggatggttactatcagaagggttatccgctgggtgacgcaatgggcggtgatggtcaact

SEQ ID NO: 212794 - DNA, 75 bp, synthetic construct
  source 1..75: mol_type = other DNA
aatcaatatatcgcggtacctcatgccaaaattatcggcggtcgtttcactttctcacctttccagtcattagaa

SEQ ID NO: 212795 - DNA, 75 bp, synthetic construct
  source 1..75: mol_type = other DNA
actggccatgataataccgggacagataatgaaccgggtaaccagctggctggctttgactttaaattcaaacta

SEQ ID NO: 212796 - DNA, 75 bp, synthetic construct
  source 1..75: mol_type = other DNA
agatagcccgggcgctaaaaaaggccaaaccgtcttattcttctgagcaagtagttctggcccgtatcaaccaga

SEQ ID NO: 212797 - DNA, 75 bp, synthetic construct
  source 1..75: mol_type = other DNA
catctataaagacggttactaccaacaagggtatccgctgggtgatgcgatggggggggatggtcaattgttcgc

SEQ ID NO: 212798 - DNA, 75 bp, synthetic construct
  source 1..75: mol_type = other DNA
atgataaaaattacgcgcattgccgtgacgttgggtttgttttcctccctgggagcccaggcttacgcggccggg

SEQ ID NO: 212799 - DNA, 75 bp, synthetic construct
  source 1..75: mol_type = other DNA
atattgtatgttttccagatgatgactgcatttatacacagagtctactaaaaaatatttatgagttatttgcat

SEQ ID NO: 212800 - DNA, 75 bp, synthetic construct
  source 1..75: mol_type = other DNA
tacgggtggaatgacaacggcgacctggtgcgcatcagcggcccgcgacagacgcgggaatacggctacagcgcc

SEQ ID NO: 212801 - DNA, 75 bp, synthetic construct
  source 1..75: mol_type = other DNA
tccaggttaaccgttatcatttttcggttatccgttatgaagctggtggatgctctccgatatgggaatccccat

SEQ ID NO: 212802 - DNA, 75 bp, synthetic construct
  source 1..75: mol_type = other DNA
cgcacctacagcagctaccggactatgactcctgccccggtgggcgtattcggccccggctggaaagcgccttct

SEQ ID NO: 212803 - DNA, 75 bp, synthetic construct
  source 1..75: mol_type = other DNA
gcggcttgcattaggtgacgaaatcataaatcaatctgttttttttaagctgattgagaaaaagattggttttta

SEQ ID NO: 212804 - DNA, 75 bp, synthetic construct
  source 1..75: mol_type = other DNA
cgggcagcacccggcagatgacgtggagccgctacgggcagttgctggcgttcactgactgctcgggctaccaga

SEQ ID NO: 212805 - DNA, 75 bp, synthetic construct
  source 1..75: mol_type = other DNA
gacggcagcgtcacgcacagcgggtatgacgcggcaggaaggctcacggcgcagacggacgcggcgggacggcgg

SEQ ID NO: 212806 - DNA, 75 bp, synthetic construct
  source 1..75: mol_type = other DNA
aacaacgcttttaaacgctcttggtggaactggtaaaacattaggtgaaagttttggtagcttgatgagcgatat

SEQ ID NO: 212807 - DNA, 75 bp, synthetic construct
  source 1..75: mol_type = other DNA
tagcatcacgaattgagaagcggataaataaagcttttaaggtcaatcctacgcctttaaatgattctctcaagg

SEQ ID NO: 212808 - DNA, 75 bp, synthetic construct
  source 1..75: mol_type = other DNA
taaaatagtagctaaaaaacagtttattcaatatcactatgaactatcagaagcattaagaaatatccgaggtga

SEQ ID NO: 212809 - DNA, 75 bp, synthetic construct
  source 1..75: mol_type = other DNA
cgcacctacagcagctaccggactaagactcctgccccggtgggcgtgtttggccccggctggaaagcgccttct

SEQ ID NO: 212810 - DNA, 75 bp, synthetic construct
  source 1..75: mol_type = other DNA
cgcacctacagcagctaccggactaagactcctgccccggtgggcgttttaggccccggctggaaagcgccttct

SEQ ID NO: 212811 - DNA, 75 bp, synthetic construct
  source 1..75: mol_type = other DNA
gtcctcactaacgagcaggggctgatcggcggcgcgccagccgcaggtctggacgctggcgcggcgcgtaattat

SEQ ID NO: 212812 - DNA, 75 bp, synthetic construct
  source 1..75: mol_type = other DNA
atgtcgcatttattctggataggtttaaaactatagattatgagatcccatcaaatcgagatattttgaaggtga

SEQ ID NO: 212813 - DNA, 75 bp, synthetic construct
  source 1..75: mol_type = other DNA
aagtcagtggtctggcactcgccatcagttgcgcagatgctatggcaaaagccgcgtccatcacgctggttggcc

SEQ ID NO: 212814 - DNA, 75 bp, synthetic construct
  source 1..75: mol_type = other DNA
ttttggcaaccgcatgtcgtgttatcggtttggctaaacaggcttttattcatttcccaaatggtgcagaaggta

SEQ ID NO: 212815 - DNA, 75 bp, synthetic construct
  source 1..75: mol_type = other DNA
tttatccacttccctaatggtgcggaaggtagcgcagagattatcgcgtgtgatttcgaatttacctggatgcta

SEQ ID NO: 212816 - DNA, 75 bp, synthetic construct
  source 1..75: mol_type = other DNA
tactctggcaagttatttaacaccttatcaggaaaacgttattactctggatccggtaacttttcctgccaacgc

SEQ ID NO: 212817 - DNA, 75 bp, synthetic construct
  source 1..75: mol_type = other DNA
aacccttggttcaaggtgaatgtgtcgtcgcagttttaaggcttctcggacggaccgagcatgctcaccaaccgc

SEQ ID NO: 212818 - DNA, 75 bp, synthetic construct
  source 1..75: mol_type = other DNA
gggattatctgtaccgtgccaattatggctcgctggaaaaagctggtattgtggcaaaaaacacccgttcataat

SEQ ID NO: 212819 - DNA, 75 bp, synthetic construct
  source 1..75: mol_type = other DNA
tgcgcaagcaacggaccatctggttgcagcgatggagacactggatcccagaagtcaggacattatccgcgcgcg

SEQ ID NO: 212820 - DNA, 75 bp, synthetic construct
  source 1..75: mol_type = other DNA
aaaaacgtcactatcacttcgttattgcaccaacagaagatgaggctcgctcttcaagcgtaccctgcacgtttt

SEQ ID NO: 212821 - DNA, 75 bp, synthetic construct
  source 1..75: mol_type = other DNA
atgctgcatatgttcttgatgaaattaagaatcgagactatgagattccatctaatagccagattctaaaagtta

SEQ ID NO: 212822 - DNA, 75 bp, synthetic construct
  source 1..75: mol_type = other DNA
gtttgataattattcatttgcgcagcggctgatcggtgagcttcaattagctgttactcctgtcatattccgtaa

SEQ ID NO: 212823 - DNA, 75 bp, synthetic construct
  source 1..75: mol_type = other DNA
ttttcaatgcgctaagccagaaagaaacgataagctttggcagcttgtcctttggttccctgccctgctggggat

SEQ ID NO: 212824 - DNA, 75 bp, synthetic construct
  source 1..75: mol_type = other DNA
ggatttagaacaaaattagtgaaagatatttctgataatagttattctgcatcagaattattatcaagaagtgat

SEQ ID NO: 212825 - DNA, 75 bp, synthetic construct
  source 1..75: mol_type = other DNA
ggaaaatgaacaattaccaaactgccgtgtgctgcgcttccccctgtcagtccactgctggatgaagacgctcgc

SEQ ID NO: 212826 - DNA, 75 bp, synthetic construct
  source 1..75: mol_type = other DNA
ttcagtcagtggactactgaagatctgaacgagtggacggaaattaactggctggaatatttgcgcctgatgcgt

SEQ ID NO: 212827 - DNA, 75 bp, synthetic construct
  source 1..75: mol_type = other DNA
ttcagcaaaacgtgctactgcccaacccgctgctgtgggatattttacccgaaagagttccagctaggggaagaa

SEQ ID NO: 212828 - DNA, 75 bp, synthetic construct
  source 1..75: mol_type = other DNA
ctcctaataaagatgtctcaatgctgacatctcaatttatttatgaggttatagatccatttataaatgctgagt

SEQ ID NO: 212829 - DNA, 75 bp, synthetic construct
  source 1..75: mol_type = other DNA
ttgaaaaaattcaataaaaaacaacgtatttatctctatcagttttgtgcagatatgttgcattcaggattaccg

SEQ ID NO: 212830 - DNA, 75 bp, synthetic construct
  source 1..75: mol_type = other DNA
aactgctaacctgcgaaggcgcttatcgcgacaatcccaccgcgctttttcaccagttgtgtggggatcgtccgg

SEQ ID NO: 212831 - DNA, 75 bp, synthetic construct
  source 1..75: mol_type = other DNA
acctttgataatgattaatggtgatattctgacaaacttagatataaattcacttcttaattatcataatgaaca

SEQ ID NO: 212832 - DNA, 75 bp, synthetic construct
  source 1..75: mol_type = other DNA
ggaactggtaaaacattaggtgaaagttttggtagcttgatgagcgatatggcacatggtgtcgataacctgact

SEQ ID NO: 212833 - DNA, 75 bp, synthetic construct
  source 1..75: mol_type = other DNA
ctgaattactgatctgcaccaggggaaatcagacagaagtcgccagaatactgaactgtagtcgcaacacggtca

SEQ ID NO: 212834 - DNA, 75 bp, synthetic construct
  source 1..75: mol_type = other DNA
gccttgagcagtcatgaattgaacgggcgattaagcgaactcttaagtcatattcctcttgaggtgatggcaacc

SEQ ID NO: 212835 - DNA, 75 bp, synthetic construct
  source 1..75: mol_type = other DNA
aacaccaaagatattactatacctttgataactcattactatttactgaaagcatccagaaaaccacacaaatct

SEQ ID NO: 212836 - DNA, 75 bp, synthetic construct
  source 1..75: mol_type = other DNA
aaaaatcatcgtattgatatgccaactcttcttgaagagcatatggataataatgaaaacatccttatgttccct

SEQ ID NO: 212837 - DNA, 75 bp, synthetic construct
  source 1..75: mol_type = other DNA
tggtacaagctggagaaacagaccaaagataaaaaaatggacagcgttagctgcatttcctggtggaccgagtga

SEQ ID NO: 212838 - DNA, 75 bp, synthetic construct
  source 1..75: mol_type = other DNA
tatcggcccagtcaggaaggggtacacaactgttgcgccatcaggaccatatcaaaagtgggacggcaaaaagtg

SEQ ID NO: 212839 - DNA, 75 bp, synthetic construct
  source 1..75: mol_type = other DNA
gataatagtggcagatatttctcaacagcacctaaccgaggagaaagaaaaggatcatatccattcaatagccct

SEQ ID NO: 212840 - DNA, 75 bp, synthetic construct
  source 1..75: mol_type = other DNA
cacattaaaatacttaagtgataaagatatgcttatgctaactacatttggtgacacaggaagtgatgagggttc

SEQ ID NO: 212841 - DNA, 75 bp, synthetic construct
  source 1..75: mol_type = other DNA
gtttattgactggatagcaccatttggtcatacacatgaattatatcagtatatgagaaaacactttccctattc

SEQ ID NO: 212842 - DNA, 75 bp, synthetic construct
  source 1..75: mol_type = other DNA
gttgattgggttgaatatgaacgtgtttataatgggaattcggaatcattaaataattacgaattcggttatata

SEQ ID NO: 212843 - DNA, 75 bp, synthetic construct
  source 1..75: mol_type = other DNA
ctgccgcagaagaacaaaaaattcccggtaactgttatccggttgataaggtgattcatcagaacaataaagaaa

SEQ ID NO: 212844 - DNA, 75 bp, synthetic construct
  source 1..75: mol_type = other DNA
aattttgaaaaacaaatgccagaatatgaagcaattattcctaataaaactggatcgttttttaaacataatgat

SEQ ID NO: 212845 - DNA, 75 bp, synthetic construct
  source 1..75: mol_type = other DNA
gctgaacgagatcacgacgaacgtgaaacgagcttgaacggcagtatcagttccaatctccattacacccaagtc

SEQ ID NO: 212846 - DNA, 75 bp, synthetic construct
  source 1..75: mol_type = other DNA
tgcgacgacaatttccagcttgtgttatctgacgggccaaacgtcagtgttagcggccacctgacattcaacgag

SEQ ID NO: 212847 - DNA, 75 bp, synthetic construct
  source 1..75: mol_type = other DNA
cgaattagcggaaacagagcaattacagcagcgcatagcgtgaatatgagcaaacttcgtgactttaatcctatg

SEQ ID NO: 212848 - DNA, 75 bp, synthetic construct
  source 1..75: mol_type = other DNA
tatccctgttaatatcactggtgaagcaactattagacctgatgaaccagcattctttagatttacacaagcatc

SEQ ID NO: 212849 - DNA, 75 bp, synthetic construct
  source 1..75: mol_type = other DNA
gatgatattcgcccagttggtattataatgaccttaccattattcatcccatatatttatgctgttatttggaag

SEQ ID NO: 212850 - DNA, 75 bp, synthetic construct
  source 1..75: mol_type = other DNA
tccccgacggaattgtggtggggataagccagggctggaaactgggcggggccattaaaaccaccgagcgcaaac

SEQ ID NO: 212851 - DNA, 75 bp, synthetic construct
  source 1..75: mol_type = other DNA
cggggatgacacggcggaagtggcggaatatgtgcgtcgtattcatgaggctgagttactggaccatatcggtat

SEQ ID NO: 212852 - DNA, 75 bp, synthetic construct
  source 1..75: mol_type = other DNA
gagaagctgccgcaggtgtaccgtgctccggggatggataagccggaaccgtggcgaaagtgtgctatgcacaaa

SEQ ID NO: 212853 - DNA, 75 bp, synthetic construct
  source 1..75: mol_type = other DNA
agcagtcgaaagccgggctcaaccgcatcatcaacgatgtgaaagggcgcaaggttgtccgggcattacagtcag

SEQ ID NO: 212854 - DNA, 75 bp, synthetic construct
  source 1..75: mol_type = other DNA
gagttcctcactaaaggctttgaagatacccgcagccagattgatgccgtaatgcgcaaggagctttcagtatga

SEQ ID NO: 212855 - DNA, 75 bp, synthetic construct
  source 1..75: mol_type = other DNA
tattgagcgaggagtaaggaatccaacccttgaggtgataagtgttttggctattgggttaggtgttgagcttaa

SEQ ID NO: 212856 - DNA, 75 bp, synthetic construct
  source 1..75: mol_type = other DNA
acatattatgctgctataaatgtaatcagccaaagcctgagttttagtgctgatgaactaaagacgtatttataa

SEQ ID NO: 212857 - DNA, 75 bp, synthetic construct
  source 1..75: mol_type = other DNA
tgcccctatacatccatcgcaatgtgttaataatggctacaggccagtctcacagcttattacattattcaaaca

SEQ ID NO: 212858 - DNA, 75 bp, synthetic construct
  source 1..75: mol_type = other DNA
aaaagaaatcattgaaataataactgcgcagaatagcgttggtacacctgctttatttttggctatgatgaacgg

SEQ ID NO: 212859 - DNA, 75 bp, synthetic construct
  source 1..75: mol_type = other DNA
acctgattggaagagatggattattttgcttggtcggtttacggggatgagggctaacgaaatttgtcaactata

SEQ ID NO: 212860 - DNA, 75 bp, synthetic construct
  source 1..75: mol_type = other DNA
cacgaggtttgcagggagaaacaggaagacagggcccgacaggtccacagggcccgacaggtgaaaccggaccac

SEQ ID NO: 212861 - DNA, 75 bp, synthetic construct
  source 1..75: mol_type = other DNA
gaaaatgggagcctggggtttctgtcaacaggaatacactacatggaaccccatcaggaagtttgtcagggctgt

SEQ ID NO: 212862 - DNA, 75 bp, synthetic construct
  source 1..75: mol_type = other DNA
aaagaatcagaaaccccgatatatgaatttgaagttgttcgctcaaaattgtttgatactgccgaggaagcgttt

SEQ ID NO: 212863 - DNA, 75 bp, synthetic construct
  source 1..75: mol_type = other DNA
gtctcgcctgaaaaccggagatacagttactactactggctcgagtgctgcgatctatacttatgatgcggctaa

SEQ ID NO: 212864 - DNA, 75 bp, synthetic construct
  source 1..75: mol_type = other DNA
aacggcgtccttcggtggtgcgaatactaatggtgctggtaattcgaatgacacctatactgatgcagacaaaga

SEQ ID NO: 212865 - DNA, 75 bp, synthetic construct
  source 1..75: mol_type = other DNA
cgattccactggtaatttgactaagaacggctctgatactttaattcaggcaacattgaatgatgtccttactgg

SEQ ID NO: 212866 - DNA, 75 bp, synthetic construct
  source 1..75: mol_type = other DNA
cgactggagcaacggcagacgcaactgtaactgatgcaaatactactaaagctacaactatcacttcaggcggta

SEQ ID NO: 212867 - DNA, 75 bp, synthetic construct
  source 1..75: mol_type = other DNA
aaagcgcagatcatccagcaggccggtaactccgtgttggcaaaagctaaccaggtaccgcagcaggttctgtct

SEQ ID NO: 212868 - DNA, 75 bp, synthetic construct
  source 1..75: mol_type = other DNA
ttgatctcaatgcagctaagaaaacaggaagcacgttagttgttaacggtgcaacttacgatgttagtgcagatg

SEQ ID NO: 212869 - DNA, 75 bp, synthetic construct
  source 1..75: mol_type = other DNA
gaggcctgtgggggctctcagcacaggcctcgtgagctgaaaaaacaggggcatgaagttcggctgttgcaggct

SEQ ID NO: 212870 - DNA, 75 bp, synthetic construct
  source 1..75: mol_type = other DNA
gaatacaaacctcgttctgttttagctgatctcgaatatatgattaaagagtttaaacataacattgactcaaaa

SEQ ID NO: 212871 - DNA, 75 bp, synthetic construct
  source 1..75: mol_type = other DNA
tatgagtggaatatcatttatgtcacgctgaaaacctgtggctggagccgaaatggccaaagcaaaacgccgaat

SEQ ID NO: 212872 - DNA, 75 bp, synthetic construct
  source 1..75: mol_type = other DNA
aaagcgcagatcatccagcaggcaggtaactccgtgctgtccaaagctaaccaggtaccgcagcaggttctgtct

SEQ ID NO: 212873 - DNA, 75 bp, synthetic construct
  source 1..75: mol_type = other DNA
tcgtgaactgacggttcaggccactaccggtactaactccgattctgacctggactccatccaggacgaaatcaa

SEQ ID NO: 212874 - DNA, 75 bp, synthetic construct
  source 1..75: mol_type = other DNA
cggtacaacagctcaagagcaaaaagtcattattgctaaggaaggtgcgaataagcggggaaattcttctcggct

SEQ ID NO: 212875 - DNA, 75 bp, synthetic construct
  source 1..75: mol_type = other DNA
ggctttttacgcagaaaactttcaggtcatgtcgggaaaagaaaatctgctggagaaggggatttccgtgcgaac

SEQ ID NO: 212876 - DNA, 75 bp, synthetic construct
  source 1..75: mol_type = other DNA
gtgtacatcgccagactgctgcggcaaggctgccaaatctacccgttgcagggggggcatgaaagcaacctcaag

SEQ ID NO: 212877 - DNA, 75 bp, synthetic construct
  source 1..75: mol_type = other DNA
cactcaacatcagtcaggtagctgctctgtctgggttacaccgacaaacggtgtctgaaaggttaaaaaaaatta

SEQ ID NO: 212878 - DNA, 75 bp, synthetic construct
  source 1..75: mol_type = other DNA
tgccattccaggctcgttatattgccctcgggcagtcagtggccggtactgcaaatgcagatgcgaccttcaaag

SEQ ID NO: 212879 - DNA, 75 bp, synthetic construct
  source 1..75: mol_type = other DNA
gctagctaatcagaaattaagagggattactgttattgttgaggggaaacaatatgcaggtggagaattggcgta

SEQ ID NO: 212880 - DNA, 75 bp, synthetic construct
  source 1..75: mol_type = other DNA
cggttcttgatggatgctttaatagcattttctttaaagagatgaaaactgatggcgtttaccttgattttatca

SEQ ID NO: 212881 - DNA, 75 bp, synthetic construct
  source 1..75: mol_type = other DNA
tttggacatttagtctggttctggtctattgaaattattcgcagagatttacgaaacagaattactcatgagcca

SEQ ID NO: 212882 - DNA, 75 bp, synthetic construct
  source 1..75: mol_type = other DNA
cctgggtttatctatgtgggaggatgcaaaatcgggggcatgtactaatggtctttgcggcacactatccgctat

SEQ ID NO: 212883 - DNA, 75 bp, synthetic construct
  source 1..75: mol_type = other DNA
ccatttggttctgttgtgaccgttgaggggacacagggacgcaatatttcagctggagtggtggggaataaaggt

SEQ ID NO: 212884 - DNA, 75 bp, synthetic construct
  source 1..75: mol_type = other DNA
caagaaatagcccaactgcgacaatatctttcttcagcaagtcagcatggaagtgttgagatcatgggtgttaat

SEQ ID NO: 212885 - DNA, 75 bp, synthetic construct
  source 1..75: mol_type = other DNA
tcaggcgacagcctgaacgtagcagggatccacgtccttcagggcgtggaggatgtcaatttgcgctatgatacc

SEQ ID NO: 212886 - DNA, 75 bp, synthetic construct
  source 1..75: mol_type = other DNA
caaattcgcaagcaagaaaatgctgaacgtttaagaagagagagggctgcggcagctgcaaatgcccgcgagaaa

SEQ ID NO: 212887 - DNA, 75 bp, synthetic construct
  source 1..75: mol_type = other DNA
ccatggacggactggaaggaactgggggccgaggggccagcgggtcgacaaggacctgccgggccgacggggccg

SEQ ID NO: 212888 - DNA, 75 bp, synthetic construct
  source 1..75: mol_type = other DNA
atttattaaaaggcgcaacagcacatggaacccctgctttatacatcgccatgagcaagggtaataaagacgtcg

SEQ ID NO: 212889 - DNA, 75 bp, synthetic construct
  source 1..75: mol_type = other DNA
taaaagtgctaacgaaacacctggactttatatctccatgttgtatggattcgatgaaataatcgatatctttct

SEQ ID NO: 212890 - DNA, 75 bp, synthetic construct
  source 1..75: mol_type = other DNA
acgccttcatcagagcctattaatcaatttgcgcgccaactcatcaccctacttgatacctctgacttaagttcg

SEQ ID NO: 212891 - DNA, 75 bp, synthetic construct
  source 1..75: mol_type = other DNA
cattacattacactataaaaaagaaatcattcccttatttctggaaaccacgcctattaaggctaaccatttgcg

SEQ ID NO: 212892 - DNA, 75 bp, synthetic construct
  source 1..75: mol_type = other DNA
tactttgtcagtaaggctacgaataaagcagtcagtgtatggacaattaaattatgttgtgtccgtttacgaccc

SEQ ID NO: 212893 - DNA, 75 bp, synthetic construct
  source 1..75: mol_type = other DNA
gctgcaatggaaaataatcaccctttgtgtgtcacacggttcctctctaaagtttatggaatcgccgttaaatat

SEQ ID NO: 212894 - DNA, 75 bp, synthetic construct
  source 1..75: mol_type = other DNA
ctgcattatacatcgccatgagcaagggtaatgaagacgtcgtgttatcttatatatcgacgctgggtgcttttg

SEQ ID NO: 212895 - DNA, 75 bp, synthetic construct
  source 1..75: mol_type = other DNA
aatccatagagaaaaaactatacaaccaacagtaaatctcaatggtagtgcatgttttttgcaatctccttctga

SEQ ID NO: 212896 - DNA, 75 bp, synthetic construct
  source 1..75: mol_type = other DNA
gaatgcattaaccactcctatagcacaagagcttttaaacaaaaaactggtgatgagtattttagccatgaaaat

SEQ ID NO: 212897 - DNA, 75 bp, synthetic construct
  source 1..75: mol_type = other DNA
gtagataatcacatcattcatgaagataatctggttaaattgttgcaaactaaaagtgctaacgaaacacctgga

SEQ ID NO: 212898 - DNA, 75 bp, synthetic construct
  source 1..75: mol_type = other DNA
attttcatgatgctatcaagttaggaaggaaggacctggagtacacgacggcccgcctcaaggacgatagcatta

SEQ ID NO: 212899 - DNA, 75 bp, synthetic construct
  source 1..75: mol_type = other DNA
atgggctttactggcaaacgtgcagccaggttcaaagaggcatacatcaacgcctttaacctgatggagaagagt

SEQ ID NO: 212900 - DNA, 75 bp, synthetic construct
  source 1..75: mol_type = other DNA
tggcacttcagaaaaaatacggcccggaacggctgggaaaggcctgttacgttgccctgcactataacgcccctg

SEQ ID NO: 212901 - DNA, 75 bp, synthetic construct
  source 1..75: mol_type = other DNA
tccgtttcacaagtcaggttaatgatgctattaatcctccaaaaaaatcaaagccaagaagagttactagtgacc

SEQ ID NO: 212902 - DNA, 75 bp, synthetic construct
  source 1..75: mol_type = other DNA
cggaagatctggaggctaaaggcctgtaccggagagcggcagcccgatgggctgaggtcatgcaacaggtgaaca

SEQ ID NO: 212903 - DNA, 75 bp, synthetic construct
  source 1..75: mol_type = other DNA
gagagcctgaaaagttaggtggcgctccctgtgaggccgtggggtgcggtgcagggcagacagcgcgcatccctg

SEQ ID NO: 212904 - DNA, 75 bp, synthetic construct
  source 1..75: mol_type = other DNA
caggataaatatctcaccggcgaatacggtgttgtgcattccggtcccttcatgtcagtttatgaaaaggttctt

SEQ ID NO: 212905 - DNA, 75 bp, synthetic construct
  source 1..75: mol_type = other DNA
agatgattatgaaaacgccagcaatgcttacaatgagggattgatcgcgaaaaatgaacttagagatattggtag

SEQ ID NO: 212906 - DNA, 75 bp, synthetic construct
  source 1..75: mol_type = other DNA
gacgcttcactaaatccatgtgaaggctcattgcttgtctgtgcagtagatggtgagtttcaggttaagagatat

SEQ ID NO: 212907 - DNA, 75 bp, synthetic construct
  source 1..75: mol_type = other DNA
ctaatagtcttgataacctgtcttcagcagcagttaaaacagcaggtgcatttatctcaatgcaggctgtattag

SEQ ID NO: 212908 - DNA, 75 bp, synthetic construct
  source 1..75: mol_type = other DNA
gaccctattttgcagaaatacatcaaatctcagttttacgggctatctgctaaagccgggtcaatggattcttca

SEQ ID NO: 212909 - DNA, 75 bp, synthetic construct
  source 1..75: mol_type = other DNA
aaatgactatatgaatgcaaatcaagcgttcaatgaaggactgatcgcaaagaatgaacttggtgatattagcag

SEQ ID NO: 212910 - DNA, 75 bp, synthetic construct
  source 1..75: mol_type = other DNA
ctaaataaatacaacatagagataaaatatgatcctgtcacaacaaacatcaagagaaaattaattaaatatcgt

SEQ ID NO: 212911 - DNA, 75 bp, synthetic construct
  source 1..75: mol_type = other DNA
ccgttcactaaatgacactcagaaaaaaattgttgatggtttatctgatgggttaattgatggcttgaagatgct

SEQ ID NO: 212912 - DNA, 75 bp, synthetic construct
  source 1..75: mol_type = other DNA
tatgaccgcagtggcaaacaggtgcgcagctttacttacgatgataaataccggggccggatggtggcgcaccac

SEQ ID NO: 212913 - DNA, 75 bp, synthetic construct
  source 1..75: mol_type = other DNA
gaggaacactctgatcctgaagatataccttcagtgaaggcgattctgaataccctgctccccctggagatactg

SEQ ID NO: 212914 - DNA, 75 bp, synthetic construct
  source 1..75: mol_type = other DNA
gcttgtcaccctctggcactacgacgaatcggaccgtatcacacaccgcacggtgaacggcgaaccggcagagca

SEQ ID NO: 212915 - DNA, 75 bp, synthetic construct
  source 1..75: mol_type = other DNA
tattattacttaattcaatatggaaacatcaattagatctggtcaataaaataaaagaatgccaagattatgatg

SEQ ID NO: 212916 - DNA, 75 bp, synthetic construct
  source 1..75: mol_type = other DNA
acattatcaaaacaacaaattcaggctcaagaattgcaaaggagaaatgatattttaaaatttcaatttaatagt

SEQ ID NO: 212917 - DNA, 75 bp, synthetic construct
  source 1..75: mol_type = other DNA
ggtgaagctgaaattttcacctgcctcgcctcgctgaatgacctggtgcgtctggcaaccgcgctgaatgtcgaa

SEQ ID NO: 212918 - DNA, 75 bp, synthetic construct
  source 1..75: mol_type = other DNA
tgttacagctggaatgactgttatggcagaaataaaaaccggagtgcgtagtgttatcagctatcttcttagccc

SEQ ID NO: 212919 - DNA, 75 bp, synthetic construct
  source 1..75: mol_type = other DNA
agcatcggataccgtccgcgtattctggccgcgccggagctggacacggaggctgtaacaaaatccctgtgcgtg

SEQ ID NO: 212920 - DNA, 75 bp, synthetic construct
  source 1..75: mol_type = other DNA
cgcctacaacccgaaaagtggcaaaaacgaaacgttaccccgcgcctgcctatgcgtgcggccttcgtgcgtaca

SEQ ID NO: 212921 - DNA, 75 bp, synthetic construct
  source 1..75: mol_type = other DNA
aagagcttggcaagctgggctctattcaggataaatcccgcggatggtgggttcactccgttctcttgctcgagg

SEQ ID NO: 212922 - DNA, 75 bp, synthetic construct
  source 1..75: mol_type = other DNA
gtcttgctgcacctgtaatgttgaatgtggcgcaggcgtccacactgcaaccgggtaacctgatcattggctctg

SEQ ID NO: 212923 - DNA, 75 bp, synthetic construct
  source 1..75: mol_type = other DNA
ctgatattttaaaatcagaagcatctttattgtatgaaaaaacagagcaatatcgctacgcaatcctttctgaat

SEQ ID NO: 212924 - DNA, 75 bp, synthetic construct
  source 1..75: mol_type = other DNA
atcaagcgacttctcctatcccctgggaacacatcaatctcaccggagaatatcgctggccaaagccttagcgta

SEQ ID NO: 212925 - DNA, 75 bp, synthetic construct
  source 1..75: mol_type = other DNA
agcacatcatgaaagctgccgggataagccgggcaacgttctaccgtatcaaacgcgagctgtccgccagtgtta

SEQ ID NO: 212926 - DNA, 75 bp, synthetic construct
  source 1..75: mol_type = other DNA
taaaaaaatattagtcatcagttcctttaaagctggggaacgtataagtaatgatataaaaaatgaattgcatcg

SEQ ID NO: 212927 - DNA, 75 bp, synthetic construct
  source 1..75: mol_type = other DNA
gaatgtgctgctgaaatatgagcctcactttaaatttattaaagtggtgatgcagaaacaagaccaacccaggga

SEQ ID NO: 212928 - DNA, 75 bp, synthetic construct
  source 1..75: mol_type = other DNA
tagatcactcggtacactaagcttttttagttctgttttacatatgtttacacttagatcatgtagagagggaac

SEQ ID NO: 212929 - DNA, 75 bp, synthetic construct
  source 1..75: mol_type = other DNA
tatcgctggccaaagccttagcgtaggattccgccccttcccgcaaacgaccccgacccgcgccacggcccacga

SEQ ID NO: 212930 - DNA, 75 bp, synthetic construct
  source 1..75: mol_type = other DNA
attcagatcggccgtggtgccttcctgatgatccacaactgctgggtctacgcgatgggtaaccgccatgacttt

SEQ ID NO: 212931 - DNA, 75 bp, synthetic construct
  source 1..75: mol_type = other DNA
gctgtcacccataacgacggtacgccgggcgctgccgaagatatcaaacctgaaaccatcaactcacttgaaagc

SEQ ID NO: 212932 - DNA, 75 bp, synthetic construct
  source 1..75: mol_type = other DNA
tgatgatccacaactgctgggtatacgcgatgggaaaccgccatgactttgctgaactggcacagtcactggaac

SEQ ID NO: 212933 - DNA, 75 bp, synthetic construct
  source 1..75: mol_type = other DNA
aaggttcaccaaggcagtgaaaaaatgtggtactatactatatatctcaataaataaagatattgcaattgagaa

SEQ ID NO: 212934 - DNA, 75 bp, synthetic construct
  source 1..75: mol_type = other DNA
tgatattcgatatgcacggtggacatgactgtgatgggcatggattccttgagttatctggtaaaattttgtacc

SEQ ID NO: 212935 - DNA, 75 bp, synthetic construct
  source 1..75: mol_type = other DNA
gctgaactggtgcggctgctggacagactggaggaagaaatccgggcagaccgcgtgagcagtgaaagccgggtg

SEQ ID NO: 212936 - DNA, 75 bp, synthetic construct
  source 1..75: mol_type = other DNA
agtgaggaaagccgccgctggctggcatcgtgcggcctgacggtggcgcagatgcaaagccagatggacccggta

SEQ ID NO: 212937 - DNA, 75 bp, synthetic construct
  source 1..75: mol_type = other DNA
aatctcctggtttaagttcattagaagctttagccaccggtgcaaatattgttgtatcttcaagccagttttgtc

SEQ ID NO: 212938 - DNA, 75 bp, synthetic construct
  source 1..75: mol_type = other DNA
caaaagtaggaagtggaagcacagcagatgctgttcgttatgaattggccacaggtgaaaaagttggtggtagag

SEQ ID NO: 212939 - DNA, 75 bp, synthetic construct
  source 1..75: mol_type = other DNA
tgcatcgctacaggaaatgcagacttatccaggtgcacctaaaaatagtcaggctgcttctgccccttggtacaa

SEQ ID NO: 212940 - DNA, 75 bp, synthetic construct
  source 1..75: mol_type = other DNA
aggcagagatggacgacgtatcgcgtttccaaaatttattgagttaatggcaaatatgaatctttcatgggagct

SEQ ID NO: 212941 - DNA, 75 bp, synthetic construct
  source 1..75: mol_type = other DNA
catgaagggcgccatgctcatcgtcgactcatcgctgacaccgaaagacggttctctgctcgtctgcgctgttga

SEQ ID NO: 212942 - DNA, 75 bp, synthetic construct
  source 1..75: mol_type = other DNA
attttgttgagcaacgaatttcactagaccagcgcatcataaccaggtcagctgctacgtatttcatgcgagccg

SEQ ID NO: 212943 - DNA, 75 bp, synthetic construct
  source 1..75: mol_type = other DNA
aaagagtctggacttaaaccagtgttcactatggacgatgttaaaggttggtttagtagtgcagctgataaaatt

SEQ ID NO: 212944 - DNA, 75 bp, synthetic construct
  source 1..75: mol_type = other DNA
cgattcttcatgcttttaatgccacctaccagcagatcagagaaaatatgtctgaatttgcacgttgccattatg

SEQ ID NO: 212945 - DNA, 75 bp, synthetic construct
  source 1..75: mol_type = other DNA
tgaatgaagagaacccgcaccagctgcagcagctcatccgcctgccggggcagcagtatgatgaggagtccggcc

SEQ ID NO: 212946 - DNA, 75 bp, synthetic construct
  source 1..75: mol_type = other DNA
tgggtgccgaatgataccatcccctatatttcggcaggagaccgcgttaaccttcgctacgaggcttttcctgcc

SEQ ID NO: 212947 - DNA, 75 bp, synthetic construct
  source 1..75: mol_type = other DNA
tattagaactgactcgtgatttaaataacgatattagaatcgctgctatctatgctttaggagaaggaggtaatg

SEQ ID NO: 212948 - DNA, 75 bp, synthetic construct
  source 1..75: mol_type = other DNA
taagacgtaagatgagaaaagcagctatgaacagagactacctcgcgtcagtctttgcggggagccggctttcgt

SEQ ID NO: 212949 - DNA, 75 bp, synthetic construct
  source 1..75: mol_type = other DNA
aagtgaaatcctggctgaccgggtgagtgaggaaagccgccgctggctggcatcgtgcggcctgacggtggcgca

SEQ ID NO: 212950 - DNA, 75 bp, synthetic construct
  source 1..75: mol_type = other DNA
ttgacggccgcacacagcgttatcaccacgacctgaccggcaaacttatccgcagcgaggatgaggggctggtca

SEQ ID NO: 212951 - DNA, 75 bp, synthetic construct
  source 1..75: mol_type = other DNA
cacgcgcatcaccacgccggatggcagggcatcggcgttttactataaccaccacagccagttaacgtcagccac

SEQ ID NO: 212952 - DNA, 75 bp, synthetic construct
  source 1..75: mol_type = other DNA
aatgcagcaggtatccggaagtgatgtgcggaatttaccggtgtcagtggaggggtttaataattatttaaaatc

SEQ ID NO: 212953 - DNA, 75 bp, synthetic construct
  source 1..75: mol_type = other DNA
atgttattatccggtgggctaacagaatgcagcaggtatccggaagtgatgtgcggaatttaccggtgtcagtgg

SEQ ID NO: 212954 - DNA, 75 bp, synthetic construct
  source 1..75: mol_type = other DNA
aacccgatgggccagcaacagcagggatagatgatttgggtgaaattttagctaagatgaaacagagaacatcga

SEQ ID NO: 212955 - DNA, 75 bp, synthetic construct
  source 1..75: mol_type = other DNA
tgcaacagaagcctttggccctgtcgcaacgctgatgccagcacaaaaccagcaacatgctctgcaactggcttg

SEQ ID NO: 212956 - DNA, 75 bp, synthetic construct
  source 1..75: mol_type = other DNA
ggtattttgtgctttctgcggctgcgggtctgtttgtcgatgccggagttggtccggtcattgctaactacgggc

SEQ ID NO: 212957 - DNA, 75 bp, synthetic construct
  source 1..75: mol_type = other DNA
ccggtacctggcagtctggccggggccgtagccgtttgattcaccacgctattagcggcgaggcgttatgggaag

SEQ ID NO: 212958 - DNA, 75 bp, synthetic construct
  source 1..75: mol_type = other DNA
aaaaaggaacacgcggacggcagcgtcacgcagagtcagtttgacgccgtgggcaggctcaggacacagacggat

SEQ ID NO: 212959 - DNA, 75 bp, synthetic construct
  source 1..75: mol_type = other DNA
cctgcgcagggagcagaacggcgcagacattccggataaaggggcttttatcgataacgtcggtttacgggaaac

SEQ ID NO: 212960 - DNA, 75 bp, synthetic construct
  source 1..75: mol_type = other DNA
tatctgaaaataccgagctgacagaaaaaggatgtgtgcaccgtaaaacacagcaggttgtacgtgctgtggtgc

SEQ ID NO: 212961 - DNA, 75 bp, synthetic construct
  source 1..75: mol_type = other DNA
ggaattttatcaatgaggattttgaagtcattagcgtagtatccgatactgagcgtgattggttcgaggaagaat

SEQ ID NO: 212962 - DNA, 75 bp, synthetic construct
  source 1..75: mol_type = other DNA
gagttgcagagcaagaaaaaatagtatcaaaggtaaaagagctgttttcacagattgatgttgttgtggcttcta

SEQ ID NO: 212963 - DNA, 75 bp, synthetic construct
  source 1..75: mol_type = other DNA
atcagatgtcgtcagtcaatgtagccaaaaagcaaaagcaacaactgatataaaaactaagatatattttaaata

SEQ ID NO: 212964 - DNA, 75 bp, synthetic construct
  source 1..75: mol_type = other DNA
gtcgctaccgttgcgagctgctaatcccgtccagacatggcgactggaacgatcacaaaaatgaactggtcaaga

SEQ ID NO: 212965 - DNA, 75 bp, synthetic construct
  source 1..75: mol_type = other DNA
gtctggttcccctgcccgatttaacagtgagcagccaaattagtacatcgcaggatacgaaagactcactgaacc

SEQ ID NO: 212966 - DNA, 75 bp, synthetic construct
  source 1..75: mol_type = other DNA
gtaccattacgacagtcagcaccggctggtgcactacacgcggacacaatatgaagagccgctggtcgaaagtcg

SEQ ID NO: 212967 - DNA, 75 bp, synthetic construct
  source 1..75: mol_type = other DNA
agactccggtgtggattggattggagatattccagagcattgggaagttgtgcctctaaaaaggttggcggtctt

SEQ ID NO: 212968 - DNA, 75 bp, synthetic construct
  source 1..75: mol_type = other DNA
cactttcccgcatcgaaagcggcacgccttccgtactgggtatttacctgcgaacttcatctctgattgctgatg

SEQ ID NO: 212969 - DNA, 75 bp, synthetic construct
  source 1..75: mol_type = other DNA
aatctcagttttacgggctatctgctaaagctgggtcaatggataattcaaaattcaatgagaagttggctcaat

SEQ ID NO: 212970 - DNA, 75 bp, synthetic construct
  source 1..75: mol_type = other DNA
gtgcggaaggttgggaagatatagaggattttggggaaacacatctcgattttttaaaacaatacggtgattttt

SEQ ID NO: 212971 - DNA, 75 bp, synthetic construct
  source 1..75: mol_type = other DNA
ccggtccaaccgctggctgacctttatagttgtacttcttcggctgctgtttgccgtactaggtgaaggtcgttt

SEQ ID NO: 212972 - DNA, 75 bp, synthetic construct
  source 1..75: mol_type = other DNA
ctggcgcggtgattggcggcccgacgccctttattgcaaccgcattagttgcactggccgacggtaggccaacct

SEQ ID NO: 212973 - DNA, 75 bp, synthetic construct
  source 1..75: mol_type = other DNA
aagatgggggttagtatcatttcgaaaggtaataataaatgtgaaatttattttgatgcttttggtgagtgtgga

SEQ ID NO: 212974 - DNA, 75 bp, synthetic construct
  source 1..75: mol_type = other DNA
cgtcaaggggctggcaatggcgtttgttattgcagagaaccgccgtcgctttattgaagcgcaaatgacactaaa

SEQ ID NO: 212975 - DNA, 75 bp, synthetic construct
  source 1..75: mol_type = other DNA
cgccatcaaacacagcgcgagcaggagggattttgttcccgattgttcgcagtgtctctaacagctttggatctg

SEQ ID NO: 212976 - DNA, 75 bp, synthetic construct
  source 1..75: mol_type = other DNA
ttacacgaacacggtatggtatctggtgatcctcaccgcggtaattttattattgaaaatggtgaagtacgcatt

SEQ ID NO: 212977 - DNA, 75 bp, synthetic construct
  source 1..75: mol_type = other DNA
ccctcggtgctaagacccattcgcttggcgaagcatcagtggcgttagggattaacactacctcagcaggtgagc

SEQ ID NO: 212978 - DNA, 75 bp, synthetic construct
  source 1..75: mol_type = other DNA
ttactgggacataaagtccaggcaaccaccgatcgttataacgatactcgtggtcaggaatgggttaaattggtt

SEQ ID NO: 212979 - DNA, 75 bp, synthetic construct
  source 1..75: mol_type = other DNA
tcggcaccaaaaacaaccaaaaccaatgagtaaagacaacctgagcgattactttgccaaagcgcgggagctggc

SEQ ID NO: 212980 - DNA, 75 bp, synthetic construct
  source 1..75: mol_type = other DNA
tcaccgaaggatatttattcaccgctgaacaagaccgcccagtaattttaccttttaatccttcttgcccggatt

SEQ ID NO: 212981 - DNA, 75 bp, synthetic construct
  source 1..75: mol_type = other DNA
cagttgcgtccactgccacttaagactaaattcaaaacgactgagagggcaaaatttcccggcatacagcttaac

SEQ ID NO: 212982 - DNA, 75 bp, synthetic construct
  source 1..75: mol_type = other DNA
tcaggcactgtgggtgtatgacaaaaataaagtgctggttcgctggaagcctgaaaaatcaacaaggcaaaaatt

SEQ ID NO: 212983 - DNA, 75 bp, synthetic construct
  source 1..75: mol_type = other DNA
tacggctttattgctttctgttattgtattgatttatgatcaagagaatagaactatagaaaaggttagaaataa

SEQ ID NO: 212984 - DNA, 75 bp, synthetic construct
  source 1..75: mol_type = other DNA
atgcaaatcaattcaaatgggactctgctaacggttgctatgcacaacggtatgcaggctgggggtatcgcttct

SEQ ID NO: 212985 - DNA, 75 bp, synthetic construct
  source 1..75: mol_type = other DNA
gctcttcttactctcttaaataaaaaatggccttatacttatcggcctgaatcaatagcgcaaggttttggcagc

SEQ ID NO: 212986 - DNA, 75 bp, synthetic construct
  source 1..75: mol_type = other DNA
ctggcagtcggtgaagactcgctggcaatgggcgcgaaaactatcgttaatggtaatgtgggtattggtatcggt

SEQ ID NO: 212987 - DNA, 75 bp, synthetic construct
  source 1..75: mol_type = other DNA
cagctattgagcgtatgctagaagcatatggggttacgacgaaacaagcgctgtgtgaacgattggggatcagca

SEQ ID NO: 212988 - DNA, 75 bp, synthetic construct
  source 1..75: mol_type = other DNA
tcttgaattatgggccgacctgctggtggctctggaacagggggatgaatacaacgtaacccccatcacaaaagt

SEQ ID NO: 212989 - DNA, 75 bp, synthetic construct
  source 1..75: mol_type = other DNA
cggagctgacgaaaaaagatatcaatcgcgtcgcctggcgttccatgctgttacaagcgtcttttaactacgaac

SEQ ID NO: 212990 - DNA, 75 bp, synthetic construct
  source 1..75: mol_type = other DNA
gatatggaaactgatgcaccgcttaccaatgtttgagcacgcaatgcgggatgatcttaaaaactctgagcaaat

SEQ ID NO: 212991 - DNA, 75 bp, synthetic construct
  source 1..75: mol_type = other DNA
aaattcgttaaagaacctcaatatgctcagtctaattactggcttaatgccgtaatctgtgaaaacttggattca

SEQ ID NO: 212992 - DNA, 75 bp, synthetic construct
  source 1..75: mol_type = other DNA
tgactcgtggtaacagtctgaatttacatcttaatgtccgacaaagccgtttactgccgacgctaaatgaagatt

SEQ ID NO: 212993 - DNA, 75 bp, synthetic construct
  source 1..75: mol_type = other DNA
ccttgagtgtggcgtaaaacccgcaaaacagaaaatgaccgaaattctgtcggatgagttttatgctactgaaaa

SEQ ID NO: 212994 - DNA, 75 bp, synthetic construct
  source 1..75: mol_type = other DNA
gacattcgtgccgcagtgctggatgcactcgagcagcatgaacacggggcgacgctgtttgatggtcgccccgtt

SEQ ID NO: 212995 - DNA, 75 bp, synthetic construct
  source 1..75: mol_type = other DNA
ttaatgactatggactgacagtggcagatgcggaagatgtgaattatgttttgcgaagtgccggtcagttcagta

SEQ ID NO: 212996 - DNA, 75 bp, synthetic construct
  source 1..75: mol_type = other DNA
ttcgcgatttgcgtaaacagcgtggattaacactggaaaaactcgctgacatggctggactcagtaaaagctatc

SEQ ID NO: 212997 - DNA, 75 bp, synthetic construct
  source 1..75: mol_type = other DNA
ccgcgctggctgcgtggcaaaaataccagcaggactgccagacggtaaaagatgaggcaaaacgccttgaggctg

SEQ ID NO: 212998 - DNA, 75 bp, synthetic construct
  source 1..75: mol_type = other DNA
atgacaaatatccttttcatcgcgacttatggcgaaaaccaactgcgtcgaatggctggagctgcacgccgcgca

SEQ ID NO: 212999 - DNA, 75 bp, synthetic construct
  source 1..75: mol_type = other DNA
tacctgatttcgtactcaggtggctgtcactttgccaggcgcagaggtgatgcgctgataacggtagatggtgaa

SEQ ID NO: 213000 - DNA, 75 bp, synthetic construct
  source 1..75: mol_type = other DNA
gttctggaaggtgaggttcttaatgaggtggatgtgaaggggattttgacgcacctgattaaccgggccaccgat

SEQ ID NO: 213001 - DNA, 75 bp, synthetic construct
  source 1..75: mol_type = other DNA
cacattccgaactgggcattcatactgcattggtaacgggcggcggtaccaataaaactaccatggcgggcttag

SEQ ID NO: 213002 - DNA, 75 bp, synthetic construct
  source 1..75: mol_type = other DNA
atgttcttcggcaacgatcacggaggagaacgtggggcgctactgtacagcctgatcggcacctgccgactgaac

SEQ ID NO: 213003 - DNA, 75 bp, synthetic construct
  source 1..75: mol_type = other DNA
cgttatgcggatgcctttgattctaatgggctttctcataattatctcattgaaagaagatttaaattaaatatt

SEQ ID NO: 213004 - DNA, 75 bp, synthetic construct
  source 1..75: mol_type = other DNA
aaaaaatcagattgccataattgaatcattgcaatcatacaatctgagaatactttttcttgggggagttaatca

SEQ ID NO: 213005 - DNA, 75 bp, synthetic construct
  source 1..75: mol_type = other DNA
gcgagaaatgttacctttgttgcggaagattgatgtcgaactttatggtgcactgtcattaagccgcaagtgcca

SEQ ID NO: 213006 - DNA, 75 bp, synthetic construct
  source 1..75: mol_type = other DNA
cgccccgctgccgttcattctctcccgcacctacagcagttaccggacaaaaacgcccgcgccgtggggagcctc

SEQ ID NO: 213007 - DNA, 75 bp, synthetic construct
  source 1..75: mol_type = other DNA
ccgtttctcccgtgaagaaagcagcacaattcgcggcttgttctttggttactctcattctgatattggttttga

SEQ ID NO: 213008 - DNA, 75 bp, synthetic construct
  source 1..75: mol_type = other DNA
aataaaaccaccatgacgggcttaggttctgacctcaacaatattctgaccgccttctctccggtatccaaagag

SEQ ID NO: 213009 - DNA, 75 bp, synthetic construct
  source 1..75: mol_type = other DNA
atgaccttgaatatcggcgcagacaactacagcaactcaaagacgcagtagtcgatctggaggacatgagcggcg

SEQ ID NO: 213010 - DNA, 75 bp, synthetic construct
  source 1..75: mol_type = other DNA
tccgcgatgtatgaaaccggaaaagatatgagcgctaaataccgggaaacttatcatggctgtcttagcaaattg

SEQ ID NO: 213011 - DNA, 75 bp, synthetic construct
  source 1..75: mol_type = other DNA
gcaaaccttattgcagttactggaatctttcgcattattttcaaccgtcaaaacgggcaaaaatactccacctaa

SEQ ID NO: 213012 - DNA, 75 bp, synthetic construct
  source 1..75: mol_type = other DNA
gcgcgttgggaataacactgtcactgttaattgctttcaccttgcagcttttcttacccggctgggagattggtt

SEQ ID NO: 213013 - DNA, 75 bp, synthetic construct
  source 1..75: mol_type = other DNA
tggtttgacctgtattttaaaaatataaggcgagatcaattttatttttcaattgctcttaaagaaaatgggttg

SEQ ID NO: 213014 - DNA, 75 bp, synthetic construct
  source 1..75: mol_type = other DNA
ctgacatgcttgttgaggcatatggaaatcagaccgaagtggcccgaatactgaactgcaatcgtgccacagtca

SEQ ID NO: 213015 - DNA, 75 bp, synthetic construct
  source 1..75: mol_type = other DNA
cggcgatacgcattgccaggacgatccgcaagactgctacggtctgacgatagggagtatgataagtaccagaat

SEQ ID NO: 213016 - DNA, 75 bp, synthetic construct
  source 1..75: mol_type = other DNA
gatgacatcataaaagcagcgtgtatattagccgctaatactcgtagatgtcttcgtatagatcctggaagcatt

SEQ ID NO: 213017 - DNA, 75 bp, synthetic construct
  source 1..75: mol_type = other DNA
caacaaatttactgatcagattgctcagcaagcatgcataacaccaggaccacatatcgaaagtggattgatcag

SEQ ID NO: 213018 - DNA, 75 bp, synthetic construct
  source 1..75: mol_type = other DNA
atgtctcgtttatggataggagattctgaaaccgtagctcaatacctgcatgaaaccatgttgatcccgaagcaa

SEQ ID NO: 213019 - DNA, 75 bp, synthetic construct
  source 1..75: mol_type = other DNA
aattgatggtcataccggctatatacttaatggcgaactaactccagcactggaggaagtacttaaccgtatttt

SEQ ID NO: 213020 - DNA, 75 bp, synthetic construct
  source 1..75: mol_type = other DNA
acatccattacagcttattatcgtaaccgccaagctgcttacgggctttgatgccccgatttgctactgcatgta

SEQ ID NO: 213021 - DNA, 75 bp, synthetic construct
  source 1..75: mol_type = other DNA
ttccgaccgcaacaggtaaaaaaaaccagccccgcattaccggtcaaccatcaggggcacctgcctgacatcgcc

SEQ ID NO: 213022 - DNA, 75 bp, synthetic construct
  source 1..75: mol_type = other DNA
ttccgactgcaacaggtgaagaaaaacctgccccatattatctgtatacccgtcaaccatcaggggcccctgcct

SEQ ID NO: 213023 - DNA, 75 bp, synthetic construct
  source 1..75: mol_type = other DNA
cttgccggattacatgtctacatccagacctcccgctacgaagggatgtgcctcgctgcacacgaagccatgaat

SEQ ID NO: 213024 - DNA, 75 bp, synthetic construct
  source 1..75: mol_type = other DNA
cccgcgaacgcgcacagctgctggctgtgctggaagtggagatctcccaacacgacgaagcctttctggaacaga

SEQ ID NO: 213025 - DNA, 75 bp, synthetic construct
  source 1..75: mol_type = other DNA
aacctcaaaataagctgataaataattttgaaaggttagtattcaatgcaagattaaataaatgcagagaaataa

SEQ ID NO: 213026 - DNA, 75 bp, synthetic construct
  source 1..75: mol_type = other DNA
aaataatgaatcaattggtgataaatgttacctacaaactttttgttatcgatttttagcattttatgcttggtg

SEQ ID NO: 213027 - DNA, 75 bp, synthetic construct
  source 1..75: mol_type = other DNA
ctcagaaagtcacaggcaataaggcaaagcatattcttaaggatatagcagaatactatcgtaacaaacccggca

SEQ ID NO: 213028 - DNA, 75 bp, synthetic construct
  source 1..75: mol_type = other DNA
tgataatcatgaaatcaaatggagctgattcttctttaggagttagatgggatcagtttactgtattaattaatg

SEQ ID NO: 213029 - DNA, 75 bp, synthetic construct
  source 1..75: mol_type = other DNA
ctgaattatggagcgcaaaagccatctctacgcggcatcctgtccaatgttctgggcgctcgcgggtgctggctg

SEQ ID NO: 213030 - DNA, 75 bp, synthetic construct
  source 1..75: mol_type = other DNA
aagctaacattttgaaaataacacttggagaaggagatgcctatgatgaaaacatggaaagaagaaatagatttt

SEQ ID NO: 213031 - DNA, 75 bp, synthetic construct
  source 1..75: mol_type = other DNA
atggcggccgaacgcatgtactgttgcagctggttatcaaacaaaatcgcacagatatccaccggttactggggc

SEQ ID NO: 213032 - DNA, 75 bp, synthetic construct
  source 1..75: mol_type = other DNA
gcaggcagtggccaaaaattgaggcatttattacctggctaagagagcaggtatgtcagtcttgtcagtatcagt

SEQ ID NO: 213033 - DNA, 75 bp, synthetic construct
  source 1..75: mol_type = other DNA
tggcgcagcacttattcaggcgattgtcgcagaaggtgatgtgagcacacctgttgtggtgaagccgtcggatgg

SEQ ID NO: 213034 - DNA, 75 bp, synthetic construct
  source 1..75: mol_type = other DNA
ggtgctctcgctaattccgaccttaaaggcattttttcagcgccattccttgctttataactcaaccggagagaa

SEQ ID NO: 213035 - DNA, 75 bp, synthetic construct
  source 1..75: mol_type = other DNA
ggggcctcacgccccatgaaagcacataagttaaatacagtagacttttgggataagaataaaaatggtaatatt

SEQ ID NO: 213036 - DNA, 75 bp, synthetic construct
  source 1..75: mol_type = other DNA
cacgttgacgaaaaactcaacaagcgtggttaccgctttgtccatctcaatatttttgaagtattgatagatatg

SEQ ID NO: 213037 - DNA, 75 bp, synthetic construct
  source 1..75: mol_type = other DNA
tttgcggtagatcagaaagcaggcggtgctattaaaacaaccacgcgggccatggaggtattcggaacaaaccgt

SEQ ID NO: 213038 - DNA, 75 bp, synthetic construct
  source 1..75: mol_type = other DNA
aagatgagtaatggggcaacagcgtttggcgattacaatagtaacggcgcgggtgctcatgtcgagagcgggttc

SEQ ID NO: 213039 - DNA, 75 bp, synthetic construct
  source 1..75: mol_type = other DNA
atgtcgttcgtttgcgccgtttggggaatcatctacacgagcaaaatatttccctcgatcagctgcaggacggtt

SEQ ID NO: 213040 - DNA, 75 bp, synthetic construct
  source 1..75: mol_type = other DNA
gggcggcggtgatgctgcatttacgttgggcaatgccggaggcgttgttgatatcggtacgtatgaatatacctt

SEQ ID NO: 213041 - DNA, 75 bp, synthetic construct
  source 1..75: mol_type = other DNA
gaaagcaggcggtgctattaaagcaaccacgcgggtcatggaggtattcggaacaaaccgtctcggtcagttcga

SEQ ID NO: 213042 - DNA, 75 bp, synthetic construct
  source 1..75: mol_type = other DNA
actacgctcaataatggtgtgctacaggtttatggcgcggcgaatgatcccacgattaaaggcgggcgcttaatc

SEQ ID NO: 213043 - DNA, 75 bp, synthetic construct
  source 1..75: mol_type = other DNA
tgttaattgttggactggctgctttttcttttgattttggtcgacggtgggaattatccaaaacagcggagtatt

SEQ ID NO: 213044 - DNA, 75 bp, synthetic construct
  source 1..75: mol_type = other DNA
tgctgtgcccgttcctccgtcggccgctggattaactggttcacgctgtcgggtgttgcaggactgaaatcatta

SEQ ID NO: 213045 - DNA, 75 bp, synthetic construct
  source 1..75: mol_type = other DNA
gagttaaagactgggggccctggcataatactgagcttcgtgatgaaattctgccgggattagcatcggtactca

SEQ ID NO: 213046 - DNA, 75 bp, synthetic construct
  source 1..75: mol_type = other DNA
tccaaatcctgacaatttagatcgactttcacaaataactgctcggcctattttttggttcatgcttcctccgag

SEQ ID NO: 213047 - DNA, 75 bp, synthetic construct
  source 1..75: mol_type = other DNA
gaaactcttgtctgaaacaggctggagtcaagcggagcttgggaaattagttggggtgtcgcaacaaacagtgca

SEQ ID NO: 213048 - DNA, 75 bp, synthetic construct
  source 1..75: mol_type = other DNA
gtgtgtcgcgcattactcgttttttgagtagaattgttactatgaaaacactcgagattactgcatatagaataa

SEQ ID NO: 213049 - DNA, 75 bp, synthetic construct
  source 1..75: mol_type = other DNA
tggaagaaacaaattatgcattccctgaccgcaattcagatatcaaaggttgggttcggaccgatgatttgtcac

SEQ ID NO: 213050 - DNA, 75 bp, synthetic construct
  source 1..75: mol_type = other DNA
tcgtgcacatatcgatcgtcggctggctccgattgcgaatatgttacttacatatagtgagagcctaccaaccgg

SEQ ID NO: 213051 - DNA, 75 bp, synthetic construct
  source 1..75: mol_type = other DNA
gtctacggcattaaacggcgcaatttccgatacttacgcgtcgatgatggcaaccatcgaccgcatgggcgatgc

SEQ ID NO: 213052 - DNA, 75 bp, synthetic construct
  source 1..75: mol_type = other DNA
cctgaatcttgactggcgacgctttgtcacatcgcaggtaaaagaattctatcaaatggaagtcgcgccgctaaa

SEQ ID NO: 213053 - DNA, 75 bp, synthetic construct
  source 1..75: mol_type = other DNA
ttattctgatggaatccacgcccagccagacaagctggcagccaaccagcaaattgaaaaagccgggaatgaata

SEQ ID NO: 213054 - DNA, 75 bp, synthetic construct
  source 1..75: mol_type = other DNA
cagactcgttacaccactcttgaggcgcttaatcaggcatggtggactggcttctggagccatacatacagtgac

SEQ ID NO: 213055 - DNA, 75 bp, synthetic construct
  source 1..75: mol_type = other DNA
atgtgttggattaccctccacatccgacaaaaaaccagatgagagaccgtccaccatttgggcaaaatatactca

SEQ ID NO: 213056 - DNA, 75 bp, synthetic construct
  source 1..75: mol_type = other DNA
attgctctaatcaggttaaagaaactgattcagtagcaaactctagaatcaagttgtatcacttcactgaactcg

SEQ ID NO: 213057 - DNA, 75 bp, synthetic construct
  source 1..75: mol_type = other DNA
atcgcttcgtcgctgactgccatcaacatggtgggcgttcacttcttcggtgaagtggagttctggctgagcctg

SEQ ID NO: 213058 - DNA, 75 bp, synthetic construct
  source 1..75: mol_type = other DNA
cggtggctatgcagtgtgccgccaccgttcacccttctacatccctcgatgtggcaagagtggagtccggttaca

SEQ ID NO: 213059 - DNA, 75 bp, synthetic construct
  source 1..75: mol_type = other DNA
tttctccttttatgctgacagaaaaaataaagccatgtaatcgtatcgttatggctcctatgacgacctggtcag

SEQ ID NO: 213060 - DNA, 75 bp, synthetic construct
  source 1..75: mol_type = other DNA
ttgcgttatcacttatttatttagccattgtcataattacgttaataccctttggacgtggtaatatctcagggc

SEQ ID NO: 213061 - DNA, 75 bp, synthetic construct
  source 1..75: mol_type = other DNA
atgcgtaccttgaaaaataaaccgttcattctgatggaatccacccccagccagacaagttggcagccaaccagc

SEQ ID NO: 213062 - DNA, 75 bp, synthetic construct
  source 1..75: mol_type = other DNA
cctgtcgcctgtatgcgctcgcgctttagcaatttgattgccttgcgccgtgatgctgaaattgaaattgcacgt

SEQ ID NO: 213063 - DNA, 75 bp, synthetic construct
  source 1..75: mol_type = other DNA
ctttcaatctatgtgaggaaaacggtggtaagtcttgttttggtgcaaatgaagtcaaagtggagtatcagacga

SEQ ID NO: 213064 - DNA, 75 bp, synthetic construct
  source 1..75: mol_type = other DNA
accctgaccctgccgcaaggatattgggattgcctgaccgacgcggcggtgtcggctccactgaccctgtcggca

SEQ ID NO: 213065 - DNA, 75 bp, synthetic construct
  source 1..75: mol_type = other DNA
atgacgatgtactgaaaaagatccgcacgcttgaatgctctgcatcattcacttcccgcaatttttcggtgagtg

SEQ ID NO: 213066 - DNA, 75 bp, synthetic construct
  source 1..75: mol_type = other DNA
cgagagctgtattgaagcattccatgaggcagaaactaacctgaatcacaccgctttccgccgtaatcaatggga

SEQ ID NO: 213067 - DNA, 75 bp, synthetic construct
  source 1..75: mol_type = other DNA
acaggaattccaactggcaagggaaatttttatgaatttgtgggagctggccagcaatgaaaacacattacgcta

SEQ ID NO: 213068 - DNA, 75 bp, synthetic construct
  source 1..75: mol_type = other DNA
acgattacgactactggcagctggcggaggtgctggatttcatctcctgggatagctatccgatgtggcaccgcg

SEQ ID NO: 213069 - DNA, 75 bp, synthetic construct
  source 1..75: mol_type = other DNA
cgaaggttaatacgctgctgcatggcgcggattataatccggagcaatgggagaatgaccccgatattattgata

SEQ ID NO: 213070 - DNA, 75 bp, synthetic construct
  source 1..75: mol_type = other DNA
tgtggcgtcgcgcaacgatctgccgttccagcgtgacttcttcgccgggattattgacgaactggcactgccacg

SEQ ID NO: 213071 - DNA, 75 bp, synthetic construct
  source 1..75: mol_type = other DNA
tgcctgaatgacggcgagtttaatctggtgcagggacttgccgggaatcagtgcggtctgcagggcccttatcag

SEQ ID NO: 213072 - DNA, 75 bp, synthetic construct
  source 1..75: mol_type = other DNA
ctactggaccggcatcgtcaatgagtccgatctctgctatctcggcggcttcccgggcccgctgcgcaatctgct

SEQ ID NO: 213073 - DNA, 75 bp, synthetic construct
  source 1..75: mol_type = other DNA
gccagctcggcgagatcctcagtaagttgccggaggtgaggggctgtcgcaccgaggcgaaagtagcgattatct

SEQ ID NO: 213074 - DNA, 75 bp, synthetic construct
  source 1..75: mol_type = other DNA
ttaccgattagcacgacgggtaaagcgcctaaaggcgggacgtttgaaggcgtaacgaccatatatcttgaaatg

SEQ ID NO: 213075 - DNA, 75 bp, synthetic construct
  source 1..75: mol_type = other DNA
aaccaatgctgacgatccccgagcggtggatatgggcaaccccgatattggcgtactggtgaaagattccagcgg

SEQ ID NO: 213076 - DNA, 75 bp, synthetic construct
  source 1..75: mol_type = other DNA
atcacacacaagaaagacgagaacggcaaccagatcggcaaaggcaagaaaggtgacaagctgataactttactt

SEQ ID NO: 213077 - DNA, 75 bp, synthetic construct
  source 1..75: mol_type = other DNA
aaaaagatacgttgatacaaggggttagtgcaatagcaaatatgaccaaggatatcggtggttttaagtattatt

SEQ ID NO: 213078 - DNA, 75 bp, synthetic construct
  source 1..75: mol_type = other DNA
aaacaaataaagattacggaacaatgcccatatcttccgtatctattcaggggcgagtcaccattacccaggatt

SEQ ID NO: 213079 - DNA, 75 bp, synthetic construct
  source 1..75: mol_type = other DNA
attattacttaaccgatgaactgtctgtatctacaaaaattcaggtaagttcggggcaatatggttttgtcccct

SEQ ID NO: 213080 - DNA, 75 bp, synthetic construct
  source 1..75: mol_type = other DNA
gctatagctataagcagtcgatccgggatggcgcaactaacccggtgaagttcgaacctcggctggctgaactcc

SEQ ID NO: 213081 - DNA, 75 bp, synthetic construct
  source 1..75: mol_type = other DNA
aacagcgcagcaggctatggagatggtccttccactgcggcgggtggctttatgtatctcggcttaagtgaagtt

SEQ ID NO: 213082 - DNA, 75 bp, synthetic construct
  source 1..75: mol_type = other DNA
gtaacgtcgcaggcggctatggtggcgcaatctattcttctggtactaatgatactggtgtcgtcgatttacgtg

SEQ ID NO: 213083 - DNA, 75 bp, synthetic construct
  source 1..75: mol_type = other DNA
acattcttaaaggtgctgcgatgaaatgtcagtacaagggcgctcaacgtggggttaaatgtgaggagattgcaa

SEQ ID NO: 213084 - DNA, 75 bp, synthetic construct
  source 1..75: mol_type = other DNA
acgctggagctgaaatccgaattcaaacaggcggtgcagaacgccattgcgcagtacaaaaagacccgcctgccg

SEQ ID NO: 213085 - DNA, 75 bp, synthetic construct
  source 1..75: mol_type = other DNA
caaaaacgttgataaaatcaaagaaattcaaacgtttatcgatcaagaactaaaggctatgaatcgaaaagctgc

SEQ ID NO: 213086 - DNA, 75 bp, synthetic construct
  source 1..75: mol_type = other DNA
caacggcggatctgtgcgcgggatttacaaccatgctcagtatctcgataagcgcagggagatgatgcagtggtg

SEQ ID NO: 213087 - DNA, 75 bp, synthetic construct
  source 1..75: mol_type = other DNA
ttattgcgttggatgagggtaccaccaatgcaaaagccatcgcacttgatggtttcggtaacgtggtggcgaagt

SEQ ID NO: 213088 - DNA, 75 bp, synthetic construct
  source 1..75: mol_type = other DNA
tacttctagttatacaaatcaagtggtgtatatattcaaactgagatcagatttcttaggtaaaattccactgga

SEQ ID NO: 213089 - DNA, 75 bp, synthetic construct
  source 1..75: mol_type = other DNA
atgatttttttggtgttaatactaatgctttatgtccatataataatgacagaataaatggttggaatttattga

SEQ ID NO: 213090 - DNA, 75 bp, synthetic construct
  source 1..75: mol_type = other DNA
gctggccttcctgattggcccggcgtcggaagccatcgctgcaggcaccttcctgaacctgtggtttcccggcgt

SEQ ID NO: 213091 - DNA, 75 bp, synthetic construct
  source 1..75: mol_type = other DNA
ggcctaccttatcggcggtgtcatcactctgttcattatgctgttgcttgccgaaatggcggtcgcccggcccgt

SEQ ID NO: 213092 - DNA, 75 bp, synthetic construct
  source 1..75: mol_type = other DNA
atgaacctggcgggattcagcgtggatggcttaacgctggtgctgttgagttttggcattgccagctttatcggt

SEQ ID NO: 213093 - DNA, 75 bp, synthetic construct
  source 1..75: mol_type = other DNA
ggaaaaaatatgtttttaatatagacttggataattttttcggcagttttaactttggtagagtccgaggttttt

SEQ ID NO: 213094 - DNA, 75 bp, synthetic construct
  source 1..75: mol_type = other DNA
caatgtgaccatttatttaaacatggtgagttcttagaggtgattgacggcaaggaaataaaggggaatgttaat

SEQ ID NO: 213095 - DNA, 75 bp, synthetic construct
  source 1..75: mol_type = other DNA
atataatggaaaaggatgaacagttggatttttcatcagaatttgacgagttgattaatgcagaaggcaggatta

SEQ ID NO: 213096 - DNA, 75 bp, synthetic construct
  source 1..75: mol_type = other DNA
taaaatgtaaaaattgtggtgaaaaattagtaacaaaaaacacaaatgaaaaagtcataattcacaaaggttata

SEQ ID NO: 213097 - DNA, 75 bp, synthetic construct
  source 1..75: mol_type = other DNA
tattccaggcgaatggtacgtacttggttttatcgatgcccttcctgaatatgaccaagaacttttcgatatgtc

SEQ ID NO: 213098 - DNA, 75 bp, synthetic construct
  source 1..75: mol_type = other DNA
aaatcagtaagtgatgccggctttgacattaaaatcattaagtcaaaacttggtgttgaggaaactatcaattac

SEQ ID NO: 213099 - DNA, 75 bp, synthetic construct
  source 1..75: mol_type = other DNA
tgtaccgttatacaccagagagtttgaaacgagcattagtaatatttagagattgtgtgagtacgcaaccgcaaa

SEQ ID NO: 213100 - DNA, 75 bp, synthetic construct
  source 1..75: mol_type = other DNA
ccgtgtccggcttaatccattaaaaataagctgtgaaccagaaggacacatggtttctgataaaagggcagatat

SEQ ID NO: 213101 - DNA, 75 bp, synthetic construct
  source 1..75: mol_type = other DNA
gagggagtattacaaatggtggtatgcggtactggcaggaagcgatgagttatttaaaaaacatcctgatgttac

SEQ ID NO: 213102 - DNA, 75 bp, synthetic construct
  source 1..75: mol_type = other DNA
atgaagatattatagacgccgccattatctcatttacacgctatgatactcgatacttgttcttacatgaatttt

SEQ ID NO: 213103 - DNA, 75 bp, synthetic construct
  source 1..75: mol_type = other DNA
gagctttctttaattcaattagaaaccatcattagagtttcagcaacgcatttccctaatgcttatcatccagta

SEQ ID NO: 213104 - DNA, 75 bp, synthetic construct
  source 1..75: mol_type = other DNA
atttgctacaacccgaacaggcttatgatttgtttgtatctgaggctaagtcagatcctgagatcatttggattg

SEQ ID NO: 213105 - DNA, 75 bp, synthetic construct
  source 1..75: mol_type = other DNA
gttgataaaagagaccgcttatcagcgatagttatagatgtctcctgtgagggcatacctcctgttgaagcaccg

SEQ ID NO: 213106 - DNA, 75 bp, synthetic construct
  source 1..75: mol_type = other DNA
ggaaccggcaatttacgtattactaatggcggtacattcacttccttagctcaactaaatataggctatgcttct

SEQ ID NO: 213107 - DNA, 75 bp, synthetic construct
  source 1..75: mol_type = other DNA
aattcgtagcgaagcggcggatgcggggatcgcgcaggcgattatgcagcagcttgaagaggcgctaaaacaact

SEQ ID NO: 213108 - DNA, 75 bp, synthetic construct
  source 1..75: mol_type = other DNA
ttaataaacggggggatcaggatattccggctgaaacgccgtatgcgccgggagaacaaattaagggagggtggc

SEQ ID NO: 213109 - DNA, 75 bp, synthetic construct
  source 1..75: mol_type = other DNA
aataccccagttacagaaccatctcgttcttctcacatgaaataattagagcggcgttatcgaggcggggttttt

SEQ ID NO: 213110 - DNA, 75 bp, synthetic construct
  source 1..75: mol_type = other DNA
attgcctctgagggttatgctcccggatggaatcattttacttctttgaatgtaggccaaaactctaacggctca

SEQ ID NO: 213111 - DNA, 75 bp, synthetic construct
  source 1..75: mol_type = other DNA
aaaataccttcagccccaactccgattatattgtcgacaacgatgggcatctcgatttaaacagttattcgcagg

SEQ ID NO: 213112 - DNA, 75 bp, synthetic construct
  source 1..75: mol_type = other DNA
atctccactgagcgtagctgggcgatgacgcacagtatcagcggtagcggtgatatgacaaaactgggtaccggg

SEQ ID NO: 213113 - DNA, 75 bp, synthetic construct
  source 1..75: mol_type = other DNA
aggaaatgctgcaacagcaacgaagttagcgaacgcaagaaatattaatggtgtcagatttgatggctctgccga

SEQ ID NO: 213114 - DNA, 75 bp, synthetic construct
  source 1..75: mol_type = other DNA
atgtattgtacattgaaatgatccgtatgttaccttatgaagtactgatacgcgaatttaggttaagtactgaaa

SEQ ID NO: 213115 - DNA, 75 bp, synthetic construct
  source 1..75: mol_type = other DNA
agcccgtgcttctgaggacaatggtaataccgggacaggggctgcttgttctgcactgagcgtcactggggacac

SEQ ID NO: 213116 - DNA, 75 bp, synthetic construct
  source 1..75: mol_type = other DNA
tttactcagttaagcagtgcgaccaacagcacgtctgaaatgctggccgcaacgccaaaagccgttaagacggta

SEQ ID NO: 213117 - DNA, 75 bp, synthetic construct
  source 1..75: mol_type = other DNA
tgcctggtggctggactgatcgtggttcatatgcggcaggttatttttcgacgtatcagactaatgagcgcgcaa

SEQ ID NO: 213118 - DNA, 75 bp, synthetic construct
  source 1..75: mol_type = other DNA
gaattcaatggaatggtaatgcctggtggctggactgatcgtggctcatatgcggcaggttatttttcgacgtat

SEQ ID NO: 213119 - DNA, 75 bp, synthetic construct
  source 1..75: mol_type = other DNA
tgcctgatactatttaatcagtatcaggcaaggtattcagtgaataatggcgttgaatatttcaacaccattatt

SEQ ID NO: 213120 - DNA, 75 bp, synthetic construct
  source 1..75: mol_type = other DNA
atgcggaccacgcgctcagttaatttgacagaagcgggagaacggctgcataaatcgctgtcattacctttatcc

SEQ ID NO: 213121 - DNA, 75 bp, synthetic construct
  source 1..75: mol_type = other DNA
gaattaatattcgggaatatcatgatattcctgctgaaacgtcgtatgcgccgggagaacagtttcagggagggg

SEQ ID NO: 213122 - DNA, 75 bp, synthetic construct
  source 1..75: mol_type = other DNA
ccccacggcaaggcgaatcactcggtaaacacagccttcagaaaatcgacgcgatcccggaagaagtacggagcg

SEQ ID NO: 213123 - DNA, 75 bp, synthetic construct
  source 1..75: mol_type = other DNA
cgcctggaagaaggatggtcagccggttgacgggcagacgacagacaccttcagtaagccaggtgcgcagtccgc

SEQ ID NO: 213124 - DNA, 75 bp, synthetic construct
  source 1..75: mol_type = other DNA
attggtgctgagggtgaactgacgactgcggccaacaagactgtcacagaaacttatcacgaatttgctaacggc

SEQ ID NO: 213125 - DNA, 75 bp, synthetic construct
  source 1..75: mol_type = other DNA
tttttaaaattacaaaccgataattataatgtttcttcaataaacgttggtcctttttcaggtggaaatgttgca

SEQ ID NO: 213126 - DNA, 75 bp, synthetic construct
  source 1..75: mol_type = other DNA
aatggttctggtaccattgcaaacaaagcggccacaatcagtgacttgactgctcagaaagccgttgacaacggt

SEQ ID NO: 213127 - DNA, 75 bp, synthetic construct
  source 1..75: mol_type = other DNA
acaatgttttactcgtttaatgataacatttatcgtcctcaacttagtgttaaagtaaccgatattgttcaattc

SEQ ID NO: 213128 - DNA, 75 bp, synthetic construct
  source 1..75: mol_type = other DNA
ggggagttttatcgggtgttcacaattaatgaatccgtcatcaacaaaaatagaaaatgcaattgaggagaacga

SEQ ID NO: 213129 - DNA, 75 bp, synthetic construct
  source 1..75: mol_type = other DNA
ctaaactgtatctgcagaaagatggctctgtaaccaacggttcaggtaaagcggtctatgtagaagcggatggtg

SEQ ID NO: 213130 - DNA, 75 bp, synthetic construct
  source 1..75: mol_type = other DNA
tatgtggatgataaaggtggtatcactaacgttgccgactatacagtctcttacagcgttaacaaggataacggc

SEQ ID NO: 213131 - DNA, 75 bp, synthetic construct
  source 1..75: mol_type = other DNA
aggtagtgacggtgcctctctgacattcaatggcacagaatataccatcgcaaaagcaactcctgcgacaaccac

SEQ ID NO: 213132 - DNA, 75 bp, synthetic construct
  source 1..75: mol_type = other DNA
cctggatggactgaccaaaaaccatgatgcgacaggagctgttggtgttgatatcacgaccgcagatggcgcaac

SEQ ID NO: 213133 - DNA, 75 bp, synthetic construct
  source 1..75: mol_type = other DNA
gttaacaacagaagctactactgcatccagttccaccgccgatcccctgaaagctctggacgaagccatcagctc

SEQ ID NO: 213134 - DNA, 75 bp, synthetic construct
  source 1..75: mol_type = other DNA
gcgtgaacgtgctgtccaaagatggctcgatgaaaattcaggtcggcgcgaacgatggcgaaacgattactattg

SEQ ID NO: 213135 - DNA, 75 bp, synthetic construct
  source 1..75: mol_type = other DNA
aatggtaaaggtactattaccaacaaagctgcaacggtaagtgatttaacttctgctggcgcgaagttaaacacc

SEQ ID NO: 213136 - DNA, 75 bp, synthetic construct
  source 1..75: mol_type = other DNA
tggacttcttggaaagaagaaaaagcatggggcgagagggttgtcccgtatgttgagactggatataaaggcatt

SEQ ID NO: 213137 - DNA, 75 bp, synthetic construct
  source 1..75: mol_type = other DNA
agcagcccggtgatgttactgacacattccgcattcgctttcatgacgagctggcgaataactatcagcagctcc

SEQ ID NO: 213138 - DNA, 75 bp, synthetic construct
  source 1..75: mol_type = other DNA
cgctggtgggttgaggcactcgacaagcagcccggtgatgttactgacacattccgaattcgctttcatgacgag

SEQ ID NO: 213139 - DNA, 75 bp, synthetic construct
  source 1..75: mol_type = other DNA
agtccgatagctgcggcacagatggcaaaaggggatatgttccgactcatttcaatcaactggatacgcacatac

SEQ ID NO: 213140 - DNA, 75 bp, synthetic construct
  source 1..75: mol_type = other DNA
acactgtcggtattgcttgtggcgatttttctgccaaatgtagcgatgcatgtattgaaaaatataacactgggc

SEQ ID NO: 213141 - DNA, 75 bp, synthetic construct
  source 1..75: mol_type = other DNA
cagcaagattttttcaaaaaggtatgggaagaagcaggcatgcacgtgccaaccaataccttatatcagaacata

SEQ ID NO: 213142 - DNA, 75 bp, synthetic construct
  source 1..75: mol_type = other DNA
cagagagtagccacctgacagcagacaaagaactgagtaaccgggttagagcagcgttgcggaacctacaaccgt

SEQ ID NO: 213143 - DNA, 75 bp, synthetic construct
  source 1..75: mol_type = other DNA
gcctcgccgatccgctggaagtcggcgaactggcggccttcctcgcatcggatgaatccagctatttaaccggta

SEQ ID NO: 213144 - DNA, 75 bp, synthetic construct
  source 1..75: mol_type = other DNA
caaagttagacggcttacccaaaaattttacttgggatgagttcgttactctcatgaaccagtatggcttcaagc

SEQ ID NO: 213145 - DNA, 75 bp, synthetic construct
  source 1..75: mol_type = other DNA
cagattagtgatgctcgcccgatgatggatcctcaaaagtgtcagctttgcggtgcatgctggcgggcctgcgag

SEQ ID NO: 213146 - DNA, 75 bp, synthetic construct
  source 1..75: mol_type = other DNA
cagagagtagccacctaacagcagacaaagaactgagtaacagggttagagcagcgttgcgaaacctacacccgt

SEQ ID NO: 213147 - DNA, 75 bp, synthetic construct
  source 1..75: mol_type = other DNA
ccgctagtgcccgccatcagtggccgatgatatttgagcaactgggtatcgttgtgccgcctgcccatcgtcacg

SEQ ID NO: 213148 - DNA, 75 bp, synthetic construct
  source 1..75: mol_type = other DNA
ggacccgctgaagtgcgtgctgtgtggaagtcagatgcgttttagggggctgaagcggggtaccgtctggcagac

SEQ ID NO: 213149 - DNA, 75 bp, synthetic construct
  source 1..75: mol_type = other DNA
gagagttgcggatataaaaggtaaaaagcagggtaaattgcaaaaaataatgagtgggcttgtggggtttaaata

SEQ ID NO: 213150 - DNA, 75 bp, synthetic construct
  source 1..75: mol_type = other DNA
tggaggagctaaaaggcaccccccaccttcagacagttgtattaatgtctatcattcaggctgctcagcatgcaa

SEQ ID NO: 213151 - DNA, 75 bp, synthetic construct
  source 1..75: mol_type = other DNA
gcatgctatgtttattaaaaaggatggtcgtcgtcgtttgtttatacttgatgaggcctgggagtatatcggcga

SEQ ID NO: 213152 - DNA, 75 bp, synthetic construct
  source 1..75: mol_type = other DNA
aagcatatttctcaacggtacgcacattcatctggaaggggagtcggatgtgaacggtgatgcgccagtgattaa

SEQ ID NO: 213153 - DNA, 75 bp, synthetic construct
  source 1..75: mol_type = other DNA
atccgcgcattattgttgaggtgaagcaccggcgggaacagatgagcagccagcaaatccgtagctttatcggtg

SEQ ID NO: 213154 - DNA, 75 bp, synthetic construct
  source 1..75: mol_type = other DNA
gaaagtttctgatataaaagataaaaagcagggtaaactgcaaaaaataatgaatgaatttgtgaggtttaaata

SEQ ID NO: 213155 - DNA, 75 bp, synthetic construct
  source 1..75: mol_type = other DNA
ccgctttacttttgcgccataccagtcgccggataacagacatatcactaatgtatgagttcagttcgccccagg

SEQ ID NO: 213156 - DNA, 75 bp, synthetic construct
  source 1..75: mol_type = other DNA
atacgtcgcagaaaactaacacttgccgctttacttttgcgccataccagtcgccggataacagacatatcacta

SEQ ID NO: 213157 - DNA, 75 bp, synthetic construct
  source 1..75: mol_type = other DNA
gatactctttcagaacattcagccgtacatttcagcagatattttccccggaaaaatactcagaatcagcggtac

SEQ ID NO: 213158 - DNA, 75 bp, synthetic construct
  source 1..75: mol_type = other DNA
ctaagcgttcttcccgccgttcgttccgcaagtatgcgaagtcgcataagaagaactttaaagcccgctcaatgc

SEQ ID NO: 213159 - DNA, 75 bp, synthetic construct
  source 1..75: mol_type = other DNA
gctgcgaagaggtcgcccgcttattctgtgtaaacaagcgcacgattttaaggtggatcgacagcataccaggtt

SEQ ID NO: 213160 - DNA, 75 bp, synthetic construct
  source 1..75: mol_type = other DNA
atacgtcgtagaaaactaacacttgctgctttacttttgcgtcacaccagtcgccgggtaacagacatatcacta

SEQ ID NO: 213161 - DNA, 75 bp, synthetic construct
  source 1..75: mol_type = other DNA
tcgctacagcagcagtacatcggtgagtaccagtaaaggcggtggcacgggcttcagcactggcgtgtccggctc

SEQ ID NO: 213162 - DNA, 75 bp, synthetic construct
  source 1..75: mol_type = other DNA
ggactgcgccggacgatcaaggaggagccggaatacaaccgtattgcgacttatcagtcatcgaatgatgacttt

SEQ ID NO: 213163 - DNA, 75 bp, synthetic construct
  source 1..75: mol_type = other DNA
ttttcatccagatgaaaatgccactttccctcagggcatggagtggttagaaaaaaatatagaagaactcaaagg

SEQ ID NO: 213164 - DNA, 75 bp, synthetic construct
  source 1..75: mol_type = other DNA
gttgctctagactttgaagttaaacgcaccgatttaatgagtggatggaatgaaacggagcaattcttctcaggt

SEQ ID NO: 213165 - DNA, 75 bp, synthetic construct
  source 1..75: mol_type = other DNA
gaacccaataaaatgggtataagcattcttaaattaattatactttattacacatcccccctcgataacgcgata

SEQ ID NO: 213166 - DNA, 75 bp, synthetic construct
  source 1..75: mol_type = other DNA
ccgggcagttgattgcatcgcgcaaaacgatcggcaacctgccgtcatttatcgcgccattcttccctgatggca

SEQ ID NO: 213167 - DNA, 75 bp, synthetic construct
  source 1..75: mol_type = other DNA
ttgatgcgtatcttgagcgacaagctgaactgaatcacatcaataagtcccacgtaacaaaggcgttcagcattg

SEQ ID NO: 213168 - DNA, 75 bp, synthetic construct
  source 1..75: mol_type = other DNA
cggttttgatgctcagcatttttgtcctgatgatccctaaaacagcttattccgcttatatcccagtctttttaa

SEQ ID NO: 213169 - DNA, 75 bp, synthetic construct
  source 1..75: mol_type = other DNA
gggcagacagggcgctgcgttccggtcatcaaaatctgctttccgaagcgcagcctgagctggagcggacgttac

SEQ ID NO: 213170 - DNA, 75 bp, synthetic construct
  source 1..75: mol_type = other DNA
atgacaatcgcagaacgtcttgagcaaaaaggtcgccaggaaggacgcatggaaggagcgcttgaaaaagccctg

SEQ ID NO: 213171 - DNA, 75 bp, synthetic construct
  source 1..75: mol_type = other DNA
tggaaattcacgtacggcagcggaacatgaagaaggcactggaagcgctgaacagtgtggatgagattctggcgt

SEQ ID NO: 213172 - DNA, 75 bp, synthetic construct
  source 1..75: mol_type = other DNA
agcctggatggcggtcgcacccagtccatgtttgactctcacccaccatcaacagagcgtgcgcaacacatccgt

SEQ ID NO: 213173 - DNA, 75 bp, synthetic construct
  source 1..75: mol_type = other DNA
cgccagtaacccgtgccagtcaggttaatggcagtaacatttatgccttccgcgccaattgttcgtatcgtcgcc

SEQ ID NO: 213174 - DNA, 75 bp, synthetic construct
  source 1..75: mol_type = other DNA
tctaactcactccgatattacacaattatttcgttttcgttatgataaattcaaaccagaggctttacggacact

SEQ ID NO: 213175 - DNA, 75 bp, synthetic construct
  source 1..75: mol_type = other DNA
gaagatatacttcgcatatctggtttgattctggattcatacgagtatgttaaaaatgatgataatttccgccga

SEQ ID NO: 213176 - DNA, 75 bp, synthetic construct
  source 1..75: mol_type = other DNA
gcattcacaaaaaccataagctcaagtcttagagaggttgatcctgaatttgtcagatatgttgccagtcgttca

SEQ ID NO: 213177 - DNA, 75 bp, synthetic construct
  source 1..75: mol_type = other DNA
tgcattcaacagctccagccttactctcggcgatgatggcgtgcaggggtacagcttgtccatcgattatcaaat

SEQ ID NO: 213178 - DNA, 75 bp, synthetic construct
  source 1..75: mol_type = other DNA
gaaatcagtctgtagttaataatgctttacgtggatatctgctgtttagtagtaatgatgcaaaaaacgattttt

SEQ ID NO: 213179 - DNA, 75 bp, synthetic construct
  source 1..75: mol_type = other DNA
accgcaaaagcggtgaaaattgcgatggataatgccaatgcccgtctggcaaaagaccggaacggagcagatatt

SEQ ID NO: 213180 - DNA, 75 bp, synthetic construct
  source 1..75: mol_type = other DNA
acaaccaagcaattggggtaacattgattcccgatatgtaaaggatgttcggcttggctcacagcaatattatgg

SEQ ID NO: 213181 - DNA, 75 bp, synthetic construct
  source 1..75: mol_type = other DNA
tatcattttgttgttgatagcgctaatttacaccctgcatttttatccctggctgaaatttagtattggattttg

SEQ ID NO: 213182 - DNA, 75 bp, synthetic construct
  source 1..75: mol_type = other DNA
atcaaagcattttcagagttggatctctccttgctggcaaacgccccactctttatgctcggcgtctttcttgtc

SEQ ID NO: 213183 - DNA, 75 bp, synthetic construct
  source 1..75: mol_type = other DNA
atgtgctctcaggcgtgctgcttaccagctttaatgcctcagcggttcccggactatggcagcagggttatggcc

SEQ ID NO: 213184 - DNA, 75 bp, synthetic construct
  source 1..75: mol_type = other DNA
attttgaagagttaactatagccgaaatatcttcccaactaaatgtaagtgttggtgctgttaaaagtcgtttgc

SEQ ID NO: 213185 - DNA, 75 bp, synthetic construct
  source 1..75: mol_type = other DNA
actaacgccacggtcacgataagccattctggtcgcgtgatttaccagaaaaagttccgccaggcccatttatta

SEQ ID NO: 213186 - DNA, 75 bp, synthetic construct
  source 1..75: mol_type = other DNA
aataattgcgttaatgacgttgctaattattcatgggcaaaactagcagatattactttctcagatatcaataat

SEQ ID NO: 213187 - DNA, 75 bp, synthetic construct
  source 1..75: mol_type = other DNA
atgaatattttcccttcaaaggagggatcgggcgctactgtgaagaagttattaatgaaataaaacttcagcaca

SEQ ID NO: 213188 - DNA, 75 bp, synthetic construct
  source 1..75: mol_type = other DNA
actgaaaggaggttatgtcatagacgcgattgatcctaaagatggtatcaacatctcccgcccagacgaatatat

SEQ ID NO: 213189 - DNA, 75 bp, synthetic construct
  source 1..75: mol_type = other DNA
tcccctgggagttacgcggctacgcgccgcaaatcagcggcatcgcacagactaacgccacggtcacgataagcc

SEQ ID NO: 213190 - DNA, 75 bp, synthetic construct
  source 1..75: mol_type = other DNA
aacaacctgaacgcctatggcaccacgggcctcaacgccggggcatggcgtctgcgcagcgattatcagcttagc

SEQ ID NO: 213191 - DNA, 75 bp, synthetic construct
  source 1..75: mol_type = other DNA
ttcttcaatggcgactggggagtactgcttaccgcgctggccagtaacaataaaaatgacatcctcgccacccca

SEQ ID NO: 213192 - DNA, 75 bp, synthetic construct
  source 1..75: mol_type = other DNA
gtggcgcacgtcttcggtgaacgcactctggccacactggagcgtcttctgagtttgaggtcgtggtatggatga

SEQ ID NO: 213193 - DNA, 75 bp, synthetic construct
  source 1..75: mol_type = other DNA
attaattttaatcagaacaatcacgtggtgattcagaacgacggcaccaacggacaggcggggccgcagctgatg

SEQ ID NO: 213194 - DNA, 75 bp, synthetic construct
  source 1..75: mol_type = other DNA
cttggtggactaccgcccattgcacaggcattaaaagatcatttagctgcctatgagcaatcgaaaaaagtataa

SEQ ID NO: 213195 - DNA, 75 bp, synthetic construct
  source 1..75: mol_type = other DNA
acaggcattaaaagatcatttagctgcctatgaactatcgaaagcgtctgagactgtaagctttaagccaacccg

SEQ ID NO: 213196 - DNA, 75 bp, synthetic construct
  source 1..75: mol_type = other DNA
tcgaaatagagcaggaagtctccagcgttgactcttcctctaactcgacgctcggcccgacgtttaatacccgta

SEQ ID NO: 213197 - DNA, 75 bp, synthetic construct
  source 1..75: mol_type = other DNA
aggcggcggcagctcaggtggtggcagctcaggtggtggcagttctggcggtggtggtaactcaggcggtggcag

SEQ ID NO: 213198 - DNA, 75 bp, synthetic construct
  source 1..75: mol_type = other DNA
gagaaaatgcgcgttaagcgtgcgaaagaaaaatttggtgatcgctataattcctacctcgcttctttagagtcc

SEQ ID NO: 213199 - DNA, 75 bp, synthetic construct
  source 1..75: mol_type = other DNA
gagacgaacttcgccgtgcgctttcgtgttgtgtgcctgcttttaaccacgtcaggcgaggtggtatccttaaaa

SEQ ID NO: 213200 - DNA, 75 bp, synthetic construct
  source 1..75: mol_type = other DNA
gcggcaagcaagaacaggcggaaggtatcctgcgcaaaattatgggcaacacgcttgcaactcaggcagtacagg

SEQ ID NO: 213201 - DNA, 75 bp, synthetic construct
  source 1..75: mol_type = other DNA
tgaaagacggtgcaggtaaaccggtacagaactgtacaatccagctgaaagcaaaacgtaacagcaccacggtgg

SEQ ID NO: 213202 - DNA, 75 bp, synthetic construct
  source 1..75: mol_type = other DNA
ggatgggctacgcgctcgctttatacttatcgctggaatccgacaataggcccgcaatggacacgccacgcaaga

SEQ ID NO: 213203 - DNA, 75 bp, synthetic construct
  source 1..75: mol_type = other DNA
attgcggaactggctccagctcatattcgcgggaaactggtttcatttaaccagtttgcgattattttcgggcaa

SEQ ID NO: 213204 - DNA, 75 bp, synthetic construct
  source 1..75: mol_type = other DNA
atgagcgccgatcttacagacagtaaagaacaatgcaggatggacaatcatggtcaaaatgttaacattttatcc

SEQ ID NO: 213205 - DNA, 75 bp, synthetic construct
  source 1..75: mol_type = other DNA
caggactggtatgaatgccagaaacagtttgcgacgaatacatacaaaatcatgtatgacagtaataacattgtc

SEQ ID NO: 213206 - DNA, 75 bp, synthetic construct
  source 1..75: mol_type = other DNA
aactcctggctggtggcccatttccacaacggtttctcctactggatttacgggtgtatgggcgttctggcagca

SEQ ID NO: 213207 - DNA, 75 bp, synthetic construct
  source 1..75: mol_type = other DNA
tcatcggcggtgccctcggtggttattgcagtaaccgcttcggtcgtcgtgattcacttaagattgctgctgtcc

SEQ ID NO: 213208 - DNA, 75 bp, synthetic construct
  source 1..75: mol_type = other DNA
ttcgcgggaaactggtttcatttaaccagtttgcgattattttcgggcaacttttagtttactgcgtaaactatt

SEQ ID NO: 213209 - DNA, 75 bp, synthetic construct
  source 1..75: mol_type = other DNA
taagccacatctgtcacctataccattgatttctgtaagagaaactaatgaggtcgcattagccgtaaggaaata

SEQ ID NO: 213210 - DNA, 75 bp, synthetic construct
  source 1..75: mol_type = other DNA
acaggtacagatagagttgctgcttatcatactcacggtgcagatagtcatggcgattatgttgatgaatttttt

SEQ ID NO: 213211 - DNA, 75 bp, synthetic construct
  source 1..75: mol_type = other DNA
gcgaggacgggcacggcgtggtatttccggctgaactggtgcggctgctggacagactggaggaagaaatccggg

SEQ ID NO: 213212 - DNA, 75 bp, synthetic construct
  source 1..75: mol_type = other DNA
tatgggtattattttggttgtgtattatccaatatatcatgttttgaaagcgacttatcaaacaccatcttttca

SEQ ID NO: 213213 - DNA, 75 bp, synthetic construct
  source 1..75: mol_type = other DNA
ttctctgtggatcgctgggacgagagctggacagaaagcgtcaaacgccaggtggtgaaggatgctttttatata

SEQ ID NO: 213214 - DNA, 75 bp, synthetic construct
  source 1..75: mol_type = other DNA
ttcccccgcaggcctggaaaaaaaccggcgttaccgtccggaggatgaggaaagctggctggcgcagacgccgct

SEQ ID NO: 213215 - DNA, 75 bp, synthetic construct
  source 1..75: mol_type = other DNA
tgttgaagtggtgaaaagttggcatggtcgtcgcccaatggctgtaggaacggggagtgaaagcgcgccatcgct

SEQ ID NO: 213216 - DNA, 75 bp, synthetic construct
  source 1..75: mol_type = other DNA
gagtggattacatgacaaaagtaagaactaaaatattgggtgatggagaccgtaacttcggatgtagtcgaggat

SEQ ID NO: 213217 - DNA, 75 bp, synthetic construct
  source 1..75: mol_type = other DNA
cacatgtatccctgtatcgggatagaattaaacaggttattgatgattccctcaaggaatatcctaatacaatga

SEQ ID NO: 213218 - DNA, 75 bp, synthetic construct
  source 1..75: mol_type = other DNA
gtctgagtcaacaggaacaaaaagcattacggaatacatcgttgcgagcgattccttattccttattccttaatc

SEQ ID NO: 213219 - DNA, 75 bp, synthetic construct
  source 1..75: mol_type = other DNA
catcagcataaaggaaccaccagtgccgtgcggcgggtggtggaaccgttcggctttctgatccgcattattgag

SEQ ID NO: 213220 - DNA, 75 bp, synthetic construct
  source 1..75: mol_type = other DNA
aagactggcctgatacccgacattcaaccttacgttacgcatgggtccgagaatataccaaaaatggaaaacggc

SEQ ID NO: 213221 - DNA, 75 bp, synthetic construct
  source 1..75: mol_type = other DNA
tacgcacaatgataacaacagcctggtacagtgcgcttggcatcccgatagatgactctgggaagctagttaatt

SEQ ID NO: 213222 - DNA, 75 bp, synthetic construct
  source 1..75: mol_type = other DNA
catggattgaaggcgcgataggttacaaatcactggcttcccgttccggtaaagacgttaacgtcatcatacgca

SEQ ID NO: 213223 - DNA, 75 bp, synthetic construct
  source 1..75: mol_type = other DNA
ggtcagcaccgacggcgtgggcgatattccgattcagggcaatattgactacaccaaccgctttggtattgccgt

SEQ ID NO: 213224 - DNA, 75 bp, synthetic construct
  source 1..75: mol_type = other DNA
gctaacgggcatttcccgccgctcggtgccgatgttcgccaggctgaaggcggtgtcagcgtcgggatggttggc

SEQ ID NO: 213225 - DNA, 75 bp, synthetic construct
  source 1..75: mol_type = other DNA
atggcagattggaatggttatattatggatatcagcaatcaatttgatcagggcgttgatgatctgaccagcaag

SEQ ID NO: 213226 - DNA, 75 bp, synthetic construct
  source 1..75: mol_type = other DNA
gatatataatgtgtttctttttgggatctcgcctagcatatgctgaaaatatagacagcaacactgtcattagtg

SEQ ID NO: 213227 - DNA, 75 bp, synthetic construct
  source 1..75: mol_type = other DNA
catgaaaggaggcatttctgctgcaggccagttagagttaaatatggacaatagttcaaacctgcgtgttgataa

SEQ ID NO: 213228 - DNA, 75 bp, synthetic construct
  source 1..75: mol_type = other DNA
acagttgtggaaaatccgtatgcccctgcctgcaactgatgcagatgacgcgctgatgccggagagtattgcaaa

SEQ ID NO: 213229 - DNA, 75 bp, synthetic construct
  source 1..75: mol_type = other DNA
ttcgccagggaatgaaggttatccgctaccgtcgcaatctgcggcgtctgccccgttatgtgatgagtacccggc

SEQ ID NO: 213230 - DNA, 75 bp, synthetic construct
  source 1..75: mol_type = other DNA
ggcagcacggtgattgttttcgaccccaagggtgacgccgatctgttgcgtcgcgtgtgggcagaggcacaccgt

SEQ ID NO: 213231 - DNA, 75 bp, synthetic construct
  source 1..75: mol_type = other DNA
caattctgtcgctatcggcgcaggatcgaccacagatgcaagcaatacggtttcagttggcaacagcacaacaaa

SEQ ID NO: 213232 - DNA, 75 bp, synthetic construct
  source 1..75: mol_type = other DNA
aatatttctgcgtcatcaccttctgcagatatcactatatcaaaacgaggtaatttaactattcaatcagtatta

SEQ ID NO: 213233 - DNA, 75 bp, synthetic construct
  source 1..75: mol_type = other DNA
ttattactattcaattttcgactaaagcatacgctaattcgatgccagcgcttttgacgactctttacggttttt

SEQ ID NO: 213234 - DNA, 75 bp, synthetic construct
  source 1..75: mol_type = other DNA
aactatcttatccagccatctgtatcgacagacttggataaattaaataatgcagcaccttttgttttttcgcca

SEQ ID NO: 213235 - DNA, 75 bp, synthetic construct
  source 1..75: mol_type = other DNA
gcagtgataacgtaattgacgatcatcacgtgttttttgctgacagtcgctgtgactttgtgaaagtagtctctg

SEQ ID NO: 213236 - DNA, 75 bp, synthetic construct
  source 1..75: mol_type = other DNA
tgcaccgcgtcagtgctcgccgggctatatccagcaaaggcagtacccgcgaaacagcgagtgatgtcgtagcca

SEQ ID NO: 213237 - DNA, 75 bp, synthetic construct
  source 1..75: mol_type = other DNA
ctttgaggctggtgagtttaaaatatcacatacaattagaaatagggtgttttttgaactttacgcgacaacaaa

SEQ ID NO: 213238 - DNA, 75 bp, synthetic construct
  source 1..75: mol_type = other DNA
aagtacagactggtttccggcagaattctggatgaaaggaagacggcagactgtttcatgaaacaggccggtccg

SEQ ID NO: 213239 - DNA, 75 bp, synthetic construct
  source 1..75: mol_type = other DNA
caacatagtcacagcagccaaggatttcagagtttgtctggggcaatggtgctcagcctgtgtggaataataacc

SEQ ID NO: 213240 - DNA, 75 bp, synthetic construct
  source 1..75: mol_type = other DNA
aaacgctgggctgatgaggcgatcctcgtcaaggaggggttagtctcagttgctgacttttgggcacatatgaat

SEQ ID NO: 213241 - DNA, 75 bp, synthetic construct
  source 1..75: mol_type = other DNA
ttagtgcaggtaaaaattcactatatagatttacgactgagagtatagagaaagcaataaatatttttaacgaaa

SEQ ID NO: 213242 - DNA, 75 bp, synthetic construct
  source 1..75: mol_type = other DNA
tgagttcacaacaatatcgccattcattataaatgttatcgcctcaagaaaaataatagtgagttccaaaaagga

SEQ ID NO: 213243 - DNA, 75 bp, synthetic construct
  source 1..75: mol_type = other DNA
gtattacgacttacatagccaatgaagataaacgtgacgacaaacggcgcagcagtcttcttttccttcatactt

SEQ ID NO: 213244 - DNA, 75 bp, synthetic construct
  source 1..75: mol_type = other DNA
cgtttggtctgtagaaggcgctgtggttgtagatgaagacggtgacgagctgaatgcacatgagctggccgacta

SEQ ID NO: 213245 - DNA, 75 bp, synthetic construct
  source 1..75: mol_type = other DNA
atgtcagtttgactatgcaggttgagaacgacctgaaacatcaactaagtattggtgcactaaaacctggcgcac

SEQ ID NO: 213246 - DNA, 75 bp, synthetic construct
  source 1..75: mol_type = other DNA
ttgaaacggataatctggattctgtgcttactgggtttaacggggagttgtgagctatttgcccatgatggcacg

SEQ ID NO: 213247 - DNA, 75 bp, synthetic construct
  source 1..75: mol_type = other DNA
cattgaaagtggtatggatgcagccagcgggctggcaattgcgattctggatgatgcgaagatattgattccgct

SEQ ID NO: 213248 - DNA, 75 bp, synthetic construct
  source 1..75: mol_type = other DNA
cttcaattaattattatgttacgcgtcaaaatgattataactacgtattctctacaggcaggacaccacgcttca

SEQ ID NO: 213249 - DNA, 75 bp, synthetic construct
  source 1..75: mol_type = other DNA
ctttaccattaaaggacatcacagtattcaatatgaatctagtgatattcatgatagtgccatcctatgcccttt

SEQ ID NO: 213250 - DNA, 75 bp, synthetic construct
  source 1..75: mol_type = other DNA
gtggtacatgtaccgatggtttcaaagtttcctcttctttctatacagatgaaactctgacagaaaatgataaag

SEQ ID NO: 213251 - DNA, 75 bp, synthetic construct
  source 1..75: mol_type = other DNA
aacgcaccttgttgaaatatctgcaaatgaatgcgtctgacaccgcaggtaaggctcacggcgataagaaggaag

SEQ ID NO: 213252 - DNA, 75 bp, synthetic construct
  source 1..75: mol_type = other DNA
aaccttccttatctattgcagacatgggttgatccatttaataaagaggataaaagcaaaccgccattttcagtg

SEQ ID NO: 213253 - DNA, 75 bp, synthetic construct
  source 1..75: mol_type = other DNA
tcataatggataaggaactgatcaagcgttctttcaaaaaagatggactacattacttagaaatccaatcgttat

SEQ ID NO: 213254 - DNA, 75 bp, synthetic construct
  source 1..75: mol_type = other DNA
atgattgtctgttacgttattcttgttaaccgtccgtttgaaacagagattgccgggaaaaagctattttttcag

SEQ ID NO: 213255 - DNA, 75 bp, synthetic construct
  source 1..75: mol_type = other DNA
ttaacgatcgtccgttgtgggagattgacctgctgaacttcatttaccggaaggacggcaaggacattgtgcctg

SEQ ID NO: 213256 - DNA, 75 bp, synthetic construct
  source 1..75: mol_type = other DNA
aatcacttgaattacgtgccgttgaagaaagacacgtcacaccgctgtatcaattaacctgtaaaaacaaaacct

SEQ ID NO: 213257 - DNA, 75 bp, synthetic construct
  source 1..75: mol_type = other DNA
atagagtgtataatgcagacattccatatacttttaatgtcaatgataaaattatttcaattgggtctgggttag

SEQ ID NO: 213258 - DNA, 75 bp, synthetic construct
  source 1..75: mol_type = other DNA
cagtttttatgccacgggcgataatttacagggcgctcgtcaactgggtgttcgtacggaagccattcgcattgt

SEQ ID NO: 213259 - DNA, 75 bp, synthetic construct
  source 1..75: mol_type = other DNA
ccgctgccgcagatattcccgtggcgagcgataacccagcgcactatgcggatgccattcgttataatgctcgaa

SEQ ID NO: 213260 - DNA, 75 bp, synthetic construct
  source 1..75: mol_type = other DNA
aattgctgttaaaacgcgtatcaagctgttctggcgaccagcaactattcgacttattcctgaagatgcagcgcc

SEQ ID NO: 213261 - DNA, 75 bp, synthetic construct
  source 1..75: mol_type = other DNA
tgtcatcgttgatggtcatgatgtgcccctcaatatgatccgtccttttgaaacgctcacgttacctttacctgc

SEQ ID NO: 213262 - DNA, 75 bp, synthetic construct
  source 1..75: mol_type = other DNA
aatcacttgaattacgtgcagttgaagaaagccatgtcacgccgctctatcagttaacctgtaaaaataaaacct

SEQ ID NO: 213263 - DNA, 75 bp, synthetic construct
  source 1..75: mol_type = other DNA
aatacaccgccaaaaagcttaacgataacgagtggcagctgacgtcggtatcggcaccgcgtgaaaagctggtgc

SEQ ID NO: 213264 - DNA, 75 bp, synthetic construct
  source 1..75: mol_type = other DNA
ctgttctggagaccggcatctatccgcatgattcccgaagatgccgcaccaaaggtgaagtggcatcgggaaggc

SEQ ID NO: 213265 - DNA, 75 bp, synthetic construct
  source 1..75: mol_type = other DNA
agtaatgaaggtgttcgtaatagtgatttaattcgtcgcttccgaatcactagcagaagcacagggtttattgta

SEQ ID NO: 213266 - DNA, 75 bp, synthetic construct
  source 1..75: mol_type = other DNA
tgtggcgagccttgccgagaaaaccttgcattcgccaattatcaatcagcggatggataaagcgattgacatgat

SEQ ID NO: 213267 - DNA, 75 bp, synthetic construct
  source 1..75: mol_type = other DNA
acagtcatatcactggaggattaattgctgtttctgaactatcaggcagagtatcattcagaacatcagccaaga

SEQ ID NO: 213268 - DNA, 75 bp, synthetic construct
  source 1..75: mol_type = other DNA
tcgcgagtcagtcttctggctgaatattaaaaatattccgccatcagcgagcaacaaagcgacgaactcgctgga

SEQ ID NO: 213269 - DNA, 75 bp, synthetic construct
  source 1..75: mol_type = other DNA
gaaaaaatattacgcattattcacaccaaaggtgtgtcattgcctgatgatcgcgagtcagtcttctggctgaat

SEQ ID NO: 213270 - DNA, 75 bp, synthetic construct
  source 1..75: mol_type = other DNA
ctgggatgcgctggggatggcggcggaaagcattctggcgctgagcggtatggcactgacagtggcgacagaggg

SEQ ID NO: 213271 - DNA, 75 bp, synthetic construct
  source 1..75: mol_type = other DNA
gttataagatttttgctaaaaatattcgtaggttatggtttcttagacgttactatttttttataaaatatatgt

SEQ ID NO: 213272 - DNA, 75 bp, synthetic construct
  source 1..75: mol_type = other DNA
tttaggaatgattggtcaatagatccatcttctggtctttatccagatcatatgcgttatttaagaccagaatta

SEQ ID NO: 213273 - DNA, 75 bp, synthetic construct
  source 1..75: mol_type = other DNA
ctgtaataataatgacacgtaatgatgctgaattattaaaaaaatgtgtaatttcaatgctaaaaacagtcacaa

SEQ ID NO: 213274 - DNA, 75 bp, synthetic construct
  source 1..75: mol_type = other DNA
agaggaaacttcatctttaccactgtgaccaccggggactgccgcaggcgcttatcagcccggaaggggaaacgg

SEQ ID NO: 213275 - DNA, 75 bp, synthetic construct
  source 1..75: mol_type = other DNA
gctctctccgcgcaaacttaggcgagtgatagaaatgtggatgcccgtgacgacagggcatcatggtcagccccc

SEQ ID NO: 213276 - DNA, 75 bp, synthetic construct
  source 1..75: mol_type = other DNA
ctaaaaattattgaatataagtttaatgataaagtaaatattattagaaatcgtactaacaggtgggttctgggt

SEQ ID NO: 213277 - DNA, 75 bp, synthetic construct
  source 1..75: mol_type = other DNA
tatgatgcaactcgaagtacaaaggctctgatgagtaacatgtttattttggtgaatgttttttatttttttggc

SEQ ID NO: 213278 - DNA, 75 bp, synthetic construct
  source 1..75: mol_type = other DNA
aactgctggccgccagcgtcccgcatctacagcagaacccggacgcgctgcggatctttatcaataagggccgga

SEQ ID NO: 213279 - DNA, 75 bp, synthetic construct
  source 1..75: mol_type = other DNA
tggtggcagaccggagagacaccgggcacgtttcgtctggatatcggcgtgcaggaacagggcatcactgaagat

SEQ ID NO: 213280 - DNA, 75 bp, synthetic construct
  source 1..75: mol_type = other DNA
tttctttgcgtggccatccttgattatttccagtcaggaagtgctaccgaaaaaaaacaggaaggtatattagag

SEQ ID NO: 213281 - DNA, 75 bp, synthetic construct
  source 1..75: mol_type = other DNA
tggtatggcgattccgtttgctatggcaatgcaagcgcttgtaattttcttatttacatcattttcaccggtgat

SEQ ID NO: 213282 - DNA, 75 bp, synthetic construct
  source 1..75: mol_type = other DNA
ttatttagcattatcgttttcctatattgggttaggtgcgtttgttgtttacatgataaagttttgtaacgcacg

SEQ ID NO: 213283 - DNA, 75 bp, synthetic construct
  source 1..75: mol_type = other DNA
tttttttcaagtagcgataaaaatcttgtaagaagtaaagataataatcttgaagcattttatctcgcaacacct

SEQ ID NO: 213284 - DNA, 75 bp, synthetic construct
  source 1..75: mol_type = other DNA
gctaacatcgatgcgccggaaaagaaacagccctttgggagctggtccagtaaacagcttaaaagtctgatagca

SEQ ID NO: 213285 - DNA, 75 bp, synthetic construct
  source 1..75: mol_type = other DNA
tatcgcggcaatcactgtttcgcagcgactggctaatggactggataactttgccctattggcaatccccttttt

SEQ ID NO: 213286 - DNA, 75 bp, synthetic construct
  source 1..75: mol_type = other DNA
cgacgcaactaaacgtttaacagtactgaaagattttaatagtgaacaggaataccaaaataaactcggtaagca

SEQ ID NO: 213287 - DNA, 75 bp, synthetic construct
  source 1..75: mol_type = other DNA
gattggtgggaaggacaatgtcaggacagacgggactgccggcacaggaatactttaattattactttcccctca

SEQ ID NO: 213288 - DNA, 75 bp, synthetic construct
  source 1..75: mol_type = other DNA
ggggcaatcgcaacaactagtatgaatgtgacggcaacgtgtcagggaagctacggaaagtcagtctggttccgg

SEQ ID NO: 213289 - DNA, 75 bp, synthetic construct
  source 1..75: mol_type = other DNA
tggcatagattccaaagtagtgcggcagatggttctggtgcttttcattggaatggttctacagatggtgttgat

SEQ ID NO: 213290 - DNA, 75 bp, synthetic construct
  source 1..75: mol_type = other DNA
ggacctcgtgtaccaagtcttagcaacagctggacccattcaactgacggtagctcgcaattacaaagctcgcta

SEQ ID NO: 213291 - DNA, 75 bp, synthetic construct
  source 1..75: mol_type = other DNA
ctttcgcggcagcagatttagtcagtcgtcattggcaaaactgacaactcgtgagtctgttgcaccgggcaatta

SEQ ID NO: 213292 - DNA, 75 bp, synthetic construct
  source 1..75: mol_type = other DNA
agcggaagatttttctctggactcagttatcacggcgttagtctcgcgaccgatgaacgtatgctgccggactcc

SEQ ID NO: 213293 - DNA, 75 bp, synthetic construct
  source 1..75: mol_type = other DNA
ggtggtgtaggtagacttgcatcacctattggtgcggcaacagttgcagtaggtggtttagtagcagtgatgaat

SEQ ID NO: 213294 - DNA, 75 bp, synthetic construct
  source 1..75: mol_type = other DNA
attctcttataaaaagtttagaaacgatacataagaaaggaatgttgcatcaactggctaacaaaaatgacaggg

SEQ ID NO: 213295 - DNA, 75 bp, synthetic construct
  source 1..75: mol_type = other DNA
cttgctaataagctagatagagatataatttggtccccagacacatctcttgactctttggatagtttaaggggg

SEQ ID NO: 213296 - DNA, 75 bp, synthetic construct
  source 1..75: mol_type = other DNA
gtgggaaattcaatgtttgccgatctggtcagcgtcgccggacatatctacaaacacggcgtgatggatggcctg

SEQ ID NO: 213297 - DNA, 75 bp, synthetic construct
  source 1..75: mol_type = other DNA
cgcagtctggcaatggacaggagaaagaaaggccactgactaaggctgaacgtcagattacaggagatactctgg

SEQ ID NO: 213298 - DNA, 75 bp, synthetic construct
  source 1..75: mol_type = other DNA
aacggcagacagatctatttttagccagaaagtacccagcccttgattccaatggtaacccatattacaaatgca

SEQ ID NO: 213299 - DNA, 75 bp, synthetic construct
  source 1..75: mol_type = other DNA
cattctgggtggtttcaacatcagtggctataaaacatatagttacgacggtgacaatgactcaagcaaccttaa

SEQ ID NO: 213300 - DNA, 75 bp, synthetic construct
  source 1..75: mol_type = other DNA
gtatttttcgtggtatctgctaagtggtttgtttcaatgcattgatttatttatattttattttctcattgatag

SEQ ID NO: 213301 - DNA, 75 bp, synthetic construct
  source 1..75: mol_type = other DNA
tatggtgatgactctcttgggcgtttcgttggaattcagtgtaaaaatacagtatcaggaatcagtacggcgaca

SEQ ID NO: 213302 - DNA, 75 bp, synthetic construct
  source 1..75: mol_type = other DNA
acctgtctgcctgacaaatttacgttgataggtttttcactgggagggtacattgcccggcagtttgctgcagat

SEQ ID NO: 213303 - DNA, 75 bp, synthetic construct
  source 1..75: mol_type = other DNA
ccagacagtggcagtcaggcttgtggtgatatcggtcctgggcgaatgctcgatccgttaaccattgtggatatg

SEQ ID NO: 213304 - DNA, 75 bp, synthetic construct
  source 1..75: mol_type = other DNA
agcagttaaatgaattgtcaaatcttgcaagtaataaccctcggctaagggctcatttaaacttacataagagtt

SEQ ID NO: 213305 - DNA, 75 bp, synthetic construct
  source 1..75: mol_type = other DNA
ccgccgctaaagaagaggcggaaggcacggtcggtagcgggcgtgaggttgtctccatcgccgccagtaaacacg

SEQ ID NO: 213306 - DNA, 75 bp, synthetic construct
  source 1..75: mol_type = other DNA
aaagacgtccgcaactgcgagcagcgctggccgcgtgtaaaaaacaaggtgctactttgttaatcgctaagcttg

SEQ ID NO: 213307 - DNA, 75 bp, synthetic construct
  source 1..75: mol_type = other DNA
acaggtaaaggttcaaatgctctcgaaagacgtccgcaactgcgagcagcgctggccgcgtgtaaaaaacaaggt

SEQ ID NO: 213308 - DNA, 75 bp, synthetic construct
  source 1..75: mol_type = other DNA
acaggtaaaggttcaaatgctctagaaagacgtccgcaactgagggcagcgctggccgcgtgtaagaaacaaggt

SEQ ID NO: 213309 - DNA, 75 bp, synthetic construct
  source 1..75: mol_type = other DNA
atacccgtaatgatgtctccgcagtgcagtcagacgtcaccaacataaaaggcgatgtcgcacatgcccagtcaa

SEQ ID NO: 213310 - DNA, 75 bp, synthetic construct
  source 1..75: mol_type = other DNA
cgaagatcgcggacctggtggtcattaaggacgactcagtggcagacggtgcaatggcgaatatgctgcgggtga

SEQ ID NO: 213311 - DNA, 75 bp, synthetic construct
  source 1..75: mol_type = other DNA
cgttcggtaatacgcttgccgggcagacggtcagcgtgtcggcggacaatgacgcaacggtcgcttcgacggtga

SEQ ID NO: 213312 - DNA, 75 bp, synthetic construct
  source 1..75: mol_type = other DNA
gagccgggacgtgacgtttatcgccgatgtcaggacggcgcagattgcggtgctggaagtgacgcaggataactc

SEQ ID NO: 213313 - DNA, 75 bp, synthetic construct
  source 1..75: mol_type = other DNA
ctcgtaggctgcggatcagttggaggagaagttgcagataagctggctgcatccggtgttggtcacatccatttg

SEQ ID NO: 213314 - DNA, 75 bp, synthetic construct
  source 1..75: mol_type = other DNA
ctcatacatagcctcgactcaaactgctcttattaccgctaatctcggggtccaatatcttcttaataaaattag

SEQ ID NO: 213315 - DNA, 75 bp, synthetic construct
  source 1..75: mol_type = other DNA
tgaagctggctggttgaatatcgtagagccggacacaaccccttttctctgtttaactgaaagcgaaacaccaga

SEQ ID NO: 213316 - DNA, 75 bp, synthetic construct
  source 1..75: mol_type = other DNA
atccttatcgcctgcgtggacggcctgaaaggcttcccggaagcagggaaagatcatcagaagtacactttttgt

SEQ ID NO: 213317 - DNA, 75 bp, synthetic construct
  source 1..75: mol_type = other DNA
atagcggcagctgactactgcaacaacccggcagacgcatggccgattatcatggaaaacatgatcagcgtatgt

SEQ ID NO: 213318 - DNA, 75 bp, synthetic construct
  source 1..75: mol_type = other DNA
ttaaagatttcgaaaatctaattcctgactatctgtatttgttattgaatgatgtgtcttttattaattatattc

SEQ ID NO: 213319 - DNA, 75 bp, synthetic construct
  source 1..75: mol_type = other DNA
gcagacggtcagcgtgatggcaggcaacggtgccacgactgctccgacggtcaccacgcagccggacggcacggt

SEQ ID NO: 213320 - DNA, 75 bp, synthetic construct
  source 1..75: mol_type = other DNA
tgtgctctacggtgctttcttcgtcatgattgtctgttgcgttcctctgattcaggtcagtcttgacagcattaa

SEQ ID NO: 213321 - DNA, 75 bp, synthetic construct
  source 1..75: mol_type = other DNA
ggacagcgggcgtccgaatacgggacgtggaggatatccgacatgtaatgagtggtggctggcagcagataacgg

SEQ ID NO: 213322 - DNA, 75 bp, synthetic construct
  source 1..75: mol_type = other DNA
gtgcccaacagaggtgcaatggtagcggcgcgtttcaacgccaatatcggttatcgcgtacttgttacagtcagc

SEQ ID NO: 213323 - DNA, 75 bp, synthetic construct
  source 1..75: mol_type = other DNA
tcgggcaacccggtaaatccgctgctgggggcgaaggtgctgcccggcgagacggaccttgcgctgcccggcccg

SEQ ID NO: 213324 - DNA, 75 bp, synthetic construct
  source 1..75: mol_type = other DNA
ataatggcggatatggagcgagacccaacaaaccgcctacgcccgatccaagtaaattgccggacatagcgaaac

SEQ ID NO: 213325 - DNA, 75 bp, synthetic construct
  source 1..75: mol_type = other DNA
tggggctgtggtctgcggcattaatgggcggtggtggacttggtgctgccctgacgccctggttagttcaacaca

SEQ ID NO: 213326 - DNA, 75 bp, synthetic construct
  source 1..75: mol_type = other DNA
gtcagttttaacaatggaaccccattcacacattgtgtgacacggaaggggattacggtgccttccggcagggta

SEQ ID NO: 213327 - DNA, 75 bp, synthetic construct
  source 1..75: mol_type = other DNA
gactggctgaaagattttaaacaggggcctaccggtgaagagcgtactgtttatggcatctacggcattggtgat

SEQ ID NO: 213328 - DNA, 75 bp, synthetic construct
  source 1..75: mol_type = other DNA
aattcatttatgcagggggcatgcaagcttggcaaaatattgatttgatgatagagacaactaaacggacatata

SEQ ID NO: 213329 - DNA, 75 bp, synthetic construct
  source 1..75: mol_type = other DNA
tcggtgtttatgttgttataggtaacgtcatttaccccagagttcagcgtttttatcatgaagatgataatttgg

SEQ ID NO: 213330 - DNA, 75 bp, synthetic construct
  source 1..75: mol_type = other DNA
atgttgatggtaaagaatctgtgacttcggagaaagagttttacttcctgttagatacagatgttgaagcatttg

SEQ ID NO: 213331 - DNA, 75 bp, synthetic construct
  source 1..75: mol_type = other DNA
tgaagccacttttgttgttgccgggcagttatttggcacgcgaggacgggtggaagtggtgaaaggatggcgtgc

SEQ ID NO: 213332 - DNA, 75 bp, synthetic construct
  source 1..75: mol_type = other DNA
tataattacatctgaaacagccttggcttttaaggagagttttgatgaagtatattcctttgataaaattcagtg

SEQ ID NO: 213333 - DNA, 75 bp, synthetic construct
  source 1..75: mol_type = other DNA
agtccctcctgactctggtctataaactcgtgttcctctctgtgggtctctacatggtcctctctggtcgactcg

SEQ ID NO: 213334 - DNA, 75 bp, synthetic construct
  source 1..75: mol_type = other DNA
attgctggcaagctggtggcgtttatgcaggggatcggctttatcatcgccgggctttccccctggttttctggc

SEQ ID NO: 213335 - DNA, 75 bp, synthetic construct
  source 1..75: mol_type = other DNA
tcttaacattggatatacatcatcatttctcaatatagtccccgagatcgttaactcattcaattcccagtatcc

SEQ ID NO: 213336 - DNA, 75 bp, synthetic construct
  source 1..75: mol_type = other DNA
tcattatgctggctcagagccagagctataggcaagctgctgagaaattatttattactcagcctgcgctaacaa

SEQ ID NO: 213337 - DNA, 75 bp, synthetic construct
  source 1..75: mol_type = other DNA
agattacgatgaaacagctatcaaatttttcttaattgagaatttaattgcatgtaacgtctttcctaattcgga

SEQ ID NO: 213338 - DNA, 75 bp, synthetic construct
  source 1..75: mol_type = other DNA
gcaacattcagaacccgacataatggagaatgcgccattcttggccgctctgatgataaatcaaggcgaggctat

SEQ ID NO: 213339 - DNA, 75 bp, synthetic construct
  source 1..75: mol_type = other DNA
ccacaaccagaacaacagcaactcttacagcagctactgaccatgcctccgggcgtggcagcggtaacggctgcg

SEQ ID NO: 213340 - DNA, 75 bp, synthetic construct
  source 1..75: mol_type = other DNA
gtaccggtgtggaaagatgtgcgttttggggggggcaacgtttatatgtatttaacatgtaactccaagagcgat

SEQ ID NO: 213341 - DNA, 75 bp, synthetic construct
  source 1..75: mol_type = other DNA
tttcatgcgctgtgcgtcgttgggctgatgatcataaccctgcgttttgcaccagcacgttttccgcagctgtgg

SEQ ID NO: 213342 - DNA, 75 bp, synthetic construct
  source 1..75: mol_type = other DNA
taacggcggttacgccagcctgattgcctggttacccgccttctatattgaggttggcgccagcgcgcagtacag

SEQ ID NO: 213343 - DNA, 75 bp, synthetic construct
  source 1..75: mol_type = other DNA
tcggcgcaaacttttgatgctggcgctggcgttacaactggtggggttctgcggctttatctggctgccgctgca

SEQ ID NO: 213344 - DNA, 75 bp, synthetic construct
  source 1..75: mol_type = other DNA
tttgctgacgtggtggacttccgcatctatagcagcaccgatgcgtataagaacattacgctttccagtgagttc

SEQ ID NO: 213345 - DNA, 75 bp, synthetic construct
  source 1..75: mol_type = other DNA
aatcagaaagcccggacagagaaaattttcggtcgctcaggaattcaaagcctgcaccgcagctgcactttcgag

SEQ ID NO: 213346 - DNA, 75 bp, synthetic construct
  source 1..75: mol_type = other DNA
atgcagatgatgcgtgttgccgacagtcgctggccggaaagcctgcaacagcaacaggcctcgacacaatggaat

SEQ ID NO: 213347 - DNA, 75 bp, synthetic construct
  source 1..75: mol_type = other DNA
gggaaccgttacagtgtgccggaaagcctgtgtggtcagctggtatcaatacggatctcgctggatgatgaactg

SEQ ID NO: 213348 - DNA, 75 bp, synthetic construct
  source 1..75: mol_type = other DNA
ggcttataaaaataacaaaaaaaataatgatatactcaaacacaagtttacatctacgaggtgcaactattattc

SEQ ID NO: 213349 - DNA, 75 bp, synthetic construct
  source 1..75: mol_type = other DNA
taacgctgctggatatccggtatataacggacagattgccaaattcgtaaccgtgcaaggccattctatggctgt

SEQ ID NO: 213350 - DNA, 75 bp, synthetic construct
  source 1..75: mol_type = other DNA
cagtaacagagcaatgatgatggacgggatttcattcctgttgcagagcagggggtataccagtacacggatttc

SEQ ID NO: 213351 - DNA, 75 bp, synthetic construct
  source 1..75: mol_type = other DNA
acgggctcttgacgcttgtcgcttctgtttcttccttttctttattcgctgccagtcttcaggtcacgcccgtta

SEQ ID NO: 213352 - DNA, 75 bp, synthetic construct
  source 1..75: mol_type = other DNA
tgccggaagtcctggcaaccgcaggaagccacacgctgaatgtgatgcaaaaaggcgggcgggcagcccgtcagg

SEQ ID NO: 213353 - DNA, 75 bp, synthetic construct
  source 1..75: mol_type = other DNA
ggctagttttatattcacagttctttcctgtgcttattccactagtgttgtatatcataacgcacaattttgatg

SEQ ID NO: 213354 - DNA, 75 bp, synthetic construct
  source 1..75: mol_type = other DNA
gagcagaaaaccctgaaatcctggcagtcggtgtggctggaaaacgactacatcaaagtgatgatcctgccggaa

SEQ ID NO: 213355 - DNA, 75 bp, synthetic construct
  source 1..75: mol_type = other DNA
gcgatttttggtgcggattccattgacagcggaacgctaaaattaaatggtaaggaaaccgttattaaagatatt

SEQ ID NO: 213356 - DNA, 75 bp, synthetic construct
  source 1..75: mol_type = other DNA
atgcctgatgcgacgcttgcgcgtcttatcaggcctacaaattcccgcgccatccgtaggccggataaggcgttt

SEQ ID NO: 213357 - DNA, 75 bp, synthetic construct
  source 1..75: mol_type = other DNA
atcagtatcttctctatcatttaacatgtatggataatctacctagtattttagacacaggattaagatctcgtg

SEQ ID NO: 213358 - DNA, 75 bp, synthetic construct
  source 1..75: mol_type = other DNA
tcaaattcctatcagaaaaaatgaatgatttttatgatcaagaatatttatccgaagagggtgaatatattgaaa

SEQ ID NO: 213359 - DNA, 75 bp, synthetic construct
  source 1..75: mol_type = other DNA
ttattacgacttgcatagccaatgaagataaacgtgacgacaaacggcgcagcaatcttcctttctttcacactt

SEQ ID NO: 213360 - DNA, 75 bp, synthetic construct
  source 1..75: mol_type = other DNA
ttaactcagatggcctgataattaatattgttgtatgggatggcgtcacagaatgggggccgcctgaaggcactc

SEQ ID NO: 213361 - DNA, 75 bp, synthetic construct
  source 1..75: mol_type = other DNA
ccacggtgtttaccacagtctgggataacgttctgaacagtttcagtaacctgtccacccgctttaccgagatcg

SEQ ID NO: 213362 - DNA, 75 bp, synthetic construct
  source 1..75: mol_type = other DNA
aagcaagggatcggcgacgtcggcaacgtgaagaaaatgtcctacatcaaagatattttcggcgtggaagcctcc

SEQ ID NO: 213363 - DNA, 75 bp, synthetic construct
  source 1..75: mol_type = other DNA
gcggaagctgattatcgcgggcgtctgacagagggcagtcattctgtgaattacccggtggagtttgccactaaa

SEQ ID NO: 213364 - DNA, 75 bp, synthetic construct
  source 1..75: mol_type = other DNA
ggcgtccccgcgggagcgttccggtgctgatgtgaataattcagcagatgcgggtgctgaacccgcgaaacctgc

SEQ ID NO: 213365 - DNA, 75 bp, synthetic construct
  source 1..75: mol_type = other DNA
ttgatggtgatggaaatattgtgaatgttatcgtttgggatggcgtcacagaatgggaaccacctgaaggtactc

SEQ ID NO: 213366 - DNA, 75 bp, synthetic construct
  source 1..75: mol_type = other DNA
cacgcgattggacaagaaggcactctacttcttccactttttaattttgatttcacaatgggagttccattcgat

SEQ ID NO: 213367 - DNA, 75 bp, synthetic construct
  source 1..75: mol_type = other DNA
atgcttctccgccttgcaaacgtcaagcctggaactccggcatatgagcgagcgttaaatcaggctgctaacgcc

SEQ ID NO: 213368 - DNA, 75 bp, synthetic construct
  source 1..75: mol_type = other DNA
ctgttatcaatgacgtcaccaataaaatgggtaatgccgcagttgataccacaaacaccatgaatgctctgaata

SEQ ID NO: 213369 - DNA, 75 bp, synthetic construct
  source 1..75: mol_type = other DNA
atgagcacacaaaaccttcgtttacaggtactactcagcgccgtagataaaatcacccgcccgctaaaagccgtc

SEQ ID NO: 213370 - DNA, 75 bp, synthetic construct
  source 1..75: mol_type = other DNA
ccgcttgaacgcgcgttgcgtgccctggtagtccggccaccaggcgctgacagatatgcacacgcaggaactgaa

SEQ ID NO: 213371 - DNA, 75 bp, synthetic construct
  source 1..75: mol_type = other DNA
tatatagatcgtgatggaaatagttcaataaaatcctataagatttatgtgagagatattgacaggggcgtaaaa

SEQ ID NO: 213372 - DNA, 75 bp, synthetic construct
  source 1..75: mol_type = other DNA
gctgcgggtacagagtaccggtggtgccgtgtacctgaaggcggacagtgccttttcacagacacggctgcagtt

SEQ ID NO: 213373 - DNA, 75 bp, synthetic construct
  source 1..75: mol_type = other DNA
cgttccagcaccgctggctggggccggtgggcacgccggaagataccaccacagcctatatcgtgacgggcacgc

SEQ ID NO: 213374 - DNA, 75 bp, synthetic construct
  source 1..75: mol_type = other DNA
ggtgggcatccacaacctgacccgcgacgcgggcttccacatcgtcaaagaactgatttttaccgcttcgccagt

SEQ ID NO: 213375 - DNA, 75 bp, synthetic construct
  source 1..75: mol_type = other DNA
ctcgccttccttttactgcgcagcaaagccatccatttacgcaccattggccgcatgggcgtagtaccgggactc

SEQ ID NO: 213376 - DNA, 75 bp, synthetic construct
  source 1..75: mol_type = other DNA
cagagtctgtatgcaccgttaagaacagtggagccggtgtccggcgtacaacctttgccactgaccttaccaaaa

SEQ ID NO: 213377 - DNA, 75 bp, synthetic construct
  source 1..75: mol_type = other DNA
gtacggtaagcaggcgtattgtgcttgatccccgggcccttcaggggcgttttgtggcggcgactttccagcatc

SEQ ID NO: 213378 - DNA, 75 bp, synthetic construct
  source 1..75: mol_type = other DNA
aatagcgtttctggatgatgatgatagctgggatcctaatcatttaaattcacttgttgactgttttcatgaaca

SEQ ID NO: 213379 - DNA, 75 bp, synthetic construct
  source 1..75: mol_type = other DNA
gtactgagcgaaaggtattacgcgttcaatcgctcattggaaatattacctttgtacaatcctgaatgtgatata

SEQ ID NO: 213380 - DNA, 75 bp, synthetic construct
  source 1..75: mol_type = other DNA
ggagggcatgctgttcttgatataccaggaacaccaggctgcttgcgatgtgcatacgttgattccgacaatttt

SEQ ID NO: 213381 - DNA, 75 bp, synthetic construct
  source 1..75: mol_type = other DNA
tattcacgaactgccgtctggcggtcgcgatccgctctcctatgatgatccattgcgtcaaatcacccgcatgat

SEQ ID NO: 213382 - DNA, 75 bp, synthetic construct
  source 1..75: mol_type = other DNA
agctggcggcgtttctgtagcatcgctatttatggcgggatatttgccagggatcttaatgggtctcgcggtaat

SEQ ID NO: 213383 - DNA, 75 bp, synthetic construct
  source 1..75: mol_type = other DNA
agttcataacaaccaaaaagccaatgcactgaaagatgccacggaacatacatttcaagcagtagccaagaagtg

SEQ ID NO: 213384 - DNA, 75 bp, synthetic construct
  source 1..75: mol_type = other DNA
gatgttgtttatcccgttcgttttcgtgccaattattaacgccatcctggcctataccgcgaccagactgggctg

SEQ ID NO: 213385 - DNA, 75 bp, synthetic construct
  source 1..75: mol_type = other DNA
gcagcgtttcacgcgtggcgctggtggatgccacgccgccggtggtaaccattaatccggtggcgaccgataacg

SEQ ID NO: 213386 - DNA, 75 bp, synthetic construct
  source 1..75: mol_type = other DNA
accgtgacagatgctgcaggaaatactggcgcggcgtctcgagcaatcacgctggtcggtgtttctccgttgatc

SEQ ID NO: 213387 - DNA, 75 bp, synthetic construct
  source 1..75: mol_type = other DNA
gtttctacgcctcatgtgaaaaagttttcctcccggaccttcgtaacgaaccggtcatcgtactcagcaataacg

SEQ ID NO: 213388 - DNA, 75 bp, synthetic construct
  source 1..75: mol_type = other DNA
cgcgtcatttcttgtggtgggccaacccggcagtgaaaggggggaagggcatcagagcgtcttcccgccggatgt

SEQ ID NO: 213389 - DNA, 75 bp, synthetic construct
  source 1..75: mol_type = other DNA
aacctgatgcggggggaaacgcattgtggcatatgtttataaatcatcacggaatacggtttttgaaaatcctga

SEQ ID NO: 213390 - DNA, 75 bp, synthetic construct
  source 1..75: mol_type = other DNA
atgcattcaaaattctaaatgcatcaggcacaactacgcctgcatctatcacgctaagtaaaacagcgtcatcca

SEQ ID NO: 213391 - DNA, 75 bp, synthetic construct
  source 1..75: mol_type = other DNA
cccgatgacttgtcagatgttgtacaggctctggctcaaaataaagagagcttggtcgaaatgcttgatgatccg

SEQ ID NO: 213392 - DNA, 75 bp, synthetic construct
  source 1..75: mol_type = other DNA
acagaagaagagatcaaagcactaaaagacgctgtggaagcagcaacagaacaaataaatgcaataaacaacacg

SEQ ID NO: 213393 - DNA, 75 bp, synthetic construct
  source 1..75: mol_type = other DNA
ctgttctgatgtgtcagattttctggttcgcaggtattcatggttcactgattgtaaccggcatcatgaatccct

SEQ ID NO: 213394 - DNA, 75 bp, synthetic construct
  source 1..75: mol_type = other DNA
ctgtatctatggtggcgctggtggggcagccgaaaggctggccggtttccttttgcgccggtattgctacccccg

SEQ ID NO: 213395 - DNA, 75 bp, synthetic construct
  source 1..75: mol_type = other DNA
gggtatcgtatctggcgaaagagcgtggaaagtatcagaccggaaatggggatcgggtccactcaacatcaaaat

SEQ ID NO: 213396 - DNA, 75 bp, synthetic construct
  source 1..75: mol_type = other DNA
taacccctacacagtcagcacaaccacaaaccacgccttacagaacagttgtccacaattacggacgctatccgg

SEQ ID NO: 213397 - DNA, 75 bp, synthetic construct
  source 1..75: mol_type = other DNA
ttttaaaagaatggagcattaaagatatagagcaattcaacgcttttttaagaagtaattatagaattagtaaca

SEQ ID NO: 213398 - DNA, 75 bp, synthetic construct
  source 1..75: mol_type = other DNA
ttttattatatttcattactaggcgttaagtctcttgcagatttcaaagcaaagattattgactgctactatctt

SEQ ID NO: 213399 - DNA, 75 bp, synthetic construct
  source 1..75: mol_type = other DNA
gtgatttgctgtttgatatcgacgtcgatgatttgcgaaagattgccgatcaggcaggggccacacaataccagt

SEQ ID NO: 213400 - DNA, 75 bp, synthetic construct
  source 1..75: mol_type = other DNA
cggaactaaatcaacaaataacacaggtggtcataatcacggtgttggtgaaaatgtttctgtcagtgccggcag

SEQ ID NO: 213401 - DNA, 75 bp, synthetic construct
  source 1..75: mol_type = other DNA
cagtagcgcaacagacagtgattcagaaacggaagcagccacaccaaaggcagtaaaatcactggcggaaaaaat

SEQ ID NO: 213402 - DNA, 75 bp, synthetic construct
  source 1..75: mol_type = other DNA
gtgctccgtgcggctgatatatcaccggacccgaagaaacaaaatcaactgattgatgctatatcgcaatatgtc

SEQ ID NO: 213403 - DNA, 75 bp, synthetic construct
  source 1..75: mol_type = other DNA
gacggcctatgatgcagtggtgggctgattttgtgatggctgcagatcacggtagtatgattgaaggagggataa

SEQ ID NO: 213404 - DNA, 75 bp, synthetic construct
  source 1..75: mol_type = other DNA
ccggaaatccgccgcaaacgcacgagtgggaagggatttctgtaccatatcagtgcggcagggatggcgctgaaa

SEQ ID NO: 213405 - DNA, 75 bp, synthetic construct
  source 1..75: mol_type = other DNA
tgccaacattgacagctctatcactgcgctctgtctggcctatgacgatatgctgcaggccaaagttacgattca

SEQ ID NO: 213406 - DNA, 75 bp, synthetic construct
  source 1..75: mol_type = other DNA
gagtgcctggagatttttatgaaagagttcgaatcagacatccggcgacgcgcgaagtacggcattaccgtgacc

SEQ ID NO: 213407 - DNA, 75 bp, synthetic construct
  source 1..75: mol_type = other DNA
gccgtaccgtctgccagggcagcagcatgatgaggaatcagggctgtactataaccgtcaccggtactacgatcc

SEQ ID NO: 213408 - DNA, 75 bp, synthetic construct
  source 1..75: mol_type = other DNA
cagtgcgggctgacggtggagcaactggccagacaggtggagccggaatacacaccggcgcgaaaagctcatctt

SEQ ID NO: 213409 - DNA, 75 bp, synthetic construct
  source 1..75: mol_type = other DNA
ccactcatgaccgcgacgtgaacgccgcaaagaacattctcgcggcggggcatcgccgtctagctgtaggaatcc

SEQ ID NO: 213410 - DNA, 75 bp, synthetic construct
  source 1..75: mol_type = other DNA
agtgaatactgactcggcagaccaggttgtcacactcggtcaatatcgtaccgatattttcaatgcggtaatgac

SEQ ID NO: 213411 - DNA, 75 bp, synthetic construct
  source 1..75: mol_type = other DNA
tggcagaccaggttgtcacactcggtcaatatcgtaccgatattttcaatgctgttggtaatacctctgcattaa

SEQ ID NO: 213412 - DNA, 75 bp, synthetic construct
  source 1..75: mol_type = other DNA
tgcctccgcgtattataaattagtacccgagccaaaagataaggatcgaacctcgctggcctggcaggcgtatgg

SEQ ID NO: 213413 - DNA, 75 bp, synthetic construct
  source 1..75: mol_type = other DNA
ttggcagcagctaaacttgcgaagatcccgaaaccaccaagccaggcagtatatgaagtgttcaaaaacgcgcca

SEQ ID NO: 213414 - DNA, 75 bp, synthetic construct
  source 1..75: mol_type = other DNA
accacgccagtgagcttgccgatttgcgggacaactggcgctacatcatcgagaacggcgagcttatccatgagc

SEQ ID NO: 213415 - DNA, 75 bp, synthetic construct
  source 1..75: mol_type = other DNA
cggaaacaaggtttaccgctgccggagcagtatcgcattggctaccgccgcaacctgggtgcatggcccttgcga

SEQ ID NO: 213416 - DNA, 75 bp, synthetic construct
  source 1..75: mol_type = other DNA
aataaatatgtgttgtttataatatatttactttctgggtttagcgagacacttattccaaatgcgcttaaaagt

SEQ ID NO: 213417 - DNA, 75 bp, synthetic construct
  source 1..75: mol_type = other DNA
tcgcctggatcaataactcgcttaccgcctggctgaacggtctgtcaggaagtaacgcgctgttgctgggtgcca

SEQ ID NO: 213418 - DNA, 75 bp, synthetic construct
  source 1..75: mol_type = other DNA
cgctattgtcggtgcgatgaatatcggcctttcgacacccggtgccggcattttctcgctctttttacttcatga

SEQ ID NO: 213419 - DNA, 75 bp, synthetic construct
  source 1..75: mol_type = other DNA
gacgaaatgaagcctgggaaagcgtctcttataaacatctccgcagccacgagaaataagagaataactctttct

SEQ ID NO: 213420 - DNA, 75 bp, synthetic construct
  source 1..75: mol_type = other DNA
cggtcaggtatcaacgaaaactgccgaatctaaattcgttgcggatgataaaaacgcggtactcaccgcatcatc

SEQ ID NO: 213421 - DNA, 75 bp, synthetic construct
  source 1..75: mol_type = other DNA
cggtgaaaaactctcagaagacggtcacggtgaaattcaacgcggatgccagcaccggtcaggcaaacctgcagg

SEQ ID NO: 213422 - DNA, 75 bp, synthetic construct
  source 1..75: mol_type = other DNA
atgccaaatacatctattcacttatctcgctgtaatattttacaaaataataaattgcaaccagcagaagtttac

SEQ ID NO: 213423 - DNA, 75 bp, synthetic construct
  source 1..75: mol_type = other DNA
atatattcttcctacctagaaactataggtagggataggtttatgaccagccctatcgaagccagagagcaagaa

SEQ ID NO: 213424 - DNA, 75 bp, synthetic construct
  source 1..75: mol_type = other DNA
tgaagacgacgatagcctaaaagttcaatgggcgtgcaccagtgatagctatgtggtgtattcgtactttattga

SEQ ID NO: 213425 - DNA, 75 bp, synthetic construct
  source 1..75: mol_type = other DNA
ggcattcttacgtcgctgggaacctttacgacttgagccagacgaaagtattttaagagcttattatggtcttgg

SEQ ID NO: 213426 - DNA, 75 bp, synthetic construct
  source 1..75: mol_type = other DNA
taaccctgtggaccctgttacgacgcaggatatcattgagggtataaataataatgtattaaaatacaaagaagt

SEQ ID NO: 213427 - DNA, 75 bp, synthetic construct
  source 1..75: mol_type = other DNA
tcttgacccgaaacaagggcaatatctgatcccgatagagaatattatggacggtgaaactattggtcagcaaat

SEQ ID NO: 213428 - DNA, 75 bp, synthetic construct
  source 1..75: mol_type = other DNA
ccgtaaaaaacaacaaggcaaacgcacctacgcaacgtcggtttgtattatctgggcgaaagaatatacgcagtc

SEQ ID NO: 213429 - DNA, 75 bp, synthetic construct
  source 1..75: mol_type = other DNA
cagtgctaccagtactggcgttttatattgtcgccgcagaagagcaaggcgttacacccgataaactgaccggca

SEQ ID NO: 213430 - DNA, 75 bp, synthetic construct
  source 1..75: mol_type = other DNA
cgaagccggtggcatggcgaaagcgatcgaagcgggcttgccaaaacgaatgatcgaagaagcatctgcgcgtga

SEQ ID NO: 213431 - DNA, 75 bp, synthetic construct
  source 1..75: mol_type = other DNA
ggtggcggctatgacccactggaagatgagtacctgtttttaagtcgcccggcgattgaaacggtactgggaaat

SEQ ID NO: 213432 - DNA, 75 bp, synthetic construct
  source 1..75: mol_type = other DNA
agtttttgccaaccagaaacctatggtctggatgtccaggatttggcctcgtttaataaacaatgtatgagcaag

SEQ ID NO: 213433 - DNA, 75 bp, synthetic construct
  source 1..75: mol_type = other DNA
tcacactgctttccaccctcgctttcatacttcctaccagtgccaaaataaaaggactttcaacagcgggtgatc

SEQ ID NO: 213434 - DNA, 75 bp, synthetic construct
  source 1..75: mol_type = other DNA
cccaatactctgatcccggttgaccttccaacactgcaacttcctgatactgaattactcattgctgaagtcact

SEQ ID NO: 213435 - DNA, 75 bp, synthetic construct
  source 1..75: mol_type = other DNA
ccagagccatcctgcggcaccctggcgacatggcgcgatgaagtggcggcgttgtgcgttggtaatagtcgtctg

SEQ ID NO: 213436 - DNA, 75 bp, synthetic construct
  source 1..75: mol_type = other DNA
aatgcgagtgattaacatacctgctgataactgcgaatttgcctgtttcgacacgattcacggagaggcaaacgg

SEQ ID NO: 213437 - DNA, 75 bp, synthetic construct
  source 1..75: mol_type = other DNA
gctgaactgctatgacggtgtaccgcagcgtctggaggcggcattgccgacggaaatccccgcgaaatcaggagc

SEQ ID NO: 213438 - DNA, 75 bp, synthetic construct
  source 1..75: mol_type = other DNA
gtcgctggatgaatgcaatggcacgctgacggcctgcaaactccgattcggcgaaaataacgaactctcgtttgg

SEQ ID NO: 213439 - DNA, 75 bp, synthetic construct
  source 1..75: mol_type = other DNA
ttttaagtatagttgaaactataaataaagagcaaacagttgactatcagtataaagcgaataatgttgtttctt

SEQ ID NO: 213440 - DNA, 75 bp, synthetic construct
  source 1..75: mol_type = other DNA
gaattactcgccccagaggttttccacgcgctgactaccgcactgcgtcgcgaaccacggctgcgctttacgcta

SEQ ID NO: 213441 - DNA, 75 bp, synthetic construct
  source 1..75: mol_type = other DNA
attagactcaacaaaccaatctctttataaggtattggctatattagagtctcaaaaagacaaacgttctcaata

SEQ ID NO: 213442 - DNA, 75 bp, synthetic construct
  source 1..75: mol_type = other DNA
ctgatatcgatgatttagtcagcgttccccagttcacgctcaactggggggagtcgccgcaggaaatacttgaac

SEQ ID NO: 213443 - DNA, 75 bp, synthetic construct
  source 1..75: mol_type = other DNA
atgcgcgtctatcgctgatgccgccggaagctttcgccgttcagccatatgccttctaccagaacctggcgggat

SEQ ID NO: 213444 - DNA, 75 bp, synthetic construct
  source 1..75: mol_type = other DNA
gagttgcttagtaagcactttgggtatttattacatcatgtccgccataagtatgaatatatatatattccaaag

SEQ ID NO: 213445 - DNA, 75 bp, synthetic construct
  source 1..75: mol_type = other DNA
acaattagagaatggtagagcaataccagacagtactacggctaaattgatttgccctaattgtaaggaagaaat

SEQ ID NO: 213446 - DNA, 75 bp, synthetic construct
  source 1..75: mol_type = other DNA
tggcaagtgtcatatctaatgcttcagagtgtgatacgattgttacatcgaaactgcatgtaggagttactggct

SEQ ID NO: 213447 - DNA, 75 bp, synthetic construct
  source 1..75: mol_type = other DNA
taagcagtatagactccgataagtttggagagagtcttgattctaaagcactagagagtattctaggagagaact

SEQ ID NO: 213448 - DNA, 75 bp, synthetic construct
  source 1..75: mol_type = other DNA
agctgagctcataaatcaagattcaggagagtcaattttcctagctcgtgttgctaccatagcggatttatcgaa

SEQ ID NO: 213449 - DNA, 75 bp, synthetic construct
  source 1..75: mol_type = other DNA
tgaggttgctgaatatttacaaatcccgcggaaaaaactctatctcagaatgaaaaaatacggtcttagcaagga

SEQ ID NO: 213450 - DNA, 75 bp, synthetic construct
  source 1..75: mol_type = other DNA
caccatctttcatctctgatatctgtatctctggttcgtcaggagcggcaaggaagaatactgtactgtcacgcc

SEQ ID NO: 213451 - DNA, 75 bp, synthetic construct
  source 1..75: mol_type = other DNA
cagacaccctgaaagagctgggtcatcctacacgactgagcgtgtacagagagctggttaaagccggacataaag

SEQ ID NO: 213452 - DNA, 75 bp, synthetic construct
  source 1..75: mol_type = other DNA
gatcatgatgcaatcctgtctatgagtagtgggcaaatcgcatcattaggtttggcatttttcctaacattgaat

SEQ ID NO: 213453 - DNA, 75 bp, synthetic construct
  source 1..75: mol_type = other DNA
gcagatgctccaggacccgtggggccgtcgctacctgatgttcgctcagcagttcgggagcctgtggggtctgac

SEQ ID NO: 213454 - DNA, 75 bp, synthetic construct
  source 1..75: mol_type = other DNA
gggggccggggataactctaccagcgcccaacgcctggttccggacttcttcaaagacctgtcgctggcagacct

SEQ ID NO: 213455 - DNA, 75 bp, synthetic construct
  source 1..75: mol_type = other DNA
ggatgtagaaattaaccagaagcacataacaaagctattgcgagaaaaaacaaaaaggcagccaacagatttagt

SEQ ID NO: 213456 - DNA, 75 bp, synthetic construct
  source 1..75: mol_type = other DNA
cgttttttactcattcaccatgtgacctggcttggcttcagccttgctgcgcttgcatgggtcttctggttaacc

SEQ ID NO: 213457 - DNA, 75 bp, synthetic construct
  source 1..75: mol_type = other DNA
tgaccatcaccatgacgaacggtgattaccaggacgctgttgtcggtattttcgacaatcagcagcaatgtgaag

SEQ ID NO: 213458 - DNA, 75 bp, synthetic construct
  source 1..75: mol_type = other DNA
cactgcgaccaccggggcctgccgctggcgctcatcagcgaagacggaaatacggcgtggagcggggagtatgat

SEQ ID NO: 213459 - DNA, 75 bp, synthetic construct
  source 1..75: mol_type = other DNA
ggttaacgctaaagctgcaggtgacgacgaagccatgttctatgacgaagattacgtgactgcgctggaatatgg

SEQ ID NO: 213460 - DNA, 75 bp, synthetic construct
  source 1..75: mol_type = other DNA
atactgagaacgcgttgattaacgttaccggcacggcaagttttgcttcggaacagctggatttgactattgatc

SEQ ID NO: 213461 - DNA, 75 bp, synthetic construct
  source 1..75: mol_type = other DNA
catacttttttttaatgctgccagttttatatgtaattattatggcttatattggttttaattatttcaataaag

SEQ ID NO: 213462 - DNA, 75 bp, synthetic construct
  source 1..75: mol_type = other DNA
taccgctatcttcgttagagctgtcttatgctgaaagaataggggaccccaaaatatggaatatggtgaaagggt

SEQ ID NO: 213463 - DNA, 75 bp, synthetic construct
  source 1..75: mol_type = other DNA
gccgctggcagcacttcgccttccgggcagaaacgcggatggagttctcgccggtgcacttccagcagagcgcgg

SEQ ID NO: 213464 - DNA, 75 bp, synthetic construct
  source 1..75: mol_type = other DNA
tttggaatagaacaaaaagaaaaaatggtgcgttagttttaagtgtaggagcaccaagctctccttttatatcga

SEQ ID NO: 213465 - DNA, 75 bp, synthetic construct
  source 1..75: mol_type = other DNA
tgacctgcgcctgcaaccgctgaaatttggcatggcgggtggcagcattgcggcgaatattcatctggaaggcga

SEQ ID NO: 213466 - DNA, 75 bp, synthetic construct
  source 1..75: mol_type = other DNA
atgcagcatcaatcaattacgcaattaatgcgtaaggtctatctctggcaaaaagaacaccaggttcgctgggta

SEQ ID NO: 213467 - DNA, 75 bp, synthetic construct
  source 1..75: mol_type = other DNA
aatgtactatcttatcttgaaaaactcccaacaatattcatgagtgaagcttatcaaatagagggagcaaaacct

SEQ ID NO: 213468 - DNA, 75 bp, synthetic construct
  source 1..75: mol_type = other DNA
gaatatatcttgttgggtgataacaaattgcatatgttttctgaatggtcaattgataacattagaacgaaccat

SEQ ID NO: 213469 - DNA, 75 bp, synthetic construct
  source 1..75: mol_type = other DNA
gggatatctggaagcattacaatcatcttttgtggtggaaaaggttaactatggtcgggggagccctggacaatg

SEQ ID NO: 213470 - DNA, 75 bp, synthetic construct
  source 1..75: mol_type = other DNA
ttcttcgcctgccagacccgtgtgcgcgacccgggccgccggggatacacaaaacacatgctgcgtctgcggcgg

SEQ ID NO: 213471 - DNA, 75 bp, synthetic construct
  source 1..75: mol_type = other DNA
aggggcatcggctgggtcctggcggcaataccacggctcctggcctggttaccccagaacttcccttcccgcgaa

SEQ ID NO: 213472 - DNA, 75 bp, synthetic construct
  source 1..75: mol_type = other DNA
atgattgtgatttcccgacatgtcgctatccctgataatgagtatgaaatcaccgccattcgtgcgcagggcgcg

SEQ ID NO: 213473 - DNA, 75 bp, synthetic construct
  source 1..75: mol_type = other DNA
ttatccccgatagtgagtatgagatcaccgctattcgagcgcagggcgcgggcgggcagcatgttaataaggcct

SEQ ID NO: 213474 - DNA, 75 bp, synthetic construct
  source 1..75: mol_type = other DNA
gtgccgagaatagcaagttcaaatacattaaaactggaacactaccatgacttcaaagttgaaatggataaagac

SEQ ID NO: 213475 - DNA, 75 bp, synthetic construct
  source 1..75: mol_type = other DNA
ggcagcaccattaaggaaggtgcgaataagcaggtcatttcttcccaagctgactcgctgattaaaatttcgcgg

SEQ ID NO: 213476 - DNA, 75 bp, synthetic construct
  source 1..75: mol_type = other DNA
cctgctgatagctgctgatacaggaagtcaatatggcaccaatattactattaatgatggtgacagaattacagg

SEQ ID NO: 213477 - DNA, 75 bp, synthetic construct
  source 1..75: mol_type = other DNA
ccatcgaattcgacattcccgctaaagatggatacctagaaaaattaaacgagagagtcgctgctctactaggca

SEQ ID NO: 213478 - DNA, 75 bp, synthetic construct
  source 1..75: mol_type = other DNA
cgctgttttatttgccgttctttatcctcggcgcactggctttcattttccctcatcttaaagccttgtttacca

SEQ ID NO: 213479 - DNA, 75 bp, synthetic construct
  source 1..75: mol_type = other DNA
atttctttttaaaaaaaaatgcggcagaattaaaaaaatagctgcattatttattttgctaaaaggatattcccg

SEQ ID NO: 213480 - DNA, 75 bp, synthetic construct
  source 1..75: mol_type = other DNA
ctgcgtccatatcgtgagcagggcttgccgctgccgccggaataccgggtaggctaccgtcgcaatgaaggtgcc

SEQ ID NO: 213481 - DNA, 75 bp, synthetic construct
  source 1..75: mol_type = other DNA
ttttatttctcaaaatgattatttacgccaaactgtatccatcagacaagatgggctaggcacaaaaataatatt

SEQ ID NO: 213482 - DNA, 75 bp, synthetic construct
  source 1..75: mol_type = other DNA
cagacagatgttgatgtcacgaacggtgcaatagtgatccacacccaacgcctgaaatcagatccagggggtaat

SEQ ID NO: 213483 - DNA, 75 bp, synthetic construct
  source 1..75: mol_type = other DNA
gcgaacaatgccacaggcgtattgttgttgggcttataatttctccggtaaggaataccatgtatacgcgaaatt

SEQ ID NO: 213484 - DNA, 75 bp, synthetic construct
  source 1..75: mol_type = other DNA
gtagatgttgttggtcaaacctctgccatcggcattaatttaattggtgactatacccatgctgacttaggcaca

SEQ ID NO: 213485 - DNA, 75 bp, synthetic construct
  source 1..75: mol_type = other DNA
caccctgatattattctcattacagaatctgaagcattagcattgctatcggagagaaaaaaccaacatattctt

SEQ ID NO: 213486 - DNA, 75 bp, synthetic construct
  source 1..75: mol_type = other DNA
tctcgtgcattagaagaggctggagaggtgtcgtttgacagtgtacagaagaccctgtgtggcagctttgtggca

SEQ ID NO: 213487 - DNA, 75 bp, synthetic construct
  source 1..75: mol_type = other DNA
aaatggcggcaaatggcttcacgagtagcgaaacaaccgtcagggatgaggttgccaaatggcataacgataggg

SEQ ID NO: 213488 - DNA, 75 bp, synthetic construct
  source 1..75: mol_type = other DNA
acggctatacgcaatccctgttcgaagatctcacggtggttgaagatggcgataagcctgaatttaccgatatta

SEQ ID NO: 213489 - DNA, 75 bp, synthetic construct
  source 1..75: mol_type = other DNA
atggaaacagtagataggtcaacaatagattttattagaaaaatcatccatgagctagaaataataggtgattgg

SEQ ID NO: 213490 - DNA, 75 bp, synthetic construct
  source 1..75: mol_type = other DNA
gaaatatacattctcgtaatcaggacaggatatcggtagccctgatatatgacacgttatctaaagaagcccaca

SEQ ID NO: 213491 - DNA, 75 bp, synthetic construct
  source 1..75: mol_type = other DNA
tagccggtgaaagtgaagatccacgttctgtttgtgaacattattattctttaatctcacaatatcgggaaattc

SEQ ID NO: 213492 - DNA, 75 bp, synthetic construct
  source 1..75: mol_type = other DNA
atgagtatcgatgcactacgatgggctaaaaaggtgaaaaccggcagttcatccagtaagtctgtattgacctgg

SEQ ID NO: 213493 - DNA, 75 bp, synthetic construct
  source 1..75: mol_type = other DNA
acgcgccgttatccgcgatgcgtatttcatccactgtcataaaggcactataggtgcaatccggcgtgtggtgga

SEQ ID NO: 213494 - DNA, 75 bp, synthetic construct
  source 1..75: mol_type = other DNA
taatatattgttttataaaattttgtcttatttacctcatgcattattcaaattcttagtgtgtgtaaaaaggaa

SEQ ID NO: 213495 - DNA, 75 bp, synthetic construct
  source 1..75: mol_type = other DNA
taattagccacagcaaaaacgctaagctcagcaactaccaacccacggctaaaaaagagcactttcaagcagcca

SEQ ID NO: 213496 - DNA, 75 bp, synthetic construct
  source 1..75: mol_type = other DNA
cgagcgccagcagatctttggcaatgagtggcaaaaatttaccgctaacagctttactgagcttcatcacgcgct

SEQ ID NO: 213497 - DNA, 75 bp, synthetic construct
  source 1..75: mol_type = other DNA
ggcgtgattgcgcaaagctaccatcagtccgataaatcagccgccgaattcgacgctatcgttgcgcaaacgaac

SEQ ID NO: 213498 - DNA, 75 bp, synthetic construct
  source 1..75: mol_type = other DNA
tcaatcacatcatccagacctaaaataataaaacttcatggtgactatctgttcgacagcataaaaagctcctta

SEQ ID NO: 213499 - DNA, 75 bp, synthetic construct
  source 1..75: mol_type = other DNA
ttttcggcactttctggctggttctgggtggctgtggtagcgccttgatctctgctgctttcccacagttaggta

SEQ ID NO: 213500 - DNA, 75 bp, synthetic construct
  source 1..75: mol_type = other DNA
atggcaaagcggtttcaccaaaccgatgtcaacggcggcatgagcgccacgcagttacctgctccaactcgcgac

SEQ ID NO: 213501 - DNA, 75 bp, synthetic construct
  source 1..75: mol_type = other DNA
tacctgggagagatgaagcgtctggctgatgggggagaaatgaattttgatggctatctggataagatgtcacat

SEQ ID NO: 213502 - DNA, 75 bp, synthetic construct
  source 1..75: mol_type = other DNA
ggccagcgactttccgttttatccagacttaacagcaccagtagccggatggcacggcaggcatatgactggctg

SEQ ID NO: 213503 - DNA, 75 bp, synthetic construct
  source 1..75: mol_type = other DNA
aatcagcgcaaaagcccgcggactcaccgaccgtcaggcgcagcgggagtcggaagagcagcgccttcgtgaggt

SEQ ID NO: 213504 - DNA, 75 bp, synthetic construct
  source 1..75: mol_type = other DNA
tgcggggatacaaacctttaatgagcagtctattctttctctttatagagataaactgcactctatttctatgat

SEQ ID NO: 213505 - DNA, 75 bp, synthetic construct
  source 1..75: mol_type = other DNA
atggttgatcattttgagtacgaggaagattttgaaacagatgactttgatatcaaaaaaagcgaaatcgagatt

SEQ ID NO: 213506 - DNA, 75 bp, synthetic construct
  source 1..75: mol_type = other DNA
gctggcgaaaacgcagcgccgcagcctggcggatgcccttcagcagtccggcggcgaagacggtggcagtgtggt

SEQ ID NO: 213507 - DNA, 75 bp, synthetic construct
  source 1..75: mol_type = other DNA
tggcgcagtttatttggaggaaagggaggggttatttgccgaaatggaaagacttggaattcagccaaatgaaca

SEQ ID NO: 213508 - DNA, 75 bp, synthetic construct
  source 1..75: mol_type = other DNA
gaggccactcctcggcaattgtcgcgatagaggtggtcagaaaatatggaagagaaaatgtcatcctgcttaacc

SEQ ID NO: 213509 - DNA, 75 bp, synthetic construct
  source 1..75: mol_type = other DNA
caagctcgcaaagccttcttgactgggcgcgtgaaaacaatgttgtcgaatacgaaatacattggcggaaacgta

SEQ ID NO: 213510 - DNA, 75 bp, synthetic construct
  source 1..75: mol_type = other DNA
aacaactggttgccaaaaaaagaacagttaaagatttagctgattatataaaaatcaaatcaggtacatcaccta

SEQ ID NO: 213511 - DNA, 75 bp, synthetic construct
  source 1..75: mol_type = other DNA
atgttcctgatgcctttgatctttatggacgttctaaattacttggcgaagtaagttatgctccacaccttacgt

SEQ ID NO: 213512 - DNA, 75 bp, synthetic construct
  source 1..75: mol_type = other DNA
caggaatgctcggaggaagtttgcttcgttatttcgctgacaagaccgagcatgatgtatatggaactgttcgtg

SEQ ID NO: 213513 - DNA, 75 bp, synthetic construct
  source 1..75: mol_type = other DNA
tgtaccactgcgaccatcgcggcctgccgctggcccttatcagcacggaagggacaacagcgtggtacgcagaat

SEQ ID NO: 213514 - DNA, 75 bp, synthetic construct
  source 1..75: mol_type = other DNA
tgatctcatatcagggacttgttcgcaccttcctaaggccgccacagcttttcgccatggctttgccacaaacac

SEQ ID NO: 213515 - DNA, 75 bp, synthetic construct
  source 1..75: mol_type = other DNA
atgctgtgcggaaatctgcatccatttccacttgctgtgtggcatgacttctccggctctctggatacggcagaa

SEQ ID NO: 213516 - DNA, 75 bp, synthetic construct
  source 1..75: mol_type = other DNA
gattggttcttaaatcaatcaggtgaggtgaaaggatttactaaagctgtattctccggagttcctactgtctat

SEQ ID NO: 213517 - DNA, 75 bp, synthetic construct
  source 1..75: mol_type = other DNA
cgcatagcatatccagtggattgactagtgcgcacatggtgcctgccggaagtaagatctatgctcgagacgaga

SEQ ID NO: 213518 - DNA, 75 bp, synthetic construct
  source 1..75: mol_type = other DNA
gttggttatgctggcaatgacagctctatcatggatgttttaaaacatttattaaaacaggacgattacctaaga

SEQ ID NO: 213519 - DNA, 75 bp, synthetic construct
  source 1..75: mol_type = other DNA
cttcacaacaaattttgacgatttaataaatgaagcattttatcaattttcttctgacagaccattattatgcgc

SEQ ID NO: 213520 - DNA, 75 bp, synthetic construct
  source 1..75: mol_type = other DNA
ctgtaactgccaatggttctgaaattgaagacttcaatccaaaatatctttcattttattgcataataaacctgg

SEQ ID NO: 213521 - DNA, 75 bp, synthetic construct
  source 1..75: mol_type = other DNA
acgccgacaaactcatgaaagatcatgaggcaaaggctaacccgcataagcaatacccgctgattgcgaacgcac

SEQ ID NO: 213522 - DNA, 75 bp, synthetic construct
  source 1..75: mol_type = other DNA
ccttaaaaatcgacccgtcagtcgtgctggcaacccgtaaatatgtcgacgatgcagtcatcgaggtgaagagct

SEQ ID NO: 213523 - DNA, 75 bp, synthetic construct
  source 1..75: mol_type = other DNA
atgaaactttccctgatgctggaagccgacagaattaatgtgcaggcactgaacatggggcgaattatcgttgac

SEQ ID NO: 213524 - DNA, 75 bp, synthetic construct
  source 1..75: mol_type = other DNA
ctgaatgaagagaacccgcaccagctgcagcagctcatccgcctgccggggcagcagtatgatgaggagtccggc

SEQ ID NO: 213525 - DNA, 75 bp, synthetic construct
  source 1..75: mol_type = other DNA
aggtattccctgctctgatctcgttcaggtcatccctctccgtcctggtcaagcctatggcctgttcatgaatcg

SEQ ID NO: 213526 - DNA, 75 bp, synthetic construct
  source 1..75: mol_type = other DNA
gactcgcataatttatccggcagggcaaaaacaagtgcaacttgccgtgacaaataatgatgaaaatagtaccta

SEQ ID NO: 213527 - DNA, 75 bp, synthetic construct
  source 1..75: mol_type = other DNA
gttatcaggtcactgctttgggggctagctatgttaggagcgtctttgatagaaagacacttgaccgattgcggc

SEQ ID NO: 213528 - DNA, 75 bp, synthetic construct
  source 1..75: mol_type = other DNA
cagagagcgtccgctaccttgagataaaaggtagcgccacagacagcataaaaaatgttccaaacgggttatcat

SEQ ID NO: 213529 - DNA, 75 bp, synthetic construct
  source 1..75: mol_type = other DNA
tgatgcctgaaaaaataggctctgcgacaacgttatatgcaaatacctcacgcgtcggctggattatcgccggct

SEQ ID NO: 213530 - DNA, 75 bp, synthetic construct
  source 1..75: mol_type = other DNA
tggtatgtgtttttacgccagcgtactcatggcgacgactccagcagttgagctggaattgcaaattctaaatgc

SEQ ID NO: 213531 - DNA, 75 bp, synthetic construct
  source 1..75: mol_type = other DNA
actaatagcaaatcatctacattttcaacatcctatggtgaggggagtaagaggagtacctgtcgaagttctgaa

SEQ ID NO: 213532 - DNA, 75 bp, synthetic construct
  source 1..75: mol_type = other DNA
tgttcaatgatgtgggcggcgaataatctctacatgataaatatgccgctatttattattgatgaactgcatcta

SEQ ID NO: 213533 - DNA, 75 bp, synthetic construct
  source 1..75: mol_type = other DNA
tcctgctatgttgcttatttggagtgttggcctgcacgctttttgcgtggaatcgcaactacttcattctcctct

SEQ ID NO: 213534 - DNA, 75 bp, synthetic construct
  source 1..75: mol_type = other DNA
ctcatggcgacgactccggcagttgagctggaattgcaaattctaaatgccatcttccttggtattctctgtggt

SEQ ID NO: 213535 - DNA, 75 bp, synthetic construct
  source 1..75: mol_type = other DNA
gcggcgatggaaaaatccgtcgagctggtaaaggcatatgttcgtgctggcttcagtaaaattcatcttgatgcg

SEQ ID NO: 213536 - DNA, 75 bp, synthetic construct
  source 1..75: mol_type = other DNA
cgaagaggataattcttgaagatgatgcttttaatgcactgatgatagccctgagaaaagaaagtgaaatctatg

SEQ ID NO: 213537 - DNA, 75 bp, synthetic construct
  source 1..75: mol_type = other DNA
atgtgtggtgccggtggtcatccagacaacggcgtcattattaacaacagtgaagaatttgccgctgccgtgaag

SEQ ID NO: 213538 - DNA, 75 bp, synthetic construct
  source 1..75: mol_type = other DNA
acaaagagaaccgcatgggcaatccagtttcctatcaaattattccttatgcaggtggtactcacccggtagcaa

SEQ ID NO: 213539 - DNA, 75 bp, synthetic construct
  source 1..75: mol_type = other DNA
taaccgtcaccggtactacgatccgttgcaggggcggtatattactcaggacccgatggggttgaaagggggatg

SEQ ID NO: 213540 - DNA, 75 bp, synthetic construct
  source 1..75: mol_type = other DNA
cagactgacaccacacgtatccagacggtatacgagccgggaagcttcacgccgctcatccgggtcgagacagag

SEQ ID NO: 213541 - DNA, 75 bp, synthetic construct
  source 1..75: mol_type = other DNA
ccggagctgcacccggacagtacactcacagtgtggccggataaccgcatcgcggaggatgcgcactatgtctac

SEQ ID NO: 213542 - DNA, 75 bp, synthetic construct
  source 1..75: mol_type = other DNA
ccagagatgatagatttctcatcagaaaaaatacataattatatcgacataatcattgaagattatgaaaatatc

SEQ ID NO: 213543 - DNA, 75 bp, synthetic construct
  source 1..75: mol_type = other DNA
gaacacttggtgcaaactataactatagtagcactcatcgtgaagttggcttagcactctctggtggtattttag

SEQ ID NO: 213544 - DNA, 75 bp, synthetic construct
  source 1..75: mol_type = other DNA
atctcatatattcttataaaaaatataatattcaactcgtcatattgattataaaaataccgaccccagagaaat

SEQ ID NO: 213545 - DNA, 75 bp, synthetic construct
  source 1..75: mol_type = other DNA
acttataacgacaatggcaccaaacgcaaagtcatgtacgaaggttctctcggcggcatgattgtgccttacggt

SEQ ID NO: 213546 - DNA, 75 bp, synthetic construct
  source 1..75: mol_type = other DNA
aagataacgagtcgctggacaacaatgttctgcacactggcgaaatcatccagcaacaccataccgtgggcgtct

SEQ ID NO: 213547 - DNA, 75 bp, synthetic construct
  source 1..75: mol_type = other DNA
gcagatgaccagcaggctgattcagtacattgagcgtgagagcctgcgccgcacgttctccggtgttgctgagga

SEQ ID NO: 213548 - DNA, 75 bp, synthetic construct
  source 1..75: mol_type = other DNA
gaaaattcaaacaaacgcaatgtatttcattattttcgtcgacaattttcatgtttacttgcttcattctgttta

SEQ ID NO: 213549 - DNA, 75 bp, synthetic construct
  source 1..75: mol_type = other DNA
gggaaaaattcttgactggatcaaaccttaccagaaggtgaaaaacacctcctttgccctaatgccgatcagtta

SEQ ID NO: 213550 - DNA, 75 bp, synthetic construct
  source 1..75: mol_type = other DNA
aagaaaaatataacctgaatggtttaaccgcttccgtgggcggagggtataacctgaatgtgcatacatggacgt

SEQ ID NO: 213551 - DNA, 75 bp, synthetic construct
  source 1..75: mol_type = other DNA
tggagaaagtggcacaaaccggtgactgcgcacaggtggcccggcaaatacttgatgcgccctcgaatgccgccg

SEQ ID NO: 213552 - DNA, 75 bp, synthetic construct
  source 1..75: mol_type = other DNA
attgaccgcacatattgctgatgcgatccatcagcgggcaatggagcggaaaatacaggtgacggaactcgattt

SEQ ID NO: 213553 - DNA, 75 bp, synthetic construct
  source 1..75: mol_type = other DNA
actggagtagaatgttagcgtttttgtttatggctttatgtggttttctgcgtcttctttccagaagcatcatgc

SEQ ID NO: 213554 - DNA, 75 bp, synthetic construct
  source 1..75: mol_type = other DNA
cccttgttgttgcatctgttctggttttttctcttgctggctgcggtgacaaagaagaatcgaagaaattcagcg

SEQ ID NO: 213555 - DNA, 75 bp, synthetic construct
  source 1..75: mol_type = other DNA
aagtgccgaactttgaagtgggggattacatttatattcctggcattaaagcggcgctggataatccaggtacga

SEQ ID NO: 213556 - DNA, 75 bp, synthetic construct
  source 1..75: mol_type = other DNA
ttgccgaggaatacgcgactaaacgctaccgttctaacgtcatcaactgggggatgttaccgctgcagatggcgg

SEQ ID NO: 213557 - DNA, 75 bp, synthetic construct
  source 1..75: mol_type = other DNA
ttgaaggagataattcccttacggaccgtctggtggtgaaaggtaatacctctggtcaaagtgacatcgtttatg

SEQ ID NO: 213558 - DNA, 75 bp, synthetic construct
  source 1..75: mol_type = other DNA
tgtagccggagcaaaaattaagaatgatggcgatttcattctcaatcttgctggcgattatgattttaatacaga

SEQ ID NO: 213559 - DNA, 75 bp, synthetic construct
  source 1..75: mol_type = other DNA
cttgccagtggtaccatgattaataatagtgggcgcgaaaatgtttcaaatggtggtgcatcttataatgccatt

SEQ ID NO: 213560 - DNA, 75 bp, synthetic construct
  source 1..75: mol_type = other DNA
cccaattgtttttagctcatctacccaagctacgaatgaatctccatatgggaaaagtaaaaacacagctgagaa

SEQ ID NO: 213561 - DNA, 75 bp, synthetic construct
  source 1..75: mol_type = other DNA
ccgatctcggtttcgacgtagatttaagcccgatgttctctacacctgaagagatcgcccgcctggccgtagaaa

SEQ ID NO: 213562 - DNA, 75 bp, synthetic construct
  source 1..75: mol_type = other DNA
ttatccgcaccaccattgaagcactggctgcgacgctgggcggtactcagtcactgcataccaacgcctttgacg

SEQ ID NO: 213563 - DNA, 75 bp, synthetic construct
  source 1..75: mol_type = other DNA
gcacttgtattgtccgaaataaatccggcacgccaggataccattctgaaacggggttatgaactgggggacagc

SEQ ID NO: 213564 - DNA, 75 bp, synthetic construct
  source 1..75: mol_type = other DNA
ccatccagaacgacattctgaaagagtacctctgccgcaatacctacatttatccgccaaaaccgtcgatgcgta

SEQ ID NO: 213565 - DNA, 75 bp, synthetic construct
  source 1..75: mol_type = other DNA
ggtactcttcctggtttaccgccctacgtgcgtggccctcgcgcaaccatgtataccgcccaaccgtggactatc

SEQ ID NO: 213566 - DNA, 75 bp, synthetic construct
  source 1..75: mol_type = other DNA
caagccagagctattatccaacagatcgacgaagccggtggcatggcgaaagcgatcgaagcaggtctgccaaaa

SEQ ID NO: 213567 - DNA, 75 bp, synthetic construct
  source 1..75: mol_type = other DNA
atccagctggctaaccggctggatgtggacgaacgcaccatccgcaagtggaaatccggcgagaccagtatggta

SEQ ID NO: 213568 - DNA, 75 bp, synthetic construct
  source 1..75: mol_type = other DNA
cggcgagaccagtatggtgtacaccacctggtgctgcctgtgctggctggccggactgggtatgccgctcgataa

SEQ ID NO: 213569 - DNA, 75 bp, synthetic construct
  source 1..75: mol_type = other DNA
ttcatccatccaagctgaatgtgataacgcttatggaaagagtaaagcagttgcggaaaaaatcattcagcagta

SEQ ID NO: 213570 - DNA, 75 bp, synthetic construct
  source 1..75: mol_type = other DNA
cctccaccacaaatcggaagtattgccttcctgaatgaccaggccatgtatgaaaaggggcgtttattgcgaaat

SEQ ID NO: 213571 - DNA, 75 bp, synthetic construct
  source 1..75: mol_type = other DNA
agctggaattgcaaattctaaatgccatcttccttggtattctctgtggtatgaggtgtactggcaatagcggac

SEQ ID NO: 213572 - DNA, 75 bp, synthetic construct
  source 1..75: mol_type = other DNA
gccctcgcccgtgaacacgccgacagaacaggccgtgagacggtcatgttcagtacatttttacgtgctcagatc

SEQ ID NO: 213573 - DNA, 75 bp, synthetic construct
  source 1..75: mol_type = other DNA
tcacattgaaaccgggatgcgatttaccgatggtaactggaacctgacgccgtatgcatcgttaacgggggttca

SEQ ID NO: 213574 - DNA, 75 bp, synthetic construct
  source 1..75: mol_type = other DNA
tccggttatcaggacatcacgcaaggaagtattgcaacgaacacaatcataaatggtggacgacagtatgttgaa

SEQ ID NO: 213575 - DNA, 75 bp, synthetic construct
  source 1..75: mol_type = other DNA
gcgaactgacggtagtggctacaacctcggcgaaaaataccaccgttgatgctggcggtaaactgatcgtccaga

SEQ ID NO: 213576 - DNA, 75 bp, synthetic construct
  source 1..75: mol_type = other DNA
aattctgaactcatgggagaaatgtcgaataataatataaaagttcatttaaatgaaccagagataatattttta

SEQ ID NO: 213577 - DNA, 75 bp, synthetic construct
  source 1..75: mol_type = other DNA
caaataaaatgcgtcatattcaactcattgcgcgcactaggccatgataaagaaaattcacttaagcgtgtcatt

SEQ ID NO: 213578 - DNA, 75 bp, synthetic construct
  source 1..75: mol_type = other DNA
tcatttctcaggcgctgcaggcattgattcatcattacgcccagtctggtgaacttagacgcttcgtgatcaaat

SEQ ID NO: 213579 - DNA, 75 bp, synthetic construct
  source 1..75: mol_type = other DNA
gcgctgatggcgtcgcgttcagcattgagcaggatgcggcgaacaatatcctgctggcagatggcggcgtgttaa

SEQ ID NO: 213580 - DNA, 75 bp, synthetic construct
  source 1..75: mol_type = other DNA
gaacttagacgcttcgtgatcaaatgtcgggtggacaatccgcaaagcaaccaggtcgctttgcgcaatggtttt

SEQ ID NO: 213581 - DNA, 75 bp, synthetic construct
  source 1..75: mol_type = other DNA
ttcggattaccgtaagcgtgcagcaagaaccgtattgacggggatgtgttattcagtcggcagtgctacgcgcca

SEQ ID NO: 213582 - DNA, 75 bp, synthetic construct
  source 1..75: mol_type = other DNA
ttgtaggaattcttaagaagcgcggccttaatataggggatattaatgcaaagtatgttacaactaaggctcctg

SEQ ID NO: 213583 - DNA, 75 bp, synthetic construct
  source 1..75: mol_type = other DNA
tcagatgcggttgagatcgctctggctgataacttcatttatatcaggaatgctttgaatgtttggtctggaaga

SEQ ID NO: 213584 - DNA, 75 bp, synthetic construct
  source 1..75: mol_type = other DNA
cggtgaggcagtaaaaacaacgattaatgaaggcggtacgctgacagtcaacgataatggcaaagcgacagatat

SEQ ID NO: 213585 - DNA, 75 bp, synthetic construct
  source 1..75: mol_type = other DNA
aaaaacagcgttatccggagatgaagaaagcattgagttactgcataatattgcgttaggttatgatgaatttgg

SEQ ID NO: 213586 - DNA, 75 bp, synthetic construct
  source 1..75: mol_type = other DNA
gggagccgtcaatgtactacgtcgttgtgaagatggcggatggcatggcgatatgtttgacggaacggggcttac

SEQ ID NO: 213587 - DNA, 75 bp, synthetic construct
  source 1..75: mol_type = other DNA
gggtttgaagccagcctgcgcggcgtaatgcagttgagtaatctggatggcctggtgatcaccgttccgcataaa

SEQ ID NO: 213588 - DNA, 75 bp, synthetic construct
  source 1..75: mol_type = other DNA
tcatgccgcgtcacccctgcgatgagattaaagaaccattgcgtaaagcaatcctgaaacaactcggtttgagtt

SEQ ID NO: 213589 - DNA, 75 bp, synthetic construct
  source 1..75: mol_type = other DNA
aggattagtatgcctcttgcatattttgcaaattccagaatgttcggagaaatacaccaactttgtaataaacta

SEQ ID NO: 213590 - DNA, 75 bp, synthetic construct
  source 1..75: mol_type = other DNA
aactttattaacatggttttgcctgccaacgcgagtaaattctcaactgcaattaataatatattagggtttgcc

SEQ ID NO: 213591 - DNA, 75 bp, synthetic construct
  source 1..75: mol_type = other DNA
atgttacaggagctttgccgggttcgccgtccaggacgaacagcctattcaacgaatgagtttttccaactgctg

SEQ ID NO: 213592 - DNA, 75 bp, synthetic construct
  source 1..75: mol_type = other DNA
aaatatggcgatgctaatatcaatcattattataaaaacttagaaataaaacacacacaacccaaaaatagagcg

SEQ ID NO: 213593 - DNA, 75 bp, synthetic construct
  source 1..75: mol_type = other DNA
aaatatggcgatgcaaatatcaatcattattatagaaacttagaaataaaacactcacaacccaaaaatagagca

SEQ ID NO: 213594 - DNA, 75 bp, synthetic construct
  source 1..75: mol_type = other DNA
cattgcgtgcactaggccatgataaagaaaattcacttaagcgtattattaatagtttcaattctgaactcatgg

SEQ ID NO: 213595 - DNA, 75 bp, synthetic construct
  source 1..75: mol_type = other DNA
ctctgagccaggcgaaatccattgccgatgaattgatgaccggatgtacaaacttcgtgttcagcggtaaacctg

SEQ ID NO: 213596 - DNA, 75 bp, synthetic construct
  source 1..75: mol_type = other DNA
atcggaggatcgacgataggaggcgctttctctggaaatttacttatgaacaggaatgctgagtctgcgtgtgag

SEQ ID NO: 213597 - DNA, 75 bp, synthetic construct
  source 1..75: mol_type = other DNA
ttattaaaaatgcctgtttaaaattatataatttggcacataccgcaaccaactcccaccttaaaccaactggtc

SEQ ID NO: 213598 - DNA, 75 bp, synthetic construct
  source 1..75: mol_type = other DNA
atgtaaatagtattgctgaaaatgatattacggctggtagtggtgatgacagaatagaaattggtacaaatctgg

SEQ ID NO: 213599 - DNA, 75 bp, synthetic construct
  source 1..75: mol_type = other DNA
tcgaaagcgacgaagggctggatttgattaattgggtagaggaacaactgcaagatgattcgacctttgatgccg

SEQ ID NO: 213600 - DNA, 75 bp, synthetic construct
  source 1..75: mol_type = other DNA
cttacaatgacgcgatcgcgtatgcaatcgatccgaattttgaccgcaagactattaccgtcgatctggctgtag

SEQ ID NO: 213601 - DNA, 75 bp, synthetic construct
  source 1..75: mol_type = other DNA
accgtatgaatttatcattacgcaatcatttttgtttgaggctccagctaaaaccgtgcgaaaaatagactccca

SEQ ID NO: 213602 - DNA, 75 bp, synthetic construct
  source 1..75: mol_type = other DNA
gtgaccggaaacggctcatttaacgatgttcagatccgttcggataaacgcaacaagcgaaatctggtaaaactg

SEQ ID NO: 213603 - DNA, 75 bp, synthetic construct
  source 1..75: mol_type = other DNA
ctcaggatgcacaaaaagcattgcctgaactggtaactgaagacgcagacgttatatctggtgaaaaacgtctgc

SEQ ID NO: 213604 - DNA, 75 bp, synthetic construct
  source 1..75: mol_type = other DNA
attacgataataatgttatcggtctcgttgaacttatcattcaaaaagcagccgggaaaaaaaatcacatcgagt

SEQ ID NO: 213605 - DNA, 75 bp, synthetic construct
  source 1..75: mol_type = other DNA
tcagccaattgcttaaacagggtttacgctccgactatgtgagcaagcaaggtaatgcggttaagttccagagca

SEQ ID NO: 213606 - DNA, 75 bp, synthetic construct
  source 1..75: mol_type = other DNA
aactaccgaatcagctaatcggtgaactgccaaatattcaggtctttggcgcagtaggggataaaaactttaccc

SEQ ID NO: 213607 - DNA, 75 bp, synthetic construct
  source 1..75: mol_type = other DNA
aggcagcctgccgtgcgctaatcgactatctcgattactcagaacgacagttaacgaccaactttagtcacccaa

SEQ ID NO: 213608 - DNA, 75 bp, synthetic construct
  source 1..75: mol_type = other DNA
gtaataatgagtcggatgataaaaaatttgccacaaattatgttttaaaagatttccctatgtttaccactcctg

SEQ ID NO: 213609 - DNA, 75 bp, synthetic construct
  source 1..75: mol_type = other DNA
tgtattgataagttggacattttttcgctgacgatctgtttaaatatgagtcagtatgcatcgccgcgatggaac

SEQ ID NO: 213610 - DNA, 75 bp, synthetic construct
  source 1..75: mol_type = other DNA
ccgaagggagacacaggagcccccgggcaaggaacagaactgcttactactgccaatacatggactcaggcacaa

SEQ ID NO: 213611 - DNA, 75 bp, synthetic construct
  source 1..75: mol_type = other DNA
cagtcaatataaccgtcaggacggcgtaaaaaccaccgacggccgcaagaagcacagccaggtaatgggcgggct

SEQ ID NO: 213612 - DNA, 75 bp, synthetic construct
  source 1..75: mol_type = other DNA
ataagcgggacgtcaaatgcaagcctgagttacagagagtgtaatggttttacatggtcacatgggctgttctgg

SEQ ID NO: 213613 - DNA, 75 bp, synthetic construct
  source 1..75: mol_type = other DNA
ctgctgggcagtacgggaacgtacggcgtgtcgctgagccggaacaacagcatgaagccgggcaatctggggtat

SEQ ID NO: 213614 - DNA, 75 bp, synthetic construct
  source 1..75: mol_type = other DNA
ttttgtgggctgttcatttaccctggacagtcagtgcggcaggttgtggctgtctcagcccccggcgacaggggc

SEQ ID NO: 213615 - DNA, 75 bp, synthetic construct
  source 1..75: mol_type = other DNA
ccatagaaagagacaagaagtcagacaatgactacacgagcttcgactccatcgcctcttatcaattcaccaaag

SEQ ID NO: 213616 - DNA, 75 bp, synthetic construct
  source 1..75: mol_type = other DNA
tattcattgccttatctggggctagcacgtcagcgctggcgattagcgtttatgaggataaagccaccacgctgg

SEQ ID NO: 213617 - DNA, 75 bp, synthetic construct
  source 1..75: mol_type = other DNA
gggatggacgtggttgatttccggctttcgacggtgggcgtgacggctaacttaagcagcactgccgcgcaggcc

SEQ ID NO: 213618 - DNA, 75 bp, synthetic construct
  source 1..75: mol_type = other DNA
cgatggcaactatctctatcaggtgcgggtgattgacgcagcgggcaacgttggcgcgaccgacagccagaatgt

SEQ ID NO: 213619 - DNA, 75 bp, synthetic construct
  source 1..75: mol_type = other DNA
gcttcacgccgctcatccgggtcgagacagagaacggcgagcgggaaaaagcgcagcggcgcagcctggcagaga

SEQ ID NO: 213620 - DNA, 75 bp, synthetic construct
  source 1..75: mol_type = other DNA
acgccaggctcaatggtttcactgcccgctatgacgatcctgtgtggcagttcatgtacccgcctgacggatacc

SEQ ID NO: 213621 - DNA, 75 bp, synthetic construct
  source 1..75: mol_type = other DNA
ggcaggggacattaagcagttcgcaggccaccgacgacactacgccgctgctgaacggtgtactttccgcgccgc

SEQ ID NO: 213622 - DNA, 75 bp, synthetic construct
  source 1..75: mol_type = other DNA
tcgataccgttaacccggcgcaggtgctcaccatcgccagcatcagcaccgacacggggagttcggcaactgact

SEQ ID NO: 213623 - DNA, 75 bp, synthetic construct
  source 1..75: mol_type = other DNA
ggctgagtggggtcgatgaaaatcaacaatttaccgtgcactggggcgaccagaaaacgtgtgccattcatctgc

SEQ ID NO: 213624 - DNA, 75 bp, synthetic construct
  source 1..75: mol_type = other DNA
ggctgcgaccatcactggtttgaaaaccggggacccaagtgtaagcactggtttacgttgatgacgccaccagtc

SEQ ID NO: 213625 - DNA, 75 bp, synthetic construct
  source 1..75: mol_type = other DNA
gacctggcatgagtggaagcgggacgaacagcacaggcaacaacaacgccgccccgggcacttccggggcatgag

SEQ ID NO: 213626 - DNA, 75 bp, synthetic construct
  source 1..75: mol_type = other DNA
caatcatttaggcgctgactctccaatatggcttgacgttgtacgcaatggtgccaattcacgttacgccgattg

SEQ ID NO: 213627 - DNA, 75 bp, synthetic construct
  source 1..75: mol_type = other DNA
tcctggtaagtcatgcgcagggattgggtagcgcaaacgttgagaacaacggtaccctggcgttgaataatagca

SEQ ID NO: 213628 - DNA, 75 bp, synthetic construct
  source 1..75: mol_type = other DNA
tcaggcggctggaccgtcaatgaccagaatgatttgcttgcgcgcctcttcggactgcaaaaggttaacaaagca

SEQ ID NO: 213629 - DNA, 75 bp, synthetic construct
  source 1..75: mol_type = other DNA
cttattcaggtgccagttaagtcccataccaaccatggacgcaatgcagaatattatgcctgggtacaaaatcat

SEQ ID NO: 213630 - DNA, 75 bp, synthetic construct
  source 1..75: mol_type = other DNA
gctactgctactgctactgctactgctactgctactgctactgctactgctactgctactgctactgctactgtt

SEQ ID NO: 213631 - DNA, 75 bp, synthetic construct
  source 1..75: mol_type = other DNA
acgaaattattttatctctatgtgcacgcattaaagaaacgcggatctccttatcattgacccagcagcagttag

SEQ ID NO: 213632 - DNA, 75 bp, synthetic construct
  source 1..75: mol_type = other DNA
tattcctgttaaggatgtattaagtgaatcccagagagcgctttgtggttctgatctgaaatacgccctttctga

SEQ ID NO: 213633 - DNA, 75 bp, synthetic construct
  source 1..75: mol_type = other DNA
acactctgacgttaatggataaaggttattattcaccaggactgttaaatgcctggagcctggcgggagaacacc

SEQ ID NO: 213634 - DNA, 75 bp, synthetic construct
  source 1..75: mol_type = other DNA
actcatatcccggatgacagaggaagagcgaagtaatcttatcgaagcactcaaaacgtcttcaggtgtaaaaca

SEQ ID NO: 213635 - DNA, 75 bp, synthetic construct
  source 1..75: mol_type = other DNA
gatagtcatgacaccgcgcgtattttaagcgtttgtttgaatgataaacgaaaagttaaactcgcctatttattt

SEQ ID NO: 213636 - DNA, 75 bp, synthetic construct
  source 1..75: mol_type = other DNA
cgtggcggtattcccactgctcaccccgggcgctgcggtagccgatcacggctgtcgtggcggaactttatctct

SEQ ID NO: 213637 - DNA, 75 bp, synthetic construct
  source 1..75: mol_type = other DNA
ggggccacggacggatgcggctgccgtacccggctgaactgctggcttatcagctcaaagccgttaaacaccagg

SEQ ID NO: 213638 - DNA, 75 bp, synthetic construct
  source 1..75: mol_type = other DNA
atgtaaaacgtatggcatgggtgctaaaatatatggatagcaaaggggatacatatacatgtccatttttcaggt

SEQ ID NO: 213639 - DNA, 75 bp, synthetic construct
  source 1..75: mol_type = other DNA
taagcgcgatatccgcgacatattcaaagctcgccgccatctggaagtactggcgttaacggtcaacacgcctat

SEQ ID NO: 213640 - DNA, 75 bp, synthetic construct
  source 1..75: mol_type = other DNA
gatgttttatattcttttgtatatcctcgatcatataatttgtaaaatacgggtcgtattccccataaactatta

SEQ ID NO: 213641 - DNA, 75 bp, synthetic construct
  source 1..75: mol_type = other DNA
tttttgcgatcaagatgatttttggcaaccattgaaagccttggcagcaattgataaatttgaaaaacacgagga

SEQ ID NO: 213642 - DNA, 75 bp, synthetic construct
  source 1..75: mol_type = other DNA
ccaatgtggttttcttcgttgcgcgcgcgttggcattactattcgatggcgcagaaaaactttcgcggttattta

SEQ ID NO: 213643 - DNA, 75 bp, synthetic construct
  source 1..75: mol_type = other DNA
gggaaattccgcctgtgttaccggatagtagagaaggggacgttaagaaactggatagcttactgtaccagacgg

SEQ ID NO: 213644 - DNA, 75 bp, synthetic construct
  source 1..75: mol_type = other DNA
atattatgaaatataagcaggatatagcaatagggtattgttcctcatataactatgttgacaaagaattaaatc

SEQ ID NO: 213645 - DNA, 75 bp, synthetic construct
  source 1..75: mol_type = other DNA
gatagttcacttagaaaacgtctcgggtatgaggttttaagcttctcgctacaggcacattcattgagtcaggaa

SEQ ID NO: 213646 - DNA, 75 bp, synthetic construct
  source 1..75: mol_type = other DNA
atgctttctacaaacttaatacagagtgattatggtaatttaaatattaaaaaccttgccttcgactcttttaaa

SEQ ID NO: 213647 - DNA, 75 bp, synthetic construct
  source 1..75: mol_type = other DNA
cggtaatatcacagtggataagaacctgcatgtcaaaggcaatgtgtccattgacggcaccggaagatcacaggg

SEQ ID NO: 213648 - DNA, 75 bp, synthetic construct
  source 1..75: mol_type = other DNA
cattaacgctgctggttacccggtatataacggacagattgccaaattcgttactgtacatggccattctatggc

SEQ ID NO: 213649 - DNA, 75 bp, synthetic construct
  source 1..75: mol_type = other DNA
gagaacgtgaaagaagaaggtgaaagcacggggcagtttataaacgcagccatgcgcggcgaaatcaaacgccgc

SEQ ID NO: 213650 - DNA, 75 bp, synthetic construct
  source 1..75: mol_type = other DNA
gtcgtgaaaaagagaatcgagttattagcaatttcggcaaaaatgggaagcgaaatgttggacggatacttgtcg

SEQ ID NO: 213651 - DNA, 75 bp, synthetic construct
  source 1..75: mol_type = other DNA
aaagcaataagaaagtgtttcttgggcaaatcggcgtttgcacgattgatcaggtgttgatatcggtattgccag

SEQ ID NO: 213652 - DNA, 75 bp, synthetic construct
  source 1..75: mol_type = other DNA
atgaggggatctctcagcgctgcgccttcctttattaacttgtccattgacccggataaatgtaacaaagcgaca

SEQ ID NO: 213653 - DNA, 75 bp, synthetic construct
  source 1..75: mol_type = other DNA
ctgagagtatcaagagcagagagtttgtcaaaataactattgatggaaagattataaaggggaattcaaaagtcg

SEQ ID NO: 213654 - DNA, 75 bp, synthetic construct
  source 1..75: mol_type = other DNA
catgctttttctagtattgacggtactctttttgattttattaatctgaagcttagggtgactaaagaagtacaa

SEQ ID NO: 213655 - DNA, 75 bp, synthetic construct
  source 1..75: mol_type = other DNA
cactaaatctggtagtgaatattcatcctttaaagttacttatgacggttgccgcttacatgatatattgttagc

SEQ ID NO: 213656 - DNA, 75 bp, synthetic construct
  source 1..75: mol_type = other DNA
gtgaaagaagggctgattaaccctgaacgttttgtgccaatgtttggcatgtatgggctggcggaagcggttaac

SEQ ID NO: 213657 - DNA, 75 bp, synthetic construct
  source 1..75: mol_type = other DNA
tcagaactcgaaaaaaaaagaataaacatgataaacgatctgaagagtatattgttaaaatcttcagaagaagtt

SEQ ID NO: 213658 - DNA, 75 bp, synthetic construct
  source 1..75: mol_type = other DNA
gtgcttctggttatagcagagagtttataaaattcacctttgatggaaatgttatagggggaaattcaaaagtca

SEQ ID NO: 213659 - DNA, 75 bp, synthetic construct
  source 1..75: mol_type = other DNA
agaacctatttatttagctgacatgttacctgaccttacgatgttagagcgaatgatcgcagcggcaaatgcggg

SEQ ID NO: 213660 - DNA, 75 bp, synthetic construct
  source 1..75: mol_type = other DNA
accaagcggctgcgtgcaaccgcagcggtaaaaccatcccggggcggcatcgacctgcacaataccgactggatt

SEQ ID NO: 213661 - DNA, 75 bp, synthetic construct
  source 1..75: mol_type = other DNA
atgaagccccggcgcaatgaaaatgtaccagtcgaaccggagcaacctgaaaagcagcagaaaacgctcaatcgc

SEQ ID NO: 213662 - DNA, 75 bp, synthetic construct
  source 1..75: mol_type = other DNA
aatgtgtcgtaacactggaggcggcaacgctcgacaactatcatgattctcggaattggttaaacgaccatcgct

SEQ ID NO: 213663 - DNA, 75 bp, synthetic construct
  source 1..75: mol_type = other DNA
ggcagagcgtggaattatttttagtcacaagcagggcgtgatgaaaattgtcggtataaatactgacctatcagc

SEQ ID NO: 213664 - DNA, 75 bp, synthetic construct
  source 1..75: mol_type = other DNA
cgcgattccggccgccggaagaatgtcgcgagcgcccagggcatcgacttcaacaatacagactggatcaacgag

SEQ ID NO: 213665 - DNA, 75 bp, synthetic construct
  source 1..75: mol_type = other DNA
aatttccgactaaaaccgagcaagcaggaggtcccatggccgacctgtccaacgggtacacccggatcgcaaacg

SEQ ID NO: 213666 - DNA, 75 bp, synthetic construct
  source 1..75: mol_type = other DNA
tatttcccgttaccgcgaacgccatgcttatcggtttacggttgaaaattcgatatatattgatccggcttatca

SEQ ID NO: 213667 - DNA, 75 bp, synthetic construct
  source 1..75: mol_type = other DNA
ccacccaggtcgtggaacaatcactcgacgttgattttgattggttaattactcagcattgtcctgcagatttgc

SEQ ID NO: 213668 - DNA, 75 bp, synthetic construct
  source 1..75: mol_type = other DNA
aaacgtcttcaggtaaacaactgctcgatggccaggtctacgaggacctaagtcatgaacagcagtatgaggcgc

SEQ ID NO: 213669 - DNA, 75 bp, synthetic construct
  source 1..75: mol_type = other DNA
ctttgcctaacggtctgcatgctcgtccggcgtgggaacttaaagaacagtgcagccagtggcaaagtgaagtca

SEQ ID NO: 213670 - DNA, 75 bp, synthetic construct
  source 1..75: mol_type = other DNA
gaatgcaaaactgcaggagagtcagaaaggttcagttgatgcgttagctaaaaaaggcacagagctgtcggagct

SEQ ID NO: 213671 - DNA, 75 bp, synthetic construct
  source 1..75: mol_type = other DNA
atggcagctaaagacgtaaaattcggtaacgacgctcgtgtgaaaatgctgcgcggcgtaaacgtactggcagat

SEQ ID NO: 213672 - DNA, 75 bp, synthetic construct
  source 1..75: mol_type = other DNA
aaggcgaacctacataccttcgataatcgtgacgatgttgcaggattcattgaggcgtcgttagacgatggatta

SEQ ID NO: 213673 - DNA, 75 bp, synthetic construct
  source 1..75: mol_type = other DNA
atgtcattgtgcgacgtgaacatgcagaattcattgccgaaattttatatgattatctgcttaaaaaattacaat

SEQ ID NO: 213674 - DNA, 75 bp, synthetic construct
  source 1..75: mol_type = other DNA
atgaagtatacatggaagggagaaaatgaaagaacgcactggcaaaggtgtgaaaaatcaaatgccccatttata

SEQ ID NO: 213675 - DNA, 75 bp, synthetic construct
  source 1..75: mol_type = other DNA
ctctcctgatgactcctacagcggcaatgccggaatgacctatgacgggacttatggctcggtcaatggtagcta

SEQ ID NO: 213676 - DNA, 75 bp, synthetic construct
  source 1..75: mol_type = other DNA
cacagacgttctatcccccgcgtcaccagacataataaagaaaaaacaaacgacattctacccttctcaaaaatc

SEQ ID NO: 213677 - DNA, 75 bp, synthetic construct
  source 1..75: mol_type = other DNA
tctattgattactcagatatatttggaaatgaagatctcgatggttatatcaataacattataaaaatgattgat

SEQ ID NO: 213678 - DNA, 75 bp, synthetic construct
  source 1..75: mol_type = other DNA
acgacgtgaagcgcggtttgcgaaacggcgttgctccttacatacctgcggccttttgcggggatgccgggagcg

SEQ ID NO: 213679 - DNA, 75 bp, synthetic construct
  source 1..75: mol_type = other DNA
acgacgtgaagcgcggtttgcgaaacggcgttgctccttacataccagcggccttttgctgggatgccgggagcg

SEQ ID NO: 213680 - DNA, 75 bp, synthetic construct
  source 1..75: mol_type = other DNA
ttttgtgggctgttcatttaccctggacagtcagtgcggcaggttgtggctgtgtcagcccccggcgacagggcc

SEQ ID NO: 213681 - DNA, 75 bp, synthetic construct
  source 1..75: mol_type = other DNA
atgtcattgtgcgacgtgaacatgcagaattcattgccgaaattttatatgattatttgtttaaaaaattacgat

SEQ ID NO: 213682 - DNA, 75 bp, synthetic construct
  source 1..75: mol_type = other DNA
aggaagaggaaaaagaagaagaacaataacaaacacggtaaccacagaaaaataacatcagaaaaaacattccgg

SEQ ID NO: 213683 - DNA, 75 bp, synthetic construct
  source 1..75: mol_type = other DNA
acgacgtgaagcgcggtttgcgaaacggcgttgctccttacatacccgcggccttttgcagggatgcctggagcg

SEQ ID NO: 213684 - DNA, 75 bp, synthetic construct
  source 1..75: mol_type = other DNA
cccctagaatgaattacaggagtctccgtagtttcttagggttttattttgttacaattaatgagagagtttggc

SEQ ID NO: 213685 - DNA, 75 bp, synthetic construct
  source 1..75: mol_type = other DNA
cggagcaggtaaatcatctctgattgaattagccaaaagagagacaaaagataatataatgattattaacggtga

SEQ ID NO: 213686 - DNA, 75 bp, synthetic construct
  source 1..75: mol_type = other DNA
ggcacggctggggcaaggtacctttcggaaaaattgtcttatgttgtatccggcatgtcctgttacgggaacgac

SEQ ID NO: 213687 - DNA, 75 bp, synthetic construct
  source 1..75: mol_type = other DNA
gcgccccgaagctggaagttacgtcgccaacctggcagccgctaacactctttttgttatgcgtctgaacgatcg

SEQ ID NO: 213688 - DNA, 75 bp, synthetic construct
  source 1..75: mol_type = other DNA
tgaagaagctatgcgtaaaataagttggcatctgggtaacgacggcagcagtagctatattgagcttaataaccc

SEQ ID NO: 213689 - DNA, 75 bp, synthetic construct
  source 1..75: mol_type = other DNA
ggttgcggattatctataatcatgacccacttccccaggatcgcgaatctgcattctggttaaatctttatgaaa

SEQ ID NO: 213690 - DNA, 75 bp, synthetic construct
  source 1..75: mol_type = other DNA
ctgctcttagcagggagtttgtcaaaatagagataggtggaaaagttataaagggaaattcaaaagttgaaaaca

SEQ ID NO: 213691 - DNA, 75 bp, synthetic construct
  source 1..75: mol_type = other DNA
caagcacggctgttatttacatcgggcaaaagcgctatcaggagttagcaaagcaagcccgtgaaatcagctacc

SEQ ID NO: 213692 - DNA, 75 bp, synthetic construct
  source 1..75: mol_type = other DNA
cccgttcatcctgctggctgacaagaaaatctctaacatccgcgaaattctgccggttctggaagctgttgccaa

SEQ ID NO: 213693 - DNA, 75 bp, synthetic construct
  source 1..75: mol_type = other DNA
tgccggttctggaagctgttgcaaaagcaggtaaaccgctgctgatcatcgctgaagatgtagaaggcgaagcgc

SEQ ID NO: 213694 - DNA, 75 bp, synthetic construct
  source 1..75: mol_type = other DNA
agcgccatgatttcagcaccatcatgaacgcacgcattccggcactgacactgagcggcgtcagtgttcgaccgc

SEQ ID NO: 213695 - DNA, 75 bp, synthetic construct
  source 1..75: mol_type = other DNA
ggccgcactgacgcaaagggtctttttaccgcagcgccattcatgcgccagaccggcacaacacaggagagattc

SEQ ID NO: 213696 - DNA, 75 bp, synthetic construct
  source 1..75: mol_type = other DNA
cacctttctccagttcctgatggatgaatttggtgagcaagcccgtaccgagctgctccggcagctactcgcaga

SEQ ID NO: 213697 - DNA, 75 bp, synthetic construct
  source 1..75: mol_type = other DNA
gcttataaatacttcttggtttatcaaggataatggcatgctttgcgaaattgcatattgcaataaaactgatcg

SEQ ID NO: 213698 - DNA, 75 bp, synthetic construct
  source 1..75: mol_type = other DNA
aaggcttcccggaagcgattaatgccgtctacccggagatgcagatccagttgtgcatagtacacatggtacgca

SEQ ID NO: 213699 - DNA, 75 bp, synthetic construct
  source 1..75: mol_type = other DNA
cattatgctgaatattccggcgagcaccgtggcagtctgtgttgggttgttttttgtcggtctgtgcctgaatat

SEQ ID NO: 213700 - DNA, 75 bp, synthetic construct
  source 1..75: mol_type = other DNA
catatcaataactttgaagccggtgccattgcaagtatgttttttcttggctactcggtgagtcaaatcccggca

SEQ ID NO: 213701 - DNA, 75 bp, synthetic construct
  source 1..75: mol_type = other DNA
gaagtcaggcgacacacaacgctggtatgcggggtcggtattgcccgtactaagacgctggcgaagctgtgtaac

SEQ ID NO: 213702 - DNA, 75 bp, synthetic construct
  source 1..75: mol_type = other DNA
agcatcctgccagtggaggaagtgtggggagtcggccatcgtaccgagaaagcgctcgctacaatggggatcaaa

SEQ ID NO: 213703 - DNA, 75 bp, synthetic construct
  source 1..75: mol_type = other DNA
atggatgacaaacaattgcaggctctggctaacgaactggccaaaaatctcaaaacccctgaagatctcagtcag

SEQ ID NO: 213704 - DNA, 75 bp, synthetic construct
  source 1..75: mol_type = other DNA
catctttaggctatacttattctaatgaatctaatactatagattatagtttgtcaggttctgcagttgcttatc

SEQ ID NO: 213705 - DNA, 75 bp, synthetic construct
  source 1..75: mol_type = other DNA
tttacagtgacgatgatatgttaggctatcgtctcaggaattacacgccaactgtacgaggcattgctcgtagtc

SEQ ID NO: 213706 - DNA, 75 bp, synthetic construct
  source 1..75: mol_type = other DNA
tatgatgcagaaagtttttatgcatcatcgttgataggtgttaatttttcgaagtggcatttacgtacatcagcg

SEQ ID NO: 213707 - DNA, 75 bp, synthetic construct
  source 1..75: mol_type = other DNA
agtatgccctgtatcggtggtttcgttggcgcaattggtggtggatatatatctgataaattattaggtcgtcgt

SEQ ID NO: 213708 - DNA, 75 bp, synthetic construct
  source 1..75: mol_type = other DNA
tcaataactggtttccgccaaaggagaaggccacggccacgggcgtctacatagctgccaccatgtttgcgccca

SEQ ID NO: 213709 - DNA, 75 bp, synthetic construct
  source 1..75: mol_type = other DNA
acatttgcagcataaaatttcgtatagaagatcaaaaatcagtgggcccaatcagagaaactactgaggtttgca

SEQ ID NO: 213710 - DNA, 75 bp, synthetic construct
  source 1..75: mol_type = other DNA
tggcggatatgcagcaggctatcactggatttgctgcgcgcgcagctgaaaaactgcgtggtgagcgacaatact

SEQ ID NO: 213711 - DNA, 75 bp, synthetic construct
  source 1..75: mol_type = other DNA
gcaaataacccaactccttattacgtctcatttaatcagatttcgctggatgccaacggtagaaaatacagcgtc

SEQ ID NO: 213712 - DNA, 75 bp, synthetic construct
  source 1..75: mol_type = other DNA
aactggcattccgcacacgcatcaaacttttttatcgcccgggcggcttgcaaggtgaatcctttgaagcaccag

SEQ ID NO: 213713 - DNA, 75 bp, synthetic construct
  source 1..75: mol_type = other DNA
ctgcgcgtttgttgccggtatgcgtaaagaaaatcgctggggcattcgcggtgcactgttttttggtagcgggac

SEQ ID NO: 213714 - DNA, 75 bp, synthetic construct
  source 1..75: mol_type = other DNA
atgacagacaaacaacgcaccaaccttttaacaataccaccgggagccgttatatatgaccgactggtatacgaa

SEQ ID NO: 213715 - DNA, 75 bp, synthetic construct
  source 1..75: mol_type = other DNA
gcgggaaagttgtgcttcaggccactaacccaacgccatttcacgtctctttcagcagcattagcctgatttcgg

SEQ ID NO: 213716 - DNA, 75 bp, synthetic construct
  source 1..75: mol_type = other DNA
acgtcaaactggaaagcggcggcaaaagctacaaagtcgattccagcatgatcgcgccgttcagtcaggcaagct

SEQ ID NO: 213717 - DNA, 75 bp, synthetic construct
  source 1..75: mol_type = other DNA
cgcgtttctaatccaacaccttatcacgtctcttttagtagtggcgatttggaagccaatggcaaacgctatccg

SEQ ID NO: 213718 - DNA, 75 bp, synthetic construct
  source 1..75: mol_type = other DNA
aacgtgattatcctctatcctttaaaacagctgttgttgagcaggttgaaaaaggcgagatgacctataaaaagg

SEQ ID NO: 213719 - DNA, 75 bp, synthetic construct
  source 1..75: mol_type = other DNA
gcatgtacgccagctgtgagcaggcttttcggcccgatctggcaaaccgcgcggtggccgttttatccaacaacg

SEQ ID NO: 213720 - DNA, 75 bp, synthetic construct
  source 1..75: mol_type = other DNA
tcagttcattgggcatgctgttcggtgccatcgctttaatgatggggattatccacttttcattcggcccttttt

SEQ ID NO: 213721 - DNA, 75 bp, synthetic construct
  source 1..75: mol_type = other DNA
gttgcgccttttggtcaggttagttttgccgtgacagatatagcgagcagtgtgtcttcaggaaaagttatttac

SEQ ID NO: 213722 - DNA, 75 bp, synthetic construct
  source 1..75: mol_type = other DNA
gcaaacgcggtcaaacaatcaagctgatgtataccggcagttctgctttacccaaagatcgggaaagtgtgttct

SEQ ID NO: 213723 - DNA, 75 bp, synthetic construct
  source 1..75: mol_type = other DNA
tcaggcggcctccaccaaaatactttttcctattgcattaagtatgggtatcgcccctgccactctggtcgcctg

SEQ ID NO: 213724 - DNA, 75 bp, synthetic construct
  source 1..75: mol_type = other DNA
ctgcttttgttgcggtcatacagcaaaacccgaagggctatctctgcctgcatacagacaaatttatcgctgaac

SEQ ID NO: 213725 - DNA, 75 bp, synthetic construct
  source 1..75: mol_type = other DNA
ctggaaaaaatctcgataaaatacacccgggagatattttatattatcaaaaagcatccatgaaagtaataatta

SEQ ID NO: 213726 - DNA, 75 bp, synthetic construct
  source 1..75: mol_type = other DNA
attaagatgagaaaatatgaaccttatcttctcaatgataattccatactttccagaattgcccttcttgaactt

SEQ ID NO: 213727 - DNA, 75 bp, synthetic construct
  source 1..75: mol_type = other DNA
ggcacgtttgacgttacggtgcttgagtacgccacgccggtgattgaagttcacgcctccgctggcgacaacttc

SEQ ID NO: 213728 - DNA, 75 bp, synthetic construct
  source 1..75: mol_type = other DNA
aaactttctgaagagaccttcaatgtcacctcaaccctggccgaactctctcgtcagacccggcaaaactttgct

SEQ ID NO: 213729 - DNA, 75 bp, synthetic construct
  source 1..75: mol_type = other DNA
tcgcaaaacagacgcttaaaaagagtaaagatccggcagagcgcgaaaaggcgcagcagaaatatgatgcattgc

SEQ ID NO: 213730 - DNA, 75 bp, synthetic construct
  source 1..75: mol_type = other DNA
gaggacagtattctgaactgcagaatcaccataaaacagaggcattatctcagaataataaatataatgaagaaa

SEQ ID NO: 213731 - DNA, 75 bp, synthetic construct
  source 1..75: mol_type = other DNA
aaaagctactgaagccatgacggtagagtctgtgatccgtgcctggtatgaagcatattgtgtaaaaataaaaaa

SEQ ID NO: 213732 - DNA, 75 bp, synthetic construct
  source 1..75: mol_type = other DNA
attccagtcaggtgtaacacgggaaacgcgggattagttaatgtcaacctgagtctgacggcaaccacagacccc

SEQ ID NO: 213733 - DNA, 75 bp, synthetic construct
  source 1..75: mol_type = other DNA
aggcgaagggaatcaggcagtactggtcagcgggaaagatgccacgggcaatacggtcaccggcgcgcagctgtt

SEQ ID NO: 213734 - DNA, 75 bp, synthetic construct
  source 1..75: mol_type = other DNA
cagcgcctgctggaagtcattgaacagatcggcagttattcaaaacagattcgttcagcaattgaagacggtgta

SEQ ID NO: 213735 - DNA, 75 bp, synthetic construct
  source 1..75: mol_type = other DNA
tcgaaacggcgcgggaagtccagagaccgagcattgatgctcaccttctgtggcttgaagcagagctgaagcgtc

SEQ ID NO: 213736 - DNA, 75 bp, synthetic construct
  source 1..75: mol_type = other DNA
ccctgctgatggattacagcctgaccggaaacagaaataattctgatgattattcatcgcggagtctgtacgtca

SEQ ID NO: 213737 - DNA, 75 bp, synthetic construct
  source 1..75: mol_type = other DNA
cagggaaggatggcgcagattcacaggcgaacagagtgcgtatcagcgagaaaacagaagtcacctccagcacag

SEQ ID NO: 213738 - DNA, 75 bp, synthetic construct
  source 1..75: mol_type = other DNA
gatggcgctgtgattctgaatatcaggacggctccggtatcactgacgaacggcaatttaggggcagcctgtgtc

SEQ ID NO: 213739 - DNA, 75 bp, synthetic construct
  source 1..75: mol_type = other DNA
tgccacattgagtggcagtgtgcctgagacacaaatgcgttaccgcgtgggaggaaactggggtaatggtggtgc

SEQ ID NO: 213740 - DNA, 75 bp, synthetic construct
  source 1..75: mol_type = other DNA
aagtatgacgatcttcataccggtcagtcatatggactgaaatactccaaaagccaggtggatacgggcacgact

SEQ ID NO: 213741 - DNA, 75 bp, synthetic construct
  source 1..75: mol_type = other DNA
acggcatcacagtgtttggtgaaacactgcaggcaggaaaatatcagtcggcaggtattggcagcaccctttcgc

SEQ ID NO: 213742 - DNA, 75 bp, synthetic construct
  source 1..75: mol_type = other DNA
tgggggccggagttggtcttgttcaggctgctatgtatcaggccagtaagcaatcaggagggaaaaactcagcca

SEQ ID NO: 213743 - DNA, 75 bp, synthetic construct
  source 1..75: mol_type = other DNA
gaggcggggtggacctggagcgagcaggcgcgcatcggtcagcagagtctgctgcagtacaccgggaagaacggg

SEQ ID NO: 213744 - DNA, 75 bp, synthetic construct
  source 1..75: mol_type = other DNA
aagggaatgttatcaccgatatctctttgggagtcggggattttgaagattgttgtagcgtagcagaggagaagt

SEQ ID NO: 213745 - DNA, 75 bp, synthetic construct
  source 1..75: mol_type = other DNA
ctccggtatcactgacgaacggcaatttaggggcagcctgtgtcaccgctgtcacttacggcttccttcaggttc

SEQ ID NO: 213746 - DNA, 75 bp, synthetic construct
  source 1..75: mol_type = other DNA
cgttatccggtgggcaacgcgccagggtgagcgttctgcggtctctgatcgccgaacctgaggcattgctgttag

SEQ ID NO: 213747 - DNA, 75 bp, synthetic construct
  source 1..75: mol_type = other DNA
ggatttttatagctcaggtaatatcagtttatttatcatttgatttttattcaaacttaggagatattggttttg

SEQ ID NO: 213748 - DNA, 75 bp, synthetic construct
  source 1..75: mol_type = other DNA
agcaacttataatcaatataaatatagtgattatatacaatcaatgaaaaatgacgtaacggaatataaaggtaa

SEQ ID NO: 213749 - DNA, 75 bp, synthetic construct
  source 1..75: mol_type = other DNA
gacaggctgttttcccacgattatctaaactagagggctatgaatatagttctaaacttaaaatttatgcaataa

SEQ ID NO: 213750 - DNA, 75 bp, synthetic construct
  source 1..75: mol_type = other DNA
aaatgaaagcgatcgttatagcaacaacaatcgctaaactgacaggtgtgatacttacttttattttagttaagt

SEQ ID NO: 213751 - DNA, 75 bp, synthetic construct
  source 1..75: mol_type = other DNA
gcaaaacatgacataacggcgcaccaaagcgcgtatttggtgaatgccaagatcagcgaactggtgcagatcttc

SEQ ID NO: 213752 - DNA, 75 bp, synthetic construct
  source 1..75: mol_type = other DNA
ccatctttatcgaggcaaaataccccaggttaaacatggcgatatttttggtcatgaatttatggggggaagtcg

SEQ ID NO: 213753 - DNA, 75 bp, synthetic construct
  source 1..75: mol_type = other DNA
ttgccgcgaagccatgcttcagtccggaactttcgggaaataagattcgtcaaccaataatttcggaaatcccgg

SEQ ID NO: 213754 - DNA, 75 bp, synthetic construct
  source 1..75: mol_type = other DNA
ggataaacctaatgcagtacgcgccggatccggtgttacgtcgtgttccccgcgccagcggggataaaccgcatc

SEQ ID NO: 213755 - DNA, 75 bp, synthetic construct
  source 1..75: mol_type = other DNA
atggtttatgtttttaacaccaaacatacaacagctttatgcttcgtaacctgtatggcttttagttcatcgtct

SEQ ID NO: 213756 - DNA, 75 bp, synthetic construct
  source 1..75: mol_type = other DNA
ccgaatatgatgtcaaagattgtgacgtcattaccggcagaaacagtgacgaatgttcaggtcagtacacttccg

SEQ ID NO: 213757 - DNA, 75 bp, synthetic construct
  source 1..75: mol_type = other DNA
agtttactattatggggcttggggcatggtaatatcaattttatttactgaagtcttaattgtattatttatgct

SEQ ID NO: 213758 - DNA, 75 bp, synthetic construct
  source 1..75: mol_type = other DNA
atgtgttccccgcgccagcggggataaaccgtacgcttacacaacgggcgaatattttaacgggtgttccccgcg

SEQ ID NO: 213759 - DNA, 75 bp, synthetic construct
  source 1..75: mol_type = other DNA
cgccagcggggataaaccgcctggcgctgaccgtgaatctgatgatgaattgtgttccccgcgccagcggggata

SEQ ID NO: 213760 - DNA, 75 bp, synthetic construct
  source 1..75: mol_type = other DNA
cgctattaccagactgccctgagatattccgcagcagcaaagaacaggttctcgctgacctgtctgagcagcgct

SEQ ID NO: 213761 - DNA, 75 bp, synthetic construct
  source 1..75: mol_type = other DNA
tgctggcggagatccagcaagaccgcctgctgatgcagtacgacaccatcattattgacgaagcgcacgaacgca

SEQ ID NO: 213762 - DNA, 75 bp, synthetic construct
  source 1..75: mol_type = other DNA
aggacattctcgaagcgattcgtgatcaccaggtggtgatcgtctccggggaaaccggttccggtaaaacgactc

SEQ ID NO: 213763 - DNA, 75 bp, synthetic construct
  source 1..75: mol_type = other DNA
ccaaagtgcagcgtttgccgattgaacccatttcgcaggcgtctgccaatcagcgtaaaggccgctgtgggcgtg

SEQ ID NO: 213764 - DNA, 75 bp, synthetic construct
  source 1..75: mol_type = other DNA
catttgatattgatcgtaacacccggcgactgcgtgaaatatttgaggatgcaattcaggcaggaatacaggcag

SEQ ID NO: 213765 - DNA, 75 bp, synthetic construct
  source 1..75: mol_type = other DNA
caacgaaagataaagggtttgtttttacgcatgttatcgttttttcggcattgaatatcctaaacttggttttag

SEQ ID NO: 213766 - DNA, 75 bp, synthetic construct
  source 1..75: mol_type = other DNA
aatattttccttttggtgggcttcaacgtgattttatgcgtattgcatcaaccgttgccgcacgaggccaccatg

SEQ ID NO: 213767 - DNA, 75 bp, synthetic construct
  source 1..75: mol_type = other DNA
acaggaaaaggttcaggtgattgtccgcaacctggccagacaaaattgttccgtagacagtaagaacacttgtag

SEQ ID NO: 213768 - DNA, 75 bp, synthetic construct
  source 1..75: mol_type = other DNA
ttcttacttcaatagggcgctacgtaggatgcaagaaattagctactgtactgcatgcatggctcagtattattg

SEQ ID NO: 213769 - DNA, 75 bp, synthetic construct
  source 1..75: mol_type = other DNA
tattatttttaggctttaataaactagctataggctctgaggcctttggtccatacgagagtcgacttatattcg

SEQ ID NO: 213770 - DNA, 75 bp, synthetic construct
  source 1..75: mol_type = other DNA
tgttcaaaattcttgctgatgaaacccgtctgggcatcgttttactgctcagcgagctgggagagttatgcgtct

SEQ ID NO: 213771 - DNA, 75 bp, synthetic construct
  source 1..75: mol_type = other DNA
gtgggttcattaccgcttatcgccgcatattccttcctgggctgcaaaaattattgagcagacctggcgatgtga

SEQ ID NO: 213772 - DNA, 75 bp, synthetic construct
  source 1..75: mol_type = other DNA
acaggaaaatgttcaggcaattgtccgtaacctggcccgacaaaattgttccgcagacagtaagaccatttgcag

SEQ ID NO: 213773 - DNA, 75 bp, synthetic construct
  source 1..75: mol_type = other DNA
aacttgtcgatatcagtgatatttatatcgcaaatccacggaaaaggaataaattcattcataatgaaattaaag

SEQ ID NO: 213774 - DNA, 75 bp, synthetic construct
  source 1..75: mol_type = other DNA
cacaccaacacttggtggcatgggggcaattcctcagatttcatttagcgatgatgacggacagacactgctgct

SEQ ID NO: 213775 - DNA, 75 bp, synthetic construct
  source 1..75: mol_type = other DNA
tagctactttggcaatccaaccaacaaatacgctggctatcactgacgatacaacaatggacggccaaatgaccg

SEQ ID NO: 213776 - DNA, 75 bp, synthetic construct
  source 1..75: mol_type = other DNA
atctggctcataatcgcgagccggatacatttgaaagccctgatgactgtgccgaatgccgcagaagactgaata

SEQ ID NO: 213777 - DNA, 75 bp, synthetic construct
  source 1..75: mol_type = other DNA
atgatcgtggcgttttgtttatataaatattttccatttggtgggcttcaacgtgactttatgcgcattgcatca

SEQ ID NO: 213778 - DNA, 75 bp, synthetic construct
  source 1..75: mol_type = other DNA
atgccgccgggtaattcgcaaccgcgcggcgattttctctatcacagcatttgtaactgggttcaggataattat

SEQ ID NO: 213779 - DNA, 75 bp, synthetic construct
  source 1..75: mol_type = other DNA
acatccagagcattcttgggatccagtcgatcgataccgggatcctcggtgcggtgatcgccggtattatcgtct

SEQ ID NO: 213780 - DNA, 75 bp, synthetic construct
  source 1..75: mol_type = other DNA
tgaaactgatttactcatcaacctgtcaacgcttacccagcgcggtctggcaaagatgattggctgtcatgaatc

SEQ ID NO: 213781 - DNA, 75 bp, synthetic construct
  source 1..75: mol_type = other DNA
accagcggctacgtgacgtcaaccagtaccgaggaaatgttacaccacatgaacgagatacttgccgatatgtag

SEQ ID NO: 213782 - DNA, 75 bp, synthetic construct
  source 1..75: mol_type = other DNA
tcgaccaggaacaccaggcgcgtattactcgggcgctggagcggcagagtcagaatccaggttgtagcattgatg

SEQ ID NO: 213783 - DNA, 75 bp, synthetic construct
  source 1..75: mol_type = other DNA
tcacgacaatatcagcgttcagttcagcggtgacgaagggctggaaaccacattaaacgtcacggatatagaaga

SEQ ID NO: 213784 - DNA, 75 bp, synthetic construct
  source 1..75: mol_type = other DNA
ggatgctgcatgagcgtttccataatatccgcctgccggatgcctggcattcttcggcggtacgcgcttcgtacc

SEQ ID NO: 213785 - DNA, 75 bp, synthetic construct
  source 1..75: mol_type = other DNA
ttaagatgagaaaatatgaaccttatcttctcaatgataattccatactttccagaattgcccttcttgaacttg

SEQ ID NO: 213786 - DNA, 75 bp, synthetic construct
  source 1..75: mol_type = other DNA
aaccgaattgcgcggtaaccggaaaattgccgccccttatcgcggcgcggtcgtgctgattaattttgataccga

SEQ ID NO: 213787 - DNA, 75 bp, synthetic construct
  source 1..75: mol_type = other DNA
cgtataaaactgcctgcctcattgcacaacatggagattcttatcttcatatagccaacctgtatttgcgcaagg

SEQ ID NO: 213788 - DNA, 75 bp, synthetic construct
  source 1..75: mol_type = other DNA
ggtcggctccaccatcgagacgatcaaagaagcgaaagcgatcgccgctgccgaaggacgcgagttgatcattct

SEQ ID NO: 213789 - DNA, 75 bp, synthetic construct
  source 1..75: mol_type = other DNA
gtactgcgagttccccgcgccagcggggataaaccgtttgttttgatgatttatcagtatatgaattggagttcc

SEQ ID NO: 213790 - DNA, 75 bp, synthetic construct
  source 1..75: mol_type = other DNA
agatgatattactgaatcacctgtcagttcattacctctcgataaggcaacagtaaacgtaaatgttcgtgttgt

SEQ ID NO: 213791 - DNA, 75 bp, synthetic construct
  source 1..75: mol_type = other DNA
taacatccagtgaatcccggtttgtggctatccccggatacagtggcggtggtgtacattttgatgccaccgcaa

SEQ ID NO: 213792 - DNA, 75 bp, synthetic construct
  source 1..75: mol_type = other DNA
tattgtaaaaacttatgggcactccatcgaaaacacatttattgacaaaacaggcatatataaggcaataaaaac

SEQ ID NO: 213793 - DNA, 75 bp, synthetic construct
  source 1..75: mol_type = other DNA
gcactccccgtcttccggaaagatttccagaaaaatgccccccaaaagttttgcattcatggtttgataatggcg

SEQ ID NO: 213794 - DNA, 75 bp, synthetic construct
  source 1..75: mol_type = other DNA
atgctgatgctgcaccggagcgctcgcgtcagtgacgttgccagaacgctctgctgcgcccgttcctccgtcagg

SEQ ID NO: 213795 - DNA, 75 bp, synthetic construct
  source 1..75: mol_type = other DNA
ctgggagagaattgataatatagaaagacgtatcgaagaactagagatgacattaaaaaagaataacttaaataa

SEQ ID NO: 213796 - DNA, 75 bp, synthetic construct
  source 1..75: mol_type = other DNA
attttaaacttagtttatacaattatcttgaaaattatatcgtaggtgagcatattagagaaagtatagataatg

SEQ ID NO: 213797 - DNA, 75 bp, synthetic construct
  source 1..75: mol_type = other DNA
cgtaactagtattcttgcggctatcttcagaaaaaaagtaaagatttttttgcatggtgaattaaacgggctaag

SEQ ID NO: 213798 - DNA, 75 bp, synthetic construct
  source 1..75: mol_type = other DNA
aattccgcctataggacgagatgttatgaaggcaaatccaggtttaaccttaactaccccggcttattgtttcac

SEQ ID NO: 213799 - DNA, 75 bp, synthetic construct
  source 1..75: mol_type = other DNA
aaatacagaaacaaattcgagacatgaacgatatgctctcccggattaaccactatctgcaacataaaaaaaagg

SEQ ID NO: 213800 - DNA, 75 bp, synthetic construct
  source 1..75: mol_type = other DNA
gatttaccataacagaaatagttactcttactcaggatgaaaactcctgccacataattgaacggcgacgtcttg

SEQ ID NO: 213801 - DNA, 75 bp, synthetic construct
  source 1..75: mol_type = other DNA
aaaaaatcgggaaatcccattggtgatggctctgccataatgcctctgaaaaccgtgactgacggcctttactgg

SEQ ID NO: 213802 - DNA, 75 bp, synthetic construct
  source 1..75: mol_type = other DNA
ttgttcagcaaacagccacaaagattttgttgcctaatccagatgctgaatttgatggttataaaaaaattggtc

SEQ ID NO: 213803 - DNA, 75 bp, synthetic construct
  source 1..75: mol_type = other DNA
ggttctgaaagccgtcgccagagccaataatcacccttatcagtccgtatttgcagactttatcactggtcattg

SEQ ID NO: 213804 - DNA, 75 bp, synthetic construct
  source 1..75: mol_type = other DNA
ccttgctccgttccttagcggtgctggagaagcaagggttatggcatgacgatgtgcgcccgtggaacgtgatgg

SEQ ID NO: 213805 - DNA, 75 bp, synthetic construct
  source 1..75: mol_type = other DNA
cagcccgagttgccccctgaaaccgctgagctactgcagcgactggaagccgctaaccgggagatccaccattta

SEQ ID NO: 213806 - DNA, 75 bp, synthetic construct
  source 1..75: mol_type = other DNA
ctgtatgcggtctggcaggagccggttgaacgctggaactttgccctgctgttggcgctgttcgagaagaaagcg

SEQ ID NO: 213807 - DNA, 75 bp, synthetic construct
  source 1..75: mol_type = other DNA
atgctggcttttggcataacagccggatttatgatcattgagacgatcggcggggttatttccgggtcactggca

SEQ ID NO: 213808 - DNA, 75 bp, synthetic construct
  source 1..75: mol_type = other DNA
ccgcttggaaaacggaatctatggtcactcccgtttttgcaacaccgattttgacgataagtgggcttgcttgaa

SEQ ID NO: 213809 - DNA, 75 bp, synthetic construct
  source 1..75: mol_type = other DNA
agaccccggctcagacaactgccagcgttaccctccctgttgacatgcgggtaaaaagccgtattaaagtcaccc

SEQ ID NO: 213810 - DNA, 75 bp, synthetic construct
  source 1..75: mol_type = other DNA
aggttttaaagactacaatatttatacgcttgggatcagtgacggtggtatttccgatatttgttcaaactatct

SEQ ID NO: 213811 - DNA, 75 bp, synthetic construct
  source 1..75: mol_type = other DNA
agctgaactgataatattcctttgttctcttcttaaatatttatctttcttgataattgacgataaatacagata

SEQ ID NO: 213812 - DNA, 75 bp, synthetic construct
  source 1..75: mol_type = other DNA
caaacctccccgctatgtcgtgaagcttcacgaagatgatttttttgatgcgtattaccgtgaaggagatcggtg

SEQ ID NO: 213813 - DNA, 75 bp, synthetic construct
  source 1..75: mol_type = other DNA
ggtttgctggatgcgcgggaagttcaattaccgactcgctacgaccttcgatatggacacccgataaatgcagat

SEQ ID NO: 213814 - DNA, 75 bp, synthetic construct
  source 1..75: mol_type = other DNA
ctgctgatttaaccgcagagaagttcgccacagcgaaccgaaatcactggtacgtggagaataagctgcactggc

SEQ ID NO: 213815 - DNA, 75 bp, synthetic construct
  source 1..75: mol_type = other DNA
ctgccttcgatgctatgggtaaatcgtcaggcatcagatcgtttgttgaacagaacaattcgacaataatgattg

SEQ ID NO: 213816 - DNA, 75 bp, synthetic construct
  source 1..75: mol_type = other DNA
tctcttcttaaatatttatctttcttgataattgacgataaatacagatacaaatttagcgaaaagttttccctc

SEQ ID NO: 213817 - DNA, 75 bp, synthetic construct
  source 1..75: mol_type = other DNA
caacggcgaatatgcctgggcggtggattccccccggaataccttcaatccactgcatcataaaaaggtgggatt

SEQ ID NO: 213818 - DNA, 75 bp, synthetic construct
  source 1..75: mol_type = other DNA
aggttttaaagactacaatatttacacgctcgggatcagtgaaggctgtatttctgatatttgcacaaattatct

SEQ ID NO: 213819 - DNA, 75 bp, synthetic construct
  source 1..75: mol_type = other DNA
tatcgtaaaagatgtaccccgaggctcgcagattggtcagtggaattttctgttatccctgccatttgagtttat

SEQ ID NO: 213820 - DNA, 75 bp, synthetic construct
  source 1..75: mol_type = other DNA
aaaatgaattcataaaatctcaacacacagacaggaatatatataatggattatgtttttttatgtgtattgatt

SEQ ID NO: 213821 - DNA, 75 bp, synthetic construct
  source 1..75: mol_type = other DNA
caagatggaacttataagttttttaaaacagaaatataaaggttattataatttagataatatatcactatattc

SEQ ID NO: 213822 - DNA, 75 bp, synthetic construct
  source 1..75: mol_type = other DNA
atggtcgggctgggttatgacgtcaaagtcggaaataacgttaccttcaccgttggtaaaacgaaaaaggatgat

SEQ ID NO: 213823 - DNA, 75 bp, synthetic construct
  source 1..75: mol_type = other DNA
accactaggattatttgagttacagcgctggctcggacattcctctcccagttcgacacagcattatatcgatat

SEQ ID NO: 213824 - DNA, 75 bp, synthetic construct
  source 1..75: mol_type = other DNA
ctggcccttcccgggatggtatttatattaactacgggcttaaaactctcgatttaatagccaaaggtaataaag

SEQ ID NO: 213825 - DNA, 75 bp, synthetic construct
  source 1..75: mol_type = other DNA
ttggggtaatgttggtattcaagctggcgataaagggtacagcaatacagttggtatgctgggcataaaatacag

SEQ ID NO: 213826 - DNA, 75 bp, synthetic construct
  source 1..75: mol_type = other DNA
gagcttgtgccaggtcaccggcgcggaagcaaaaccgcagcagacaaaaccacctgagcactatacggaagggac

SEQ ID NO: 213827 - DNA, 75 bp, synthetic construct
  source 1..75: mol_type = other DNA
cagaatggggtcatttgatagcgtttccgcctccttcgctcagccccatgataataacaacccctgccccggcgt

SEQ ID NO: 213828 - DNA, 75 bp, synthetic construct
  source 1..75: mol_type = other DNA
gcgccgctttattccggccaccccgctgccagcagtaaagaatatggccgggtacttgggctggtggcgcgtgat

SEQ ID NO: 213829 - DNA, 75 bp, synthetic construct
  source 1..75: mol_type = other DNA
gtattctaattatacgagtgcaatgacgaaaaatggcagcggtctatatactgtggcattttatgtaattattgc

SEQ ID NO: 213830 - DNA, 75 bp, synthetic construct
  source 1..75: mol_type = other DNA
ctgttccacgtatgcaaaaggttattgatggagaacaaggcggcatttcaaaagatgttggctggcagtgcggcg

SEQ ID NO: 213831 - DNA, 75 bp, synthetic construct
  source 1..75: mol_type = other DNA
cgcagtaacgatatccttcgccaggcttccgcttattttgcgaaggcggagttcgaccgcctctggaaaaaatga

SEQ ID NO: 213832 - DNA, 75 bp, synthetic construct
  source 1..75: mol_type = other DNA
ccggagatgacggaaagggacgggaatttgaaccttttgttgaaataaactggctgcataatacgaaggatttca

SEQ ID NO: 213833 - DNA, 75 bp, synthetic construct
  source 1..75: mol_type = other DNA
gccttatgcgtatgcagaggaaaaggcccctcaacttcaggcgctgctgcgatccttacttgagaatatgctcga

SEQ ID NO: 213834 - DNA, 75 bp, synthetic construct
  source 1..75: mol_type = other DNA
tcacatgcgtagaccctaagaaaatgagatatagggatgcaattaacaatgttgcatttgatgccattaccatac

SEQ ID NO: 213835 - DNA, 75 bp, synthetic construct
  source 1..75: mol_type = other DNA
ccagaatggtcatgagcgactggatccttataatggaataatattagcagctcatattgatgctctttttgacca

SEQ ID NO: 213836 - DNA, 75 bp, synthetic construct
  source 1..75: mol_type = other DNA
tactacagcgtgcgtcgtagcgtcgagatttgtcagttcacacaacagacacgctacctgtgcgcgatcccggcg

SEQ ID NO: 213837 - DNA, 75 bp, synthetic construct
  source 1..75: mol_type = other DNA
ggcagaatgcggaagctgaaaggtaagaacggagagttctggagttgccagcgttacccggagtgtaaaggcgtg

SEQ ID NO: 213838 - DNA, 75 bp, synthetic construct
  source 1..75: mol_type = other DNA
gtgggaaacgcattgtggcatatgtttataaatcatcacggagtacggtttttgaaaatcctgacattgtaaaaa

SEQ ID NO: 213839 - DNA, 75 bp, synthetic construct
  source 1..75: mol_type = other DNA
ggaagagggcgagtttgatctggccattggcttaagcgtgtttcaccatattgttcaccttcatggtatcgatga

SEQ ID NO: 213840 - DNA, 75 bp, synthetic construct
  source 1..75: mol_type = other DNA
gaggggcgacggagcagtggattatcgctcaggagacggtgctgctggagctccagtctcgagtgcgtaatgaaa

SEQ ID NO: 213841 - DNA, 75 bp, synthetic construct
  source 1..75: mol_type = other DNA
ctggggcgcccgcttaacgttctcgatctgggctgcgcgcagggcttttttagcctgagtctggcaagcaaaggc

SEQ ID NO: 213842 - DNA, 75 bp, synthetic construct
  source 1..75: mol_type = other DNA
cggggatttttgttaatcgcgtcattcaggggcaatttgaaaaacgcattgaacaacgcacccttagccgcaaag

SEQ ID NO: 213843 - DNA, 75 bp, synthetic construct
  source 1..75: mol_type = other DNA
gcaggaggttttggcctgtgcggcatcccggagaatctgattgctgaagttcgccaccgtggagtaaccggatta

SEQ ID NO: 213844 - DNA, 75 bp, synthetic construct
  source 1..75: mol_type = other DNA
agcggttaatgaagtttattgtgaatataatggcgtgaccgctgataaaaatatccgatttggagggcagacgaa

SEQ ID NO: 213845 - DNA, 75 bp, synthetic construct
  source 1..75: mol_type = other DNA
ttagcagttccttgcgtgcgcaggacgttgccgggcgggtcggtggcgaggagttttgtgtgattctgccaggcg

SEQ ID NO: 213846 - DNA, 75 bp, synthetic construct
  source 1..75: mol_type = other DNA
agtatgacgaaagtgaagaatccttcctggtgacgcttgccacccagatggcagctattctttctcagtcgcagt

SEQ ID NO: 213847 - DNA, 75 bp, synthetic construct
  source 1..75: mol_type = other DNA
tacctgatggcgacccggggactgaaaaaaccacgcggtcgcactgtaacgctcgcgtttgatgaagggatcgtc

SEQ ID NO: 213848 - DNA, 75 bp, synthetic construct
  source 1..75: mol_type = other DNA
atggttaaggtgctggggcaattcccgcgagaaattaacggttacttgcttggtcgtgacgaatgtgatcgcgcc

SEQ ID NO: 213849 - DNA, 75 bp, synthetic construct
  source 1..75: mol_type = other DNA
atgcaagtacagtgcctttcggcccctttctgagtctgggaggaatggtgacgttatatacaggcattgatgtaa

SEQ ID NO: 213850 - DNA, 75 bp, synthetic construct
  source 1..75: mol_type = other DNA
gctcgtggcgtcattctgtgctctgatatatgccatcacgacagggaaatatgcaagtacagtgcctttcggccc

SEQ ID NO: 213851 - DNA, 75 bp, synthetic construct
  source 1..75: mol_type = other DNA
caatcaggtactaacgtgccctatgtgcaagttagtgcaattgactacagcaaaaatttctccggcgagtacaaa

SEQ ID NO: 213852 - DNA, 75 bp, synthetic construct
  source 1..75: mol_type = other DNA
gaaacagggtaagcatatccgggcaacacaactgggggcagagttgattgcaggattacctgaggtgctgaccag

SEQ ID NO: 213853 - DNA, 60 bp, synthetic construct
  source 1..60: mol_type = other DNA
tgttatatattaccctttattttgggggcgtttccacgccccatttttaataacttttag

SEQ ID NO: 213854 - DNA, 75 bp, synthetic construct
  source 1..75: mol_type = other DNA
ccgctggaacctgttaacgcgttttatattagtggttgcgagaaactggtttaccagcaacatggtggtgatggg

SEQ ID NO: 213855 - DNA, 75 bp, synthetic construct
  source 1..75: mol_type = other DNA
aaagagaggcgtgttgaaatgatgcaggcaattaacagtagcaatggagacaaactgaaatacgccctgccggaa

SEQ ID NO: 213856 - DNA, 75 bp, synthetic construct
  source 1..75: mol_type = other DNA
gaacaggcgaaggcgcggcaccgtagcctggcggaggtgttgcaggaggacacgggtgtgacgctaccggcggag

SEQ ID NO: 213857 - DNA, 75 bp, synthetic construct
  source 1..75: mol_type = other DNA
gctggttgaattattgacggcactatcatttttactggcaggcattgtctggccggacagcgggtggggtgtggc

SEQ ID NO: 213858 - DNA, 75 bp, synthetic construct
  source 1..75: mol_type = other DNA
acgcgagttattacggcaaataaatacggccagccagtgctggctgatcctcctcaggccacggaagaggagtta

SEQ ID NO: 213859 - DNA, 75 bp, synthetic construct
  source 1..75: mol_type = other DNA
gggcctacggagcaacagcgcgactggatttagcgccactggaagtaagtagtaaaggtgttaaaagtctgggag

SEQ ID NO: 213860 - DNA, 75 bp, synthetic construct
  source 1..75: mol_type = other DNA
tgatgatcaggagaaatttagcaaaagaccgtttcacggtacccaaaacacaggcgggaaccaatcgggtcattc

SEQ ID NO: 213861 - DNA, 75 bp, synthetic construct
  source 1..75: mol_type = other DNA
agccacaacagccacaacagccacaacagccacaacagccacaacagccacaacagccacaacagccacaacagc

SEQ ID NO: 213862 - DNA, 75 bp, synthetic construct
  source 1..75: mol_type = other DNA
aggcatctgcacgtgagcggctgaaaaagcggctcagacaacagcgtcgcagggcggagcttcaggcgattcttg

SEQ ID NO: 213863 - DNA, 75 bp, synthetic construct
  source 1..75: mol_type = other DNA
gcagcgcttatagcggaaaaaaaagaggctgccagggagttgtcggtttatggaaaaatcagaccactggctgag

SEQ ID NO: 213864 - DNA, 75 bp, synthetic construct
  source 1..75: mol_type = other DNA
ataatataattggctctcagaaagaaggaaccgatcctgctaaagctcttatcatgtcagatgataatgactggg

SEQ ID NO: 213865 - DNA, 75 bp, synthetic construct
  source 1..75: mol_type = other DNA
caggtggattgttaaacaaggcaattgttgacctcggggatggggatgatgtcgtcacattgagtggaatatcag

SEQ ID NO: 213866 - DNA, 75 bp, synthetic construct
  source 1..75: mol_type = other DNA
gccacaacagccacaacagccacaacagccacaacagccacaacagccacaacagccacaacagccagtgtcttc

SEQ ID NO: 213867 - DNA, 75 bp, synthetic construct
  source 1..75: mol_type = other DNA
ttactaagcttcgagtgtataccgcttggctcctttattaactgggaaaatctcttcgccgatgaatttaaaaat

SEQ ID NO: 213868 - DNA, 75 bp, synthetic construct
  source 1..75: mol_type = other DNA
gctatttttcttgaatgtgactctgtcgatgaagcgatgaacgttatggccgaattcccgttggcaaaagcaggc

SEQ ID NO: 213869 - DNA, 75 bp, synthetic construct
  source 1..75: mol_type = other DNA
aggcaatccgatcaaagtttctgaagggctggaatttgtgcaatcaggtactaacgtgccctatatgaaaattag

SEQ ID NO: 213870 - DNA, 75 bp, synthetic construct
  source 1..75: mol_type = other DNA
tgacactgaagcggaaaacagagggaacaacccctgtccgcagccggaaaaccatcatcaatgtcaccacgccac

SEQ ID NO: 213871 - DNA, 75 bp, synthetic construct
  source 1..75: mol_type = other DNA
gttggccgagaaggcggcccgggaagctgagctgacagcaaaaaaagcgcaggccagacaggggctgtctattta

SEQ ID NO: 213872 - DNA, 75 bp, synthetic construct
  source 1..75: mol_type = other DNA
aaagccacgcttaactgctgatcaggcatgggatgttattcgccaaaccagtcgtcaggatcttaacctgaggct

SEQ ID NO: 213873 - DNA, 75 bp, synthetic construct
  source 1..75: mol_type = other DNA
tgatccctcgccctaattcaaatgattggaatgtatatcaaaacatagataatatccttgacccatttgaaaaga

SEQ ID NO: 213874 - DNA, 75 bp, synthetic construct
  source 1..75: mol_type = other DNA
ttatgttactggggctcgtcctgtacagttggcaaagctagctgttcgagatttgcgtattgatacatgtaatac

SEQ ID NO: 213875 - DNA, 75 bp, synthetic construct
  source 1..75: mol_type = other DNA
gatgaatggcttttttattactcaggaagtaagcggtatgtttattttaagcttgatgagttaacaaatacgctc

SEQ ID NO: 213876 - DNA, 75 bp, synthetic construct
  source 1..75: mol_type = other DNA
cctgttgaaagcgtaaaaatcacctcgccagatgatcgctacggtaaacaacctttacttactttttccatgctc

SEQ ID NO: 213877 - DNA, 75 bp, synthetic construct
  source 1..75: mol_type = other DNA
cctgtcgaaagcgtaaaaatcactgcctcttatgatcgctacggtaaacaatcctcccccactttctccgtgctc

SEQ ID NO: 213878 - DNA, 75 bp, synthetic construct
  source 1..75: mol_type = other DNA
aagcaagattgttgcctaccgataagatgtttgatatgggggcatcagcaactaagtttgtctctcagtctatta

SEQ ID NO: 213879 - DNA, 75 bp, synthetic construct
  source 1..75: mol_type = other DNA
tttggcgattccagcggaaatcggcgcgttgattaggcactatatcgagcgagcgcaactaaaacctgatggcaa

SEQ ID NO: 213880 - DNA, 75 bp, synthetic construct
  source 1..75: mol_type = other DNA
tcattttcggcctaaaaatcctctgtgccgaagcattccccggtttcaccctcgacgattacgaagacctcgaat

SEQ ID NO: 213881 - DNA, 75 bp, synthetic construct
  source 1..75: mol_type = other DNA
tgcctacacaaccacttgaagcattgaaggttgtagaagcatggggctttcgcctggtgacgatgaaaggattaa

SEQ ID NO: 213882 - DNA, 75 bp, synthetic construct
  source 1..75: mol_type = other DNA
tcttgcaaggttctggaatgtatgatcagaatctctcttcaaaattaaaatctttagttattcccggaattattt

SEQ ID NO: 213883 - DNA, 75 bp, synthetic construct
  source 1..75: mol_type = other DNA
acttccagcgttgcaccttgattggaggaatatcatttcatattgtcgagaacatggtggattttcgcttgctac

SEQ ID NO: 213884 - DNA, 75 bp, synthetic construct
  source 1..75: mol_type = other DNA
caaggtgctagcgctgaagagatagcacatgtactggggcacacctctcttgccgtagctaaatactacattatg

SEQ ID NO: 213885 - DNA, 75 bp, synthetic construct
  source 1..75: mol_type = other DNA
ggcgatctcgaacttgaaacggaacctttttcattaatttatggtgaaacggggtatggcgaccagcacccggtt

SEQ ID NO: 213886 - DNA, 75 bp, synthetic construct
  source 1..75: mol_type = other DNA
gtgacccaagaagaacgctttgagcaacggatagcccaggaaacggctatcgagccgcaggactggatgcccgat

SEQ ID NO: 213887 - DNA, 75 bp, synthetic construct
  source 1..75: mol_type = other DNA
atttctgaatttatgcatagtaatgataacagaattgaattgttacagcggcgattacattcatgttcattttta

SEQ ID NO: 213888 - DNA, 75 bp, synthetic construct
  source 1..75: mol_type = other DNA
cagagttaatcgtacatatatatttaaaaacttttctatgaaaaacataattcagaaagaaataaccttatataa

SEQ ID NO: 213889 - DNA, 75 bp, synthetic construct
  source 1..75: mol_type = other DNA
gccttccgctgcccactgacgaaatacgaagattggcttgcacaggtcgaagaggagcaagcccgacgtaagatg

SEQ ID NO: 213890 - DNA, 75 bp, synthetic construct
  source 1..75: mol_type = other DNA
atctgcaaagaagagagttttcaccagcgtcaggggtttgaagcctgcatggcactggcgcagggcagcgaagct

SEQ ID NO: 213891 - DNA, 75 bp, synthetic construct
  source 1..75: mol_type = other DNA
caggagcggctcgacgccaaacgtaaagcctgggaagaaggtacctgggtacgggaagcagcgctggcccatgca

SEQ ID NO: 213892 - DNA, 75 bp, synthetic construct
  source 1..75: mol_type = other DNA
actaattgctgttgaactattgagtagattttattctaaaactggagttcctctctctacgcagagagttttaag

SEQ ID NO: 213893 - DNA, 75 bp, synthetic construct
  source 1..75: mol_type = other DNA
agtgtcgtcaggccggtgttgctgttgtcagggatgtcagcagcagacgggagaaaaagcagcctccgctgtgtt

SEQ ID NO: 213894 - DNA, 75 bp, synthetic construct
  source 1..75: mol_type = other DNA
ctgtatgacgtactggcgagccacccggaagtaaccagccttattaccaacaaagtggcggaagctgcaaaaggc

SEQ ID NO: 213895 - DNA, 75 bp, synthetic construct
  source 1..75: mol_type = other DNA
gtaaactgacggtcagcgatccgttcctcggtcagtaccaacaactggtccgcgacgtggtgatttcttatcagt

SEQ ID NO: 213896 - DNA, 75 bp, synthetic construct
  source 1..75: mol_type = other DNA
gcgtggcgagccggacaaactggcgattgaagcgcgtaaaaccggttttgatgaaatttatctgccattccgtgc

SEQ ID NO: 213897 - DNA, 75 bp, synthetic construct
  source 1..75: mol_type = other DNA
tcctgattcgcagtcgatattgtcctgcagccatgtaatcagaatatccagcactgtttccgtggttaatgattt

SEQ ID NO: 213898 - DNA, 75 bp, synthetic construct
  source 1..75: mol_type = other DNA
tgccaagtacgcagatcccaagtcacgctggacagcacgtaaagggctgttttggggcgcggctgaaggtggtcc

SEQ ID NO: 213899 - DNA, 75 bp, synthetic construct
  source 1..75: mol_type = other DNA
actgaattatccagccagttacagcgcgccaatcttccgttttgccgattttaacgctggctggtatgccagccg

SEQ ID NO: 213900 - DNA, 75 bp, synthetic construct
  source 1..75: mol_type = other DNA
ggtgtaattgccgatgtccatgctctgcgacagcgcgcgttatctgctgcgcgtggtgtgaaaataacaacggag

SEQ ID NO: 213901 - DNA, 75 bp, synthetic construct
  source 1..75: mol_type = other DNA
gaaggatctgccaaagacggcctgagcgttgacaacctgaatgctggcgataacacccaggaaaaacagcctttg

SEQ ID NO: 213902 - DNA, 75 bp, synthetic construct
  source 1..75: mol_type = other DNA
tgaaagcctttattaccgaagaaggggaagatattaaaatgaaatggaaaacaactatagtaacgtcgatgatat

SEQ ID NO: 213903 - DNA, 75 bp, synthetic construct
  source 1..75: mol_type = other DNA
ctgctgatttaacggcagagaagtttgcggcagcgattagaaatcactggcacgtagagaataagctgcactggc

SEQ ID NO: 213904 - DNA, 75 bp, synthetic construct
  source 1..75: mol_type = other DNA
gtggcaaaacatggtggctatgatgcttactgggaaactagttcattcagaagaatgggaaggtcgacgcgtggt

SEQ ID NO: 213905 - DNA, 75 bp, synthetic construct
  source 1..75: mol_type = other DNA
ccgatgcaggtcagcattgcttttgccgaacagcataccaaagggtatccgtggaaaatggacggtacagttcgt

SEQ ID NO: 213906 - DNA, 75 bp, synthetic construct
  source 1..75: mol_type = other DNA
tggcctgctcggtgtgtcccaacagcccggtggaggagcagaagggtaacccggtgaacccgctactgggtgcga

SEQ ID NO: 213907 - DNA, 75 bp, synthetic construct
  source 1..75: mol_type = other DNA
tggaaaaccggggtgtttaaatttgatacattacacctgaacaatgctgacttttcaatatcacgcaatgccaat

SEQ ID NO: 213908 - DNA, 75 bp, synthetic construct
  source 1..75: mol_type = other DNA
acgcgaaccagtcatgcgctggtgaaacataattatcagcgcctgctggataaaattgatagtggaagcgaccgt

SEQ ID NO: 213909 - DNA, 75 bp, synthetic construct
  source 1..75: mol_type = other DNA
ttccatacatacgcttcgattatccaacgaaggaagaagcccagcaaattgaacatgacattactcatgttaagc

SEQ ID NO: 213910 - DNA, 75 bp, synthetic construct
  source 1..75: mol_type = other DNA
gtgagcatgtgctcgcctataaaaaacatattgaacgagtcgtcaatgatgctatcagtgaattccccagaacaa

SEQ ID NO: 213911 - DNA, 75 bp, synthetic construct
  source 1..75: mol_type = other DNA
taactgctcgatttgaatcatttggaaataatgacacaatatctactatcaatgatatatttactaacactagtg

SEQ ID NO: 213912 - DNA, 75 bp, synthetic construct
  source 1..75: mol_type = other DNA
tcaggtggaaacgattggacttgttcgtgcgctgaccgtgggcgtggcgtaccagacgacggtaggtggcattat

SEQ ID NO: 213913 - DNA, 75 bp, synthetic construct
  source 1..75: mol_type = other DNA
acgattggacttgttcgtgcgctgaccgtgggcgtggcgtatcagacgacggtaggtggcattatgaacacctcg

SEQ ID NO: 213914 - DNA, 75 bp, synthetic construct
  source 1..75: mol_type = other DNA
attatgatgcgcttaacaattacatcagaaacttacgcgatccttcaaccccccaagatgcagccactaaaaatt

SEQ ID NO: 213915 - DNA, 75 bp, synthetic construct
  source 1..75: mol_type = other DNA
gccgcaggcggtaccgggacgcaggggttcaggcaccacgctggataaccactttgcggtaatcccggcagaccg

SEQ ID NO: 213916 - DNA, 75 bp, synthetic construct
  source 1..75: mol_type = other DNA
gccgggacgacgaattgtgctgacggggcatccgcaggcgaacctgaaccgggaatggcaggtggtggcaagtga

SEQ ID NO: 213917 - DNA, 75 bp, synthetic construct
  source 1..75: mol_type = other DNA
gacatgactcacttggtttttatctatggcagttattaatcgaagactgggaaaatgaatctaataatattcttt

SEQ ID NO: 213918 - DNA, 75 bp, synthetic construct
  source 1..75: mol_type = other DNA
ggtaattgttatgaatgctcaatgaaacttgattacataaaacaattttatttttcactggaaaccgcatggtac

SEQ ID NO: 213919 - DNA, 75 bp, synthetic construct
  source 1..75: mol_type = other DNA
ggaaaagctaaagcgctttgtgggaaagcataaatggtggttaggaggcacttgcgcagttatcgcatcaattac

SEQ ID NO: 213920 - DNA, 75 bp, synthetic construct
  source 1..75: mol_type = other DNA
gcgattatcaggctgcgctcgttggcgctagtcctgcgcacgacatcgcggtactcaagattggcgtcggcttca

SEQ ID NO: 213921 - DNA, 75 bp, synthetic construct
  source 1..75: mol_type = other DNA
atttgaagattttagggatggtcaaataaaagtaataggcacttctatggatatgcgccttgttcaggttaacgg

SEQ ID NO: 213922 - DNA, 75 bp, synthetic construct
  source 1..75: mol_type = other DNA
cactatggcgcgttcttttaaagccgtagccaatggcaaaatttatatcggtcaggttgacactgacccggtaaa

SEQ ID NO: 213923 - DNA, 75 bp, synthetic construct
  source 1..75: mol_type = other DNA
ctgtattatttacagaaatagtcatattgatattgcgaatgttcttctttgtgaagttatacaggcgagaagtaa

SEQ ID NO: 213924 - DNA, 75 bp, synthetic construct
  source 1..75: mol_type = other DNA
tattccgtcactagcagataaagcccttttattttatagaggctttctggatgatgcagaaaaatatttttatgg

SEQ ID NO: 213925 - DNA, 75 bp, synthetic construct
  source 1..75: mol_type = other DNA
tattacaagatcccctgaaggctggggtattatgccgcctgagccttacggagaaatgaggattagaacttttac

SEQ ID NO: 213926 - DNA, 75 bp, synthetic construct
  source 1..75: mol_type = other DNA
tgcgccatcggaagtgaattggtgggatcacggttattcaaccgagacggatcatatttatgtcaccacacaaag

SEQ ID NO: 213927 - DNA, 75 bp, synthetic construct
  source 1..75: mol_type = other DNA
ctggcgataccgcgtgtgggtcaggaggtgattgtggacttcctcaacggcgatccggaccagccgattattatg

SEQ ID NO: 213928 - DNA, 75 bp, synthetic construct
  source 1..75: mol_type = other DNA
agttctcttatccgtcatatagaaaaaatcgatagcatacctgttttaatcagacatatcacctataactcttta

SEQ ID NO: 213929 - DNA, 75 bp, synthetic construct
  source 1..75: mol_type = other DNA
aacaagaactgcttacaactatcctcgattacttccagaagggagaaatcccggatacagaaactatttcggaaa

SEQ ID NO: 213930 - DNA, 75 bp, synthetic construct
  source 1..75: mol_type = other DNA
cacggacggcacctttgccatcacggcggtgcagcatgtgccggaaaaagaagccatcgtggataacgggcccgc

SEQ ID NO: 213931 - DNA, 75 bp, synthetic construct
  source 1..75: mol_type = other DNA
tggtggaagacccggaagccatactgcgctacgggcgcaacctgctgaagatggatgcgttcggctgtaccagtc

SEQ ID NO: 213932 - DNA, 75 bp, synthetic construct
  source 1..75: mol_type = other DNA
gcggtcaggcccaccgtgccgggctgtgggtgataaagaccgaactgctggaaacgcagacggtggatttcacgc

SEQ ID NO: 213933 - DNA, 75 bp, synthetic construct
  source 1..75: mol_type = other DNA
gatcgcacccagaaaccgcttaacaaaatctatatacctaaaggatatgatacgggatataacaaatatctatta

SEQ ID NO: 213934 - DNA, 75 bp, synthetic construct
  source 1..75: mol_type = other DNA
ataactgtacgctggggcgaagctcccgatcaaatttgtcatatcagttaccagcttaccgaacaacaaattaac

SEQ ID NO: 213935 - DNA, 75 bp, synthetic construct
  source 1..75: mol_type = other DNA
atactcgtgtggcgaacagcaccgggctgaaaactgactggcgcggatataccgttgttccttatgccacttctt

SEQ ID NO: 213936 - DNA, 75 bp, synthetic construct
  source 1..75: mol_type = other DNA
aaaagaatcaaactcgaatatctattcaggtacatttaccgataacggcaagaattcattagtaaagttttataa

SEQ ID NO: 213937 - DNA, 75 bp, synthetic construct
  source 1..75: mol_type = other DNA
cgattgcagaagacaagtatgctgcaaactaccacgaaatggcgcaggccaaagatgaaggccgcttggttgagg

SEQ ID NO: 213938 - DNA, 75 bp, synthetic construct
  source 1..75: mol_type = other DNA
acgaatgaaaagcagtatcaagtgaaatatcaacatgcaaagaaaaatggtgatacgtttaacgcttttatttac

SEQ ID NO: 213939 - DNA, 75 bp, synthetic construct
  source 1..75: mol_type = other DNA
caaagccgctttcggttgcgcactgggcgcgaatccgggcttttacggtcagttcgagcagaacgcccgtaacta

SEQ ID NO: 213940 - DNA, 75 bp, synthetic construct
  source 1..75: mol_type = other DNA
ttcaactggaaagcccgaaaatcacccgcaacctgactacggcctggtttgcgaagcgcgtagacgaacggcggg

SEQ ID NO: 213941 - DNA, 75 bp, synthetic construct
  source 1..75: mol_type = other DNA
cagtttgatgagtttaataacattgcctctcagggtgacagcggttcagcactgttcgtctatgataaccaaaag

SEQ ID NO: 213942 - DNA, 75 bp, synthetic construct
  source 1..75: mol_type = other DNA
ttcatttccagcacttcctgttcctgacttttcatctgcaaccgcaaatggagctgcaacaagtattggtggtgc

SEQ ID NO: 213943 - DNA, 75 bp, synthetic construct
  source 1..75: mol_type = other DNA
ctgtgtcgtaggagatagtgattctatttcgcttgcgcagtctttctctcgtcagggtattttttactttaatgc

SEQ ID NO: 213944 - DNA, 75 bp, synthetic construct
  source 1..75: mol_type = other DNA
tgctcatcacaacagtatccgctccggcgctggcagcgtacccggtaagccagcctgctcaggccgcagaagtga

SEQ ID NO: 213945 - DNA, 75 bp, synthetic construct
  source 1..75: mol_type = other DNA
ggtaacattatgccgaggaactattgcctctcaggctgaaaacattgtttcttatagtactgcagggggggcgag

SEQ ID NO: 213946 - DNA, 75 bp, synthetic construct
  source 1..75: mol_type = other DNA
gctggatgggccgtaccccagactacaaagccgctttcggttgcgcactgggcgcgaatccgggcttttacggtc

SEQ ID NO: 213947 - DNA, 75 bp, synthetic construct
  source 1..75: mol_type = other DNA
ggtcgcgagatctatatctatggcgagcgagtgaaagacgtcaccactcatccggcatttcgtaatgcggcagcg

SEQ ID NO: 213948 - DNA, 75 bp, synthetic construct
  source 1..75: mol_type = other DNA
atgagcagaaggcgaatcacacgcaggcatcgccgcacacacatgaattccttaccgacgctgaaagaactcatt

SEQ ID NO: 213949 - DNA, 75 bp, synthetic construct
  source 1..75: mol_type = other DNA
cagttattccgttcccgcggaagagttaatgtgattatcgggtggaaacagttatttccaccggaaaatcatgca

SEQ ID NO: 213950 - DNA, 75 bp, synthetic construct
  source 1..75: mol_type = other DNA
acttaccgctgagcttaccgctgagcttaatatgcgtaaaaaacagtacaactactatcgcgaccaattgctgag

SEQ ID NO: 213951 - DNA, 75 bp, synthetic construct
  source 1..75: mol_type = other DNA
cggctgcttggaaattgacgataccaaagcattatatcgttatgtcttccattgggttagtttcaattatgaaaa

SEQ ID NO: 213952 - DNA, 75 bp, synthetic construct
  source 1..75: mol_type = other DNA
aaaaaatgcagggggttacccgggggatgaataaaagaaagaaggccgtgaagaagagcataacaggactcttta

SEQ ID NO: 213953 - DNA, 75 bp, synthetic construct
  source 1..75: mol_type = other DNA
cagaatgtgctggcgcaattgcagccggcgcgtatttcacgggtctggaatgatgcaaaaattacggctcaccat

SEQ ID NO: 213954 - DNA, 75 bp, synthetic construct
  source 1..75: mol_type = other DNA
attgacagtccgggcgggcaggccgccggcgcgtttgactgcgctgacatgatttaccgcctccgtcagcagaag

SEQ ID NO: 213955 - DNA, 75 bp, synthetic construct
  source 1..75: mol_type = other DNA
aagagagggacttgtgccagtcataaggattgggaaaacagagttgggccaaacactgaagtggatagagccagg

SEQ ID NO: 213956 - DNA, 75 bp, synthetic construct
  source 1..75: mol_type = other DNA
ttggcgagaaagaagtgctttccgttgacacctacagatcgccctatgaaacgcgcaagaaaagaggaaggacag

SEQ ID NO: 213957 - DNA, 75 bp, synthetic construct
  source 1..75: mol_type = other DNA
ctcatgcggatgaagcacaacgcaatgagctagagaaacatctgtccccgctgaagcgaatggggaaaatcacca

SEQ ID NO: 213958 - DNA, 75 bp, synthetic construct
  source 1..75: mol_type = other DNA
tgcttattgtttgaattatttcttatatatgattgttttcatatttgtcattaataaatattctagtgaaaattt

SEQ ID NO: 213959 - DNA, 75 bp, synthetic construct
  source 1..75: mol_type = other DNA
ggagtaaatattgagttgtttacagcgcccgattcgctggaaacccgtatctttcgtgaccacctcgttgacagt

SEQ ID NO: 213960 - DNA, 75 bp, synthetic construct
  source 1..75: mol_type = other DNA
aaccaaactgtgactgagttaaaaaaaatatttattaccgaaccaccattatggttgggaaagaatatatttgta

SEQ ID NO: 213961 - DNA, 75 bp, synthetic construct
  source 1..75: mol_type = other DNA
gccgccgtttttgaaggtcagtccggcattgaggccgggctggcggatgaattaatcaatgcgtcggatgccatc

SEQ ID NO: 213962 - DNA, 75 bp, synthetic construct
  source 1..75: mol_type = other DNA
ctttttaagaaatttctgacagaaatcattcctgattttaaaaatgctctaatcgctgcattacaaaaacaaaac

SEQ ID NO: 213963 - DNA, 75 bp, synthetic construct
  source 1..75: mol_type = other DNA
tctaatttccccacttaccggtgaattgatgcacgttaccccccgaagactgcggtatacgcttgcgacagggtt

SEQ ID NO: 213964 - DNA, 75 bp, synthetic construct
  source 1..75: mol_type = other DNA
gcaatcattaatactcatacctatttttgtattttttataggcctatataattataaactggcgataataaatgc

SEQ ID NO: 213965 - DNA, 75 bp, synthetic construct
  source 1..75: mol_type = other DNA
gcatttagatttaaaatgctcctatgacgtcacaattcatgactactttgcaataaatggaaacccatcgctaac

SEQ ID NO: 213966 - DNA, 75 bp, synthetic construct
  source 1..75: mol_type = other DNA
atatccttgcatttagtaatagtttcgataatcaagccttattggactatgctgaaggttcatttattggaaaaa

SEQ ID NO: 213967 - DNA, 75 bp, synthetic construct
  source 1..75: mol_type = other DNA
agcagaaaaatataatattccagttataaatcttgaattaggtccgctgcgttctccgacgtatctttttactgg

SEQ ID NO: 213968 - DNA, 75 bp, synthetic construct
  source 1..75: mol_type = other DNA
tatgagttgcattttacggcgcaatacgcaaaagcagataaaaatgtgggtcctggcggagttagttctgcgata

SEQ ID NO: 213969 - DNA, 75 bp, synthetic construct
  source 1..75: mol_type = other DNA
cggtgtcggtttcgctgtttttttggggaaaggtactgattctagcaaccggatttctggtaatagtcctattaa

SEQ ID NO: 213970 - DNA, 75 bp, synthetic construct
  source 1..75: mol_type = other DNA
taacctgttacccggcgagaaaacggcctccttatattcggcaggactgggacgggccagagcagactggcttat

SEQ ID NO: 213971 - DNA, 75 bp, synthetic construct
  source 1..75: mol_type = other DNA
cctcgctcgcctggtttcttgtgcatggccaggcaacgattttgaactttacagcgtcatcgagaatcttgctct

SEQ ID NO: 213972 - DNA, 75 bp, synthetic construct
  source 1..75: mol_type = other DNA
cctgccgggtcagcagtatgatgaggagtccggcctgtattacaaccgccaccgctattatgacccgctgctggg

SEQ ID NO: 213973 - DNA, 75 bp, synthetic construct
  source 1..75: mol_type = other DNA
cgttcagcatgtcatccagtggatactcccttcaccgctggcttcgctgatgtccgatgatacctggttatggcc

SEQ ID NO: 213974 - DNA, 75 bp, synthetic construct
  source 1..75: mol_type = other DNA
cctgtccacgaagaaaggccgtgaccgtgttgcctctctggcagcgcaggtgtcccgcagcaagacggcaatcga

SEQ ID NO: 213975 - DNA, 75 bp, synthetic construct
  source 1..75: mol_type = other DNA
actaatttacatgctctaactgcaagaacagtaatagatcttattatggatcgtttttcaaatgaatcttttgct

SEQ ID NO: 213976 - DNA, 75 bp, synthetic construct
  source 1..75: mol_type = other DNA
aattattaatgaagcccctgtaccagcaggagatgcagttatacttccagatactaaaagtgaactggctgtctg

SEQ ID NO: 213977 - DNA, 75 bp, synthetic construct
  source 1..75: mol_type = other DNA
aagcgtgaagctgaagcgaaagaaaaagcccgtctggccgaagagcagcgcaaagcggaagaagaagcgcgccgc

SEQ ID NO: 213978 - DNA, 75 bp, synthetic construct
  source 1..75: mol_type = other DNA
accgtgaccgcgaagagaagcgccgccaggaagaacaggcccagcgtgagcacgaagagcgcattaagcgcgaag

SEQ ID NO: 213979 - DNA, 75 bp, synthetic construct
  source 1..75: mol_type = other DNA
gctcaccagccacacaagcttaacccgcgaacaggctatcgaagtgctcaccgctctgaaggatgacctgatccc

SEQ ID NO: 213980 - DNA, 75 bp, synthetic construct
  source 1..75: mol_type = other DNA
tggcacaggcgtgggcaggcaccggttttggccacctggcgataccgcgtgtgggtcaggaggtgattgtagact

SEQ ID NO: 213981 - DNA, 75 bp, synthetic construct
  source 1..75: mol_type = other DNA
ggcattcagctacaggtcggggaatcgacggtaatcaggctgtcgaaggatggcatcaccatcgtgggcggttct

SEQ ID NO: 213982 - DNA, 75 bp, synthetic construct
  source 1..75: mol_type = other DNA
gagtgcttatttttgtatttctggtgatcttctatgggatcattattttacatgatattccctacctgattgcca

SEQ ID NO: 213983 - DNA, 75 bp, synthetic construct
  source 1..75: mol_type = other DNA
cacagaaaatgagttagccgccagcaaacttggattggccttaaaccaaaacaactgcaaaactattaccgagta

SEQ ID NO: 213984 - DNA, 75 bp, synthetic construct
  source 1..75: mol_type = other DNA
tcagattgagcgcgctattgatgaattgcgccgaaatcgcactgaatttaacgatgcaattgatggcttatatgc

SEQ ID NO: 213985 - DNA, 75 bp, synthetic construct
  source 1..75: mol_type = other DNA
ggtattcccgcttatcaaaactacctgcgcaaagccgcactcaccgacatgctacaaacctttgtgccttaccta

SEQ ID NO: 213986 - DNA, 75 bp, synthetic construct
  source 1..75: mol_type = other DNA
tcatcgaaatcaagccggaacaggccccagtgctttacgtagcgggcggccttgacgcgtaccttgagcaaatcc

SEQ ID NO: 213987 - DNA, 75 bp, synthetic construct
  source 1..75: mol_type = other DNA
ttcgtgaaggattatatgcatcctcagcgtatctctcccgacatggaacgcctgaagtgccggcagatctctgtc

SEQ ID NO: 213988 - DNA, 75 bp, synthetic construct
  source 1..75: mol_type = other DNA
gctacagtcaaagcggtgtgactcgcaatagttgcaatgaaagtcttagtgttgcggataatgggcagacgcttg

SEQ ID NO: 213989 - DNA, 75 bp, synthetic construct
  source 1..75: mol_type = other DNA
gaacgttcagctggcatcgctcaattcatctattagctctatttcttctaaaattgaagggaaaatggatagcgt

SEQ ID NO: 213990 - DNA, 75 bp, synthetic construct
  source 1..75: mol_type = other DNA
ctgacatgatgattgagtttatcggtcaggagggcgctaaaacgtgtgaggaactggcggggaagttcggtgtca

SEQ ID NO: 213991 - DNA, 75 bp, synthetic construct
  source 1..75: mol_type = other DNA
tatggcaaaccgtgaactgcgccgggcaaaaagtcatatccggaagtgggaacgtgtctgcgccgcgctgcggga

SEQ ID NO: 213992 - DNA, 75 bp, synthetic construct
  source 1..75: mol_type = other DNA
tttacccgttctgtgcggatcactttcagggcgcagctcaccagttccagctgttctgcactgactccccccaga

SEQ ID NO: 213993 - DNA, 75 bp, synthetic construct
  source 1..75: mol_type = other DNA
aatcagtctgtcttgatgtacttacacagtggattgaagggcgtgagaccccgcgctaccgtcatgccatacagc

SEQ ID NO: 213994 - DNA, 75 bp, synthetic construct
  source 1..75: mol_type = other DNA
cagcatcagttaacaaaccatcaccagaaaataccaaccagaaatctccatcggttgtgggatgcacagcgccgt

SEQ ID NO: 213995 - DNA, 75 bp, synthetic construct
  source 1..75: mol_type = other DNA
cttgctgaccttatcaaggttggcgcatcagaagatgttgctaaaaatatcataacagccatcgtaaaaggcgaa

SEQ ID NO: 213996 - DNA, 75 bp, synthetic construct
  source 1..75: mol_type = other DNA
actgtggagcagatgcaaaaccagatggacccggtgtacacgccggcgcgaaaaatccacctgtaccactgcgac

SEQ ID NO: 213997 - DNA, 75 bp, synthetic construct
  source 1..75: mol_type = other DNA
ataatcaccgcgttaatgcgttgtcagtattctgactggtttggtctggtcggactgagcgaacacattgatgct

SEQ ID NO: 213998 - DNA, 75 bp, synthetic construct
  source 1..75: mol_type = other DNA
cggacgacgcagtatccgccatatccggcgctggttcgtcacggaacggggttgtcatctccggctaaccaggcg

SEQ ID NO: 213999 - DNA, 75 bp, synthetic construct
  source 1..75: mol_type = other DNA
accgcagcctcttctgtgggcctgggtaattacccggcctctaaatgtgaggtggtcgttttcatggagaaagca

SEQ ID NO: 214000 - DNA, 75 bp, synthetic construct
  source 1..75: mol_type = other DNA
gctacgtcgccctcagggaattaaacctaaaaagaaaatcgtcaaaattagagattccggtttgacacggaaagt

SEQ ID NO: 214001 - DNA, 75 bp, synthetic construct
  source 1..75: mol_type = other DNA
taggaacggaatacaattctccgcaaatcctcagagtttactctgctgctcttttactaaaagcatatgaactgg

SEQ ID NO: 214002 - DNA, 75 bp, synthetic construct
  source 1..75: mol_type = other DNA
ttttgcgcctcttatgaaactcatagataattactcattgcaggcgcaatctatagaaggtgcgggttatgaaat

SEQ ID NO: 214003 - DNA, 75 bp, synthetic construct
  source 1..75: mol_type = other DNA
tctgactgcttgccaagctaactatgtaagagatgttcagggtggaacaattgctccatcatcatcttcgaaact

SEQ ID NO: 214004 - DNA, 75 bp, synthetic construct
  source 1..75: mol_type = other DNA
gggacaatcaggtatctctccgcagattaactatggcacagctattaatttggatggttttgctgcgaatgagac

SEQ ID NO: 214005 - DNA, 75 bp, synthetic construct
  source 1..75: mol_type = other DNA
aaatggttgaacgtgtcgatcagcgtgatctgacccgtaagaccctgacagaaacccgcagccggatgaaagccg

SEQ ID NO: 214006 - DNA, 75 bp, synthetic construct
  source 1..75: mol_type = other DNA
ctgattgtgcttggcggtctgatggacgaccaggcgggagaaagcgtggcgaaagtgccgctgcttggcgatatc

SEQ ID NO: 214007 - DNA, 75 bp, synthetic construct
  source 1..75: mol_type = other DNA
gttcacttacgaaaacctcaaaaaaacgatgggaacattatgcagtaactcgcatttatcatcttttaaatgatc

SEQ ID NO: 214008 - DNA, 75 bp, synthetic construct
  source 1..75: mol_type = other DNA
tagatcatctgaatcgggaggtagtagcgctaggaaacgactatgcggagggatttttcctgcaaccacaccagc

SEQ ID NO: 214009 - DNA, 75 bp, synthetic construct
  source 1..75: mol_type = other DNA
tttttcgcctctcatgaaactaatggataattactcattgcagacgcaacctatagaaggtgcgggttacgaaat

SEQ ID NO: 214010 - DNA, 75 bp, synthetic construct
  source 1..75: mol_type = other DNA
tgcaaattgagcggtgctagttttgtaaggacagatctaacagaagccaagggttgtgcagatttttcaggatgt

SEQ ID NO: 214011 - DNA, 75 bp, synthetic construct
  source 1..75: mol_type = other DNA
ctaacgttaattttaatgatgctaatatgaagagagcaacactcatggattgcaaattgagcggtgctagttttg

SEQ ID NO: 214012 - DNA, 75 bp, synthetic construct
  source 1..75: mol_type = other DNA
agaaaaatcatgatgacaatgttgttgtcggcatcagtgacctgaaatatccggcaacaacaaatgcgaccagtc

SEQ ID NO: 214013 - DNA, 75 bp, synthetic construct
  source 1..75: mol_type = other DNA
tgccgctgatgaaagcaaagtaaaaacgctttctaacggcaatcctaccatcattaacactgcagatggtcgcac

SEQ ID NO: 214014 - DNA, 75 bp, synthetic construct
  source 1..75: mol_type = other DNA
ggggcgaaagatgatggcagcgataagcgtctcggtgatggacaaactgcccgcccggtgtgggaaaccgccaaa

SEQ ID NO: 214015 - DNA, 75 bp, synthetic construct
  source 1..75: mol_type = other DNA
ctggctatttctcgcccacgaaagccagatcccaaaacctggtgatttctttaacacctacatgggagaagatgc

SEQ ID NO: 214016 - DNA, 75 bp, synthetic construct
  source 1..75: mol_type = other DNA
ttgtatttttacatttttgattactgttgcttggtctagaatagacaacacttttgcaggagataatctagctgt

SEQ ID NO: 214017 - DNA, 75 bp, synthetic construct
  source 1..75: mol_type = other DNA
atgatcataaagggatggcagctggagcagcaggcacagacggaattcatttctatcgttcaaaaaatattaatg

SEQ ID NO: 214018 - DNA, 75 bp, synthetic construct
  source 1..75: mol_type = other DNA
gtgctggcggcaaaggtgctggagcattctggactgtattcagaaccccgacaatcaccactgttgcaaacccta

SEQ ID NO: 214019 - DNA, 75 bp, synthetic construct
  source 1..75: mol_type = other DNA
cggtggctgtggtaacgcgccgtctgaagccgctgaatgtaaacggtcagcaggttgaaacggtgggtattccaa

SEQ ID NO: 214020 - DNA, 75 bp, synthetic construct
  source 1..75: mol_type = other DNA
cccaacgcccacggcgctatgccatcaccgatgcgggattggcgcacttcagggatgcctatcctggcgaaacca

SEQ ID NO: 214021 - DNA, 75 bp, synthetic construct
  source 1..75: mol_type = other DNA
aagcctatcaggcatccgagattgaacatctcagagaaacggcaccgggcaaagcgattgacccgtcattaaaac

SEQ ID NO: 214022 - DNA, 75 bp, synthetic construct
  source 1..75: mol_type = other DNA
gcaatggaagcctgtggtggttctcactttatggcccgtaagctggaagaattgggacatttcccaaagctgata

SEQ ID NO: 214023 - DNA, 75 bp, synthetic construct
  source 1..75: mol_type = other DNA
aacgccagctggcagaacgggataaagagctggccatcctccaaaaggccgcgacatacttcgcgaagcgtctga

SEQ ID NO: 214024 - DNA, 75 bp, synthetic construct
  source 1..75: mol_type = other DNA
attcgcacgctgaaagcgaacggcaaagatatcgataccatcggtattccgattcactggggctatgaaggcgta

SEQ ID NO: 214025 - DNA, 75 bp, synthetic construct
  source 1..75: mol_type = other DNA
atcaaacaaaccggtgataagtcttttaatattacactggttggtagagataaaagtttacgaaaagaaatacca

SEQ ID NO: 214026 - DNA, 75 bp, synthetic construct
  source 1..75: mol_type = other DNA
gacacctgaacaattggttgcacaggtttgctttaaagatgatgattgtgctcgggtaagagaattattaaaaca

SEQ ID NO: 214027 - DNA, 75 bp, synthetic construct
  source 1..75: mol_type = other DNA
aaaaaaggggtgactcttccttctggtcagtatgaggttgatgtggtggtgaataatgataacctgggtaaagct

SEQ ID NO: 214028 - DNA, 75 bp, synthetic construct
  source 1..75: mol_type = other DNA
atatcatgtccggttctcggagtattaacaccgatattcttgactatttccaccctatgccaggcacggaaaata

SEQ ID NO: 214029 - DNA, 75 bp, synthetic construct
  source 1..75: mol_type = other DNA
tatccagccttcaggggattacatgtttttattattcttccgtacaaggctatcagagtcgcttacaacatacat

SEQ ID NO: 214030 - DNA, 75 bp, synthetic construct
  source 1..75: mol_type = other DNA
tagaactataaaagaacaaaatcaacaaaatggtgctactaaaataacttgctgcggtgttgagttaagtaaaga

SEQ ID NO: 214031 - DNA, 75 bp, synthetic construct
  source 1..75: mol_type = other DNA
ccggtggcctgggggtcacacagatgctgggtggcctgggggcattatcgctcagtgcgaacgtgtcaaaggcca

SEQ ID NO: 214032 - DNA, 75 bp, synthetic construct
  source 1..75: mol_type = other DNA
ggacaatatatcgttgacgtaaccgtaaataaagaacgtatggggcgtcttggactgaacatcagcaaagaagat

SEQ ID NO: 214033 - DNA, 75 bp, synthetic construct
  source 1..75: mol_type = other DNA
agcaacagcgtgggctataccaggacgggcggaacgacattcaacaccagtgtgtcagcaatgcagactgaacgg

SEQ ID NO: 214034 - DNA, 75 bp, synthetic construct
  source 1..75: mol_type = other DNA
acagaaggagcgatggtttaccgcaaattcggcttcgagaatgtgctgcgctacatcctgcgcgtaaaagatgca

SEQ ID NO: 214035 - DNA, 75 bp, synthetic construct
  source 1..75: mol_type = other DNA
cagtatttcgggttcggtgctgggtacagcagaaacaggcccgctctttaccaaagaatcgtctggcactgtggg

SEQ ID NO: 214036 - DNA, 75 bp, synthetic construct
  source 1..75: mol_type = other DNA
ccgaaaaagcgatggtttaccgtaaattcggcttcgagaatgtgctgcgttatatcctgcgtgtgaaggatgcac

SEQ ID NO: 214037 - DNA, 75 bp, synthetic construct
  source 1..75: mol_type = other DNA
atggcaagccctataaacagcggaataatgatgtcaaatctctgctcttccacctttttggataaaaatataaat

SEQ ID NO: 214038 - DNA, 75 bp, synthetic construct
  source 1..75: mol_type = other DNA
ccagaaatcttctggaagatgcatcgtcagtcacagattcacctgacaccagtcccccgtcagaaaacccgatcg

SEQ ID NO: 214039 - DNA, 75 bp, synthetic construct
  source 1..75: mol_type = other DNA
agaaaagtcgcgagaagatagaaaagaagatcgcgcgggcagaaacgcgtataaccgagctccagaacaggcttg

SEQ ID NO: 214040 - DNA, 75 bp, synthetic construct
  source 1..75: mol_type = other DNA
cttccacgcgctgatctcttccggtacgacgccaaaactgctggctaatgaaaccgacgcgcgtttcatcggcta

SEQ ID NO: 214041 - DNA, 75 bp, synthetic construct
  source 1..75: mol_type = other DNA
aacaggtaaaccggtgaatgaagtggcactcactctcggatacgacaatgcatcatctttcgccactatgttccg

SEQ ID NO: 214042 - DNA, 75 bp, synthetic construct
  source 1..75: mol_type = other DNA
gggatcgattgagtatcgacactgtaaggtgatcagcgtatcgccattgttacgtcagttgttgcttgatgccgt

SEQ ID NO: 214043 - DNA, 75 bp, synthetic construct
  source 1..75: mol_type = other DNA
gtcagtcacagattcacctgacaccagtcccccgtcagaaaacccgatcgccagtaagcctgaatccccgggatg

SEQ ID NO: 214044 - DNA, 75 bp, synthetic construct
  source 1..75: mol_type = other DNA
tcttttaccaaattcatttcgcttaaaacgtctagaggtactctagcagttttttgttgtgacttgttgttggtt

SEQ ID NO: 214045 - DNA, 75 bp, synthetic construct
  source 1..75: mol_type = other DNA
ttaatgttatacagtttggcgcaggtgataaaaataaaaaaataatattagaagaaacatcatattctggagtgg

SEQ ID NO: 214046 - DNA, 75 bp, synthetic construct
  source 1..75: mol_type = other DNA
attaaaaaaaccaaacggtaacgttacggatgataagattgatgaaatagtcgcttgcttagccagtcctcaagg

SEQ ID NO: 214047 - DNA, 75 bp, synthetic construct
  source 1..75: mol_type = other DNA
gtctgtcgctgtctgatgtgctgaatctgaaagcggataccatgtttacgctgttgcctcgcgtgacctcgccac

SEQ ID NO: 214048 - DNA, 75 bp, synthetic construct
  source 1..75: mol_type = other DNA
cccgggagcacaggacgtgttgcgaaacgcagaaagacgcatggataagctggatgacccgttcacgggtaaagg

SEQ ID NO: 214049 - DNA, 75 bp, synthetic construct
  source 1..75: mol_type = other DNA
tctttaacaatataacatcatcttcattttcacgcgataatatcgtagagcgtcttaaagattatgcagcagaaa

SEQ ID NO: 214050 - DNA, 75 bp, synthetic construct
  source 1..75: mol_type = other DNA
tctggccgggatgattgaacaggcgtggtgcagtgccctgggggtggatgccggatgccatgccacgctggtgca

SEQ ID NO: 214051 - DNA, 75 bp, synthetic construct
  source 1..75: mol_type = other DNA
gtagcttgataagtaacgatagtttgatcgtagcaccttacgattgtcagaagctaagctatgaaaatattttac

SEQ ID NO: 214052 - DNA, 75 bp, synthetic construct
  source 1..75: mol_type = other DNA
gttggtcgggtgattctgattatgtcctcagatgcaaaaacacacgttgatggtggaatggctgtttatgcgtga

SEQ ID NO: 214053 - DNA, 75 bp, synthetic construct
  source 1..75: mol_type = other DNA
aaaagtcaccattgacggtgatatcaaactgcttggtgaaaacgagtccatttatattccgctgggggcgacgca

SEQ ID NO: 214054 - DNA, 75 bp, synthetic construct
  source 1..75: mol_type = other DNA
gtggtcgagcagatcaaagccgatggtcgccatgagcatcgggtgcatcgcgaagtgtatcgtccgtggggcaaa

SEQ ID NO: 214055 - DNA, 75 bp, synthetic construct
  source 1..75: mol_type = other DNA
catctgcattgctcgcgcgttggcattgaatccaaaagtgatcattgccgacgaagccgtttcggcgctggatgt

SEQ ID NO: 214056 - DNA, 75 bp, synthetic construct
  source 1..75: mol_type = other DNA
ttcatcgcgtagtttatcggccatggggcaagtatgactctattgatgccggagagcgttatcaggtgaagcgaa

SEQ ID NO: 214057 - DNA, 75 bp, synthetic construct
  source 1..75: mol_type = other DNA
cctcttgatctgattgaggtgcgttccgggccttatcttgaggaagatgatattgtgcgtttatcggatcgttat

SEQ ID NO: 214058 - DNA, 75 bp, synthetic construct
  source 1..75: mol_type = other DNA
agaagtaattgagattcagtcgggtgtatatctaggtgatgatgatattgtgcgcctaagtgataaatatggtcg

SEQ ID NO: 214059 - DNA, 75 bp, synthetic construct
  source 1..75: mol_type = other DNA
ttgaaaatcctggcaagatcccgcttgaaataattgaggttagatcaggagtctacctggaagaggatgatgtta

SEQ ID NO: 214060 - DNA, 75 bp, synthetic construct
  source 1..75: mol_type = other DNA
aataattttgtttatgcagataatgcgttagtagcaactattggtgcagataatcttgttatagtgcaaacaaaa

SEQ ID NO: 214061 - DNA, 75 bp, synthetic construct
  source 1..75: mol_type = other DNA
tattctagaagtatgtactgctgcgattaaaacagctcagattgatttggattttatccgtattaatcatgaagt

SEQ ID NO: 214062 - DNA, 75 bp, synthetic construct
  source 1..75: mol_type = other DNA
ccggacgggaaaacgggtgtggcggcgggagcgtgacctgacggggtggatgtcgctgtcgcgtaaaccggagga

SEQ ID NO: 214063 - DNA, 75 bp, synthetic construct
  source 1..75: mol_type = other DNA
acggcattgcgggttgacctgcgtttcccggatgtaccggcagcaacggacgcagctgtgatatcccgcttcatc

SEQ ID NO: 214064 - DNA, 75 bp, synthetic construct
  source 1..75: mol_type = other DNA
gcagcgtccgcgcgctcatgctgctgacgggcctggcgctgtgcgccagcgccttcgccgccgacccaacccccg

SEQ ID NO: 214065 - DNA, 75 bp, synthetic construct
  source 1..75: mol_type = other DNA
cccggactgctgcgcagcgttgcgatcaccgaatcccgtggtaatcagtttgccgtctcacctgctggtgcgatg

SEQ ID NO: 214066 - DNA, 75 bp, synthetic construct
  source 1..75: mol_type = other DNA
taccgccctcacaaaagtgcatagcctcaaactatcaaacacatccgacaaattgttacatttatgttattgcaa

SEQ ID NO: 214067 - DNA, 75 bp, synthetic construct
  source 1..75: mol_type = other DNA
aaatacaggtgacggaactcgatttatatcggcgtaatattatcagtcgttattatctcaggtacgggatatggt

SEQ ID NO: 214068 - DNA, 75 bp, synthetic construct
  source 1..75: mol_type = other DNA
ggggcaacgccttactccagcgcggtgaggcgctgacggcagaaaatcaatatcgcaatatcgcaatatcgccag

SEQ ID NO: 214069 - DNA, 75 bp, synthetic construct
  source 1..75: mol_type = other DNA
actgtgacaccattaaaaaagcccgccgttggctggaaaccaatagcattgactttcgctttcacgattaccgtg

SEQ ID NO: 214070 - DNA, 75 bp, synthetic construct
  source 1..75: mol_type = other DNA
atgatcaacccggaaacccgggtcatcgctgtcgatctaaataatgttgccggtgacaaaacgcctgcaggcagg

SEQ ID NO: 214071 - DNA, 75 bp, synthetic construct
  source 1..75: mol_type = other DNA
gacctggtacgggtgggacggtgacaggctgaccactgtacagacccaacagacaagaatccagacggtatacca

SEQ ID NO: 214072 - DNA, 75 bp, synthetic construct
  source 1..75: mol_type = other DNA
caagaggtgtcgggcttaatcatctaaggccaaaaccaacatttagatttttatctttctgttctgagactgcaa

SEQ ID NO: 214073 - DNA, 75 bp, synthetic construct
  source 1..75: mol_type = other DNA
attacgccacagcattatggggcgaaaggtgacggtgttaacgatgatacggtggcatttattgcagcagcaaat

SEQ ID NO: 214074 - DNA, 75 bp, synthetic construct
  source 1..75: mol_type = other DNA
ttcctgttccgcaaccaatcatcattaatgctgctggatatccggtatataacggacagattgccaagttcgtaa

SEQ ID NO: 214075 - DNA, 75 bp, synthetic construct
  source 1..75: mol_type = other DNA
ggctttttcaaacggtaacgcagttgcaagaacagacgttgccatttggcgtgaaattattgtgcgtaagtattt

SEQ ID NO: 214076 - DNA, 75 bp, synthetic construct
  source 1..75: mol_type = other DNA
ggctttttcaaacggtaacacagttgcaagaacagacgttgccatttggcgtgaaattattatgcgtaagtattt

SEQ ID NO: 214077 - DNA, 75 bp, synthetic construct
  source 1..75: mol_type = other DNA
aaaccgacgcgcgtttcatcggctacggcgcaatgctgatggagtccttcgtggcgattatggcgctggttgctg

SEQ ID NO: 214078 - DNA, 75 bp, synthetic construct
  source 1..75: mol_type = other DNA
gtgtttaattatatcgaatgtgattacaatcggtggcggcggcacagttggtgtggcggcctcagtccggaacaa

SEQ ID NO: 214079 - DNA, 75 bp, synthetic construct
  source 1..75: mol_type = other DNA
catgatggaaaccagcacgagaagggcggcggtgagcagctcaaagggcagtatgcagacgctggatttatgatg

SEQ ID NO: 214080 - DNA, 75 bp, synthetic construct
  source 1..75: mol_type = other DNA
gcatcacacggctgatggcgttgaagatggcatttcaatctgctacttcaagccatactcgcaaggccgtgctcg

SEQ ID NO: 214081 - DNA, 75 bp, synthetic construct
  source 1..75: mol_type = other DNA
cgtatggatatcaattcaattaagatgctgtgcggtgcgttgaaagatggtctctctcaagaatttaagctgact

SEQ ID NO: 214082 - DNA, 75 bp, synthetic construct
  source 1..75: mol_type = other DNA
gaagttcgagccgcagcggcgttacgcgaccctggtggcgctcgccatcgagggcatggccaccgtcaccgacga

SEQ ID NO: 214083 - DNA, 75 bp, synthetic construct
  source 1..75: mol_type = other DNA
aggatccgattgggctgaaggggggatggaatttttatcagtatccgctgaatccggttcagtatatagattcaa

SEQ ID NO: 214084 - DNA, 75 bp, synthetic construct
  source 1..75: mol_type = other DNA
aacttgttcgcaccttccctaatgacggtgcggggtttgcaaatggttccacagccgcagataaagcaagtgctg

SEQ ID NO: 214085 - DNA, 75 bp, synthetic construct
  source 1..75: mol_type = other DNA
gacgccgcctgttgcctctgttgatgttccacctgcgcaacctactgttgcttggcagcctgtgccggggccgca

SEQ ID NO: 214086 - DNA, 75 bp, synthetic construct
  source 1..75: mol_type = other DNA
aaatttcagctatccagtacgatttaagtaatcctttttatttacgtccaaaacgcaagacggttcagaatattt

SEQ ID NO: 214087 - DNA, 75 bp, synthetic construct
  source 1..75: mol_type = other DNA
tacgagcagtcccgccagtcatttggcattaacgttcttggcacgttgattgttgaagttgaagcagaaaacggc

SEQ ID NO: 214088 - DNA, 75 bp, synthetic construct
  source 1..75: mol_type = other DNA
tatcagcatgattattgttgcggctgatctacatcagcagtgcgctgtggtggacgcgcaagatgattgttcaac

SEQ ID NO: 214089 - DNA, 75 bp, synthetic construct
  source 1..75: mol_type = other DNA
gaaagtaatcaactttcggatttcctcactgcgccggtgcagggatcacagaatgcgtttgacgttaacttttag

SEQ ID NO: 214090 - DNA, 75 bp, synthetic construct
  source 1..75: mol_type = other DNA
gcaatttctttttgagcaaactgaaatgagccctggtacggtgcgtgaatatgtcgttcgtctgcgccgtttggg

SEQ ID NO: 214091 - DNA, 75 bp, synthetic construct
  source 1..75: mol_type = other DNA
gatatggcagaatatccagggggaataaagattctttttctgctgccaaaatatgggatgatattatttatttgc

SEQ ID NO: 214092 - DNA, 75 bp, synthetic construct
  source 1..75: mol_type = other DNA
ccagcgtgcaattatcgaagctgtggagaaggtgacacatatcgccccggctgaccatgaggggagtattcttgg

SEQ ID NO: 214093 - DNA, 75 bp, synthetic construct
  source 1..75: mol_type = other DNA
tcgacttctgtgccattgccagaatgggcaacgcagaggatgcccactactgccaggtagttgagagcccagcag

SEQ ID NO: 214094 - DNA, 75 bp, synthetic construct
  source 1..75: mol_type = other DNA
gcaaacgcaaaagatgaagcggcatttgctacaggatatccgtcgctcggcttacgtttatcgcgtcgattgcgg

SEQ ID NO: 214095 - DNA, 75 bp, synthetic construct
  source 1..75: mol_type = other DNA
atgtggaacagtcgcacttcatccttgagtcttacggattggattgcttccttgccgacattgaagcctgccgcc

SEQ ID NO: 214096 - DNA, 75 bp, synthetic construct
  source 1..75: mol_type = other DNA
ttacgctacgaatatgctttgaatttattaggtagactcggtgtatcaaaatctcgagtcggattagattttatc

SEQ ID NO: 214097 - DNA, 75 bp, synthetic construct
  source 1..75: mol_type = other DNA
cttgcgaacgccggctaccaggaagagatagaccatcgttcatacgagcgtcagggactggagaaagcgcccggc

SEQ ID NO: 214098 - DNA, 75 bp, synthetic construct
  source 1..75: mol_type = other DNA
tgcggaggtgcgccaatatccgtcatccgccaatacattgaacaacagcaaacacctggtcaggtggaaaaccgc

SEQ ID NO: 214099 - DNA, 75 bp, synthetic construct
  source 1..75: mol_type = other DNA
gaaatcgggttaacacctggttgcgcgaagccgacgatccgcgtctcaatagtatcgttcagcaactctttcgcg

SEQ ID NO: 214100 - DNA, 75 bp, synthetic construct
  source 1..75: mol_type = other DNA
agtgtttccggttccgtgctgggcacgtctgagaccggaccgctctttactaaagagtcgtctgacaccgtgggt

SEQ ID NO: 214101 - DNA, 75 bp, synthetic construct
  source 1..75: mol_type = other DNA
aagcaaattcagaaattatcactgcagatgagtttattgatttcataaactctttcaaaaagcctttaatttgcc

SEQ ID NO: 214102 - DNA, 75 bp, synthetic construct
  source 1..75: mol_type = other DNA
ccgtaacaaatggcaacataatttctggtgatcagactaatcatatattcaattatcctgttaaaggaactaaca

SEQ ID NO: 214103 - DNA, 75 bp, synthetic construct
  source 1..75: mol_type = other DNA
gaatacggtctggcgccgatatttctgaagctggaatgataagccttaataatcgttttttgactaagctattta

SEQ ID NO: 214104 - DNA, 75 bp, synthetic construct
  source 1..75: mol_type = other DNA
tcgcgcttgctgcatggaatatcgcgttaaaggccggagccattgccatgcgggtttacggtgcggcgaccatgt

SEQ ID NO: 214105 - DNA, 75 bp, synthetic construct
  source 1..75: mol_type = other DNA
ctgcgcacatgtactgcttttttcttataaaaaagccaggacactgattaataaaagaaaagaagatcaaggaga

SEQ ID NO: 214106 - DNA, 75 bp, synthetic construct
  source 1..75: mol_type = other DNA
aagcaaactccgagattatcacagcggatgagttcattgatttcataaattcattcaaaaaaccaataacttgcc

SEQ ID NO: 214107 - DNA, 75 bp, synthetic construct
  source 1..75: mol_type = other DNA
aagaagtcacattgacaaagttaagtagcggccgccgtcttctggaggcgttgctgatccttattgtcctgtttg

SEQ ID NO: 214108 - DNA, 75 bp, synthetic construct
  source 1..75: mol_type = other DNA
aagttttaaccagtcatcacggaataataagagatgaagaaaaaaatgttattgtctcggtgctttgcaggttcc

SEQ ID NO: 214109 - DNA, 75 bp, synthetic construct
  source 1..75: mol_type = other DNA
tagagttgatgcacatagtgatattccaaataactatatatctaaattattagatgattattttaatattatgca

SEQ ID NO: 214110 - DNA, 75 bp, synthetic construct
  source 1..75: mol_type = other DNA
agcgaaatggtcaatgggcatccatactcgacgatttggcacgcagtctcgatatcctaattatcgtttccgcag

SEQ ID NO: 214111 - DNA, 75 bp, synthetic construct
  source 1..75: mol_type = other DNA
cgaagacaaaactttagtgcttttttcgtcaaacgactctctattatctctaacagaaagaattaatgcgtactc

SEQ ID NO: 214112 - DNA, 75 bp, synthetic construct
  source 1..75: mol_type = other DNA
gcaatattactcaagcaaattccaaattgcactgctaacttgttaagagctctattggttaactcctcaagtcat

SEQ ID NO: 214113 - DNA, 75 bp, synthetic construct
  source 1..75: mol_type = other DNA
gttctttctcgacgctgcgtaagcattgggaatggatgacgttctccgcagatagcgtatcttcggtacatacgc

SEQ ID NO: 214114 - DNA, 75 bp, synthetic construct
  source 1..75: mol_type = other DNA
gtatggaacggctgcaaaagctgattgtaagaataaaagatcagcatcctgccggtagtacaccaaccatagcaa

SEQ ID NO: 214115 - DNA, 75 bp, synthetic construct
  source 1..75: mol_type = other DNA
tctgcatatgtgctgcaacaatctggcgaacagacaagcacgctcccgtgaaacgcagcgcgcgttattctacgt

SEQ ID NO: 214116 - DNA, 75 bp, synthetic construct
  source 1..75: mol_type = other DNA
tgggagatggcagcctgcagatggctattggtgttatggggattttagcagcaatgttatgcctgatctcgccga

SEQ ID NO: 214117 - DNA, 75 bp, synthetic construct
  source 1..75: mol_type = other DNA
cagtcggtgcaccgattccgtggccatcagataccgttccgtctggttatgccctgatgcaggggcagacttttg

SEQ ID NO: 214118 - DNA, 75 bp, synthetic construct
  source 1..75: mol_type = other DNA
atggataaaataaaatcaaatgcgcgttatttaagacgcaatctcaccccgcaggaacgaaagctctggcgatat

SEQ ID NO: 214119 - DNA, 75 bp, synthetic construct
  source 1..75: mol_type = other DNA
acttgactatagctatatcgacgtatggcgaaagaatagttaatgcgaagaaaattgctttggaatttagtcgga

SEQ ID NO: 214120 - DNA, 75 bp, synthetic construct
  source 1..75: mol_type = other DNA
aacccaaagacatttttaagatcactttaaatgcaaaccctgaagccttgggaaaaaacccgagcgaacgagatc

SEQ ID NO: 214121 - DNA, 75 bp, synthetic construct
  source 1..75: mol_type = other DNA
gggtaactggattgacgacaaagatccattgtcaggtgcccttatcaatggtaccggttcgggtattggttatgg

SEQ ID NO: 214122 - DNA, 75 bp, synthetic construct
  source 1..75: mol_type = other DNA
aagcctgtaagcgaggagaagcagtcaataaagcgtatgccggagcgttggccactggtagtgtagctctcttac

SEQ ID NO: 214123 - DNA, 75 bp, synthetic construct
  source 1..75: mol_type = other DNA
atttttttgatagccagagtatgggatgcagttcacgatccccttatcgctggcgtgatggataccctgaatctc

SEQ ID NO: 214124 - DNA, 75 bp, synthetic construct
  source 1..75: mol_type = other DNA
ggctggtgtgtcgaccgcccacacttagtcaaactggtcgaaaacctctttagccgcgaaagtttcgcccgcacc

SEQ ID NO: 214125 - DNA, 75 bp, synthetic construct
  source 1..75: mol_type = other DNA
aacttctttcgtttataaagatggccaacagatggttactttaacagctatcgttcttgaaaacactgatacaga

SEQ ID NO: 214126 - DNA, 75 bp, synthetic construct
  source 1..75: mol_type = other DNA
gcagccgcaacaaccagttgcgccacagccgcaatatcaacagccgcaacaaccggttgcaccgcagccgcaata

SEQ ID NO: 214127 - DNA, 75 bp, synthetic construct
  source 1..75: mol_type = other DNA
gttccggtattacgagccggaaaccgggatgtacctggtgagtgatccgctggggttgcagggaggggagcagac

SEQ ID NO: 214128 - DNA, 75 bp, synthetic construct
  source 1..75: mol_type = other DNA
gctgtgctataaccggttccggtattacgagtcggaaaccgggatgtacctggtgagtgatccgctggggttgct

SEQ ID NO: 214129 - DNA, 75 bp, synthetic construct
  source 1..75: mol_type = other DNA
tggaaaattcagtaacggtgaacacttcaacttatttatctcaaatggtaaatgctggtcaaggtaatgtaatct

SEQ ID NO: 214130 - DNA, 75 bp, synthetic construct
  source 1..75: mol_type = other DNA
cgacggtgacagtgatacggcggttaacccgtatcacgcccagtacattctgcgccgccgcgatgattatctgga

SEQ ID NO: 214131 - DNA, 75 bp, synthetic construct
  source 1..75: mol_type = other DNA
gcgtactgcgacgaacgtaccgactttacgctgggccagaccctccccctctccttcacccgtttccacagttct

SEQ ID NO: 214132 - DNA, 75 bp, synthetic construct
  source 1..75: mol_type = other DNA
aatttgaatacgccgccgcacacggtcagttaagccgttacacggcggcagacggcgcggagtggcagtaccgct

SEQ ID NO: 214133 - DNA, 75 bp, synthetic construct
  source 1..75: mol_type = other DNA
gaatatctccgcgtcataatcctgaatttacaatgatggaactctatatagcttatgcagatttccatgacctga

SEQ ID NO: 214134 - DNA, 75 bp, synthetic construct
  source 1..75: mol_type = other DNA
ccataccttccaagaaggctatctgcggcagaggcgatggcactccagtctttaccaaaagagtttgaacttcct

SEQ ID NO: 214135 - DNA, 75 bp, synthetic construct
  source 1..75: mol_type = other DNA
gtccgttcgatttgccggtggcgcgaacggacggtgaaggccaccgctggcagtaccgctacgataaagacacgc

SEQ ID NO: 214136 - DNA, 75 bp, synthetic construct
  source 1..75: mol_type = other DNA
gtcacggcggtgacagcctcaggcaccgggctgggctatggcgaaggcgacgagacttatggctatgacagctgc

SEQ ID NO: 214137 - DNA, 75 bp, synthetic construct
  source 1..75: mol_type = other DNA
gtaccggctggaccggaacggccaggtcacggcggtgacagcctcaggcaccgggctgggctatggcgaaggcga

SEQ ID NO: 214138 - DNA, 75 bp, synthetic construct
  source 1..75: mol_type = other DNA
agcagttcagccgggtacggcaggcgcatccgtcggtggccccgcagtgggggacacggacgaatcatgcggtga

SEQ ID NO: 214139 - DNA, 75 bp, synthetic construct
  source 1..75: mol_type = other DNA
gccgggaccagctgaccgggtattgcagcgcacagggggagcagtgggaataccgccacgacgccagcggcaggc

SEQ ID NO: 214140 - DNA, 75 bp, synthetic construct
  source 1..75: mol_type = other DNA
attaatggagtttgccaccatggtgggcgggcgtggcgaaatcaaaaaagatgtggatttcccggaagccggtga

SEQ ID NO: 214141 - DNA, 75 bp, synthetic construct
  source 1..75: mol_type = other DNA
cggcagcaccaccacgtatgaatgggatgaattccatcacctgctggcccgccactcccctgccgggcgggtgga

SEQ ID NO: 214142 - DNA, 75 bp, synthetic construct
  source 1..75: mol_type = other DNA
gcgcggaaggatttcgctatgaccgccacggcaacctgctggcctggacggacggcaacggcgttgtctggacga

SEQ ID NO: 214143 - DNA, 75 bp, synthetic construct
  source 1..75: mol_type = other DNA
tttcatgataagacacaaaaaaatgcttgggttatctgatgaggatgtagcaatactcaaaatattgaaagacaa

SEQ ID NO: 214144 - DNA, 75 bp, synthetic construct
  source 1..75: mol_type = other DNA
aaccggttccggtattacgaaccggagagcgggatgtacctggtgagtgatccactggggttgctggggggtgag

SEQ ID NO: 214145 - DNA, 75 bp, synthetic construct
  source 1..75: mol_type = other DNA
ctaatccgctggggtatgttgatcctttgggattagctatatgtcctgtgatgtatgattggtataaatacaatc

SEQ ID NO: 214146 - DNA, 75 bp, synthetic construct
  source 1..75: mol_type = other DNA
tgcgccgccgcgacgattacctggagctgttcgaccgtgatgcactgagcagccgcttcttttatgacgcctttc

SEQ ID NO: 214147 - DNA, 75 bp, synthetic construct
  source 1..75: mol_type = other DNA
tatttatcttaggaaaaatgctaccttatatgaggtgtatcatgaagtgattcatgctaagcaatttgcgaaaat

SEQ ID NO: 214148 - DNA, 75 bp, synthetic construct
  source 1..75: mol_type = other DNA
cctggcagcctgtaccggggccgcaaacgggagaaccggttattgcacctgcaccggaaggttacccacagcagt

SEQ ID NO: 214149 - DNA, 75 bp, synthetic construct
  source 1..75: mol_type = other DNA
ctcagcgaacaggaccttgacgaatactacaaccaattctccaatgccgttctctggcccgcttttcattatcgg

SEQ ID NO: 214150 - DNA, 75 bp, synthetic construct
  source 1..75: mol_type = other DNA
atatttgactcggaacggtctctcacattcaacttctgtagagagccaaataatgttaacaagttttcacgaagc

SEQ ID NO: 214151 - DNA, 75 bp, synthetic construct
  source 1..75: mol_type = other DNA
gcttgttaaccctgaactggatttagttcggcagctggcgcttaacggtaagacgcgcgcaatacgggaacaagc

SEQ ID NO: 214152 - DNA, 75 bp, synthetic construct
  source 1..75: mol_type = other DNA
tttgggcgaagttttttctgaggcaggaaaacagctctcgtgcgcaggttaacgaagcgttacgtgtttattatg

SEQ ID NO: 214153 - DNA, 75 bp, synthetic construct
  source 1..75: mol_type = other DNA
atctggtgttgcgctacgctcatgaaaaaccgaagttaacgcgctggtcagacaacgtgcgtattctggaactac

SEQ ID NO: 214154 - DNA, 75 bp, synthetic construct
  source 1..75: mol_type = other DNA
cacgcaggcgcagcgtgcggaagaggcccgcacctcttcgctatcttcttctgacagttcccgccctctctcagc

SEQ ID NO: 214155 - DNA, 75 bp, synthetic construct
  source 1..75: mol_type = other DNA
aaatcagcattcattggttaatctggaagcgcaaaataataatctaaaaaaattaatatttctgatagttataaa

SEQ ID NO: 214156 - DNA, 75 bp, synthetic construct
  source 1..75: mol_type = other DNA
ccgtcattcgctgaaattgccgatctttctgacgccactgcagatatcattacgaagttgcttcaagtcggtgtt

SEQ ID NO: 214157 - DNA, 75 bp, synthetic construct
  source 1..75: mol_type = other DNA
gccgcgccgccggttacaccgatggggaaagctggtggagccacagagtagaggaacgcgaagatgatttgtctc

SEQ ID NO: 214158 - DNA, 75 bp, synthetic construct
  source 1..75: mol_type = other DNA
gggcggcgctgccgccggatatccggttaagcccgcatctttacctggcgaccaacagcgcacaggggccgtggt

SEQ ID NO: 214159 - DNA, 75 bp, synthetic construct
  source 1..75: mol_type = other DNA
ccccgttctgtttcctcttctcaggttttccccgacacgctgcccgccggtacagagtacggtgccgataacggt

SEQ ID NO: 214160 - DNA, 75 bp, synthetic construct
  source 1..75: mol_type = other DNA
tgaaaattttgaatcctgcacgcccccagaagatccaaatctttatgttttttggctggcagaaaagcaacgaca

SEQ ID NO: 214161 - DNA, 75 bp, synthetic construct
  source 1..75: mol_type = other DNA
ataaggcggcgaatgctctgccatcggacggcaccgccgttgccgcgaatagactcgccaccccaagaaatatta

SEQ ID NO: 214162 - DNA, 75 bp, synthetic construct
  source 1..75: mol_type = other DNA
cagtcaaatatcaggtcaaaagatacacctgaaagtaattttgtatatcgcaaatttggtacccttccagaacac

SEQ ID NO: 214163 - DNA, 75 bp, synthetic construct
  source 1..75: mol_type = other DNA
taccggttccggtaaatctgtcggtgtgaacgcgatgatcctgagcatgctttataaagcacagccagaagatgt

SEQ ID NO: 214164 - DNA, 75 bp, synthetic construct
  source 1..75: mol_type = other DNA
ggaatgttgtgtctgtcttcggaatggctgaaaaatgcaaacgttccgatacgtctggacgggtatgttggtgaa

SEQ ID NO: 214165 - DNA, 75 bp, synthetic construct
  source 1..75: mol_type = other DNA
aatgataaaaaaagatgcttatgatgttgttaaggatgaacacaaacaatgttatgttctgagtgacaattccca

SEQ ID NO: 214166 - DNA, 75 bp, synthetic construct
  source 1..75: mol_type = other DNA
acgacgccaaaactgctggctaatgaaaccgacgcgcgtttcatcggctacggcgcaatgctgatggagtccttc

SEQ ID NO: 214167 - DNA, 75 bp, synthetic construct
  source 1..75: mol_type = other DNA
tcggataaggcagattacgccgtttcactgagtctgagcgtgccatttgacctgaaagggacccgtcattacagc

SEQ ID NO: 214168 - DNA, 75 bp, synthetic construct
  source 1..75: mol_type = other DNA
gacctggtggtgactgttgaggatgaaagtggtaacaaaaccgagcgggtctatccggtcaccacgctgccaacg

SEQ ID NO: 214169 - DNA, 75 bp, synthetic construct
  source 1..75: mol_type = other DNA
cgtcattacagcagtaacagcgtgggctatacctataatggtggtactacattcaacagcagtgtatcggccacg

SEQ ID NO: 214170 - DNA, 75 bp, synthetic construct
  source 1..75: mol_type = other DNA
caccaatctgacgggccgtaacggcaccatcaacatgtcgattcgtcttgatgacccggccttcccgaccgatat

SEQ ID NO: 214171 - DNA, 75 bp, synthetic construct
  source 1..75: mol_type = other DNA
aacgggagagccggttattgctcctgcaccggaaggttacccacagcagtcacaatatgcgcagcctgcagtgca

SEQ ID NO: 214172 - DNA, 75 bp, synthetic construct
  source 1..75: mol_type = other DNA
ttttaccattttcacttttgggatacccaaagtaacaatgtttagaaacatgctaccttttgattcgaaggctct

SEQ ID NO: 214173 - DNA, 75 bp, synthetic construct
  source 1..75: mol_type = other DNA
tatctgctaaggtaggaggaggtaaaacctatatcaataacttactaactaatatgcctaagcaagaatgcgaaa

SEQ ID NO: 214174 - DNA, 75 bp, synthetic construct
  source 1..75: mol_type = other DNA
ggcaaggactgtctctggatgatgggcatgacaacggcggttacgtgaactttggtgacggcagtgcgcagcatg

SEQ ID NO: 214175 - DNA, 75 bp, synthetic construct
  source 1..75: mol_type = other DNA
acgtggtgtttggtgagcgcaaactgaaaaccaccgtgctggctaacgatggtgagctgattgtgcttggtggtc

SEQ ID NO: 214176 - DNA, 75 bp, synthetic construct
  source 1..75: mol_type = other DNA
caatcgtccgggcgaattggcgaatggatttcacagctccctgttattggcgcacctggtaatgactccaactta

SEQ ID NO: 214177 - DNA, 75 bp, synthetic construct
  source 1..75: mol_type = other DNA
atcctctttctgtattgtttacatcgactgtacgaaggaataataatcgagctaagatgaatgttgagttcgact

SEQ ID NO: 214178 - DNA, 75 bp, synthetic construct
  source 1..75: mol_type = other DNA
atcggtttgattatagtatttgtatgtattttattgacacagagtcttactgtctttgcctgttttattccaata

SEQ ID NO: 214179 - DNA, 75 bp, synthetic construct
  source 1..75: mol_type = other DNA
tatttataacaacatcaatgaataccttagccacagggatggttcctgaaacatcagtattgctggttgatgaaa

SEQ ID NO: 214180 - DNA, 75 bp, synthetic construct
  source 1..75: mol_type = other DNA
ttaatccggataccaacggcgatctctccacgctcgcccagcttctttccggctttagcggtacggcggttggtg

SEQ ID NO: 214181 - DNA, 75 bp, synthetic construct
  source 1..75: mol_type = other DNA
ccctgggcagtacggtcagtgccgccgagaatattgttaactggctgaaagctgaactggagggtgaaaagcaac

SEQ ID NO: 214182 - DNA, 75 bp, synthetic construct
  source 1..75: mol_type = other DNA
gaggtgaagcaaatcatcaacgcctcactgttctgtttgtaccaaccgctgcaaaatgcgtttaacaatcgcgaa

SEQ ID NO: 214183 - DNA, 75 bp, synthetic construct
  source 1..75: mol_type = other DNA
actgccgacgcaacaggccgcaatgcactggcaaacgtcaacgaagaagatatagatacacttattcaacgcctg

SEQ ID NO: 214184 - DNA, 75 bp, synthetic construct
  source 1..75: mol_type = other DNA
ccaaggattccgttaaaaaaattccttaatgctgagaaggttctcacgcaaacaacatcatgggcactaaattca

SEQ ID NO: 214185 - DNA, 75 bp, synthetic construct
  source 1..75: mol_type = other DNA
agaaactttccattattttcttgtcgttggccggaatacttttaattatcatgaatttttctgcacgtggcaatt

SEQ ID NO: 214186 - DNA, 75 bp, synthetic construct
  source 1..75: mol_type = other DNA
tctcatatttatcattatctttttttgtgttgttcttaatttttttaaatatttcagcagtttcattcgatgagt

SEQ ID NO: 214187 - DNA, 75 bp, synthetic construct
  source 1..75: mol_type = other DNA
attccgcattgacaaatatttatgctgctatttgttctttagatctttctttcggctttggggttggtttaggag

SEQ ID NO: 214188 - DNA, 75 bp, synthetic construct
  source 1..75: mol_type = other DNA
cgcacctacagcagttaccggacaaaaacgcccgcgccggtgggggagcctcggccccggctggaaatgcctgcg

SEQ ID NO: 214189 - DNA, 75 bp, synthetic construct
  source 1..75: mol_type = other DNA
ctatctacttcggcggcgtgattgctcacgacccttactggggtccggcactgacctttaaagacaccaccatta

SEQ ID NO: 214190 - DNA, 75 bp, synthetic construct
  source 1..75: mol_type = other DNA
ctatcccagaacttcttaacatgctggatattaaaggaaaaatcatcacaactgatgcgatgggttgccagaaag

SEQ ID NO: 214191 - DNA, 75 bp, synthetic construct
  source 1..75: mol_type = other DNA
ctgaatcatgccgcaatgagtacacttcttggtgagaggattatggaccgcatgaccatgaacggtggtcgatga

SEQ ID NO: 214192 - DNA, 75 bp, synthetic construct
  source 1..75: mol_type = other DNA
attatcgacgcggaactgtttgcactggctggtctggatgcgcagcatctgcaactgctggttcatagcggctcc

SEQ ID NO: 214193 - DNA, 75 bp, synthetic construct
  source 1..75: mol_type = other DNA
ttaggccattatacattcatactgccagaggatattttaaaaggagagctgagagctctaaatttaaatataaac

SEQ ID NO: 214194 - DNA, 75 bp, synthetic construct
  source 1..75: mol_type = other DNA
acgactgaagatgacagcgatatcctgctctatcacgcgttacgtgattacgcattggatcactctgaatcggtc

SEQ ID NO: 214195 - DNA, 75 bp, synthetic construct
  source 1..75: mol_type = other DNA
cggtcgttcttgataattatccctggacgaatcactttctgcttcgtagcagaggcggtagttcgctttatctgg

SEQ ID NO: 214196 - DNA, 75 bp, synthetic construct
  source 1..75: mol_type = other DNA
atgaaattactcaccacggcggcgctggtcgccagcctctgcattatctcagcgcccccggtcctcgctgaaaat

SEQ ID NO: 214197 - DNA, 75 bp, synthetic construct
  source 1..75: mol_type = other DNA
aaataaagataattcccttggcaatgatcaatatgcggggatattttttactaaacgtggtggcacgctagattt

SEQ ID NO: 214198 - DNA, 75 bp, synthetic construct
  source 1..75: mol_type = other DNA
ggtactctgaatgttcaaaaaaaacagggggcaaatataaagataggtgaaggaaatgttattcttaatgaagaa

SEQ ID NO: 214199 - DNA, 75 bp, synthetic construct
  source 1..75: mol_type = other DNA
ctttgaagcgttttgggatgaacttcatccgcaggaagcgggcacccgatgctggactggtcacagcgttagggt

SEQ ID NO: 214200 - DNA, 75 bp, synthetic construct
  source 1..75: mol_type = other DNA
cgccgtgaactgaccagcggtgagcgcgcgatccagcacggtctggcgattgccgccgggattaaagcagcaaag

SEQ ID NO: 214201 - DNA, 75 bp, synthetic construct
  source 1..75: mol_type = other DNA
gatttcaagaaaagtttatttttctcgatgcaagaacatctacgacatgtggtagctcagaaagcaaatctcttt

SEQ ID NO: 214202 - DNA, 75 bp, synthetic construct
  source 1..75: mol_type = other DNA
acgccaccagtgaccacctgagaaaaatgccgccgctgtacgagctggaaattactgaggacggccacgtgaaag

SEQ ID NO: 214203 - DNA, 75 bp, synthetic construct
  source 1..75: mol_type = other DNA
tttaccctggagcgacagaagaagattgtataccagttgtagagaaagtatcaggtcttaagtttaatattgatt

SEQ ID NO: 214204 - DNA, 75 bp, synthetic construct
  source 1..75: mol_type = other DNA
tctcgtattgatgaattacgaaatggtcacgatagtacattagagtgctcaaatttagagttgttagaagcaact

SEQ ID NO: 214205 - DNA, 75 bp, synthetic construct
  source 1..75: mol_type = other DNA
gtcggtcagggttcgcaaaacgaatcgctgatgtcggtgattgagtacaaaggcaacgcgtcggaagatgcacgc

SEQ ID NO: 214206 - DNA, 75 bp, synthetic construct
  source 1..75: mol_type = other DNA
aacatagcctgcagggtgaggacttctcatcgttcaattatctgtttgcggttaacaagctgttgtctaaccctg

SEQ ID NO: 214207 - DNA, 75 bp, synthetic construct
  source 1..75: mol_type = other DNA
gggaatgtcgtaacagcgaatcaatgcagcgggtactggctttttacaggggtggatttcaggagctcgtatcgt

SEQ ID NO: 214208 - DNA, 75 bp, synthetic construct
  source 1..75: mol_type = other DNA
ataccagagaaattattctggaaatgattgacgaagcagatgaccccccgtttgctgagcagcggacctggcatc

SEQ ID NO: 214209 - DNA, 75 bp, synthetic construct
  source 1..75: mol_type = other DNA
attcatgtgatgatccaacctatgatgtgctacctccgtggccatcaacaacaaacacagcctggataatcctga

SEQ ID NO: 214210 - DNA, 75 bp, synthetic construct
  source 1..75: mol_type = other DNA
aagttaacggacaacgattttcttatggaattactggtggaaatgtttttgttagttgtcttgtttttgtttttg

SEQ ID NO: 214211 - DNA, 75 bp, synthetic construct
  source 1..75: mol_type = other DNA
gacgccattctcggatggttatgttttccactcaatgcagttccacatattcgatctgctcaagtctggtcaaaa

SEQ ID NO: 214212 - DNA, 75 bp, synthetic construct
  source 1..75: mol_type = other DNA
atgtcatcagcggtggagtgcaatgtcgtgcaatacgaatggcgaaaagccgagctcatcggtcagcttctcaac

SEQ ID NO: 214213 - DNA, 75 bp, synthetic construct
  source 1..75: mol_type = other DNA
aaaagcgtgccgagctcactcaagacgccatcacggcgctcaccaagacccaggaggctttgaccctccttgatg

SEQ ID NO: 214214 - DNA, 75 bp, synthetic construct
  source 1..75: mol_type = other DNA
tgccatcagcagagcaggttaccgttataagacgccaggcgtttctggcatatctgtttggtgatgacgctcaca

SEQ ID NO: 214215 - DNA, 75 bp, synthetic construct
  source 1..75: mol_type = other DNA
gcggcagtgatgttgccattgaaaccgcggcgattaccctgatgcgccatagcctgatgggcgttgcggatgcgc

SEQ ID NO: 214216 - DNA, 75 bp, synthetic construct
  source 1..75: mol_type = other DNA
actggatttcacctctctgcgtgatgctgtaaccgagttcgaacagcatcgcgacgagcacgcctggaaaatcga

SEQ ID NO: 214217 - DNA, 75 bp, synthetic construct
  source 1..75: mol_type = other DNA
ccaagatgcaatcactgcgctcaccaagacccatgaggcattgatcctccttgatgcaaagaagaccaaggaggc

SEQ ID NO: 214218 - DNA, 75 bp, synthetic construct
  source 1..75: mol_type = other DNA
gacatccacgccgacgtggaatcggtcaagaaagcggtcaagttgtctcaggagttgttggatgatggcgaggtg

SEQ ID NO: 214219 - DNA, 75 bp, synthetic construct
  source 1..75: mol_type = other DNA
cgggacgccgacgcgctgcaacgcgccagtacactcgataccgtcgtgttcgataaaaccgggacgctgaccgaa

SEQ ID NO: 214220 - DNA, 75 bp, synthetic construct
  source 1..75: mol_type = other DNA
ggtgaatattttgttagcgttgcggtgaataacaacaaaatcagtaatgggcaaaaaattaactggcaaaaaaaa

SEQ ID NO: 214221 - DNA, 75 bp, synthetic construct
  source 1..75: mol_type = other DNA
gtgaatatttatcgactctcttttgtatcctgcctggtcatggcgatgccttgcgcaatggcggtcgaattcaat

SEQ ID NO: 214222 - DNA, 75 bp, synthetic construct
  source 1..75: mol_type = other DNA
gccggacggtaaagccgaagcgatcaaacgtctgcaaagtgaaggacgtcaggtggcaatggtgggcgacggcat

SEQ ID NO: 214223 - DNA, 75 bp, synthetic construct
  source 1..75: mol_type = other DNA
gcgctgttaaatgagcaacaggttggtaccaaagctatcgaagcggagattactgctcaggcatcgcaaggagca

SEQ ID NO: 214224 - DNA, 75 bp, synthetic construct
  source 1..75: mol_type = other DNA
aggtgatatgcagctgccgcaggtcaacggtttccgcacattgcgcgggctgggcgtgagcggtgaagctgaagg

SEQ ID NO: 214225 - DNA, 75 bp, synthetic construct
  source 1..75: mol_type = other DNA
aactggcgatgaacaaagaggtgaaaggctttgtgttcaatcccatgctggaacaggtcttcaatatcaatacca

SEQ ID NO: 214226 - DNA, 75 bp, synthetic construct
  source 1..75: mol_type = other DNA
gtaacggaaaacagatgcgcggcccgattccggaaggcatgtggggctacgatgcgacggcaatgcaatacaacc

SEQ ID NO: 214227 - DNA, 75 bp, synthetic construct
  source 1..75: mol_type = other DNA
gctctggcgacacaatccagtctcaacaagctgggcatcaatgtgaagctggaaaagctggcgaacgccaccatg

SEQ ID NO: 214228 - DNA, 75 bp, synthetic construct
  source 1..75: mol_type = other DNA
atgttttggccatccccggcgatatccgtgatgaggctttttgcggtcatctggtaacacaggcggtaaaaggac

SEQ ID NO: 214229 - DNA, 75 bp, synthetic construct
  source 1..75: mol_type = other DNA
tccgggctcactggccggaatgattgaacaggcctggtgcagtgccctgggggtggatgccgggccttatgccac

SEQ ID NO: 214230 - DNA, 75 bp, synthetic construct
  source 1..75: mol_type = other DNA
gtaattcataaattatttggtctaaaatttaaagacgtcatttatgactggaataatgcgcaaccatgtgatgct

SEQ ID NO: 214231 - DNA, 75 bp, synthetic construct
  source 1..75: mol_type = other DNA
gttactcacaggtctgtcctctacgggattatctacagatgagagagaaatgcgacgaattatcgatctcgctca

SEQ ID NO: 214232 - DNA, 75 bp, synthetic construct
  source 1..75: mol_type = other DNA
tgcctggcttgccgatcgttttggtcggcgcagggtttatatcacaggcgcgttgatcggaacgttgagcgcatt

SEQ ID NO: 214233 - DNA, 75 bp, synthetic construct
  source 1..75: mol_type = other DNA
atgggtttaaaagaatattttaaaaaatccaaagcagaagcgcgtaaaacacccgctcaaaaagaaatcgataaa

SEQ ID NO: 214234 - DNA, 75 bp, synthetic construct
  source 1..75: mol_type = other DNA
gtgccgcaagggaaaagtcttttgattgggggatatacacgcgatacgaatacctatgaaagtcgcaagatccca

SEQ ID NO: 214235 - DNA, 75 bp, synthetic construct
  source 1..75: mol_type = other DNA
tccgggctcactggccgggatgattaaacaggcctggtgcagtgccctgggggtggatgccgggccttatgccac

SEQ ID NO: 214236 - DNA, 75 bp, synthetic construct
  source 1..75: mol_type = other DNA
aaacgggtatggcgacgtgaacgggacctgacgggctggatgtcgctgtcacggaaaccggaagtgacctggtac

SEQ ID NO: 214237 - DNA, 75 bp, synthetic construct
  source 1..75: mol_type = other DNA
tccctagataaagaaaaacgggcgattttgtttactcagtggataatgaaacaaactaataaaaacggtatgacg

SEQ ID NO: 214238 - DNA, 75 bp, synthetic construct
  source 1..75: mol_type = other DNA
tccgggttcactggccggtatgattcaacaggcctggtgcagtgccctgggggtggatgccgggccttatgccac

SEQ ID NO: 214239 - DNA, 75 bp, synthetic construct
  source 1..75: mol_type = other DNA
aatgaaatccgcatggcgatccatcaggttagcccctttcgtgaagagccagtggattgcgttctgtgggttaaa

SEQ ID NO: 214240 - DNA, 75 bp, synthetic construct
  source 1..75: mol_type = other DNA
ccggagcaacgacaaggattatggctctatcacgttatcgaaccggatcgctgggctgctatgtgcgcacgagtc

SEQ ID NO: 214241 - DNA, 75 bp, synthetic construct
  source 1..75: mol_type = other DNA
tttgatgaccaaacctggattcggttattcaaaaaacactttgctgatgttattcaactacgatgtgatgtgtaa

SEQ ID NO: 214242 - DNA, 75 bp, synthetic construct
  source 1..75: mol_type = other DNA
aaaaattgaaaaaataaactatgaacatcttacttttttagctacgtatattatcccattgattacatttgattt

SEQ ID NO: 214243 - DNA, 75 bp, synthetic construct
  source 1..75: mol_type = other DNA
tccgggatcactggccgggatgattcaacaggcctggtgcagtgccctgggggtggatgccgggccttatgccac

SEQ ID NO: 214244 - DNA, 75 bp, synthetic construct
  source 1..75: mol_type = other DNA
atttaccggtcaacaacaaaccggtgatgctgttaagccaggtcgttgttgcatcctgctcgccagatccagctt

SEQ ID NO: 214245 - DNA, 75 bp, synthetic construct
  source 1..75: mol_type = other DNA
cgacgctgggtaagagcctggcaactccacagtattgatggtattccatggaaaaatgatcgccactttcctgag

SEQ ID NO: 214246 - DNA, 75 bp, synthetic construct
  source 1..75: mol_type = other DNA
cagacctggctggataccggagattcatccgctacgcctaagaatttaccgatgcaggcaattccaccgatttta

SEQ ID NO: 214247 - DNA, 75 bp, synthetic construct
  source 1..75: mol_type = other DNA
gccgaatggttttcacaaaaacgtccggcggcgatgatgatcggcatccgtgcggatgagtcctacaaccgtttt

SEQ ID NO: 214248 - DNA, 75 bp, synthetic construct
  source 1..75: mol_type = other DNA
gcttgggtagatccatttaataaagaggataaaagcaaagcgccgtttaccgttattccgccagtatcacgattc

SEQ ID NO: 214249 - DNA, 75 bp, synthetic construct
  source 1..75: mol_type = other DNA
atggtcaggagatattctggagtattaattggtatttccgtgaaaatatcccgtattgataggttttcatcttct

SEQ ID NO: 214250 - DNA, 75 bp, synthetic construct
  source 1..75: mol_type = other DNA
tgatgaacgcggcctgccggtaagcctggtgtcgccacagggcgaagagacccggctggcatacaccgctcaggg

SEQ ID NO: 214251 - DNA, 75 bp, synthetic construct
  source 1..75: mol_type = other DNA
caccgccagcaaccgcatcacgtttgagcgcgacacccagtaccggatcacgggtgtcagtcacaccgacgggat

SEQ ID NO: 214252 - DNA, 75 bp, synthetic construct
  source 1..75: mol_type = other DNA
tgggagccacgctgaacttcgccttcgacggtgaaagtgatacggcggttaacccgtatcacgcccagtacattc

SEQ ID NO: 214253 - DNA, 75 bp, synthetic construct
  source 1..75: mol_type = other DNA
gtataaagtatgaagaaatgatgaatgttggcggctgggaactagtatttagtcaagctaaatctgactcggctt

SEQ ID NO: 214254 - DNA, 75 bp, synthetic construct
  source 1..75: mol_type = other DNA
gggaaaactggggaatctggcgaaactgggcaaactgggaaacctgctggggaaaagcgggaagctgctgggtgc

SEQ ID NO: 214255 - DNA, 75 bp, synthetic construct
  source 1..75: mol_type = other DNA
tggcgggatgcggaatcggggctgtgctataaccggttccggtattacgagccggagagcgggatgtacctggtg

SEQ ID NO: 214256 - DNA, 75 bp, synthetic construct
  source 1..75: mol_type = other DNA
aactgcgacaggagaaatggcaattttatttatatcggccttaccagctgattactcccaaaagggtgactgtcg

SEQ ID NO: 214257 - DNA, 75 bp, synthetic construct
  source 1..75: mol_type = other DNA
agacatgctgtggttatatacatggacactctgctgggggaactaacccttcacttgttgaggcaatgcattttt

SEQ ID NO: 214258 - DNA, 75 bp, synthetic construct
  source 1..75: mol_type = other DNA
ggcgaaaaaatgatagcaattgcacaaaagagttacacttgggatataattagcaagcaatataaacatttattt

SEQ ID NO: 214259 - DNA, 75 bp, synthetic construct
  source 1..75: mol_type = other DNA
gctggggctggcaaaaacttctgttcccgcagaaaaaataagcctttcggataaagcaagagatctttttagaca

SEQ ID NO: 214260 - DNA, 75 bp, synthetic construct
  source 1..75: mol_type = other DNA
tgatattgataaagcaacaaatggaatctttttaagaaaagttgacgatggtgtaagtgcaatggcaaggcatca

SEQ ID NO: 214261 - DNA, 75 bp, synthetic construct
  source 1..75: mol_type = other DNA
ggatggaatttatatcagtatcctttaaatccactacaacaaattgaccctatgggattattgcagacttgggat

SEQ ID NO: 214262 - DNA, 75 bp, synthetic construct
  source 1..75: mol_type = other DNA
tgctttaggcgcaagaaaaattctggaaaaatatggtatacacattgattccgcagaaaatggaatatttttgaa

SEQ ID NO: 214263 - DNA, 75 bp, synthetic construct
  source 1..75: mol_type = other DNA
ttgctcaagagcgatgttaatttgttcaatcatttggttaggaaatcaacgttaccttctgcccgtaaggtgaat

SEQ ID NO: 214264 - DNA, 75 bp, synthetic construct
  source 1..75: mol_type = other DNA
cgaaccagcaacaccaggccagatacacagggaattacgccgccgcgtggaaaacgtcgtggattacgtcataaa

SEQ ID NO: 214265 - DNA, 75 bp, synthetic construct
  source 1..75: mol_type = other DNA
tatgacacatcttttattgacaaagatgcagaatatattgaattattagcgaagattgatttttcttatgaagtt

SEQ ID NO: 214266 - DNA, 75 bp, synthetic construct
  source 1..75: mol_type = other DNA
aatccagataagtatcctaattatcgtcttttgattcactcagccaaattaaaaaatgaaataaagagccactat

SEQ ID NO: 214267 - DNA, 75 bp, synthetic construct
  source 1..75: mol_type = other DNA
ggttggtctgggcattggcacgatggcgaatacgaactctgctggcgcgcatacccactcactgtccggcactgc

SEQ ID NO: 214268 - DNA, 75 bp, synthetic construct
  source 1..75: mol_type = other DNA
tctacaagctcggccggagcacactcgcacgttgatggtcgcaggtttaatacaagcacttttaaagacacctat

SEQ ID NO: 214269 - DNA, 75 bp, synthetic construct
  source 1..75: mol_type = other DNA
cgcagacaccggctacccggacccgcgcggggaactggacccggaagccgcccccggcctgctgtatgcgggaca

SEQ ID NO: 214270 - DNA, 75 bp, synthetic construct
  source 1..75: mol_type = other DNA
gatccgctgggattggctgcaagttctaaaatcagcagtttgatggactatattggcgatggtcgtcgtgttagt

SEQ ID NO: 214271 - DNA, 75 bp, synthetic construct
  source 1..75: mol_type = other DNA
gctggaatgcagccagccagcttgtcacccagcgcgccggatttttcccggaggaaaccacatggggcgggctgc

SEQ ID NO: 214272 - DNA, 75 bp, synthetic construct
  source 1..75: mol_type = other DNA
ctgaagggcctgcaattattagtggtgtaaataataatgacaggttatatatgttaaaaagagattttaattctg

SEQ ID NO: 214273 - DNA, 75 bp, synthetic construct
  source 1..75: mol_type = other DNA
aggtaaaacagccatagtgttccttatgccaatagggaatgatatgacagcttttagtattgtagagtcacgata

SEQ ID NO: 214274 - DNA, 75 bp, synthetic construct
  source 1..75: mol_type = other DNA
aggaaaccatcctctacagccgggatgccgcaggccgcctggcagaagtcatcacgccggaaggcaaaacgcagt

SEQ ID NO: 214275 - DNA, 75 bp, synthetic construct
  source 1..75: mol_type = other DNA
ctcaagaattaatgatggcgaattcgggggcgcaagttgtcaatgccggggtgattaatatcaggccagatgctg

SEQ ID NO: 214276 - DNA, 75 bp, synthetic construct
  source 1..75: mol_type = other DNA
catcacggccacaaatggctatagcgcaatcaaaactgaaaatactggctcgaacagtaacgggaaatggatttg

SEQ ID NO: 214277 - DNA, 75 bp, synthetic construct
  source 1..75: mol_type = other DNA
atgccaatacggtagaaattaccggcgtgaataaccttggcggtatgacgtggtgttacggtaaagacggcatta

SEQ ID NO: 214278 - DNA, 75 bp, synthetic construct
  source 1..75: mol_type = other DNA
ccgagcgaagggctgaaggtcacaccatatgcgggtgtgaaactgcgtcacacactggaaggtggctatcaggag

SEQ ID NO: 214279 - DNA, 75 bp, synthetic construct
  source 1..75: mol_type = other DNA
atggaaaaattaatcttttcggtaatccaatggatgaaagtgattcccacattggcgttacgccggatgacaaag

SEQ ID NO: 214280 - DNA, 75 bp, synthetic construct
  source 1..75: mol_type = other DNA
gcctggcaagcgtcggcgtgaagttacagcagcaaagaaagttcgctgaatctggatgcttaccactggaaagag

SEQ ID NO: 214281 - DNA, 75 bp, synthetic construct
  source 1..75: mol_type = other DNA
aaaaatttagtcgttatcattctctttctaattctcatcatctctttcaagcttttggcagtacaatgcaatcca

SEQ ID NO: 214282 - DNA, 75 bp, synthetic construct
  source 1..75: mol_type = other DNA
tagaaaaagaaaaagacagtatcaataagcaaattgcagataaacagcatattgacagtcataataaaaaattta

SEQ ID NO: 214283 - DNA, 75 bp, synthetic construct
  source 1..75: mol_type = other DNA
atcgtttttgaacagcttgtccatcttcagagtagcgaaacaaaaaatgcttcttgggcaaatttaacaggtgca

SEQ ID NO: 214284 - DNA, 75 bp, synthetic construct
  source 1..75: mol_type = other DNA
gtatggatgccagcggttatccgcaatccgcacctttaccggcgaacaatgtgctgcaaatcgagcgtcatattc

SEQ ID NO: 214285 - DNA, 75 bp, synthetic construct
  source 1..75: mol_type = other DNA
atttgactcaccgatattaggttttctggttaaagatcgtttgggtcaggttctattcggagagaacacgttacc

SEQ ID NO: 214286 - DNA, 75 bp, synthetic construct
  source 1..75: mol_type = other DNA
ttagccaggcagccttacaacttaaagaaaaagcgcgtcaaatgagagctgctaaacaaacgggggagcagcaag

SEQ ID NO: 214287 - DNA, 75 bp, synthetic construct
  source 1..75: mol_type = other DNA
tattcgataatgctggaaccgctagtaataatattgatatcaatggcggtacgttcaataatggtggagatgtta

SEQ ID NO: 214288 - DNA, 75 bp, synthetic construct
  source 1..75: mol_type = other DNA
cggatagcgcactgctggcgttaacagcagggaagaaccgggaaactattgctgcacaatttgcacagggtggtg

SEQ ID NO: 214289 - DNA, 75 bp, synthetic construct
  source 1..75: mol_type = other DNA
gatggctatcatctcgcaggatttccagacggttttgccgcatggcgagagctgccgtggagtgcatttgctccg

SEQ ID NO: 214290 - DNA, 75 bp, synthetic construct
  source 1..75: mol_type = other DNA
atacattcccggatgctcctgaaacgtcatctccagggtcaacactgtttttaaataatattacctgccacatgg

SEQ ID NO: 214291 - DNA, 75 bp, synthetic construct
  source 1..75: mol_type = other DNA
cgtcattgtgatggtgttactggcaagaaaaatatggcgtacccacggcacgctggacgtgaacaacttgaccgc

SEQ ID NO: 214292 - DNA, 75 bp, synthetic construct
  source 1..75: mol_type = other DNA
tccgggatcactggccggcatgattgaacaggcctggtgcagtgccctgggggtggatgccgggccttatgccac

SEQ ID NO: 214293 - DNA, 75 bp, synthetic construct
  source 1..75: mol_type = other DNA
acgtctagaaaaatttattaatgatctggatagcgcattaacagataaacatgttgatttaacacatgccagatc

SEQ ID NO: 214294 - DNA, 75 bp, synthetic construct
  source 1..75: mol_type = other DNA
taatcatcatgacgatccgtctccggtgccggatgatggcggtgatacacccgtcccgccggatgatggcggtga

SEQ ID NO: 214295 - DNA, 75 bp, synthetic construct
  source 1..75: mol_type = other DNA
gtccgcctactgaaagtagaccgcgaactgatgaaacgcatccagaccgatctggaaaaacgtcgcaccaattac

SEQ ID NO: 214296 - DNA, 75 bp, synthetic construct
  source 1..75: mol_type = other DNA
gctttctgctctcatggtacggctacgatgccggtgcgaaagcccaaagtgccacggcgattaacggtattgtac

SEQ ID NO: 214297 - DNA, 75 bp, synthetic construct
  source 1..75: mol_type = other DNA
cgagcgaaggactgaaggttacgccatatgcgggtgttaaactgcgtcacacactggaaggtggctatcaagagc

SEQ ID NO: 214298 - DNA, 75 bp, synthetic construct
  source 1..75: mol_type = other DNA
tcaatggcgtcaatcctggcggaacctccacctggcgctatgacgaagcgggaaaaatcgaaataatcatagagt

SEQ ID NO: 214299 - DNA, 75 bp, synthetic construct
  source 1..75: mol_type = other DNA
gacgaggctgctaacacggcttcgttcaatggcgtcaatcctggcggaacctccacctggcgctatgacgaagcg

SEQ ID NO: 214300 - DNA, 75 bp, synthetic construct
  source 1..75: mol_type = other DNA
gatccaaagcggaagcacgtaaaacgcccgctcaaaaagaaaccgataaaaaaattgaaaaaaacgtactggacg

SEQ ID NO: 214301 - DNA, 75 bp, synthetic construct
  source 1..75: mol_type = other DNA
cagctgggcagcaactccaccatgaagaaacacggtcgtgcgttgctttccgtgcgcgaaggcgataaagaacgc

SEQ ID NO: 214302 - DNA, 75 bp, synthetic construct
  source 1..75: mol_type = other DNA
attcagctacaggtcggggaatcgacggtaatcaggctgtcgaaggatggcatcaccatcgtgggcggttctgtt

SEQ ID NO: 214303 - DNA, 75 bp, synthetic construct
  source 1..75: mol_type = other DNA
actcactgttgattaactggaactgtgcagcctcgaaatccccaccgaagacccctgatgaaaagcaggatacgc

SEQ ID NO: 214304 - DNA, 75 bp, synthetic construct
  source 1..75: mol_type = other DNA
ctgacaaataagacaacggactattcgatggccgtaatcgatgtcggtgtcgcctatcgcgaaaaccttcaggag

SEQ ID NO: 214305 - DNA, 75 bp, synthetic construct
  source 1..75: mol_type = other DNA
gtaatctggtacaggttgccgagttgattgttcgctgcgcgatgatgcgcaaagaaagccgggggctgcatttta

SEQ ID NO: 214306 - DNA, 75 bp, synthetic construct
  source 1..75: mol_type = other DNA
atggcctcaatatacatctgaatcactacgaatcgctgctggggcgtgccagcatgatactggggtatgacatca

SEQ ID NO: 214307 - DNA, 75 bp, synthetic construct
  source 1..75: mol_type = other DNA
tatagtagagaatgtaatgatagtgatattccctattaccccgtacggctggtcagtgataaagaaatattaaaa

SEQ ID NO: 214308 - DNA, 75 bp, synthetic construct
  source 1..75: mol_type = other DNA
cgttttaactatgatgataactattttttccataaattccagggcatacctcgtgatggctacacaccattattt

SEQ ID NO: 214309 - DNA, 75 bp, synthetic construct
  source 1..75: mol_type = other DNA
acatatcgctatctcgatatggatgtctgtattaaagaagctattgaatgtgctcaattgtatataaagaataat

SEQ ID NO: 214310 - DNA, 75 bp, synthetic construct
  source 1..75: mol_type = other DNA
ttactccgccggtgagcatctggagctctgctgtggtaaggcaaggctggtgctgacgaaggacggacaaatttt

SEQ ID NO: 214311 - DNA, 75 bp, synthetic construct
  source 1..75: mol_type = other DNA
tgtgggagacggggtatcaggtctggggtaacacgatacaggagaaggaccacggcggggtggagcagaacctgc

SEQ ID NO: 214312 - DNA, 75 bp, synthetic construct
  source 1..75: mol_type = other DNA
ataattatttaaaatcacagatgcgtggtgaatggcgtgatgtcctgaccaatgatatccgggatgaactggttc

SEQ ID NO: 214313 - DNA, 75 bp, synthetic construct
  source 1..75: mol_type = other DNA
ctggtcaacgagaatattagccgagccagaggtctttggggtcgaaacgttgggtgactcttcggttatcctgcg

SEQ ID NO: 214314 - DNA, 75 bp, synthetic construct
  source 1..75: mol_type = other DNA
tatttcattacgctaaaggtaaatatgctttgcatcagagagcatatcgtattgtcccaaatgcatttatgaatc

SEQ ID NO: 214315 - DNA, 75 bp, synthetic construct
  source 1..75: mol_type = other DNA
aacggacgcagctgtgatatcccgcttcatcaatgccctgaaagcccgaatcaacgcttaccagaaccgtaagcc

SEQ ID NO: 214316 - DNA, 75 bp, synthetic construct
  source 1..75: mol_type = other DNA
cgacttcatcaccggtgagaaaaccacgacctgggagccacgccacaccgccgacctcgatacaggcgaaatgca

SEQ ID NO: 214317 - DNA, 75 bp, synthetic construct
  source 1..75: mol_type = other DNA
atgaaaaagactctgattgcactggctgtggctacctctgctgcagtatctggttctgctatggcgtggactgca

SEQ ID NO: 214318 - DNA, 75 bp, synthetic construct
  source 1..75: mol_type = other DNA
cccctgcccggataatccggagaaatcccttgccatccagtctgaaatcgttcggattctggataaatttactgc

SEQ ID NO: 214319 - DNA, 75 bp, synthetic construct
  source 1..75: mol_type = other DNA
actgttcgtgagatccagaatggcaaagttgtctttcttgataaaacagacagagtaaatgatagagcattaaaa

SEQ ID NO: 214320 - DNA, 75 bp, synthetic construct
  source 1..75: mol_type = other DNA
ataaatctaatatttatggcaagctaggtttgcattcaattgtagagcttatcgactacgccaaattatatgaat

SEQ ID NO: 214321 - DNA, 75 bp, synthetic construct
  source 1..75: mol_type = other DNA
ctacattatcttgtcaaagaaatagatgaatcagactccttttataaattactatcacagggaaaatacgtaagc

SEQ ID NO: 214322 - DNA, 75 bp, synthetic construct
  source 1..75: mol_type = other DNA
atggtcgtcttgtttataacgaaaacctatacaagtcattaatttcaatatttaaaccaacttataacatgaatg

SEQ ID NO: 214323 - DNA, 75 bp, synthetic construct
  source 1..75: mol_type = other DNA
cgttggaatcggcccaaagcgttgccgaacgtttcggtatttcggtggctgagttacgcaaactcaaccagtttc

SEQ ID NO: 214324 - DNA, 75 bp, synthetic construct
  source 1..75: mol_type = other DNA
aggagaagtgaaatcactggtttcgtcgctacaaaccaaatatgccctgaaaggctataacgtcgaagccaccgc

SEQ ID NO: 214325 - DNA, 75 bp, synthetic construct
  source 1..75: mol_type = other DNA
ccctgctggcggaaggcgagaaggcacgctttgccgcgcaggccggcgtggtgaccgatgcgctggagcgtattg

SEQ ID NO: 214326 - DNA, 75 bp, synthetic construct
  source 1..75: mol_type = other DNA
ggcaacaacgtatccgtgagacggtgctgcgcgcactggatgttcatccccgtctgacggcattgcgggttgatc

SEQ ID NO: 214327 - DNA, 75 bp, synthetic construct
  source 1..75: mol_type = other DNA
gatgaatggggcaacctgctgaatgaagagaacccgcaccagctgcagcagctcatccgcctgccgggtcagcag

SEQ ID NO: 214328 - DNA, 75 bp, synthetic construct
  source 1..75: mol_type = other DNA
cttctggcattgaaacatcgaccactgaaagcctctcttcactacccggatcatttccctgctgtgtatggcgat

SEQ ID NO: 214329 - DNA, 75 bp, synthetic construct
  source 1..75: mol_type = other DNA
acggctggcttgccgccgttgacaggctgaacggcggcggctcaggaaggaaggacacctcacagaccacccgcc

SEQ ID NO: 214330 - DNA, 75 bp, synthetic construct
  source 1..75: mol_type = other DNA
atgggcatggcggactggtcgattctggcaccgccgatgatgcaaggcttcttctccatcggcatcgcctttatg

SEQ ID NO: 214331 - DNA, 75 bp, synthetic construct
  source 1..75: mol_type = other DNA
atggattttaacgttggaaagatggcgggaatcgtccatgtgctgcgtttggggcttccatgtgcggtaactgaa

SEQ ID NO: 214332 - DNA, 75 bp, synthetic construct
  source 1..75: mol_type = other DNA
attcagcgaattcctgatgaccagcccggattgttcaacgatgcgtccgcaatttgatccgattctgcttaatga

SEQ ID NO: 214333 - DNA, 75 bp, synthetic construct
  source 1..75: mol_type = other DNA
gaagcttatgcgctgggagcaggcattttctttgtggtatacgcgtttctgggggttccggcgaatcttttgatg

SEQ ID NO: 214334 - DNA, 75 bp, synthetic construct
  source 1..75: mol_type = other DNA
catgttgataagcggcggtaatagcctggtgaatgctgtgcgtaagggcgccggatggcgtgcggactgctgggg

SEQ ID NO: 214335 - DNA, 75 bp, synthetic construct
  source 1..75: mol_type = other DNA
accctgcattacgtctgggcccgggagtttggggagtgcaaaggtaaaaaacactatcacctgatgctgctggtc

SEQ ID NO: 214336 - DNA, 75 bp, synthetic construct
  source 1..75: mol_type = other DNA
gccaccgctattatgacccgctgcaggggcggtatatcactcaggatccgattggactgaaggggggatggaatt

SEQ ID NO: 214337 - DNA, 75 bp, synthetic construct
  source 1..75: mol_type = other DNA
cggagctgcacccggacagtaccctcacggcgtggccggataaccgcatcgcagaggatgcgcactatgtttacc

SEQ ID NO: 214338 - DNA, 75 bp, synthetic construct
  source 1..75: mol_type = other DNA
tattaccgggccgttgcttacctatgaggtgctgaccgctttcttccttgaagccggattcctcggggtgatgct

SEQ ID NO: 214339 - DNA, 75 bp, synthetic construct
  source 1..75: mol_type = other DNA
ttctcgacgcattcacagtgctgatgacaagtcctacttacgaccagacctacttgagtggttcaagcagcgtgt

SEQ ID NO: 214340 - DNA, 75 bp, synthetic construct
  source 1..75: mol_type = other DNA
aacggacgcagctgtgatatcccgcttcatcaatgccctgaaagcccgaatccacgcttaccagaatcgtaagct

SEQ ID NO: 214341 - DNA, 75 bp, synthetic construct
  source 1..75: mol_type = other DNA
cacgcacacctcataccgggagggacgccagatgctgccggcggatttgcagtcggcactgtgggaaatctcccg

SEQ ID NO: 214342 - DNA, 75 bp, synthetic construct
  source 1..75: mol_type = other DNA
agcgtgttatacaaagagtttagtcgtagttgcgataaagaagatattccatattatccagttagacttgtctct

SEQ ID NO: 214343 - DNA, 75 bp, synthetic construct
  source 1..75: mol_type = other DNA
gtgggtttggtttggggataagtttgccactttccttctgctgtatgtatttagcaagacatgagaataaaaaaa

SEQ ID NO: 214344 - DNA, 75 bp, synthetic construct
  source 1..75: mol_type = other DNA
aacggacgcagctgtgatatcccgcttcatcaatgccctgaaagcccgaatccacgcttaccagaaacgtaagcg

SEQ ID NO: 214345 - DNA, 75 bp, synthetic construct
  source 1..75: mol_type = other DNA
gagctatatcccgttggcaccgaaggccgctcaacggcgtttctggaacaggtccgcgataccgtcaccgatgcc

SEQ ID NO: 214346 - DNA, 75 bp, synthetic construct
  source 1..75: mol_type = other DNA
caacggacgcagctgtgatatcccgcttcatcaatgccctgaaagcccgaatcgacgcttaccagaaacgtaagc

SEQ ID NO: 214347 - DNA, 75 bp, synthetic construct
  source 1..75: mol_type = other DNA
atgacctacaaatacaaccccttctggcagcaacgtattcgtgagacagtgcggcatgcactgaatgttcatccc

SEQ ID NO: 214348 - DNA, 75 bp, synthetic construct
  source 1..75: mol_type = other DNA
gggtggacagggacacactgtaccgtctggccactcgcgcggcaccgcaggagaccccggagggcatgatgccgg

SEQ ID NO: 214349 - DNA, 75 bp, synthetic construct
  source 1..75: mol_type = other DNA
aacggacgcagctgtgatatcccgcttcatcaatgccctgaaagcccgaatccacgcttaccagaagcgtaagca

SEQ ID NO: 214350 - DNA, 75 bp, synthetic construct
  source 1..75: mol_type = other DNA
gagaaggaggagaaggcggagcgccgggcgttaatgaaagcgcatcagtgcagcgaactggaagccgcatttcat

SEQ ID NO: 214351 - DNA, 75 bp, synthetic construct
  source 1..75: mol_type = other DNA
ttgaattttgagactcaaagaaagcagctaagtaatgagctggcgctggaaaaattacgtcttgagttgaataaa

SEQ ID NO: 214352 - DNA, 75 bp, synthetic construct
  source 1..75: mol_type = other DNA
tgagcaatgaactggcactggaaaagttacgtcttgaattaaataaactcaaggcagaaaatcagcctgtagttc

SEQ ID NO: 214353 - DNA, 75 bp, synthetic construct
  source 1..75: mol_type = other DNA
aattttgaatctcagcggaagcaattgagcaatgaactggcactggaaaagttacgtcttgaattaaataaactc

SEQ ID NO: 214354 - DNA, 75 bp, synthetic construct
  source 1..75: mol_type = other DNA
ccggattttttccggaagaagccacatgggacgggctggttccctcactggtacgggagtaccgttacgacagcg

SEQ ID NO: 214355 - DNA, 75 bp, synthetic construct
  source 1..75: mol_type = other DNA
acgggccattgaataccactaccccgatgaacacaccgtcatccgctgtatcctgccaccggaagatgaacgcga

SEQ ID NO: 214356 - DNA, 75 bp, synthetic construct
  source 1..75: mol_type = other DNA
acgattctgacgcattttttatgtttaccctggtgtttccttgtctttttgtgttttttgcgtcagaaagcgatt

SEQ ID NO: 214357 - DNA, 75 bp, synthetic construct
  source 1..75: mol_type = other DNA
tacgtgttttctcgaatgataaaattcaggcagctaatattattaacaccatgacgccaggtgatgtttatcaga

SEQ ID NO: 214358 - DNA, 75 bp, synthetic construct
  source 1..75: mol_type = other DNA
taaggataggggaagtatctttgaagaagttttatattaaaaactatgtccgtaaattatatatatctcaacaat

SEQ ID NO: 214359 - DNA, 75 bp, synthetic construct
  source 1..75: mol_type = other DNA
accactatcactacgacagccagcaccgcctggtgttctacacgcggatacagcacggcgaaccacaggtggaga

SEQ ID NO: 214360 - DNA, 75 bp, synthetic construct
  source 1..75: mol_type = other DNA
atgccaatcaacaagtgctttctcggaaagaagttccagaagcaattgaagaaagcagatatacagattgagtgc

SEQ ID NO: 214361 - DNA, 75 bp, synthetic construct
  source 1..75: mol_type = other DNA
tatatgaacgttatttatgagaagaagaaagatttcaaagttggtgaagtacttgaatgggaattacagggtgaa

SEQ ID NO: 214362 - DNA, 75 bp, synthetic construct
  source 1..75: mol_type = other DNA
atgcgcatatcaaagcagcaacgccaaatcctcgactatctggcagaaaacgaatcaatcacagcacgccaggcg

SEQ ID NO: 214363 - DNA, 75 bp, synthetic construct
  source 1..75: mol_type = other DNA
ggagcggatcagcgcgctgcaattgcaagggatatcttgaaaagagcaggaatagatattgacgacgctgcgaat

SEQ ID NO: 214364 - DNA, 75 bp, synthetic construct
  source 1..75: mol_type = other DNA
caattgataaactcaaaaattatctcaataaagaaaatgaaaacagcatttctggtgctgaaattgagctatcac

SEQ ID NO: 214365 - DNA, 75 bp, synthetic construct
  source 1..75: mol_type = other DNA
aaaaaacagacatttctttaaggaatattattcgtgcagaaaagaaaaatatgtataatgaattgcgcgaaatgc

SEQ ID NO: 214366 - DNA, 75 bp, synthetic construct
  source 1..75: mol_type = other DNA
aaatcgagtaaaacgcgtgagcactataaggcgcttagtgagccggaaaagaaaagtttcctaaaaaacaggatt

SEQ ID NO: 214367 - DNA, 75 bp, synthetic construct
  source 1..75: mol_type = other DNA
atgaacatccgattcaccgatgaaacccacaaggcgcttgttgaacgtgccaaccgtgaagacaagtcagccgcc

SEQ ID NO: 214368 - DNA, 75 bp, synthetic construct
  source 1..75: mol_type = other DNA
ggcggcatacagcagattctccaccgccagacggcacacgtcattcaacagccagcggttgctttcgaacaccgg

SEQ ID NO: 214369 - DNA, 75 bp, synthetic construct
  source 1..75: mol_type = other DNA
catgaccgacggagataagtttatttattgctctgccgggaaagatggcacgccatcctgccatgaagtgacgct

SEQ ID NO: 214370 - DNA, 75 bp, synthetic construct
  source 1..75: mol_type = other DNA
tgctttatctgatcaagatgatatttggaaagaaaacaaacttattcatgcaattaaacaaattggaactgacgg

SEQ ID NO: 214371 - DNA, 75 bp, synthetic construct
  source 1..75: mol_type = other DNA
attgaatgtaatccccggcgcaacgtaaccattcttcccctggcgcgttttgaacgccagtttctgaaagtggag

SEQ ID NO: 214372 - DNA, 75 bp, synthetic construct
  source 1..75: mol_type = other DNA
tccggggtcactggccggaatgattcaacaggcctggtgcagtgccctgggggtggatgccgggccttatgccac

SEQ ID NO: 214373 - DNA, 75 bp, synthetic construct
  source 1..75: mol_type = other DNA
tcgctgattcttcttgaagcgactggcggatatgaaaatcctgttgtctgttatctgcaatcctgcggttacgat

SEQ ID NO: 214374 - DNA, 75 bp, synthetic construct
  source 1..75: mol_type = other DNA
gagctcaaaagaaaataacgattatttccccttggttatcttggcaaaaagtggagcaaacgggatttctggcat

SEQ ID NO: 214375 - DNA, 75 bp, synthetic construct
  source 1..75: mol_type = other DNA
atcaacgatacgatacgtctttggtgtaccgtggcgaaggcgtaaaaaatgaaataaaggcaatatatggtagtc

SEQ ID NO: 214376 - DNA, 75 bp, synthetic construct
  source 1..75: mol_type = other DNA
tccggggtcactggccggcatgattaaacaggcctggtgcagtgccctgggggtggatgccgggccttatgccac

SEQ ID NO: 214377 - DNA, 75 bp, synthetic construct
  source 1..75: mol_type = other DNA
gaagggttacgccagttgatcttcatctacccaagcgcactggcggtagtcaccattgtggcgatgggttgcttc

SEQ ID NO: 214378 - DNA, 75 bp, synthetic construct
  source 1..75: mol_type = other DNA
ggatttcaggggatttacatagacagcaatgatggaatggtatacatcggctggcagacgctagaccccgcatcg

SEQ ID NO: 214379 - DNA, 75 bp, synthetic construct
  source 1..75: mol_type = other DNA
cgacacagcaatgtacacagcgaaggaaggcggacgaggacaattttgcgtttttactccagaaatgaatcagcg

SEQ ID NO: 214380 - DNA, 75 bp, synthetic construct
  source 1..75: mol_type = other DNA
gtgagttcatgtacagggaataatactaattgtaatagcgtccgctttaattataatttaaatactattttacag

SEQ ID NO: 214381 - DNA, 75 bp, synthetic construct
  source 1..75: mol_type = other DNA
gtcgtcattatattattaattttccctttgaatctgacggtaaaaaaatagagcttccagggaaggcatcttata

SEQ ID NO: 214382 - DNA, 75 bp, synthetic construct
  source 1..75: mol_type = other DNA
ctgtggctgcttctgccgcagtatccggctctgctatggcgtggaatccctctggccttggtggcaacggtggca

SEQ ID NO: 214383 - DNA, 75 bp, synthetic construct
  source 1..75: mol_type = other DNA
tccgatatgaaaattggcactctaaccactaccctcagtgctggagctgaagcgtctgtggtagctggaaatacc

SEQ ID NO: 214384 - DNA, 75 bp, synthetic construct
  source 1..75: mol_type = other DNA
accaagcaccccatgggaagttaaagtaggcgatgcggtaaataacctgaatattcagatcgaccgaggagagac

SEQ ID NO: 214385 - DNA, 75 bp, synthetic construct
  source 1..75: mol_type = other DNA
acctgtctcatatttccaggcatgtcagtggtacgcgtaggccgctgaactggaaattagaattcagcatcatag

SEQ ID NO: 214386 - DNA, 75 bp, synthetic construct
  source 1..75: mol_type = other DNA
gcggaggatgaacagggagccgcccggtttttgtctgctctcgaaaactggaatcgcccgcgctctggcctggta

SEQ ID NO: 214387 - DNA, 75 bp, synthetic construct
  source 1..75: mol_type = other DNA
aaatcgattataataaagccgctgatgtggattatatggataaggggaatttacctacgcaaattgatgtcacat

SEQ ID NO: 214388 - DNA, 75 bp, synthetic construct
  source 1..75: mol_type = other DNA
gtgtcatgccgcgtcacccctgcgatgagattaactcttacacccgcgccggaaggcggttatatggtttctttt

SEQ ID NO: 214389 - DNA, 75 bp, synthetic construct
  source 1..75: mol_type = other DNA
atggcacgaaacaagcaagccctgcgaagaactgcgcaagccacagctgatggttatgagaattttattgcccgc

SEQ ID NO: 214390 - DNA, 75 bp, synthetic construct
  source 1..75: mol_type = other DNA
cgccaggcggagatccgatatcgaacgagcctacggcagatagcgcgggcggtcggggatatcgtaaatgggcgc

SEQ ID NO: 214391 - DNA, 75 bp, synthetic construct
  source 1..75: mol_type = other DNA
aacagattagtggcgctgttggtattccactggtgcggttgttcggacagtccccgaaaggattttctaccggtg

SEQ ID NO: 214392 - DNA, 75 bp, synthetic construct
  source 1..75: mol_type = other DNA
cggacccggcaggaaaccggctgccggacccggagctgcacccggacagtacgctcacggcgtggccggataacc

SEQ ID NO: 214393 - DNA, 75 bp, synthetic construct
  source 1..75: mol_type = other DNA
ttgataaaatattggtttagggggatcgagaaattttgtccgtgggctagaaaagttcattttgtaactagcggt

SEQ ID NO: 214394 - DNA, 75 bp, synthetic construct
  source 1..75: mol_type = other DNA
cccactggtgcggttgttcggacagtcccgaaaggattttctaccggcgatgcagaccttgccaactattacgac

SEQ ID NO: 214395 - DNA, 75 bp, synthetic construct
  source 1..75: mol_type = other DNA
cccactggtgcggttgttcggacagtcaccgaagggattttctaccggcgatgcagaccttgccaactattacga

SEQ ID NO: 214396 - DNA, 75 bp, synthetic construct
  source 1..75: mol_type = other DNA
gaggggcagattacctatgtatggatgttaactatgatacagttaacggaataattgagcgattaatgatggaat

SEQ ID NO: 214397 - DNA, 75 bp, synthetic construct
  source 1..75: mol_type = other DNA
cctctaaggtattgctgttaaatgcttttttacagtcagaaatcactcagcaagagttagccaggcgaattggca

SEQ ID NO: 214398 - DNA, 75 bp, synthetic construct
  source 1..75: mol_type = other DNA
caggcaccaatgaccccgctgcggctcgaaaccattggagaaggcaagtttaagggcattctcccgctcgaccgc

SEQ ID NO: 214399 - DNA, 75 bp, synthetic construct
  source 1..75: mol_type = other DNA
ggtgggtttcatcatgattgaggggcaggcaccaatgaccccgctgcgacccgaaaccatcggtaaaggcaagtt

SEQ ID NO: 214400 - DNA, 75 bp, synthetic construct
  source 1..75: mol_type = other DNA
ggcattcgcatcacttcggagattgacgccaaagaccgtggcaccctggaagcgcagctggatgagttgcagatc

SEQ ID NO: 214401 - DNA, 75 bp, synthetic construct
  source 1..75: mol_type = other DNA
tgagcggcattgaacgtgctggaaccggcgcggaaggattccgctatgaccgccacggcaacctgctggcgtaca

SEQ ID NO: 214402 - DNA, 75 bp, synthetic construct
  source 1..75: mol_type = other DNA
tgagaaatgggtgacggatactgatgcacagcatagcggcgcagtagaagctgcagaagcacagcgccagtcact

SEQ ID NO: 214403 - DNA, 75 bp, synthetic construct
  source 1..75: mol_type = other DNA
ccaacaaattaatgcgtgccacacgaacaccacatatacaaatgcagactactcaaaagttgtggctcaacttgt

SEQ ID NO: 214404 - DNA, 75 bp, synthetic construct
  source 1..75: mol_type = other DNA
acagcatcttgacaaacaaatcaatggcttgttttctacattgttaactattaatgacaactctttacgcgcgaa

SEQ ID NO: 214405 - DNA, 75 bp, synthetic construct
  source 1..75: mol_type = other DNA
aataaaaatttcactggatacatgtgattctgcagatgaactacgtaaaataatcgatcgtcttatagaactgaa

SEQ ID NO: 214406 - DNA, 75 bp, synthetic construct
  source 1..75: mol_type = other DNA
tcaatattagaaacgaaaccagaaatatgtatcgatattcttttaccgagaaatgatatacattctcttataaga

SEQ ID NO: 214407 - DNA, 75 bp, synthetic construct
  source 1..75: mol_type = other DNA
agaaaatggtatctcaatgaattgaaaggattaagttatacggagttagttaatttagcaagggaatatgtgaac

SEQ ID NO: 214408 - DNA, 75 bp, synthetic construct
  source 1..75: mol_type = other DNA
aatgaaattgaatcgctaagaaaagaacatgatcttatttatcctggtcatgtggaaaatgttcaagattggtta

SEQ ID NO: 214409 - DNA, 75 bp, synthetic construct
  source 1..75: mol_type = other DNA
cctctgctcggtgcaaaggtccttcccggtgaaaccgacatcgccctgcccgccccgctgccgttcatcctctcc

SEQ ID NO: 214410 - DNA, 75 bp, synthetic construct
  source 1..75: mol_type = other DNA
gatatgctgctgtcggtgctcgatctggaaaaaatgaccgttgatgacatcatggtgccgccagtgaaattatcg

SEQ ID NO: 214411 - DNA, 75 bp, synthetic construct
  source 1..75: mol_type = other DNA
ccggaaccaactttattgatttcaatatgacaggacagaacctgtcctgggttcgttctaaccttgtcaaggttt

SEQ ID NO: 214412 - DNA, 75 bp, synthetic construct
  source 1..75: mol_type = other DNA
tcattgttgtcgttaatccagaacccaacaatccaatcataactaaaattctcgtagaagaaggaatacccgaaa

SEQ ID NO: 214413 - DNA, 75 bp, synthetic construct
  source 1..75: mol_type = other DNA
tgagaaatgggtgacggataccgatgcacagcatagcgccgcagtagaagcggcagaagcacagcgccagtcact

SEQ ID NO: 214414 - DNA, 75 bp, synthetic construct
  source 1..75: mol_type = other DNA
agcagcggtgatttatgctaactgcgcagaccttaacaaccaacagcttgatgagattatcgagtgggttcgtct

SEQ ID NO: 214415 - DNA, 75 bp, synthetic construct
  source 1..75: mol_type = other DNA
atgcgtcccgcgactatcgccccgttaacgccatacgataaatgggatggtgagaaatgggtgacagatactgaa

SEQ ID NO: 214416 - DNA, 75 bp, synthetic construct
  source 1..75: mol_type = other DNA
cgccttcactgacgccactgatgctggatgacgccagcggaaaactggtggcatgggatggtcagaaagccggaa

SEQ ID NO: 214417 - DNA, 75 bp, synthetic construct
  source 1..75: mol_type = other DNA
aaaaattttccgcattatccactgagagaaaaaaaagattagtatatgaaaaatatgacgcacagctatctctat

SEQ ID NO: 214418 - DNA, 75 bp, synthetic construct
  source 1..75: mol_type = other DNA
tacagccgcagcgaatcactctggctggtgcgcggcggtgtggcgaaactggatgaaggtcaccggctggccgca

SEQ ID NO: 214419 - DNA, 75 bp, synthetic construct
  source 1..75: mol_type = other DNA
taagttcaaatgataatgatagtgtagacttgcgaaatataaaatgccctgaaggttcagagagagtaggcgatt

SEQ ID NO: 214420 - DNA, 75 bp, synthetic construct
  source 1..75: mol_type = other DNA
cattaggattatatgaatttaaatcaaaaaatatagatgatattggaatatttgcattggcaatgtgtaatggag

SEQ ID NO: 214421 - DNA, 75 bp, synthetic construct
  source 1..75: mol_type = other DNA
atgcgtcccgcgactatcgccccgttagcgccatacgataaatgggatggtgagaaatgggtgacggatactgaa

SEQ ID NO: 214422 - DNA, 75 bp, synthetic construct
  source 1..75: mol_type = other DNA
tgagaaatgggtgacggatacagatgcacagcatagcgacgcagtagaagccgcagaagcacagcgccagtcact

SEQ ID NO: 214423 - DNA, 75 bp, synthetic construct
  source 1..75: mol_type = other DNA
tgagaaatgggtgacggatactgatgcacagcatagcgtcgcagtagaagcagcagaagcacagcgccagtcact

SEQ ID NO: 214424 - DNA, 75 bp, synthetic construct
  source 1..75: mol_type = other DNA
acttcggcagtactgagaaggttgccgaattttttggaatcacaagcgaggctgtttaccagtggcgtaatagaa

SEQ ID NO: 214425 - DNA, 75 bp, synthetic construct
  source 1..75: mol_type = other DNA
cgaaaccaatacaggcatgaataacatgctggaacgcattggggcggagccgtacaagcgttaccgattgtatga

SEQ ID NO: 214426 - DNA, 75 bp, synthetic construct
  source 1..75: mol_type = other DNA
atgcgtcccgcgactatcgccccgttaccgccatacgataaatgggatggtgagaaatgggtgaccgatactgaa

SEQ ID NO: 214427 - DNA, 75 bp, synthetic construct
  source 1..75: mol_type = other DNA
tccaggtttgctggatgccgtgattgcttcacagagcagcaacgcgttcgtcaatgccgtgctggtcactctgaa

SEQ ID NO: 214428 - DNA, 75 bp, synthetic construct
  source 1..75: mol_type = other DNA
ttagcgaagatggtcagttccatctgatggggcgtcgtgggcgcatcgttaagattgaagaaaaacgtatttcac

SEQ ID NO: 214429 - DNA, 75 bp, synthetic construct
  source 1..75: mol_type = other DNA
ttccatgtgaagcgcttgcagatgcagggcgataggttggcagttttgtctgataactcagcttatgagaagtgg

SEQ ID NO: 214430 - DNA, 75 bp, synthetic construct
  source 1..75: mol_type = other DNA
tgttgcaacttcatccagtgaaagtgtatacagtgagtctgatttcagctgctagctggtcagcactttatgttg

SEQ ID NO: 214431 - DNA, 75 bp, synthetic construct
  source 1..75: mol_type = other DNA
gatatgtcatcttctgcgtggcttgagataccacctaaaagcaattatacatatcaagttaatttaaatgactaa

SEQ ID NO: 214432 - DNA, 75 bp, synthetic construct
  source 1..75: mol_type = other DNA
actggagtcctgcattggggatgtcgtttgacaaagccctcaatggggatttatctgatggacgacttgatatgg

SEQ ID NO: 214433 - DNA, 75 bp, synthetic construct
  source 1..75: mol_type = other DNA
caatttatgccgcgctccagcagaccggggtggcacgggtgatcttaaccagtccaaaggccgatattgaggcgg

SEQ ID NO: 214434 - DNA, 75 bp, synthetic construct
  source 1..75: mol_type = other DNA
catcaccgcagaactggacattccggacgggcctgatgcgggtaaggtgctggaaaatgccatcagcacgctgca

SEQ ID NO: 214435 - DNA, 75 bp, synthetic construct
  source 1..75: mol_type = other DNA
agggagggtaatggcacggccccgcaggcattactgaacaccgtcgctgaacggctgaattcaaatgatattcgc

SEQ ID NO: 214436 - DNA, 75 bp, synthetic construct
  source 1..75: mol_type = other DNA
gtgaatcagctgaagaacatctattcataatggggaaagttctcattcatcagtcaatccagtataacagggtcg

SEQ ID NO: 214437 - DNA, 75 bp, synthetic construct
  source 1..75: mol_type = other DNA
acaacgaagggaagggaacgctggaaaggatacgtaaagcgtcgttttactggtatcgggatctcatcgccaaca

SEQ ID NO: 214438 - DNA, 75 bp, synthetic construct
  source 1..75: mol_type = other DNA
gtgaacgatcactatcgcattgattactttgcttcccatattcgtgaaatgaaaaaagccgtagtcgaagatggt

SEQ ID NO: 214439 - DNA, 75 bp, synthetic construct
  source 1..75: mol_type = other DNA
aattatgggtattctacggaaacaatataccgtggtgaagctaatttactcgattgctgcgatgactacctccgg

SEQ ID NO: 214440 - DNA, 75 bp, synthetic construct
  source 1..75: mol_type = other DNA
gatctggcagcctgagttcacagataaaacactctccaggaaacccggggcggttcacggtgtactcatagaagg

SEQ ID NO: 214441 - DNA, 75 bp, synthetic construct
  source 1..75: mol_type = other DNA
atcaaagcggcttactgaaagagattatttgtaaagcacttcccctgcccgtagacgataaatcgttgagcgaag

SEQ ID NO: 214442 - DNA, 75 bp, synthetic construct
  source 1..75: mol_type = other DNA
gtcaatgggcaatgatttttgagcacttcgggttacctcccattaatgccagaaatcattttaaaggtgaatgtc

SEQ ID NO: 214443 - DNA, 75 bp, synthetic construct
  source 1..75: mol_type = other DNA
tattttaagtactttaacgagctgtatgtcgtgagaatccctccaaatgaaattccaacatacaattcaaaaaaa

SEQ ID NO: 214444 - DNA, 75 bp, synthetic construct
  source 1..75: mol_type = other DNA
cagcagaagcacagcgccagtcgctgattgattctgcaatggcttccattagtctgattcaactgaaattccagg

SEQ ID NO: 214445 - DNA, 75 bp, synthetic construct
  source 1..75: mol_type = other DNA
ccgggaaaacaaaactgatgtttgagtcaaaggagcaggcactggaagttaaagaagggtacaaatttttaacgt

SEQ ID NO: 214446 - DNA, 75 bp, synthetic construct
  source 1..75: mol_type = other DNA
atttttaccgcctcaacattgttcataacttcatgtggaacccttgccgcaactgtttgtgattttgcgtttact

SEQ ID NO: 214447 - DNA, 75 bp, synthetic construct
  source 1..75: mol_type = other DNA
ttcagtatacgcaaaaaaaaagataaaaaaagtcttgcggtgtatttcacctgaatgtagatttaaaaatgaagg

SEQ ID NO: 214448 - DNA, 75 bp, synthetic construct
  source 1..75: mol_type = other DNA
ctgcagaagcacagcgccagtcgctgattgatgctgcaatggcttccattagtctgattcaactgaaattccagg

SEQ ID NO: 214449 - DNA, 75 bp, synthetic construct
  source 1..75: mol_type = other DNA
cgagcagcaggacgcagcagaattatgggctaagaaaattcaagagtgttcggaaatcaatcctttatctttgca

SEQ ID NO: 214450 - DNA, 75 bp, synthetic construct
  source 1..75: mol_type = other DNA
gggacttggatctgcatctgcggcagcggtgacggcatgaagcttgtcaccctgacacaggggaagccatttaat

SEQ ID NO: 214451 - DNA, 75 bp, synthetic construct
  source 1..75: mol_type = other DNA
ttacaccttgttaatgcaaggtacagaaaagacgaaaccccgcagtgctggaacacatacggggcttctaaccaa

SEQ ID NO: 214452 - DNA, 75 bp, synthetic construct
  source 1..75: mol_type = other DNA
atacgcataaagatgatcgttctgaaaaaaataataaagacaaattacagagatgcatatcatgcggccataaaa

SEQ ID NO: 214453 - DNA, 75 bp, synthetic construct
  source 1..75: mol_type = other DNA
atttcttgctaaagaagacccacagtgctggcctggtacagacttttcccatattcgtcatcaaataatagactg

SEQ ID NO: 214454 - DNA, 75 bp, synthetic construct
  source 1..75: mol_type = other DNA
gataaagttaaaaagacagattgatgattttgaatttagaattaaggatgttgaaaataaaggtggctatcttac

SEQ ID NO: 214455 - DNA, 75 bp, synthetic construct
  source 1..75: mol_type = other DNA
ccatgctggaaaagcggttagcccggcgatgcacacttttattcagtgtgttgaagagagttttgtggctggata

SEQ ID NO: 214456 - DNA, 75 bp, synthetic construct
  source 1..75: mol_type = other DNA
taaatataacctcagcaaaattaacatcatagatttattaaaaggcgcaacagtacatggaacccctgctttata

SEQ ID NO: 214457 - DNA, 75 bp, synthetic construct
  source 1..75: mol_type = other DNA
gatcaagtttctggaaatttttcttcagcaacccgtcgtgttagaatcaataaaatgcgctgagttcaagaagtt

SEQ ID NO: 214458 - DNA, 75 bp, synthetic construct
  source 1..75: mol_type = other DNA
accgacttggattaatactgactcgcctcaacaatggagagtcattgaccgtcagaggcctggctgacgaattta

SEQ ID NO: 214459 - DNA, 75 bp, synthetic construct
  source 1..75: mol_type = other DNA
acagttcggcggcagcggttcaggccatgaaaaatgcagcagtggacaccatcgatcctccgtcccatgcaggtt

SEQ ID NO: 214460 - DNA, 75 bp, synthetic construct
  source 1..75: mol_type = other DNA
caaagacatttttgcccgaggtggtaatgtcactggtgattacggtgaacatctcgtaaagcaactttatggtgg

SEQ ID NO: 214461 - DNA, 75 bp, synthetic construct
  source 1..75: mol_type = other DNA
gaagcgttcctggcagtcggcgactttaagcgcggttacttcatcgtggatcacaccactggcgtgcgtacccgc

SEQ ID NO: 214462 - DNA, 75 bp, synthetic construct
  source 1..75: mol_type = other DNA
gtaatacaaccggcctcaatccgtcaacaacttgctgaagatatgcaatccgcactgaaacgttacacccagcca

SEQ ID NO: 214463 - DNA, 75 bp, synthetic construct
  source 1..75: mol_type = other DNA
cgatccggttgtgagccagcaggtggaacttgcggaaagcatctggtatggcgatgaactgaccgaagtgctgat

SEQ ID NO: 214464 - DNA, 75 bp, synthetic construct
  source 1..75: mol_type = other DNA
ggatcaagataagtcgcgttgggaaatgccagcttctctggcatcttatgctgcgcaagataaacaggctcgtga

SEQ ID NO: 214465 - DNA, 75 bp, synthetic construct
  source 1..75: mol_type = other DNA
gaatgtgttaaatcagttacatattgattttcgcgcactcagtggcgtaatggcgacaggttccagtcaaatatt

SEQ ID NO: 214466 - DNA, 75 bp, synthetic construct
  source 1..75: mol_type = other DNA
gcccagtttacctatattaatcacggaacagattattcacctggctggcgaagggactataactccagaaataag

SEQ ID NO: 214467 - DNA, 75 bp, synthetic construct
  source 1..75: mol_type = other DNA
gacgctggtgtcgttacggggaagtcatcttcacagcgattttcagtcagttagcattaccgacattcattcacc

SEQ ID NO: 214468 - DNA, 75 bp, synthetic construct
  source 1..75: mol_type = other DNA
gatacagacatttcccgcctcgagtctgtggctgatgaagaacgcagcaagccaggaacgggcatccagaaatta

SEQ ID NO: 214469 - DNA, 75 bp, synthetic construct
  source 1..75: mol_type = other DNA
atctacgcctacccgaaaaccacgcaggaaatccttgatttttcagaggtggatattctgggctggttatcctcc

SEQ ID NO: 214470 - DNA, 75 bp, synthetic construct
  source 1..75: mol_type = other DNA
gaaattttatgccagaatgcaaaaaatcgatcccgcgctggatgtcatatctggtcaggtgatgagtcatatatt

SEQ ID NO: 214471 - DNA, 75 bp, synthetic construct
  source 1..75: mol_type = other DNA
ctctccggtacatcacagcgagacagttattattctctgaatgccagttggaatggttcattcactgcgactcgc

SEQ ID NO: 214472 - DNA, 75 bp, synthetic construct
  source 1..75: mol_type = other DNA
acgccagcagtaatgtgaattattcattatcacttagccgcgattttgatatcgggccattaaaaaacgtctcca

SEQ ID NO: 214473 - DNA, 75 bp, synthetic construct
  source 1..75: mol_type = other DNA
tcgataactacgggagctattcctgcgttgttaaccggtgtaatggttgcctgtctgccggaaaagatcgggtca

SEQ ID NO: 214474 - DNA, 75 bp, synthetic construct
  source 1..75: mol_type = other DNA
ggagtctgctcaggcgctttatctctatttagaaggtctacccacaaaccctgcaccagttagcattaagcgttt

SEQ ID NO: 214475 - DNA, 75 bp, synthetic construct
  source 1..75: mol_type = other DNA
tcctgaatatcaaggaaattaacaagcgaacgggagaagagctcacgcttatatccacaagtgagtccagtgttc

SEQ ID NO: 214476 - DNA, 75 bp, synthetic construct
  source 1..75: mol_type = other DNA
cgatcattgatggtggggagcagcacatttccagtgggggaagtgcgattaacaccacactggatggctatcaga

SEQ ID NO: 214477 - DNA, 75 bp, synthetic construct
  source 1..75: mol_type = other DNA
attttgctggctgtggaggaaagcaaaattgcgctgacgccggatggcattcagctacaggtcggggaatcgacg

SEQ ID NO: 214478 - DNA, 75 bp, synthetic construct
  source 1..75: mol_type = other DNA
aaaccacattatgttgcaacacttctcactgcactgaacttatatgaagtcgcgcatgaccatgagttttttaat

SEQ ID NO: 214479 - DNA, 75 bp, synthetic construct
  source 1..75: mol_type = other DNA
aaagaattaacattagagcatgaagaggctgcatctgaaatttttgagatgtcaaaaaatattagaaatcagatc

SEQ ID NO: 214480 - DNA, 75 bp, synthetic construct
  source 1..75: mol_type = other DNA
cctccggaaagaaaagacgaagctgtcggtattattctgagcaatgatccggaatacacccgtaacctttttgac

SEQ ID NO: 214481 - DNA, 75 bp, synthetic construct
  source 1..75: mol_type = other DNA
tccaatgtatgaatccgttatgaccctggctgcaacggatgaaaaagaacctgtctgcataatgaccatcatggc

SEQ ID NO: 214482 - DNA, 75 bp, synthetic construct
  source 1..75: mol_type = other DNA
cactgccgggcacgctggatgcgcgcagtgggactccgcaggccgaatttcagcctaagctcgacaacatcgaga

SEQ ID NO: 214483 - DNA, 75 bp, synthetic construct
  source 1..75: mol_type = other DNA
gctgatttgagtcgctacagtggcacggtggttaaccgtccgacgttttttgcttttgcaaaaggtgcaggtgtg

SEQ ID NO: 214484 - DNA, 75 bp, synthetic construct
  source 1..75: mol_type = other DNA
acggagagcctgaaccgacaactgaatgagaatcgccgttactggcaacagcttgaagttgtgcagggtaactgg

SEQ ID NO: 214485 - DNA, 75 bp, synthetic construct
  source 1..75: mol_type = other DNA
atgcgtcccgcgactatcgcccccttagcgccatacgataaatgggatggtgagaaatgggtgaccgatactgaa

SEQ ID NO: 214486 - DNA, 75 bp, synthetic construct
  source 1..75: mol_type = other DNA
atgcgtcccgcgactatcgccccattagcgccatacgataaatgggatggtgagaaatgggtgacagatactgaa

SEQ ID NO: 214487 - DNA, 75 bp, synthetic construct
  source 1..75: mol_type = other DNA
atgcgtcccgcgactatcgcccctttatcgccatacgataaatgggatggtgagaaatgggtgacagatactgaa

SEQ ID NO: 214488 - DNA, 75 bp, synthetic construct
  source 1..75: mol_type = other DNA
cggtaagctgggggttgtggcggatattggtggttcaggtatggcgatgtttgccccgcagtacaacatcgagat

SEQ ID NO: 214489 - DNA, 75 bp, synthetic construct
  source 1..75: mol_type = other DNA
aaaagtgggcaaattcagctatagcgatgccggacagatgaatatgtatctcaactacgccaaagagcactggac

SEQ ID NO: 214490 - DNA, 75 bp, synthetic construct
  source 1..75: mol_type = other DNA
ttgaagctcttaacacagggcatgaaggctcaataagtacgatccatgctaacaatacttatgcgtcattctcgc

SEQ ID NO: 214491 - DNA, 75 bp, synthetic construct
  source 1..75: mol_type = other DNA
attggcgacactttcgttgataccgaagaaacggatctggtttccggtgatggcgagaaaaaagctaaaggtttc

SEQ ID NO: 214492 - DNA, 75 bp, synthetic construct
  source 1..75: mol_type = other DNA
ttccacaggtggcgcggctgtaaattatggaaccgagggcagcaagcgtaacgaaaccaacaccccgaaagttga

SEQ ID NO: 214493 - DNA, 75 bp, synthetic construct
  source 1..75: mol_type = other DNA
agaagtcaaagcggcgatcaaagaaactggtttaccggtgaccaccgcctgcggtggctatgacggctggattgg

SEQ ID NO: 214494 - DNA, 75 bp, synthetic construct
  source 1..75: mol_type = other DNA
tgggccgtccggttcaatatctcgaaaccatgccagatgcggaagcaggtgaagcgttccttgctgtgggcgact

SEQ ID NO: 214495 - DNA, 75 bp, synthetic construct
  source 1..75: mol_type = other DNA
agatgtaccggaaatgtctctgccgctgcatccaaaccacatccggcttttttacaaaaaaataccgttgaagcg

SEQ ID NO: 214496 - DNA, 75 bp, synthetic construct
  source 1..75: mol_type = other DNA
cggctaaccggatccgcgatctggacaactataacaaggcgctgtttgacgccctgacccacgcgggtgtgtggg

SEQ ID NO: 214497 - DNA, 75 bp, synthetic construct
  source 1..75: mol_type = other DNA
ctgtacccggtttatgctcagccccgacacccgcgtcgtggccgttgatctgaacaatgtggccggtgacaagac

SEQ ID NO: 214498 - DNA, 75 bp, synthetic construct
  source 1..75: mol_type = other DNA
ttcccctgaacagggccggctctgtctggcggggacagggaaatctgatgatgcacaccgaggacggctctgcat

SEQ ID NO: 214499 - DNA, 75 bp, synthetic construct
  source 1..75: mol_type = other DNA
aactgatcgacatcctctacaagctgaaagcgaaataccgtaagaacgccgtatgggtgatgaactcgagcacag

SEQ ID NO: 214500 - DNA, 75 bp, synthetic construct
  source 1..75: mol_type = other DNA
cgtttacaggcgggtgatcctgatacgttgctgggccttccggtcgaatatctggagtttatgccggataacgtt

SEQ ID NO: 214501 - DNA, 75 bp, synthetic construct
  source 1..75: mol_type = other DNA
ggcaaagtaatcctcatgccataaccgctggacttaactatacccccttcccgctgatgaccttcagcgcggagc

SEQ ID NO: 214502 - DNA, 75 bp, synthetic construct
  source 1..75: mol_type = other DNA
cagccggtgcgcggaatgcttaccggtttcatgccaaatcggccagtgaggatgtcctggatgcggatgcttatg

SEQ ID NO: 214503 - DNA, 75 bp, synthetic construct
  source 1..75: mol_type = other DNA
atctggtcttatggcattcgtaatccgcaaggaatggcgatgaatccgtggagtaatgcactgtggctgaatgaa

SEQ ID NO: 214504 - DNA, 75 bp, synthetic construct
  source 1..75: mol_type = other DNA
gcaaattcgcgacgttgcgccagaaaaagccgagctgccgcgcccgtttcgcctggcgattattcagctgggaac

SEQ ID NO: 214505 - DNA, 75 bp, synthetic construct
  source 1..75: mol_type = other DNA
aaagccgagctgccgcgcccgtttcgcctggcgattattcagctgggaacctatgacggaactgtctataacgcc

SEQ ID NO: 214506 - DNA, 75 bp, synthetic construct
  source 1..75: mol_type = other DNA
tggtgttggcagaccggcacgcaggaatatgacgttaatctgtatcagcagttacatttcgcattatgggaggaa

SEQ ID NO: 214507 - DNA, 75 bp, synthetic construct
  source 1..75: mol_type = other DNA
aaaggaatatttccctaaggacaatcttccgatcggccttttgtataaagtggtcaccccgggagcggggatcac

SEQ ID NO: 214508 - DNA, 75 bp, synthetic construct
  source 1..75: mol_type = other DNA
cggcagtaagtgcccgtgctgtgttaaaggaatatttccctaaggacaatcttccgatcggccttttgtataaag

SEQ ID NO: 214509 - DNA, 75 bp, synthetic construct
  source 1..75: mol_type = other DNA
agcgaatacgcgcaaaagcgggcgctgaaacctctcttaaccctgccttatgatgccgagcaaacctggcatttt

SEQ ID NO: 214510 - DNA, 75 bp, synthetic construct
  source 1..75: mol_type = other DNA
taagtgctgaggtttttgcgtctacacttggtcttcccatgtttatagtaaaactagataaattgatgtcttcct

SEQ ID NO: 214511 - DNA, 75 bp, synthetic construct
  source 1..75: mol_type = other DNA
cgagctataggttcgaattactcattaaaaggattggagcgattctctcccatgaacgaggccactaatgatttt

SEQ ID NO: 214512 - DNA, 75 bp, synthetic construct
  source 1..75: mol_type = other DNA
atgtacgaatctttaggtattatcgatcagctcaaaactgaatttgtcgagagaatcaataacttaggatatgct

SEQ ID NO: 214513 - DNA, 75 bp, synthetic construct
  source 1..75: mol_type = other DNA
aaagggcaactctatcgcgccgatcttgatcgtaacggcattcaggatctggttatctggttatctggttatctg

SEQ ID NO: 214514 - DNA, 75 bp, synthetic construct
  source 1..75: mol_type = other DNA
gaattcagggaattgaacatcaaaacagggatgtgcgcttttttattgagcttagtgctgcctgcacaggccacc

SEQ ID NO: 214515 - DNA, 75 bp, synthetic construct
  source 1..75: mol_type = other DNA
cctgaagataacggcgagaattttgcggaaaaatggaatcgtccggatgaaggttataaatacgttgatgccttt

SEQ ID NO: 214516 - DNA, 75 bp, synthetic construct
  source 1..75: mol_type = other DNA
gtgtttgaatcgctggcgcgactggagcagattttaggccagcatcgttacctgaccggcaaccagctaaccgaa

SEQ ID NO: 214517 - DNA, 75 bp, synthetic construct
  source 1..75: mol_type = other DNA
ataacgccaccggtattcgggtacgggattatcccatcactctggataagctgctcgataagctgccggatgtgg

SEQ ID NO: 214518 - DNA, 75 bp, synthetic construct
  source 1..75: mol_type = other DNA
catatttcctttttctaatggctaatcttttttattctggctatccttcttttttcttattaaaaataaaacatt

SEQ ID NO: 214519 - DNA, 75 bp, synthetic construct
  source 1..75: mol_type = other DNA
tggatatcattaataccgcctttaaagttatcgaaaccatacgccccaaactggcctgtagccggtgtgatgtca

SEQ ID NO: 214520 - DNA, 75 bp, synthetic construct
  source 1..75: mol_type = other DNA
ccggatatgaaggaaccagagcaaaactgggcgataattattccattaatggattcaatattggcgtgggttatc

SEQ ID NO: 214521 - DNA, 75 bp, synthetic construct
  source 1..75: mol_type = other DNA
gccgatattcgcctgtggactacgctggtgcgttttgatccagtgtatgtgacccacttcaagtgtgataagcac

SEQ ID NO: 214522 - DNA, 75 bp, synthetic construct
  source 1..75: mol_type = other DNA
gtgaaaatgaaaataggatggaagcccttgctggatgcgactttattgatttcaacatgacagggcaagatatgt

SEQ ID NO: 214523 - DNA, 75 bp, synthetic construct
  source 1..75: mol_type = other DNA
ctcagccggtatagtgaaggtaaccctgctataccgggtatgtacgacctcagtgtttatgtcaacgatcaacct

SEQ ID NO: 214524 - DNA, 75 bp, synthetic construct
  source 1..75: mol_type = other DNA
ggtggtaatttagcgggtgctctggccggagcttctgcaccggaactggcgcatctgctgaaatcaacagaaaaa

SEQ ID NO: 214525 - DNA, 75 bp, synthetic construct
  source 1..75: mol_type = other DNA
gcagtgatgtgattgtctgcgctgaaatggacgaacagtggggctacgtcggtgctaaatcacgtgagcgctggc

SEQ ID NO: 214526 - DNA, 75 bp, synthetic construct
  source 1..75: mol_type = other DNA
aaattatggggtggaaatagaaataccatcaggcaacagaattcgctcatcaaatcattatcagaatataatacc

SEQ ID NO: 214527 - DNA, 75 bp, synthetic construct
  source 1..75: mol_type = other DNA
ggaaatatctcgcctgttacctgagtggtctctgtgcaatctggtctgccagttgcaggctcttaaagcccctga

SEQ ID NO: 214528 - DNA, 75 bp, synthetic construct
  source 1..75: mol_type = other DNA
cggcagcgtcacgcagagtcagtttgacgccgtgggcaggctcaggacacagacggatgccgcaggccggacaac

SEQ ID NO: 214529 - DNA, 75 bp, synthetic construct
  source 1..75: mol_type = other DNA
aagagtttcaggtgctatcccgtcccatcggcgaacgcagaacccgctgcgtctacagcgccacgcgggatatca

SEQ ID NO: 214530 - DNA, 75 bp, synthetic construct
  source 1..75: mol_type = other DNA
ctggtactgaaaaacattgagtttcgtctgctggatagcgacggtgccaccagcgcgattctggaagcgcaccga

SEQ ID NO: 214531 - DNA, 75 bp, synthetic construct
  source 1..75: mol_type = other DNA
acacaattcttttgtgtggcgtattaatatcatcaatcatttgttttattaatagtggtaaaggcgtggtttact

SEQ ID NO: 214532 - DNA, 75 bp, synthetic construct
  source 1..75: mol_type = other DNA
acactattcttatatgtggcgtattaatatcatcaatcattcgccttattaatcaaggtaaaaatgccgcatact

SEQ ID NO: 214533 - DNA, 75 bp, synthetic construct
  source 1..75: mol_type = other DNA
atgcgctacctgcgtgaagcggggaaagaatttgcgcaggcttaccccgaccgcgctgcgatgcttaatcttgat

SEQ ID NO: 214534 - DNA, 75 bp, synthetic construct
  source 1..75: mol_type = other DNA
ttttaattgcttattatactggtgcaaaatttgatgcttggtgtgagagatacattgattatctaaaagagatta

SEQ ID NO: 214535 - DNA, 75 bp, synthetic construct
  source 1..75: mol_type = other DNA
gaaaaattgaacatcattttagatatgcgggagaacattatttttgtgttcattatgcagtcaagatggctcggt

SEQ ID NO: 214536 - DNA, 75 bp, synthetic construct
  source 1..75: mol_type = other DNA
accggaacagtgacggtcagtctggggcgttatcagggattaatacccgctttttccattcgtaacagggagagt

SEQ ID NO: 214537 - DNA, 75 bp, synthetic construct
  source 1..75: mol_type = other DNA
cgcggacacaatatgaagagccgctggtcgaaagtcgctatctttacgacccgctgggccgcagggtggcaaaac

SEQ ID NO: 214538 - DNA, 75 bp, synthetic construct
  source 1..75: mol_type = other DNA
tacagacctcacgaattattgcaacgatctccttacaaaattatctgatattaattactttgatggttttactcc

SEQ ID NO: 214539 - DNA, 75 bp, synthetic construct
  source 1..75: mol_type = other DNA
taagctgcgccgaagcgattgtcaccagtgcgaatcacttttgcgaagagttcgcccgttccagcagcagctacc

SEQ ID NO: 214540 - DNA, 75 bp, synthetic construct
  source 1..75: mol_type = other DNA
aaattcttaagggagcagtagagttgtttctggaaagaggtatagacaaggtttccactcgtgatttgacggaat

SEQ ID NO: 214541 - DNA, 75 bp, synthetic construct
  source 1..75: mol_type = other DNA
gctgcactgaaagccggtgataaatacgccacgatacgtacgatgctgacagatatagttaacagtaattaccag

SEQ ID NO: 214542 - DNA, 75 bp, synthetic construct
  source 1..75: mol_type = other DNA
acgttgctgaagaaagctggctggaggaaaacctgccgtcagcgtttgcactacatccgtggcgcagctcgcttg

SEQ ID NO: 214543 - DNA, 75 bp, synthetic construct
  source 1..75: mol_type = other DNA
taatgaattaaaacttaggtttagaatgatgcaaactatcttgaaatcgagagttaatgtattaccatatattaa

SEQ ID NO: 214544 - DNA, 75 bp, synthetic construct
  source 1..75: mol_type = other DNA
tgttgccatcttcttcgtgtacccggaggcgatccgcaaggttatctacaccacaaacgcaatcgaatcgctgaa

SEQ ID NO: 214545 - DNA, 75 bp, synthetic construct
  source 1..75: mol_type = other DNA
cgactgtggccgaaaggtgagtcagcgttcagcggctaccagttgttgctggaatatttcaccttccgtgagaag

SEQ ID NO: 214546 - DNA, 75 bp, synthetic construct
  source 1..75: mol_type = other DNA
acgctgctcgatacgccagttcatgcctcacagaacgtcctgcgggtgcgcaacctgtgcgctccgacgcagccc

SEQ ID NO: 214547 - DNA, 75 bp, synthetic construct
  source 1..75: mol_type = other DNA
gtactgttcggtgtagccgcattctcgaccttttatgtgattgtggtgtggatgcccaaatatgcgatggctttt

SEQ ID NO: 214548 - DNA, 75 bp, synthetic construct
  source 1..75: mol_type = other DNA
ggctgggtattcccggcagcgagaaccatatcgccacgccggtatcccgttttctggccctgctcagcgtgatgc

SEQ ID NO: 214549 - DNA, 75 bp, synthetic construct
  source 1..75: mol_type = other DNA
cgttcttctccgtaggccgtttttacccggcactggtcggcaatgatatcggctgcggcatggcgctatggcaaa

SEQ ID NO: 214550 - DNA, 75 bp, synthetic construct
  source 1..75: mol_type = other DNA
atgaaattgaagctgaaaaaccttagcatggcgatcatgatgagcactatagtcatgggaagcagtgcaatggcg

SEQ ID NO: 214551 - DNA, 75 bp, synthetic construct
  source 1..75: mol_type = other DNA
accagacacaatggcaagctcgccaatgttattttcagccagattgccaggggtattgaggcaggcgaggaacaa

SEQ ID NO: 214552 - DNA, 75 bp, synthetic construct
  source 1..75: mol_type = other DNA
ggaatagattgaagtctaatcttacattaagtgagattgctttttatataaagagtaacaaatactctgaagaac

SEQ ID NO: 214553 - DNA, 75 bp, synthetic construct
  source 1..75: mol_type = other DNA
ttgaagcggcggttaagcgcggtgcgcagcaaggctatgccatggccgtcagcgatgtcgccagcggcaaaggta

SEQ ID NO: 214554 - DNA, 75 bp, synthetic construct
  source 1..75: mol_type = other DNA
tctatcggcgcaatgtcatatggtggcgggcgcgaacacggcggcccggtatctgccagctccatgtaccgtgtg

SEQ ID NO: 214555 - DNA, 75 bp, synthetic construct
  source 1..75: mol_type = other DNA
tgatggtgtaactcgtttatgtaaagaaaggaaaaaaattattgttcttgaagatgatttattaacatcatcttc

SEQ ID NO: 214556 - DNA, 75 bp, synthetic construct
  source 1..75: mol_type = other DNA
cccccgtgattttatttgtatatgctaggtatgatcatacaaaaaaaacaattgaagcattagtagataattacc

SEQ ID NO: 214557 - DNA, 75 bp, synthetic construct
  source 1..75: mol_type = other DNA
aaaacagcatatcgacaatattttgtatttctaatcagttgctgggaaacatattttagagacgtttttgttttc

SEQ ID NO: 214558 - DNA, 75 bp, synthetic construct
  source 1..75: mol_type = other DNA
gaggagttcaactccatccttgagcaaatgcctgaacttgcgcgccagattgccgccgggatgggtgtaagtatt

SEQ ID NO: 214559 - DNA, 75 bp, synthetic construct
  source 1..75: mol_type = other DNA
gcgacacaggaacaggtcattctggccgggcaatacgcggctaaagcctgggataacgccaacgcattgcgcgcc

SEQ ID NO: 214560 - DNA, 75 bp, synthetic construct
  source 1..75: mol_type = other DNA
taattgattcaacactaacagaactaggtgatatggaatttgaattacctgatgatatggatatcttagaacatg

SEQ ID NO: 214561 - DNA, 75 bp, synthetic construct
  source 1..75: mol_type = other DNA
cgtgacccaagcctctcaagaggcctctaacacaaagccaataaacattaaaacgaccggagacgatgcggctac

SEQ ID NO: 214562 - DNA, 75 bp, synthetic construct
  source 1..75: mol_type = other DNA
ctgacatgaataacggcggcccggcaagcaacgccattaccagcaacatgaacgttaaacgcacgccaagggggc

SEQ ID NO: 214563 - DNA, 75 bp, synthetic construct
  source 1..75: mol_type = other DNA
tctcaacgccattcagaagcaaaccggctcagtgaatgcagaattcgagaaactccctcgcacgctttcccaggc

SEQ ID NO: 214564 - DNA, 75 bp, synthetic construct
  source 1..75: mol_type = other DNA
tgattgtaaattcaacaacatacagctttatgagactaatgatgatactgtggaatcaggaaataaaaaccaata

SEQ ID NO: 214565 - DNA, 75 bp, synthetic construct
  source 1..75: mol_type = other DNA
gcacaacaacccgttgagcaatacgaactctattttcatgagataacagaagacgttgccttcaatcataataaa

SEQ ID NO: 214566 - DNA, 75 bp, synthetic construct
  source 1..75: mol_type = other DNA
tgttatgcagcaaaagtaatgacgaagaaatactggtgctttttagcgataccggcggtggcgccgggcgaatta

SEQ ID NO: 214567 - DNA, 75 bp, synthetic construct
  source 1..75: mol_type = other DNA
tatatgacattaaccgatcactttgataatgctattccacctgttttttaccatgagcaccaatcatttttctta

SEQ ID NO: 214568 - DNA, 75 bp, synthetic construct
  source 1..75: mol_type = other DNA
gcagataaatgatgctgtccgtgctgtactgcttgccagtgccggtgggaacgatctggatcaggttggcgcgaa

SEQ ID NO: 214569 - DNA, 75 bp, synthetic construct
  source 1..75: mol_type = other DNA
gttgctatcgacgatgatggcaaacaaggtaatgactccaacttattgatagtgttttatgttcagataatgccc

SEQ ID NO: 214570 - DNA, 75 bp, synthetic construct
  source 1..75: mol_type = other DNA
ccgcagaagcacagcgccagtcgctgattgattctgcaatggcttccattagtctgattcaactgaaattacagg

SEQ ID NO: 214571 - DNA, 75 bp, synthetic construct
  source 1..75: mol_type = other DNA
cggcagaagcacagcgccagtcgctgattgatcctgcaatggcttccattagtctgattcaactgaaatttcagg

SEQ ID NO: 214572 - DNA, 75 bp, synthetic construct
  source 1..75: mol_type = other DNA
ttaaccgcattcagtttcgtgagaaatttaccgggcagctactggtcaatgtggataaaggtcgcgtggtgtgta

SEQ ID NO: 214573 - DNA, 75 bp, synthetic construct
  source 1..75: mol_type = other DNA
ggtagcaccactcgcgctaacagcgaagactgcctttttgcagtgaaaggaaatctgcccgaacgcattaacgcc

SEQ ID NO: 214574 - DNA, 75 bp, synthetic construct
  source 1..75: mol_type = other DNA
atgcccgatcttgggatcgcgggctcccttattgtggttacatgtttacttctgctttttagtattgcttacaag

SEQ ID NO: 214575 - DNA, 75 bp, synthetic construct
  source 1..75: mol_type = other DNA
ttcagaaagaatatcgcaaaccagttgttgttgaagatcagcaattggggactttcgtgcttaataaagactact

SEQ ID NO: 214576 - DNA, 75 bp, synthetic construct
  source 1..75: mol_type = other DNA
aacccgttctaacatatcctactcgttatagtagaaaagcagttacccgctggatagatgaaggaggaataaata

SEQ ID NO: 214577 - DNA, 75 bp, synthetic construct
  source 1..75: mol_type = other DNA
ccggacattccgggtatcggatattacggttcgaaatggcgtgacagctcagccacctggacgtcacaggacagg

SEQ ID NO: 214578 - DNA, 75 bp, synthetic construct
  source 1..75: mol_type = other DNA
tggcgcagcacttattcaggcgattgtcgcagaaggtgatgtgagcacacctgttgtggtgaagctgacaggtgg

SEQ ID NO: 214579 - DNA, 75 bp, synthetic construct
  source 1..75: mol_type = other DNA
atatcttcttctgtcttgttacagaagaacagaaaatcgggcttttgcgcctgaatattgcggagaaaaagcatg

SEQ ID NO: 214580 - DNA, 75 bp, synthetic construct
  source 1..75: mol_type = other DNA
agtacgacgctgcggtaatggctgacgttgcgaaatccaaagcgccgaactctccggttgcaggtcgcgctaccg

SEQ ID NO: 214581 - DNA, 75 bp, synthetic construct
  source 1..75: mol_type = other DNA
tcgttatcagtccggaacgatgaaacggtttgatggtaaaccacttgatgctttaccgccgggtaaggaaaaaca

SEQ ID NO: 214582 - DNA, 75 bp, synthetic construct
  source 1..75: mol_type = other DNA
cgtttccttcccctgagggttttaccgcaggtatgacaatggcgggatattttattcacgccactgtcataaatg

SEQ ID NO: 214583 - DNA, 75 bp, synthetic construct
  source 1..75: mol_type = other DNA
gtcgtgggttaatatgcaggctcagtacagcctctcgaaaagtcgtaagactttatccgagacgctagaacacct

SEQ ID NO: 214584 - DNA, 75 bp, synthetic construct
  source 1..75: mol_type = other DNA
tacggcttgctggggatatggtatagaagaaggggatgctagagaagaactttctaggaaaaatgaattaccttt

SEQ ID NO: 214585 - DNA, 75 bp, synthetic construct
  source 1..75: mol_type = other DNA
cggcgatcatctacagtctgctggtcacctgcaagctgaacgaagtggagccggaggactggttgcgcgaagtga

SEQ ID NO: 214586 - DNA, 75 bp, synthetic construct
  source 1..75: mol_type = other DNA
ggtgcccccattcatgccagtattgatggcatggtcagcgatgtgacagaaaacgcgattacgcttgtgagaggt

SEQ ID NO: 214587 - DNA, 75 bp, synthetic construct
  source 1..75: mol_type = other DNA
aggaattacgcgcacaaaatctccgctacgaaggtgccttaaatcctgcagatcccatggcaaattatcgactga

SEQ ID NO: 214588 - DNA, 75 bp, synthetic construct
  source 1..75: mol_type = other DNA
cggacctgtctgaaaaactgcatgtatcaccttccactctaagtagagtgctgaatggaaaagctgatttaagtg

SEQ ID NO: 214589 - DNA, 75 bp, synthetic construct
  source 1..75: mol_type = other DNA
tcgcttttaccaagccccctacaagctttagcgatcaagtacgcttgttgcaacaacgtggcctagtgatcagtg

SEQ ID NO: 214590 - DNA, 75 bp, synthetic construct
  source 1..75: mol_type = other DNA
cggctgctggggttatttccaccggaaatcagggattcaatggcagccgccaccctttccctggtgcagttcatt

SEQ ID NO: 214591 - DNA, 75 bp, synthetic construct
  source 1..75: mol_type = other DNA
aaccgcctgagcgtcttcctcgcccataaacagcaactggtcacacacgcctttttgtacgctaacgactacgtt

SEQ ID NO: 214592 - DNA, 75 bp, synthetic construct
  source 1..75: mol_type = other DNA
cccgacttaacgctgtgctggattacattgacgcggtgacggcaacagataccagcaccgcgccggatgtcatct

SEQ ID NO: 214593 - DNA, 75 bp, synthetic construct
  source 1..75: mol_type = other DNA
atcctgggttcaaaacccggaacgatcttcactatgttaagggatactggcggcataaaaccccatgagcgtaag

SEQ ID NO: 214594 - DNA, 75 bp, synthetic construct
  source 1..75: mol_type = other DNA
cggcggataagggatcaggttctgaccatgtatcagaacgatcgcattgagaaatcagaagcagcgctcttcatc

SEQ ID NO: 214595 - DNA, 75 bp, synthetic construct
  source 1..75: mol_type = other DNA
ggaatacatcgtcataactgacgaactgcgtgatacgctctcccggcagtcccatgcgacatgggggcattacat

SEQ ID NO: 214596 - DNA, 75 bp, synthetic construct
  source 1..75: mol_type = other DNA
tttatcattttttatactttgctatttttcaatcacaggagatgctattagtttaatttttgtcgcctctgtatg

SEQ ID NO: 214597 - DNA, 75 bp, synthetic construct
  source 1..75: mol_type = other DNA
cattttggattatgtcagaaaaaataatatcaatttttgggttattttttgtgacatcctttgtagcaaaatata

SEQ ID NO: 214598 - DNA, 75 bp, synthetic construct
  source 1..75: mol_type = other DNA
catcgagcgttttgaggtgtcattacgcacacaaattgcgtatcagttgagccaaaaataccaaaccgcgcaccc

SEQ ID NO: 214599 - DNA, 75 bp, synthetic construct
  source 1..75: mol_type = other DNA
ctcttgcaatttcattcctttcgaagatatattctgagaaagacgacttgaaagcccaggataaaacatcgggtt

SEQ ID NO: 214600 - DNA, 75 bp, synthetic construct
  source 1..75: mol_type = other DNA
cgactctaaattcgaagttcaacactattgccaacgtgatcggattgcttattggtttgatttttcgctacgtta

SEQ ID NO: 214601 - DNA, 75 bp, synthetic construct
  source 1..75: mol_type = other DNA
gtcgttcaagttgtagctcagttgggttgtgataatataatatttaaaagagtttctaagaatgcaacctctgga

SEQ ID NO: 214602 - DNA, 75 bp, synthetic construct
  source 1..75: mol_type = other DNA
atttcagcaatacaattgccgggtctcttggaaaatattttcgagggcgaaggcttgcaatggttgaaaaatata

SEQ ID NO: 214603 - DNA, 75 bp, synthetic construct
  source 1..75: mol_type = other DNA
gtgcctgtcagtttaccaggctggcactggagtctctcatcccagcggacaggtatatcgtgcgggtgtacagca

SEQ ID NO: 214604 - DNA, 75 bp, synthetic construct
  source 1..75: mol_type = other DNA
agctgggttactcgctttactttatctgtatggctctattatcaaagaaacaaccaatgtgatatttaaaaaagt

SEQ ID NO: 214605 - DNA, 75 bp, synthetic construct
  source 1..75: mol_type = other DNA
cggcagaactgggctgcacttttctgaatcacggggtcggtggttcgaaaatagccaaaccggatagctcctcaa

SEQ ID NO: 214606 - DNA, 75 bp, synthetic construct
  source 1..75: mol_type = other DNA
ttcggggttaacatcacgcgtcgatgcgctccagggagctatctctgttggttatgcttatgcagctgcctggca

SEQ ID NO: 214607 - DNA, 75 bp, synthetic construct
  source 1..75: mol_type = other DNA
gacacactatctaaatatcaattactggatggcaatgaaaatataagaattagaatagttaaccctaacatacat

SEQ ID NO: 214608 - DNA, 75 bp, synthetic construct
  source 1..75: mol_type = other DNA
ttgaagtgaccgacgcgggtgggctgcgcatcggcgcactggtacggaacaccgacctggcggctcacgagcgcg

SEQ ID NO: 214609 - DNA, 75 bp, synthetic construct
  source 1..75: mol_type = other DNA
caggtcgccgggccgaccggttgctcccccggagggcgaaagccccttctgccgtccacttcttcggggtttctc

SEQ ID NO: 214610 - DNA, 75 bp, synthetic construct
  source 1..75: mol_type = other DNA
aagggacaaaatcatccagtcagactatcactgcctatatggggaccatgtacggtatttttaaagaccaggctg

SEQ ID NO: 214611 - DNA, 75 bp, synthetic construct
  source 1..75: mol_type = other DNA
aagtcgaccattgaagatatggcctgctgggtacgaagcaatatgaatccccgtgatatcaacgacaaaacactt

SEQ ID NO: 214612 - DNA, 75 bp, synthetic construct
  source 1..75: mol_type = other DNA
gcgctgcccctatttttacgacaccaatcagccctgcaataagcgcctgcccgggagcggctgcgcggcgcttga

SEQ ID NO: 214613 - DNA, 75 bp, synthetic construct
  source 1..75: mol_type = other DNA
ggtcagttacgtaatcaggcaaccaccgcaggtaatctgctccagcgcacgcgctgcccctatttttacgacacc

SEQ ID NO: 214614 - DNA, 75 bp, synthetic construct
  source 1..75: mol_type = other DNA
ctattcgggcagccaacgctattctggttgcagcacaaagagaagttcccctggcgaatctctggggtggtggtg

SEQ ID NO: 214615 - DNA, 75 bp, synthetic construct
  source 1..75: mol_type = other DNA
agcaaaaagtggaacaggtcagtttcataaaataataagcgccctacctgagtctgaacgcgcgccagcaattgc

SEQ ID NO: 214616 - DNA, 75 bp, synthetic construct
  source 1..75: mol_type = other DNA
ttgccaattcaacatcaggtgccattgttggtggagcaggagggggcattgcaggcgctgccgcaggtgctttag

SEQ ID NO: 214617 - DNA, 75 bp, synthetic construct
  source 1..75: mol_type = other DNA
atacgtgatacagtcggaaacgaagagtttcagcgattagcgagagctgggattgtggcatcgctaagcggaatg

SEQ ID NO: 214618 - DNA, 75 bp, synthetic construct
  source 1..75: mol_type = other DNA
ttaaaagtacacaacgtacactttgataataatcaagagttagttgctgatggtgagcctgacgtagtattttaa

SEQ ID NO: 214619 - DNA, 75 bp, synthetic construct
  source 1..75: mol_type = other DNA
aaatgcggtttctgaaattaacctgtcatctaataaaaataatgttgatcagtttattgaatgcgctaagagaaa

SEQ ID NO: 214620 - DNA, 75 bp, synthetic construct
  source 1..75: mol_type = other DNA
gccaaaccaccgcggcagagccaaaaaaagagctggatcaggctgccggtatcctgcaagccctgggcggggtcg

SEQ ID NO: 214621 - DNA, 75 bp, synthetic construct
  source 1..75: mol_type = other DNA
ttgatcatattgtcgccagcctgtgcttcgagcgcgatggcgtcaacctgcccgatttttcccggctgttcgccg

SEQ ID NO: 214622 - DNA, 75 bp, synthetic construct
  source 1..75: mol_type = other DNA
ggatatccggtcatggattcagacgttgagaaactgtcaccattgcagtgcgggcatattaatatgcaggggcgc

SEQ ID NO: 214623 - DNA, 75 bp, synthetic construct
  source 1..75: mol_type = other DNA
ggcttgcggatatggggggagccagattttggcgcatcgatcctaaagctgattacggtccgtttaacgcaatat

SEQ ID NO: 214624 - DNA, 75 bp, synthetic construct
  source 1..75: mol_type = other DNA
gggatttttttatcctgttagcgaccttgacgagtaccaaaaagcgcgaagttcaactattgttctgtggtgttc

SEQ ID NO: 214625 - DNA, 75 bp, synthetic construct
  source 1..75: mol_type = other DNA
attgcagtgtccggctttaccggtcttattggtggcctaatcagcgtagaaagtgggctgagcctttacatgatt

SEQ ID NO: 214626 - DNA, 75 bp, synthetic construct
  source 1..75: mol_type = other DNA
gagtgttctggctcgttttgctgatcatcgcaggttggggcggtctggtccgctacctgatagatgtgaagcaga

SEQ ID NO: 214627 - DNA, 75 bp, synthetic construct
  source 1..75: mol_type = other DNA
tattctgacaaaggaaatccaacggttttatatccaaatggtgatggtgaattaataattccagaacagtgtaga

SEQ ID NO: 214628 - DNA, 75 bp, synthetic construct
  source 1..75: mol_type = other DNA
gctccgcccgcaaaagctcgctaaagggccttttaaaggcctttaagggtaagggagagctgcgcgcgctggtac

SEQ ID NO: 214629 - DNA, 75 bp, synthetic construct
  source 1..75: mol_type = other DNA
gttgcaggaagtcattcaacagccggatgcgagcgatgaactgcgcgacgcgctgatggccctcgaatggcgacg

SEQ ID NO: 214630 - DNA, 75 bp, synthetic construct
  source 1..75: mol_type = other DNA
ttatgaattatatgccagacataaagattttatattatttaagtgtacatttttttcatttctgcttactgtcat

SEQ ID NO: 214631 - DNA, 75 bp, synthetic construct
  source 1..75: mol_type = other DNA
ggtaccgtgagcgcttggtgttccgtccgggtgcctccgaaaacgaggaccgcagcgttgcccttaagcgccttg

SEQ ID NO: 214632 - DNA, 75 bp, synthetic construct
  source 1..75: mol_type = other DNA
actggcatcgcattgatattgtcgccgagctgcacaagcgtggcgtcactatgcgcggcctttccgccagcgcgg

SEQ ID NO: 214633 - DNA, 75 bp, synthetic construct
  source 1..75: mol_type = other DNA
aggccagcgaactgcttcatgccgcgctgcattatccggagaatttaagcgaaggccgtttaccggggcaaactg

SEQ ID NO: 214634 - DNA, 75 bp, synthetic construct
  source 1..75: mol_type = other DNA
ttggtgcgggggctgggtcacaagccattgtaggcgaaggtattaatgctaatggccatggtggtggaggcggtg

SEQ ID NO: 214635 - DNA, 75 bp, synthetic construct
  source 1..75: mol_type = other DNA
catcattgtgctgtgcagcggggcgatgacgaatgcggcggccgattacaaccctaccagtcgtaatgagaccga

SEQ ID NO: 214636 - DNA, 75 bp, synthetic construct
  source 1..75: mol_type = other DNA
gtgacgttaggccagccttcactaacagcccctgcgaaatggtggggtgaatttttcgggctgagtctttcagcc

SEQ ID NO: 214637 - DNA, 75 bp, synthetic construct
  source 1..75: mol_type = other DNA
cggttttgcgcgtacgggtaaactgtttgccatggttcattacgccgataagccggatttaatgactatggcgaa

SEQ ID NO: 214638 - DNA, 75 bp, synthetic construct
  source 1..75: mol_type = other DNA
tgattgaggctaaagaaaacgttccggccatcgaggcggtacgtggtctggggtcgatgattgccgcagagttta

SEQ ID NO: 214639 - DNA, 75 bp, synthetic construct
  source 1..75: mol_type = other DNA
gatgtccggtggtgggcaagttgaagaactgcgccgtgcgctggaaatatcaggcgcccgggtgattatcatcga

SEQ ID NO: 214640 - DNA, 75 bp, synthetic construct
  source 1..75: mol_type = other DNA
tcaaaagacggaaacagttacatcgaaatgccgtataccaaactgcgttcactgagccagaaggtcaatctgaaa

SEQ ID NO: 214641 - DNA, 75 bp, synthetic construct
  source 1..75: mol_type = other DNA
attcgccggatggttgggaatgaaatacatcatcgccttggcagcagattgcccggaaagtgaaagcgctccgtg

SEQ ID NO: 214642 - DNA, 75 bp, synthetic construct
  source 1..75: mol_type = other DNA
cctcactgcttgaagccgtattcacccccatgaccgagtacacgcacaacgtgtattcggtgaagggtgatcggc

SEQ ID NO: 214643 - DNA, 75 bp, synthetic construct
  source 1..75: mol_type = other DNA
gaccacaatcgataactcccgtcgtgtggtcaacgtcaacgtgcaggatccatctcctgcccgtctcaacgagtg

SEQ ID NO: 214644 - DNA, 75 bp, synthetic construct
  source 1..75: mol_type = other DNA
cgctcaatcaggtccagcctcttacgcccttaaaagccgggataacacactcaaatatcaacttcgttataagtc

SEQ ID NO: 214645 - DNA, 75 bp, synthetic construct
  source 1..75: mol_type = other DNA
atgccgtataccaaactgcgttcactgagccagaaggtcaatctgaaagaagggcaatcacttgtcgttactggt

SEQ ID NO: 214646 - DNA, 75 bp, synthetic construct
  source 1..75: mol_type = other DNA
aggctatttcaacgatcccctgcgtagcgagcagcaatttttgacgctcccggacgagcgctggtatcgcaccgg

SEQ ID NO: 214647 - DNA, 75 bp, synthetic construct
  source 1..75: mol_type = other DNA
gctctgcaacagccgcaggcgctggcggtaacggacatgcgttatcagtggaattatcatgagctgacagactat

SEQ ID NO: 214648 - DNA, 75 bp, synthetic construct
  source 1..75: mol_type = other DNA
ttcgccctacaaccgatgctgcactggtagcagctattgcacacacgttgataaaagaaaatctgatcgacgaag

SEQ ID NO: 214649 - DNA, 75 bp, synthetic construct
  source 1..75: mol_type = other DNA
ggaagagttaatcattccgttaatgcaagagattggttttaaagaagagaatttttcagcgagcacattagctga

SEQ ID NO: 214650 - DNA, 75 bp, synthetic construct
  source 1..75: mol_type = other DNA
ctgatacttttgccgaagatcttattaatgactatatcgatgtcacaggtttgatcagaagagatggcgccgaaa

SEQ ID NO: 214651 - DNA, 75 bp, synthetic construct
  source 1..75: mol_type = other DNA
ctgcactgggtattgtggccaccaataaaatggtagaaacttttagtgaatctttaacaaaatcaacttacgaat

SEQ ID NO: 214652 - DNA, 75 bp, synthetic construct
  source 1..75: mol_type = other DNA
atattggttcagagattcatgtagagctgttaattacataaaaaataaacaatttgaattaaatgaattaggctt

SEQ ID NO: 214653 - DNA, 75 bp, synthetic construct
  source 1..75: mol_type = other DNA
tactcagaggatggtaaaaaaattcaagacttatttggggttaggataatattatattttcctgatgatttattt

SEQ ID NO: 214654 - DNA, 75 bp, synthetic construct
  source 1..75: mol_type = other DNA
aaacaaattgctccgttgttatctcttactagcgactattgcatttataacagttatattattcaatgtgggagg

SEQ ID NO: 214655 - DNA, 75 bp, synthetic construct
  source 1..75: mol_type = other DNA
tcctggctgaccgggtgagtgaggaaagccgacgctggctggcatcgtgcggcctgacggtggagcagatgcaaa

SEQ ID NO: 214656 - DNA, 75 bp, synthetic construct
  source 1..75: mol_type = other DNA
cgctgaacgctactctgtggtggctgaactggttcgatggtcgtagcgaatctgccctcgtacagtggcgaggtc

SEQ ID NO: 214657 - DNA, 75 bp, synthetic construct
  source 1..75: mol_type = other DNA
cgaaacacatatccccgaagcgccagcccggaagaagaaaaagaaaagacaccgtttcccacgtcccgtccactg

SEQ ID NO: 214658 - DNA, 75 bp, synthetic construct
  source 1..75: mol_type = other DNA
tattcgtcagaaatgctcgatgaattactggcaaccggtgcggttatctggtcggggcaaaaaaaactgggtgaa

SEQ ID NO: 214659 - DNA, 75 bp, synthetic construct
  source 1..75: mol_type = other DNA
gctttaccctcaaagtgcgctgctgcttagcagcgcactgctcggtggggtggggtggggatcggcatcattcag

SEQ ID NO: 214660 - DNA, 75 bp, synthetic construct
  source 1..75: mol_type = other DNA
atatttattaaacactttgtagaaactgaaaggaatttactttggggatatgcagaagcagctctatcatatatt

SEQ ID NO: 214661 - DNA, 75 bp, synthetic construct
  source 1..75: mol_type = other DNA
aggttgtttgcgccggggctgcatgtgctgtcgtataacgaagtgccggatgagctggagttgaagattatgggg

SEQ ID NO: 214662 - DNA, 75 bp, synthetic construct
  source 1..75: mol_type = other DNA
cagcgcggtatggagtcccggctgaagcaggctcgtctgccgtgggtcaaaacgctggagcagttcgattttacc

SEQ ID NO: 214663 - DNA, 75 bp, synthetic construct
  source 1..75: mol_type = other DNA
ttcaacatcacgaatattattgcagacaaatgccgagaaatcccagagctatgcgaaaagaaggtaatccgggac

SEQ ID NO: 214664 - DNA, 75 bp, synthetic construct
  source 1..75: mol_type = other DNA
tggagcaactaatagaaaacctaatggtatacgtttagtaccgtcagcaaatacagaaacgtataatcgtgatgg

SEQ ID NO: 214665 - DNA, 75 bp, synthetic construct
  source 1..75: mol_type = other DNA
attttgaacgcaacgcgtatctgtcgatctttatggccccgtcgattgctaaagaaggcaagatctcaaccgtcg

SEQ ID NO: 214666 - DNA, 75 bp, synthetic construct
  source 1..75: mol_type = other DNA
gacatattcaccacgatcttagccacgtcttcgacttacaccgtaatttaattgcaaccggctcgatgctgggtt

SEQ ID NO: 214667 - DNA, 75 bp, synthetic construct
  source 1..75: mol_type = other DNA
agcaagcgcttagtgccttgaatgaacgtctgaacgttaaagatccggctgagaacgcccgcaacaagcttgcgg

SEQ ID NO: 214668 - DNA, 75 bp, synthetic construct
  source 1..75: mol_type = other DNA
caattgctttgaattggatgaggggtaaatctctgccggagataatctctctctccataaataagaaaaaagaaa

SEQ ID NO: 214669 - DNA, 75 bp, synthetic construct
  source 1..75: mol_type = other DNA
tatcaacaagccgaagaggatttctggcgtgcggtctggagcggcaacagcaaagccggtggctattatggcctg

SEQ ID NO: 214670 - DNA, 75 bp, synthetic construct
  source 1..75: mol_type = other DNA
aaaagcaagttctcatagatacagctaatcacgtaatcaatcgtgataatacttcaccatatagcgaaaatctta

SEQ ID NO: 214671 - DNA, 75 bp, synthetic construct
  source 1..75: mol_type = other DNA
ttagtaattggtatcgttggcactgctgtatggttattgttcgctgtatggtatatgtctgcaaaaattaaaaat

SEQ ID NO: 214672 - DNA, 75 bp, synthetic construct
  source 1..75: mol_type = other DNA
tttgagtcgcaaactaactcgtgatgaactcaaagaaattttaatatcaacgtttctcactggtatcgaggaaaa

SEQ ID NO: 214673 - DNA, 75 bp, synthetic construct
  source 1..75: mol_type = other DNA
catggtccaatccaattctgacatgctttgagtcaccctcgtcagatgataaaatatggaaaatttatctaattc

SEQ ID NO: 214674 - DNA, 75 bp, synthetic construct
  source 1..75: mol_type = other DNA
ttggtattgcaggctttgtctgcacggcaaagccaaactcgcttttgtatggtgcgatttggtaatgtactcggt

SEQ ID NO: 214675 - DNA, 75 bp, synthetic construct
  source 1..75: mol_type = other DNA
gctgcagctattcttaccatatttaccgtgtttatatttatcaggattgggctttatcgggcagtcttacggtat

SEQ ID NO: 214676 - DNA, 75 bp, synthetic construct
  source 1..75: mol_type = other DNA
agatgggctactccagaggaattgtcaaaaattaatttagatcgaagattttcaactcaaaatggcggcagaaca

SEQ ID NO: 214677 - DNA, 75 bp, synthetic construct
  source 1..75: mol_type = other DNA
ctcgggctgtggggccgaacggtccactgccgctgcactacaccgaactggcgcgtaaccggactgaaagccgac

SEQ ID NO: 214678 - DNA, 75 bp, synthetic construct
  source 1..75: mol_type = other DNA
atgcaggactgactcacctgtacaggatgcgcgatgcgcagttgtggagccacatcgaatttcaccccgaatgta

SEQ ID NO: 214679 - DNA, 75 bp, synthetic construct
  source 1..75: mol_type = other DNA
tgaaaaataccaaagaaactgaaatcggcggcgccactggcgttggcgtacgtattctgggtgatgctgccaact

SEQ ID NO: 214680 - DNA, 75 bp, synthetic construct
  source 1..75: mol_type = other DNA
ataccggagacaccatcaccctgaaggtgaccacgaaagatgctgcgggcaatccgatggggtatgtgccgttta

SEQ ID NO: 214681 - DNA, 75 bp, synthetic construct
  source 1..75: mol_type = other DNA
tattacagcgaaaatgcgcagtaatttcactgctgaagatgccaaagatgtggtctttacggtggtgaccagtcc

SEQ ID NO: 214682 - DNA, 75 bp, synthetic construct
  source 1..75: mol_type = other DNA
aatggcggtaatttattggtattagcaggtaccgaagctcgcgactccacggttggcagcggtggagccaccaac

SEQ ID NO: 214683 - DNA, 75 bp, synthetic construct
  source 1..75: mol_type = other DNA
gaacagccattgcagctgtcagggattccaagaacgatatagaaacctggaagaaaaatggtattcgtagggaag

SEQ ID NO: 214684 - DNA, 75 bp, synthetic construct
  source 1..75: mol_type = other DNA
tctgtccgagaatgacttcatgcgagcagaagaagaatctcaaagaatggttgagtcattcagagatagccttgg

SEQ ID NO: 214685 - DNA, 75 bp, synthetic construct
  source 1..75: mol_type = other DNA
tttgctctacaataacttcagaatacaacccaaataaaattcgaaagtttacaagactgttgattacccatctaa

SEQ ID NO: 214686 - DNA, 75 bp, synthetic construct
  source 1..75: mol_type = other DNA
ctgactacaagattgcttacgagtaatcgcatttggccgggttcacccggccacatcattaacggattaatgata

SEQ ID NO: 214687 - DNA, 75 bp, synthetic construct
  source 1..75: mol_type = other DNA
gaaaaaatgtgtgatgaatatatgaacggtggaaatcaaaacttccataccttaagagatttgtgggattttttg

SEQ ID NO: 214688 - DNA, 75 bp, synthetic construct
  source 1..75: mol_type = other DNA
gtcgggtattcacaaactaacggcctgagtggtcatactgccgatttggattttttatttaatgacgataaagaa

SEQ ID NO: 214689 - DNA, 75 bp, synthetic construct
  source 1..75: mol_type = other DNA
acgttacaagtgaaagtcacggtgaaagatacagcgggcaaccctatgccgggaatgccgtttaccctgaaacgt

SEQ ID NO: 214690 - DNA, 75 bp, synthetic construct
  source 1..75: mol_type = other DNA
ataagcaaatatgaattcaataataataaaacagtaaggatttataatccaatatctattgcaaataataatgaa

SEQ ID NO: 214691 - DNA, 75 bp, synthetic construct
  source 1..75: mol_type = other DNA
cgctagggtattcggtctaggatattcatacggtactagcgaagtacaaatgaacgctgatcagaagcgttacga

SEQ ID NO: 214692 - DNA, 75 bp, synthetic construct
  source 1..75: mol_type = other DNA
gtaagtgcaattgtgactacggatgaaattcaacaggcggggactcatgtcgcagcagtagatgttgaagcttca

SEQ ID NO: 214693 - DNA, 75 bp, synthetic construct
  source 1..75: mol_type = other DNA
tatatgatgatgttggggggaacggcctgcctgataagtctcatattatgaactcttggcagatacttgggctgt

SEQ ID NO: 214694 - DNA, 75 bp, synthetic construct
  source 1..75: mol_type = other DNA
ataacgtccgggcaggcacatttgttttcagaatgcaggctgcgggggtgttgcgccatgtgaaggacggacagc

SEQ ID NO: 214695 - DNA, 75 bp, synthetic construct
  source 1..75: mol_type = other DNA
acgtgaggggctttcccccggggtcagttacggaaagggggctgagggtttttcacttgaatggacagcgcccgg

SEQ ID NO: 214696 - DNA, 75 bp, synthetic construct
  source 1..75: mol_type = other DNA
atcatatccattttctgttttttggcgttggcatttattaactgatattcgagtaatgaaaaaattcccaagaat

SEQ ID NO: 214697 - DNA, 75 bp, synthetic construct
  source 1..75: mol_type = other DNA
atggaatccccaagcaaagatgctaccccgggcaacgtttacgctcaggctgactataagattgcttacgagtaa

SEQ ID NO: 214698 - DNA, 75 bp, synthetic construct
  source 1..75: mol_type = other DNA
cgtgttcaaaagtaaagagatgctgctgatcaatctccacgagcgggacgatttagccccctatgaacgcatgtt

SEQ ID NO: 214699 - DNA, 75 bp, synthetic construct
  source 1..75: mol_type = other DNA
tctttgattcttctttttgtaatcaaaacgttaaaggattttggtggaatgtcatttacaggtctgttatttaca

SEQ ID NO: 214700 - DNA, 75 bp, synthetic construct
  source 1..75: mol_type = other DNA
gcaaccgtcggaaagataatctaaaaaaaaccaacatagcatttttacatccccttgctagcggaagacaagaga

SEQ ID NO: 214701 - DNA, 75 bp, synthetic construct
  source 1..75: mol_type = other DNA
ttgtattgttgagcctgtttatcgccatgatttttcaatttttctggcctgccccacacgatgaacacgttttcc

SEQ ID NO: 214702 - DNA, 75 bp, synthetic construct
  source 1..75: mol_type = other DNA
gcttggagaagcgcagaaaaaagctttccgcttccatcatatctccaccgatgaggtgtacggagacctgcatgg

SEQ ID NO: 214703 - DNA, 75 bp, synthetic construct
  source 1..75: mol_type = other DNA
aactggggaatgcccactctggcgacagagatgctgaacgcactggactgtcagcgcacgttatcgctttatcta

SEQ ID NO: 214704 - DNA, 75 bp, synthetic construct
  source 1..75: mol_type = other DNA
aagataaatttgagattaagcccggggtttgggtttatgtcccaagcgttgaggcacgtaaagtcggagggaaga

SEQ ID NO: 214705 - DNA, 75 bp, synthetic construct
  source 1..75: mol_type = other DNA
gctggattatcgctgtaacctggcgttggcgatgctggaatataaccgcgccgacttcccgcaaacggtggcgta

SEQ ID NO: 214706 - DNA, 75 bp, synthetic construct
  source 1..75: mol_type = other DNA
cactttaccagaggtaaacaaatccggtgctgacgcccctgatttgtcccgtttttacaaggcccgctctcgtga

SEQ ID NO: 214707 - DNA, 75 bp, synthetic construct
  source 1..75: mol_type = other DNA
gatcatactgatccgttgtttgtggcctatcgtgaaacagtcgccagaaaacagaagaacccgcagcgacgttca

SEQ ID NO: 214708 - DNA, 75 bp, synthetic construct
  source 1..75: mol_type = other DNA
aggacaatcgtaaagaagccaatgcgggaactgcatcagccatcgctatcgcctcacaaccacaggtgaaaaccg

SEQ ID NO: 214709 - DNA, 75 bp, synthetic construct
  source 1..75: mol_type = other DNA
aggacaaaaaaccgttgccgctacaggtgatgtacagacaactgcccgttatcagagcatgatcaacgcccgaca

SEQ ID NO: 214710 - DNA, 75 bp, synthetic construct
  source 1..75: mol_type = other DNA
cattgatgttttcccgcagtttgtccgtttccctaatacgctggaagaggttgcggcgctggagagtattgaaga

SEQ ID NO: 214711 - DNA, 75 bp, synthetic construct
  source 1..75: mol_type = other DNA
aaattcagcgtctggcgcaagactcaacgcaaacgcatgaacaaattgacagcctgacacaagacgtaacccaaa

SEQ ID NO: 214712 - DNA, 75 bp, synthetic construct
  source 1..75: mol_type = other DNA
atgacaatcgtaaagaagccaatgcgggaactgcatctgccatcgctatcgcctcacaaccacaggtgaaaaccg

SEQ ID NO: 214713 - DNA, 75 bp, synthetic construct
  source 1..75: mol_type = other DNA
cagcctgtcacaagacgtaacccaaacgcaccaacagttaaccaacacccaaaaacgggttgcagataacagcca

SEQ ID NO: 214714 - DNA, 75 bp, synthetic construct
  source 1..75: mol_type = other DNA
cagatatcgctttgttttatctcaggctcaaatttaataaaaatttattacccttgtgttatttcaatgatgtac

SEQ ID NO: 214715 - DNA, 75 bp, synthetic construct
  source 1..75: mol_type = other DNA
cagacatgtgttttccggacctaacgaagccatcgacctggcagtggttggcattgtcgatacgctttcgcgcta

SEQ ID NO: 214716 - DNA, 75 bp, synthetic construct
  source 1..75: mol_type = other DNA
atgcaactctgtattcgcacaaataaaagaatgcaggataatatatctgaatttctgggggtgtatggaataaat

SEQ ID NO: 214717 - DNA, 75 bp, synthetic construct
  source 1..75: mol_type = other DNA
ttaaatatgacaacgccgattatatcaaagactatttagatagctcaattgattcattaggaagcgatggttttt

SEQ ID NO: 214718 - DNA, 75 bp, synthetic construct
  source 1..75: mol_type = other DNA
agcgaataaaatttttaaacaatatcaccacgagttaataactgaagtaaaaaacaagtcagatttcaatttttc

SEQ ID NO: 214719 - DNA, 75 bp, synthetic construct
  source 1..75: mol_type = other DNA
gcgtgttacacggtatcaatcctgaaagactgaccattgagctctctgatgccgacggcaatattgtactgagtt

SEQ ID NO: 214720 - DNA, 75 bp, synthetic construct
  source 1..75: mol_type = other DNA
cagacatgtttttagcggccccaacgaagccatcgacctggccgtggtcggcattgtagatacgctttcgcgcta

SEQ ID NO: 214721 - DNA, 75 bp, synthetic construct
  source 1..75: mol_type = other DNA
cgaacagggtctggcaaaccgcgtcacgccggacagcctgccgcgggtggagtggctgacctacggcagcggtta

SEQ ID NO: 214722 - DNA, 75 bp, synthetic construct
  source 1..75: mol_type = other DNA
acgttacagcttgatttagggggagaatccccaggttatctggaaaaagataaacattacagagaagccgatgcg

SEQ ID NO: 214723 - DNA, 75 bp, synthetic construct
  source 1..75: mol_type = other DNA
tgtttgttaaacctgctaacgtacaaaaaaaatataaatttgggttggtgctacattatgtagataaatatcatc

SEQ ID NO: 214724 - DNA, 75 bp, synthetic construct
  source 1..75: mol_type = other DNA
gccctgataaataccctaacccaaccgatggcttgccttgtggacgtaagagtacagcgaatgaattactggcgg

SEQ ID NO: 214725 - DNA, 75 bp, synthetic construct
  source 1..75: mol_type = other DNA
cgcgagaaactgctgcgcgattatccgctgaacgccaccctgtggtggttgaactggttcgatggtcgttctgaa

SEQ ID NO: 214726 - DNA, 75 bp, synthetic construct
  source 1..75: mol_type = other DNA
gactggaatgacaatggcgacctggtgcgcatcagcggcccgcgacagacgtgggaatatggctacagcgccacg

SEQ ID NO: 214727 - DNA, 75 bp, synthetic construct
  source 1..75: mol_type = other DNA
gcagctcaagccaggctgactactgctcttgcaactggtaccgctacggaaaaagtcagggccagaacagctctt

SEQ ID NO: 214728 - DNA, 75 bp, synthetic construct
  source 1..75: mol_type = other DNA
cccgcaaagacctgaagagcatggctgaccaggggcaacttacgattgataaggttgttcctgcattaatgagcc

SEQ ID NO: 214729 - DNA, 75 bp, synthetic construct
  source 1..75: mol_type = other DNA
gcgttgtctggcggattggataatgttgcccagacgcttgattcttttacttcatcagcagtgagcggcgctctg

SEQ ID NO: 214730 - DNA, 75 bp, synthetic construct
  source 1..75: mol_type = other DNA
tactacgattgtgccggtgatatcgttcgcattaagtcgctggacttcgacagccagcgcgcagacgtggagatc

SEQ ID NO: 214731 - DNA, 75 bp, synthetic construct
  source 1..75: mol_type = other DNA
ggcatgaagcaggctatgggcggggcggttaccaccattactgacatgcttaacggtaacgtcgacagctggaaa

SEQ ID NO: 214732 - DNA, 75 bp, synthetic construct
  source 1..75: mol_type = other DNA
tcaaatagacgatttgaatacttctcgcggcaaaccaggtattaccagcgagaacgatgcaaatatactgagagc

SEQ ID NO: 214733 - DNA, 75 bp, synthetic construct
  source 1..75: mol_type = other DNA
acccagttcagccaggcgctggcacagggggggttgcgcggcgaggaatttaattctgtcaatgaaagtggggac

SEQ ID NO: 214734 - DNA, 75 bp, synthetic construct
  source 1..75: mol_type = other DNA
aggcagcacagctggcaacggaggggatttcaggactggtgaataacatcacggagatgctgaacggaaacaaag

SEQ ID NO: 214735 - DNA, 75 bp, synthetic construct
  source 1..75: mol_type = other DNA
gcaggaaatatcaaaagttcttatgaatgccgcgattgtcaacggaattaagacggcggcaaacggtatgtccgg

SEQ ID NO: 214736 - DNA, 75 bp, synthetic construct
  source 1..75: mol_type = other DNA
gtccgaaatcgtacaattctgtacatccacgcaagggaatgtacggaagtaagccaaacggttatcggacggtca

SEQ ID NO: 214737 - DNA, 75 bp, synthetic construct
  source 1..75: mol_type = other DNA
gggcagcggatggttcactcggcgtgcgtgcggtgggcagtatgaacggcagtgcgggtctggtgtattccccgg

SEQ ID NO: 214738 - DNA, 75 bp, synthetic construct
  source 1..75: mol_type = other DNA
ctggcgaagctgaagtaccagacctcgcagggcgagctgaaaatcctgacggagatacagaagcaggagctgctg

SEQ ID NO: 214739 - DNA, 75 bp, synthetic construct
  source 1..75: mol_type = other DNA
tcggataactccgctgctggctaaccatgctaaatgggagctttgttatacctggtttatcgaaaaagaaggcca

SEQ ID NO: 214740 - DNA, 75 bp, synthetic construct
  source 1..75: mol_type = other DNA
gaacatttcgtacatcctttacgttcagtgagttagctggcttggatgtaaccactcgttcaactcaattctctt

SEQ ID NO: 214741 - DNA, 75 bp, synthetic construct
  source 1..75: mol_type = other DNA
gaacatttcgtacagcctttacgttcagtgagttagctggcctagatgtaaccactcgttcaactcaattctctt

SEQ ID NO: 214742 - DNA, 75 bp, synthetic construct
  source 1..75: mol_type = other DNA
gatgcgctttaatcagctgcagcatatcaggctgaaggatgttcgtcccggagaaggggtgattgaactgcaact

SEQ ID NO: 214743 - DNA, 75 bp, synthetic construct
  source 1..75: mol_type = other DNA
ggaagtctgactattcatacaggatactaacagcagcatcatttaataatatagatttcgtaacagccgttcaac

SEQ ID NO: 214744 - DNA, 75 bp, synthetic construct
  source 1..75: mol_type = other DNA
tttattgcctgagggtagaaatcctttcaacaattgcaccgtacagcgggacagaaagaaaaagcgcacgttaac

SEQ ID NO: 214745 - DNA, 75 bp, synthetic construct
  source 1..75: mol_type = other DNA
catgggaagaattgcttgaggagtacttcttcgcccgaaacctgcgtgctgcaacagaatggagctatacgaagg

SEQ ID NO: 214746 - DNA, 75 bp, synthetic construct
  source 1..75: mol_type = other DNA
ctagatagagttctggcagaaaaaaatcctgaggaaaagtataaagaattactaagaagtgtatcgcacataaaa

SEQ ID NO: 214747 - DNA, 75 bp, synthetic construct
  source 1..75: mol_type = other DNA
tgaccaaaaaattgcattctgtgataatgggattaccatcatttatggtatgaatggtgcgggcaaatcaggata

SEQ ID NO: 214748 - DNA, 75 bp, synthetic construct
  source 1..75: mol_type = other DNA
gataccgacctgaaatcgttcatcgaaaccgtcggcgctaaccttaataaaaccatcattatggggcagggcgta

SEQ ID NO: 214749 - DNA, 75 bp, synthetic construct
  source 1..75: mol_type = other DNA
atccgcagccggaacgctggagacggcgctgggtttgtataccgacacgcgaacggtcagtgaggtttgtaagga

SEQ ID NO: 214750 - DNA, 75 bp, synthetic construct
  source 1..75: mol_type = other DNA
aaccgccaccgctattatgacccgctgcaggggaggtatatcactcaggatccgattggactgaaggggggatgg

SEQ ID NO: 214751 - DNA, 75 bp, synthetic construct
  source 1..75: mol_type = other DNA
ccggtcaatcccctgctcggtgcaaaggtccttcccggtgaaaccgacatcgccctgcccggcccgctgccgttc

SEQ ID NO: 214752 - DNA, 75 bp, synthetic construct
  source 1..75: mol_type = other DNA
caggaactgaatttcaaagctcgtatggaatccccaagcaaagatgccaccccgggcaacgtttacgctcaggct

SEQ ID NO: 214753 - DNA, 75 bp, synthetic construct
  source 1..75: mol_type = other DNA
agctgcaggatattgcatcggatttaccgcgatttacccacgcattagatgaactttccctccgtctggggttga

SEQ ID NO: 214754 - DNA, 75 bp, synthetic construct
  source 1..75: mol_type = other DNA
agaaagaaaatggtgaggaagtattttcacaggtccggaatgaagtattccccggcgaatcacttaaagtttttg

SEQ ID NO: 214755 - DNA, 75 bp, synthetic construct
  source 1..75: mol_type = other DNA
gtggcgggaaagtgggagttacaaacacaaacggcggtaacggaggtgtgccgagtactggcgatatccgcatca

SEQ ID NO: 214756 - DNA, 75 bp, synthetic construct
  source 1..75: mol_type = other DNA
attgacggcgattaatccggcctggccgaaagcggcattattcaccaccgtgatgccttttatttttaactacgt

SEQ ID NO: 214757 - DNA, 75 bp, synthetic construct
  source 1..75: mol_type = other DNA
ttatcgatgctatcggtgaagccacgaagctcgacgttttagtaaatggtaagaaagtcgacagctataccgcaa

SEQ ID NO: 214758 - DNA, 75 bp, synthetic construct
  source 1..75: mol_type = other DNA
accacctcgccaatggtgattctgctggtcatgatgctggcgatgggaacgcatattccacaacctgtcatcagg

SEQ ID NO: 214759 - DNA, 75 bp, synthetic construct
  source 1..75: mol_type = other DNA
gataagaacaaaactttatcttgccgctttatgtgggctgagattcaatcctgtaatgaaacagatgtatacgaa

SEQ ID NO: 214760 - DNA, 75 bp, synthetic construct
  source 1..75: mol_type = other DNA
cgcgcagtggcgcggtctgtgtcagggacgcgacgttaacgccctgatgaccgccgggcaactgattaactgggg

SEQ ID NO: 214761 - DNA, 75 bp, synthetic construct
  source 1..75: mol_type = other DNA
ttccgagtttgcatttcaaacaaaacgtagattaagtggcttaactgcagcttggaagtatcttgttcatgcaca

SEQ ID NO: 214762 - DNA, 75 bp, synthetic construct
  source 1..75: mol_type = other DNA
gcgtgtcattactacgactattttttgccgccgtcttaatgctatggtgcgctcaaaccgctgcttatagcgggc

SEQ ID NO: 214763 - DNA, 75 bp, synthetic construct
  source 1..75: mol_type = other DNA
tagtggtaaggcatatggttcaggtggcggtggcgcatacgatgccggttatagcggaaccagtatgacaggcgg

SEQ ID NO: 214764 - DNA, 75 bp, synthetic construct
  source 1..75: mol_type = other DNA
aggcggcccgtcactactggtccggccttggggaagcgcagaagcaggccttccgcttccaccacatctccaccg

SEQ ID NO: 214765 - DNA, 75 bp, synthetic construct
  source 1..75: mol_type = other DNA
gtgatcggcaccttcactctgctggaggcggcccgtcactactggtccgggcttggggaagcgcagaagcaggct

SEQ ID NO: 214766 - DNA, 75 bp, synthetic construct
  source 1..75: mol_type = other DNA
atattgcgctggagctggatcttaaatcggttcgcttgcagcaatataaagagatctttatttccagcgtgatga

SEQ ID NO: 214767 - DNA, 75 bp, synthetic construct
  source 1..75: mol_type = other DNA
cctggcgccggtggccgggagcgagcgctactcgttttcccagaccgatatcacggacgccgctgccgtggcggc

SEQ ID NO: 214768 - DNA, 75 bp, synthetic construct
  source 1..75: mol_type = other DNA
accgtgcactggtacctgaacaaccagacttggtggcagcgcgtgctggacggctcctatgccggtgagcgcttt

SEQ ID NO: 214769 - DNA, 75 bp, synthetic construct
  source 1..75: mol_type = other DNA
cgctgtacaaagtggcgaccgaaggaaaaagtggtgagacctacaatatcggcggtaataacgagcgtaaaaata

SEQ ID NO: 214770 - DNA, 75 bp, synthetic construct
  source 1..75: mol_type = other DNA
tgccagcgccgccgcgctcggtgtgcctttaaaaattacccatatggcggtcggtgatggcggcggaacattgcc

SEQ ID NO: 214771 - DNA, 75 bp, synthetic construct
  source 1..75: mol_type = other DNA
aacggtggttacggaggcgtaccgaatattggcgatacccgcatcactggtggagatggaggcgacggtcagtcc

SEQ ID NO: 214772 - DNA, 75 bp, synthetic construct
  source 1..75: mol_type = other DNA
acttcgacgcgggtctggatttttgccaacaaagtcttcgcgcctgcccaaccaatcaggaagtgctttgcctgc

SEQ ID NO: 214773 - DNA, 75 bp, synthetic construct
  source 1..75: mol_type = other DNA
cgggaaaaggccttgtccagctcagcagtgccactaacagcacgtcagaaacgcaggctgccacaccaaaagccg

SEQ ID NO: 214774 - DNA, 75 bp, synthetic construct
  source 1..75: mol_type = other DNA
agcgttacttgatgatgccgttgccctgacgccagcgaccgccatccagggggtgttgcacggtattgatccgga

SEQ ID NO: 214775 - DNA, 75 bp, synthetic construct
  source 1..75: mol_type = other DNA
gatgcaagtggatacgttggacgctggctgaatacccgggttttcacctcatcaggtacgtacaccccgacgcca

SEQ ID NO: 214776 - DNA, 75 bp, synthetic construct
  source 1..75: mol_type = other DNA
tccaaaggataaatttggtgcatttagtgattcctgcccggatcgttgggggcgtatgctaatgaagcgtcgttt

SEQ ID NO: 214777 - DNA, 75 bp, synthetic construct
  source 1..75: mol_type = other DNA
ccatacacggcgtcgaaacatgctgttaccgggttgaccaaggccatttccctggattgtcgcaaatttaatatc

SEQ ID NO: 214778 - DNA, 75 bp, synthetic construct
  source 1..75: mol_type = other DNA
tccctcacatgttcataaagattacaaaggaattatcccgcttggtcgccctggcaaactcgaagaaatcgctga

SEQ ID NO: 214779 - DNA, 75 bp, synthetic construct
  source 1..75: mol_type = other DNA
cggttatgaagaattgaataaatatgccaaccgatttgatttgtatgcaaaagaaaacacgttcgacgttatcta

SEQ ID NO: 214780 - DNA, 75 bp, synthetic construct
  source 1..75: mol_type = other DNA
atgaattattttattcactattaaatactgataatttcaaaaaaccatttaactacgaaatggatattgcgacgg

SEQ ID NO: 214781 - DNA, 75 bp, synthetic construct
  source 1..75: mol_type = other DNA
accggtatgtgccaaatccgtgtgggtatgttgatcctttgggattagcaacatgtcccataatcagacaacggg

SEQ ID NO: 214782 - DNA, 75 bp, synthetic construct
  source 1..75: mol_type = other DNA
gagaaagaaacaggacggtggatagagggatataaaaaagcaacagaactggccagctcctgtcctgatacccag

SEQ ID NO: 214783 - DNA, 75 bp, synthetic construct
  source 1..75: mol_type = other DNA
ctgttttctgttttcattggcccggataaattcgatagcaccgatgatgcggcattcgaagcattaaaaaaaaca

SEQ ID NO: 214784 - DNA, 75 bp, synthetic construct
  source 1..75: mol_type = other DNA
ccaacgcgcagggcgatgaaactgaagcgatgcgttgtttacgtctggcggcgaccggcgatcgcaccattaaca

SEQ ID NO: 214785 - DNA, 75 bp, synthetic construct
  source 1..75: mol_type = other DNA
aatgagatggaaggcattacctttataaaatgtgatgtcacaaaaaagacccaggttgaagctctcacacaggca

SEQ ID NO: 214786 - DNA, 75 bp, synthetic construct
  source 1..75: mol_type = other DNA
acgtagtgatcattcactcaatatataacccaactgaatattacgtcgtatttgccggattggcagtcgataaaa

SEQ ID NO: 214787 - DNA, 75 bp, synthetic construct
  source 1..75: mol_type = other DNA
attaaggcagatgttcttgcaaaatccaaaggtctaacgatagatacttctctgtttgacgatgatttcaagaat

SEQ ID NO: 214788 - DNA, 75 bp, synthetic construct
  source 1..75: mol_type = other DNA
acgacgcttacatacagtctgactgtttcaggttctttaatccgcgatataacgaagctcccggagctgcgtagg

SEQ ID NO: 214789 - DNA, 75 bp, synthetic construct
  source 1..75: mol_type = other DNA
ttgaactcaacgggataattagggcttttttacgcactgcggttaatgatttcatggatagcgtccaccatattt

SEQ ID NO: 214790 - DNA, 75 bp, synthetic construct
  source 1..75: mol_type = other DNA
aaaaaatgttaaaaattatttatacattctagcgttaatatgtttacgcctcgcaccgggtaatataaagaaata

SEQ ID NO: 214791 - DNA, 75 bp, synthetic construct
  source 1..75: mol_type = other DNA
acatgcgaaaagcgaattgctaattggttggccgttgctgagtatgcgctatacattcctatgcgagaatcattc

SEQ ID NO: 214792 - DNA, 75 bp, synthetic construct
  source 1..75: mol_type = other DNA
gaataattttggcgaaatccgtgttccacataaaggtgatattgtcgggcaggttattgagggaacgtatgaagt

SEQ ID NO: 214793 - DNA, 75 bp, synthetic construct
  source 1..75: mol_type = other DNA
gtccatgtacctgacggtagatacagaatcaaaagaggtgatcacggttcgctggtggacatggtcgaaagaatc

SEQ ID NO: 214794 - DNA, 75 bp, synthetic construct
  source 1..75: mol_type = other DNA
gatttagttgaaactttcaactatctcattggtttacatgtgaaatccatcgaatccaatatcgaacgtggctat

SEQ ID NO: 214795 - DNA, 75 bp, synthetic construct
  source 1..75: mol_type = other DNA
ctgtttggtgctgtggcgtgactgtgaaaaaatcgattacgaaggcctgagcaaactgtgcgacaagctggagat

SEQ ID NO: 214796 - DNA, 75 bp, synthetic construct
  source 1..75: mol_type = other DNA
aattagtggtgataattttcaagcgctgaggtttctcgaaggaaagtacaagaatagtatcgatgcaatttatat

SEQ ID NO: 214797 - DNA, 75 bp, synthetic construct
  source 1..75: mol_type = other DNA
ccttcgccaaatggtcacggcgaggtacggggttatctggtgataacccgcaaggataagcggcaaaacgccagc

SEQ ID NO: 214798 - DNA, 75 bp, synthetic construct
  source 1..75: mol_type = other DNA
ctcaggtagagtttaccgacctggagattgttgctgagtacatcacgtatccttcgccaaatggtcacgggaggt

SEQ ID NO: 214799 - DNA, 75 bp, synthetic construct
  source 1..75: mol_type = other DNA
gcgcgattgcgacaagatcggttatgaagaattgaataaatatgccagccgattcgatttatatgcaaaagaaaa

SEQ ID NO: 214800 - DNA, 75 bp, synthetic construct
  source 1..75: mol_type = other DNA
accctgtgggattatatgtctacgcccgaccagattaagcggatgcaggacgctgagagatcccctcataatttc

SEQ ID NO: 214801 - DNA, 75 bp, synthetic construct
  source 1..75: mol_type = other DNA
gtacttgcagagccagacgacaaaccatcagatcatttctggcagccataaacaaaatctgtgcgttaacgctcc

SEQ ID NO: 214802 - DNA, 75 bp, synthetic construct
  source 1..75: mol_type = other DNA
tcgtccggggccgatgtctgcctatgcgctggcgaaattgtgcttcgacaccatcctggagtacggcgaacaggc

SEQ ID NO: 214803 - DNA, 75 bp, synthetic construct
  source 1..75: mol_type = other DNA
gcctttggcaccctggccatgctgctaatgaccgacagaaaaccggagctgatagcccaggtttatacgttttac

SEQ ID NO: 214804 - DNA, 75 bp, synthetic construct
  source 1..75: mol_type = other DNA
ttcctgcaatggggatatcgttgtggaggcggaaattaccaggggggaaggtggtctttatcaccttgcggtcgc

SEQ ID NO: 214805 - DNA, 75 bp, synthetic construct
  source 1..75: mol_type = other DNA
tcgtagaactggaaataatattagaaatgttttatcgcggtggtataaagattgaacccttacttgacgccatta

SEQ ID NO: 214806 - DNA, 75 bp, synthetic construct
  source 1..75: mol_type = other DNA
atgcatcattataagttctttgcgttgattgcaatgtttttgtgtggttcatcgtttgcaagtgatgtatatttt

SEQ ID NO: 214807 - DNA, 75 bp, synthetic construct
  source 1..75: mol_type = other DNA
ttattgatgctgaagtacttatcgaatatatccgggaacattcaccgctggatgctgcttcatatgaaccaaaag

SEQ ID NO: 214808 - DNA, 75 bp, synthetic construct
  source 1..75: mol_type = other DNA
ctgagccagcctttaggggataccaatgttttgattaaagcgcctggcgcaggcggtgtacgcattgaaaatcaa

SEQ ID NO: 214809 - DNA, 75 bp, synthetic construct
  source 1..75: mol_type = other DNA
gaatacttcggattcagatacctggtatcaggtggggtataccagcagctgggttggcatcagttattcactctc

SEQ ID NO: 214810 - DNA, 75 bp, synthetic construct
  source 1..75: mol_type = other DNA
ccgtacggtgtgggagtgaatcatatggcaatacggcagggtattcaggttgacagtatccgcttctcaggtatg

SEQ ID NO: 214811 - DNA, 75 bp, synthetic construct
  source 1..75: mol_type = other DNA
catactgtaaaggtgaaaaaaattgtctcacaataggtcataaaaaaagagagtggagtaaaaatgatggggata

SEQ ID NO: 214812 - DNA, 75 bp, synthetic construct
  source 1..75: mol_type = other DNA
gaccgttctgtcagagggattgtgtttttactattaaataacaccataactgacagtgccaatattccccagcaa

SEQ ID NO: 214813 - DNA, 75 bp, synthetic construct
  source 1..75: mol_type = other DNA
ataagtttgagcaggtggaaacacaggaaaatagccaggagtccgaatccagaatagagaaaggtgatgcactga

SEQ ID NO: 214814 - DNA, 75 bp, synthetic construct
  source 1..75: mol_type = other DNA
gggaaattattctgggctttaacggatgaaagcaataaagagcaaccggacgttattcctgtttatgctgccgcg

SEQ ID NO: 214815 - DNA, 75 bp, synthetic construct
  source 1..75: mol_type = other DNA
ttgaattgttcattaaaaatccgcttgaaaacgggcttacccgtggtgaacaaatggaacttgcacggattacgc

SEQ ID NO: 214816 - DNA, 75 bp, synthetic construct
  source 1..75: mol_type = other DNA
gaaagcgcagcgccgcagcctggcggagaagttgcagcaggaaggaagcgaggacggccacggtgtggtgttccc

SEQ ID NO: 214817 - DNA, 75 bp, synthetic construct
  source 1..75: mol_type = other DNA
cgcaacctaaactcatccgcatcctgccatgccagaaacttttctctatattcccgcaatgccatcatcgacagc

SEQ ID NO: 214818 - DNA, 75 bp, synthetic construct
  source 1..75: mol_type = other DNA
cggcaactaaaaaccagtcccatcaggctattttatttgccattttgaacctgggcagtgctcgaactcctcacg

SEQ ID NO: 214819 - DNA, 75 bp, synthetic construct
  source 1..75: mol_type = other DNA
cgctacattccgatattctgtggtcggtaaagacccgcgaaggcgatggctatatttatgtggtgattgaacatc

SEQ ID NO: 214820 - DNA, 75 bp, synthetic construct
  source 1..75: mol_type = other DNA
gagcaggcacaggctacagagcaggcacaggctacagagcaggcacagaccacagagcaggcacagaccacagag

SEQ ID NO: 214821 - DNA, 75 bp, synthetic construct
  source 1..75: mol_type = other DNA
aatggcagaagatgctcttggaaaacaatttgtccaggccagagaagaacatctggaattgcagcaacagcgtga

SEQ ID NO: 214822 - DNA, 75 bp, synthetic construct
  source 1..75: mol_type = other DNA
agaacacaggctttgattcatgagcagctttcttctcaacaggagcaggctgctgtgcaggagacgtaccaggaa

SEQ ID NO: 214823 - DNA, 75 bp, synthetic construct
  source 1..75: mol_type = other DNA
attggagcacatggtgatcctcaatcagtatatgatgaaaattataataagatagatgtcaagacattagctaat

SEQ ID NO: 214824 - DNA, 75 bp, synthetic construct
  source 1..75: mol_type = other DNA
cacaagtcgcggagcaagcacaggtcgcggagcaagcacaggtcgcagagcaggccacatcttcatatgatcctg

SEQ ID NO: 214825 - DNA, 75 bp, synthetic construct
  source 1..75: mol_type = other DNA
aatcttctgcaatagaaaaatatgaaagcaattatttaaatggtgatggttttgaaactattgtgcttatgtcta

SEQ ID NO: 214826 - DNA, 75 bp, synthetic construct
  source 1..75: mol_type = other DNA
ttatactcatttatccgcgactatcgcacccgcaaacttcaccgtaatcatttcgattctctggaaacaaaactg

SEQ ID NO: 214827 - DNA, 75 bp, synthetic construct
  source 1..75: mol_type = other DNA
agtcatggcctactcgcgctttactgtgcaagagagagcggatctggtgtcgctatttattgattatttcattgc

SEQ ID NO: 214828 - DNA, 75 bp, synthetic construct
  source 1..75: mol_type = other DNA
aaaactatcaatgatggcagtatgcgagagtatttcattgccctgaaatacgctttgtctcagaaagacgtgaga

SEQ ID NO: 214829 - DNA, 75 bp, synthetic construct
  source 1..75: mol_type = other DNA
ccataggggaattagagaggaaatagtttgtcgatatattcctaagatactctgggatggcgttcattttggtac

SEQ ID NO: 214830 - DNA, 75 bp, synthetic construct
  source 1..75: mol_type = other DNA
atgagtaccatgtattcagtaatatcgttgataacggcaacgacaaaatcaaactgttatcgctggtattttata

SEQ ID NO: 214831 - DNA, 75 bp, synthetic construct
  source 1..75: mol_type = other DNA
tccttgacctgattcaggaaggtaacatcggtctgatgaaagcggttgataaattcgaataccgccgtggttaca

SEQ ID NO: 214832 - DNA, 75 bp, synthetic construct
  source 1..75: mol_type = other DNA
aaaacacatctcaaatactctacaaaaaacaatcaaacagtgcattaaaaaatacaaacaaaaaaatcaaaatcg

SEQ ID NO: 214833 - DNA, 75 bp, synthetic construct
  source 1..75: mol_type = other DNA
gcccactttatgatgagcaaataaaaaaaacacttatgtatgctgaccataaattcaagcggctggtaaatacac

SEQ ID NO: 214834 - DNA, 75 bp, synthetic construct
  source 1..75: mol_type = other DNA
agaaagcgcagtgccgcagcctggcggagaagttacagcaggaagggagcgaagacggtcacggtgtggtgttcc

SEQ ID NO: 214835 - DNA, 75 bp, synthetic construct
  source 1..75: mol_type = other DNA
ccgttccgagttcaacgctcagacgctggatgctactgaacgcgcagctgcattcctgtatctcaaccggcattg

SEQ ID NO: 214836 - DNA, 75 bp, synthetic construct
  source 1..75: mol_type = other DNA
ttaatctgtatcagatgttagcggtcgtgccggatgaagtggaattgaaggcccgctggatgttcgagcacatgc

SEQ ID NO: 214837 - DNA, 75 bp, synthetic construct
  source 1..75: mol_type = other DNA
aatacaaacaaaaaaatcaaaatcgagccttctattttagattacatatcagcatcaccccgcaatacgtcgagt

SEQ ID NO: 214838 - DNA, 75 bp, synthetic construct
  source 1..75: mol_type = other DNA
caggatctgagctacgcaacctcaaacggtgaatattttatcgatgacgagaacagagtcatcagcgaattggtt

SEQ ID NO: 214839 - DNA, 75 bp, synthetic construct
  source 1..75: mol_type = other DNA
gcagagcgtgaatggaaaatgcttgataaggcaccaattattaaaatgcctcaaccgaagaataaacggatccgc

SEQ ID NO: 214840 - DNA, 75 bp, synthetic construct
  source 1..75: mol_type = other DNA
tgcgccacggcggcgatctgcgtttgctgccacgacagcatcgacaacggcagcaagctatcgcgagacgaacgc

SEQ ID NO: 214841 - DNA, 75 bp, synthetic construct
  source 1..75: mol_type = other DNA
tccagtggcggtaatggcggattgctttctgagttattgcttttgggatttaatagtggtcctcgagcccttggt

SEQ ID NO: 214842 - DNA, 75 bp, synthetic construct
  source 1..75: mol_type = other DNA
ccgctattcgacacaaggttttggtaatgactccaacttattgatagtgttttatgttcagataatgcccgatga

SEQ ID NO: 214843 - DNA, 75 bp, synthetic construct
  source 1..75: mol_type = other DNA
aggccgcttggcggcgcgccaactggctggttggcaaccctggtcacctgcccgcactggaaattactgccggtg

SEQ ID NO: 214844 - DNA, 75 bp, synthetic construct
  source 1..75: mol_type = other DNA
agatggtgtcaggcctaccgctggcggtacttttcttaatctcgatgcatccgaagctgagatgattctggataa

SEQ ID NO: 214845 - DNA, 75 bp, synthetic construct
  source 1..75: mol_type = other DNA
gtgatgcgtttctaaatgctttcggtcagtctatccaaacttgtacgggaagtacttttacaggaatagtagaag

SEQ ID NO: 214846 - DNA, 75 bp, synthetic construct
  source 1..75: mol_type = other DNA
gtaaaccaaacaatttataatattgaagatgatctgtcaggtatggttaattgctactttcgtacttctgctggt

SEQ ID NO: 214847 - DNA, 75 bp, synthetic construct
  source 1..75: mol_type = other DNA
cggcgttggggttggtaactatagaaacggtaatgcagtagctgttggtgttcaatacaaacttaatgaaaacac

SEQ ID NO: 214848 - DNA, 75 bp, synthetic construct
  source 1..75: mol_type = other DNA
actacagtttgagagccaggcttcatttagagatttttatttctttgcaaataagttatcctatgttagagactt

SEQ ID NO: 214849 - DNA, 75 bp, synthetic construct
  source 1..75: mol_type = other DNA
tgaaattatcatcaagatgtcagagcacttagatatgatttttggtgatattaatacaatatttgatattgaaca

SEQ ID NO: 214850 - DNA, 75 bp, synthetic construct
  source 1..75: mol_type = other DNA
gtaaaccagacaatctataacattgaagatgatctatcaggtatggttaattgctatttccgtacttctgctggt

SEQ ID NO: 214851 - DNA, 75 bp, synthetic construct
  source 1..75: mol_type = other DNA
ttagcggattgtactccagatacagatggtgcaactcaggttaaagcttattttgaacctggagccagtactgat

SEQ ID NO: 214852 - DNA, 75 bp, synthetic construct
  source 1..75: mol_type = other DNA
atgaagataaactctaagagtttggtttcgattttttttggtatattttgcagttcagctatggcctatgacgga

SEQ ID NO: 214853 - DNA, 75 bp, synthetic construct
  source 1..75: mol_type = other DNA
ctacatttgtttctgctgtgtttgctggttcaactatggcctatgacggaacaattacgtttacaggtaaagttg

SEQ ID NO: 214854 - DNA, 75 bp, synthetic construct
  source 1..75: mol_type = other DNA
ttaaaaggtcttttttattatccatcttctgtataccagtcctgcttacatgctgcagagcaaggctattcgcta

SEQ ID NO: 214855 - DNA, 75 bp, synthetic construct
  source 1..75: mol_type = other DNA
tatcagaaatgccagatttgtcttatgaacagtcaaatgcttatgaaaatgccgtcagagttttattactgggag

SEQ ID NO: 214856 - DNA, 75 bp, synthetic construct
  source 1..75: mol_type = other DNA
aaattcgccattatagatgataaaggtacgccatactatttccatagtttaccgcaagaccaacaagagaaaatc

SEQ ID NO: 214857 - DNA, 75 bp, synthetic construct
  source 1..75: mol_type = other DNA
caagttcctggtacagccaaccaatccgcaaccattaccttgattgccgacacggcggatgaaagtaagtcaatt

SEQ ID NO: 214858 - DNA, 75 bp, synthetic construct
  source 1..75: mol_type = other DNA
ccacggctaaattcccgagcgaaggctttgcaggagcgtattacacactcaacaatgataactttgaagcgggta

SEQ ID NO: 214859 - DNA, 75 bp, synthetic construct
  source 1..75: mol_type = other DNA
atggtggaagaatccgcagtacgcaatcgacccgttagagccgctaccgcagcgtctggttgattacttcgccga

SEQ ID NO: 214860 - DNA, 75 bp, synthetic construct
  source 1..75: mol_type = other DNA
aaccactgaacttcactggtggcgtacctctgtggaaggcaaacaggagcattatttcactaaccgcatcgcaga

SEQ ID NO: 214861 - DNA, 75 bp, synthetic construct
  source 1..75: mol_type = other DNA
agacggaccgcatcccgacgggtgtgatacggacggacgacgagcggacccaccactaccactacgacagccagc

SEQ ID NO: 214862 - DNA, 75 bp, synthetic construct
  source 1..75: mol_type = other DNA
ttctatcatcaatatctttgtgtcccagatggtaaaggggactatacttgtggtggccaagaccaacggggagaa

SEQ ID NO: 214863 - DNA, 75 bp, synthetic construct
  source 1..75: mol_type = other DNA
gtacgtaccggggttgaggcgaaagtaaataacaaccttagcctgtgggggaatgttggtgtgcaactaggtgat

SEQ ID NO: 214864 - DNA, 75 bp, synthetic construct
  source 1..75: mol_type = other DNA
ccggagaacataaacagttaccacttcctgcatctggcggaaagaacgtgaaatgggctgcgatcaatgattatg

SEQ ID NO: 214865 - DNA, 75 bp, synthetic construct
  source 1..75: mol_type = other DNA
atcactggaatttaaacgtagtgatcattcactcaatatatataacccaactgaatattacgtcgtatttgccgg

SEQ ID NO: 214866 - DNA, 75 bp, synthetic construct
  source 1..75: mol_type = other DNA
tgagagcgcacagttaagcgatcaggagattaaaacggcgggaattcgaccacagcagcaccggggactgctccg

SEQ ID NO: 214867 - DNA, 75 bp, synthetic construct
  source 1..75: mol_type = other DNA
gggcattattggcagttggggattttgacaacattgccgctggagaaagcagtaaaagcatggaatgcccttacc

SEQ ID NO: 214868 - DNA, 75 bp, synthetic construct
  source 1..75: mol_type = other DNA
cttcctaaagttatggttaatgtgagagctggtgaaagtatgctttctcgacgaaaaggaattcgctatatatag

SEQ ID NO: 214869 - DNA, 75 bp, synthetic construct
  source 1..75: mol_type = other DNA
agtagccttcaaaaaagatataatattatcagttggtggatataagcatcatccatttatggaggattacaatct

SEQ ID NO: 214870 - DNA, 75 bp, synthetic construct
  source 1..75: mol_type = other DNA
ctgtatcttcatcgggtatttcggccattattaactctcgctgctgcacaaacttttagatggcatttagttgca

SEQ ID NO: 214871 - DNA, 75 bp, synthetic construct
  source 1..75: mol_type = other DNA
ggccgggcgtgtgcggctgggtgcctccacaggggccatcgcacagttgatgccgcaagctttggagacgttggg

SEQ ID NO: 214872 - DNA, 75 bp, synthetic construct
  source 1..75: mol_type = other DNA
cacgaccgtctgggtgagccgcagtatacagattcactgcattctcagggggcggcaagcagtatgtggatgcgt

SEQ ID NO: 214873 - DNA, 75 bp, synthetic construct
  source 1..75: mol_type = other DNA
gcaaggttattctttatatctaagttatgaaagtaataaaataaattcgataaagtacgataatagaataaatga

SEQ ID NO: 214874 - DNA, 75 bp, synthetic construct
  source 1..75: mol_type = other DNA
caagctcaaagtgtataaaaaaagcttaatttatcattggcatcataattaccttgatataaagaatgtgattgc

SEQ ID NO: 214875 - DNA, 75 bp, synthetic construct
  source 1..75: mol_type = other DNA
cttgagcaagggaaatatcaacaatcaaaaaaattaacaagttataaacgtgccgcgcagcaaggaaattcggtg

SEQ ID NO: 214876 - DNA, 75 bp, synthetic construct
  source 1..75: mol_type = other DNA
tcaggtattaagtaacgttgtaaaagaagccaaacaagaaggtattaaagtattagggaaggtgcgaataagcgg

SEQ ID NO: 214877 - DNA, 75 bp, synthetic construct
  source 1..75: mol_type = other DNA
agcaatatatgtctcatcgccacgtcagtcgtcgagggttgtttcgggcgtttgtgacagcatcacgtaacgtta

SEQ ID NO: 214878 - DNA, 75 bp, synthetic construct
  source 1..75: mol_type = other DNA
caatgctcaacttgcaatgactattagtgaactatcacgcaaggtagacgctttaacagtagaaactaggaagcc

SEQ ID NO: 214879 - DNA, 75 bp, synthetic construct
  source 1..75: mol_type = other DNA
cggcgaagatcgctgatctggtggtcattaaggatggttcagaggcagacggttcgacggcgaacacgctgcagg

SEQ ID NO: 214880 - DNA, 75 bp, synthetic construct
  source 1..75: mol_type = other DNA
gacggcacggtggagatctctgtcaccagccagatggcgggcaccagtgcggtcaccgccagcattaacagcagc

SEQ ID NO: 214881 - DNA, 75 bp, synthetic construct
  source 1..75: mol_type = other DNA
gggtgatgcatcgcagctcacttcaaccgttgaaacaaataagtcgaactatacggttggagagacaatcaccat

SEQ ID NO: 214882 - DNA, 75 bp, synthetic construct
  source 1..75: mol_type = other DNA
actgattgggtatccggcgatgaaactgtcgaattacagtatatgctggaaatgtttttccgtgccgatatcgct

SEQ ID NO: 214883 - DNA, 75 bp, synthetic construct
  source 1..75: mol_type = other DNA
tttattcaataacaaaacagtattaaccatactggatgcacatggtgtagtacctgaagaaagtaaaatgaataa

SEQ ID NO: 214884 - DNA, 75 bp, synthetic construct
  source 1..75: mol_type = other DNA
tgagtccagagtttgagcaaaaggtgaagctttactggcacagatattcacctgaaagtattacaatgcaagcac

SEQ ID NO: 214885 - DNA, 75 bp, synthetic construct
  source 1..75: mol_type = other DNA
ggcgtgaggatgaatggaaaattttgcaacgatttgcctgccagtatatgactgattgggtatccggcgatgagg

SEQ ID NO: 214886 - DNA, 75 bp, synthetic construct
  source 1..75: mol_type = other DNA
ctgtcgaattacagaacatgctggaaatgtttttccgtgccgatatcgcccttgcgccattgcttgatgccgtta

SEQ ID NO: 214887 - DNA, 75 bp, synthetic construct
  source 1..75: mol_type = other DNA
tcacgaagtattttctctgcgccgtatcaacctggctaataaagcaaactggcgtgcggatgaactggcgatatt

SEQ ID NO: 214888 - DNA, 75 bp, synthetic construct
  source 1..75: mol_type = other DNA
tcaaaccaggtgaagtgagtccgcttggttcacagcttcgtatacgagaagttttagtagtggaaggggcggatt

SEQ ID NO: 214889 - DNA, 75 bp, synthetic construct
  source 1..75: mol_type = other DNA
cctatgccgagttcctgaaactggtagctgaactgaccgacaaaggttataacgaagcggatctggcatttgcta

SEQ ID NO: 214890 - DNA, 75 bp, synthetic construct
  source 1..75: mol_type = other DNA
gccagcatcaacaacagcagccagagccagaacgtcacctttgtaccgggtgatgcatcgcagctcacttcaacc

SEQ ID NO: 214891 - DNA, 75 bp, synthetic construct
  source 1..75: mol_type = other DNA
cgagaaatttaatcctgaaactggtatatcagagcttgggacaggaaagtcttctggcttgtgcgtagagtatta

SEQ ID NO: 214892 - DNA, 75 bp, synthetic construct
  source 1..75: mol_type = other DNA
cgatgacatgaagcgagaatacccgaccattccggccgaggcgtttcagcagtcggtcgagggcgcgtactacgc

SEQ ID NO: 214893 - DNA, 75 bp, synthetic construct
  source 1..75: mol_type = other DNA
atgttgaatgtattaataagaagtatacttcaagtattatatttagaggggaagtttgctctcaaaaattgaagg

SEQ ID NO: 214894 - DNA, 75 bp, synthetic construct
  source 1..75: mol_type = other DNA
ataaactggttaaccgtccgatctatggctctggtgtagttgctcaggataccatgctgtttggtgactttagct

SEQ ID NO: 214895 - DNA, 75 bp, synthetic construct
  source 1..75: mol_type = other DNA
ttattccatccacagcggtgctccggtgcaggcaaattctgctatcaggacagataaatcggcatatatcgccgg

SEQ ID NO: 214896 - DNA, 75 bp, synthetic construct
  source 1..75: mol_type = other DNA
atcgccgatgtcaggacggcgcagatcgcgagtctggaggtcattaaggatggttcagaggcggacggttcgacg

SEQ ID NO: 214897 - DNA, 75 bp, synthetic construct
  source 1..75: mol_type = other DNA
ggtctggatttgctggatgatgcagtgtacttacaaaatgtagaaaagaaagaaggggaaaaatggagatatgtg

SEQ ID NO: 214898 - DNA, 75 bp, synthetic construct
  source 1..75: mol_type = other DNA
tgatgaagtatatgttctcggtcactcattagctaacgtagatttaccctacttcaagaagttggagcaatcagt

SEQ ID NO: 214899 - DNA, 75 bp, synthetic construct
  source 1..75: mol_type = other DNA
ataccatccttccttttgtggaagtcgagtcgctgagtgttaatggtgcaaaattcagggcggcagatggttttc

SEQ ID NO: 214900 - DNA, 75 bp, synthetic construct
  source 1..75: mol_type = other DNA
gtaggcggcgcaactcacgatgctatgcagtgggtcgagcagaataatggtgaatataccattgtctggacagca

SEQ ID NO: 214901 - DNA, 75 bp, synthetic construct
  source 1..75: mol_type = other DNA
gccgcaggcggtaccgggacgcagtggttcaggcaccacgctgaataatcactttgcggtgatcccggcagacag

SEQ ID NO: 214902 - DNA, 75 bp, synthetic construct
  source 1..75: mol_type = other DNA
tggatgatgtgaaaggctggtttaatagtgcagctacaaagattgctaacttccaagagccaatgaataactttg

SEQ ID NO: 214903 - DNA, 75 bp, synthetic construct
  source 1..75: mol_type = other DNA
acagtctgtgccatgcggattaccgtcttccggaagagaaggggcctgcggggatatttctgacccgtacggtgt

SEQ ID NO: 214904 - DNA, 75 bp, synthetic construct
  source 1..75: mol_type = other DNA
cgaagggggcagtggtccgggccggattcaggacccgtgtgggtggtcgtgcgctggtgagtctggcccgtcagg

SEQ ID NO: 214905 - DNA, 75 bp, synthetic construct
  source 1..75: mol_type = other DNA
agcctgggatccctttctcagcgggcatccttccaagccctggcattcgccttcggcaatggcgccaggcgctcc

SEQ ID NO: 214906 - DNA, 75 bp, synthetic construct
  source 1..75: mol_type = other DNA
tgcaaatggtctgcaatacgttggggctgataggattgcccgatcaatatttcatgatgggcatctcccgcccgc

SEQ ID NO: 214907 - DNA, 75 bp, synthetic construct
  source 1..75: mol_type = other DNA
ttggaataccacgcttgatagtatcttcagaggttctgaaaatggtctgcaagattttacacgaagcctaacaac

SEQ ID NO: 214908 - DNA, 75 bp, synthetic construct
  source 1..75: mol_type = other DNA
ttccactactactctctggcagtcatgatttcagcgaaacaaattaataacctgatatcgcaagtatttcaggga

SEQ ID NO: 214909 - DNA, 75 bp, synthetic construct
  source 1..75: mol_type = other DNA
agcggttcagaactgaaggaccggatgacgtcacctccggcaccttttacggaaggaaccctgattgccgccatg

SEQ ID NO: 214910 - DNA, 75 bp, synthetic construct
  source 1..75: mol_type = other DNA
tgaacggggtgaacactgccggattagtggttcagaactgaaggagcggatgacgtcacctccggccccttttac

SEQ ID NO: 214911 - DNA, 75 bp, synthetic construct
  source 1..75: mol_type = other DNA
aaacaatttccgcaaggtataaatggggagcaatggagacttaaacttgatgttcagagacgagcagagcaagag

SEQ ID NO: 214912 - DNA, 75 bp, synthetic construct
  source 1..75: mol_type = other DNA
tcgtcgtagcatccggcaactacatttatgatcctcaacgaacctggcctcctcaagaattaggtgggcatgaca

SEQ ID NO: 214913 - DNA, 75 bp, synthetic construct
  source 1..75: mol_type = other DNA
ggaagctttatccagaccttatcccagatggcgcgattggaccccgaaccatcaccgctctgaaggggtatcttt

SEQ ID NO: 214914 - DNA, 75 bp, synthetic construct
  source 1..75: mol_type = other DNA
caggaagtggatctccatgggttaattttgatctgtctctcaccggatgccagaatatgaatactgttcgggcaa

SEQ ID NO: 214915 - DNA, 75 bp, synthetic construct
  source 1..75: mol_type = other DNA
atgttgtctgactggaccgatgaaagtaagcgtcgtctgagtaccgtctggtcccgaatccaggatcctgtaact

SEQ ID NO: 214916 - DNA, 75 bp, synthetic construct
  source 1..75: mol_type = other DNA
ctcttagctcaggggtttcctaaatctgatgtaaacgatttagaaattgctattggtgaagatggcccgatagct

SEQ ID NO: 214917 - DNA, 75 bp, synthetic construct
  source 1..75: mol_type = other DNA
tgcaagtaaagcagcccatggtattttgggtataggaatagctgtagcaactcaagccgctaccaccgcgctaaa

SEQ ID NO: 214918 - DNA, 75 bp, synthetic construct
  source 1..75: mol_type = other DNA
ctgcgcctcagcgatcccgacgctgcactcattatcagccggggccagatgcaggaaggggacgaattagcctcc

SEQ ID NO: 214919 - DNA, 75 bp, synthetic construct
  source 1..75: mol_type = other DNA
ccctgcacaccgacgctggctcagcaaatactcattcgaaagtccccggcgacaattagcttttgacgaacaccg

SEQ ID NO: 214920 - DNA, 75 bp, synthetic construct
  source 1..75: mol_type = other DNA
taataagacttttgaccgtctggaagctagagcaaaaaatactaaagctttccgtttcacaagtcaggttaatga

SEQ ID NO: 214921 - DNA, 75 bp, synthetic construct
  source 1..75: mol_type = other DNA
ttgtttacgcgcaatgtaccaacgcgttattacggctatgtcacccaaccctggtttatcggccattcgcaatga

SEQ ID NO: 214922 - DNA, 75 bp, synthetic construct
  source 1..75: mol_type = other DNA
aatgcaacctttaatcttaaagcccgtgcagtgagtaaaggccaggttactcctggagatatcagttctgttata

SEQ ID NO: 214923 - DNA, 75 bp, synthetic construct
  source 1..75: mol_type = other DNA
tgatgccgggtaatccgataaaaatcagcggctgcgcggacccgcatgttatgccgggagcggcaacgctcgacc

SEQ ID NO: 214924 - DNA, 75 bp, synthetic construct
  source 1..75: mol_type = other DNA
actgatgtggttacttgaacgattaacgcctgattttaaaaccattgcagacttcagaaaagataacggtgaagg

SEQ ID NO: 214925 - DNA, 75 bp, synthetic construct
  source 1..75: mol_type = other DNA
ttattcaggagataaacgcaccatgccaaacaacagaaatcgctatacgttttgatatgagtgcttatcaggctc

SEQ ID NO: 214926 - DNA, 75 bp, synthetic construct
  source 1..75: mol_type = other DNA
gcatgcgcgaagctctcgtagcgccactggatttcacctctctgcgtaatgctgtaaccgagttcgaacagcatc

SEQ ID NO: 214927 - DNA, 75 bp, synthetic construct
  source 1..75: mol_type = other DNA
ctggcattttaaccgactggcgcggctatgcggtgatgccgtatgccacggtttatcggtataaccgtatcgcgc

SEQ ID NO: 214928 - DNA, 75 bp, synthetic construct
  source 1..75: mol_type = other DNA
ttttcttagacggaacaacatacagtgcgtcgaaattttataaattttcacttccttttgaaaaaggtattactg

SEQ ID NO: 214929 - DNA, 75 bp, synthetic construct
  source 1..75: mol_type = other DNA
gcgcaatgccatgtacgcactaacaacattgaaagtagttaataaggatgaacaagggaaaaatgacagtagttt

SEQ ID NO: 214930 - DNA, 75 bp, synthetic construct
  source 1..75: mol_type = other DNA
ttcgtggactggtccaaagacgcgttactcgatgtcgataagctgctggtggacggtcagccgattgagatgccg

SEQ ID NO: 214931 - DNA, 75 bp, synthetic construct
  source 1..75: mol_type = other DNA
tacttgatgtcgataagctgctggtggatggtcagccggttgacatgccgccgcactgcgacatgattttcgcag

SEQ ID NO: 214932 - DNA, 75 bp, synthetic construct
  source 1..75: mol_type = other DNA
aacgttaccagtatgacctgaccggaaaactcacgcagagtgaagatgaggggcttatcaccctctggcactacg

SEQ ID NO: 214933 - DNA, 75 bp, synthetic construct
  source 1..75: mol_type = other DNA
gtatgaggatgaccgagtctgtgaaccaatagtcttatcatcctgggtgagttttttcggtgatgaggctgaata

SEQ ID NO: 214934 - DNA, 75 bp, synthetic construct
  source 1..75: mol_type = other DNA
caatgtaccaggattgctttccctgataactgcacatcttaaggctctgccggatgatggaagaaatgaagatgt

SEQ ID NO: 214935 - DNA, 75 bp, synthetic construct
  source 1..75: mol_type = other DNA
taatctgcatcattaaaggcgttcagcattttcgcttgatgccttgcacattaaaagatctaaaacagacggtaa

SEQ ID NO: 214936 - DNA, 75 bp, synthetic construct
  source 1..75: mol_type = other DNA
tcaagttggaagtggtagagaattggttcaaactattgggagagttgttaggaattacaattcaatagaaccgat

SEQ ID NO: 214937 - DNA, 75 bp, synthetic construct
  source 1..75: mol_type = other DNA
tacgccatcgaacctggcagattgcgatggatggcagccagaaattgccacagcggatgttggattctgttcgct

SEQ ID NO: 214938 - DNA, 75 bp, synthetic construct
  source 1..75: mol_type = other DNA
tcagccacggccctccatgtcacatcaaactgaaaatgaaaccttttttagcaatgaagtttcctgggggatgct

SEQ ID NO: 214939 - DNA, 75 bp, synthetic construct
  source 1..75: mol_type = other DNA
tacacaacgggcagttaacggtctggtctgattcctgggatcaccagttgaatgcggttcgctgtggtcgacgct

SEQ ID NO: 214940 - DNA, 75 bp, synthetic construct
  source 1..75: mol_type = other DNA
cacgacgtatccccggacggactgtggctatctgcctgaatccatgcaacaggaaagccgggaggtactggcggc

SEQ ID NO: 214941 - DNA, 75 bp, synthetic construct
  source 1..75: mol_type = other DNA
tttgtcagcagcagggcagggctacggtactggaggtgacacagaagcgggagaaaacggcggcacccctctgtt

SEQ ID NO: 214942 - DNA, 75 bp, synthetic construct
  source 1..75: mol_type = other DNA
gcctatggcgagcagtatggcaggccgtggcgtgccgatgtcctgcctgtgctgcctgaggcctggaaaatggtc

SEQ ID NO: 214943 - DNA, 75 bp, synthetic construct
  source 1..75: mol_type = other DNA
agcccttcagtatgacggttccggtgacgccgccgtgcccgctttgtcaggggccgacccggcagcgaaagggaa

SEQ ID NO: 214944 - DNA, 75 bp, synthetic construct
  source 1..75: mol_type = other DNA
cgtcacaggcgcgggatattgcccgggtgctgggactcagcgggcggggagagggctgtattgaaggtgatactg

SEQ ID NO: 214945 - DNA, 75 bp, synthetic construct
  source 1..75: mol_type = other DNA
ttgatatcagggcactgagtgaagatgagctgaaggtgtatctgctcattcgccagcattatctggcccagtttc

SEQ ID NO: 214946 - DNA, 75 bp, synthetic construct
  source 1..75: mol_type = other DNA
cctggaaaattgacgttttgccggtctttcctgaacagtggcagatggtggtgaaggataatgtcgggaagcagt

SEQ ID NO: 214947 - DNA, 75 bp, synthetic construct
  source 1..75: mol_type = other DNA
caatgctatttagaatcgctgacgaatgggaatactcagcaaaaaacgcagatattcgagccgcaaaggctgatt

SEQ ID NO: 214948 - DNA, 75 bp, synthetic construct
  source 1..75: mol_type = other DNA
tgatcttactcagcgcctgtcctatcttaatctgattcgacaaaatggtcgttatcgcctgtctgatggtgtttg

SEQ ID NO: 214949 - DNA, 75 bp, synthetic construct
  source 1..75: mol_type = other DNA
cctcccaggcaaaggatattgcccgcgtgctgggtatcagcaagcgtgagcagggatttatcagcggcggtaaca

SEQ ID NO: 214950 - DNA, 75 bp, synthetic construct
  source 1..75: mol_type = other DNA
tgagcttaaggtgtaccggttaattcgtcagcattatctggctcagtttttacccatgcaggagtcggatgtcac

SEQ ID NO: 214951 - DNA, 75 bp, synthetic construct
  source 1..75: mol_type = other DNA
aagaagtgcctgacgtactggcagcgctggaaaaaaccgatccggatattgccccggagctggcaaaactcagtc

SEQ ID NO: 214952 - DNA, 75 bp, synthetic construct
  source 1..75: mol_type = other DNA
cattacttcgtcgccatccgtgggtcttttccggggccgttgcccgcatggaaggtaaagccagcctcggtgaaa

SEQ ID NO: 214953 - DNA, 75 bp, synthetic construct
  source 1..75: mol_type = other DNA
tttttatattaatgaaaatatagcaatttatgctagtgtattatttttttgtactttctttatgcgcgaaatatt

SEQ ID NO: 214954 - DNA, 75 bp, synthetic construct
  source 1..75: mol_type = other DNA
aaccgtgagcgtttagaaaaactctctcattaccgggaaatgatgatcgctgatggtataaatccgagcgaactg

SEQ ID NO: 214955 - DNA, 75 bp, synthetic construct
  source 1..75: mol_type = other DNA
gtgatgcccgccgggcattacatgaactgatgatcggacgtgctgtggtttccgtcagcaaggacgggcgtcagg

SEQ ID NO: 214956 - DNA, 75 bp, synthetic construct
  source 1..75: mol_type = other DNA
gcacgcccaccagtcataccggataatttcggaatactgaaagaggccataaaccgcacacataccgggattggc

SEQ ID NO: 214957 - DNA, 75 bp, synthetic construct
  source 1..75: mol_type = other DNA
acttcggagacctgagaaaggcagtcgatcgcacttatgctgaaatgggtatggatggtgtaagcgatgaaatat

SEQ ID NO: 214958 - DNA, 75 bp, synthetic construct
  source 1..75: mol_type = other DNA
gcgagcggtctcaacttagtggtggcggcaatcattctgtggaacacagtctacctagaatgggcggtcaaagcg

SEQ ID NO: 214959 - DNA, 75 bp, synthetic construct
  source 1..75: mol_type = other DNA
gtggtgggttctaacgccggcgggacggatattctggtgtcgtggatctataagctgacgatgtcctcgtcgcag

SEQ ID NO: 214960 - DNA, 75 bp, synthetic construct
  source 1..75: mol_type = other DNA
ttcggcatcagtccgaaggcatggctcaccgatccgttctggaccaaaacggcgctgattatgatgcagacctgg

SEQ ID NO: 214961 - DNA, 75 bp, synthetic construct
  source 1..75: mol_type = other DNA
agcatatttccgggcggtaccgaaagaaaaatccgtgccgtttttgatgtgccggcagataacaccgggatgaac

SEQ ID NO: 214962 - DNA, 75 bp, synthetic construct
  source 1..75: mol_type = other DNA
gcatcgacaaaggcccgtgaagcagcaaaaagtgctgctgctgcagagtcctcaaaaagcgcggcaactaccagt

SEQ ID NO: 214963 - DNA, 75 bp, synthetic construct
  source 1..75: mol_type = other DNA
gcctttcgaaggatgaccagtacctagacctgcagcgtgacgcacttaagcaggccgggtgcaacgtgatctacg

SEQ ID NO: 214964 - DNA, 75 bp, synthetic construct
  source 1..75: mol_type = other DNA
caagtcatgaattggatgcaatcaaaaatgtcagaaattttataacattctgtcgtgataaattaactatttatg

SEQ ID NO: 214965 - DNA, 75 bp, synthetic construct
  source 1..75: mol_type = other DNA
cgctgatcagaataactacattctggtgatctatggttcccgcttcagcgaggaactgagggaactggtctatca

SEQ ID NO: 214966 - DNA, 75 bp, synthetic construct
  source 1..75: mol_type = other DNA
tcatcaagggcttgggttgtatcacttgatgaaattgataaaaacatataatggggaattgcaactggcttcagg

SEQ ID NO: 214967 - DNA, 75 bp, synthetic construct
  source 1..75: mol_type = other DNA
caacaggaacgtgtaaatgttggaagaaattacagtttggttacagcattaaccaatgttgaagctgttgacgtt

SEQ ID NO: 214968 - DNA, 75 bp, synthetic construct
  source 1..75: mol_type = other DNA
taccgtctgccggggcagcagcatgatgaggaatcagggctgtactataaccggaaccggtactatgacccgcta

SEQ ID NO: 214969 - DNA, 75 bp, synthetic construct
  source 1..75: mol_type = other DNA
atgaagccttggcgcaatgaacaggaatcagacaaagcacaaatgccagaaaaacaacagcaaactctcaaccgc

SEQ ID NO: 214970 - DNA, 75 bp, synthetic construct
  source 1..75: mol_type = other DNA
ggacggtcgctcacgccagaaccagcgcctatgaagctccatcggttaaacgctcatggtatcagtgccagaatc

SEQ ID NO: 214971 - DNA, 75 bp, synthetic construct
  source 1..75: mol_type = other DNA
cttgcctctcccgctctttgcttgagggagtccagcttcttttagctttgggcatagtcctaatgactgctaaac

SEQ ID NO: 214972 - DNA, 75 bp, synthetic construct
  source 1..75: mol_type = other DNA
gtttgccatgcactggggtataatttatttgatcataaatcatgtgttttaaaaattaaaagaacgagtttggat

SEQ ID NO: 214973 - DNA, 75 bp, synthetic construct
  source 1..75: mol_type = other DNA
caaatggattccacgggttatgataccagttgcaaagaaagcaattagaagattactttccttatcacaaaatgc

SEQ ID NO: 214974 - DNA, 75 bp, synthetic construct
  source 1..75: mol_type = other DNA
aatattcgctgctgccggaactggatcgtttgatccccgcaggtaaacgccttattgagccttttgtgggtggcg

SEQ ID NO: 214975 - DNA, 75 bp, synthetic construct
  source 1..75: mol_type = other DNA
gcccccctcagttgagagcgaagctttacatgtccgccctgtgcggaaaaatctacaataagcgaatgcgtaata

SEQ ID NO: 214976 - DNA, 75 bp, synthetic construct
  source 1..75: mol_type = other DNA
ggctgatagaaaaattaaagatttatttcacttcaaccttgttgattcattaacattgaaacctagaagaatgaa

SEQ ID NO: 214977 - DNA, 75 bp, synthetic construct
  source 1..75: mol_type = other DNA
tgccgtttctggagagtggcaaactggtgcaagtattgccggagtatgcacaaagcgccaatatctgggctgttt

SEQ ID NO: 214978 - DNA, 75 bp, synthetic construct
  source 1..75: mol_type = other DNA
gccagcaatattggcacacagatgatgtcgaacgattaatccaatttggttacagcagtagctggaagcgcctct

SEQ ID NO: 214979 - DNA, 75 bp, synthetic construct
  source 1..75: mol_type = other DNA
ctctcgtctggggaatatctccccggcagccttcagggaaaaatatcatcagatagctgcttaaaaaaagaacaa

SEQ ID NO: 214980 - DNA, 75 bp, synthetic construct
  source 1..75: mol_type = other DNA
tcaaaagatccactatttgactgcccctaatatcaatatacataaaatgtcgctatcaaatataacaatagaaaa

SEQ ID NO: 214981 - DNA, 75 bp, synthetic construct
  source 1..75: mol_type = other DNA
aaaaacaatatattgtcgaaagcaattttcatatcagcttttcttttagctttaatcattacctcaaaagcagcg

SEQ ID NO: 214982 - DNA, 75 bp, synthetic construct
  source 1..75: mol_type = other DNA
tatccatgatggatggcaagtatttactgagctagttgatattgataaagagtttctttattacgtattgttaaa

SEQ ID NO: 214983 - DNA, 75 bp, synthetic construct
  source 1..75: mol_type = other DNA
cagccctggaaaaaaataatctgtcctggaatttaatgcagtcttataacagccacgatgatgaagttggcggga

SEQ ID NO: 214984 - DNA, 75 bp, synthetic construct
  source 1..75: mol_type = other DNA
aatgtttgaacgtcaggatgtgacctttgttcaggataatcccgatgctgatttacacgcctgctttgtcgctat

SEQ ID NO: 214985 - DNA, 75 bp, synthetic construct
  source 1..75: mol_type = other DNA
acgcgcaacattcaggcgtcgatcgcaagactattggccgatggatcaaggctggtcggtttatcgtcatggatg

SEQ ID NO: 214986 - DNA, 75 bp, synthetic construct
  source 1..75: mol_type = other DNA
attgggccgtggcgactccgcaattacagcaccttgaacaccaccgatggtcgtgcggaatacaactctatcagt

SEQ ID NO: 214987 - DNA, 75 bp, synthetic construct
  source 1..75: mol_type = other DNA
acgtccttcaggcgcaaatacttcatggtttttcccacgggatcactttatatggaggtatgcaggctgctgaaa

SEQ ID NO: 214988 - DNA, 75 bp, synthetic construct
  source 1..75: mol_type = other DNA
cagccatgatgatgaggttggcggtaatatgtccctgacctatgatggcacttatggcacggtgaacggcagcta

SEQ ID NO: 214989 - DNA, 75 bp, synthetic construct
  source 1..75: mol_type = other DNA
tatgttttgaaagcgacttatcaaacaccatcttttcaaatggagaaattaataatctcttcattaaaaaaagca

SEQ ID NO: 214990 - DNA, 75 bp, synthetic construct
  source 1..75: mol_type = other DNA
aacctgaatctgtccggtaacctggcgagctggagcaatattaccctgagttcagccggctccgccggtggtgca

SEQ ID NO: 214991 - DNA, 75 bp, synthetic construct
  source 1..75: mol_type = other DNA
gtggcgtggcgaccggtggtaacaccaccacgaacggttcgaccatcacgggtaacgcgaccaacgggtcgggtg

SEQ ID NO: 214992 - DNA, 75 bp, synthetic construct
  source 1..75: mol_type = other DNA
ccattttctcattactgataaatatgccgatgatggactaaataatacactcaaagtcattatatcttacctggt

SEQ ID NO: 214993 - DNA, 75 bp, synthetic construct
  source 1..75: mol_type = other DNA
cggatgagctggcactgatgttcgggattacctcccgccgggcgaattcatcgctggccatggtaatcagcaaag

SEQ ID NO: 214994 - DNA, 75 bp, synthetic construct
  source 1..75: mol_type = other DNA
atgaagaaaatgcgggtagtggcagagtacgttgaaaacgaagagatccgcgaggcggtgttctctttggggatc

SEQ ID NO: 214995 - DNA, 75 bp, synthetic construct
  source 1..75: mol_type = other DNA
gatggcgacatgtcatatgcccgtatcggtttcaaaggtgaaactcagatcgctgatcaattcactggttatggt

SEQ ID NO: 214996 - DNA, 75 bp, synthetic construct
  source 1..75: mol_type = other DNA
ggttggtggatattttccctgatgttaaacggttaagaaaaggaactaaatcaaaatttacattgggccctaaac

SEQ ID NO: 214997 - DNA, 75 bp, synthetic construct
  source 1..75: mol_type = other DNA
gaatctttgattaagtgtactgaacggttggtggatattttccctgatgttaaacggttaagaaaaggaactaaa

SEQ ID NO: 214998 - DNA, 75 bp, synthetic construct
  source 1..75: mol_type = other DNA
aagctacaaacttatcgtgctgataccattactatagattgtgattctgaagattttcaaattcatggaggatta

SEQ ID NO: 214999 - DNA, 75 bp, synthetic construct
  source 1..75: mol_type = other DNA
atcattaagaataaaaattcgataacaaacattaaaaatattattgcagaacaaacaaaggcatctgaagttgaa

SEQ ID NO: 215000 - DNA, 75 bp, synthetic construct
  source 1..75: mol_type = other DNA
atttgtaacaaaaataatgataaagctaatgcgttaatccatttatctcgtgcagcaaactccagcattgataaa

SEQ ID NO: 215001 - DNA, 75 bp, synthetic construct
  source 1..75: mol_type = other DNA
aaacggtcagagtttccaggattttattaatataactgacaatcttggttattcgatagacactgtattttattt

SEQ ID NO: 215002 - DNA, 75 bp, synthetic construct
  source 1..75: mol_type = other DNA
cagagtcccgtttttatgccatcgaatggcgtgctgattatgtcgataataattgctggccgcatgatgccatta

SEQ ID NO: 215003 - DNA, 75 bp, synthetic construct
  source 1..75: mol_type = other DNA
gctggcggcaattatctcaatgtcggttacttattaaactatgttgaaaaccgtacgctgatgcaacgaatgggt

SEQ ID NO: 215004 - DNA, 75 bp, synthetic construct
  source 1..75: mol_type = other DNA
cgggaaatgaagttctgacagtggtaaaaaccactgacggtgcggcctcgttcagcgcgtcttctcaggttgagt

SEQ ID NO: 215005 - DNA, 75 bp, synthetic construct
  source 1..75: mol_type = other DNA
tattaacactaaaaaatttgatgcaattgttaataataatgtatatgtcaatgttgataggatttattttgagag

SEQ ID NO: 215006 - DNA, 75 bp, synthetic construct
  source 1..75: mol_type = other DNA
tcttattcaccaacaacataaatttgttgtttcattgttaaaaaatgatagtgccgttgccttttttgtagccag

SEQ ID NO: 215007 - DNA, 75 bp, synthetic construct
  source 1..75: mol_type = other DNA
atggttacctggacccaaatgtatatgccgatgggaggactggggctatccgctctggtcgccctgatcccgata

SEQ ID NO: 215008 - DNA, 75 bp, synthetic construct
  source 1..75: mol_type = other DNA
tagacttctttaaagatgagttgcggaatggatatattaatggaaatgagcagcaatcagctttgaaagcttttg

SEQ ID NO: 215009 - DNA, 75 bp, synthetic construct
  source 1..75: mol_type = other DNA
atcggggctgtgctataaccgtcaccggtactatgatccgttgcagggacggtatatcacccaggatccgattgg

SEQ ID NO: 215010 - DNA, 75 bp, synthetic construct
  source 1..75: mol_type = other DNA
tgcgcatcagcggcccgcggcagacgcgggaatacggctacagcgccacgggcaggctggagagcgtgcgcaccc

SEQ ID NO: 215011 - DNA, 75 bp, synthetic construct
  source 1..75: mol_type = other DNA
atcaacagtctcgccattccgcccgcagatgccatcgatcgtcaggagcgtctggtgctgattcagtatcgtccc

SEQ ID NO: 215012 - DNA, 75 bp, synthetic construct
  source 1..75: mol_type = other DNA
agcctgatgaaaagttaccatcatggtgtgaagagccttcgacacatcttccaaataatttgaatatgtcttccg

SEQ ID NO: 215013 - DNA, 75 bp, synthetic construct
  source 1..75: mol_type = other DNA
attaaaactgacacagttaacatttccggaagccaagacagactcaaaaatctgtatgatagtataaaaaatgat

SEQ ID NO: 215014 - DNA, 75 bp, synthetic construct
  source 1..75: mol_type = other DNA
ggaaaaggtgtgtatgcgggtgatgctcgatgcggcacaggacgccggggtaatatttggagatattgacccgca

SEQ ID NO: 215015 - DNA, 75 bp, synthetic construct
  source 1..75: mol_type = other DNA
aatgtatatccgatgactccaggcttgattgatcaactccgcccggagactgttctcgcacgtccgaatccacag

SEQ ID NO: 215016 - DNA, 75 bp, synthetic construct
  source 1..75: mol_type = other DNA
cacgactgctcctttggtacgttggaatcgcgtaatttctcagcttgtaccgactattactggtgttcatgacat

SEQ ID NO: 215017 - DNA, 75 bp, synthetic construct
  source 1..75: mol_type = other DNA
taacggtaaagatacaaaagtctcattgtatgcattaatgcagaagggggacttgacccagaatcatttactgta

SEQ ID NO: 215018 - DNA, 75 bp, synthetic construct
  source 1..75: mol_type = other DNA
atgaagaaaaaaattgttaggttttcggcattagcattggcaattgggtttttatcaggttgtactattttccct

SEQ ID NO: 215019 - DNA, 75 bp, synthetic construct
  source 1..75: mol_type = other DNA
agggaaaaattgctaatatttatcagcttaatgcgcaagatgcttctgcaatggtattaggcacggaattccagt

SEQ ID NO: 215020 - DNA, 75 bp, synthetic construct
  source 1..75: mol_type = other DNA
ctttacgctctaatgcaaaaaggggatttaaccgaaaaccgattgctttaccccggtgatattctgtttgtccct

SEQ ID NO: 215021 - DNA, 75 bp, synthetic construct
  source 1..75: mol_type = other DNA
tacaaccttatgatatcgtctatgtaacttctgctcctttggttcgctggaatcgtgtaatttcccagctagtac

SEQ ID NO: 215022 - DNA, 75 bp, synthetic construct
  source 1..75: mol_type = other DNA
aacggttatggatgcaataaatgccgctggtgggctggcaccagacgcagattggcgtaatgttgtgctgactca

SEQ ID NO: 215023 - DNA, 75 bp, synthetic construct
  source 1..75: mol_type = other DNA
atcagcgcagaactgacccgctttatcaaacttaatcgtgacaaagtggcgattgcgaaggtgcagtttgacgtg

SEQ ID NO: 215024 - DNA, 75 bp, synthetic construct
  source 1..75: mol_type = other DNA
aatgtgtatcctatgactccggggctgatcgatcagcttcgcccagagaccgttcttgctcgtccaaacccacaa

SEQ ID NO: 215025 - DNA, 75 bp, synthetic construct
  source 1..75: mol_type = other DNA
atggtgttaggtactgaattccagttacagccgtatgatattgtttatgtcactacagcaccattggttcgctgg

SEQ ID NO: 215026 - DNA, 75 bp, synthetic construct
  source 1..75: mol_type = other DNA
agaacgtagttgagcttccggacagcgactacgatctggataaactggtcaatgtgtacccgatgacgccgggtc

SEQ ID NO: 215027 - DNA, 75 bp, synthetic construct
  source 1..75: mol_type = other DNA
gtggtgttttttattcctgatgtttttttgttgtggtttcagaacggtgagattcagggggccagtctattagcg

SEQ ID NO: 215028 - DNA, 75 bp, synthetic construct
  source 1..75: mol_type = other DNA
atggattggtaagcaggttccggtattcttcagctatgccaaaagggaataccccaacgctgaaattaatgttca

SEQ ID NO: 215029 - DNA, 75 bp, synthetic construct
  source 1..75: mol_type = other DNA
atgacatcgattatagttacttcgttacttaaaaccggtccttgccttagctctgtacttgtagaggaaatgctg

SEQ ID NO: 215030 - DNA, 75 bp, synthetic construct
  source 1..75: mol_type = other DNA
accagtcagataactcgcaggttaaactttataacgattctgcctataccgctatcgacgctgaaggcaaggctg

SEQ ID NO: 215031 - DNA, 75 bp, synthetic construct
  source 1..75: mol_type = other DNA
tacagaagcgcctggcggcgacggcgacctgaaagtgggtacgccgcttacagcgggcaaccctggcgattttac

SEQ ID NO: 215032 - DNA, 75 bp, synthetic construct
  source 1..75: mol_type = other DNA
ctgtactcagaaggccgcgacggatatcaaacgcctgcgcccgctggtggaggatgcaataaataaaggcattct

SEQ ID NO: 215033 - DNA, 75 bp, synthetic construct
  source 1..75: mol_type = other DNA
ttaactttagccgggacttgaacggaagcggaacacagggtttattcatcaaaaaacaaaacgttgatattgatt

SEQ ID NO: 215034 - DNA, 75 bp, synthetic construct
  source 1..75: mol_type = other DNA
aagcattgcctgaactggtaactgaagacgcagacgttatatctggtgaaaaacgtctgcgtcttaactacaacg

SEQ ID NO: 215035 - DNA, 75 bp, synthetic construct
  source 1..75: mol_type = other DNA
tctttgatgaggtgacattagcttatcgtggtttaaccgatgaacaaaagaaagttgttgatgctttaggttctg

SEQ ID NO: 215036 - DNA, 75 bp, synthetic construct
  source 1..75: mol_type = other DNA
ggcccccccgccgccaggctgggtgccgcgcgccaatcaaaacgcgacacattgacaactaacattggatcgcgt

SEQ ID NO: 215037 - DNA, 75 bp, synthetic construct
  source 1..75: mol_type = other DNA
gtgctttcaagggggtatagcttttatcctatattaaagggaacgtcgactataaattatattaaggaatggatt

SEQ ID NO: 215038 - DNA, 75 bp, synthetic construct
  source 1..75: mol_type = other DNA
gtggagagcggatatcgaacgactaacgagatcgcacgataatcttgaggactggttaaaaaacggctcggagat

SEQ ID NO: 215039 - DNA, 75 bp, synthetic construct
  source 1..75: mol_type = other DNA
cgaagggggcggttttctgcctctgaaaacaggcataacccgtgacattactacatatctggcagcacatccgga

SEQ ID NO: 215040 - DNA, 75 bp, synthetic construct
  source 1..75: mol_type = other DNA
atggcgaggggctgcatatccgccgcctggaaccaggaacggaaattgcgttttacattcctaaccaacgcaccc

SEQ ID NO: 215041 - DNA, 75 bp, synthetic construct
  source 1..75: mol_type = other DNA
caaataaggcagagcttcgcgccctgcaaagcaaaattaatccccattttctgtttaacgctttgaacgctattt

SEQ ID NO: 215042 - DNA, 75 bp, synthetic construct
  source 1..75: mol_type = other DNA
catcagataacctcgtcattacaggaaatggcggtcggtctgtcacaaatcatctccacgcaactggaggtttcg

SEQ ID NO: 215043 - DNA, 75 bp, synthetic construct
  source 1..75: mol_type = other DNA
ttaaccagaaaaaagccgctgaattactggggctgacttaccatcagcttcgcgctttgctgaaaaaacaccaga

SEQ ID NO: 215044 - DNA, 75 bp, synthetic construct
  source 1..75: mol_type = other DNA
taattattaacacaacatacccatggaatcattacttagcagttggcccgcttagttttgatgtaattcattaca

SEQ ID NO: 215045 - DNA, 75 bp, synthetic construct
  source 1..75: mol_type = other DNA
ggggtttcgcccactggcggtgtgcctgttcagttttggtgtcgtggttcagttggcttatgccgcctggcaaac

SEQ ID NO: 215046 - DNA, 75 bp, synthetic construct
  source 1..75: mol_type = other DNA
tcaaagcggcgatcaaaaatatgttgctgtagacggctcctataatggtgcatctgcaattggtcgtctggggaa

SEQ ID NO: 215047 - DNA, 75 bp, synthetic construct
  source 1..75: mol_type = other DNA
gatttattcaacaaagccggtgccggggtgaaaaatttcgacattggtggcatcaagtttgaccttgctactgtc

SEQ ID NO: 215048 - DNA, 75 bp, synthetic construct
  source 1..75: mol_type = other DNA
tccaggcgctggctggcggcgaaagagcagaggtggctgagtatgaaggcccggcaggaaaatatttctgagaaa

SEQ ID NO: 215049 - DNA, 75 bp, synthetic construct
  source 1..75: mol_type = other DNA
tcagtgacgaaatacaggatctgactgaaacggggattgacctgagtattcgcacaggtatattgacggactcat

SEQ ID NO: 215050 - DNA, 75 bp, synthetic construct
  source 1..75: mol_type = other DNA
cggctttccacgctgctattcagcttaatcccaaaggttaccagtggctgaggtcttctgacttcgttcgggagc

SEQ ID NO: 215051 - DNA, 75 bp, synthetic construct
  source 1..75: mol_type = other DNA
ggtgatcaccgactcctggccgggtcaggcgcgtacgctgtttggcgatcacgaacgttttgaacagacctactt

SEQ ID NO: 215052 - DNA, 75 bp, synthetic construct
  source 1..75: mol_type = other DNA
atatatcatttgtttttatgatattgaaagaggcgttgcaaaatattcaagaaaataaaaacatgatgtatttgt

SEQ ID NO: 215053 - DNA, 75 bp, synthetic construct
  source 1..75: mol_type = other DNA
agcatcacccgcagcgagtatgatgaggcggggaggctgaaggcgcagacggatgcggcgggacggcggacggag

SEQ ID NO: 215054 - DNA, 75 bp, synthetic construct
  source 1..75: mol_type = other DNA
ggtctgtatctctatagcgccgccgaaacactgggctgtgccagagaagacatctaccaaaaatgctcgacggac

SEQ ID NO: 215055 - DNA, 75 bp, synthetic construct
  source 1..75: mol_type = other DNA
gtcgcagtttgtgccgacggtttccggttactactccgacagcaaaacgggccacttactctcccagccgttcaa

SEQ ID NO: 215056 - DNA, 75 bp, synthetic construct
  source 1..75: mol_type = other DNA
actatctgtttttgtcatagtgttctttttatgcgtatacaacattcggttgagttactcacttttttcgaaaga

SEQ ID NO: 215057 - DNA, 75 bp, synthetic construct
  source 1..75: mol_type = other DNA
tctctacaggaagatagcgatttttttatcccattagaaacagcgttgaggttgaccctcagtaacgaaatagat

SEQ ID NO: 215058 - DNA, 75 bp, synthetic construct
  source 1..75: mol_type = other DNA
tcattattgattgctcaaatctatcaagttcaatgtctgtcagctatagtcaggtagcaccgagttttgtatttt

SEQ ID NO: 215059 - DNA, 75 bp, synthetic construct
  source 1..75: mol_type = other DNA
gtgggcagacaaaaaacctgttccaccatggctgtggcgaaaagaaaataaaaatagccacaataattataaata

SEQ ID NO: 215060 - DNA, 75 bp, synthetic construct
  source 1..75: mol_type = other DNA
gggtagagtgggattttgataagaaattatggcgcgttcccgctgatcatagcaaaaatggcagggaaataatca

SEQ ID NO: 215061 - DNA, 75 bp, synthetic construct
  source 1..75: mol_type = other DNA
ttatcccactggaaacagcactcaggttgtctctcagtaacgaaatagatagcgtaaaacttctcctaaaaaaag

SEQ ID NO: 215062 - DNA, 75 bp, synthetic construct
  source 1..75: mol_type = other DNA
ataaatgggaaaattgtttgctttgttattcttatggaaagcattattgttgctttgttttcattgttaatatca

SEQ ID NO: 215063 - DNA, 75 bp, synthetic construct
  source 1..75: mol_type = other DNA
attgcataatgcttttttgtctggaagaccaatttttaatgatataattgaagagaaaattaaaattttcaaatt

SEQ ID NO: 215064 - DNA, 75 bp, synthetic construct
  source 1..75: mol_type = other DNA
aacaacgcttttaaatagtcttggtgggagtggtaaaacattaggtgaaagtcttggtaatctcatgacttctat

SEQ ID NO: 215065 - DNA, 75 bp, synthetic construct
  source 1..75: mol_type = other DNA
gatatcgctgaactgcaatcacagtttgctggtttcggtgcttcagctaaagaatctatgggtattcagggttct

SEQ ID NO: 215066 - DNA, 75 bp, synthetic construct
  source 1..75: mol_type = other DNA
ggtgttaccagaagtatttacgggcttatgactgctatcacaagattaggtcaggtagccaatacaacaacagat

SEQ ID NO: 215067 - DNA, 75 bp, synthetic construct
  source 1..75: mol_type = other DNA
catcaccatcggctttaacggcgtgagccgggcggcgacgtctgaccgtagcaaaaacccgctgcttcaggatgt

SEQ ID NO: 215068 - DNA, 75 bp, synthetic construct
  source 1..75: mol_type = other DNA
agatacaacttatctgtttatgagcaaaaaaatcttggagacttaatgttttcaaatggagaagtaggtgtatac

SEQ ID NO: 215069 - DNA, 75 bp, synthetic construct
  source 1..75: mol_type = other DNA
gcttgcggacaaatcaatattggtaatgcgcgaacgcagatgtcggaacgtatgtctgaaggtgttctgcaagca

SEQ ID NO: 215070 - DNA, 75 bp, synthetic construct
  source 1..75: mol_type = other DNA
gggataactgatcgtgtcaatgacataataaatgacagattctggagtgatgggaaaaaacccgacagatgtgac

SEQ ID NO: 215071 - DNA, 75 bp, synthetic construct
  source 1..75: mol_type = other DNA
ggaagcggtaaaagtcttggtgaatctcttggtagcttgatgactgatatgtcgcatggtgtggatagtctgacc

SEQ ID NO: 215072 - DNA, 75 bp, synthetic construct
  source 1..75: mol_type = other DNA
gcgaaaaatccacctgtaccactgcgaccatcgcggcctgccgctggcgcttgtcagcacggaaggggcaacaga

SEQ ID NO: 215073 - DNA, 75 bp, synthetic construct
  source 1..75: mol_type = other DNA
atggcacaatttaaagttgatgattttctgattgagttaaaacttaaccctcaggaagttttaaaaggtctggaa

SEQ ID NO: 215074 - DNA, 75 bp, synthetic construct
  source 1..75: mol_type = other DNA
ccgttggcgagctgaccgaagagaaggtcggtatcgatgtgactggctccatagccagcaccgctgacaccgacg

SEQ ID NO: 215075 - DNA, 75 bp, synthetic construct
  source 1..75: mol_type = other DNA
tatcagccagaaaaccatcggtcagcttcaggcggtgcgcgcgccgttcttcccggcaaacagcgttttcatcac

SEQ ID NO: 215076 - DNA, 75 bp, synthetic construct
  source 1..75: mol_type = other DNA
ccattggtaattttaaagcaatagataaccacgggaaggaaataacaaacagaaaaggattacctaatgtctgca

SEQ ID NO: 215077 - DNA, 75 bp, synthetic construct
  source 1..75: mol_type = other DNA
ctggtttaatattattcagtctgaactgctggaaattctccggcaggcaaatatcaaaccggataaaaataccac

SEQ ID NO: 215078 - DNA, 75 bp, synthetic construct
  source 1..75: mol_type = other DNA
aaagtcagttgctggctgtcgaacgggcattttcctcacagatttcagttattgaaggaccacctggaacaggta

SEQ ID NO: 215079 - DNA, 75 bp, synthetic construct
  source 1..75: mol_type = other DNA
ccaggtacgccaggatatagcaagtcgtttgaccacttatattgaaagcccgcaggttgatgtaagcgtagctgc

SEQ ID NO: 215080 - DNA, 75 bp, synthetic construct
  source 1..75: mol_type = other DNA
agatgtatgaagcttacagcaacggctatcccactgattatggcaatgttctgcatctgaaaggtgcggaatcat

SEQ ID NO: 215081 - DNA, 75 bp, synthetic construct
  source 1..75: mol_type = other DNA
gataacatcggcggcgtgtattacaaacaaacccagatttatatcaatggcggatggcgcacggtatccggctaa

SEQ ID NO: 215082 - DNA, 75 bp, synthetic construct
  source 1..75: mol_type = other DNA
taacaccgctcagtgcgtttgtgcgcagtattctcgggaaaaacagcgccagtgaatttattaaagcaatcggcc

SEQ ID NO: 215083 - DNA, 75 bp, synthetic construct
  source 1..75: mol_type = other DNA
aacagtgatggacgcaatcaatgctgccggaggtttagccccagatgcggattggagaaatgtcgttctgacgca

SEQ ID NO: 215084 - DNA, 75 bp, synthetic construct
  source 1..75: mol_type = other DNA
agtaccgtagtgcgagtgataccggtaactgggtcaattcagatggtactattttctatccttatatcggtaagg

SEQ ID NO: 215085 - DNA, 75 bp, synthetic construct
  source 1..75: mol_type = other DNA
aatcgtgtgatttctcagcttgtgccgactattaccggtgttcatgacatgacggaaactgcgaaatttattaag

SEQ ID NO: 215086 - DNA, 75 bp, synthetic construct
  source 1..75: mol_type = other DNA
cggcattagcattggcgattgggtttttatcgggctgtacaatcatccctggccagggattaaacagtctgcgta

SEQ ID NO: 215087 - DNA, 75 bp, synthetic construct
  source 1..75: mol_type = other DNA
tgcaggtggcaggcaagacattaagccaggtacgccaggatatagccagccgtttaaccacttatatcgaaagcc

SEQ ID NO: 215088 - DNA, 75 bp, synthetic construct
  source 1..75: mol_type = other DNA
attggcgcaacgttgtgttaacgcataacgggaaagacaccaaaatttcattatatgctctgatgcaaaaaggag

SEQ ID NO: 215089 - DNA, 75 bp, synthetic construct
  source 1..75: mol_type = other DNA
accagagatatcaccatcagcagcaccgattctggtgctgtgcgtgatttcagatacaccagcgaagtgtttcac

SEQ ID NO: 215090 - DNA, 75 bp, synthetic construct
  source 1..75: mol_type = other DNA
ccaaaaatctagctgaagagctggggatctcaatgcctagtttatggcgctgggttaaagcaggaaaaatgccga

SEQ ID NO: 215091 - DNA, 75 bp, synthetic construct
  source 1..75: mol_type = other DNA
gtctgggggacgacgtataacacccgtaataatgtcaccaccgatgcgggtgccgggtttgagcagacgctgacc

SEQ ID NO: 215092 - DNA, 75 bp, synthetic construct
  source 1..75: mol_type = other DNA
aaaaggaaatacaaaggtcttcacagatctggattttgaaaatctcggaataattgcaaatttgagcagggatgt

SEQ ID NO: 215093 - DNA, 75 bp, synthetic construct
  source 1..75: mol_type = other DNA
gtttgccacaaaactaagtgatcatggttttgaacataatgtggttgaacagttgcttgggcacacattaggcgg

SEQ ID NO: 215094 - DNA, 75 bp, synthetic construct
  source 1..75: mol_type = other DNA
acaggtaacaaagaaaatgtgattgggtttgatatgcgtcagtgtacggcaagcgtaactatcggtaagacatgg

SEQ ID NO: 215095 - DNA, 75 bp, synthetic construct
  source 1..75: mol_type = other DNA
aacgttctcgacaagccttaacgatatgggcgttgattttatggtcgtagagcagctgctggggcataccataaa

SEQ ID NO: 215096 - DNA, 75 bp, synthetic construct
  source 1..75: mol_type = other DNA
attttataatgttatgcggtattttttttgcttttgtcaaagaaaatacccattcaataatattcaaagtcgcta

SEQ ID NO: 215097 - DNA, 75 bp, synthetic construct
  source 1..75: mol_type = other DNA
ggcaaagccgacattaactatctggcaaacctgtgccataactgcggcgcttgcctgcacgcctgccagtatgct

SEQ ID NO: 215098 - DNA, 75 bp, synthetic construct
  source 1..75: mol_type = other DNA
cggggttgggattactctttggtggcggtcttgcgttatggcttttttggggagcagggaccctggcaggactgt

SEQ ID NO: 215099 - DNA, 75 bp, synthetic construct
  source 1..75: mol_type = other DNA
actaacagctctttatatgaatatagttacagtggcacgcgtggaacgtaacccaacggtaaaaaacgaaattgt

SEQ ID NO: 215100 - DNA, 75 bp, synthetic construct
  source 1..75: mol_type = other DNA
aacggtagcaatccccaaacgattcgaaacaacattccagaagtgctggccgattatctcgctgcaggcattgat

SEQ ID NO: 215101 - DNA, 75 bp, synthetic construct
  source 1..75: mol_type = other DNA
gaactattgcaacaaatctttctgaaaataattccggacttggagttagtccatatactacaatatttgatgtta

SEQ ID NO: 215102 - DNA, 75 bp, synthetic construct
  source 1..75: mol_type = other DNA
gccggacatctattccggattaccacgccggaaggaccgcaggtaggggatttgaatatctggaaccgccgtgac

SEQ ID NO: 215103 - DNA, 75 bp, synthetic construct
  source 1..75: mol_type = other DNA
aactgggagatatattagaagactttttaagttcaaataaaagagttcttcgtttatgcctaagcgatgttagct

SEQ ID NO: 215104 - DNA, 75 bp, synthetic construct
  source 1..75: mol_type = other DNA
aaagacattatctgggattatcccaaagactttgtggcgggtaattgcggagttcagaattgtcacggtgaaacc

SEQ ID NO: 215105 - DNA, 75 bp, synthetic construct
  source 1..75: mol_type = other DNA
gtgacatggttaatagtaatgctcaattagctatggctgtatcagagttaggacgaaaggtagatgccttaacag

SEQ ID NO: 215106 - DNA, 75 bp, synthetic construct
  source 1..75: mol_type = other DNA
gcgaagtcaccagcggtacgccaggctgctatcgtcaggctgtatgtatcggttctgcgcttaacattacggcga

SEQ ID NO: 215107 - DNA, 75 bp, synthetic construct
  source 1..75: mol_type = other DNA
ttagcttaccgtccactaaatgacactcagaggaaaattgttgatggtgaagtggtcaacaaaaactggccaccg

SEQ ID NO: 215108 - DNA, 75 bp, synthetic construct
  source 1..75: mol_type = other DNA
accgagatcgagaagtcgttgagcgtgcatgcggtgaaattgataaatctgcagcatcttttctaccaagtctca

SEQ ID NO: 215109 - DNA, 75 bp, synthetic construct
  source 1..75: mol_type = other DNA
tactgtctggataccgagatcgatttcctccggggtaaacgcccgcgaccggactatctgaccaatatcaagttc

SEQ ID NO: 215110 - DNA, 75 bp, synthetic construct
  source 1..75: mol_type = other DNA
gatcatcctcgatacgctggcccgctgttttggtaattcagatgaaaacaccgcgcgggatatgggcgcatttat

SEQ ID NO: 215111 - DNA, 75 bp, synthetic construct
  source 1..75: mol_type = other DNA
ggaagagtgatgttcatacgctctcgtatggcttccggtctgaacgcagagtccataacgcgatctgcacggtga

SEQ ID NO: 215112 - DNA, 75 bp, synthetic construct
  source 1..75: mol_type = other DNA
agctgattggttaccgttttatcaccaacaaccgcatccttccgctgctcctgaacgatcgcggtgagcagttga

SEQ ID NO: 215113 - DNA, 75 bp, synthetic construct
  source 1..75: mol_type = other DNA
ctttggagaagtattggtggctgattttattgaatacttgctcggctactgggttcctcgcactcgctacggtga

SEQ ID NO: 215114 - DNA, 75 bp, synthetic construct
  source 1..75: mol_type = other DNA
caatggcttctcggttactgggtacccagggtacggtggtcatcaaaggttgttcgagatgaatcgcccaagggc

SEQ ID NO: 215115 - DNA, 75 bp, synthetic construct
  source 1..75: mol_type = other DNA
gctaactccagcattggtctgtttggcgcgctggcggtgaaaccctcaggaatgagttacgaagaggcaatgacc

SEQ ID NO: 215116 - DNA, 75 bp, synthetic construct
  source 1..75: mol_type = other DNA
atgccaatacggtgccctacacccttggagtgctggaaatcggcccaaagcgttgccgaacgtttcggtatttcg

SEQ ID NO: 215117 - DNA, 75 bp, synthetic construct
  source 1..75: mol_type = other DNA
tttcgtcgctacaaaccaaatatgccctgaaaggctataacgtcgaagccaccgcactggaagctgccggtggca

SEQ ID NO: 215118 - DNA, 75 bp, synthetic construct
  source 1..75: mol_type = other DNA
gcggaaggactgtcagctatttttccaatggctatccagcaggtcactgaatttgcaaaacagaaagttgatctg

SEQ ID NO: 215119 - DNA, 75 bp, synthetic construct
  source 1..75: mol_type = other DNA
aacggtttgccgtcagaaacctatattacttgcgcagaagccaacgaaatggcaaaaactgacagcgcacaggtt

SEQ ID NO: 215120 - DNA, 75 bp, synthetic construct
  source 1..75: mol_type = other DNA
ggaatgtagtgctgattagctgtgcaatcatcaccatgattccgttatttatcaaaacaaaaacacgagaaaact

SEQ ID NO: 215121 - DNA, 75 bp, synthetic construct
  source 1..75: mol_type = other DNA
tgaggcggcagggaatagacaaggtcagccagctaaagaaagaatcatggatcttaaaaataacactgtcggtat

SEQ ID NO: 215122 - DNA, 75 bp, synthetic construct
  source 1..75: mol_type = other DNA
ggacccggaagacctcctgaagaaagcggaagaggtttgggaaaaatggcgcctgtctggctccatgcgggttat

SEQ ID NO: 215123 - DNA, 75 bp, synthetic construct
  source 1..75: mol_type = other DNA
tgtggcaccgcgtaaccagtggaattacctcgacactgacgtactgcaatgggtgctggaaaacgactacgaccc

SEQ ID NO: 215124 - DNA, 75 bp, synthetic construct
  source 1..75: mol_type = other DNA
attactgcatagctgcgaagtcaccagcggtacgccaggctgctatcgtcaggctgtatgtatcggttctgcgct

SEQ ID NO: 215125 - DNA, 75 bp, synthetic construct
  source 1..75: mol_type = other DNA
ctgccccggcggatattcgtgtgaaaaaccccgatttttttaaacgcgttctgcaagaaggctctttggggttag

SEQ ID NO: 215126 - DNA, 75 bp, synthetic construct
  source 1..75: mol_type = other DNA
tgaaggcgagatccgtgcacagatgatcgaaaatgatctgatcgactgcatgatcactctgctaggtcagttgtt

SEQ ID NO: 215127 - DNA, 75 bp, synthetic construct
  source 1..75: mol_type = other DNA
aacaatatcaggaactgatattgttatgggggcaggaaatgatactgttctggctttagggtatgaaggtaatag

SEQ ID NO: 215128 - DNA, 75 bp, synthetic construct
  source 1..75: mol_type = other DNA
aagagacattatcaataacatgagcaaagataagactcctgaaaactgggaagggagggtaatgttacaaagata

SEQ ID NO: 215129 - DNA, 75 bp, synthetic construct
  source 1..75: mol_type = other DNA
tacaattcgtcagtacctgattgctaaaggaatacctgcaggcaagattattgctattggtatggggaaaaacca

SEQ ID NO: 215130 - DNA, 75 bp, synthetic construct
  source 1..75: mol_type = other DNA
ttgttgcttcaatcaatttaaatgtattggttttttttccgaagtactctggttggttaggcatgatggattttt

SEQ ID NO: 215131 - DNA, 75 bp, synthetic construct
  source 1..75: mol_type = other DNA
aagcgggtgtggcggataacgtgatttgttttgaagcgcaaataccactggcgctttctcgtgcagcactgcgtg

SEQ ID NO: 215132 - DNA, 75 bp, synthetic construct
  source 1..75: mol_type = other DNA
ttttatttatgagaatgatttcttgagagaaaagattgaagcagtaaaaaacaaaatgaattctcacgaacttta

SEQ ID NO: 215133 - DNA, 75 bp, synthetic construct
  source 1..75: mol_type = other DNA
caaatgagtttcttgaaatatctacttttatttatgagaatgatttcttgagagaaaagattgaagcagtaaaaa

SEQ ID NO: 215134 - DNA, 75 bp, synthetic construct
  source 1..75: mol_type = other DNA
atcctttttcgtgacttaggaacatcagctgctatagtccagagagattcgatcgacgaaagtctcaaatctgct

SEQ ID NO: 215135 - DNA, 75 bp, synthetic construct
  source 1..75: mol_type = other DNA
atcgcccgtctgactaacgagcgatgggctgatgttgaaccatccttgcgggagtttttttgcgataacggcgac

SEQ ID NO: 215136 - DNA, 75 bp, synthetic construct
  source 1..75: mol_type = other DNA
agggttacctgggttagtaaactcacttgcacgctatccacaagaagccttgcccatcacgaattacttcgcagc

SEQ ID NO: 215137 - DNA, 75 bp, synthetic construct
  source 1..75: mol_type = other DNA
agaccaggctcaaagtatagctgctttatatagttctcgaactttaagggttggtcttcaaaaaaggctaagtag

SEQ ID NO: 215138 - DNA, 75 bp, synthetic construct
  source 1..75: mol_type = other DNA
aatcaaaaattttaaaagtagcgatcgttgacgacgatttgtccgatttaattactatggacgatctgaatacta

SEQ ID NO: 215139 - DNA, 75 bp, synthetic construct
  source 1..75: mol_type = other DNA
acgttgttatcttcaggtttgttttggtatttaagttcatggagccctagaattaaaatcgagaatatatttaaa

SEQ ID NO: 215140 - DNA, 75 bp, synthetic construct
  source 1..75: mol_type = other DNA
tctgatttattgtggtctggcaggttttttagctgtttgcggtatgcgggcgcttgggcttatctgagtagcaat

SEQ ID NO: 215141 - DNA, 75 bp, synthetic construct
  source 1..75: mol_type = other DNA
cggtaccgcatcggcgttctttaacaagctgacgctgatggcgaacgtgtctatgacgcttccttacctgttcct

SEQ ID NO: 215142 - DNA, 75 bp, synthetic construct
  source 1..75: mol_type = other DNA
tatagaaacagagatcagtaatcagtgcggtcgcctgatctccaacgcgatcgtttattacaactctgcgatcct

SEQ ID NO: 215143 - DNA, 75 bp, synthetic construct
  source 1..75: mol_type = other DNA
tatctgcgcgatccgcaaatggaacgcaatattcgccgttcccagaaccggatagagtcttatcaccagttacgt

SEQ ID NO: 215144 - DNA, 75 bp, synthetic construct
  source 1..75: mol_type = other DNA
catatacaaagattgcaatagagcagctactgcacgaaaagtattttgatgacaggtgttattgccatagtatta

SEQ ID NO: 215145 - DNA, 75 bp, synthetic construct
  source 1..75: mol_type = other DNA
gcgtagggaagaaatcgccgatatcgttgatacaggcggttatggagatgttgatactgaaggtgtatcaaacga

SEQ ID NO: 215146 - DNA, 75 bp, synthetic construct
  source 1..75: mol_type = other DNA
tcttctcgctgttagcgatggcgatttaccagaactattgcagcagagtggcaaaaaatccgcagtgggcggtgg

SEQ ID NO: 215147 - DNA, 75 bp, synthetic construct
  source 1..75: mol_type = other DNA
cgttcattgagcgctattgcatcgtgccggaaggcaagcttctgggtaagcctatgaggcttgatcccttccaga

SEQ ID NO: 215148 - DNA, 75 bp, synthetic construct
  source 1..75: mol_type = other DNA
attacagagacgcatgggaggggttaatccacgctaatttacgtcttgtagtcgcgattgcgaaaaaacactgcg

SEQ ID NO: 215149 - DNA, 75 bp, synthetic construct
  source 1..75: mol_type = other DNA
acgcaatggattttatgcagtgggatgctgaaatcgaatcggaacccgccgaagataatctgacattacgacagg

SEQ ID NO: 215150 - DNA, 75 bp, synthetic construct
  source 1..75: mol_type = other DNA
ctattaatcacgtcaagtgctgcagctccggcatttctcaatgcaccatccaaagagccatcatctaaaccaatc
